United States Patent Application Publication US 2025/0302929 A1 - sequence listing, part 2

SEQ ID NO: 4982 - protein, 276 aa, Artificial Sequence
  Synthetic polypeptide
MAGRGSLVSWRAFHGCDSAEELPRVSPRFLRAWHPPPVSARMPTRRWAPGTQCITKCEHTRPKPGELAFRKGDVVTILEACENKSWYRVKHHTSGQEGLLAAGALREREALSADPKLSLMPWFHGKISGQEAVQQLQPPEDGLFLVRESARHPGDYVLCVSFGRDVIHYRVLHRDGHLTIDEAVFFCNLMDMVEHYSKDKGAICTKLVRPKRKHGTKSAEEELARAGWLLNLQHLTLGAQIGEGEFGVVQLKTCKSSEPQFPPLEQGVMAAVMRSK

SEQ ID NO: 4983 - protein, 277 aa, Artificial Sequence
  Synthetic polypeptide
MQGHFPAERREGRPRRGTRGQQQLLVSPRFLRAWHPPPVSARMPTRRWAPGTQCITKCEHTRPKPGELAFRKGDVVTILEACENKSWYRVKHHTSGQEGLLAAGALREREALSADPKLSLMPWFHGKISGQEAVQQLQPPEDGLFLVRESARHPGDYVLCVSFGRDVIHYRVLHRDGHLTIDEAVFFCNLMDMVEHYSKDKGAICTKLVRPKRKHGTKSAEEELARAGWLLNLQHLTLGAQIGEGEFGVVQLKTCKSSEPQFPPLEQGVMAAVMRSK

SEQ ID NO: 4984 - protein, 191 aa, Artificial Sequence
  Synthetic polypeptide
SADPKLSLMPWFHGKISGQEAVQQLQPPEDGLFLVRESARHPGDYVLCVSFGRDVIHYRVLHRDGHLTIDEAVFFCNLMDMVERPPGNGTGCWGSPPWGWAHGCPTILQHYSKDKGAICTKLVRPKRKHGTKSAEEELARAGWLLNLQHLTLGAQIGEGEFGVVQLKTCKSSEPQFPPLEQGVMAAVMRSK

SEQ ID NO: 4985 - protein, 183 aa, Artificial Sequence
  Synthetic polypeptide
VSFGRDVIHYRVLHRDGHLTIDEAVFFCNLMDMVERPPGNGTGCWGSPPWGWAHGCPTILQHYSKDKGAICTKLVRPKRKHGTKSAEEELARGPQLRHSSVTIIHHLSQKPGPEPPPTPSSSIPSLARFPRPAGWLLNLQHLTLGAQIGEGEFGVVQLKTCKSSEPQFPPLEQGVMAAVMRSK

SEQ ID NO: 4986 - protein, 157 aa, Artificial Sequence
  Synthetic polypeptide
MPWFHGKISGQEAVQQLQPPEDGLFLVRESARHPGDYVLCVSFGRDVIHYRVLHRDGHLTIDEAVFFCNLMDMVEHYSKDKGAICTKLVRPKRKHGTKSAEEELARAGWLLNLQHLTLGAQIGEGEFGVVQLKTCKSSEPQFPPLEQGVMAAVMRSK

SEQ ID NO: 4987 - protein, 31 aa, Artificial Sequence
  Synthetic polypeptide
MIVREETRGECTATREAEAGELLEPGRRRLQ

SEQ ID NO: 4988 - protein, 97 aa, Artificial Sequence
  Synthetic polypeptide
MSYGSITFGDVAIDFSHQEWEYLSLVQKTLYQEVMMENYDNLVSLAGHSVSKPDLITLLEQGKEPWMIVREETRGECTATREAEAGELLEPGRRRLQ

SEQ ID NO: 4989 - protein, 96 aa, Artificial Sequence
  Synthetic polypeptide
MSYGSITFGDVAIDFSHQEWEYLSLVQKTLYQEVMMENYDNLVSLGHSVSKPDLITLLEQGKEPWMIVREETRGECTATREAEAGELLEPGRRRLQ

SEQ ID NO: 4990 - protein, 29 aa, Artificial Sequence
  Synthetic polypeptide
MIVREETRGECTAHACNLITLGGQGGRIT

SEQ ID NO: 4991 - protein, 95 aa, Artificial Sequence
  Synthetic polypeptide
MSYGSITFGDVAIDFSHQEWEYLSLVQKTLYQEVMMENYDNLVSLAGHSVSKPDLITLLEQGKEPWMIVREETRGECTAHACNLITLGGQGGRIT

SEQ ID NO: 4992 - protein, 94 aa, Artificial Sequence
  Synthetic polypeptide
MSYGSITFGDVAIDFSHQEWEYLSLVQKTLYQEVMMENYDNLVSLGHSVSKPDLITLLEQGKEPWMIVREETRGECTAHACNLITLGGQGGRIT

SEQ ID NO: 4993 - protein, 119 aa, Artificial Sequence
  Synthetic polypeptide
MFPVLEPHQVGLIRSYNSKTMTCFQELVTFRDVAIDFSRQEWEYLDPNQRDLYRDVMLENYRNLVSLGGHSISKPVVVDLLERGKEPWMILREETQFTGAVAHACNPSTLGGRGGRITR

SEQ ID NO: 4994 - protein, 134 aa, Artificial Sequence
  Synthetic polypeptide
MFPVLEPHQVGLIRSYNSKTMTCNWGRPLKFCPTKYMKFQELVTFRDVAIDFSRQEWEYLDPNQRDLYRDVMLENYRNLVSLGGHSISKPVVVDLLERGKEPWMILREETQFTGAVAHACNPSTLGGRGGRITR

SEQ ID NO: 4995 - protein, 31 aa, Artificial Sequence
  Synthetic polypeptide
MILREETQFTGAVAHACNPSTLGGRGGRITR

SEQ ID NO: 4996 - protein, 117 aa, Artificial Sequence
  Synthetic polypeptide
MFPVLEPHQVGLIRSYNSKTMTCELVTFRDVAIDFSRQEWEYLDPNQRDLYRDVMLENYRNLVSLGGHSISKPVVVDLLERGKEPWMILREETQFTGAVAHACNPSTLGGRGGRITR

SEQ ID NO: 4997 - protein, 986 aa, Artificial Sequence
  Synthetic polypeptide
MTTYRAIPSDGVDLAASCGARVGDVLPGPHTGDYAPLGFWAQNGSMSQPLGESPATATATATATTRPSPTTPAMPKMGVRARVADWPPKREALREHSNPSPSQDTDGTKATKMAHSMRSIQNGQPPTSTPASSGSKAFHRLSRRRSKDVEFQDGWPRSPGRAFLPLRHRSSSEITLSECDAEDAGEPRGARHTGALPLFREYGSTSSIDVQGMPEQSFFDILNEFRSEQPDARGCQALTELLRADPGPHLMGGGGGAKGDSHNGQPAKDSLLPLQPTKEKEKARKKPARGLGGGDTVDSSIFRKLRSSKPEGEAGRSPGEADEGRSPPEASRPWVCQKSFAHFDVQSMLFDLNEAAANRVSVSQRRNTTTGASAASAASAMASLTASRAHSLGGLDPAFTSTEDLNCKENLEQDLGDDNSNDLLLSCPHFRNEIGGECERNVSFSRASVGSPSSGEGHLAEPALSAYRTNASISVLEVPKEQQRTQSRPRQYSIEHVDLGARYYQDYFVGKEHANYFGVDEKLGPVAVSIKREKLEDHKEHGPQYQYRIIFRTRELITLRGSILEDATPTATKHGTGRGLPLKDALEYVIPELNIHCLRLALNTPKVTEQLLKLDEQGLCRKHKVGILYCKAGQSSEEEMYNNEEAGPAFEEFLSLIGEKVCLKGFTKYAAQLDVKTDSTGTHSLYTMYQDYEIMFHVSTLLPYTPNNRQQLLRKRHIGNDIVTIIFQEPGALPFTPKNIRSHFQHVFIIVRVHNPCTDNVCYSMAVTRSKDAPPFGPPIPSGTTFRKSDVFRDFLLAKVINAENAAHKSDKFHTMATRTRQEYLKDLAENCVSNTPIDSTGKFNLISLTSKKKEKTKARAGAEQHSAGAIAWRVVAQDYAQGVEIDCILGISNEFVVLLDLRTKEVVFNCYCGDVIGWTPDSSTLKIFYGRGDHIFLQATEGSVEDIREIVQRLKWLTPVIPALWEAETGESLEVRSSRPAWPTW

SEQ ID NO: 4998 - protein, 8 aa, Artificial Sequence
  Synthetic polypeptide
RQRVLWRT

SEQ ID NO: 4999 - protein, 55 aa, Artificial Sequence
  Synthetic polypeptide
MAQLCGLRRSRAFLALLGSLLLSGVLAADRERSIHGAVARACKPSTLGTRGRWIT

SEQ ID NO: 5000 - protein, 313 aa, Artificial Sequence
  Synthetic polypeptide
MRRGALLAGALAAYAAYLVLGALLVARLEGPHEARLRAELETLRAQLLQRSPCVAAPALDAFVERVLAAGRLGRVVLANASGSANASDPAWDFASALFFASTLITTVGYGYTTPLTDAGKAFSIAFALLGVPTTMLLLTASAQRLSLLLTHVPLSWLSMRWGWDPRRAACWHLVALLGVVVTVCFLVPAVIFAHLEEAWSFLDAFYFCFISLSTIGLGDYVPGEAPGQPYRALYKVLVTVYLFLGLVAMVLVLQTFRHVSDLHGLTELILLPPPCPASFNADEDDRVDILGPQPESHQQLSASSHTDYASIPR

SEQ ID NO: 5001 - protein, 237 aa, Artificial Sequence
  Synthetic polypeptide
MNRKDSKRKSHQECTGKIGGRGRPRQVRRHKTCPSPREISKVMASMNLGLLSEGGCSEDELLEKCIQSFDSAGSLCHEDHMLNMVLAMHSWVLPSADLAARLLTSYQKATGDTQELRRLQICHLVRYWLMRHPEVMHQDPQLEEVIGRFWATVAREGNSAQRRLGDSSDLPGLGKKRKVSLLFDHLETGELAQHLTYLEFRSFQAITVWWCMPVIPATWEGEAGESLEPQEAEITVS

SEQ ID NO: 5002 - protein, 251 aa, Artificial Sequence
  Synthetic polypeptide
MNRKDSKRKSHQECTGKIGGRGRPRQVRRHKTCPSPREISKVMASMNLGLLSEGGCSEDELLEKCIQSFDSAGSLCHEDHMLNMVLAMHSWVLPSADLAARLLTSYQKATGDTQELRRLQICHLVRYWLMRHPEVMHQDPQLEEVIGRFWATVAREGNSAQRRLGDSSDLLSPGGPGPPLPMSSPGLGKKRKVSLLFDHLETGELAQHLTYLEFRSFQAITVWWCMPVIPATWEGEAGESLEPQEAEITVS

SEQ ID NO: 5003 - protein, 13 aa, Artificial Sequence
  Synthetic polypeptide
CPSKRVPPLSWSS

SEQ ID NO: 5004 - protein, 193 aa, Artificial Sequence
  Synthetic polypeptide
MAYVPAPGYQPTYNPTLPYYQPIPGGLNVGMSVYIQGVASEHMKRFFVNFVVGQDPGSDVAFHFNPRFDGWDKVVFNTLQGGKWGSEERKRSMPFKKGAAFELVFIVLAEHYKVVVNGNPFYEYGHRLPLQMVTHLQVDGDLQLQSINFIGGQPLRPQGPPMMPPYPGPGHCHQQLNSLPTMEGPPTFNPERK

SEQ ID NO: 5005 - protein, 215 aa, Artificial Sequence
  Synthetic polypeptide
MAEPDPSHPLETQAGKVQEAQDSDSDSEGGAAGGEADMDFLRNLFSQTLSLGSQKERLLDELTLEGVARYMQSERCRRVICLVGAGISTSAGIPDFRSPSTGLYDNLEKYHLPYPEAIFEISYFKKHPEPFFALAKELYPGQFKPTICHYFMRLLKDKGLLLRCYTQNIDTLERIAGLEQEDLVEAHGTFYTSHCVSASCRHEYPLSWMKARATE

SEQ ID NO: 5006 - protein, 178 aa, Artificial Sequence
  Synthetic polypeptide
MDFLRNLFSQTLSLGSQKERLLDELTLEGVARYMQSERCRRVICLVGAGISTSAGIPDFRSPSTGLYDNLEKYHLPYPEAIFEISYFKKHPEPFFALAKELYPGQFKPTICHYFMRLLKDKGLLLRCYTQNIDTLERIAGLEQEDLVEAHGTFYTSHCVSASCRHEYPLSWMKARATE

SEQ ID NO: 5007 - protein, 538 aa, Artificial Sequence
  Synthetic polypeptide
MAASMARRLWPLLTRRGFRPRGGCISNDSPRRSFTTEKRNRNLLYEYAREGYSALPQLDIERFCACPEEAAHALELRKGELRSADLPAIISTWQELRQLQEQIRSLEEEKAAVTEAVRALLANQDSGEVQQDPKYQGLRARGREIRKELVHLYPREAQLEEQFYLQALKLPNQTHPDVPVGDESQARVLHMVGDKPVFSFQPRGHLEIGEKLDIIRQKRLSHVSGHRSYYLRGAGALLQHGLVNFTFNKLLRRGFTPMTVPDLLRGAVFEGCGMTPNANPSQIYNIDPARFKDLNLAGTAEVGLAGYFMDHTVAFRDLPVRMVCSSTCYRAETNTGQEPRGLYRVHHFTKVEMFGVTGPGLEQSSQLLEEFLSLQMEILTELGLHFRVLDMPTQELGLPAYRKFDIEAWMPGRGRFGEVTSASNCTDFQSRRLHIMFQTEAGELQFAHTVNATACAVPRLLIALLESNQQKDGSVLVPPALQSYLGTDRITAPTHVPLQYIGPNQPRKPGLPGQPAPIFLSCLVHPTRLDIETLQTPS

SEQ ID NO: 5008 - protein, 348 aa, Artificial Sequence
  Synthetic polypeptide
MVGDKPVFSFQPRGHLEIGEKLDIIRQKRLSHVSGHRSYYLRGAGALLQHGLVNFTFNKLLRRGFTPMTVPDLLRGAVFEGCGMTPNANPSQIYNIDPARFKDLNLAGTAEVGLAGYFMDHTVAFRDLPVRMVCSSTCYRAETNTGQEPRGLYRVHHFTKVEMFGVTGPGLEQSSQLLEEFLSLQMEILTELGLHFRVLDMPTQELGLPAYRKFDIEAWMPGRGRFGEVTSASNCTDFQSRRLHIMFQTEAGELQFAHTVNATACAVPRLLIALLESNQQKDGSVLVPPALQSYLGTDRITAPTHVPLQYIGPNQPRKPGLPGQPAPIFLSCLVHPTRLDIETLQTPS

SEQ ID NO: 5009 - protein, 538 aa, Artificial Sequence
  Synthetic polypeptide
MAASMARRLWPLLTRRGFRPRGGCISNDSPRRSFTTEKRNRNLLYEYAREGYSALPQLDIERFCACPEEAAHALELRKGELRSADLPAIISTWQELRQLQEQIRSLEEEKAAVTEAVRALLANQDSGEVQQDPKYQGLRARGREIRKELVHLYPREAQLEEQFYLQALKLPNQTHPDVPVGDESQARVLHMVGDKPVFSFQPRGHLEIGEKLDIIRQKRLSHVSGHRSYYLRGAGALLQHGLVNFTFNKLLRRGFTPMTVPDLLRGAVFEGCGMTPNANPSQIYNIDPARFKDLNLAGTAEVGLAGYFMDHTVAFRDLPVRMVCSSTCYRAETNTGQEPRGLYRVHHFTKAGMFGVTGPGLEQSSQLLEEFLSLQMEILTELGLHFRVLDMPTQELGLPAYRKFDIEAWMPGRGRFGEVTSASNCTDFQSRRLHIMFQTEAGELQFAHTVNATACAVPRLLIALLESNQQKDGSVLVPPALQSYLGTDRITAPTHVPLQYIGPNQPRKPGLPGQPAPIFLSCLVHPTRLDIETLQTPS

SEQ ID NO: 5010 - protein, 186 aa, Artificial Sequence
  Synthetic polypeptide
MFGVTGPGLEQSSQLLEEFLSLQMEILTELGLHFRVLDMPTQELGLPAYRKFDIEAWMPGRGRFGEVTSASNCTDFQSRRLHIMFQTEAGELQFAHTVNATACAVPRLLIALLESNQQKDGSVLVPPALQSYLGTDRITAPTHVPLQYIGPNQPRKPGLPGQPAPIFLSCLVHPTRLDIETLQTPS

SEQ ID NO: 5011 - protein, 538 aa, Artificial Sequence
  Synthetic polypeptide
MEGVWQELLDSAQIEICVADWWGARENCGCVYQLRVRLLDVYEKEVVKFSASPDPVLQWTERGCRQVSHVFTNFGKGIRYVSFEQYGRDISTWQELRQLQEQIRSLEEEKAAVTEAVRALLANQDSGEVQQDPKYQGLRARGREIRKELVHLYPREAQLEEQFYLQALKLPNQTHPDVPVGDESQARVLHMVGDKPVFSFQPRGHLEIGEKLDIIRQKRLSHVSGHRSYYLRGAGALLQHGLVNFTFNKLLRRGFTPMTVPDLLRGAVFEGCGMTPNANPSQIYNIDPARFKDLNLAGTAEVGLAGYFMDHTVAFRDLPVRMVCSSTCYRAETNTGQEPRGLYRVHHFTKVEMFGVTGPGLEQSSQLLEEFLSLQMEILTELGLHFRVLDMPTQELGLPAYRKFDIEAWMPGRGRFGEVTSASNCTDFQSRRLHIMFQTEAGELQFAHTVNATACAVPRLLIALLESNQQKDGSVLVPPALQSYLGTDRITAPTHVPLQYIGPNQPRKPGLPGQPAPIFLSCLVHPTRLDIETLQTPS

SEQ ID NO: 5012 - protein, 4 aa, Artificial Sequence
  Synthetic polypeptide
RGRG

SEQ ID NO: 5013 - protein, 540 aa, Artificial Sequence
  Synthetic polypeptide
MAASMARRLWPLLTRRGFRPRGGCISNDSPRRSFTTEKRNRNLLYEYAREGYSALPQLDIERFCACPEEAAHALELRKGELRSADLPAIISTWQELRQLQEQIRSLEEEKAAVTEAVRALLANQDSGEVQQVRLDPGAGSIFGPTFLPFPGQLSLLVEAQLEEQFYLQALKLPNQTHPDVPVGDESQARVLHMVGDKPVFSFQPRGHLEIGEKLDIIRQKRLSHVSGHRSYYLRGAGALLQHGLVNFTFNKLLRRGFTPMTVPDLLRGAVFEGCGMTPNANPSQIYNIDPARFKDLNLAGTAEVGLAGYFMDHTVAFRDLPVRMVCSSTCYRAETNTGQEPRGLYRVHHFTKVEMFGVTGPGLEQSSQLLEEFLSLQMEILTELGLHFRVLDMPTQELGLPAYRKFDIEAWMPGRGRFGEVTSASNCTDFQSRRLHIMFQTEAGELQFAHTVNATACAVPRLLIALLESNQQKDGSVLVPPALQSYLGTDRITAPTHVPLQYIGPNQPRKPGLPGQPAPIFLSCLVHPTRLDIETLQTPS

SEQ ID NO: 5014 - protein, 4 aa, Artificial Sequence
  Synthetic polypeptide
RGRG

SEQ ID NO: 5015 - protein, 80 aa, Artificial Sequence
  Synthetic polypeptide
MEGVWQELLDSAQIEICVADWWGARENCGCVYQLRVRLLDVYEKEVVKFSASPDPVLQWTERGCRQHRWVRVSTTELVSA

SEQ ID NO: 5016 - protein, 245 aa, Artificial Sequence
  Synthetic polypeptide
MGARLSRRRLPADPSLALDALPPELLVQVLSHVPPRSLVTRCRPVCRAWRDIVDGPTVWLLQLARDRSAEGRALYAVAQRCLPSNEDKEEFPLCALARYCLRAPFGRNLIFNSCGEQGFRGWEVEHGGNGWAIEKNLTPVPGAPSQTCFVTSFEWCSKRQLVDLVMEGVWQELLDSAQIEICVADWWGARENCGCVYQLRVRLLDVYEKEVVKFSASPDPVLQWTERGCRQHRWVRVSTTELVSA

SEQ ID NO: 5017 - protein, 8 aa, Artificial Sequence
  Synthetic polypeptide
GLLRRPAS

SEQ ID NO: 5018 - protein, 4 aa, Artificial Sequence
  Synthetic polypeptide
RGRG

SEQ ID NO: 5019 - protein, 8 aa, Artificial Sequence
  Synthetic polypeptide
GLLRRPAS

SEQ ID NO: 5020 - protein, 34 aa, Artificial Sequence
  Synthetic polypeptide
MEGVWQELLDSAQIEICVADCTAGLGSPQPSWSR

SEQ ID NO: 5021 - protein, 199 aa, Artificial Sequence
  Synthetic polypeptide
MGARLSRRRLPADPSLALDALPPELLVQVLSHVPPRSLVTRCRPVCRAWRDIVDGPTVWLLQLARDRSAEGRALYAVAQRCLPSNEDKEEFPLCALARYCLRAPFGRNLIFNSCGEQGFRGWEVEHGGNGWAIEKNLTPVPGAPSQTCFVTSFEWCSKRQLVDLVMEGVWQELLDSAQIEICVADCTAGLGSPQPSWSR

SEQ ID NO: 5022 - protein, 354 aa, Artificial Sequence
  Synthetic polypeptide
MAPTIQTQAQREDGHRPNSHRTLPERSGVVCRVKYCNSLPDIPFDPKFITYPFDQNRFVQYKATSLEKQHKHDLLTEPDLGVTIDLINPDTYRIDPNVLLDPADEKLLEEEIQAPTSSKRSQQHAKVVPWMRKTEYISTEFNRYGISNEKPEVKIGVSVKQQFTEEEIYKDRDSQITAIEKTFEDAQKSISQHYSKPRVTPVEVMPVFPDFKMWINPCAQVIFDSDPAPKDTSGAAALEMMSQAMIRGMMDEEGNQFVAYFLPVEETLKKRKRDQEEEMDYAPDDVYDYKIAREYNWNVKNKASKGYEENYFFIFREGDGVYYNELETRYTNTYYCITIACSIQYSHMLYNLVA

SEQ ID NO: 5023 - protein, 344 aa, Artificial Sequence
  Synthetic polypeptide
MAPTIQTQAQREDGHRSGVVCRVKYCNSLPDIPFDPKFITYPFDQNRFVQYKATSLEKQHKHDLLTEPDLGVTIDLINPDTYRIDPNVLLDPADEKLLEEEIQAPTSSKRSQQHAKVVPWMRKTEYISTEFNRYGISNEKPEVKIGVSVKQQFTEEEIYKDRDSQITAIEKTFEDAQKSISQHYSKPRVTPVEVMPVFPDFKMWINPCAQVIFDSDPAPKDTSGAAALEMMSQAMIRGMMDEEGNQFVAYFLPVEETLKKRKRDQEEEMDYAPDDVYDYKIAREYNWNVKNKASKGYEENYFFIFREGDGVYYNELETRYTNTYYCITIACSIQYSHMLYNLVA

SEQ ID NO: 5024 - protein, 321 aa, Artificial Sequence
  Synthetic polypeptide
MAPTIQTQAQREDGHRSGVVCRVKYCNSLPDIPFDPKFITYPFDQNRFVQYKATSLEKQHKHDLLTEPDLGVTIDLINPDTYRIDPNVLLDPADEKLLEEEIQAPTSSKRSQQHAKVVPWMRKTEYISTEFNRYGISNEKPEVKIGVSVKQQFTEEEIYKDRDSQITAIEKTFEDAQKSMWINPCAQVIFDSDPAPKDTSGAAALEMMSQAMIRGMMDEEGNQFVAYFLPVEETLKKRKRDQEEEMDYAPDDVYDYKIAREYNWNVKNKASKGYEENYFFIFREGDGVYYNELETRYTNTYYCITIACSIQYSHMLYNLVA

SEQ ID NO: 5025 - protein, 301 aa, Artificial Sequence
  Synthetic polypeptide
MATGPIPTGLCLRGLEWSAESSTAIASLISPSTPSSSPTPSTRTVLLDPADEKLLEEEIQAPTSSKRSQQHAKVVPWMRKTEYISTEFNRYGISNEKPEVKIGVSVKQQFTEEEIYKDRDSQITAIEKTFEDAQKSISQHYSKPRVTPVEVMPVFPDFKMWINPCAQVIFDSDPAPKDTSGAAALEMMSQAMIRGMMDEEGNQFVAYFLPVEETLKKRKRDQEEEMDYAPDDVYDYKIAREYNWNVKNKASKGYEENYFFIFREGDGVYYNELETRYTNTYYCITIACSIQYSHMLYNLVA

SEQ ID NO: 5026 - protein, 182 aa, Artificial Sequence
  Synthetic polypeptide
MPEGAQGLSLSKPSPSLGCGRRGEVCDCGTVCETRTAPAAPTMASPRGSGSSTSLSTVGSEGDPAPGPTPACSASRPEPLPGPPIRLHLSPVGIPGSARPSRLERVAREIVETERAYVRDLRSIVEDYLGPLLDGGVLGLSVEQVGTLFANIEDIYEFSSFSTESPRPRKLLSPGQTRMVGH

SEQ ID NO: 5027 - protein, 123 aa, Artificial Sequence
  Synthetic polypeptide
MPEGAQGLSLSKPSPSLGCGRRGEVCDCGTVCETRTGSARPSRLERVAREIVETERAYVRDLRSIVEDYLGPLLDGGVLGLSVEQVGTLFANIEDIYEFSSFSTESPRPRKLLSPGQTRMVGH

SEQ ID NO: 5028 - protein, 183 aa, Artificial Sequence
  Synthetic polypeptide
MPEGAQGLSLSKPSPSLGCGRRGEVCDCGTVCETRTAAPAAPTMASPRGSGSSTSLSTVGSEGDPAPGPTPACSASRPEPLPGPPIRLHLSPVGIPGSARPSRLERVAREIVETERAYVRDLRSIVEDYLGPLLDGGVLGLSVEQVGTLFANIEDIYEFSSFSTESPRPRKLLSPGQTRMVGH

SEQ ID NO: 5029 - protein, 36 aa, Artificial Sequence
  Synthetic polypeptide
SVWPGRSWRQNGPMSGTSAASWRTTWALCWTAGSWG

SEQ ID NO: 5030 - protein, 208 aa, Artificial Sequence
  Synthetic polypeptide
MASALSLGNKCDPFLRCVLCRGGGALQGPRGRGPDDFESQLSPPGSARRLVRSKRACGNPPDAFGLSRASVHPPLPRVSIGCSSGPGRAKRERVGGAAWRQRKMAASAAVFSRLRSGLRLGSRGLCTRLATPPRRAPDQAAEIGSRGSTKAQGPQQQPGSEGPSYAKKVALWLAGLLGAGGTVSVVYIFDPGVQAPYPTPPSGPRGLG

SEQ ID NO: 5031 - protein, 105 aa, Artificial Sequence
  Synthetic polypeptide
MAASAAVFSRLRSGLRLGSRGLCTRLATPPRRAPDQAAEIGSRGSTKAQGPQQQPGSEGPSYAKKVALWLAGLLGAGGTVSVVYIFDPGVQAPYPTPPSGPRGLG

SEQ ID NO: 5032 - protein, 45 aa, Artificial Sequence
  Synthetic polypeptide
GGLGSGVLALAKRAPARLAGTVHEVGDAAPPGPRSGRRDREPREH

SEQ ID NO: 5033 - protein, 70 aa, Artificial Sequence
  Synthetic polypeptide
ACEAGSGSARGDCARGWRRRPAGPQIRPQRSGAAGALRRKGHSSSRAQRVPAMPKKLRSGLLGCLELVGL

SEQ ID NO: 5034 - protein, 21 aa, Artificial Sequence
  Synthetic polypeptide
VGDAAPPGPRSGRRDREPREH

SEQ ID NO: 5035 - protein, 2 aa, Artificial Sequence
  Synthetic polypeptide
LR

SEQ ID NO: 5036 - protein, 687 aa, Artificial Sequence
  Synthetic polypeptide
MVHGSVTFRDVAIDFSQEEWECLQPDQRTLYRDVMLENYSHLISLGSSISKPDVITLLEQEKEPWIVVSKETSRWYPDLESKYGPEKISPENDIFEINLPKHVIKQISKTLGLEAFYFRNDSEYRSRFEGRQGHQEGYINQKIISYEEMPAYTHASPIHNTHKPYECKECGKYFSCGSNLIQHQSIHTGEKPYKCKECGKAFQLHIQLTRHQKFHTGEKTFECKECGKAFNLPTQLNRHKNIHTVKKLFECKECGKSFNRSSNLTQHQSIHAGVKPYQCKECGKAFNRGSNLIQHQKIHSNEKPFVCRECEMAFRYHYQLIEHCRIHTGEKPFECKECRKAFTLLTKLVRHQKIHMGEKPFECRECGKAFSLLNQLNRHKNIHTGEKPFECKECGKSFNRSSNLIQHQSIHADVKPYECKECGKGFNRGANLIQHQKIHSNEKPFVCRECEMAFRYHYQLIQHCQIHTGGKPFECKECGKAFSLLTQLARHKNIHTGEKPFECKDCGKAFNRGSNLVQHQSIHTGEKPYECKECGKAFRLHLQLSQHEKTHTGEKPFECKECGKFFRRGSNLNQHRSIHTGKKPFECKECGKAFRLHMHLIRHQKFHTGEKPFECKECGKAFSLHTQLNHHKNIHTAQFDRSFSVGGCCQDDGAAAVNQGLSYINRRGMPPGFLIPTSSWLKWLNSW

SEQ ID NO: 5037 - protein, 539 aa, Artificial Sequence
  Synthetic polypeptide
MPAYTHASPIHNTHKPYECKECGKYFSCGSNLIQHQSIHTGEKPYKCKECGKAFQLHIQLTRHQKFHTGEKTFECKECGKAFNLPTQLNRHKNIHTVKKLFECKECGKSFNRSSNLTQHQSIHAGVKPYQCKECGKAFNRGSNLIQHQKIHSNEKPFVCRECEMAFRYHYQLIEHCRIHTGEKPFECKECRKAFTLLTKLVRHQKIHMGEKPFECRECGKAFSLLNQLNRHKNIHTGEKPFECKECGKSFNRSSNLIQHQSIHADVKPYECKECGKGFNRGANLIQHQKIHSNEKPFVCRECEMAFRYHYQLIQHCQIHTGGKPFECKECGKAFSLLTQLARHKNIHTGEKPFECKDCGKAFNRGSNLVQHQSIHTGEKPYECKECGKAFRLHLQLSQHEKTHTGEKPFECKECGKFFRRGSNLNQHRSIHTGKKPFECKECGKAFRLHMHLIRHQKFHTGEKPFECKECGKAFSLHTQLNHHKNIHTAQFDRSFSVGGCCQDDGAAAVNQGLSYINRRGMPPGFLIPTSSWLKWLNSW

SEQ ID NO: 5038 - protein, 289 aa, Artificial Sequence
  Synthetic polypeptide
MEEEEGAVAKEWGTTPAGPVWTAVFDYEAAGDEELTLRRGDRVQVLSQDCAVSGDEGWWTGQLPSGRVGVFPSNYVAPGAPAAPAGLQLPQEIPFHELQLEEIIGVGGFGKVYRALWRGEEVAVKAARLDPEKDPAVTAEQVCQEARLFGALQHPNIIALRGACLNPPHLCLVMEYARGGALSRVLAGRRVPPHVLVNWAVQVARGMNYLHNDAPVPIIHRDLKSINILILEAIENHNLADTVLKITDFGLAREWHKTTKMSAAGTYAWMAPEGCCEDYRVPSTVPGLQ

SEQ ID NO: 5039 - protein, 41 aa, Artificial Sequence
  Synthetic polypeptide
EPQPRRHGAQDHGLRPRPRVAQDHQDERCGDLRLDGAGGLL

SEQ ID NO: 5040 - protein, 32 aa, Artificial Sequence
  Synthetic polypeptide
QDHGLRPRPRVAQDHQDERCGDLRLDGAGGLL

SEQ ID NO: 5041 - protein, 39 aa, Artificial Sequence
  Synthetic polypeptide
LAREWHKTTKMSAAGTYAWMAPEGCCEDYRVPSTVPGLQ

SEQ ID NO: 5042 - protein, 310 aa, Artificial Sequence
  Synthetic polypeptide
MEEEEGAVAKEWGTTPAGPVWTAVFDYEAAGDEELTLRRGDRVQVLSQDCAVSGDEGWWTGQLPSGRVGVFPSNYVAPGAPAAPAGLQLPQEIPFHELQLEEIIGVGGFGKVYRALWRGEEVAVKAARLDPEKDPAVTAEQVCQEARLFGALQHPNIIALRGACLNPPHLCLVMEYARGGALSRVLAGRRVPPHVLVNWAVQVARGMNYLHNDAPVPIIHRDLKSINILILEAIENHNLADTVLKITDFGLAREWHKTTKMSAAGTYAWMAPEVIRLSLFSKSSDVWRAVVRITECLAQCLACSKCFINV

SEQ ID NO: 5043 - protein, 49 aa, Artificial Sequence
  Synthetic polypeptide
EPQPRRHGAQDHGLRPRPRVAQDHQDERCGDLRLDGAGGYPSLPLLQKQ

SEQ ID NO: 5044 - protein, 60 aa, Artificial Sequence
  Synthetic polypeptide
LAREWHKTTKMSAAGTYAWMAPEVIRLSLFSKSSDVWRAVVRITECLAQCLACSKCFINV

SEQ ID NO: 5045 - protein, 406 aa, Artificial Sequence
  Synthetic polypeptide
MEEEEGAVAKEWGTTPAGPVWTAVFDYEAAGDEELTLRRGDRVQVLSQDCAVSGDEGWWTGQLPSGRVGVFPSNYVAPGAPAAPAGLQLPQEIPFHELQLEEIIGVGGFGKVYRALWRGEEVAVKAARLDPEKDPAVTAEQVCQEARLFGALQHPNIIALRGACLNPPHLCLVMEYARGGALSRVLAGRRVPPHVLVNWAVQVARGMNYLHNDAPVPIIHRDLKSINILILEAIENHNLADTVLKITDFGLAREWHKTTKMSAAGTYAWMAPEVIRLSLFSKSSDVWSFGVLLWELLTGEVPYREIDALAVAYGVAMNKLTLPIPSTCPEPFARLLEECWDPDPHGRPDFGSILKRLEVIEQSALFQMPLESFHSLQEDWKLEIQHMFDDLRTKEKVTLHDVWGWL

SEQ ID NO: 5046 - protein, 98 aa, Artificial Sequence
  Synthetic polypeptide
QDHGLRPRPRVAQDHQDERCGDLRLDGAGECWDPDPHGRPDFGSILKRLEVIEQSALFQMPLESFHSLQEDWKLEIQHMFDDLRTKEKVTLHDVWGWL

SEQ ID NO: 5047 - protein, 156 aa, Artificial Sequence
  Synthetic polypeptide
LAREWHKTTKMSAAGTYAWMAPEVIRLSLFSKSSDVWSFGVLLWELLTGEVPYREIDALAVAYGVAMNKLTLPIPSTCPEPFARLLEECWDPDPHGRPDFGSILKRLEVIEQSALFQMPLESFHSLQEDWKLEIQHMFDDLRTKEKVTLHDVWGWL

SEQ ID NO: 5048 - protein, 415 aa, Artificial Sequence
  Synthetic polypeptide
MEEEEGAVAKEWGTTPAGPVWTAVFDYEAAGDEELTLRRGDRVQVLSQDCAVSGDEGWWTGQLPSGRVGVFPSNYVAPGAPAAPAGLQLPQEIPFHELQLEEIIGVGGFGKVYRALWRGEEVAVKAARLDPEKDPAVTAEQVCQEARLFGALQHPNIIALRGACLNPPHLCLVMEYARGGALSRVLAGRRVPPHVLVNWAVQVARGMNYLHNDAPVPIIHRDLKSINILILEAIENHNLADTVLKITDFGLAREWHKTTKMSAAGTYAWMAPEVIRLSLFSKSSDVWSFGVLLWELLTGEVPYREIDALAVAYGVAMNKLTLPIPSTCPEPFARLLEECWDPDPHGRPDFGSILKRLEVIEQSALFQMPLESFHSLQEDWKLEIQHMFDDLRTKEKQKRREGKRREGRGYKIRKA

SEQ ID NO: 5049 - protein, 107 aa, Artificial Sequence
  Synthetic polypeptide
QDHGLRPRPRVAQDHQDERCGDLRLDGAGECWDPDPHGRPDFGSILKRLEVIEQSALFQMPLESFHSLQEDWKLEIQHMFDDLRTKEKQKRREGKRREGRGYKIRKA

SEQ ID NO: 5050 - protein, 165 aa, Artificial Sequence
  Synthetic polypeptide
LAREWHKTTKMSAAGTYAWMAPEVIRLSLFSKSSDVWSFGVLLWELLTGEVPYREIDALAVAYGVAMNKLTLPIPSTCPEPFARLLEECWDPDPHGRPDFGSILKRLEVIEQSALFQMPLESFHSLQEDWKLEIQHMFDDLRTKEKQKRREGKRREGRGYKIRKA

SEQ ID NO: 5051 - protein, 91 aa, Artificial Sequence
  Synthetic polypeptide
MKPKLMYQELKVPAEEPANELPMNEIEAWKAAEKKARWVLLVLILAVVGFGALMTQLFLWEYGDLHLFGPNQRPAPCYDPCDLGDRARLCL

SEQ ID NO: 5052 - protein, 8 aa, Artificial Sequence
  Synthetic polypeptide
QPAPSPLL

SEQ ID NO: 5053 - protein, 17 aa, Artificial Sequence
  Synthetic polypeptide
MQPRGSPVGGLPGKSFI

SEQ ID NO: 5054 - protein, 121 aa, Artificial Sequence
  Synthetic polypeptide
MAAAATAAEGVPSRGPPGEVIHLNVGGKRFSTSRQTLTWIPDSFFSSLLSGRISTLKDETGAIFIDRDPTVFAPILNFLRTKELDPRPGAPGLLTPVIPTLWEAEVGGSLEPRIWRLAWAT

SEQ ID NO: 5055 - protein, 39 aa, Artificial Sequence
  Synthetic polypeptide
MRPEQSSSTGTLQSSPPSSTSCAPKSWIPGRARRDCSRL

SEQ ID NO: 5056 - protein, 88 aa, Artificial Sequence
  Synthetic polypeptide
MSRSAAASGGPRRPERHLPPAPCGAPGPPETCRTEPDGAGTMNKLRQSLRRRKPAYVPEASRPHQWQADEDAVRKGTCSFPVRMLSGH

SEQ ID NO: 5057 - protein, 47 aa, Artificial Sequence
  Synthetic polypeptide
MNKLRQSLRRRKPAYVPEASRPHQWQADEDAVRKGTCSFPVRMLSGH

SEQ ID NO: 5058 - protein, 47 aa, Artificial Sequence
  Synthetic polypeptide
MRGQAFVIFKEVSSATNALRSMQGFPFYDKPMSLEWRLASGRFSLNS

SEQ ID NO: 5059 - protein, 97 aa, Artificial Sequence
  Synthetic polypeptide
MAVPETRPNHTIYINNLNEKIKKDELKKSLYAIFSQFGQILDILVSRSLKMRGQAFVIFKEVSSATNALRSMQGFPFYDKPMSLEWRLASGRFSLNS

SEQ ID NO: 5060 - protein, 265 aa, Artificial Sequence
  Synthetic polypeptide
MAWRCPRMGRVPLAWCLALCGWACMAPRGTQAEESPFVGNPGNITGARGLTGTLRCQLQVQGEPPEVHWLRDGQILELADSTQTQVPLGEDEQDDWIVVSQLRITSLQLSDTGQYQCLVFLGHQTFVSQPGYVGLEGLPYFLEEPEDRTVAANTPFNLSCQAQGPPEPVDLLWLQDAVPLATAPGHGPQRSLHVPGLNKTSSFSCEAHNAKGVTTSRTATITVLPQQPRNLHLVSRQPTELEVAWTPGLSGIYPLTHCTLQNKKK

SEQ ID NO: 5061 - protein, 525 aa, Artificial Sequence
  Synthetic polypeptide
MAWRCPRMGRVPLAWCLALCGWACMAPRGTQAEESPFVGNPGNITGARGLTGTLRCQLQVQGEPPEVHWLRDGQILELADSTQTQVPLGEDEQDDWIVVSQLRITSLQLSDTGQYQCLVFLGHQTFVSQPGYVGLEGLPYFLEEPEDRTVAANTPFNLSCQAQGPPEPVDLLWLQDAVPLATAPGHGPQRSLHVPGLNKTSSFSCEAHNAKGVTTSRTATITVLPQQPRNLHLVSRQPTELEVAWTPGLSGIYPLTHCTLQAVLSNDGMGIQAGEPDPPEEPLTSQASVPPHQLRLGSLHPHTPYHIRVACTSSQGPSSWTHWLPVETPEGVPLGPPENISATRNGSQAFVHWQEPRAPLQGTLLGYRLAYQGQDTPEVLMDIGLRQEVTLELQGDGSVSNLTVCVAAYTAAGDGPWSLPVPLEAWRPGQAQPVHQLVKEPSTPAFSWPWWYVLLGAVVAAACVLILALFLVHRRKKETRYGEVFEPTVERGELVVRYRVRKSYSRRTTEATSFSAVFQRLPDVG

SEQ ID NO: 5062 - protein, 516 aa, Artificial Sequence
  Synthetic polypeptide
MAWRCPRMGRVPLAWCLALCGWACMAPRGTQAEESPFVGNPGNITGARGLTGTLRCQLQVQGEPPEVHWLRDGQILELADSTQTQVPLGEDEQDDWIVVSQLRITSLQLSDTGQYQCLVFLGHQTFVSQPGYVGLEGLPYFLEEPEDRTVAANTPFNLSCQAQGPPEPVDLLWLQDAVPLATAPGHGPQRSLHVPGLNKTSSFSCEAHNAKGVTTSRTATITVLPQQPRNLHLVSRQPTELEVAWTPGLSGIYPLTHCTLQAVLSNDGMGIQAGEPDPPEEPLTSQASVPPHQLRLGSLHPHTPYHIRVACTSSQGPSSWTHWLPVETPEGVPLGPPENISATRNGSQAFVHWQEPRAPLQGTLLGYRLAYQGQDTPEVLMDIGLRQEVTLELQGDGSVSNLTVCVAAYTAAGDGPWSLPVPLEAWRPVKEPSTPAFSWPWWYVLLGAVVAAACVLILALFLVHRRKKETRYGEVFEPTVERGELVVRYRVRKSYSRRTTEATSFSAVFQRLPDVG

SEQ ID NO: 5063 - protein, 257 aa, Artificial Sequence
  Synthetic polypeptide
MGIQAGEPDPPEEPLTSQASVPPHQLRLGSLHPHTPYHIRVACTSSQGPSSWTHWLPVETPEGVPLGPPENISATRNGSQAFVHWQEPRAPLQGTLLGYRLAYQGQDTPEVLMDIGLRQEVTLELQGDGSVSNLTVCVAAYTAAGDGPWSLPVPLEAWRPGQAQPVHQLVKEPSTPAFSWPWWYVLLGAVVAAACVLILALFLVHRRKKETRYGEVFEPTVERGELVVRYRVRKSYSRRTTEATSFSAVFQRLPDVG

SEQ ID NO: 5064 - protein, 537 aa, Artificial Sequence
  Synthetic polypeptide
MAWRCPRMGRVPLAWCLALCGWACMAPRGTQAEESPFVGNPGNITGARGLTGTLRCQLQVQGEPPEVHWLRDGQILELADSTQTQVPLGEDEQDDWIVVSQLRITSLQLSDTGQYQCLVFLGHQTFVSQPGYVGLEGLPYFLEEPEDRTVAANTPFNLSCQAQGPPEPVDLLWLQDAVPLATAPGHGPQRSLHVPGLNKTSSFSCEAHNAKGVTTSRTATITVLPQQPRNLHLVSRQPTELEVAWTPGLSGIYPLTHCTLQAVLSNDGMGIQAGEPDPPEEPLTSQASVPPHQLRLGSLHPHTPYHIRVACTSSQGPSSWTHWLPVETPEGVPLGPPENISATRNGSQAFVHWQEPRAPLQGTLLGYRLAYQGQDTPEVLMDIGLRQEVTLELQGDGSVSNLTVCVAAYTAAGDGPWSLPVPLEAWRPGQAQPVHQLVKEPSTPAFSWPWWYVLLGAVVAAACVLILALFLVHRRKKETRYGEVFEPTVERGELVVRYRVRKSYSRRTTEATLQKYVSVSTMDLSLLVGECHLNVSP

SEQ ID NO: 5065 - protein, 528 aa, Artificial Sequence
  Synthetic polypeptide
MAWRCPRMGRVPLAWCLALCGWACMAPRGTQAEESPFVGNPGNITGARGLTGTLRCQLQVQGEPPEVHWLRDGQILELADSTQTQVPLGEDEQDDWIVVSQLRITSLQLSDTGQYQCLVFLGHQTFVSQPGYVGLEGLPYFLEEPEDRTVAANTPFNLSCQAQGPPEPVDLLWLQDAVPLATAPGHGPQRSLHVPGLNKTSSFSCEAHNAKGVTTSRTATITVLPQQPRNLHLVSRQPTELEVAWTPGLSGIYPLTHCTLQAVLSNDGMGIQAGEPDPPEEPLTSQASVPPHQLRLGSLHPHTPYHIRVACTSSQGPSSWTHWLPVETPEGVPLGPPENISATRNGSQAFVHWQEPRAPLQGTLLGYRLAYQGQDTPEVLMDIGLRQEVTLELQGDGSVSNLTVCVAAYTAAGDGPWSLPVPLEAWRPVKEPSTPAFSWPWWYVLLGAVVAAACVLILALFLVHRRKKETRYGEVFEPTVERGELVVRYRVRKSYSRRTTEATLQKYVSVSTMDLSLLVGECHLNVSP

SEQ ID NO: 5066 - protein, 269 aa, Artificial Sequence
  Synthetic polypeptide
MGIQAGEPDPPEEPLTSQASVPPHQLRLGSLHPHTPYHIRVACTSSQGPSSWTHWLPVETPEGVPLGPPENISATRNGSQAFVHWQEPRAPLQGTLLGYRLAYQGQDTPEVLMDIGLRQEVTLELQGDGSVSNLTVCVAAYTAAGDGPWSLPVPLEAWRPGQAQPVHQLVKEPSTPAFSWPWWYVLLGAVVAAACVLILALFLVHRRKKETRYGEVFEPTVERGELVVRYRVRKSYSRRTTEATLQKYVSVSTMDLSLLVGECHLNVSP

SEQ ID NO: 5067 - protein, 20 aa, Artificial Sequence
  Synthetic polypeptide
MEAVATATAAKEPDKDWQGA

SEQ ID NO: 5068 - protein, 15 aa, Artificial Sequence
  Synthetic polypeptide
GSLPAAEVTWPPFMA

SEQ ID NO: 5069 - protein, 344 aa, Artificial Sequence
  Synthetic polypeptide
MPPSGLRLLPLLLPLLWLLVLTPGRPAAGLSTCKTIDMELVKRKRIEAIRGQILSKLRLASPPSQGEVPPGPLPEAVLALYNSTRDRVAGESAEPEPEPEADYYAKEVTRVLMVETHNEIYDKFKQSTHSIYMFFNTSELREAVPEPVLLSRAELRLLRLKLKVEQHVELYQKYSNNSWRYLSNRLLAPSDSPEWLSFDVTGVVRQWLSRGGEIEGFRLSAHCSCDSRDNTLQVDINGFTTGRRGDLATIHGMNRPFLLLMATPLERAQHLQSSRHRRALDTNYCFSSTEKNCCVRQLYIDFRKDLGWKWIHEPKGYHANFCLGPCPYIWSLDTQYSKVLRRLR

SEQ ID NO: 5070 - protein, 30 aa, Artificial Sequence
  Synthetic polypeptide
MPGGPGVLQALPATIFLLFLLSAVYLGFCE

SEQ ID NO: 5071 - protein, 52 aa, Artificial Sequence
  Synthetic polypeptide
EAWGCPLGTGISGLLGRTPLESLCTLCPWTAQTGNQVLTPPWSWGTHPRRAQ

SEQ ID NO: 5072 - protein, 785 aa, Artificial Sequence
  Synthetic polypeptide
MEDFARGAASPGPSRPGLVPVSIIGAEDEDFENELETNSEEQNSQFQSLEQVKRRPAHLMALLQHVALQFEPGPLLCCLHADMLGSLGPKEAKKAFLDFYHSFLEKTAVLRVPVPPNVAFELDRTRADLISEDVQRRFVQEVVQSQQVAVGRQLEDFRSKRLMGMTPWEQELAQLEAWVGRDRASYEARERHVAERLLMHLEEMQHTISTDEEKSAAVVNAIGLYMRHLGVRTKSGDKKSGRNFFRKKVMGNRRSDEPAKTKKGLSSILDAARWNRGEPQVPDFRHLKAEVDAEKPGATDRKGGVGMPSRDRNIGAPGQDTPGVSLHPLSLDSPDREPGADAPLELGDSSPQGPMSLESLAPPESTDEGAETESPEPGDEGEPGRSGLELEPEEPPGWRELVPPDTLHSLPKSQVKRQEVISELLVTEAAHVRMLRVLHDLFFQPMAECLFFPLEELQNIFPSLDELIEVHSLFLDRLMKRRQESGYLIEEIGDVLLARFDGAEGSWFQKISSRFCSRQSFALEQLKAKQRKDPRFCAFVQEAESRPRCRRLQLKDMIPTEMQRLTKYPLLLQSIGQNTEEPTEREKVELAAECCREILHHVNQAVRDMEDLLRLKDYQRRLDLSHLRQSSDPMLSEFKNLDITKKKLVHEGPLTWRVTKDKAVEVHVLLLDDLLLLLQRQDERLLLKSHSRTLTPTPDGKTMLRPVLRLTSAMTREVATDHKAFYVLFTWDQEAQIYELVAQTVSERKNWCALITETAGSLKVPAPASRPKPRPSPSSSLSPCP

SEQ ID NO: 5073 - protein, 841 aa, Artificial Sequence
  Synthetic polypeptide
MEDFARGAASPGPSRPGLVPVSIIGAEDEDFENELETNSEEQNSQFQSLEQVKRRPAHLMALLQHVALQFEPGPLLCCLHADMLGSLGPKEAKKAFLDFYHSFLEKTAVLRVPVPPNVAFELDRTRADLISEDVQRRFVQEVVQSQQVAVGRQLEDFRSKRLMGMTPWEQELAQLEAWVGRDRASYEARERHVAERLLMHLEEMQHTISTDEEKSAAVVNAIGLYMRHLGVRTKSGDKKSGRNFFRKKVMGNRRSDEPAKTKKGLSSILDAARWNRGEPQVPDFRHLKAEVDAEKPGATDRKGGVGMPSRDRNIGAPGQDTPGVSLHPLSLDSPDREPGADAPLELGDSSPQGPMSLESLAPPESTDEGAETERLSGRLGRSESLRVSDRRRPSRGSLGAKGRGGGRSRSDVDMDPSSATAVLGPARRATPEPGDEGEPGRSGLELEPEEPPGWRELVPPDTLHSLPKSQVKRQEVISELLVTEAAHVRMLRVLHDLFFQPMAECLFFPLEELQNIFPSLDELIEVHSLFLDRLMKRRQESGYLIEEIGDVLLARFDGAEGSWFQKISSRFCSRQSFALEQLKAKQRKDPRFCAFVQEAESRPRCRRLQLKDMIPTEMQRLTKYPLLLQSIGQNTEEPTEREKVELAAECCREILHHVNQAVRDMEDLLRLKDYQRRLDLSHLRQSSDPMLSEFKNLDITKKKLVHEGPLTWRVTKDKAVEVHVLLLDDLLLLLQRQDERLLLKSHSRTLTPTPDGKTMLRPVLRLTSAMTREVATDHKAFYVLFTWDQEAQIYELVAQTVSERKNWCALITETAGSLKVPAPASRPKPRPSPSSSLSPCP

SEQ ID NO: 5074 - protein, 752 aa, Artificial Sequence
  Synthetic polypeptide
MEDFARGAASPGPSRPGLVPVSIIGAEDEDFENELETNSEEQNSQFQSLEQVKRRPAHLMALLQHVALQFEPGPLVLRVPVPPNVAFELDRTRADLISEDVQRRFVQEVVQSQQVAVGRQLEDFRSKRLMGMTPWEQELAQLEAWVGRDRASYEARERHVAERLLMHLEEMQHTISTDEEKSAAVVNAIGLYMRHLGVRTKSGDKKSGRNFFRKKVMGNRRSDEPAKTKKGLSSILDAARWNRGEPQVPDFRHLKAEVDAEKPGATDRKGGVGMPSRDRNIGAPGQDTPGVSLHPLSLDSPDREPGADAPLELGDSSPQGPMSLESLAPPESTDEGAETESPEPGDEGEPGRSGLELEPEEPPGWRELVPPDTLHSLPKSQVKRQEVISELLVTEAAHVRMLRVLHDLFFQPMAECLFFPLEELQNIFPSLDELIEVHSLFLDRLMKRRQESGYLIEEIGDVLLARFDGAEGSWFQKISSRFCSRQSFALEQLKAKQRKDPRFCAFVQEAESRPRCRRLQLKDMIPTEMQRLTKYPLLLQSIGQNTEEPTEREKVELAAECCREILHHVNQAVRDMEDLLRLKDYQRRLDLSHLRQSSDPMLSEFKNLDITKKKLVHEGPLTWRVTKDKAVEVHVLLLDDLLLLLQRQDERLLLKSHSRTLTPTPDGKTMLRPVLRLTSAMTREVATDHKAFYVLFTWDQEAQIYELVAQTVSERKNWCALITETAGSLKVPAPASRPKPRPSPSSSLSPCP

SEQ ID NO: 5075 - protein, 767 aa, Artificial Sequence
  Synthetic polypeptide
MASLSTWSSPAEPREMEDFARGAASPGPSRPGLVPVSIIGAEDEDFENELETNSEEQNSQFQSLEQVKRRPAHLMALLQHVALQFEPGPLVLRVPVPPNVAFELDRTRADLISEDVQRRFVQEVVQSQQVAVGRQLEDFRSKRLMGMTPWEQELAQLEAWVGRDRASYEARERHVAERLLMHLEEMQHTISTDEEKSAAVVNAIGLYMRHLGVRTKSGDKKSGRNFFRKKVMGNRRSDEPAKTKKGLSSILDAARWNRGEPQVPDFRHLKAEVDAEKPGATDRKGGVGMPSRDRNIGAPGQDTPGVSLHPLSLDSPDREPGADAPLELGDSSPQGPMSLESLAPPESTDEGAETESPEPGDEGEPGRSGLELEPEEPPGWRELVPPDTLHSLPKSQVKRQEVISELLVTEAAHVRMLRVLHDLFFQPMAECLFFPLEELQNIFPSLDELIEVHSLFLDRLMKRRQESGYLIEEIGDVLLARFDGAEGSWFQKISSRFCSRQSFALEQLKAKQRKDPRFCAFVQEAESRPRCRRLQLKDMIPTEMQRLTKYPLLLQSIGQNTEEPTEREKVELAAECCREILHHVNQAVRDMEDLLRLKDYQRRLDLSHLRQSSDPMLSEFKNLDITKKKLVHEGPLTWRVTKDKAVEVHVLLLDDLLLLLQRQDERLLLKSHSRTLTPTPDGKTMLRPVLRLTSAMTREVATDHKAFYVLFTWDQEAQIYELVAQTVSERKNWCALITETAGSLKVPAPASRPKPRPSPSSSLSPCP

SEQ ID NO: 5076 - protein, 800 aa, Artificial Sequence
  Synthetic polypeptide
MASLSTWSSPAEPREMEDFARGAASPGPSRPGLVPVSIIGAEDEDFENELETNSEEQNSQFQSLEQVKRRPAHLMALLQHVALQFEPGPLLCCLHADMLGSLGPKEAKKAFLDFYHSFLEKTAVLRVPVPPNVAFELDRTRADLISEDVQRRFVQEVVQSQQVAVGRQLEDFRSKRLMGMTPWEQELAQLEAWVGRDRASYEARERHVAERLLMHLEEMQHTISTDEEKSAAVVNAIGLYMRHLGVRTKSGDKKSGRNFFRKKVMGNRRSDEPAKTKKGLSSILDAARWNRGEPQVPDFRHLKAEVDAEKPGATDRKGGVGMPSRDRNIGAPGQDTPGVSLHPLSLDSPDREPGADAPLELGDSSPQGPMSLESLAPPESTDEGAETESPEPGDEGEPGRSGLELEPEEPPGWRELVPPDTLHSLPKSQVKRQEVISELLVTEAAHVRMLRVLHDLFFQPMAECLFFPLEELQNIFPSLDELIEVHSLFLDRLMKRRQESGYLIEEIGDVLLARFDGAEGSWFQKISSRFCSRQSFALEQLKAKQRKDPRFCAFVQEAESRPRCRRLQLKDMIPTEMQRLTKYPLLLQSIGQNTEEPTEREKVELAAECCREILHHVNQAVRDMEDLLRLKDYQRRLDLSHLRQSSDPMLSEFKNLDITKKKLVHEGPLTWRVTKDKAVEVHVLLLDDLLLLLQRQDERLLLKSHSRTLTPTPDGKTMLRPVLRLTSAMTREVATDHKAFYVLFTWDQEAQIYELVAQTVSERKNWCALITETAGSLKVPAPASRPKPRPSPSSSLSPCP

SEQ ID NO: 5077 - protein, 390 aa, Artificial Sequence
  Synthetic polypeptide
MVHSSMGAPEIRMSKPLEAEKQGLDSPSEHTDTERNGPDTNHQNPQNKTSPFSVSPTGPSTKIKAEDPSGDSAPAAPLPPQPAQPHLPQAQLMLTGSQLAGDIQQLLQLQQLVLVPGHHLQPPAQFLLPQAQQSQPGLLPTPNLFQLPQQTQGALLTSQPRAGLPTQPPKCLEPPSHPEEPSDLEELEQFARTFKQRRIKLGFTQGDVGLAMGKLYGNDFSQTTISRFEALNLSFKNMCKLKPLLEKWLNDAETMSVDSSLPSPNQLSSPSLGFDGLPGRRRKKRTSIETNVRFALEKSFLANQKPTSEEILLIAEQLHMEKEVIRVWFCNRRQKEKRINPCSAAPMLPSPGKPASYSPHMVTPQGGAGTLPLSQASSSLSTTGQGMWIT

SEQ ID NO: 5078 - protein, 406 aa, Artificial Sequence
  Synthetic polypeptide
MVHSSMGAPEIRMSKPLEAEKQGLDSPSEHTDTERNGPDTNHQNPQNKTSPFSVSPTGPSTKIKAEDPSGDSAPAAPLPPQPAQPHLPQAQLMLTGSQLAGDIQQLLQLQQLVLVPGHHLQPPAQFLLPQAQQSQPGLLPTPNLFQLPQQTQGALLTSQPRAGLPTQAVTRPTLPDPHLSHPQPPKCLEPPSHPEEPSDLEELEQFARTFKQRRIKLGFTQGDVGLAMGKLYGNDFSQTTISRFEALNLSFKNMCKLKPLLEKWLNDAETMSVDSSLPSPNQLSSPSLGFDGLPGRRRKKRTSIETNVRFALEKSFLANQKPTSEEILLIAEQLHMEKEVIRVWFCNRRQKEKRINPCSAAPMLPSPGKPASYSPHMVTPQGGAGTLPLSQASSSLSTTGQGMWIT

SEQ ID NO: 5079 - protein, 408 aa, Artificial Sequence
  Synthetic polypeptide
SMGAPEIRMSKPLEAEKQGLDSPSEHTDTERNGPDTNHQNPQNKTSPFSVSPTGPSTKVGILSGLHLTFWGPGPCLSPPQIKAEDPSGDSAPAAPLPPQPAQPHLPQAQLMLTGSQLAGDIQQLLQLQQLVLVPGHHLQPPAQFLLPQAQQSQPGLLPTPNLFQLPQQTQGALLTSQPRAGLPTQPPKCLEPPSHPEEPSDLEELEQFARTFKQRRIKLGFTQGDVGLAMGKLYGNDFSQTTISRFEALNLSFKNMCKLKPLLEKWLNDAETMSVDSSLPSPNQLSSPSLGFDGLPGRRRKKRTSIETNVRFALEKSFLANQKPTSEEILLIAEQLHMEKEVIRVWFCNRRQKEKRINPCSAAPMLPSPGKPASYSPHMVTPQGGAGTLPLSQASSSLSTTGQGMWIT

SEQ ID NO: 5080 - protein, 69 aa, Artificial Sequence
  Synthetic polypeptide
KEVIRVWFCNRRQKEKRINPCSAAPMLPSPGKPASYSPHMVTPQGGAGTLPLSQASSSLSTTGQGMWIT

SEQ ID NO: 5081 - protein, 412 aa, Artificial Sequence
  Synthetic polypeptide
MVHSSMGAPEIRMSKPLEAEKQGLDSPSEHTDTERNGPDTNHQNPQNKTSPFSVSPTGPSTKVGILSGLHLTFWGPGPCLSPPQIKAEDPSGDSAPAAPLPPQPAQPHLPQAQLMLTGSQLAGDIQQLLQLQQLVLVPGHHLQPPAQFLLPQAQQSQPGLLPTPNLFQLPQQTQGALLTSQPRAGLPTQPPKCLEPPSHPEEPSDLEELEQFARTFKQRRIKLGFTQGDVGLAMGKLYGNDFSQTTISRFEALNLSFKNMCKLKPLLEKWLNDAETMSVDSSLPSPNQLSSPSLGFDGLPGRRRKKRTSIETNVRFALEKSFLANQKPTSEEILLIAEQLHMEKEVIRVWFCNRRQKEKRINPCSAAPMLPSPGKPASYSPHMVTPQGGAGTLPLSQASSSLSTTGQGMWIT

SEQ ID NO: 5082 - protein, 351 aa, Artificial Sequence
  Synthetic polypeptide
MVHSSMGAPEIRMSKPLEAEKQGLDSPSEHTDTERNGPDTNHQNPQNKTSPFSVSPTGPSTKDIQQLLQLQQLVLVPGHHLQPPAQFLLPQAQQSQPGLLPTPNLFQLPQQTQGALLTSQPRAGLPTQPPKCLEPPSHPEEPSDLEELEQFARTFKQRRIKLGFTQGDVGLAMGKLYGNDFSQTTISRFEALNLSFKNMCKLKPLLEKWLNDAETMSVDSSLPSPNQLSSPSLGFDGLPGRRRKKRTSIETNVRFALEKSFLANQKPTSEEILLIAEQLHMEKEVIRVWFCNRRQKEKRINPCSAAPMLPSPGKPASYSPHMVTPQGGAGTLPLSQASSSLSTTGQGMWIT

SEQ ID NO: 5083 - protein, 128 aa, Artificial Sequence
  Synthetic polypeptide
ETQEEDQHRDKRPLRLREEFSSEPEAYLRGDPADRRAAAHGEGSDPRLVLQPAPEGETHQPLQCGPHAAQPREAGQLQPPYGHTPRGRGDLTVVPSFQQSEHNRPRHVDHLRSGVRDQPGQHGKPCLY

SEQ ID NO: 5084 - protein, 955 aa, Artificial Sequence
  Synthetic polypeptide
MKPMKKACTGLSGPGSGSKSPPATRAKALRRRGAGEGDKPEEEDDEAQQPQPQSGPEEAEEGEEEEAERGPGAEGPPLELHPGDPAPGPAEDPKGDGEAGRWEPSLSRKTATFKSRAPKKKYVEEHGAGSSGVAGAPEERVRTPEEASGLGVPPRPPTSTRSSSTDTASEHSADLEDEPAEACGPGPWPPGSTSGSYDLRQLRSQRVLARRGDGLFLPAVVRQVRRSQDLGVQFPGDRALTFYEGVPGAGVDVVLDATPPPGALVVGTAVCTCVEPGVAAYREGVVVEVATKPAAYKVRLSPGPSSQPGLPGSLPQPPQPLHREPEEAVWVARSSLRLLRPPWEPETMLRKPPTGPEEEQAEPGATLPPCPAALDPKQPEDAEVSKISFGGNLGTHCEEGEEKHPPALGTPALLPLPPPQLLSPPPKSPAFVGPGRPGEQPSPCQEGSQGGSRSSSVASLEKGTAPAARARTPLTAAQQKYKKGDVVCTPSGIRKKFNGKQWRRLCSRDGCMKESQRRGYCSRHLSMRTKEMEGLADSGPGGAGRPAAVAAREGSTEFDWGDETSRDSEASSVAARGDSRPRLVAPADLSRFEFDECEAAVMLVSLGSSRSGTPSFSPVSTQSPFSPAPSPSPSPLFGFRPANFSPINASPVIQRTAVRSRHLSASTPKAGVLTPPDLGPHPPPPAPRERHSSGILPTFQTNLTFTVPISPGRRKTELLPHPGALGAPGAGGGGAAPDFPKSDSLDSGVDSVSHTPTPSTPAGFRAVSPAVPFSRSRQPSPLLLLPPPAGLTSDPGPSVRRVPAVQRDSPVIVRNPDVPLPSKFPGEVGTAGEVRAGGPGRGCRETPVPPGVASGKPGLPPPLPAPVPITVPPAAPTAVAQPMPAFGLASSPFQPVAFHPSPAALLPVLVPSSYTSHPAPKKEVIMGRPGTGGCEDSMNQIIHTSSQHTAAPVSV

SEQ ID NO: 5085 - protein, 355 aa, Artificial Sequence
  Synthetic polypeptide
MGPLSAPPCTQHITWKGLLLTASLLNFWNLPITAQVTIEALPPKVSEGKDVLLLVHNLPQNLAGYIWYKGQLMDLYHYITSYVVDGQINIYGPAYTGRETVYSNASLLIQNVTREDAGSYTLHIIKRGDRTRGVTGYFTFNLYLKLPKPYITINNSKPRENKDVLAFTCEPKSENYTYIWWLNGQSLPVSPRVKRPIENRILILPSVTRNETGPYECEIRDRDGGMRSDPVTLNVLYGPDLPSIYPSFTYYRSGENLYLSCFAESNPPAEYFWTINGKFQQSGQKLSIPQITTKHRGLYTCSVRNSATGKESSKSMTVEVSDSCFDSSSNYLQSPTVQNCFFFKEIYGKDSDKDS

SEQ ID NO: 5086 - protein, 448 aa, Artificial Sequence
  Synthetic polypeptide
MGPLSAPPCTQHITWKGLLLTASLLNFWNLPITAQVTIEALPPKVSEGKDVLLLVHNLPQNLAGYIWYKGQLMDLYHYITSYVVDGQINIYGPAYTGRETVYSNASLLIQNVTREDAGSYTLHIIKRGDRTRGVTGYFTFNLYLETPKPSISSSNLNPREAMEAVILTCDPAASDTSYLWWMNGQSLPMTHRLQLSKTNRTLFIFGVTKYIAGPYECEIRNPVSASHSDPVTLNLLLKLPKPYITINNSKPRENKDVLAFTCEPKSENYTYIWWLNGQSLPVSPRVKRPIENRILILPSVTRNETGPYECEIRDRDGGMRSDPVTLNVLYGPDLPSIYPSFTYYRSGENLYLSCFAESNPPAEYFWTINGKFQQSGQKLSIPQITTKHRGLYTCSVRNSATGKESSKSMTVEVSDSCFDSSSNYLQSPTVQNCFFFKEIYGKDSDKDS

SEQ ID NO: 5087 - protein, 67 aa, Artificial Sequence
  Synthetic polypeptide
MGPLPAPSCTQRITWKGLLLTATREAEVGESCEPGRQKLQLAEIPPLHASLGDSTRLRLKKKRKKGK

SEQ ID NO: 5088 - protein, 45 aa, Artificial Sequence
  Synthetic polypeptide
MVTPQTSQRGSLAAPLGYFQVLFKPSAVAHACSSSTLRGRGRWIA

SEQ ID NO: 5089 - protein, 22 aa, Artificial Sequence
  Synthetic polypeptide
GHSSDLPTRVSCCPSWLFSGLV

SEQ ID NO: 5090 - protein, 132 aa, Artificial Sequence
  Synthetic polypeptide
MGHPPLLPLLLLLHTCVPASWGLRCMQCKTNGDCRVEECALGQDLCRTTIVRLWEEGEELELVEKSCTHSEKTNRTLSYRTGLKITSLTEVVCGLDLCNQGNSDNLAFSRSALANLLLWKGNRAQTERESLD

SEQ ID NO: 5091 - protein, 107 aa, Artificial Sequence
  Synthetic polypeptide
MQCKTNGDCRVEECALGQDLCRTTIVRLWEEGEELELVEKSCTHSEKTNRTLSYRTGLKITSLTEVVCGLDLCNQGNSDNLAFSRSALANLLLWKGNRAQTERESLD

SEQ ID NO: 5092 - protein, 127 aa, Artificial Sequence
  Synthetic polypeptide
MDTNLNGRGLETWSSWGLRCMQCKTNGDCRVEECALGQDLCRTTIVRLWEEGEELELVEKSCTHSEKTNRTLSYRTGLKITSLTEVVCGLDLCNQGNSDNLAFSRSALANLLLWKGNRAQTERESLD

SEQ ID NO: 5093 - protein, 343 aa, Artificial Sequence
  Synthetic polypeptide
MSESGHSQPGLYGIERRRRWKEPGSGGPQNLSGPGGRERDYIAPWERERRDASEETSTSVMQKTPIILSKPPAERSKQPPPPTAPAAPPAPAPLEKPIVLMKPREEGKGPVAVTGASTPEGTAPPPPAAPAPPKGEKEGQRPTQPVYQIQNRGMGTAAPAAMDPVVGQAKLLPPERMKHSIKLVDDQMNWCDSAIEYLLDQTDVLVVGVLGLQGTGKSMVMSLLSANTPEEDQRTYVFRAQSAEMKERGGNQTSGIDFFITQERIVFLDTQPILSPSILDHLINNDRKLPPEYNLPHTYVEMQSLQIAAFLFTVCHVVIVVQDWFTDLSLYSFHQNLKGSPCP

SEQ ID NO: 5094 - protein, 93 aa, Artificial Sequence
  Synthetic polypeptide
MTTFKEGLTFKDVAVVFTEEELGLLDPVQRNLYQDVMLENFRNLLSVGHHPFKHDVFLLEKEKKLDIMKTATQRKGKSATSSSLLFPRPGKDI

SEQ ID NO: 5095 - protein, 82 aa, Artificial Sequence
  Synthetic polypeptide
MNMFKEAVTFKDVAVAFTEEELGLLGPAQRKLYRDVMVENFRNLLSVGHPPFKQDVSPIERNEQLWIMTTATRRQGNLVLVL

SEQ ID NO: 5096 - protein, 46 aa, Artificial Sequence
  Synthetic polypeptide
MVENFRNLLSVGHPPFKQDVSPIERNEQLWIMTTATRRQGNLVLVL

SEQ ID NO: 5097 - protein, 644 aa, Artificial Sequence
  Synthetic polypeptide
MPHAFKPGDLVFAKMKGYPHWPARIDDIADGAVKPPPNKYPIFFFGTHETAFLGPKDLFPYDKCKDKYGKPNKRKGFNEGLWEIQNNPHASYSAPPPVSSSDSEAPEANPADGSDADEDDEDRGVMAVTAVTATAASDRMESDSDSDKSSDNSGLKRKTPALKMSVSKRARKASSDLDQASVSPSEEENSESSSESEKTSDQDFTPEKKAAVRAPRRGPLGGRKKKKAPSASDSDSKADSDGAKPEPVAMARSASSSSSSSSSSDSDVSVKKPPRGRKPAEKPLPKPRGRKPKPERPPSSSSSDSDSDEVDRISEWKRRDEARRRELEARRRREQEEELRRLREQEKEEKERRRERADRGEAERGSGGSSGDELREDDEPVKKRGRKGRGRGPPSSSDSEPEAELEREAKKSAKKPQSSSTEPARKPGQKEKRVRPEEKQQAKPVKVERTRKRSEGFSMDRKVEKKKEPSVEEKLQKLHSEIKFALKVDSPDVKRCLNALEELGTLQVTSQILQKNTDVVATLKKIRRYKANKDVMEKAAEVYTRLKSRVLGPKIEAVQKVNKAGMEKEKAEEKLAGEELAGEELAGEEAPQEKAEDKPSTDLSAPVNGEATSQKGESAEDKEHEEGRDSEEGPRCGSSEDLHE

SEQ ID NO: 5098 - protein, 140 aa, Artificial Sequence
  Synthetic polypeptide
EKKKEPSVEEKLQKLHSEIKFALKVDSPDVKRCLNALEELGTLQVTSQILQKNTDVVATLKKIRRYKANKDVMEKLAGEELAGEEAPQEKAEDKPSTDLSAPVNGEATSQKGESAEDKEHEEGRDSEEGPRCGSSEDLHE

SEQ ID NO: 5099 - protein, 158 aa, Artificial Sequence
  Synthetic polypeptide
KVDSPDVKRCLNALEELGTLQVTSQILQKNTDVVATLKKIRRYKANKDVMEKAAEVYTRLKSRVLGPKIEAVQKVNKAGMEKEKAEEKLAGEELAGEELAGEEAPQEKAEDKPSTDLSAPVNGEATSQKGESAEDKEHEEGRDSEEGPRCGSSEDLHE

SEQ ID NO: 5100 - protein, 73 aa, Artificial Sequence
  Synthetic polypeptide
EEKLAGEELAGEELAGEEAPQEKAEDKPSTDLSAPVNGEATSQKGESAEDKEHEEGRDSEEGPRCGSSEDLHE

SEQ ID NO: 5101 - protein, 302 aa, Artificial Sequence
  Synthetic polypeptide
MEIPMGTQGCFSKSLLLSASILVLWMLQGSQAALYIQKIPEQPQKNQDLLLSVQGVPDTFQDFNWYLGEETYGGTRLFTYIPGIQRPQRDGSAMGQRDIVGFPNGSMLLRRAQPTDSGTYQVAITINSEWTMKAKTEVQVAEKNKELPSTHLPTNAGILAATIIGSLAAGALLISCIAYLLVTRNWRGQSHRLPAPRGQGSLSILCSAVSPVPSVTPSTWMATTEKPELGPAHDAGDNNIYEVMPSPVLLVSPISDTRSINPAREKRLEGNSTTEAAFVSGVWRLVGGFYLLFFYTCLCFLH

SEQ ID NO: 5102 - protein, 310 aa, Artificial Sequence
  Synthetic polypeptide
MALAVAPWGRQWEEARALGRAVRMLQRLEEQCVDPRLSVSPPSLRDLLPRTAQLLREVAHSRRAAGGGGPGGPGGSGDFLLIYLANLEAKSRQVAALLPPRGRRSANDELFRAGSRLRRQLAKLAIIFSHMHAELHALFPGGKYCGHMYQLTKAPAHTFWRESCGARCVLPWAEFESLLGTCHPVEPGCTALALRTTIDLTCSGHVSIFEFDVFTRLFQPWPTLLKNWQLLAVNHPGYMAFLTYDEVQERLQACRDKPGSYIFRPSCTRLGQWAIGYVSSDGSILQTIPANKPLSQVLLEGQKDGLHFIQ

SEQ ID NO: 5103 - protein, 481 aa, Artificial Sequence
  Synthetic polypeptide
MARAAALLPSRSPPTPLLWPLLLLLLLETGAQDVRVQVLPEVRGQLGGTVELPCHLLPPVPGLYISLVTWQRPDAPANHQNVAAFHPKMGPSFPSPKPGSERLSFVSAKQSTGQDTEAELQDATLALHGLTVEDEGNYTCEFATFPKGSVRGMTWLRVIAKPKNQAEAQKVTFSQDPTTVALCISKEGRPPARISWLSSLDWEAKETQVSGTLAGTVTVTSRFTLVPSGRADGVTVTCKVEHESFEEPALIPVTLSVRYPPEVSISGYDDNWYLGRTDATLSCDVRSNPEPTGYDWSTTSGTFPTSAVAQGSQLVIHAVDSLFNTTFVCTVTNAVGMGRAEQVIFVRETPNTAGAGATGGIIGGIIAAIIATAVAATGILICRQQRKEQTLQGAEEDEDLEGPPSYKPPTPKAKLEAQEMPSQLFTLGASEHSPLKTPYFDAGASCTEQAWWLTPVIPALWEAETGRSPDVRSSRPPWLTR

SEQ ID NO: 5104 - protein, 478 aa, Artificial Sequence
  Synthetic polypeptide
MARAAALLPSRSPPTPLLWPLLLLLLLETGAQDVRVQVLPEVRGQLGGTVELPCHLLPPVPGLYISLVTWQRPDAPANHQNVAAFHPKMGPSFPSPKPGSERLSFVSAKQSTGQDTEAELQDATLALHGLTVEDEGNYTCEFATFPKGSVRGMTWLRVIAKPKNQAEAQKVTFSQDPTTVALCISKEGRPPARISWLSSLDWEAKETQVSGTLAGTVTVTSRFTLVPSGRADGVTVTCKVEHESFEEPALIPVTLSVRYPPEVSISGYDDNWYLGRTDATLSCDVRSNPEPTGYDWSTTSGTFPTSAVAQGSQLVIHAVDSLFNTTFVCTVTNAVGMGRAEQVIFVRETPNTAGAGATGGIIGGIIAAIIATAVAATGILICRQQRKEQTLQGAEEDEDLEGPPSYKPPTPKAKLEAQEMPSQLFTLGASEHSPLKTPYFDAGASCTEQLFRRLKQENRLDPGGRSCNELRPRHCTPA

SEQ ID NO: 5105 - protein, 169 aa, Artificial Sequence
  Synthetic polypeptide
MNLHVYISEHEHFTDFNATSALFWEQHDLVYGDWTSGENSDGCYEHFAELDIPQSVQQNGSIYIHVYFTKSGFHPDPRQKALYRRLATVHMSRMINKYKRRRFQKTKNLLTGETEADPEMIKHFGRPKQKDHLSPEVQDQPRQHSETPSLPKKRKKKERKEAVHGGSRL

SEQ ID NO: 5106 - protein, 257 aa, Artificial Sequence
  Synthetic polypeptide
MSRKAHITEKVTSNGSIGRDPPAETQPQNPPAQPAPNAWQVIKGVLFRIFIIWAISSWFRRGPAPQDQAGPGGAPRVASRNLFPKDTLMNLHVYISEHEHFTDFNATSALFWEQHDLVYGDWTSGENSDGCYEHFAELDIPQSVQQNGSIYIHVYFTKSGFHPDPRQKALYRRLATVHMSRMINKYKRRRFQKTKNLLTGETEADPEMIKHFGRPKQKDHLSPEVQDQPRQHSETPSLPKKRKKKERKEAVHGGSRL

SEQ ID NO: 5107 - protein, 271 aa, Artificial Sequence
  Synthetic polypeptide
MAAAQEADGARSAVVAAGGGSSGQVTSNGSIGRDPPAETQPQNPPAQPAPNAWQVIKGVLFRIFIIWAISSWFRRGPAPQDQAGPGGAPRVASRNLFPKDTLMNLHVYISEHEHFTDFNATSALFWEQHDLVYGDWTSGENSDGCYEHFAELDIPQSVQQNGSIYIHVYFTKSGFHPDPRQKALYRRLATVHMSRMINKYKRRRFQKTKNLLTGETEADPEMIKHFGRPKQKDHLSPEVQDQPRQHSETPSLPKKRKKKERKEAVHGGSRL

SEQ ID NO: 5108 - protein, 218 aa, Artificial Sequence
  Synthetic polypeptide
MAAAQEADGARSAVVAAGGGSSGQVTSNGSIGRDPPAETQPQNPPAQPAPNAWQVIKGVLFRIFIIWAISSWFRRGPAPQDQAGPGGAPRVASRNLFPKDTLMSVQQNGSIYIHVYFTKSGFHPDPRQKALYRRLATVHMSRMINKYKRRRFQKTKNLLTGETEADPEMIKHFGRPKQKDHLSPEVQDQPRQHSETPSLPKKRKKKERKEAVHGGSRL

SEQ ID NO: 5109 - protein, 285 aa, Artificial Sequence
  Synthetic polypeptide
MNLHVYISEHEHFTDFNATSALFWEQHDLVYGDWTSGENSDGCYEHFAELDIPQSVQQNGSIYIHVYFTKSGFHPDPRQKALYRRLATVHMSRMINKYKRRRFQKTKNLLTGETEADPEMIKRAEDYGPVEVISHWHPNITINIVDDHTPWVKGSVPPPLDQYVKFDAVSGDYYPIIYFNDYWNLQKDYYPINESLASLPLRVSFCPLSLWRWQLYAAQSTKSPWNFLGDELYEQSDEEQDSVKVALLETNPYLLALTIIVSIVHSVFEFLAFKNGNRVTPCSKK

SEQ ID NO: 5110 - protein, 373 aa, Artificial Sequence
  Synthetic polypeptide
MSRKAHITEKVTSNGSIGRDPPAETQPQNPPAQPAPNAWQVIKGVLFRIFIIWAISSWFRRGPAPQDQAGPGGAPRVASRNLFPKDTLMNLHVYISEHEHFTDFNATSALFWEQHDLVYGDWTSGENSDGCYEHFAELDIPQSVQQNGSIYIHVYFTKSGFHPDPRQKALYRRLATVHMSRMINKYKRRRFQKTKNLLTGETEADPEMIKRAEDYGPVEVISHWHPNITINIVDDHTPWVKGSVPPPLDQYVKFDAVSGDYYPIIYFNDYWNLQKDYYPINESLASLPLRVSFCPLSLWRWQLYAAQSTKSPWNFLGDELYEQSDEEQDSVKVALLETNPYLLALTIIVSIVHSVFEFLAFKNGNRVTPCSKK

SEQ ID NO: 5111 - protein, 387 aa, Artificial Sequence
  Synthetic polypeptide
MAAAQEADGARSAVVAAGGGSSGQVTSNGSIGRDPPAETQPQNPPAQPAPNAWQVIKGVLFRIFIIWAISSWFRRGPAPQDQAGPGGAPRVASRNLFPKDTLMNLHVYISEHEHFTDFNATSALFWEQHDLVYGDWTSGENSDGCYEHFAELDIPQSVQQNGSIYIHVYFTKSGFHPDPRQKALYRRLATVHMSRMINKYKRRRFQKTKNLLTGETEADPEMIKRAEDYGPVEVISHWHPNITINIVDDHTPWVKGSVPPPLDQYVKFDAVSGDYYPIIYFNDYWNLQKDYYPINESLASLPLRVSFCPLSLWRWQLYAAQSTKSPWNFLGDELYEQSDEEQDSVKVALLETNPYLLALTIIVSIVHSVFEFLAFKNGNRVTPCSKK

SEQ ID NO: 5112 - protein, 62 aa, Artificial Sequence
  Synthetic polypeptide
PWNFLGDELYEQSDEEQDSVKVALLETNPYLLALTIIVSIVHSVFEFLAFKNGNRVTPCSKK

SEQ ID NO: 5113 - protein, 5 aa, Artificial Sequence
  Synthetic polypeptide
IGGRL

SEQ ID NO: 5114 - protein, 3 aa, Artificial Sequence
  Synthetic polypeptide
IRP

SEQ ID NO: 5115 - protein, 243 aa, Artificial Sequence
  Synthetic polypeptide
MASGSGDSVTRRSVASQFFTQEEGPGIDGMTTSERVVDLLNQAALITNDSKITVLKQVQELIINKDPTLLDNFLDEIIAFQADKSIEVRKFVIGFIEEACKRDIELLLKLIANLNMLLRDENVNVVKKAILTMTQLYKVALQWMVKSRVISELQEACWDMVSAMAGDIILLLDSDNDGIRTHAIKFVEGLIVTLSPRMADSEIPRRQEHDISLDRIPRDHPYIQYTLVRIAKTSEQTKYSSTE

SEQ ID NO: 5116 - protein, 22 aa, Artificial Sequence
  Synthetic polypeptide
MRFSVSGMRTDYPRSVLAQRPR

SEQ ID NO: 5117 - protein, 135 aa, Artificial Sequence
  Synthetic polypeptide
MRFSVSGMRTDYPRSVLAPAYVSVCLLLLCPREVIAPAGSEPWLCQPAPRCGDKIYNPLEQCCYNDAIVSLSETRQCGPPCTFWPCFELCCLDSFGLTNDFVVKLKVQGVNSQCHSSPISSKCESTETKITMRGI

SEQ ID NO: 5118 - protein, 124 aa, Artificial Sequence
  Synthetic polypeptide
MVPRIFAPAYVSVCLLLLCPREVIAPAGSEPWLCQPAPRCGDKIYNPLEQCCYNDAIVSLSETRQCGPPCTFWPCFELCCLDSFGLTNDFVVKLKVQGVNSQCHSSPISSKCESTETKITMRGI

SEQ ID NO: 5119 - protein, 90 aa, Artificial Sequence
  Synthetic polypeptide
QPAPRCGDKIYNPLEQCCYNDAIVSLSETRQCGPPCTFWPCFELCCLDSFGLTNDFVVKLKVQGVNSQCHSSPISSKCESTETKITMRGI

SEQ ID NO: 5120 - protein, 146 aa, Artificial Sequence
  Synthetic polypeptide
MRKSLRLGAVAHAYNLSTLGGRGGRITRTSRVVSSHCKWMEKYIFSCAFEEGTGNRIWWGLQFEMRFRWEHRAKPHQPVNLGLICYTAIDNLLRQDHGYWKTGLCPAGPPHLALLALWKGLPLWELPGERLMGQGTDASSQQPART

SEQ ID NO: 5121 - protein, 96 aa, Artificial Sequence
  Synthetic polypeptide
MRKSLRLGAVAHAYNLSTLGGRGGRITRTSRVVSSHCKWMEKYIFSCAFEEGTGNRIWLLEDWFMSCWSSPPCLACSMEGASIMGTAWGEAHGARN

SEQ ID NO: 5122 - protein, 29 aa, Artificial Sequence
  Synthetic polypeptide
MAWWRVPVVPATQDTEAGESLEPGRRRLQ

SEQ ID NO: 5123 - protein, 186 aa, Artificial Sequence
  Synthetic polypeptide
MARRYDELPHYPGIVDGPAALASFPETVPAVPGPYGPHRPPQPLPPGLDSDGLKREKDEIYGHPLFPLLALVFEKCELATCSPRDGAGAGLGTPPGGDVCSSDSFNEDIAAFAKQVRSERPLFSSNPELDNLMIQAIQVLRFHLLELEKGKMPIDLVIEDRDGGCREDFEDYPASCPSLPDQKCEM

SEQ ID NO: 5124 - protein, 78 aa, Artificial Sequence
  Synthetic polypeptide
PPPSLSTPALPPWVAPPSTPVPPQVHDLCDNFCHRYITCLKGKMPIDLVIEDRDGGCREDFEDYPASCPSLPDQKCEM

SEQ ID NO: 5125 - protein, 291 aa, Artificial Sequence
  Synthetic polypeptide
MCTLCTTMRGSYRRCPWISLSVCLSLCLCHCLLTPLSPSLFPPSQTLPSLPLGPPAHMSGISAWTGSSLPTEAAPGDLEGFKLGGSDTWGPQYDELPHYPGIVDGPAALASFPETVPAVPGPYGPHRPPQPLPPGLDSDGLKREKDEIYGHPLFPLLALVFEKCELATCSPRDGAGAGLGTPPGGDVCSSDSFNEDIAAFAKQVRSERPLFSSNPELDNLMIQAIQVLRFHLLELEKVHDLCDNFCHRYITCLKGKMPIDLVIEDRDGGCREDFEDYPASCPSLPDQKCEM

SEQ ID NO: 5126 - protein, 203 aa, Artificial Sequence
  Synthetic polypeptide
MARRYDELPHYPGIVDGPAALASFPETVPAVPGPYGPHRPPQPLPPGLDSDGLKREKDEIYGHPLFPLLALVFEKCELATCSPRDGAGAGLGTPPGGDVCSSDSFNEDIAAFAKQVRSERPLFSSNPELDNLMIQAIQVLRFHLLELEKVHDLCDNFCHRYITCLKGKMPIDLVIEDRDGGCREDFEDYPASCPSLPDQKCEM

SEQ ID NO: 5127 - protein, 61 aa, Artificial Sequence
  Synthetic polypeptide
PASLFPPRFALRGPSSPPTQNWTIWERCPSTWSSRIGTAAAGRTSRTTQPPAPASQTRNVK

SEQ ID NO: 5128 - protein, 1 aa, Artificial Sequence
  Synthetic polypeptide
G

SEQ ID NO: 5129 - protein, 287 aa, Artificial Sequence
  Synthetic polypeptide
MAAGGSGVGGKRSSKSDADSGFLGLRPTSVDPALRRRRRGPRNKKRGWRRLAQEPLGLEVDQFLEDVRLQERTSGGLLSEAPNEKLFFVDTGSKEKGLTKKRTKVQKKSLLLKKPLRVDLILENTSKVPAPKDVLAHQVPNAKKLRRKEQLWEKLAKQGELPREVRRAQARLLNPSATRAKPGPQDTVERPFYDLWASDNPLDRPLVGQDEFFLEQTKKKGVKRPARLHTKPSQAPAVEVAPAGASYNPSFEDHQKISRAWQHASVVPTAWEAEVGGLLEPRRSRLQ

SEQ ID NO: 5130 - protein, 9 aa, Artificial Sequence
  Synthetic polypeptide
MALAVRVVY

SEQ ID NO: 5131 - protein, 15 aa, Artificial Sequence
  Synthetic polypeptide
MWQPRAMALAVRVVY

SEQ ID NO: 5132 - protein, 388 aa, Artificial Sequence
  Synthetic polypeptide
MRTRPRPRLRRTENFLTAVHHGKKEEKAAVERRRLHVLKALKKLRIEADEAPVVAVLGSGGGLRAHIACLGVLSEMKEQGLLDAVTYLAGVSGSTWAISSLYTNDGDMEALEADLKHRFTRQEWDLAKSLQKTIQAARSENYSLTDFWAYMVISKQTRELPESHLSNMKKPVEEGTLPYPIFAAIDNDLQPSWQEARAPETWFEFTPHHAGFSALGAFVSITHFGSKFKKGRLVRTHPERDLTFLRGLWGSALGNTEVIREYIFDQLRNLTLKGLWRRAVANAKSIGHLIFARLLRLQESSQGEHPPPEDEGGEPEHTWLTEMLENWTRTSLEKQEQPHEDPERKGSLSNLMDFVKKTGICASKWEWGTTHNFLYKHDLLSLCTVDSP

SEQ ID NO: 5133 - protein, 378 aa, Artificial Sequence
  Synthetic polypeptide
MGSSEVSIIPGLQKEEKAAVERRRLHVLKALKKLRIEADEAPVVAVLGSGGGLRAHIACLGVLSEMKEQGLLDAVTYLAGVSGSTWAISSLYTNDGDMEALEADLKHRFTRQEWDLAKSLQKTIQAARSENYSLTDFWAYMVISKQTRELPESHLSNMKKPVEEGTLPYPIFAAIDNDLQPSWQEARAPETWFEFTPHHAGFSALGAFVSITHFGSKFKKGRLVRTHPERDLTFLRGLWGSALGNTEVIREYIFDQLRNLTLKGLWRRAVANAKSIGHLIFARLLRLQESSQGEHPPPEDEGGEPEHTWLTEMLENWTRTSLEKQEQPHEDPERKGSLSNLMDFVKKTGICASKWEWGTTHNFLYKHDLLSLCTVDSP

SEQ ID NO: 5134 - protein, 130 aa, Artificial Sequence
  Synthetic polypeptide
GSALGNTEVIREYIFGLWRRAVANAKSIGHLIFARLLRLQESSQGEHPPPEDEGGEPEHTWLTEMLENWTRTSLEKQEQPHEDPERKGSLSNLMDFVKKTGICASKWEWGTTHNFLYKHDLLSLCTVDSP

SEQ ID NO: 5135 - protein, 17 aa, Artificial Sequence
  Synthetic polypeptide
DARELDQDLPGKAGAAP

SEQ ID NO: 5136 - protein, 194 aa, Artificial Sequence
  Synthetic polypeptide
LPYPIFAAIDNDLQPSWQEARAPETWFEFTPHHAGFSALGAFVSITHFGSKFKKGRLVRTHPERDLTFLRDQLRNLTLKGLWRRAVANAKSIGHLIFARLLRLQESSQGEHPPPEDEGGEPEHTWLTEMLENWTRTSLEKQEQPHEDPERKGSLSNLMDFVKKTGICASKWEWGTTHNFLYKHDLLSLCTVDSP

SEQ ID NO: 5137 - protein, 17 aa, Artificial Sequence
  Synthetic polypeptide
DARELDQDLPGKAGAAP

SEQ ID NO: 5138 - protein, 384 aa, Artificial Sequence
  Synthetic polypeptide
MRTRPRPRLRRTENFLTAVHHGKKEEKAAVERRRLHVLKALKKLRIEADEAPVVAVLGSGGGLRAHIACLGVLSEMKEQGLLDAVTYLAGVSGSTWAISSLYTNDGDMEALEADLKHRFTRQEWDLAKSLQKTIQAARSENYSLTDFWAYMVISKQTRELPESHLSNMKKPVEEGTLPYPIFAAIDNDLQPSWQEARAPETWFEFTPHHAGFSALGAFVSITHFGSKFKKGRLVRTHPERDLTFLRGLWGSALGNTEVIREYIFDQLRNLTLKGLWRRAVANAKSIGHLIFARLLRLQESSQGEHPPPEDEGGEPEHTWLTEMLENWTRTSLEKQEQPHEDPERKGSLSNLMDFVKKTGICASKWEWGTTHNFLYKHEFDSFHQ

SEQ ID NO: 5139 - protein, 374 aa, Artificial Sequence
  Synthetic polypeptide
MGSSEVSIIPGLQKEEKAAVERRRLHVLKALKKLRIEADEAPVVAVLGSGGGLRAHIACLGVLSEMKEQGLLDAVTYLAGVSGSTWAISSLYTNDGDMEALEADLKHRFTRQEWDLAKSLQKTIQAARSENYSLTDFWAYMVISKQTRELPESHLSNMKKPVEEGTLPYPIFAAIDNDLQPSWQEARAPETWFEFTPHHAGFSALGAFVSITHFGSKFKKGRLVRTHPERDLTFLRGLWGSALGNTEVIREYIFDQLRNLTLKGLWRRAVANAKSIGHLIFARLLRLQESSQGEHPPPEDEGGEPEHTWLTEMLENWTRTSLEKQEQPHEDPERKGSLSNLMDFVKKTGICASKWEWGTTHNFLYKHEFDSFHQ

SEQ ID NO: 5140 - protein, 126 aa, Artificial Sequence
  Synthetic polypeptide
GSALGNTEVIREYIFGLWRRAVANAKSIGHLIFARLLRLQESSQGEHPPPEDEGGEPEHTWLTEMLENWTRTSLEKQEQPHEDPERKGSLSNLMDFVKKTGICASKWEWGTTHNFLYKHEFDSFHQ

SEQ ID NO: 5141 - protein, 190 aa, Artificial Sequence
  Synthetic polypeptide
LPYPIFAAIDNDLQPSWQEARAPETWFEFTPHHAGFSALGAFVSITHFGSKFKKGRLVRTHPERDLTFLRDQLRNLTLKGLWRRAVANAKSIGHLIFARLLRLQESSQGEHPPPEDEGGEPEHTWLTEMLENWTRTSLEKQEQPHEDPERKGSLSNLMDFVKKTGICASKWEWGTTHNFLYKHEFDSFHQ

SEQ ID NO: 5142 - protein, 445 aa, Artificial Sequence
  Synthetic polypeptide
MQRSIMSFFHPKKEGKAKKPEKEASNSSRETEPPPKAALKEWNGVVSESDSPVKRPGRKAARVLGSEGEEEDEALSPAKGQKPALDCSQVSPPRPATSPENNASLSDTSPMDSSPSGIPKRRTARKQLPKRTIQEVLEEQSEDEDREAKRKKEEEEEETPKESLTEAEVATEKEGEDGDQPTTPPKPLKTSKAETPTESVSEPEVATKQELQEEEEQTKPPRRAPKTLSSFFTPRKPAVKKEVKEEEPGAPGKEGAAEGPLDPSGYNPAKNNYHPVEDACWKPGQKVPYLAVARTFEKIEEVSARLRMVETLSNLLRSVVALSPPDLLPVLYLSLNHLGPPQQGLELGVGDGVLLKAVAQATGRQLESVRAEAAEKGDVGLVAENSRSTQRLMLPPPPLTASGVFSKFRDIARLTGSASTAKKIDIIKGLFVACRHSEARFIARL

SEQ ID NO: 5143 - protein, 377 aa, Artificial Sequence
  Synthetic polypeptide
MQRSIMSFFHPKKEGKAKKPEKEASNSSRETEPPPKAALKEWNGVVSESDSPVKRPGRKAARVLGSEGEEEDEALSPAKGQKPALDCSQVSPPRPATSPENNASLSDTSPMDSSPSGIPKRRTEAETPTESVSEPEVATKQELQEEEEQTKPPRRAPKTLSSFFTPRKPAVKKEVKEEEPGAPGKEGAAEGPLDPSGYNPAKNNYHPVEDACWKPGQKVPYLAVARTFEKIEEVSARLRMVETLSNLLRSVVALSPPDLLPVLYLSLNHLGPPQQGLELGVGDGVLLKAVAQATGRQLESVRAEAAEKGDVGLVAENSRSTQRLMLPPPPLTASGVFSKFRDIARLTGSASTAKKIDIIKGLFVACRHSEARFIARL

SEQ ID NO: 5144 - protein, 444 aa, Artificial Sequence
  Synthetic polypeptide
MQRSIMSFFHPKKEGKAKKPEKEASNSSRETEPPPKAALKEWNGVVSESDSPVKRPGRKAARVLGSEGEEEDEALSPAKGQKPALDCSQVSPPRPATSPENNASLSDTSPMDSSPSGIPKRRTARKQLPKRTIQEVLEEQSEDEDREAKRKKEEEEETPKESLTEAEVATEKEGEDGDQPTTPPKPLKTSKAETPTESVSEPEVATKQELQEEEEQTKPPRRAPKTLSSFFTPRKPAVKKEVKEEEPGAPGKEGAAEGPLDPSGYNPAKNNYHPVEDACWKPGQKVPYLAVARTFEKIEEVSARLRMVETLSNLLRSVVALSPPDLLPVLYLSLNHLGPPQQGLELGVGDGVLLKAVAQATGRQLESVRAEAAEKGDVGLVAENSRSTQRLMLPPPPLTASGVFSKFRDIARLTGSASTAKKIDIIKGLFVACRHSEARFIARL

SEQ ID NO: 5145 - protein, 414 aa, Artificial Sequence
  Synthetic polypeptide
MQRSIMAALKEWNGVVSESDSPVKRPGRKAARVLGSEGEEEDEALSPAKGQKPALDCSQVSPPRPATSPENNASLSDTSPMDSSPSGIPKRRTARKQLPKRTIQEVLEEQSEDEDREAKRKKEEEEETPKESLTEAEVATEKEGEDGDQPTTPPKPLKTSKAETPTESVSEPEVATKQELQEEEEQTKPPRRAPKTLSSFFTPRKPAVKKEVKEEEPGAPGKEGAAEGPLDPSGYNPAKNNYHPVEDACWKPGQKVPYLAVARTFEKIEEVSARLRMVETLSNLLRSVVALSPPDLLPVLYLSLNHLGPPQQGLELGVGDGVLLKAVAQATGRQLESVRAEAAEKGDVGLVAENSRSTQRLMLPPPPLTASGVFSKFRDIARLTGSASTAKKIDIIKGLFVACRHSEARFIARL

SEQ ID NO: 5146 - protein, 175 aa, Artificial Sequence
  Synthetic polypeptide
MQRSIMSFFHPKKEGKAKKPEKEASNSSRETEPPPKAALKEWNGVVSESDSPVKRPGRKAARVLGSEGEEEDEALSPAKGQKPALDCSQVSPPRPATSPENNASLSDTSPMDSSPSGIPKRRTARKQLPKRTIQEVLEEQSEDEDREAKRKKEEEGAVAHACTPSSLGGRSGWIT

SEQ ID NO: 5147 - protein, 145 aa, Artificial Sequence
  Synthetic polypeptide
MQRSIMAALKEWNGVVSESDSPVKRPGRKAARVLGSEGEEEDEALSPAKGQKPALDCSQVSPPRPATSPENNASLSDTSPMDSSPSGIPKRRTARKQLPKRTIQEVLEEQSEDEDREAKRKKEEEGAVAHACTPSSLGGRSGWIT

SEQ ID NO: 5148 - protein, 227 aa, Artificial Sequence
  Synthetic polypeptide
MERPEPPPGTAAGQEEQELRERAFFSWAEFSRFFDAWCQQRLALFFVKSSMHLARCRWASAPPLYTLIDVLKYSYVRLVCKDVRAPSRPAVGPPQPGCPAFIIVKLSPLRDRLVVTECQLTHSHPACPLEFAYYFRPGHLLANACLPVRTTNKISKQFVAPADVRRLLSYCKGRDHGVLDALHVLEGLFRTDPEAKVRWLTPVISALWEAEARGSLEPRSSRPAWPT

SEQ ID NO: 5149 - protein, 92 aa, Artificial Sequence
  Synthetic polypeptide
MEKKECPEKSSSSEEELPRRDSGSSRNIDASKLIRLQGSRKLLVDNSIRELQYTKTGIFFQAEACVTNDTYSADGSVHCCNLLWRVIWEYLS

SEQ ID NO: 5150 - protein, 62 aa, Artificial Sequence
  Synthetic polypeptide
MSLLLLVVSALHILILILLFVATLDKSWWTLPGKESLNLWLWWLVPVVPATQEAGVREFLEP

SEQ ID NO: 5151 - protein, 67 aa, Artificial Sequence
  Synthetic polypeptide
MDGPAEPQIPGLWDTYEDDISEISYLPKRNENAGSHKDRNNCGSFGSNSLTWKPPRCPLTEDWINTL

SEQ ID NO: 5152 - protein, 2 aa, Artificial Sequence
  Synthetic polypeptide
MK

SEQ ID NO: 5153 - protein, 1 aa, Artificial Sequence
  Synthetic polypeptide
M

SEQ ID NO: 5154 - protein, 13 aa, Artificial Sequence
  Synthetic polypeptide
MCLAVRWVHSNLI

SEQ ID NO: 5155 - protein, 17 aa, Artificial Sequence
  Synthetic polypeptide
MPLPQCLAVRWVHSNLI

SEQ ID NO: 5156 - protein, 153 aa, Artificial Sequence
  Synthetic polypeptide
MAPPPPPLAASTPLLHGEFGSYPARGPRFALTLTSQALHIQRLRPKPEARPRGGLVPLAEVSGCCTLRSRSPSDSAAYFCIYTYPRGRRGARRRATRTFRADGAATYEENRAEAQRWATALTCLLRGLPLPGDGATREAEAGESLEPGRQRLQ

SEQ ID NO: 5157 - protein, 189 aa, Artificial Sequence
  Synthetic polypeptide
MNGHLEAEEQQDQRPDQELTGSWGHGPRSTLVRAKAMAPPPPPLAASTPLLHGEFGSYPARGPRFALTLTSQALHIQRLRPKPEARPRGGLVPLAEVSGCCTLRSRSPSDSAAYFCIYTYPRGRRGARRRATRTFRADGAATYEENRAEAQRWATALTCLLRGLPLPGDGATREAEAGESLEPGRQRLQ

SEQ ID NO: 5158 - protein, 130 aa, Artificial Sequence
  Synthetic polypeptide
MNGHLEAEEQQDQALHIQRLRPKPEARPRGGLVPLAEVSGCCTLRSRSPSDSAAYFCIYTYPRGRRGARRRATRTFRADGAATYEENRAEAQRWATALTCLLRGLPLPGDGATREAEAGESLEPGRQRLQ

SEQ ID NO: 5159 - protein, 251 aa, Artificial Sequence
  Synthetic polypeptide
MIGCLHARVSGPLWDAGLCPASSRSAHTCLSLSVSDAPVSPATAPHCLLLSTAPAPPCPCHGVLNSHPFSPPFPQRPDQELTGSWGHGPRSTLVRAKAMAPPPPPLAASTPLLHGEFGSYPARGPRFALTLTSQALHIQRLRPKPEARPRGGLVPLAEVSGCCTLRSRSPSDSAAYFCIYTYPRGRRGARRRATRTFRADGAATYEENRAEAQRWATALTCLLRGLPLPGDGATREAEAGESLEPGRQRLQ

SEQ ID NO: 5160 - protein, 310 aa, Artificial Sequence
  Synthetic polypeptide
MTLAASSQRSQIIRSKFRSVLQLRIHRRNQEQISDPDPWISASDPPLAPALPSGTAPFLFSPGVLLPEPEYCPPWRSPKKESPKISQRWRESKPRGNLTYHQYMPPEPRQGSRADPQAEGSALGPPGPSLWEGTDSQQPHPRMKPSPLTPCPPGVPSPSPPPHKLELQTLKLEELTVSELRQQLRLRGLPVSGTKSMLLERMRGGAPPRERPKPRREDSPAGAPWPRLKPKALAAARRQGSVKPSAASHRPPLPRAADTPGTAPAPTPTPAPAAAPALTPSSGPGSAALTLEEELQEAIRRAQALQIKQW

SEQ ID NO: 5161 - protein, 207 aa, Artificial Sequence
  Synthetic polypeptide
MPPEPRQGSRADPQAEGSALGPPGPSLWEGTDSQQPHPRMKPSPLTPCPPGVPSPSPPPHKLELQTLKLEELTVSELRQQLRLRGLPVSGTKSMLLERMRGGAPPRERPKPRREDSPAGAPWPRLKPKALAAARRQGSVKPSAASHRPPLPRAADTPGTAPAPTPTPAPAAAPALTPSSGPGSAALTLEEELQEAIRRAQALQIKQW

SEQ ID NO: 5162 - protein, 142 aa, Artificial Sequence
  Synthetic polypeptide
MPPEPRQGSRADPQAEGSALGPPGPSLWEGTDSQQPHPRMKPSPLTPCPPGVPSPSPPPHKLELQTLKLEELTVKPSAASHRPPLPRAADTPGTAPAPTPTPAPAAAPALTPSSGPGSAALTLEEELQEAIRRAQALQIKQW

SEQ ID NO: 5163 - protein, 282 aa, Artificial Sequence
  Synthetic polypeptide
MLSGERKEGGSPRFGKLHLPVGLWINSPRKQLAKLGRRWPSAASVKSSSSDTGSRSSEPLPPPPPHVELRRVGAVKAAGGASGSRAKRISQLFRGSGTGTTGSSGAGGPGTPGGAQRWASEKKLPELAAGVAPEPPLATRATAPPGVLKIFGAGLASGANYKSVLATARSTARELVAEALERYGLAGSPGGGPGESSCVDAFALCDALGRPAAAGVGSGEWRAEHLRVLGDSERPLLVQELWRARPGWARRFELRGREEARRLEQEAFGAADSEAERGDACL

SEQ ID NO: 5164 - protein, 23 aa, Artificial Sequence
  Synthetic polypeptide
RPRGGAAPGAGGLRGRGQRSRAW

SEQ ID NO: 5165 - protein, 113 aa, Artificial Sequence
  Synthetic polypeptide
MPLNRTLSMSSLPGLEDWEDEFDLENAVLFEVAWEVANKVGGIYTVLQTKAKVTGDEWGDNYFLVGPYTEQGVRTQVELLEAPTPALKRTLDSMNSKGCKAGGQSKTPSLKIK

SEQ ID NO: 5166 - protein, 23 aa, Artificial Sequence
  Synthetic polypeptide
MATVYFTRATSQCKCSINYHLNI

SEQ ID NO: 5167 - protein, 38 aa, Artificial Sequence
  Synthetic polypeptide
MATVTATTKVPEIRDVTRIERIGPNRADDQEITIECTS

SEQ ID NO: 5168 - protein, 134 aa, Artificial Sequence
  Synthetic polypeptide
MTQFLPPNLLALFAPRDPIPYLPPLEKLPHEKHHNQPYCGIAPYIREFEDPRDAPPPTRAETREERMERKRREKIERRQQEVETELKMWDPHNDPNAQGDAFKTLFVARVNYDTTESKLRREFEVYGPIKRVLA

SEQ ID NO: 5169 - protein, 68 aa, Artificial Sequence
  Synthetic polypeptide
MERKRREKIERRQQEVETELKMWDPHNDPNAQGDAFKTLFVARVNYDTTESKLRREFEVYGPIKRVLA

SEQ ID NO: 5170 - protein, 44 aa, Artificial Sequence
  Synthetic polypeptide
MAATRAGPRAREIFTSLEYGPVPESHACALFGRPRQEDHSHLGV

SEQ ID NO: 5171 - protein, 25 aa, Artificial Sequence
  Synthetic polypeptide
MRTVWETEAGGSLAPRSLRPAWATW

SEQ ID NO: 5172 - protein, 37 aa, Artificial Sequence
  Synthetic polypeptide
STAYGRMHSRRISESSRCVRRPGTLETRSCALGGKDS

SEQ ID NO: 5173 - protein, 238 aa, Artificial Sequence
  Synthetic polypeptide
MAEAHQAVGFRPSLTSDGAEVELSAPVLQEIYLSGLRSWKRHLSRFWNDFLTGVFPASPLSWLFLFSAIQLAWFLQLDPSLGLMEKIKELLPDWGGQHHGLRGVLAAALFASCLWGALIFTLHVALRLLLSYHGWLLEPHGAMSSPTKTWLALVRIFSGRHPMLFSYQRSLPRQPVPSVQDTVRKYLESVRPILSDEDFDWTAVLAQEFLRLQASLLQWYLRLKSWWASNYVWWRTRL

SEQ ID NO: 5174 - protein, 100 aa, Artificial Sequence
  Synthetic polypeptide
MGEVEAPGRLWLESPPGGAPPIFLPSDGQALVLGRGPLTQVTDRKCSRTQVELVADPETRTVAVKQEAQVSMSQDCTTALQPGRQNKPISPGEKKKKKKK

SEQ ID NO: 5175 - protein, 584 aa, Artificial Sequence
  Synthetic polypeptide
MEGAGYRVVFEKGGVYLHTSAKKYQDRDSLIAGVIRVVEKDNDVLLHWAPVEEAGDSTQILFSKKDSSGGDSCASEEEPTFDPDYEPDWAVISTVRPQLCHSEPTRGAEPSCPQGSWAFSVSLGELKSIRRSKPGLSWAYLVLVTQAGGSLPALHFHRGGTRALLRVLSRYLLLASSPQDSRLYLVFPHDSSALSNSFHHLQLFDQDSSNVVSRFLQDPYSTTFSSFSRVTNFFRGALQPQPEGAASDLPPPPDDEPEPGFEVISCVELGPRPTVERGPPVTEEEWARHVGPEGRLQQVPELKNRIFSGGLSPSLRREAWKFLLGYLSWEGTAEEHKAHIRKKTDEYFRMKLQWKSVSPEQERRNSLLHGYRSLIERDVSRTDRTNKFYEGPENPGLGLLNDILLTYCMYHFDLGYVQGMSDLLSPILYVIQNEVDAFWCFCGFMELVQGNFEESQETMKRQLGRLLLLLRVLDPLLCDFLDSQDSGSLCFCFRWLLIWFKREFPFPDVLRLWEVLWTGLPGPNLHLLVACAILDMERDTLMLSGFGSNEILKRTSEPPEGQPGVSSLFPSTKHRVGARAEVVE

SEQ ID NO: 5176 - protein, 551 aa, Artificial Sequence
  Synthetic polypeptide
MEGAGYRDNDVLLHWAPVEEAGDSTQILFSKKDSSGGDSCASEEEPTFDPDYEPDWAVISTVRPQLCHSEPTRGAEPSCPQGSWAFSVSLGELKSIRRSKPGLSWAYLVLVTQAGGSLPALHFHRGGTRALLRVLSRYLLLASSPQDSRLYLVFPHDSSALSNSFHHLQLFDQDSSNVVSRFLQDPYSTTFSSFSRVTNFFRGALQPQPEGAASDLPPPPDDEPEPGFEVISCVELGPRPTVERGPPVTEEEWARHVGPEGRLQQVPELKNRIFSGGLSPSLRREAWKFLLGYLSWEGTAEEHKAHIRKKTDEYFRMKLQWKSVSPEQERRNSLLHGYRSLIERDVSRTDRTNKFYEGPENPGLGLLNDILLTYCMYHFDLGYVQGMSDLLSPILYVIQNEVDAFWCFCGFMELVQGNFEESQETMKRQLGRLLLLLRVLDPLLCDFLDSQDSGSLCFCFRWLLIWFKREFPFPDVLRLWEVLWTGLPGPNLHLLVACAILDMERDTLMLSGFGSNEILKRTSEPPEGQPGVSSLFPSTKHRVGARAEVVE

SEQ ID NO: 5177 - protein, 363 aa, Artificial Sequence
  Synthetic polypeptide
TTFSSFSRVTNFFRGALQPQPEGAASDLPPPPDDEPEPGFEVISCVELGPRPTVERGPPVTEEEWARHVGPEGRLQQVPELKNRIFSGGLSPSLRREAWKFLLGYLSWEGTAEEHKAHIRKKTDEYFRMKLQWKSVSPEQERRNSLLHGYRSLIERDVSRTDRTNKFYEGPENPGLGLLNDILLTYCMYHFDLGYVQGMSDLLSPILYVIQNEVDAFWCFCGFMELVQGNFEESQETMKRQLGRLLLLLRVLDPLLCDFLDSQDSGSLCFCFRWLLIWFKREFPFPDVLRLWEVLWTGLPGPNLHLLVACAILDMERDTLMLSGFGSNEILKRTSEPPEGQPGVSSLFPSTKHRVGARAEVVE

SEQ ID NO: 5178 - protein, 209 aa, Artificial Sequence
  Synthetic polypeptide
MAPLALHLLVLVPILLSLVASQDWKAERSQDPFEKCMQDPDYEQLLKVVTWGLNRTLKPQRVIVVGAGVAGLVAAKVLSDAGHKVTILEADNRIGGRIFTYRDQNTGWIGELGAMRMPSSHRILHKLCQGLGLNLTKFTQYDKNTWTEVHEVKLRNYVVEKVPEKLGYALRPQEKGHSPEDIYQMALNQELLLSPQELAPMSPPPGSLP

SEQ ID NO: 5179 - protein, 231 aa, Artificial Sequence
  Synthetic polypeptide
MPNDDFCPGLTIKAMGAERAPQRQPCTLHLLVLVPILLSLVASQDWKAERSQDPFEKCMQDPDYEQLLKVVTWGLNRTLKPQRVIVVGAGVAGLVAAKVLSDAGHKVTILEADNRIGGRIFTYRDQNTGWIGELGAMRMPSSHRILHKLCQGLGLNLTKFTQYDKNTWTEVHEVKLRNYVVEKVPEKLGYALRPQEKGHSPEDIYQMALNQELLLSPQELAPMSPPPGSLP

SEQ ID NO: 5180 - protein, 370 aa, Artificial Sequence
  Synthetic polypeptide
MISFCPDCGKSIQAAFKFCPYCGNSLPVEEHVGSQTFVNPHVSSFQGSKRGLNSSFETSPKKVKWSSTVTSPRLSLFSDGDSSESEDTLSSSERSKGSGSRPPTPKSSPQKTRKSPQVTRGSPQKTSCSPQKTRQSPQTLKRSRVTTSLEALPTGTVLTDKSGRQWKLKSFQTRDNQGILYEAAPTSTLTCDSGPQKQKFSLKLDAKDGRLFNEQNFFQRAAKPLQVNKWKKLYSTPLLAIPTCMGFGVHQDKYRFLVLPSLGRSLQSALDVSPKHVLSERSVLQVACRLLDALEFLHENEYVHGNVTAENIFVDPEDQSQVTLAGYGFAFRYCPSGKHVAYVEGSRSPHEGDLEFISMDLHKGCGSRTL

SEQ ID NO: 5181 - protein, 320 aa, Artificial Sequence
  Synthetic polypeptide
MISFCPDCGKSIQAAFKFCPYCGNSLPVEEHVGSQTFVNPHVSSFQGSGSRPPTPKSSPQKTRKSPQVTRGSPQKTSCSPQKTRQSPQTLKRSRVTTSLEALPTGTVLTDKSGRQWKLKSFQTRDNQGILYEAAPTSTLTCDSGPQKQKFSLKLDAKDGRLFNEQNFFQRAAKPLQVNKWKKLYSTPLLAIPTCMGFGVHQDKYRFLVLPSLGRSLQSALDVSPKHVLSERSVLQVACRLLDALEFLHENEYVHGNVTAENIFVDPEDQSQVTLAGYGFAFRYCPSGKHVAYVEGSRSPHEGDLEFISMDLHKGCGSRTL

SEQ ID NO: 5182 - protein, 139 aa, Artificial Sequence
  Synthetic polypeptide
MKLHPPPPSPVTQDHRSKSSHSNWFLVLPSLGRSLQSALDVSPKHVLSERSVLQVACRLLDALEFLHENEYVHGNVTAENIFVDPEDQSQVTLAGYGFAFRYCPSGKHVAYVEGSRSPHEGDLEFISMDLHKGCGSRTL

SEQ ID NO: 5183 - protein, 66 aa, Artificial Sequence
  Synthetic polypeptide
GNVTAENIFVDPEDQSQVTLAGYGFAFRYCPSGKHVAYVEGSRSPHEGDLEFISMDLHKGCGSRTL

SEQ ID NO: 5184 - protein, 862 aa, Artificial Sequence
  Synthetic polypeptide
MDGKRRPGPGPGVPPKRARGGLWDDDDAPRPSQFEEDLALMEEMEAEHRLQEQEEEELQSVLEGVADGQVPPSAIDPRWLRPTPPALDPQTEPLIFQQLEIDHYVGPAQPVPGGPPPSRGSVPVLRAFGVTDEGFSVCCHIHGFAPYFYTPAPPGFGPEHMGDLQRELNLAISRDSRGGRELTGPAVLAVELCSRESMFGYHGHGPSPFLRITVALPRLVAPARRLLEQGIRVAGLGTPSFAPYEANVDFEIRFMVDTDIVGCNWLELPAGKYALRLKEKATQCQLEADVLWSDVVSHPPEGPWQRIAPLRVLSFDIECAGRKGIFPEPERDPVIQICSLGLRWGEPEPFLRLALTLRPCAPILGAKVQSYEKEEDLLQAWSTFIRIMDPDVITGYNIQNFDLPYLISRAQTLKVQTFPFLGRVAGLCSNIRDSSFQSKQTGRRDTKVVSMVGRVQMDMLQVLLREYKLRSYTLNAVSFHFLGEQKEDVQHSIITDLQNGNDQTRRRLAVYCLKDAYLPLRLLERLMVLVNAVEMARVTGVPLSYLLSRGQQVKVVSQLLRQAMHEGLLMPVVKSEGGEDYTGATVIEPLKGYYDVPIATLDFSSLYPSIMMAHNLCYTTLLRPGTAQKLGLTEDQFIRTPTGDEFVKTSVRKGLLPQILENLLSARKRAKAELAKETDPLRRQVLDGRQLALKVSANSVYGFTGAQVGKLPCLEISQSVTGFGRQMIEKTKQLVESKYTVENGYSTSAKVVYGDTDSVMCRFGVSSVAEAMALGREAADWVSGHFPSPIRLEFEKVYFPYLLISKKRYAGLLFSSRPDAHDRMDCKGLEAVRRDNCPLVANLVTASLRRLLIDRCQAQLFL

SEQ ID NO: 5185 - protein, 888 aa, Artificial Sequence
  Synthetic polypeptide
MDGKRRPGPGPGVPPKRARGGLWDDDDAPRPSQFEEDLALMEEMEAEHRLQEQEEEELQSVLEGVADGQVPPSAIDPRWLRPTPPALDPQTEPLIFQQLEIDHYVGPAQPVPGGPPPSRGSVPVLRAFGVTDEGFSVCCHIHGFAPYFYTPAPPGFGPEHMGDLQRELNLAISRDSRGGRELTGPAVLAVELCSRESMFGYHGHGPSPFLRITVALPRLVAPARRLLEQGIRVAGLGTPSFAPYEANVDFEIRFMVDTDIVGCNWLELPAGKYALRLKEKATQCQLEADVLWSDVVSHPPEGPWQRIAPLRVLSFDIECAGRKGIFPEPERDPVIQICSLGLRWGEPEPFLRLALTLRPCAPILGAKVQSYEKEEDLLQAWSTFIRIMDPDVITGYNIQNFDLPYLISRAQTLKVQTFPFLGRVAGLCSNIRDSSFQSKQTGRRDTKVVSMVGRVQMDMLQVLLREYKLRSYTLNAVSFHFLGEQKEDVQHSIITDLQNGNDQTRRRLAVYCLKDAYLPLRLLERLMVLVNAVEMARVTGVPLSYLLSRGQQVKVVSQLLRQAMHEGLLMPVVKSEGGEDYTGATVIEPLKGVRPQDRAGAAWELLALTPGRGCSPPRYYDVPIATLDFSSLYPSIMMAHNLCYTTLLRPGTAQKLGLTEDQFIRTPTGDEFVKTSVRKGLLPQILENLLSARKRAKAELAKETDPLRRQVLDGRQLALKVSANSVYGFTGAQVGKLPCLEISQSVTGFGRQMIEKTKQLVESKYTVENGYSTSAKVVYGDTDSVMCRFGVSSVAEAMALGREAADWVSGHFPSPIRLEFEKVYFPYLLISKKRYAGLLFSSRPDAHDRMDCKGLEAVRRDNCPLVANLVTASLRRLLIDRCQAQLFL

SEQ ID NO: 5186 - protein, 10 aa, Artificial Sequence
  Synthetic polypeptide
LQHQCQGGVW

SEQ ID NO: 5187 - protein, 70 aa, Artificial Sequence
  Synthetic polypeptide
WSLRRSTSHTCLSARSATRACSSPPGPTPTTAWTARAWRPCAGTTAPSWPTWSLPHCAACSSTGVRPSSS

SEQ ID NO: 5188 - protein, 46 aa, Artificial Sequence
  Synthetic polypeptide
MAAASAGATRLLLLLLMAVAAPSRARGSGCRAGTGARGAGRGGSCL

SEQ ID NO: 5189 - protein, 439 aa, Artificial Sequence
  Synthetic polypeptide
MGSEDHGAQNPSCKIMTFRPTMEEFKDFNKYVAYIESQGAHRAGLAKIIPPKEWKPRQTYDDIDDVVIPAPIQQVVTGQSGLFTQYNIQKKAMTVGEYRRLANSEKYCTPRHQDFDDLERKYWKNLTFVSPIYGADISGSLYDDDVAQWNIGSLRTILDMVERECGTIIEGVNTPYLYFGMWKTTFAWHTEDMDLYSINYLHFGEPKSWYAIPPEHGKRLERLAIGFFPGSSQGCDAFLRHKMTLISPIILKKYGIPFSRITQEAGEFMITFPYGYHAGFNHGFNCAESTNFATLRWIDYGKVATQCTCRKDMVKISMDVFVRILQPERYELWKQGKDLTVLDHTRPTALTSPELSSWSASRASLKAKLLRRSHRKRSQPKKPKPEDPKFPGEGTAGAALLEEAGGSVKEEAGPEVDPEEEEEEPQPLPHGREAEGAEG

SEQ ID NO: 5190 - protein, 473 aa, Artificial Sequence
  Synthetic polypeptide
MGSEDHGAQNPSCKIMTFRPTMEEFKDFNKYVAYIESQGAHRAGLAKIIPPKEWKPRQTYDDIDDVVIPAPIQQVVTGQSGLFTQYNIQKKAMTVGEYRRLANSEKYCTPRHQDFDDLERKYWKNLTFVSPIYGADISGSLYDDDVAQWNIGSLRTILDMVERECGTIIEGVNTPYLYFGMWKTTFAWHTEDMDLYSINYLHFGEPKSWYAIPPEHGKRLERLAIGFFPGSSQGCDAFLRHKMTLISPIILKKYGIPFSRITQEAGEFMITFPYGYHAGFNHGFNCAESTNFATLRWIDYGKVATQCTCRKDMVKISMDVFVRILQPERYELWKQGKDLTVLDHTRPTALTSPELSSWSASRASLKAKLLRRQISLKENRHWRKTEEERKPSLERKKEQTKRPGLSSHRKRSQPKKPKPEDPKFPGEGTAGAALLEEAGGSVKEEAGPEVDPEEEEEEPQPLPHGREAEGAEG

SEQ ID NO: 5191 - protein, 66 aa, Artificial Sequence
  Synthetic polypeptide
LPTSPPCGGLTTAKWPLSARAGRTWSRSPWTCSCASCSPSATSCGSRARTSRCWTTRGPRRSPAPS

SEQ ID NO: 5192 - protein, 41 aa, Artificial Sequence
  Synthetic polypeptide
MATARPPWMWVLCALITALLLGVTAWATRAKLRLERKKEKK

SEQ ID NO: 5193 - protein, 55 aa, Artificial Sequence
  Synthetic polypeptide
MATARPPWMWVLCALITALLLGVTGGGCGEPRSRHCTPAWATRAKLRLERKKEKK

SEQ ID NO: 5194 - protein, 45 aa, Artificial Sequence
  Synthetic polypeptide
MATARPPWMWVLCALITALLLGVTAGVVARACNPSYSGDWGRKIA

SEQ ID NO: 5195 - protein, 480 aa, Artificial Sequence
  Synthetic polypeptide
MLLPLLLSSLLGGSQAMDGRFWIRVQESVMVPEGLCISVPCSFSYPRQDWTGSTPAYGYWFKAVTETTKGAPVATNHQSREVEMSTRGRFQLTGDPAKGNCSLVIRDAQMQDESQYFFRVERGSYVRYNFMNDGFFLKVTVLSFTPRPQDHNTDLTCHVDFSRKGVSAQRTVRLRVAYAPRDLVISISRDNTPALEPQPQGNVPYLEAQKGQFLRLLCAADSQPPATLSWVLQNRVLSSSHPWGPRPLGLELPGVKAGDSGRYTCRAENRLGSQQRALDLSVQYPPENLRVMVSQANRTVLENLGNGTSLPVLEGQSLCLVCVTHSSPPARLSWTQRGQVLSPSQPSDPGVLELPRVQVEHEGEFTCHARHPLGSQHVSLSLSVHYKKGLISTAFSNGAFLGIGITALLFLCLALIIMKILPKRRTQTETPRPRFSRHSTILDYINVVPTAGPLAQKRNQKATPNSPRTPLPPGHSGSRL

SEQ ID NO: 5196 - protein, 538 aa, Artificial Sequence
  Synthetic polypeptide
MLLPLLLSSLLGGSQAMDGRFWIRVQESVMVPEGLCISVPCSFSYPRQDWTGSTPAYGYWFKAVTETTKGAPVATNHQSREVEMSTRGRFQLTGDPAKGNCSLVIRDAQMQDESQYFFRVERGSYVRYNFMNDGFFLKVTALTQKPDVYIPETLEPGQPVTVICVFNWAFEECPPPSFSWTGAALSSQGTKPTTSHFSVLSFTPRPQDHNTDLTCHVDFSRKGVSAQRTVRLRVAYAPRDLVISISRDNTPALEPQPQGNVPYLEAQKGQFLRLLCAADSQPPATLSWVLQNRVLSSSHPWGPRPLGLELPGVKAGDSGRYTCRAENRLGSQQRALDLSVQYPPENLRVMVSQANRTVLENLGNGTSLPVLEGQSLCLVCVTHSSPPARLSWTQRGQVLSPSQPSDPGVLELPRVQVEHEGEFTCHARHPLGSQHVSLSLSVHYKKGLISTAFSNGAFLGIGITALLFLCLALIIMKILPKRRTQTETPRPRFSRHSTILDYINVVPTAGPLAQKRNQKATPNSPRTPLPPGHSGSRL

SEQ ID NO: 5197 - protein, 390 aa, Artificial Sequence
  Synthetic polypeptide
MLLPLLLSSLLGGSQAMDGRFWIRVQESVMVPEGLCISVPCSFSYPRQDWTGSTPAYGYWFKAVTETTKGAPVATNHQSREVEMSTRGRFQLTGDPAKGNCSLVIRDAQMQDESQYFFRVERGSYVRYNFMNDGFFLKVTVLSFTPRPQDHNTDLTCHVDFSRKGVSAQRTVRLRVAYAPRDLVISISRDNTPDPPENLRVMVSQANRTVLENLGNGTSLPVLEGQSLCLVCVTHSSPPARLSWTQRGQVLSPSQPSDPGVLELPRVQVEHEGEFTCHARHPLGSQHVSLSLSVHYKKGLISTAFSNGAFLGIGITALLFLCLALIIMKILPKRRTQTETPRPRFSRHSTILDYINVVPTAGPLAQKRNQKATPNSPRTPLPPGHSGSRL

SEQ ID NO: 5198 - protein, 633 aa, Artificial Sequence
  Synthetic polypeptide
MLLPLLLSSLLGGSQAMDGRFWIRVQESVMVPEGLCISVPCSFSYPRQDWTGSTPAYGYWFKAVTETTKGAPVATNHQSREVEMSTRGRFQLTGDPAKGNCSLVIRDAQMQDESQYFFRVERGSYVRYNFMNDGFFLKVTALTQKPDVYIPETLEPGQPVTVICVFNWAFEECPPPSFSWTGAALSSQGTKPTTSHFSVLSFTPRPQDHNTDLTCHVDFSRKGVSAQRTVRLRVAYAPRDLVISISRDNTPALEPQPQGNVPYLEAQKGQFLRLLCAADSQPPATLSWVLQNRVLSSSHPWGPRPLGLELPGVKAGDSGRYTCRAENRLGSQQRALDLSVQYPPENLRVMVSQANRTVLENLGNGTSLPVLEGQSLCLVCVTHSSPPARLSWTQRGQVLSPSQPSDPGVLELPRVQVEHEGEFTCHARHPLGSQHVSLSLSVHYSPKLLGPSCSWEAEGLHCSCSSQASPAPSLRWWLGEELLEGNSSQDSFEVTPSSAGPWANSSLSLHGGLSSGLRLRCEAWNVHGAQSGSILQLPDKKGLISTAFSNGAFLGIGITALLFLCLALIIMKILPKRRTQTETPRPRFSRHSTILDYINVVPTAGPLAQKRNQKATPNSPRTPLPPGHSGSRL

SEQ ID NO: 5199 - protein, 455 aa, Artificial Sequence
  Synthetic polypeptide
MLLPLLLSSLLGGSQAMDGRFWIRVQESVMVPEGLCISVPCSFSYPRQDWTGSTPAYGYWFKAVTETTKGAPVATNHQSREVEMSTRGRFQLTGDPAKGNCSLVIRDAQMQDESQYFFRVERGSYVRYNFMNDGFFLKVTALTQKTVRLRVAYAPRDLVISISRDNTPALEPQPQGNVPYLEAQKGQFLRLLCAADSQPPATLSWVLQNRVLSSSHPWGPRPLGLELPGVKAGDSGRYTCRAENRLGSQQRALDLSVQYPPENLRVMVSQANRTVLENLGNGTSLPVLEGQSLCLVCVTHSSPPARLSWTQRGQVLSPSQPSDPGVLELPRVQVEHEGEFTCHARHPLGSQHVSLSLSVHYKKGLISTAFSNGAFLGIGITALLFLCLALIIMKILPKRRTQTETPRPRFSRHSTILDYINVVPTAGPLAQKRNQKATPNSPRTPLPPGHSGSRL

SEQ ID NO: 5200 - protein, 448 aa, Artificial Sequence
  Synthetic polypeptide
MLLPLLLSSLLGGSQAMDGRFWIRVQESVMVPEGLCISVPCSFSYPRQDWTGSTPAYGYWFKAVTETTKGAPVATNHQSREVEMSTRGRFQLTGDPAKGNCSLVIRDAQMQDESQYFFRVERGSYVRYNFMNDGFFLKVTALTQKPDVYIPETLEPGQPVTVICVFNWAFEECPPPSFSWTGAALSSQGTKPTTSHFSVLSFTPRPQDHNTDLTCHVDFSRKGVSAQRTVRLRVAYAPRDLVISISRDNTPDPPENLRVMVSQANRTVLENLGNGTSLPVLEGQSLCLVCVTHSSPPARLSWTQRGQVLSPSQPSDPGVLELPRVQVEHEGEFTCHARHPLGSQHVSLSLSVHYKKGLISTAFSNGAFLGIGITALLFLCLALIIMKILPKRRTQTETPRPRFSRHSTILDYINVVPTAGPLAQKRNQKATPNSPRTPLPPGHSGSRL

SEQ ID NO: 5201 - protein, 490 aa, Artificial Sequence
  Synthetic polypeptide
MLLPLLLSSLLGGSQAMDGRFWIRVQESVMVPEGLCISVPCSFSYPRQDWTGSTPAYGYWFKAVTETTKGAPVATNHQSREVEMSTRGRFQLTGDPAKGNCSLVIRDAQMQDESQYFFRVERGSYVRYNFMNDGFFLKVTGTKPTTSHFSVLSFTPRPQDHNTDLTCHVDFSRKGVSAQRTVRLRVAYAPRDLVISISRDNTPALEPQPQGNVPYLEAQKGQFLRLLCAADSQPPATLSWVLQNRVLSSSHPWGPRPLGLELPGVKAGDSGRYTCRAENRLGSQQRALDLSVQYPPENLRVMVSQANRTVLENLGNGTSLPVLEGQSLCLVCVTHSSPPARLSWTQRGQVLSPSQPSDPGVLELPRVQVEHEGEFTCHARHPLGSQHVSLSLSVHYKKGLISTAFSNGAFLGIGITALLFLCLALIIMKILPKRRTQTETPRPRFSRHSTILDYINVVPTAGPLAQKRNQKATPNSPRTPLPPGHSGSRL

SEQ ID NO: 5202 - protein, 575 aa, Artificial Sequence
  Synthetic polypeptide
MLLPLLLSSLLGGSQAMDGRFWIRVQESVMVPEGLCISVPCSFSYPRQDWTGSTPAYGYWFKAVTETTKGAPVATNHQSREVEMSTRGRFQLTGDPAKGNCSLVIRDAQMQDESQYFFRVERGSYVRYNFMNDGFFLKVTVLSFTPRPQDHNTDLTCHVDFSRKGVSAQRTVRLRVAYAPRDLVISISRDNTPALEPQPQGNVPYLEAQKGQFLRLLCAADSQPPATLSWVLQNRVLSSSHPWGPRPLGLELPGVKAGDSGRYTCRAENRLGSQQRALDLSVQYPPENLRVMVSQANRTVLENLGNGTSLPVLEGQSLCLVCVTHSSPPARLSWTQRGQVLSPSQPSDPGVLELPRVQVEHEGEFTCHARHPLGSQHVSLSLSVHYSPKLLGPSCSWEAEGLHCSCSSQASPAPSLRWWLGEELLEGNSSQDSFEVTPSSAGPWANSSLSLHGGLSSGLRLRCEAWNVHGAQSGSILQLPDKKGLISTAFSNGAFLGIGITALLFLCLALIIMKILPKRRTQTETPRPRFSRHSTILDYINVVPTAGPLAQKRNQKATPNSPRTPLPPGHSGSRL

SEQ ID NO: 5203 - protein, 466 aa, Artificial Sequence
  Synthetic polypeptide
MLLPLLLSSLLGGSQAMDGRFWIRVQESVMVPEGLCISVPCSFSYPRQDWTGSTPAYGYWFKAVTETTKGAPVATNHQSREVEMSTRGRFQLTGDPAKGNCSLVIRDAQMQDESQYFFRVERGSYVRYNFMNDGFFLKVTVLSFTPRPQDHNTDLTCHVDFSRKGVSAQRTVRLRVAYAPRDLVISISRDNTPALEPQPQGNVPYLEAQKGQFLRLLCAADSQPPATLSWVLQNRVLSSSHPWGPRPLGLELPGVKAGDSGRYTCRAENRLGSQQRALDLSVQYPPENLRVMVSQANRTVLENLGNGTSLPVLEGQSLCLVCVTHSSPPARLSWTQRGQVLSPSQPSDPGVLELPRVQVEHEGEFTCHARHPLGSQHVSLSLSVHYKKGLISTAFSNGAFLGIGITALLFLCLALIIMKILPKRRTQTETPRPRFSRHSTILDYINVVPTAGPLMECKLSKARAGT

SEQ ID NO: 5204 - protein, 524 aa, Artificial Sequence
  Synthetic polypeptide
MLLPLLLSSLLGGSQAMDGRFWIRVQESVMVPEGLCISVPCSFSYPRQDWTGSTPAYGYWFKAVTETTKGAPVATNHQSREVEMSTRGRFQLTGDPAKGNCSLVIRDAQMQDESQYFFRVERGSYVRYNFMNDGFFLKVTALTQKPDVYIPETLEPGQPVTVICVFNWAFEECPPPSFSWTGAALSSQGTKPTTSHFSVLSFTPRPQDHNTDLTCHVDFSRKGVSAQRTVRLRVAYAPRDLVISISRDNTPALEPQPQGNVPYLEAQKGQFLRLLCAADSQPPATLSWVLQNRVLSSSHPWGPRPLGLELPGVKAGDSGRYTCRAENRLGSQQRALDLSVQYPPENLRVMVSQANRTVLENLGNGTSLPVLEGQSLCLVCVTHSSPPARLSWTQRGQVLSPSQPSDPGVLELPRVQVEHEGEFTCHARHPLGSQHVSLSLSVHYKKGLISTAFSNGAFLGIGITALLFLCLALIIMKILPKRRTQTETPRPRFSRHSTILDYINVVPTAGPLMECKLSKARAGT

SEQ ID NO: 5205 - protein, 376 aa, Artificial Sequence
  Synthetic polypeptide
MLLPLLLSSLLGGSQAMDGRFWIRVQESVMVPEGLCISVPCSFSYPRQDWTGSTPAYGYWFKAVTETTKGAPVATNHQSREVEMSTRGRFQLTGDPAKGNCSLVIRDAQMQDESQYFFRVERGSYVRYNFMNDGFFLKVTVLSFTPRPQDHNTDLTCHVDFSRKGVSAQRTVRLRVAYAPRDLVISISRDNTPDPPENLRVMVSQANRTVLENLGNGTSLPVLEGQSLCLVCVTHSSPPARLSWTQRGQVLSPSQPSDPGVLELPRVQVEHEGEFTCHARHPLGSQHVSLSLSVHYKKGLISTAFSNGAFLGIGITALLFLCLALIIMKILPKRRTQTETPRPRFSRHSTILDYINVVPTAGPLMECKLSKARAGT

SEQ ID NO: 5206 - protein, 619 aa, Artificial Sequence
  Synthetic polypeptide
MLLPLLLSSLLGGSQAMDGRFWIRVQESVMVPEGLCISVPCSFSYPRQDWTGSTPAYGYWFKAVTETTKGAPVATNHQSREVEMSTRGRFQLTGDPAKGNCSLVIRDAQMQDESQYFFRVERGSYVRYNFMNDGFFLKVTALTQKPDVYIPETLEPGQPVTVICVFNWAFEECPPPSFSWTGAALSSQGTKPTTSHFSVLSFTPRPQDHNTDLTCHVDFSRKGVSAQRTVRLRVAYAPRDLVISISRDNTPALEPQPQGNVPYLEAQKGQFLRLLCAADSQPPATLSWVLQNRVLSSSHPWGPRPLGLELPGVKAGDSGRYTCRAENRLGSQQRALDLSVQYPPENLRVMVSQANRTVLENLGNGTSLPVLEGQSLCLVCVTHSSPPARLSWTQRGQVLSPSQPSDPGVLELPRVQVEHEGEFTCHARHPLGSQHVSLSLSVHYSPKLLGPSCSWEAEGLHCSCSSQASPAPSLRWWLGEELLEGNSSQDSFEVTPSSAGPWANSSLSLHGGLSSGLRLRCEAWNVHGAQSGSILQLPDKKGLISTAFSNGAFLGIGITALLFLCLALIIMKILPKRRTQTETPRPRFSRHSTILDYINVVPTAGPLMECKLSKARAGT

SEQ ID NO: 5207 - protein, 441 aa, Artificial Sequence
  Synthetic polypeptide
MLLPLLLSSLLGGSQAMDGRFWIRVQESVMVPEGLCISVPCSFSYPRQDWTGSTPAYGYWFKAVTETTKGAPVATNHQSREVEMSTRGRFQLTGDPAKGNCSLVIRDAQMQDESQYFFRVERGSYVRYNFMNDGFFLKVTALTQKTVRLRVAYAPRDLVISISRDNTPALEPQPQGNVPYLEAQKGQFLRLLCAADSQPPATLSWVLQNRVLSSSHPWGPRPLGLELPGVKAGDSGRYTCRAENRLGSQQRALDLSVQYPPENLRVMVSQANRTVLENLGNGTSLPVLEGQSLCLVCVTHSSPPARLSWTQRGQVLSPSQPSDPGVLELPRVQVEHEGEFTCHARHPLGSQHVSLSLSVHYKKGLISTAFSNGAFLGIGITALLFLCLALIIMKILPKRRTQTETPRPRFSRHSTILDYINVVPTAGPLMECKLSKARAGT

SEQ ID NO: 5208 - protein, 434 aa, Artificial Sequence
  Synthetic polypeptide
MLLPLLLSSLLGGSQAMDGRFWIRVQESVMVPEGLCISVPCSFSYPRQDWTGSTPAYGYWFKAVTETTKGAPVATNHQSREVEMSTRGRFQLTGDPAKGNCSLVIRDAQMQDESQYFFRVERGSYVRYNFMNDGFFLKVTALTQKPDVYIPETLEPGQPVTVICVFNWAFEECPPPSFSWTGAALSSQGTKPTTSHFSVLSFTPRPQDHNTDLTCHVDFSRKGVSAQRTVRLRVAYAPRDLVISISRDNTPDPPENLRVMVSQANRTVLENLGNGTSLPVLEGQSLCLVCVTHSSPPARLSWTQRGQVLSPSQPSDPGVLELPRVQVEHEGEFTCHARHPLGSQHVSLSLSVHYKKGLISTAFSNGAFLGIGITALLFLCLALIIMKILPKRRTQTETPRPRFSRHSTILDYINVVPTAGPLMECKLSKARAGT

SEQ ID NO: 5209 - protein, 476 aa, Artificial Sequence
  Synthetic polypeptide
MLLPLLLSSLLGGSQAMDGRFWIRVQESVMVPEGLCISVPCSFSYPRQDWTGSTPAYGYWFKAVTETTKGAPVATNHQSREVEMSTRGRFQLTGDPAKGNCSLVIRDAQMQDESQYFFRVERGSYVRYNFMNDGFFLKVTGTKPTTSHFSVLSFTPRPQDHNTDLTCHVDFSRKGVSAQRTVRLRVAYAPRDLVISISRDNTPALEPQPQGNVPYLEAQKGQFLRLLCAADSQPPATLSWVLQNRVLSSSHPWGPRPLGLELPGVKAGDSGRYTCRAENRLGSQQRALDLSVQYPPENLRVMVSQANRTVLENLGNGTSLPVLEGQSLCLVCVTHSSPPARLSWTQRGQVLSPSQPSDPGVLELPRVQVEHEGEFTCHARHPLGSQHVSLSLSVHYKKGLISTAFSNGAFLGIGITALLFLCLALIIMKILPKRRTQTETPRPRFSRHSTILDYINVVPTAGPLMECKLSKARAGT

SEQ ID NO: 5210 - protein, 561 aa, Artificial Sequence
  Synthetic polypeptide
MLLPLLLSSLLGGSQAMDGRFWIRVQESVMVPEGLCISVPCSFSYPRQDWTGSTPAYGYWFKAVTETTKGAPVATNHQSREVEMSTRGRFQLTGDPAKGNCSLVIRDAQMQDESQYFFRVERGSYVRYNFMNDGFFLKVTVLSFTPRPQDHNTDLTCHVDFSRKGVSAQRTVRLRVAYAPRDLVISISRDNTPALEPQPQGNVPYLEAQKGQFLRLLCAADSQPPATLSWVLQNRVLSSSHPWGPRPLGLELPGVKAGDSGRYTCRAENRLGSQQRALDLSVQYPPENLRVMVSQANRTVLENLGNGTSLPVLEGQSLCLVCVTHSSPPARLSWTQRGQVLSPSQPSDPGVLELPRVQVEHEGEFTCHARHPLGSQHVSLSLSVHYSPKLLGPSCSWEAEGLHCSCSSQASPAPSLRWWLGEELLEGNSSQDSFEVTPSSAGPWANSSLSLHGGLSSGLRLRCEAWNVHGAQSGSILQLPDKKGLISTAFSNGAFLGIGITALLFLCLALIIMKILPKRRTQTETPRPRFSRHSTILDYINVVPTAGPLMECKLSKARAGT

SEQ ID NO: 5211 - protein, 455 aa, Artificial Sequence
  Synthetic polypeptide
MLLPLLLSSLLGGSQAMDGRFWIRVQESVMVPEGLCISVPCSFSYPRQDWTGSTPAYGYWFKAVTETTKGAPVATNHQSREVEMSTRGRFQLTGDPAKGNCSLVIRDAQMQDESQYFFRVERGSYVRYNFMNDGFFLKVTVLSFTPRPQDHNTDLTCHVDFSRKGVSAQRTVRLRVAYAPRDLVISISRDNTPALEPQPQGNVPYLEAQKGQFLRLLCAADSQPPATLSWVLQNRVLSSSHPWGPRPLGLELPGVKAGDSGRYTCRAENRLGSQQRALDLSVQYPPENLRVMVSQANRTVLENLGNGTSLPVLEGQSLCLVCVTHSSPPARLSWTQRGQVLSPSQPSDPGVLELPRVQVEHEGEFTCHARHPLGSQHVSLSLSVHYKKGLISTAFSNGAFLGIGITALLFLCLALIIMKILPKRRTQTETPRPRFSRHSTILDYINVVPTAGPLL

SEQ ID NO: 5212 - protein, 513 aa, Artificial Sequence
  Synthetic polypeptide
MLLPLLLSSLLGGSQAMDGRFWIRVQESVMVPEGLCISVPCSFSYPRQDWTGSTPAYGYWFKAVTETTKGAPVATNHQSREVEMSTRGRFQLTGDPAKGNCSLVIRDAQMQDESQYFFRVERGSYVRYNFMNDGFFLKVTALTQKPDVYIPETLEPGQPVTVICVFNWAFEECPPPSFSWTGAALSSQGTKPTTSHFSVLSFTPRPQDHNTDLTCHVDFSRKGVSAQRTVRLRVAYAPRDLVISISRDNTPALEPQPQGNVPYLEAQKGQFLRLLCAADSQPPATLSWVLQNRVLSSSHPWGPRPLGLELPGVKAGDSGRYTCRAENRLGSQQRALDLSVQYPPENLRVMVSQANRTVLENLGNGTSLPVLEGQSLCLVCVTHSSPPARLSWTQRGQVLSPSQPSDPGVLELPRVQVEHEGEFTCHARHPLGSQHVSLSLSVHYKKGLISTAFSNGAFLGIGITALLFLCLALIIMKILPKRRTQTETPRPRFSRHSTILDYINVVPTAGPLL

SEQ ID NO: 5213 - protein, 365 aa, Artificial Sequence
  Synthetic polypeptide
MLLPLLLSSLLGGSQAMDGRFWIRVQESVMVPEGLCISVPCSFSYPRQDWTGSTPAYGYWFKAVTETTKGAPVATNHQSREVEMSTRGRFQLTGDPAKGNCSLVIRDAQMQDESQYFFRVERGSYVRYNFMNDGFFLKVTVLSFTPRPQDHNTDLTCHVDFSRKGVSAQRTVRLRVAYAPRDLVISISRDNTPDPPENLRVMVSQANRTVLENLGNGTSLPVLEGQSLCLVCVTHSSPPARLSWTQRGQVLSPSQPSDPGVLELPRVQVEHEGEFTCHARHPLGSQHVSLSLSVHYKKGLISTAFSNGAFLGIGITALLFLCLALIIMKILPKRRTQTETPRPRFSRHSTILDYINVVPTAGPLL

SEQ ID NO: 5214 - protein, 608 aa, Artificial Sequence
  Synthetic polypeptide
MLLPLLLSSLLGGSQAMDGRFWIRVQESVMVPEGLCISVPCSFSYPRQDWTGSTPAYGYWFKAVTETTKGAPVATNHQSREVEMSTRGRFQLTGDPAKGNCSLVIRDAQMQDESQYFFRVERGSYVRYNFMNDGFFLKVTALTQKPDVYIPETLEPGQPVTVICVFNWAFEECPPPSFSWTGAALSSQGTKPTTSHFSVLSFTPRPQDHNTDLTCHVDFSRKGVSAQRTVRLRVAYAPRDLVISISRDNTPALEPQPQGNVPYLEAQKGQFLRLLCAADSQPPATLSWVLQNRVLSSSHPWGPRPLGLELPGVKAGDSGRYTCRAENRLGSQQRALDLSVQYPPENLRVMVSQANRTVLENLGNGTSLPVLEGQSLCLVCVTHSSPPARLSWTQRGQVLSPSQPSDPGVLELPRVQVEHEGEFTCHARHPLGSQHVSLSLSVHYSPKLLGPSCSWEAEGLHCSCSSQASPAPSLRWWLGEELLEGNSSQDSFEVTPSSAGPWANSSLSLHGGLSSGLRLRCEAWNVHGAQSGSILQLPDKKGLISTAFSNGAFLGIGITALLFLCLALIIMKILPKRRTQTETPRPRFSRHSTILDYINVVPTAGPLL

SEQ ID NO: 5215 - protein, 430 aa, Artificial Sequence
  Synthetic polypeptide
MLLPLLLSSLLGGSQAMDGRFWIRVQESVMVPEGLCISVPCSFSYPRQDWTGSTPAYGYWFKAVTETTKGAPVATNHQSREVEMSTRGRFQLTGDPAKGNCSLVIRDAQMQDESQYFFRVERGSYVRYNFMNDGFFLKVTALTQKTVRLRVAYAPRDLVISISRDNTPALEPQPQGNVPYLEAQKGQFLRLLCAADSQPPATLSWVLQNRVLSSSHPWGPRPLGLELPGVKAGDSGRYTCRAENRLGSQQRALDLSVQYPPENLRVMVSQANRTVLENLGNGTSLPVLEGQSLCLVCVTHSSPPARLSWTQRGQVLSPSQPSDPGVLELPRVQVEHEGEFTCHARHPLGSQHVSLSLSVHYKKGLISTAFSNGAFLGIGITALLFLCLALIIMKILPKRRTQTETPRPRFSRHSTILDYINVVPTAGPLL

SEQ ID NO: 5216 - protein, 423 aa, Artificial Sequence
  Synthetic polypeptide
MLLPLLLSSLLGGSQAMDGRFWIRVQESVMVPEGLCISVPCSFSYPRQDWTGSTPAYGYWFKAVTETTKGAPVATNHQSREVEMSTRGRFQLTGDPAKGNCSLVIRDAQMQDESQYFFRVERGSYVRYNFMNDGFFLKVTALTQKPDVYIPETLEPGQPVTVICVFNWAFEECPPPSFSWTGAALSSQGTKPTTSHFSVLSFTPRPQDHNTDLTCHVDFSRKGVSAQRTVRLRVAYAPRDLVISISRDNTPDPPENLRVMVSQANRTVLENLGNGTSLPVLEGQSLCLVCVTHSSPPARLSWTQRGQVLSPSQPSDPGVLELPRVQVEHEGEFTCHARHPLGSQHVSLSLSVHYKKGLISTAFSNGAFLGIGITALLFLCLALIIMKILPKRRTQTETPRPRFSRHSTILDYINVVPTAGPLL

SEQ ID NO: 5217 - protein, 465 aa, Artificial Sequence
  Synthetic polypeptide
MLLPLLLSSLLGGSQAMDGRFWIRVQESVMVPEGLCISVPCSFSYPRQDWTGSTPAYGYWFKAVTETTKGAPVATNHQSREVEMSTRGRFQLTGDPAKGNCSLVIRDAQMQDESQYFFRVERGSYVRYNFMNDGFFLKVTGTKPTTSHFSVLSFTPRPQDHNTDLTCHVDFSRKGVSAQRTVRLRVAYAPRDLVISISRDNTPALEPQPQGNVPYLEAQKGQFLRLLCAADSQPPATLSWVLQNRVLSSSHPWGPRPLGLELPGVKAGDSGRYTCRAENRLGSQQRALDLSVQYPPENLRVMVSQANRTVLENLGNGTSLPVLEGQSLCLVCVTHSSPPARLSWTQRGQVLSPSQPSDPGVLELPRVQVEHEGEFTCHARHPLGSQHVSLSLSVHYKKGLISTAFSNGAFLGIGITALLFLCLALIIMKILPKRRTQTETPRPRFSRHSTILDYINVVPTAGPLL

SEQ ID NO: 5218 - protein, 550 aa, Artificial Sequence
  Synthetic polypeptide
MLLPLLLSSLLGGSQAMDGRFWIRVQESVMVPEGLCISVPCSFSYPRQDWTGSTPAYGYWFKAVTETTKGAPVATNHQSREVEMSTRGRFQLTGDPAKGNCSLVIRDAQMQDESQYFFRVERGSYVRYNFMNDGFFLKVTVLSFTPRPQDHNTDLTCHVDFSRKGVSAQRTVRLRVAYAPRDLVISISRDNTPALEPQPQGNVPYLEAQKGQFLRLLCAADSQPPATLSWVLQNRVLSSSHPWGPRPLGLELPGVKAGDSGRYTCRAENRLGSQQRALDLSVQYPPENLRVMVSQANRTVLENLGNGTSLPVLEGQSLCLVCVTHSSPPARLSWTQRGQVLSPSQPSDPGVLELPRVQVEHEGEFTCHARHPLGSQHVSLSLSVHYSPKLLGPSCSWEAEGLHCSCSSQASPAPSLRWWLGEELLEGNSSQDSFEVTPSSAGPWANSSLSLHGGLSSGLRLRCEAWNVHGAQSGSILQLPDKKGLISTAFSNGAFLGIGITALLFLCLALIIMKILPKRRTQTETPRPRFSRHSTILDYINVVPTAGPLL

SEQ ID NO: 5219 - protein, 76 aa, Artificial Sequence
  Synthetic polypeptide
MKNATIVMSVRREQGSSSGEGSLSFEDVAVGFTREEWQFLDQSQKVLYKEVMLENYINLVSIDLHYRWKTAASEPQ

SEQ ID NO: 5220 - protein, 29 aa, Artificial Sequence
  Synthetic polypeptide
MIKSQELVSELNLIVGHLLGVRELENWLM

SEQ ID NO: 5221 - protein, 11 aa, Artificial Sequence
  Synthetic polypeptide
RTVTQEKNSKQ

SEQ ID NO: 5222 - protein, 827 aa, Artificial Sequence
  Synthetic polypeptide
MALPQGSLTFRDVAVEFSQEEWKCLDPVQKALYRDVMLENYRNLGFLGLCLPDLNIISMLEQGKEPWTVVSQVKIARNPNCGECMKGVITGISPKCVIKELPPIQNSNTGEKFQAVMLEGHESYDTENFYFREIRKNLQEVDFQWKDGEINYKEGPMTHKNNLTGQRVRHSQGDVENKHMENQLILRFQSGLGELQKFQTAEKIYGCNQIERTVNNCFLASPLQRIFPGVQTNISRKYGNDFLQLSLPTQDEKTHIREKPYIGNECGKAFRVSSSLINHQMIHTTEKPYRCNESGKAFHRGSLLTVHQIVHTRGKPYQCDVCGRIFRQNSDLVNHRRSHTGDKPYICNECGKSFSKSSHLAVHQRIHTGEKPYKCNRCGKCFSQSSSLATHQTVHTGDKPYKCNECGKTFKRNSSLTAHHIIHAGKKPYTCDVCGKVFYQNSQLVRHQIIHTGETPYKCNECGKVFFQRSRLAGHRRIHTGEKPYKCNECGKVFSQHSHLAVHQRVHTGEKPYKCNECGKAFNWGSLLTVHQRIHTGEKPYKCNVCGKVFNYGGYLSVHMRCHTGEKPLHCNKCGMVFTYYSCLARHQRMHTGEKPYKCNVCGKVFIDSGNLSIHRRSHTGEKPFQCNECGKVFSYYSCLARHRKIHTGEKPYKCNDCGKAYTQRSSLTKHLVIHTGENPYHCNEFGEAFIQSSKLARYHRNPTGEKPHKCSECGRTFSHKTSLVYHQRRHTGEMPYKCIECGKVFNSTTTLARHRRIHTGEKPYKCNECGKVFRYRSGLARHWSIHTGEKPYKCNECGKAFRVRSILLNHQMMHTGEKPYKCFPRG

SEQ ID NO: 5223 - protein, 711 aa, Artificial Sequence
  Synthetic polypeptide
MLEGHESYDTENFYFREIRKNLQEVDFQWKDGEINYKEGPMTHKNNLTGQRVRHSQGDVENKHMENQLILRFQSGLGELQKFQTAEKIYGCNQIERTVNNCFLASPLQRIFPGVQTNISRKYGNDFLQLSLPTQDEKTHIREKPYIGNECGKAFRVSSSLINHQMIHTTEKPYRCNESGKAFHRGSLLTVHQIVHTRGKPYQCDVCGRIFRQNSDLVNHRRSHTGDKPYICNECGKSFSKSSHLAVHQRIHTGEKPYKCNRCGKCFSQSSSLATHQTVHTGDKPYKCNECGKTFKRNSSLTAHHIIHAGKKPYTCDVCGKVFYQNSQLVRHQIIHTGETPYKCNECGKVFFQRSRLAGHRRIHTGEKPYKCNECGKVFSQHSHLAVHQRVHTGEKPYKCNECGKAFNWGSLLTVHQRIHTGEKPYKCNVCGKVFNYGGYLSVHMRCHTGEKPLHCNKCGMVFTYYSCLARHQRMHTGEKPYKCNVCGKVFIDSGNLSIHRRSHTGEKPFQCNECGKVFSYYSCLARHRKIHTGEKPYKCNDCGKAYTQRSSLTKHLVIHTGENPYHCNEFGEAFIQSSKLARYHRNPTGEKPHKCSECGRTFSHKTSLVYHQRRHTGEMPYKCIECGKVFNSTTTLARHRRIHTGEKPYKCNECGKVFRYRSGLARHWSIHTGEKPYKCNECGKAFRVRSILLNHQMMHTGEKPYKCFPRG

SEQ ID NO: 5224 - protein, 403 aa, Artificial Sequence
  Synthetic polypeptide
MLEGHESYDTENFYFREIRKNLQEVDFQWKDGEINYKEGPMTHKNNLTGQRVRHSQGDVENKHMENQLILRFQSGLGELQKFQTAEKIYGCNQIERTVNNCFLASPLQRIFPGVQTNISRKYGNDFLQLSLPTQDEKTHIREKPYIGNECGKAFRVSSSLINHQMIHTTEKPYRCNESGKAFHRGSLLTVHQIVHTRGKPYQCDVCGRIFRQNSDLVNHRRSHTGDKPYICNECGKSFSKSSHLAVHQRIHTGEKPYKCNRCGKCFSQSSSLATHQTVHTGDKPYKCNECGKTFKRNSSLTAHHIIHAGKKPYTCDVCGKVFYQNSQLVRHQIIHTGETPYKCNECGKVFRYRSGLARHWSIHTGEKPYKCNECGKAFRVRSILLNHQMMHTGEKPYKCFPRG

SEQ ID NO: 5225 - protein, 799 aa, Artificial Sequence
  Synthetic polypeptide
MALPQGSLTFRDVAVEFSQEEWKCLDPVQKALYRDVMLENYRNLGFLGLCLPDLNIISMLEQGKEPWTVVSQVKIARNPNCGECMKGVITGISPKCVIKELPPIQNSNTGEKFQAVMLEGHESYDTENFYFREIRKNLQEVDFQWKDGEINYKEGPMTHKNNLTGQRVRHSQGDVENKHMENQLILRFQSGLGELQKFQTAEKIYGCNQIERTVNNCFLASPLQRIFPGVQTNISRKYGNDFLQLSLPTQDEKTHIREKPYIGNECGKAFRVSSSLINHQMIHTTEKPYRCNESGKAFHRGSLLTVHQIVHTRGKPYQCDVCGRIFRQNSDLVNHRRSHTGDKPYICNECGKSFSKSSHLAVHQRIHTGEKPYKCNRCGKCFSQSSSLATHQTVHTGDKPYKCNECGKTFKRNSSLTAHHIIHAGKKPYTCDVCGKVFYQNSQLVRHQIIHTGETPYKCNECGKVFFQRSRLAGHRRIHTGEKPYKCNECGKVFSQHSHLAVHQRVHTGEKPYKCNECGKAFNWGSLLTVHQRIHTGEKPYKCNVCGKVFNYGGYLSVHMRCHTGEKPLHCNKCGMVFTYYSCLARHQRMHTGEKPYKCNVCGKVFIDSGNLSIHRRSHTGEKPFQCNECGKVFSYYSCLARHRKIHTGEKPYKCNDCGKAYTQRSSLTKHLVIHTGENPYHCNEFGEAFIQSSKLARYHRNPTGEKPHKCSECGRTFSHKTSLVYHQRRHTGEMPYKCIECGKVFNSTTTLARHRRIHTGEKPYKCNECGKVFRYRSGLARHWSIHTGEKPYKCFPRG

SEQ ID NO: 5226 - protein, 683 aa, Artificial Sequence
  Synthetic polypeptide
MLEGHESYDTENFYFREIRKNLQEVDFQWKDGEINYKEGPMTHKNNLTGQRVRHSQGDVENKHMENQLILRFQSGLGELQKFQTAEKIYGCNQIERTVNNCFLASPLQRIFPGVQTNISRKYGNDFLQLSLPTQDEKTHIREKPYIGNECGKAFRVSSSLINHQMIHTTEKPYRCNESGKAFHRGSLLTVHQIVHTRGKPYQCDVCGRIFRQNSDLVNHRRSHTGDKPYICNECGKSFSKSSHLAVHQRIHTGEKPYKCNRCGKCFSQSSSLATHQTVHTGDKPYKCNECGKTFKRNSSLTAHHIIHAGKKPYTCDVCGKVFYQNSQLVRHQIIHTGETPYKCNECGKVFFQRSRLAGHRRIHTGEKPYKCNECGKVFSQHSHLAVHQRVHTGEKPYKCNECGKAFNWGSLLTVHQRIHTGEKPYKCNVCGKVFNYGGYLSVHMRCHTGEKPLHCNKCGMVFTYYSCLARHQRMHTGEKPYKCNVCGKVFIDSGNLSIHRRSHTGEKPFQCNECGKVFSYYSCLARHRKIHTGEKPYKCNDCGKAYTQRSSLTKHLVIHTGENPYHCNEFGEAFIQSSKLARYHRNPTGEKPHKCSECGRTFSHKTSLVYHQRRHTGEMPYKCIECGKVFNSTTTLARHRRIHTGEKPYKCNECGKVFRYRSGLARHWSIHTGEKPYKCFPRG

SEQ ID NO: 5227 - protein, 11 aa, Artificial Sequence
  Synthetic polypeptide
RTVTQEKNSKQ

SEQ ID NO: 5228 - protein, 375 aa, Artificial Sequence
  Synthetic polypeptide
MLEGHESYDTENFYFREIRKNLQEVDFQWKDGEINYKEGPMTHKNNLTGQRVRHSQGDVENKHMENQLILRFQSGLGELQKFQTAEKIYGCNQIERTVNNCFLASPLQRIFPGVQTNISRKYGNDFLQLSLPTQDEKTHIREKPYIGNECGKAFRVSSSLINHQMIHTTEKPYRCNESGKAFHRGSLLTVHQIVHTRGKPYQCDVCGRIFRQNSDLVNHRRSHTGDKPYICNECGKSFSKSSHLAVHQRIHTGEKPYKCNRCGKCFSQSSSLATHQTVHTGDKPYKCNECGKTFKRNSSLTAHHIIHAGKKPYTCDVCGKVFYQNSQLVRHQIIHTGETPYKCNECGKVFRYRSGLARHWSIHTGEKPYKCFPRG

SEQ ID NO: 5229 - protein, 17 aa, Artificial Sequence
  Synthetic polypeptide
MATQCYHRRSPLRQFSA

SEQ ID NO: 5230 - protein, 830 aa, Artificial Sequence
  Synthetic polypeptide
MALTQGPLTFRDVAIEFSQEEWKSLDPVQKALYWDVMLENYRNLVFLGILPKCMTKELPPIGNSNTGEKCQTVTLERHECYDVENFYLREIQKNLQDLEFQWKDGEINYKEVPMTYKNNLNGKRGQHSQEDVENKCIENQLTLSFQSRLTELQKFQTEGKIYECNQSEKTVNNSSLVSPLQRILPSVQTNISKKYENEFLQLSLPTQLEKTHIREKPYMCKGCGKAFRVSSSLINHQMVHTTEKPYKCNECGKAFHRGSLLTIHQIVHTRGKPYQCGVCGKIFRQNSDLVNHRRSHTGEKPYKCNECGKSFSQSYNLAIHQRIHTGEKPYKCNECGKTFKQGSCLTTHQIIHTGEKPYQCDICGKVFRQNSNLVNHQRIHTGEKPYKCNICGKSFSQSSNLATHQTVHSGNKPYKCDECGKTFKRSSSLTTHQIIHTGEKPYTCDVCDKVFSQRSQLARHQRSHTGEKPYKCNECGKVFSQTSHLVGHRRIHTGEKPYKCDKCGKAFKQGSLLTRHKIIHTREKRYQCGECGKVFSENSCLVRHLRIHTGEQPYKCNVCGKVFNYSGNLSIHKRIHTGEKPFQCNECGTVFRNYSCLARHLRIHTGQKPYKCNVCGKVFNDSGNLSNHKRIHTGEKPFQCNECGKVFSYYSCLARHRKIHTGEKPYKCNDCGKAYTQRSSLTKHLIIHTGEKPYNCNEFGGAFIQSSKLARYHRNPTGEKPHKCSHCGRTFSHITGLTYHQRRHTGEMPYKCIECGQVFNSTSNLARHRRIHTGEKPYKCNECGKVFRHQSTLARHRSIHTGEKPYVCNECGKAFRVSREGEQTSAPCFL

SEQ ID NO: 5231 - protein, 242 aa, Artificial Sequence
  Synthetic polypeptide
MALTQGPLTFRDVAIEFSQEEWKSLDPVQKALYWDVMLENYRNLVFLGILPKCMTKELPPIGNSNTGEKCQTVTLERHECYDVENFYLREIQKNLQDLEFQWKDGEINYKEVPMTYKNNLNGKRGQHSQEDVENKCIENQLTLSFQSRLTELQKFQTEGKIYECNQSEKTVNNSSLVSPLQRILPSVQTNISKKYENEFLQLSLPTQLEKTHIREKPYMCKGCGKAFRVSREGEQTSAPCFL

SEQ ID NO: 5232 - protein, 131 aa, Artificial Sequence
  Synthetic polypeptide
MVLPQGLLTFRDVAIEFSQEEWKCLDPAQRTLYRDVMLENYRNLVSLGHDLILFFLFPRWSFCSCCPGWSAVAQSRLTTTSASRVQAILPPQPQKLLELQGLPLMPSRSWTVLLPSWLTATSLPDSPASAC

SEQ ID NO: 5233 - protein, 92 aa, Artificial Sequence
  Synthetic polypeptide
MVLPQGLLTFRDVAIEFSQEEWKCLDPAQRTLYRDVMLENYRNLVSLDGVFALVAQAGVQWHNLGSPPPPPPGFKRFSRLSLRSCWNYRVSL

SEQ ID NO: 5234 - protein, 76 aa, Artificial Sequence
  Synthetic polypeptide
MALSQGLLTFRDVAIEFSQEEWKCLDPAQRTLYRDVMLENYRNLVSLGAVADTCYSSTGMPRWADRLRSGVQNQPG

SEQ ID NO: 5235 - protein, 63 aa, Artificial Sequence
  Synthetic polypeptide
MLEQGKEPFTLESQVQIAGNPDGWEWIKAVITGTWMKLETIILSKLSQGQKTKHRMFSLTGGN

SEQ ID NO: 5236 - protein, 121 aa, Artificial Sequence
  Synthetic polypeptide
MALTQGQVTFRDVAIEFSQEEWTCLDPAQRTLYRDVMLENYRNLASLGISCFDLSIISMLEQGKEPFTLESQVQIAGNPDGWEWIKAVITGTWMKLETIILSKLSQGQKTKHRMFSLTGGN

SEQ ID NO: 5237 - protein, 122 aa, Artificial Sequence
  Synthetic polypeptide
MALTQGQVTFRDVAIEFSQEEWTCLDPAQRTLYRDVMLENYRNLASLAGISCFDLSIISMLEQGKEPFTLESQVQIAGNPDGWEWIKAVITGTWMKLETIILSKLSQGQKTKHRMFSLTGGN

SEQ ID NO: 5238 - protein, 85 aa, Artificial Sequence
  Synthetic polypeptide
MLENYRNLASLGISCFDLSIISMLEQGKEPFTLESQVQIAGNPDGWEWIKAVITGTWMKLETIILSKLSQGQKTKHRMFSLTGGN

SEQ ID NO: 5239 - protein, 74 aa, Artificial Sequence
  Synthetic polypeptide
MALSQGLFTFKDVAIEFSQEEWECLDPAQRALYRDVMLENYRNLLSLDEDNIPPEDENKPGVVAGTCSSSYSGG

SEQ ID NO: 5240 - protein, 87 aa, Artificial Sequence
  Synthetic polypeptide
MALSQGLFTFKDVAIEFSQEEWECLDPAQRALYRDVMLENYRNLLSLDEDNIPPEDGLGVVAHACNPSTLGGRGRRITRSGDQDDPG

SEQ ID NO: 5241 - protein, 17 aa, Artificial Sequence
  Synthetic polypeptide
MALSQCGPGKPKGWTLL

SEQ ID NO: 5242 - protein, 66 aa, Artificial Sequence
  Synthetic polypeptide
MALPQGLLTFRDVAIEFSQEEWKCLDPAQRTLYRDVMLENYRNLVSLGTQEAEAGEWLEPKRWRLQ

SEQ ID NO: 5243 - protein, 30 aa, Artificial Sequence
  Synthetic polypeptide
MLENYRNLVSLGTQEAEAGEWLEPKRWRLQ

SEQ ID NO: 5244 - protein, 66 aa, Artificial Sequence; identical to SEQ ID NO: 5242
  Synthetic polypeptide

SEQ ID NO: 5245 - protein, 188 aa, Artificial Sequence
  Synthetic polypeptide
MESLKRWNEERGLWCEKGVQVLLTTVGAFAAFGLMTIAISTDYWLYTRALICNTTNLTAGGDDGTPHRGGGGASEKKDPGGLTHSGLWRICCLEGLKRGVCVKINHFPEDTDYDHDSAEYLLRVVRASSIFPILSAILLLLGGVCVAASRVYKSKRNIILGAGILFVAAGWATEQDPVSENRKKESQR

SEQ ID NO: 5246 - protein, 30 aa, Artificial Sequence
  Synthetic polypeptide
MTAEFLSLLCLACATEQDYISKKKKKKERR

SEQ ID NO: 5247 - protein, 26 aa, Artificial Sequence
  Synthetic polypeptide
MALVLILQLLTLWPLCHTDITPSGEY

SEQ ID NO: 5248 - protein, 13 aa, Artificial Sequence
  Synthetic polypeptide
MALVLILQLLTLY

SEQ ID NO: 5249 - protein, 454 aa, Artificial Sequence
  Synthetic polypeptide
MTPIVTVLICLGLSLGPRTHVQTGTIPKPTLWAEPDSVITQGSPVTLSCQGSLEAQEYRLYREKKSASWITRIRPELVKNGQFHIPSITWEHTGRYGCQYYSRARWSELSDPLVLVMTGAYPKPTLSAQPSPVVTSGGRVTLQCESQVAFGGFILCKEGEEEHPQCLNSQPHARGSSRAIFSVGPVSPNRRWSHRCYGYDLNSPYVWSSPSDLLELLVPGVSKKPSLSVQPGPVVAPGESLTLQCVSDVGYDRFVLYKEGERDLRQLPGRQPQAGLSQANFTLGPVSRSYGGQYRCYGAHNLSSECSAPSDPLDILITGQIRGTPFISVQPGPTVASGENVTLLCQSWRQFHTFLLTKAGAADAPLRLRSIHEYPKYQAEFPMSPVTSAHAGTYRCYGSLNSDPYLLSHPSEPLELVVSGPSMGSSPPPTGPISTPGPEDQPLTPTGSDPQSGA

SEQ ID NO: 5250 - protein, 16 aa, Artificial Sequence
  Synthetic polypeptide
PSSQCSQAPQWPQERT

SEQ ID NO: 5251 - protein, 455 aa, Artificial Sequence
  Synthetic polypeptide
MTPIVTVLICLGLSLGPRTHVQTGTIPKPTLWAEPDSVITQGSPVTLSCQGSLEAQEYRLYREKKSASWITRIRPELVKNGQFHIPSITWEHTGRYGCQYYSRARWSELSDPLVLVMTGAYPKPTLSAQPSPVVTSGGRVTLQCESQVAFGGFILCKEGEEEHPQCLNSQPHARGSSRAIFSVGPVSPNRRWSHRCYGYDLNSPYVWSSPSDLLELLVPGVSKKPSLSVQPGPVVAPGESLTLQCVSDVGYDRFVLYKEGERDLRQLPGRQPQAGLSQANFTLGPVSRSYGGQYRCYGAHNLSSECSAPSDPLDILITGQIRGTPFISVQPGPTVASGENVTLLCQSWRQFHTFLLTKAGAADAPLRLRSIHEYPKYQAEFPMSPVTSAHAGTYRCYGSLNSDPYLLSHPSEPLELVVSGPSMGSSPPPTGPISTPAGPEDQPLTPTGSDPQSGA

SEQ ID NO: 5252 - protein, 339 aa, Artificial Sequence
  Synthetic polypeptide
MTGAYPKPTLSAQPSPVVTSGGRVTLQCESQVAFGGFILCKEGEEEHPQCLNSQPHARGSSRAIFSVGPVSPNRRWSHRCYGYDLNSPYVWSSPSDLLELLVPGVSKKPSLSVQPGPVVAPGESLTLQCVSDVGYDRFVLYKEGERDLRQLPGRQPQAGLSQANFTLGPVSRSYGGQYRCYGAHNLSSECSAPSDPLDILITGQIRGTPFISVQPGPTVASGENVTLLCQSWRQFHTFLLTKAGAADAPLRLRSIHEYPKYQAEFPMSPVTSAHAGTYRCYGSLNSDPYLLSHPSEPLELVVSGPSMGSSPPPTGPISTPAGPEDQPLTPTGSDPQSGA

SEQ ID NO: 5253 - protein, 10 aa, Artificial Sequence
  Synthetic polypeptide
MEREMGKKCV

SEQ ID NO: 5254 - protein, 6 aa, Artificial Sequence
  Synthetic polypeptide
MEREMA

SEQ ID NO: 5255 - protein, 113 aa, Artificial Sequence
  Synthetic polypeptide
MAANVGDQRSTDWSSQYSMVAGAGRENGMETPMHENPEWEKARQALASISKSGAAGGSAKSSSNGPVASAQYVSQAEASALQQQQYYQWYQQYNYAYPYSYYYPMCLEELALS

SEQ ID NO: 5256 - protein, 456 aa, Artificial Sequence
  Synthetic polypeptide
MTPILTVLICLGLSLGPRTHVQAGHLPKPTLWAEPGSVITQGSPVTLRCQGGQETQEYRLYREKKTALWITRIPQELVKKGQFPIPSITWEHAGRYRCYYGSDTAGRSESSDPLELVVTGAYIKPTLSAQPSPVVNSGGNVILQCDSQVAFDGFSLCKEGEDEHPQCLNSQPHARGSSRAIFSVGPVSPSRRWWYRCYAYDSNSPYEWSLPSDLLELLVLGVSKKPSLSVQPGPIVAPEETLTLQCGSDAGYNRFVLYKDGERDFLQLAGAQPQAGLSQANFTLGPVSRSYGGQYRCYGAHNLSSEWSAPSDPLDILIAGQFYDRVSLSVQPGPTVASGENVTLLCQSQGWMQTFLLTKEGAADDPWRLRSTYQSQKYQAEFPMGPVTSAHAGTYRCYGSQSSKPYLLTHPSDPLELVVSGPSGGPSSPTTGPTSTSGPEDQPLTPTGSDPQSVGA

SEQ ID NO: 5257 - protein, 440 aa, Artificial Sequence
  Synthetic polypeptide
MTPILTVLICLGLSLGPRTHVQAGHLPKPTLWAEPGSVITQGSPVTLRCQGGQETQEYRLYREKKTALWITRIPQELVKKGQFPIPSITWEHAGRYRCYYGSDTAGRSESSDPLELVVTGAYIKPTLSAQPSPVVNSGGNVILQCDSQVAFDGFSLCKEGEDEHPQCLNSQPHARGSSRAIFSVGPVSPSRRWWYRCYAYDSNSPYEWSLPSDLLELLVLGVSKKPSLSVQPGPIVAPEETLTLQCGSDAGYNRFVLYKDGERDFLQLAGAQPQAGLSQANFTLGPVSRSYGGQYRCYGAHNLSSEWSAPSDPLDILIAGQFYDRVSLSVQPGPTVASGENVTLLCQSQGWMQTFLLTKEGAADDPWRLRSTYQSQKYQAEFPMGPVTSAHAGTYRCYGSQSSKPYLLTHPSDPLELVVSAGPEDQPLTPTGSDPQSVGA

SEQ ID NO: 5258 - protein, 457 aa, Artificial Sequence
  Synthetic polypeptide
MTPILTVLICLGLSLGPRTHVQAGHLPKPTLWAEPGSVITQGSPVTLRCQGGQETQEYRLYREKKTALWITRIPQELVKKGQFPIPSITWEHAGRYRCYYGSDTAGRSESSDPLELVVTGAYIKPTLSAQPSPVVNSGGNVILQCDSQVAFDGFSLCKEGEDEHPQCLNSQPHARGSSRAIFSVGPVSPSRRWWYRCYAYDSNSPYEWSLPSDLLELLVLGVSKKPSLSVQPGPIVAPEETLTLQCGSDAGYNRFVLYKDGERDFLQLAGAQPQAGLSQANFTLGPVSRSYGGQYRCYGAHNLSSEWSAPSDPLDILIAGQFYDRVSLSVQPGPTVASGENVTLLCQSQGWMQTFLLTKEGAADDPWRLRSTYQSQKYQAEFPMGPVTSAHAGTYRCYGSQSSKPYLLTHPSDPLELVVSGPSGGPSSPTTGPTSTSAGPEDQPLTPTGSDPQSVGA

SEQ ID NO: 5259 - protein, 493 aa, Artificial Sequence
  Synthetic polypeptide
MRRRTQPPIGHTLCVSLSCQHRGLIHPQSRAVGGDAMTPILTVLICLGLSLGPRTHVQAGHLPKPTLWAEPGSVITQGSPVTLRCQGGQETQEYRLYREKKTALWITRIPQELVKKGQFPIPSITWEHAGRYRCYYGSDTAGRSESSDPLELVVTGAYIKPTLSAQPSPVVNSGGNVILQCDSQVAFDGFSLCKEGEDEHPQCLNSQPHARGSSRAIFSVGPVSPSRRWWYRCYAYDSNSPYEWSLPSDLLELLVLGVSKKPSLSVQPGPIVAPEETLTLQCGSDAGYNRFVLYKDGERDFLQLAGAQPQAGLSQANFTLGPVSRSYGGQYRCYGAHNLSSEWSAPSDPLDILIAGQFYDRVSLSVQPGPTVASGENVTLLCQSQGWMQTFLLTKEGAADDPWRLRSTYQSQKYQAEFPMGPVTSAHAGTYRCYGSQSSKPYLLTHPSDPLELVVSGPSGGPSSPTTGPTSTSAGPEDQPLTPTGSDPQSVGA

SEQ ID NO: 5260 - protein, 455 aa, Artificial Sequence
  Synthetic polypeptide
MTPILTVLICLGLSLGPRTHVQAGHLPKPTLWAEPGSVITQGSPVTLRCQGGQETQEYRLYREKKTALWITRIPQELVKKGQFPIPSITWEHAGRYRCYYGSDTAGRSESSDPLELVVTGAYIKPTLSAQPSPVVNSGGNVILQCDSQVAFDGFSLCKEGEDEHPQCLNSQPHARGSSRAIFSVGPVSPSRRWWYRCYAYDSNSPYEWSLPSDLLELLVLGVSKKPSLSVQPGPIVAPEETLTLQCGSDAGYNRFVLYKDGERDFLQLAGAQPQAGLSQANFTLGPVSRSYGGQYRCYGAHNLSSEWSAPSDPLDILIAGQFYDRVSLSVQPGPTVASGENVTLLCQSQGWMQTFLLTKEGAADDPWRLRSTYQSQKYQAEFPMGPVTSAHAGTYRCYGSQSSKPYLLTHPSDPLELVVSGPSGGPSSPTTGPTSTSGPEDQPLTPTGSDPQSGA

SEQ ID NO: 5261 - protein, 439 aa, Artificial Sequence
  Synthetic polypeptide
MTPILTVLICLGLSLGPRTHVQAGHLPKPTLWAEPGSVITQGSPVTLRCQGGQETQEYRLYREKKTALWITRIPQELVKKGQFPIPSITWEHAGRYRCYYGSDTAGRSESSDPLELVVTGAYIKPTLSAQPSPVVNSGGNVILQCDSQVAFDGFSLCKEGEDEHPQCLNSQPHARGSSRAIFSVGPVSPSRRWWYRCYAYDSNSPYEWSLPSDLLELLVLGVSKKPSLSVQPGPIVAPEETLTLQCGSDAGYNRFVLYKDGERDFLQLAGAQPQAGLSQANFTLGPVSRSYGGQYRCYGAHNLSSEWSAPSDPLDILIAGQFYDRVSLSVQPGPTVASGENVTLLCQSQGWMQTFLLTKEGAADDPWRLRSTYQSQKYQAEFPMGPVTSAHAGTYRCYGSQSSKPYLLTHPSDPLELVVSAGPEDQPLTPTGSDPQSGA

SEQ ID NO: 5262 - protein, 456 aa, Artificial Sequence
  Synthetic polypeptide
MTPILTVLICLGLSLGPRTHVQAGHLPKPTLWAEPGSVITQGSPVTLRCQGGQETQEYRLYREKKTALWITRIPQELVKKGQFPIPSITWEHAGRYRCYYGSDTAGRSESSDPLELVVTGAYIKPTLSAQPSPVVNSGGNVILQCDSQVAFDGFSLCKEGEDEHPQCLNSQPHARGSSRAIFSVGPVSPSRRWWYRCYAYDSNSPYEWSLPSDLLELLVLGVSKKPSLSVQPGPIVAPEETLTLQCGSDAGYNRFVLYKDGERDFLQLAGAQPQAGLSQANFTLGPVSRSYGGQYRCYGAHNLSSEWSAPSDPLDILIAGQFYDRVSLSVQPGPTVASGENVTLLCQSQGWMQTFLLTKEGAADDPWRLRSTYQSQKYQAEFPMGPVTSAHAGTYRCYGSQSSKPYLLTHPSDPLELVVSGPSGGPSSPTTGPTSTSAGPEDQPLTPTGSDPQSGA

SEQ ID NO: 5263 - protein, 492 aa, Artificial Sequence
  Synthetic polypeptide
MRRRTQPPIGHTLCVSLSCQHRGLIHPQSRAVGGDAMTPILTVLICLGLSLGPRTHVQAGHLPKPTLWAEPGSVITQGSPVTLRCQGGQETQEYRLYREKKTALWITRIPQELVKKGQFPIPSITWEHAGRYRCYYGSDTAGRSESSDPLELVVTGAYIKPTLSAQPSPVVNSGGNVILQCDSQVAFDGFSLCKEGEDEHPQCLNSQPHARGSSRAIFSVGPVSPSRRWWYRCYAYDSNSPYEWSLPSDLLELLVLGVSKKPSLSVQPGPIVAPEETLTLQCGSDAGYNRFVLYKDGERDFLQLAGAQPQAGLSQANFTLGPVSRSYGGQYRCYGAHNLSSEWSAPSDPLDILIAGQFYDRVSLSVQPGPTVASGENVTLLCQSQGWMQTFLLTKEGAADDPWRLRSTYQSQKYQAEFPMGPVTSAHAGTYRCYGSQSSKPYLLTHPSDPLELVVSGPSGGPSSPTTGPTSTSAGPEDQPLTPTGSDPQSGA

SEQ ID NO: 5264 - protein, 127 aa, Artificial Sequence
  Synthetic polypeptide
MVSSAQMGFNLQALLEQLSQDELSKFKYLITTFSLAHELQKIPHKEVDKADGKQLVEILTTHCDSYWVEMASLQVFEKMHRMDLSERAKDEVREAALKSFNKRKPLSLATPEAEAGESLEPRRRRLQ

SEQ ID NO: 5265 - protein, 58 aa, Artificial Sequence
  Synthetic polypeptide
MASLQVFEKMHRMDLSERAKDEVREAALKSFNKRKPLSLATPEAEAGESLEPRRRRLQ

SEQ ID NO: 5266 - protein, 104 aa, Artificial Sequence
  Synthetic polypeptide
MVSSAQMGFNLQALLEQLSQDELSKFKYLITTFSLAHELQKIPHKEMASLQVFEKMHRMDLSERAKDEVREAALKSFNKRKPLSLATPEAEAGESLEPRRRRLQ

SEQ ID NO: 5267 - protein, 59 aa, Artificial Sequence
  Synthetic polypeptide
MLAIKRYKQPSAVAHACNPNTLGGREAALKSFNKRKPLSLATPEAEAGESLEPRRRRLQ

SEQ ID NO: 5268 - protein, 79 aa, Artificial Sequence
  Synthetic polypeptide
MGRKAIVLAIANTSLAFPLCQHLVTFCLGEDDGVHTVEDASRKLAVMDSQGRVWAQEMLLRVSPDHVTLLDPASKGCYP

SEQ ID NO: 5269 - protein, 97 aa, Artificial Sequence
  Synthetic polypeptide
MSTATGPEAAPKPSAKSIYEQRKRYSTVVMADVSQYPVNHLVTFCLGEDDGVHTVEDASRKLAVMDSQGRVWAQEMLLRVSPDHVTLLDPASKGCYP

SEQ ID NO: 5270 - protein, 33 aa, Artificial Sequence
  Synthetic polypeptide
MDSQGRVWAQEMLLRVSPDHVTLLDPASKGCYP

SEQ ID NO: 5271 - protein, 59 aa, Artificial Sequence
  Synthetic polypeptide
MHLVTFCLGEDDGVHTVEDASRKLAVMDSQGRVWAQEMLLRVSPDHVTLLDPASKGCYP

SEQ ID NO: 5272 - protein, 59 aa, Artificial Sequence
  Synthetic polypeptide
RGGKPGARDSSSPDPGIFHRPLPAARFCSDSPPQELLQRPIPAPLCGLTQTPVLPPLLP

SEQ ID NO: 5273 - protein, 332 aa, Artificial Sequence
  Synthetic polypeptide
MKMRAQIPESLREEGIEILKPQFFVLENNLEAVARHMLIFSLALEEPEKMGLQERSETFLEVWGNALLRPPVAAFVRAQADLLAHLVPEPDRLEEQLPWLSLRALKFRERDALEAVFRFWAGGEKGPQAFPMSRLWDSRLRHYLGSRYDARRGVSDWDLRMKLHDRGAQVIHPQEFRRWRDTGVAFELRDSSAYHVPNRTLASGRLLSYRGERVAARGYWGDIATGPFVAFGIEADDESLLRTSNGQPVKTAGEITQHNVTELLRDVAAWGRARATGGDLEEQQHAEGSPEPGTPAAPTPESFTVHFLPLDSAQTLHHKSCYNGRFQLLYVA

SEQ ID NO: 5274 - protein, 386 aa, Artificial Sequence
  Synthetic polypeptide
MTTPAGSGSGFGSVSWWGLSPALDLQAESPPVDPDSQADTVHSNPELDVLLLGSVDGRHLLRTLSRAKFWPRRRFNFFVLENNLEAVARHMLIFSLALEEPEKMGLQERSETFLEVWGNALLRPPVAAFVRAQADLLAHLVPEPDRLEEQLPWLSLRALKFRERDALEAVFRFWAGGEKGPQAFPMSRLWDSRLRHYLGSRYDARRGVSDWDLRMKLHDRGAQVIHPQEFRRWRDTGVAFELRDSSAYHVPNRTLASGRLLSYRGERVAARGYWGDIATGPFVAFGIEADDESLLRTSNGQPVKTAGEITQHNVTELLRDVAAWGRARATGGDLEEQQHAEGSPEPGTPAAPTPESFTVHFLPLDSAQTLHHKSCYNGRFQLLYVA

SEQ ID NO: 5275 - protein, 453 aa, Artificial Sequence
  Synthetic polypeptide
MLPLLDSSKRAGTLGSGCGVPRVHSAALSREEGASRDIWRIKVWARVMTTPAGSGSGFGSVSWWGLSPALDLQAERDATVDALPTTMVPQPAVILPGPPVDPDSQADTVHSNPELDVLLLGSVDGRHLLRTLSRAKFWPRRRFNFFVLENNLEAVARHMLIFSLALEEPEKMGLQERSETFLEVWGNALLRPPVAAFVRAQADLLAHLVPEPDRLEEQLPWLSLRALKFRERDALEAVFRFWAGGEKGPQAFPMSRLWDSRLRHYLGSRYDARRGVSDWDLRMKLHDRGAQVIHPQEFRRWRDTGVAFELRDSSAYHVPNRTLASGRLLSYRGERVAARGYWGDIATGPFVAFGIEADDESLLRTSNGQPVKTAGEITQHNVTELLRDVAAWGRARATGGDLEEQQHAEGSPEPGTPAPTPESFTVHFLPLDSAQTLHHKSCYNGRFQLLYVA

SEQ ID NO: 5276 - protein, 433 aa, Artificial Sequence
  Synthetic polypeptide
MLPLLDSSKRAGTLGSGCGVPRVHSAALSREEGASRDIWRIKVWARVMTTPAGSGSGFGSVSWWGLSPALDLQAESPPVDPDSQADTVHSNPELDVLLLGSVDGRHLLRTLSRAKFWPRRRFNFFVLENNLEAVARHMLIFSLALEEPEKMGLQERSETFLEVWGNALLRPPVAAFVRAQADLLAHLVPEPDRLEEQLPWLSLRALKFRERDALEAVFRFWAGGEKGPQAFPMSRLWDSRLRHYLGSRYDARRGVSDWDLRMKLHDRGAQVIHPQEFRRWRDTGVAFELRDSSAYHVPNRTLASGRLLSYRGERVAARGYWGDIATGPFVAFGIEADDESLLRTSNGQPVKTAGEITQHNVTELLRDVAAWGRARATGGDLEEQQHAEGSPEPGTPAAPTPESFTVHFLPLDSAQTLHHKSCYNGRFQLLYVA

SEQ ID NO: 5277 - protein, 64 aa, Artificial Sequence
  Synthetic polypeptide
PGGAAARGGKPGARDSSPDPGIFHRPLPAARFCSDSPPQELLQRPIPAPLCGLTQTPVLPPLLP

SEQ ID NO: 5278 - protein, 685 aa, Artificial Sequence
  Synthetic polypeptide
MAESDSTDFDLLWYLENLSDKEFQSFKKYLARKILDFKLPQFPLIQMTKEELANVLPISYEGQYIWNMLFSIFSMMRKEDLCRKIIGRRNRNQEACKAVMRRKFMLQWESHTFGKFHYKFFRDVSSDVFYILQLAYDSTSYYSANNLNVFLMGERASGKTIVINLAVLRWIKGEMWQNMISYVVHLTAHEINQMTNSSLAELIAKDWPDGQAPIADILSDPKKLLFILEDLDNIRFELNVNESALCSNSTQKVPIPVLLVSLLKRKMAPGCWFLISSRPTRGNNVKTFLKEVDCCTTLQLSNGKREIYFNSFFKDRQRASAALQLVHEDEILVGLCRVAILCWITCTVLKRQMDKGRDFQLCCQTPTDLHAHFLADALTSEAGLTANQYHLGLLKRLCLLAAGGLFLSTLNFSGEDLRCVGFTEADVSVLQAANILLPSNTHKDRYKFIHLNVQEFCTAIAFLMAVPNYLIPSGSREYKEKREQYSDFNQVFTFIFGLLNANRRKILETSFGYQLPMVDSFKWYSVGYMKHLDRDPEKLTHHMPLFYCLYENREEEFVKTIVDALMEVTVYLQSDKDMMVSLYCLDYCCHLRTLKLSVQRIFQNKEPLIRPTARLSYVSTASGFEDLLKALARNRSLTYLSINCTSISLNMFSLLHDILHEPTCQISHLRPSTAFTFIPNRIHRP

SEQ ID NO: 5279 - protein, 640 aa, Artificial Sequence
  Synthetic polypeptide
MRRKFMLQWESHTFGKFHYKFFRDVSSDVFYILQLAYDSTSYYSANNLNVFLMGERASGKTIVINLAVLRWIKGEMWQNMISYVVHLTAHEINQMTNSSLAELIAKDWPDGQAPIADILSDPKKLLFILEDLDNIRFELNVNESALCSNSTQKVPIPVLLVSLLKRKMAPGCWFLISSRPTRGNNVKTFLKEVDCCTTLQLSNGKREIYFNSFFKDRQRASAALQLVHEDEILVGLCRVAILCWITCTVLKRQMDKGRDFQLCCQTPTDLHAHFLADALTSEAGLTANQYHLGLLKRLCLLAAGGLFLSTLNFSGEDLRCVGFTEADVSVLQAANILLPSNTHKDRYKFIHLNVQEFCTAIAFLMAVPNYLIPSGSREYKEKREQYSDFNQVFTFIFGLLNANRRKILETSFGYQLPMVDSFKWYSVGYMKHLDRDPEKLTHHMPLFYCLYENREEEFVKTIVDALMEVTVYLQSDKDMMVSLYCLDYCCHLRTLKLSVQRIFQNKEPLIRPTASQMKSLVYWREICSLFYTMESLRELHIFDNDLNGISERILSKALEHSSCKLRTLKLSYVSTASGFEDLLKALARNRSLTYLSINCTSISLNMFSLLHDILHEPTCQISHLRPSTAFTFIPNRIHRP

SEQ ID NO: 5280 - protein, 739 aa, Artificial Sequence
  Synthetic polypeptide
MAESDSTDFDLLWYLENLSDKEFQSFKKYLARKILDFKLPQFPLIQMTKEELANVLPISYEGQYIWNMLFSIFSMMRKEDLCRKIIGRRNRNQEACKAVMRRKFMLQWESHTFGKFHYKFFRDVSSDVFYILQLAYDSTSYYSANNLNVFLMGERASGKTIVINLAVLRWIKGEMWQNMISYVVHLTAHEINQMTNSSLAELIAKDWPDGQAPIADILSDPKKLLFILEDLDNIRFELNVNESALCSNSTQKVPIPVLLVSLLKRKMAPGCWFLISSRPTRGNNVKTFLKEVDCCTTLQLSNGKREIYFNSFFKDRQRASAALQLVHEDEILVGLCRVAILCWITCTVLKRQMDKGRDFQLCCQTPTDLHAHFLADALTSEAGLTANQYHLGLLKRLCLLAAGGLFLSTLNFSGEDLRCVGFTEADVSVLQAANILLPSNTHKDRYKFIHLNVQEFCTAIAFLMAVPNYLIPSGSREYKEKREQYSDFNQVFTFIFGLLNANRRKILETSFGYQLPMVDSFKWYSVGYMKHLDRDPEKLTHHMPLFYCLYENREEEFVKTIVDALMEVTVYLQSDKDMMVSLYCLDYCCHLRTLKLSVQRIFQNKEPLIRPTASQMKSLVYWREICSLFYTMESLRELHIFDNDLNGISERILSKALEHSSCKLRTLKLSYVSTASGFEDLLKALARNRSLTYLSINCTSISLNMFSLLHDILHEPTCQISHLRPSTAFTFIPNRIHRP

SEQ ID NO: 5281 - protein, 129 aa, Artificial Sequence
  Synthetic polypeptide
MRSECVLGAASDSGQEAPRDTWFLQGWKASRRFLIKGSVAGGAVYLVYDQELLGPSDKSQAALQKAGEVVPPAMYQFSQYVCQQTGLQIPQLPAPPKIYFPIRDSWNAVPATWEAEARESLEPRRRRLQ

SEQ ID NO: 5282 - protein, 107 aa, Artificial Sequence
  Synthetic polypeptide
MVARVWSLMRFLIKGSVAGGAVYLVYDQELLGPSDKSQAALQKAGEVVPPAMYQFSQYVCQQTGLQIPQLPAPPKIYFPIRDSWNAVPATWEAEARESLEPRRRRLQ

SEQ ID NO: 5283 - protein, 111 aa, Artificial Sequence
  Synthetic polypeptide
MRSECVLGAASDSGQEAPRDTWFLQGWKASRRFLIKGSVAGGAVYLVYDQELLGPSDKSQAALQKAGEVVPPAMYQFSQYVCQQTGLQIPQLPAPPKIYFPIRDSWNAAAA

SEQ ID NO: 5284 - protein, 89 aa, Artificial Sequence
  Synthetic polypeptide
MVARVWSLMRFLIKGSVAGGAVYLVYDQELLGPSDKSQAALQKAGEVVPPAMYQFSQYVCQQTGLQIPQLPAPPKIYFPIRDSWNAAAA

SEQ ID NO: 5285 - protein, 34 aa, Artificial Sequence
  Synthetic polypeptide
MVARVWSLMSSSVQVASSRPALHVVKRVLYIIGV

SEQ ID NO: 5286 - protein, 124 aa, Artificial Sequence
  Synthetic polypeptide
MKSQEEVEVAGIKLCKAMSLGSVTFTDVAIDFSQDEWEWLNLAQRSLYKKVMLENYRNLVSVGLCISKPDVISLLEQEKDPWVIKGGMNRGLCPEEMLCKDTTRMLPSASQEERPHQEPALPAP

SEQ ID NO: 5287 - protein, 5 aa, Artificial Sequence
  Synthetic polypeptide
FLNQM

SEQ ID NO: 5288 - protein, 116 aa, Artificial Sequence
  Synthetic polypeptide
MYQPEDDNNSDVTSDDDMTRNRRESSPPHSVHSFSGDRDWDRRGRSRDMEPRDRWSHTRNPRSRMPPRDLSLPVVAKTSFEMDREDDRDSRAYESRSQLHEGKEYVSCVFGICLRV

SEQ ID NO: 5289 - protein, 241 aa, Artificial Sequence
  Synthetic polypeptide
MLPPKHLSATKPKKSWAPNLYELDSDLTKEPDVIIGEGPTDSEFFHQRFRNLIYVEFVGPRKTLIKLRNLCLDWLQPETRTKEEIIELLVLEQYLTIIPEKLKPWVRAKKPENCEKLVTLLENYKEMYQPEDDNNSDVTSDDDMTRNRRESSPPHSVHSFSDRDWDRRGRSRDMEPRDRWSHTRNPRSRMPPRDLSLPVVAKTSFEMDREDDRDSRAYESRSQLHEGKEYVSCVFGICLRV

SEQ ID NO: 5290 - protein, 115 aa, Artificial Sequence
  Synthetic polypeptide
MYQPEDDNNSDVTSDDDMTRNRRESSPPHSVHSFSDRDWDRRGRSRDMEPRDRWSHTRNPRSRMPPRDLSLPVVAKTSFEMDREDDRDSRAYESRSQLHEGKEYVSCVFGICLRV

SEQ ID NO: 5291 - protein, 320 aa, Artificial Sequence
  Synthetic polypeptide
MAEGTAEAPLENGGGGDSGAGALERGVAPIKRQYLTTKEQFHQFLEAKGQEKTCRETELDIRGKLYLAPLTTCGNLPFRRICKRFGADVTCGEMAVCTNLLQGQMSEWALLKRHQCEDIFGVQLEGAFPDTMTKCAELLSRTVEVDFVDINVGCPIDLVYKKGGGCALMNRSTKFQQIVRGMNQVLDVPLTVKIRTGVQERVNLAHRLLPELRDWGVALVTLHGRSREQRYTKLADWQYIEECVQAASPMPLFGNGDILSFEDANRAMQTGVTGIMIAREAEAGQLPEPGRRRLNSEPRSYHCTPAWATEPDSVSEKTKE

SEQ ID NO: 5292 - protein, 562 aa, Artificial Sequence
  Synthetic polypeptide
MAEGTAEAPLENGGGGDSGAGALERGVAPIKRQYLTTKEQFHQFLEAKGQEKTCRETEVGDPAGNELAEPEAKRIRLEDGQTADGQTEEAAEPGEQLQTQKRARGQNKGRPHVKPTNYDKNRLCPSLIQESAAKCFFGDRCRFLHDVGRYLETKPADLGPRCVLFETFGRCPYGVTCRFAGAHLRPEGQNLVQEELAARGTQPPSIRNGLDKALQQQLRKREVRFERAEQALRRFSQGPTPAAAVPEGTAAEGAPRQENCGAQQVPAGPGTSTPPSSPVRTCGPLTDEDVVRLRPCEKKRLDIRGKLYLAPLTTCGNLPFRRICKRFGADVTCGEMAVCTNLLQGQMSEWALLKRHQCEDIFGVQLEGAFPDTMTKCAELLSRTVEVDFVDINVGCPIDLVYKKGGGCALMNRSTKFQQIVRGMNQVLDVPLTVKIRTGVQERVNLAHRLLPELRDWGVALVTLHGRSREQRYTKLADWQYIEECVQAASPMPLFGNGDILSFEDANRAMQTGVTGIMIAREAEAGQLPEPGRRRLNSEPRSYHCTPAWATEPDSVSEKTKE

SEQ ID NO: 5293 - protein, 13 aa, Artificial Sequence
  Synthetic polypeptide
MNLTEAGCDGSCL

SEQ ID NO: 5294 - protein, 83 aa, Artificial Sequence
  Synthetic polypeptide
MNLTEAGVQWHDLSSLQPPSPSRLPWPPKVLRLQPLPGRHPVWEVRSVSAWPPIVWDVRSPSAWLPSLESEERLCPAAIPSRK

SEQ ID NO: 5295 - protein, 53 aa, Artificial Sequence
  Synthetic polypeptide
MNLTEPPALASQSAEIAASARPPPRLGSEERLCLAAHRLGREEPLCLAAQSGK

SEQ ID NO: 5296 - protein, 88 aa, Artificial Sequence
  Synthetic polypeptide
MAAAEPMGPAQVPMNSEVIVDPIQGQVNFEDVFVYFSQEEWVLLDEAQRLLYRDVMLENFALMASLGTRAEQLLMQESTFIRTRKLDE

SEQ ID NO: 5297 - protein, 174 aa, Artificial Sequence
  Synthetic polypeptide
MAAAALRDPAQQGYVTFEDVAVYFSQEEWRLLDDAQRLLYRNVMLENFTLLASLGLASSKTHEITQLESWEEPFMPAWEVVTSAIPRGCWHGAEAEEAPEQIASVGLLSSNIQQHQKQHCGEKPLKRQEGRVPVLRSCKVHLSEKSLQSREVGKALLISSGVLKHQSRTDSHKW

SEQ ID NO: 5298 - protein, 173 aa, Artificial Sequence
  Synthetic polypeptide
MAAAALRDPAQGYVTFEDVAVYFSQEEWRLLDDAQRLLYRNVMLENFTLLASLGLASSKTHEITQLESWEEPFMPAWEVVTSAIPRGCWHGAEAEEAPEQIASVGLLSSNIQQHQKQHCGEKPLKRQEGRVPVLRSCKVHLSEKSLQSREVGKALLISSGVLKHQSRTDSHKW

SEQ ID NO: 5299 - protein, 187 aa, Artificial Sequence
  Synthetic polypeptide
MAAAALRDPAQVPVAADLLTDHEEQGYVTFEDVAVYFSQEEWRLLDDAQRLLYRNVMLENFTLLASLGLASSKTHEITQLESWEEPFMPAWEVVTSAIPRGCWHGAEAEEAPEQIASVGLLSSNIQQHQKQHCGEKPLKRQEGRVPVLRSCKVHLSEKSLQSREVGKALLISSGVLKHQSRTDSHKW

SEQ ID NO: 5300 - protein, 154 aa, Artificial Sequence
  Synthetic polypeptide
MAAAALRDPAQVPVAADLLTDHEEQGYVTFEDVAVYFSQEEWRLLDDAQRLLYRNVMLENFTLLASLGCWHGAEAEEAPEQIASVGLLSSNIQQHQKQHCGEKPLKRQEGRVPVLRSCKVHLSEKSLQSREVGKALLISSGVLKHQSRTDSHKW

SEQ ID NO: 5301 - protein, 140 aa, Artificial Sequence
  Synthetic polypeptide
MAAAALRDPAQGYVTFEDVAVYFSQEEWRLLDDAQRLLYRNVMLENFTLLASLGCWHGAEAEEAPEQIASVGLLSSNIQQHQKQHCGEKPLKRQEGRVPVLRSCKVHLSEKSLQSREVGKALLISSGVLKHQSRTDSHKW

SEQ ID NO: 5302 - protein, 186 aa, Artificial Sequence
  Synthetic polypeptide
MAAAALRDPAQVPVAADLLTDHEEGYVTFEDVAVYFSQEEWRLLDDAQRLLYRNVMLENFTLLASLGLASSKTHEITQLESWEEPFMPAWEVVTSAIPRGCWHGAEAEEAPEQIASVGLLSSNIQQHQKQHCGEKPLKRQEGRVPVLRSCKVHLSEKSLQSREVGKALLISSGVLKHQSRTDSHKW

SEQ ID NO: 5303 - protein, 153 aa, Artificial Sequence
  Synthetic polypeptide
MAAAALRDPAQVPVAADLLTDHEEGYVTFEDVAVYFSQEEWRLLDDAQRLLYRNVMLENFTLLASLGCWHGAEAEEAPEQIASVGLLSSNIQQHQKQHCGEKPLKRQEGRVPVLRSCKVHLSEKSLQSREVGKALLISSGVLKHQSRTDSHKW

SEQ ID NO: 5304 - protein, 173 aa, Artificial Sequence
  Synthetic polypeptide
MAAATLRDPAQGYVTFEDVAVYFSQEEWRLLDDAQRLLYRNVMLENFTLLASLGLASSKTHEITQLESWEEPFMPAWEVVTSAILRGSWQGAKAEAAAEQSASVEVPSSNVQQHQKQHCGEKPLKRQEGRVPVLRSCRVHLSEKSLQSREVGKDLLTSSGVLKHQSRTDSHKW

SEQ ID NO: 5305 - protein, 174 aa, Artificial Sequence
  Synthetic polypeptide
MAAATLRDPAQQGYVTFEDVAVYFSQEEWRLLDDAQRLLYRNVMLENFTLLASLGLASSKTHEITQLESWEEPFMPAWEVVTSAILRGSWQGAKAEAAAEQSASVEVPSSNVQQHQKQHCGEKPLKRQEGRVPVLRSCRVHLSEKSLQSREVGKDLLTSSGVLKHQSRTDSHKW

SEQ ID NO: 5306 - protein, 108 aa, Artificial Sequence
  Synthetic polypeptide
MAAAAPRRPTQGTVTFEDVAVKFTQEEWNLLSEAQRCLYRDVTLENLALMSSLGCWCGVEDEAAPSKQSIYIQRETQRPRLVDHLRPEIQDQPGQHGETPSLLKKKNT

SEQ ID NO: 5307 - protein, 59 aa, Artificial Sequence
  Synthetic polypeptide
MSSLGCWCGVEDEAAPSKQSIYIQRETQRPRLVDHLRPEIQDQPGQHGETPSLLKKKNT

SEQ ID NO: 5308 - protein, 109 aa, Artificial Sequence
  Synthetic polypeptide
MAVVATLRLSAQGTVTFEDVAVKFTQEEWNLLSEAQRCLYRDVTLENLALMSSLGCWCGVEDEAAPSKQSIYIQRETQRPRLVDHLRPEIQDQPGQHGETPSLLKKKNT

SEQ ID NO: 5309 - protein, 22 aa, Artificial Sequence
  Synthetic polypeptide
MAAAATLRLSAQKLAGHGGTCL

SEQ ID NO: 5310 - protein, 6 aa, Artificial Sequence
  Synthetic polypeptide
GSPLRN

SEQ ID NO: 5311 - protein, 357 aa, Artificial Sequence
  Synthetic polypeptide
MQTVLCTIICNLTVTAAVTACLREPGAVSNPGLTSFTVLCVNWQGEKRRLGNERGYSSHQWPQKHPYHLLPELPTQISSSRPTRPRRCKSSSRPHLARGRRSPLKAAQQDRGLPAWGVWLLSRAEVRPRSALGSSRRGLGDKGPRSRRAAEFTQARPTRKRRTPGGGRPEAGCWLENRRQRRRKAGAERAGAGPTLTPPLPAGSPDPPSPAATAAPQPEQRPHLSRGQWRLLPRRRPERAAGSAGSCSSRRALPASGSGAAMTGSWAAPPRPAWAGLGPFWHLRRSRRQDGLCCPGPRPPSSTVASHCKKAWIRNLIRATLLCEARRLRTSGLVPKSLSRGQALWEHGLPATHPLTA

SEQ ID NO: 5312 - protein, 63 aa, Artificial Sequence
  Synthetic polypeptide
RHDRFLGRAASPCLGGVGTFLAPASKPAAGWTLLSRSQTTLLHRRLPLQKGLDKEPNSSYPSL

SEQ ID NO: 5313 - protein, 96 aa, Artificial Sequence
  Synthetic polypeptide
MTGSWAAPPRPAWAGLGPFWHLRRSRRQDGLCCPGPRPPSSTVASHCKKAWIRNLIRATLLCEARRLRTSGLVPKSLSRGQALWEHGLPATHPLTA

SEQ ID NO: 5314 - protein, 57 aa, Artificial Sequence
  Synthetic polypeptide
GRAASPCLGGVGTFLAPASKPAAGWTLLSRSQTTLLHRRLPLQKGLDKEPNSSYPSL

SEQ ID NO: 5315 - protein, 87 aa, Artificial Sequence
  Synthetic polypeptide
RPAWAGLGPFWHLRRSRRQDGLCCPGPRPPSSTVASHCKKAWIRNLIRATLLCEARRLRTSGLVPKSLSRGQALWEHGLPATHPLTA

SEQ ID NO: 5316 - protein, 125 aa, Artificial Sequence
  Synthetic polypeptide
MASRLPTAWSCEPVTFEDVTLGFTPEEWGLLDLKQKSLYREVMLENYRNLVSVEHQLSKPDVVSQLEEAEDFWPVERGIPQDTIPALWEAKAGGSPEKFETILANTETPSLLKIQKIAGHGGGRQ

SEQ ID NO: 5317 - protein, 94 aa, Artificial Sequence
  Synthetic polypeptide
MASRLPTAWSCEPVTFEDVTLGFTPEEWGLLDLKQKSLYREVMLENYRNLVSVEHQLSKPDVVSQLEEAEDFWPVERGIPQDTIPGTQYITLSE

SEQ ID NO: 5318 - protein, 15 aa, Artificial Sequence
  Synthetic polypeptide
MEARSMLVPPQAVTQ

SEQ ID NO: 5319 - protein, 30 aa, Artificial Sequence
  Synthetic polypeptide
MDPEDEGVAGVMSVGPPAARLQLLFRDEQF

SEQ ID NO: 5320 - protein, 25 aa, Artificial Sequence
  Synthetic polypeptide
MDPEDEGVAGVMSVGPPAARLQKQP

SEQ ID NO: 5321 - protein, 101 aa, Artificial Sequence
  Synthetic polypeptide
MDPEDEGVAGVMSVGPPAARLQEPVTFRDVAVDFTQEEWGQLDPTQRILYRDVMLETFGHLLSIGPELPKPEVISQLEQGTELWVAERGTTQGCHPEATVT

SEQ ID NO: 5322 - protein, 22 aa, Artificial Sequence
  Synthetic polypeptide
MADLANEGCWCKPPPKVVVEIR

SEQ ID NO: 5323 - protein, 282 aa, Artificial Sequence
  Synthetic polypeptide
MSALCWGRGAAGLKRALRPCGRPGLPGKEGTAGGVCGPRRSSSASPQEQDQDRRKDWGHVELLEVLQARVRQLQAESVSEVVVNRVDVARLPECGSGDGSLQPPRKVQMGAKDATPVPCGRWAKILEKDKRTQQMRMQRLKAKLQMPFQSGEFKALTRRLQVEPRLLSKQMAGCLEDCTRQAPESPWEEQLARLLQEAPGKLSLDVEQAPSGQHSQAQLSGQQQRLLAFFKCCLLTDQLPLAHHLLVVHHGQRQKRKLLTLDMYNAVMLGWARQETRRRSCH

SEQ ID NO: 5324 - protein, 18 aa, Artificial Sequence
  Synthetic polypeptide
CSRRGCGSCRLRACRRWW

SEQ ID NO: 5325 - protein, 198 aa, Artificial Sequence
  Synthetic polypeptide
MWPGILVGGARVASCRYPALGPRLAAHFPAQRPPQRTLQNGLALQRCLHATATRALPLIPIVVEQTGRGERAYDIYSRLLRERIVCVMGPIDDSVASLVIAQLLFLQSESNKKPIHMYINSPGGVVTAGLAIYDTMQYILNPICTWCVGQAASMGSLLLAAGTPGMRHSLPNSRIMIHQPSGGARPQQQRKTLSQKKK

SEQ ID NO: 5326 - protein, 135 aa, Artificial Sequence
  Synthetic polypeptide
SFPSWWSRRVAASAPMTSTRGCCGSASCASWARSMTALPALLSHSSSSCNPRATRSPSTCGVVTAGLAIYDTMQYILNPICTWCVGQAASMGSLLLAAGTPGMRHSLPNSRIMIHQPSGGARPQQQRKTLSQKKK

SEQ ID NO: 5327 - protein, 111 aa, Artificial Sequence
  Synthetic polypeptide
MGPIDDSVASLVIAQLLFLQSESNKKPIHMYINSPGGVVTAGLAIYDTMQYILNPICTWCVGQAASMGSLLLAAGTPGMRHSLPNSRIMIHQPSGGARPQQQRKTLSQKKK

SEQ ID NO: 5328 - protein, 133 aa, Artificial Sequence
  Synthetic polypeptide
NVLKIAPESAIKFMAYEQTLKNWWLQQYSHDSADPGILVLLACGTISSTCGQIASYPLALVRTRMQAQGSSDSPASASRVAGITGSRWSCHEQPYGEDHVVRNSANSHVTELGRGSCCPGQHLTAILSVEFPG

SEQ ID NO: 5329 - protein, 64 aa, Artificial Sequence
  Synthetic polypeptide
MANPGLGLLLALGLPFLLARWGRAWGQIQTTSANENSTVLPSSTSSSSDGNLPGQQSKTRSQKK

SEQ ID NO: 5330 - protein, 66 aa, Artificial Sequence
  Synthetic polypeptide
MEESVVRPSVFVVDGQTDIPFTRLGRSHRRQSCSVARDGPAGSWEQLIQERRSHEVNPAAHLTVTT

SEQ ID NO: 5331 - protein, 102 aa, Artificial Sequence
  Synthetic polypeptide
MEESVVRPSVFVVDGQTDIPFTRLGRSHRRQSCSVARVGLGLLLLLMGAGLAVQGWFLLQLHWRLGEMVTRLPDGPAGSWEQLIQERRSHEVNPAAHLTVTT

SEQ ID NO: 5332 - protein, 81 aa, Artificial Sequence
  Synthetic polypeptide
MDWGTELWDQFEVLERHTQWGLDLLDRYVKFVKERTEVEQAYAKQLRSLVKKYLPKRPAKDDPESKSSAVAHTCTPSTLGG

SEQ ID NO: 5333 - protein, 166 aa, Artificial Sequence
  Synthetic polypeptide
MGLGLRGWGRPLLTVATALMLPVKPPAGSWGAQIIGGHEVTPHSRPYMASVRFGGQHHCGGFLLRARWVVSAAHCFSHRDLRTGLVVLGAHVLSTAEPTQQVFGIDALTTHPDYHPMTHANDICLLRRLRQENRLNPGGGGCREPRLRHCIPAWTTEQDSEKNKKK

SEQ ID NO: 5334 - protein, 80 aa, Artificial Sequence
  Synthetic polypeptide
MGLGLRGWGRPLLTVATALMLPVKPPAGSWGAQIIGGHEVTPHSRPYMASVRFGGQHHCGGFLLRARWVVSAAHCFSHRG

SEQ ID NO: 5335 - protein, 2 aa, Artificial Sequence
  Synthetic polypeptide
RT

SEQ ID NO: 5336 - protein, 324 aa, Artificial Sequence [sequence omitted]

SEQ ID NO: 5337 - protein, 47 aa, Artificial Sequence
  Synthetic polypeptide
MGVKLEIFRMIIYLTFPVAMFWVSNQAEWFEDDVIQRKRELWPPEKK

SEQ ID NO: 5338 - protein, 18 aa, Artificial Sequence
  Synthetic polypeptide
MGVKLEIFRRELWPPEKK

SEQ ID NO: 5339 - protein, 29 aa, Artificial Sequence
  Synthetic polypeptide
GGEAGDISDDNLPHFPCGYVLGFQSGRVV

SEQ ID NO: 5340 - protein, 28 aa, Artificial Sequence
  Synthetic polypeptide
GEAGDISDDNLPHFPCGYVLGFQSGRVV

SEQ ID NO: 5341 - protein, 73 aa, Artificial Sequence
  Synthetic polypeptide
MLSSFNEWFWQDRFWLPPNVTWTELEDRDGRVYPHPQDLLAALPLALVLLAMRLAFERPDVVADSCNVSNLGG

SEQ ID NO: 5342 - protein, 22 aa, Artificial Sequence
  Synthetic polypeptide
MRLAFERPDVVADSCNVSNLGG

SEQ ID NO: 5343 - protein, 234 aa, Artificial Sequence
  Synthetic polypeptide
MRLAFERFIGLPLSRWLGVRDQTRRQVKPNATLEKHFLTEGHRPKEPQLSLLAAQCGLTLQQTQRWFRRRRNQDRPQLTKKFCEASWRFLFYLSSFVGGLSVLYHESWLWAPVMCWDRYPNQTLKPSLYWWYLLELGFYLSLLIRLPFDVKRKDFKEQVIHHFVAVILMTFSYSANLLRIGSLVLLLHDSSDYLLEACKMVNYMQYQQVCDALFLIFSFVFFYTRLVLFPTHRT

SEQ ID NO: 5344 - protein, 285 aa, Artificial Sequence
  Synthetic polypeptide
MLSSFNEWFWQDRFWLPPNVTWTELEDRDGRVYPHPQDLLAALPLALVLLAMRLAFERFIGLPLSRWLGVRDQTRRQVKPNATLEKHFLTEGHRPKEPQLSLLAAQCGLTLQQTQRWFRRRRNQDRPQLTKKFCEASWRFLFYLSSFVGGLSVLYHESWLWAPVMCWDRYPNQTLKPSLYWWYLLELGFYLSLLIRLPFDVKRKDFKEQVIHHFVAVILMTFSYSANLLRIGSLVLLLHDSSDYLLEACKMVNYMQYQQVCDALFLIFSFVFFYTRLVLFPTHRT

SEQ ID NO: 5345 - protein, 138 aa, Artificial Sequence
  Synthetic polypeptide
MAHRPPSPALASVLLALLLSGAARAAEIVGGHEAQPHSRPYMASLQMRGNPGSHFCGGTLIHPSFVLTAAHCLRDIPQRLVNVVLGAHNVRTQEPTQQHFSVAQVFLNNYDAENKLNDVLLIQHFRRLRKADHLRLGV

SEQ ID NO: 5346 - protein, 97 aa, Artificial Sequence
  Synthetic polypeptide
MASLQMRGNPGSHFCGGTLIHPSFVLTAAHCLRDIPQRLVNVVLGAHNVRTQEPTQQHFSVAQVFLNNYDAENKLNDVLLIQHFRRLRKADHLRLGV

SEQ ID NO: 5347 - protein, 536 aa, Artificial Sequence
  Synthetic polypeptide
MAHHLPAAMESHQDFRSIKAKFQASQPEPSDLPKKPPKPEFGKLKKFSQPELSEHPKKAPLPEFGAVSLKPPPPEVTDLPKKPPPPEVTDLPKKPPPPEVTDLPKKPPPPEVTDLPKKPSKLELSDLSKKFPQLGATPFPRKPLQPEVGEAPLKASLPEPGAPARKPLQPDELSHPARPPSEPKSGAFPRKLWQPEAGEATPRSPQPELSTFPKKPAQPEFNVYPKKPPQPQVGGLPKKSVPQPEFSEAAQTPLWKPQSSEPKRDSSAFPKKASQPPLSDFPKKPPQPELGDLTRTSSEPEVSVLPKRPRPAEFKALSKKPPQPELGGLPRTSSEPEFNSLPRKLLQPERRGPPRKFSQPEPSAVLKRHPQPEFFGDLPRKPPLPSSASESSLPAAVAGFSSRHPLSPGFGAAGTPRWRSGGLVHSGGARPGLRPSHPPRRRPLPPASSLGHPPAKPPLPPGPVDMQSFRRPSAASIDLRRTRSAAGLHFQDRQPEDIPQVPDEIYELYDDVEPRDDSSPSPKGRGVVVRACSPSY

SEQ ID NO: 5348 - protein, 535 aa, Artificial Sequence
  Synthetic polypeptide
MAHHLPAAMESHQDFRSIKAKFQASQPEPSDLPKKPPKPEFGKLKKFSQPELSEHPKKAPLPEFGAVSLKPPPPEVTDLPKKPPPPEVTDLPKKPPPPEVTDLPKKPPPPEVTDLPKKPSKLELSDLSKKFPQLGATPFPRKPLQPEVGEAPLKASLPEPGAPARKPLQPDELSHPARPPSEPKSGAFPRKLWQPEAGEATPRSPQPELSTFPKKPAQPEFNVYPKKPPQPQVGGLPKKSVPQPEFSEAAQTPLWKPQSSEPKRDSSAFPKKASQPPLSDFPKKPPQPELGDLTRTSSEPEVSVLPKRPRPAEFKALSKKPPQPELGGLPRTSSEPEFNSLPRKLLQPERRGPPRKFSQPEPSAVLKRHPQPEFFGDLPRKPPLPSSASESSLPAAVAGFSSRHPLSPGFGAAGTPRWRSGGLVHSGGARPGLRPSHPPRRRPLPPASSLGHPPAKPPLPPGPVDMQSFRRPSAASIDLRRTRSAAGLHFQDRQPEDIPVPDEIYELYDDVEPRDDSSPSPKGRGVVVRACSPSY

SEQ ID NO: 5349 - protein, 162 aa, Artificial Sequence
  Synthetic polypeptide
MAPACQILRWALALGLGLMFEVTHAFRSQDEFLSSLESYEIAFPTRVDHNGALLAFSPPPPRRQRRGTGATAESRLFYKVASPSTHFLLNLTRSSRLLAGHVSVEYWTREGLAWQRAARPHCLYAGHLQGQASTSHVAISTCGGLSQILGRLRQEDRLSPGS

SEQ ID NO: 5350 - protein, 173 aa, Artificial Sequence
  Synthetic polypeptide
MAPACQILRWALALGLGLMFEVTHAFRSQDEFLSSLESYEIAFPTRVDHNGALLAFSPPPPRRQRRGTGATAESRLFYKVASPSTHFLLNLTRSSRLLAGHVSVEYWTREGLAWQRAARPHCLYAGHLQGQASTSHVAISTCGGLHFGRPRQEDHLRPGIRDQPGQHSGTPSL

SEQ ID NO: 5351 - protein, 1 aa, Artificial Sequence
  Synthetic polypeptide
S

SEQ ID NO: 5352 - protein, 77 aa, Artificial Sequence
  Synthetic polypeptide
MRITAAILTARSRWRLRNSISAFLFTVTFAWCPPGLSNLTILSCPGAQTKLSRVRKRYSMQMITKGQQEPLFLHHTK

SEQ ID NO: 5353 - protein, 71 aa, Artificial Sequence
  Synthetic polypeptide
ILTARSRWRLRNSISAFLFTVTFAWCPPGLSNLTILSCPGAQTKLSRVRKRYSMQMITKGQQEPLFLHHTK

SEQ ID NO: 5354 - protein, 41 aa, Artificial Sequence
  Synthetic polypeptide
NSAFPLASEEQHLCLPVHGDLRLVSSWPQQPDNSVVSRGTD

SEQ ID NO: 5355 - protein, 62 aa, Artificial Sequence
  Synthetic polypeptide
MRNSISAFLFTVTFAWCPPGLSNLTILSCPGAQTKLSRVRKRYSMQMITKGQQEPLFLHHTK

SEQ ID NO: 5356 - protein, 153 aa, Artificial Sequence
  Synthetic polypeptide
MRITAAILTARSRWRLRNSISAFLFTVTFAWCPPGLSNLTILSCPDHLSQDVFCLHESKFEEERMVAGWLTNYSQDSVTFEDVAVDFTQEEWTLLDQTQRNLYRDVMLENYKNLVAVDWESHINTKWSAPQQNFLQGKTSSVVEMDTARSHHL

SEQ ID NO: 5357 - protein, 89 aa, Artificial Sequence
  Synthetic polypeptide
MVAGWLTNYSQDSVTFEDVAVDFTQEEWTLLDQTQRNLYRDVMLENYKNLVAVDWESHINTKWSAPQQNFLQGKTSSVVEMDTARSHHL

SEQ ID NO: 5358 - protein, 117 aa, Artificial Sequence
  Synthetic polypeptide
MLAIGLSLCDHLSQDVFCLHESKFEEERMVAGWLTNYSQDSVTFEDVAVDFTQEEWTLLDQTQRNLYRDVMLENYKNLVAVDWESHINTKWSAPQQNFLQGKTSSVVEMDTARSHHL

SEQ ID NO: 5359 - protein, 81 aa, Artificial Sequence
  Synthetic polypeptide
MRITAAILTARSRWRLRNSISAFLFTVTFAWCPPGLSNLTILSCPDWESHINTKWSAPQQNFLQGKTSSVVEMDTARSHHL

SEQ ID NO: 5360 - protein, 75 aa, Artificial Sequence
  Synthetic polypeptide
ILTARSRWRLRNSISAFLFTVTFAWCPPGLSNLTILSCPDWESHINTKWSAPQQNFLQGKTSSVVEMDTARSHHL

SEQ ID NO: 5361 - protein, 9 aa, Artificial Sequence
  Synthetic polypeptide
MDTARSHHL

SEQ ID NO: 5362 - protein, 57 aa, Artificial Sequence
  Synthetic polypeptide
QTQRNLYRDVMLENYKNLVAVDWESHINTKWSAPQQNFLQGKTSSVVEMDTARSHHL

SEQ ID NO: 5363 - protein, 267 aa, Artificial Sequence
  Synthetic polypeptide
MKLQAVMETLLQRQQRARQELEARQQLPPDPPAAPPGRARAAPDEDREPESARMQRAQMAALAAMRAAAAGLGHPASPGGSEDGPPGSEEEDAAREGTPGSPGRGREGPGEEHFEDMASDEDMKPKWEEEEMEEDLGEDEEEEEEDYEDEEEEEDEEGLGPPGPASLGTTALFPRKAQPPQAFRGDGVPRVLGGQERPGPGPAHPGGAAHVAPQLQPPDHGDWTYEEQFKQLYELDGDPKRKEFLDDLFSFMQKRVQKLTRRGGRRL

SEQ ID NO: 5364 - protein, 114 aa, Artificial Sequence
  Synthetic polypeptide
EDEEGLGPPGPASLGTTALFPRKAQPPQAFRGDGVPRVLGGQERPGPGPAHPGGAAHVAPQLQPPDHGDWTYEEQFKQLYELDGDPKRKEFLDDLFSFMQKRVQKLTRRGGRRL

SEQ ID NO: 5365 - protein, 274 aa, Artificial Sequence
  Synthetic polypeptide
MAEIHNGGELCDFMENGEIFSEHSCLNAHMGTENTGDTYDCDEYGENFPMLHNSAPAGETLSVLNQCRKAFSLPPNVHQRTWIGDKSFEYSDCEEAFVDQSHLQANRITHNGETLYEQKQCGRAFTYSTSHAVSVKMHTVEKPYECKECGKFFRYSSYLNSHMRTHTGEKPYECKECGKCFTVSSHLVEHVRIHTGEKPYQCKECGRAFAGRSGLTKHVRIHTGEKPYECNECGKAYNRFYLLTEHFKTHTEEKPFECKHYSEEPRGGSKVNVH

SEQ ID NO: 5366 - protein, 98 aa, Artificial Sequence
  Synthetic polypeptide
MAVTDLSHGFFPREPICPFEEKTKIGTMVEDYLANSYQDSVTFDDVAVEFTPEEWALLDTTEKCLYRDVMLENYVNLASVVTWEAVAGKSLEPRGGGY

SEQ ID NO: 5367 - protein, 142 aa, Artificial Sequence
  Synthetic polypeptide
MADEEKLPPGWEKRMSRSSGRVYYFNHITNASQWERPSGNSSSGGKNGQGEPARVRCSHLLVKHSQSRRPSSWRQEKITRTKEEALELINGYIQKIKSGEEDFESLASQFSDCSSAKARGDLGAFSRVSRFSYLRPTTVQKY

SEQ ID NO: 5368 - protein, 29 aa, Artificial Sequence
  Synthetic polypeptide
AGEDHPDQGGGPGADQRLHPEDQVGRGGL

SEQ ID NO: 5369 - protein, 238 aa, Artificial Sequence
  Synthetic polypeptide
MSPEPVPPPPPPQCPGCDRAEPIAQRLEEGDEAFRAGDYEMAAELFRSMLAGLAQPDRGLCLRLGDALARAGRLPEALGAFRGAARLGALRPEELEELAGGLVRAVGLRDRPLSAENPGGEPEAPGEGGPAPEPRAPRDLLGCPRCRRLLHKPVTLPCGLTVCKRCVEPGPARPQVRRVNVVLSGLLEKCFPAECRLRRLAGQARSLQRQQQPEAALLRCDQALELDHRKMWEDFHLI

SEQ ID NO: 5370 - protein, 218 aa, Artificial Sequence
  Synthetic polypeptide
MDEDEKDRAKRASRNKSEKKRRDQFNVLIKELSSMLPGNTRKMDKTTVLEKVIGFLQKHNEVSAQTEICDIQQDWKPSFLSNEEFTQLMLEALDGFIIAVTTDGSIIYVSDSITPLLGHLPSDVMDQNLLNFLPEQEHSEVYKILSSHMLVTDSPSPEYLKSDSDLEFYCHLLRGSLNPKEFPTYEYIKFVGNFRSYNNAKRWKQPTCPSVDEWIKKV

SEQ ID NO: 5371 - protein, 283 aa, Artificial Sequence
  Synthetic polypeptide
MYAYGFVGRCAPFPAEEGRTFDLSEELGRSVTREGTGTTRLNSEPVPLLCLPLLNCSRKNCIENLMDEDEKDRAKRASRNKSEKKRRDQFNVLIKELSSMLPGNTRKMDKTTVLEKVIGFLQKHNEVSAQTEICDIQQDWKPSFLSNEEFTQLMLEALDGFIIAVTTDGSIIYVSDSITPLLGHLPSDVMDQNLLNFLPEQEHSEVYKILSSHMLVTDSPSPEYLKSDSDLEFYCHLLRGSLNPKEFPTYEYIKFVGNFRSYNNAKRWKQPTCPSVDEWIKKV

SEQ ID NO: 5372 - protein, 6 aa, Artificial Sequence
  Synthetic polypeptide
SFSKQV

SEQ ID NO: 5373 - protein, 8 aa, Artificial Sequence
  Synthetic polypeptide
AVLPSTKW

SEQ ID NO: 5374 - protein, 59 aa, Artificial Sequence
  Synthetic polypeptide
MAPAKKGGEKKKGRSAINEVVTREYTINIHKRIHGVRMRTAAAPYSCSLPYPNMRGLFS

SEQ ID NO: 5375 - protein, 8 aa, Artificial Sequence
  Synthetic polypeptide
AVLPSTKW

SEQ ID NO: 5376 - protein, 48 aa, Artificial Sequence
  Synthetic polypeptide
MAPAKKGGEKKKGRSAINEVVTREYTINIHKRIHGVTRYHLMYSIGCL

SEQ ID NO: 5377 - protein, 8 aa, Artificial Sequence
  Synthetic polypeptide
AVLPSTKW

SEQ ID NO: 5378 - protein, 45 aa, Artificial Sequence
  Synthetic polypeptide
MAPAKKGGEKKKGRSAINEVVTREYTINIHKRIHGVQFPGAYHRH

SEQ ID NO: 5379 - protein, 44 aa, Artificial Sequence
  Synthetic polypeptide
MAPAKKGGEKKKGRSAINEVVTREYTINIHKRIHGVSLSSTLRI

SEQ ID NO: 5380 - protein, 8 aa, Artificial Sequence
  Synthetic polypeptide
AVLPSTKW

SEQ ID NO: 5381 - protein, 951 aa, Artificial Sequence
  Synthetic polypeptide
MWLKPEEVLLKNALKLWVTQKSSCYFILQRRRGHGEGGGRLTGRLVGALDAVLDSNARVAPFRILLQVPGSQVYSPIACGATLEEINQHWDWLEQNLLHTLSVFDNKDDIASFVKGKVKALIAEETSSRLAEQEEEPEKFREALVKFEARFNFPEAEKLVTYYSCCCWKGRVPRQGWLYLSINHLCFYSFFLGKELKLVVPWVDIQKLERTSNVFLTDTIRITTQNKERDFSMFLNLDEVFKVMEQLADVTLRRLLDNEVFDLDPDLQEPSQITKRDLEARAQNEFFRAFFRLPRKEKLHAVVDCSLWTPFSRCHTTGRMFASDSYICFASREDGCCKIILPLREVVSIEKMEDTSLLPHPIIVSIRSKVAFQFIELRDRDSLVEALLARLKQVHANHPVHYDTSADDDMASLVFHSTSMCSDHRFGDLEMMSSQNSEESEKEKSPLMHPDALVTAFQQSGSQSPDSRMSREQIKISLWNDHFVEYGRTVCMFRTEKIRKLVAMGIPESLRGRLWLLFSDAVTDLASHPGYYGNLVEESLGKCCLVTEEIERDLHRSLPEHPAFQNETGIAALRRVLTAYAHRNPKIGYCQSMNILTSVLLLYTKEEEAFWLLVAVCERMLPDYFNHRVIGAQVDQSVFEELIKGHLPELAEHMNDLSALASVSLSWFLTLFLSIMPLESAVNVVDCFFYDGIKAIFQLGLAVLEANAEDLCSSKDDGQALMILSRFLDHIKNEDSPGPPVGSHHAFFSDDQEPYPVTDISDLIRDSYEKFGDQSVEQIEHLRYKHRIRVLQGHEDTTKQNVLRVVIPEVSILPEDLEELYDLFKREHMMSCYWEQPRPMASRHDPSRPYAEQYRIDARQFAHLFQLVSPWTCGAHTEILAERTFRLLDDNMDQLIEFKAFVSCLDIMYNGEMNEKIKLLYRLHIPPASGRSFRRYSRRHRRGQLCVCYCP

SEQ ID NO: 5382 - protein, 966 aa, Artificial Sequence
  Synthetic polypeptide
MWLKPEEVLLKNALKLWVTQKSSCYFILQRRRGHGEGGGRLTGRLVGALDAVLDSNARVAPFRILLQVPGSQVYSPIACGELLNGSDVYWAIATGATLEEINQHWDWLEQNLLHTLSVFDNKDDIASFVKGKVKALIAEETSSRLAEQEEEPEKFREALVKFEARFNFPEAEKLVTYYSCCCWKGRVPRQGWLYLSINHLCFYSFFLGKELKLVVPWVDIQKLERTSNVFLTDTIRITTQNKERDFSMFLNLDEVFKVMEQLADVTLRRLLDNEVFDLDPDLQEPSQITKRDLEARAQNEFFRAFFRLPRKEKLHAVVDCSLWTPFSRCHTTGRMFASDSYICFASREDGCCKIILPLREVVSIEKMEDTSLLPHPIIVSIRSKVAFQFIELRDRDSLVEALLARLKQVHANHPVHYDTSADDDMASLVFHSTSMCSDHRFGDLEMMSSQNSEESEKEKSPLMHPDALVTAFQQSGSQSPDSRMSREQIKISLWNDHFVEYGRTVCMFRTEKIRKLVAMGIPESLRGRLWLLFSDAVTDLASHPGYYGNLVEESLGKCCLVTEEIERDLHRSLPEHPAFQNETGIAALRRVLTAYAHRNPKIGYCQSMNILTSVLLLYTKEEEAFWLLVAVCERMLPDYFNHRVIGAQVDQSVFEELIKGHLPELAEHMNDLSALASVSLSWFLTLFLSIMPLESAVNVVDCFFYDGIKAIFQLGLAVLEANAEDLCSSKDDGQALMILSRFLDHIKNEDSPGPPVGSHHAFFSDDQEPYPVTDISDLIRDSYEKFGDQSVEQIEHLRYKHRIRVLQGHEDTTKQNVLRVVIPEVSILPEDLEELYDLFKREHMMSCYWEQPRPMASRHDPSRPYAEQYRIDARQFAHLFQLVSPWTCGAHTEILAERTFRLLDDNMDQLIEFKAFVSCLDIMYNGEMNEKIKLLYRLHIPPASGRSFRRYSRRHRRGQLCVCYCP

SEQ ID NO: 5383 - protein, 430 aa, Artificial Sequence
  Synthetic polypeptide
MAEGVPASPSSGEGSRGPHSGVIQWLVDNFCICEECSVPRCLMYEIYVETCGQNTENQVNPATFGKLVRLVFPDLGTRRLGTRGSARYHYDGICIKKSSFFYAQYCYLIGEKRYHSGDAIAFEKSTNYNSIIQQEATCEDHSPMKTDPVGSPLSEFRRCPFLEQEQAKKYSCNMMAFLADEYCNYCRDILRNVEDLLTSFWKSLQQDTVMLMSLPDVCQLFKCYDVQLYKGIEDVLLHDFLEDVSIQYLKSVQLFSKKFKLWLLNALEGVPALLQISKLKEVTLFVKRLRRKTYLSNMAKTMRMVLKSKRRVSVLKSDLQAIINQGTLATSKKALASDRSGADELENNPEMKCLRNLISLLGTSTDLRVFLSCLSSHLQAFVFQTSRSKEEFTKLAASFQLRWNLLLTAVSKAMTLCHRDSFAGRGGGRL

SEQ ID NO: 5384 - protein, 317 aa, Artificial Sequence
  Synthetic polypeptide
MYEIYVETCGQNTENQVNPATFGKCEDHSPMKTDPVGSPLSEFRRCPFLEQEQAKKYSCNMMAFLADEYCNYCRDILRNVEDLLTSFWKSLQQDTVMLMSLPDVCQLFKCYDVQLYKGIEDVLLHDFLEDVSIQYLKSVQLFSKKFKLWLLNALEGVPALLQISKLKEVTLFVKRLRRKTYLSNMAKTMRMVLKSKRRVSVLKSDLQAIINQGTLATSKKALASDRSGADELENNPEMKCLRNLISLLGTSTDLRVFLSCLSSHLQAFVFQTSRSKEEFTKLAASFQLRWNLLLTAVSKAMTLCHRDSFAGRGGGRL

SEQ ID NO: 5385 - protein, 105 aa, Artificial Sequence
  Synthetic polypeptide
MGRVGGMAQPMGRAGAPKPMGRAGSARRGRFKGCWSEGSPVHPVPAVLSWLLALLRCASTMLSLRVPLAPITDPQQLQLSPLKGLSLVDKENTPPALSGTRRGRA

SEQ ID NO: 5386 - protein, 45 aa, Artificial Sequence
  Synthetic polypeptide
MLSLRVPLAPITDPQQLQLSPLKGLSLVDKENTPPALSGTRRGRA

SEQ ID NO: 5387 - protein, 50 aa, Artificial Sequence
  Synthetic polypeptide
MESRPSGRQHASEGDGDQSPTQCAVCGRLNTLGSLRTRTGSKCSIHFIII

SEQ ID NO: 5388 - protein, 41 aa, Artificial Sequence
  Synthetic polypeptide
MESRPSGRQHASEGDGDQSPTQCAGMRLGARQTWAESCPTY

SEQ ID NO: 5389 - protein, 69 aa, Artificial Sequence
  Synthetic polypeptide
MESRPSGRQHASEGDGDQSPTQCAGMRSSGRSDQPYVLKGNPLLLRVRCYSGCASGSGRQLQLSGVWTA

SEQ ID NO: 5390 - protein, 75 aa, Artificial Sequence
  Synthetic polypeptide
MESRPSGRQHASEGDGDQSPTQCAGMRSSGRSDQPYVLKGNPLLLRVRCYSGCASGSGRQLQLSGHAFGSQTDLG

SEQ ID NO: 5391 - protein, 159 aa, Artificial Sequence [sequence omitted]

SEQ ID NO: 5392 - protein, 132 aa, Artificial Sequence
  Synthetic polypeptide
MTRRGFSRAGAAQRSTRPAAEPQPPAARALQPRPGVPGPLRCREYLQPPAPRREAEGLSHQGSEVGAESGARPKERGAEPELGRLWLRTVSSWRLGWHFDFGSLLFSDCNLHHRLSWVSSLLTAGLGTFSPS

SEQ ID NO: 5393 - protein, 105 aa, Artificial Sequence
  Synthetic polypeptide
MTRRGFSRAGAAQRSTRPAAEPQPPAARALQPRPGVPGPLRCREYLQPPAPRREAEGLSHQGSEVGAESGARPKERGAEPELGRLWLRTVSSWRLGWHFDFGLKA

SEQ ID NO: 5394 - protein, 97 aa, Artificial Sequence
  Synthetic polypeptide
MTEEVIVIAKWDYTAQQDQELDIKKNERLWLLDDSKTWWRVRNAANRTGYVPSNYVERKNSLKKGSLVKNLKDTLEKEIGTQRKGDWNTDTLRGKTM

SEQ ID NO: 5395 - protein, 121 aa, Artificial Sequence
  Synthetic polypeptide
MTEEVIVIAKWDYTAQQDQELDIKKNERLWLLDDSKTWWRVRNAANRTGYVPSNYVERKNSLKKGSLVKNLKDTLGDWNTKKRRLEHRHTQREDHVKTHRKKTASAGPGERPCKEPTLPTP

SEQ ID NO: 5396 - protein, 149 aa, Artificial Sequence
  Synthetic polypeptide
MTEEVIVIAKWDYTAQQDQELDIKKNERLWLLDDSKTWWRVRNAANRTGYVPSNYVERKNSLKKGSLVKNLKDTLEKEIGTQTHSEGRPCEDTQEEDSICRSRREALQGTNPAHTLIWTSSLQNCEEINVCCLSHPVYGTYHGSLSRLV

SEQ ID NO: 5397 - protein, 295 aa, Artificial Sequence
  Synthetic polypeptide
MQVSSLNEVKIYSLSCGKSLPEWLSDRKKRALQKKDVDVRRRIELIQDFEMPTVCTTIKVSKDGQYILATGTYKPRVRCYDTYQLSLKFERCLDSEVVTFEILSDDYSKIVFLHNDRYIEFHSQSGFYYKTRIPKFGRDFSYHYPSCDLYFVGASSEVYRLNLEQGRYLNPLQTDAAENNVCDINSVHGLFATGTIEGRVECWDPRTRNRVGLLDCALNSVTADSEINSLPTISALKFNGALTMAVGTTTGQGKIFTSLEPEHDLNDVCLYPNSGMLLTANETPKMGIYYIPPSL

SEQ ID NO: 5398 - protein, 345 aa, Artificial Sequence
  Synthetic polypeptide
MQVSSLNEVKIYSLSCGKSLPEWLSDRKKRALQKKDVDVRRRIELIQDFEMPTVCTTIKVSKDGQYILATGTYKPRVRCYDTYQLSLKFERCLDSEVVTFEILSDDYSKIVFLHNDRYIEFHSQSGFYYKTRIPKFGRDFSYHYPSCDLYFVGASSEVYRLNLEQGRYLNPLQTDAAENNVCDINSVHGLFATGTIEGRVECWDPRTRNRVGLLDCALNSVTADSEINSLPTISALKFNGALTMAVGTTTGQVLLYDLRSDKPLLVKDHQYGLPIKSVHFQDSLDLILSADSRIVKMWNKNSGKIFTSLEPEHDLNDVCLYPNSGMLLTANETPKMGIYYIPPSL

SEQ ID NO: 5399 - protein, 295 aa, Artificial Sequence
  Synthetic polypeptide
MPTVCTTIKVSKDGQYILATGTYKPRVRCYDTYQLSLKFERCLDSEVVTFEILSDDYSKIVFLHNDRYIEFHSQSGFYYKTRIPKFGRDFSYHYPSCDLYFVGASSEVYRLNLEQGRYLNPLQTDAAENNVCDINSVHGLFATGTIEGRVECWDPRTRNRVGLLDCALNSVTADSEINSLPTISALKFNGALTMAVGTTTGQVLLYDLRSDKPLLVKDHQYGLPIKSVHFQDSLDLILSADSRIVKMWNKNSGKIFTSLEPEHDLNDVCLYPNSGMLLTANETPKMGIYYIPPSL

SEQ ID NO: 5400 - protein, 319 aa, Artificial Sequence
  Synthetic polypeptide
MQVSSLNEVKIYSLSCGKSLPEWLSDRKKRALQKKDVDVRRRIELIQDFEMPTVCTTIKVSKDGQYILATVVTFEILSDDYSKIVFLHNDRYIEFHSQSGFYYKTRIPKFGRDFSYHYPSCDLYFVGASSEVYRLNLEQGRYLNPLQTDAAENNVCDINSVHGLFATGTIEGRVECWDPRTRNRVGLLDCALNSVTADSEINSLPTISALKFNGALTMAVGTTTGQVLLYDLRSDKPLLVKDHQYGLPIKSVHFQDSLDLILSADSRIVKMWNKNSGKIFTSLEPEHDLNDVCLYPNSGMLLTANETPKMGIYYIPPSL

SEQ ID NO: 5401 - protein, 236 aa, Artificial Sequence
  Synthetic polypeptide
IVFLHNDRYIEFHSQSGFYYKTRIPKFGRDFSYHYPSCDLYFVGASSEVYRLNLEQGRYLNPLQTDAAENNVCDINSVHGLFATGTIEGRVECWDPRTRNRVGLLDCALNSVTADSEINSLPTISALKFNGALTMAVGTTTGQVLLYDLRSDKPLLVKDHQYGLPIKSVHFQDSLDLILSADSRIVKMWNKNSGKIFTSLEPEHDLNDVCLYPNSGMLLTANETPKMGIYYIPPSL

SEQ ID NO: 5402 - protein, 217 aa, Artificial Sequence
  Synthetic polypeptide
MALLVLGIQLTRDVKDLFKENYKPLLKEIKEDTNKWKNIPCSWVGRINIVKMAILPKVIYRFNAIPIKLPMTFFTELEKTTLKFIWNQKRARIAKAILSQKNKAGGITLPDFKLYYKATVTKTAWYWYQNRDIDQWNRTEPSEITLPVYNYLIFDKPEKNKQWGKESLFNKWCWENCLAICRKLKLDPFLTPYTKINSRWIKDLNVRPKTIKTLEEN

SEQ ID NO: 5403 - protein, 13 aa, Artificial Sequence
  Synthetic polypeptide
MALLVLDREPNHE

SEQ ID NO: 5404 - protein, 34 aa, Artificial Sequence
  Synthetic polypeptide
MAHVGDCTQTPWLPVLVGSSEGEMKPGLQSTELC

SEQ ID NO: 5405 - protein, 354 aa, Artificial Sequence
  Synthetic polypeptide
MASSEVARHLLFQSHMATKTTCMSSQGSDDEQIKRENIRSLTMSGHVGFESLPDQLVNRSIQQGFCFNILCVGETGIGKSTLIDTLFNTNFEDYESSHFCPNVKLKAQTYELQESNVQLKLTIVNTVGFGDQINKEESYQPIVDYIDAQFEAYLQEELKIKRSLFTYHDSRIHVCLYFISPTGHSLKTLDLLTMKNLDSKVNIIPVIAKADTVSKTELQKFKIKLMSELVSNGVQIYQFPTDDDTIAKVNAAMNGQLPFAVVGSMDEVKVGNKMVKARQYPWGVVQVENENHCDFVKLREMLICTNMEDLREQTHTRHYELYRRCKLEEMGFTDVGPENKPVSYSFQEPIDGIR

SEQ ID NO: 5406 - protein, 331 aa, Artificial Sequence
  Synthetic polypeptide
MASSEVARHLKRENIRSLTMSGHVGFESLPDQLVNRSIQQGFCFNILCVGETGIGKSTLIDTLFNTNFEDYESSHFCPNVKLKAQTYELQESNVQLKLTIVNTVGFGDQINKEESYQPIVDYIDAQFEAYLQEELKIKRSLFTYHDSRIHVCLYFISPTGHSLKTLDLLTMKNLDSKVNIIPVIAKADTVSKTELQKFKIKLMSELVSNGVQIYQFPTDDDTIAKVNAAMNGQLPFAVVGSMDEVKVGNKMVKARQYPWGVVQVENENHCDFVKLREMLICTNMEDLREQTHTRHYELYRRCKLEEMGFTDVGPENKPVSYSFQEPIDGIR

SEQ ID NO: 5407 - protein, 221 aa, Artificial Sequence
  Synthetic polypeptide
MMNRYYQPIVDYIDAQFEAYLQEELKIKRSLFTYHDSRIHVCLYFISPTGHSLKTLDLLTMKNLDSKVNIIPVIAKADTVSKTELQKFKIKLMSELVSNGVQIYQFPTDDDTIAKVNAAMNGQLPFAVVGSMDEVKVGNKMVKARQYPWGVVQVENENHCDFVKLREMLICTNMEDLREQTHTRHYELYRRCKLEEMGFTDVGPENKPVSYSFQEPIDGIR

SEQ ID NO: 5408 - protein, 339 aa, Artificial Sequence
  Synthetic polypeptide
MATKTTCMSSQGSDDEQIKRENIRSLTMSGHVGFESLPDQLVNRSIQQGFCFNILCVGETGIGKSTLIDTLFNTNFEDYESSHFCPNVKLKAQTYELQESNVQLKLTIVNTVGFGDQINKEESYQPIVDYIDAQFEAYLQEELKIKRSLFTYHDSRIHVCLYFISPTGHSLKTLDLLTMKNLDSKVNIIPVIAKADTVSKTELQKFKIKLMSELVSNGVQIYQFPTDDDTIAKVNAAMNGQLPFAVVGSMDEVKVGNKMVKARQYPWGVVQVENENHCDFVKLREMLICTNMEDLREQTHTRHYELYRRCKLEEMGFTDVGPENKPVSYSFQEPIDGIR

SEQ ID NO: 5409 - protein, 187 aa, Artificial Sequence
  Synthetic polypeptide
MASSEVARHLLFQSHMATKTTCMSSQGSDDEQIVNIIPVIAKADTVSKTELQKFKIKLMSELVSNGVQIYQFPTDDDTIAKVNAAMNGQLPFAVVGSMDEVKVGNKMVKARQYPWGVVQVENENHCDFVKLREMLICTNMEDLREQTHTRHYELYRRCKLEEMGFTDVGPENKPVSYSFQEPIDGIR

SEQ ID NO: 5410 - protein, 105 aa, Artificial Sequence
  Synthetic polypeptide
MASPDPPATSYAPSDVPSGVALFLTIPFAFFLPELNAEDRVKTKYSQIRKTDSYKARVQLTADFSMATMEARIQQNIMEKYTTQWKHILEVRRENNCQGKFKDVF

SEQ ID NO: 5411 - protein, 266 aa, Artificial Sequence
  Synthetic polypeptide
MRALTVQRVKFAMDLPLLKRAGQDLAEKTKNFVSRSLVIGEVLSMADMATGVKCGIIYWLFGGAIRNLGSPEHVTKWFQPLQEQKYTGMFAMTERGHGSNARGIQTEATFDLSAQEFVIDTPCENAEKMYIGNAMYGNYAAVFAQLIIDGRSQGPHCFIVPVRDENGSLYPGVTAIDMMYKEGLHGVDNGILIFDKVRIPRENLLDKFGSVAPDGQYHSPIRNKSARFNAMLAALTPSRLAVAFQAMGAMKLGLTIAIRYSHRDIQ

SEQ ID NO: 5412 - protein, 104 aa, Artificial Sequence
  Synthetic polypeptide
RDENGSLYPGVTAIDMMYKEGLHGVDNGILIFDKVRIPRENLLDKFGSVAPDGQYHSPIRNKSARFNAMLAALTPSRLAVAFQAMGAMKLGLTIAIRYSHRDIQ

SEQ ID NO: 5413 - protein, 9 aa, Artificial Sequence
  Synthetic polypeptide
QDSMPCWQH

SEQ ID NO: 5414 - protein, 534 aa, Artificial Sequence
  Synthetic polypeptide
MRALTVQRVKFAMDLPLLKRAGQDLAEKTKNFVSRSLVIGEVLSMADMATGVKCGIIYWLFGGAIRNLGSPEHVTKWFQPLQEQKYTGMFAMTERGHGSNARGIQTEATFDLSAQEFVIDTPCENAEKMYIGNAMYGNYAAVFAQLIIDGRSQGPHCFIVPVRDENGSLYPGVTAIDMMYKEGLHGVDNGILIFDKVRIPRENLLDKFGSVAPDGQYHSPIRNKSARFNAMLAALTPSRLAVAFQAMGAMKLGLTIAIRYSHSRRQFGPKTKEEVKIIEHQTQTLRLMPHLATALALTFVSRYAGALLDEDVFQGKELVNSRSLQALVAGLKAYSTWENIRCLQDCRECTGGMGYMMENRISGLKCDTDVFATFEGDDVVMLQVVGRELLAQYTKQYEEKPLFGLLQNWAESVGDKLRTSFLAFNMDTVDDLAFLLKAVKFRERVLQRGLVARIYYKNALWEGPGVKELKLPAHNHMSNLGSVPCSSSHSFRDCKHGTVNTCCNLMRVPEPEPHHQAASGFPGFRNCVHNEHLV

SEQ ID NO: 5415 - protein, 504 aa, Artificial Sequence
  Synthetic polypeptide
MRALTVQRVKFAMDLPLLKRAGQDLAEKTKNFVSRSLVIGEVLSMADMATGVKCGIIYWLFGGAIRNLGSPEHVTKWFQPLQEQKYTGMFAMTERGHGSNARGIQTEATFDLSAQEFVIDTPCENAEKMYIGNAMYGNYAAVFAQLIIDGRSQGPHCFIVPVRDENGSLYPGVTAIDMMYKEGLHGVDNGILIFDKVRIPRENLLDKFGSVAPDGQYHSPIRNKSARFNAMLAALTPSRLAVAFQAMGAMKLGLTIAIRYSHSRRQFGPKTKEEVKIIEHQTQTLRLMPHLATALALTFVSRYAGALLDEDVFQGKELVNSRSLQALVAGLKAYSTWENIRCLQDCRECTGGMVVGRELLAQYTKQYEEKPLFGLLQNWAESVGDKLRTSFLAFNMDTVDDLAFLLKAVKFRERVLQRGLVARIYYKNALWEGPGVKELKLPAHNHMSNLGSVPCSSSHSFRDCKHGTVNTCCNLMRVPEPEPHHQAASGFPGFRNCVHNEHLV

SEQ ID NO: 5416 - protein, 342 aa, Artificial Sequence
  Synthetic polypeptide
RDENGSLYPGVTAIDMMYKEGLHGVDNGILIFDKVRIPRENLLDKFGSVAPDGQYHSPIRNKSARFNAMLAALTPSRLAVAFQAMGAMKLGLTIAIRYSHSRRQFGPKTKEEVKIIEHQTQTLRLMPHLATALALTFVSRYAGALLDEDVFQGKELVNSRSLQALVAGLKAYSTWENIRCLQDCRECTGGMVVGRELLAQYTKQYEEKPLFGLLQNWAESVGDKLRTSFLAFNMDTVDDLAFLLKAVKFRERVLQRGLVARIYYKNALWEGPGVKELKLPAHNHMSNLGSVPCSSSHSFRDCKHGTVNTCCNLMRVPEPEPHHQAASGFPGFRNCVHNEHLV

SEQ ID NO: 5417 - protein, 181 aa, Artificial Sequence
  Synthetic polypeptide
GYMMENRISGLKCDTDVFATFEGDDVVMLQVVGRELLAQYTKQYEEKPLFGLLQNWAESVGDKLRTSFLAFNMDTVDDLAFLLKAVKFRERVLQRGLVARIYYKNALWEGPGVKELKLPAHNHMSNLGSVPCSSSHSFRDCKHGTVNTCCNLMRVPEPEPHHQAASGFPGFRNCVHNEHLV

SEQ ID NO: 5418 - protein, 121 aa, Artificial Sequence
  Synthetic polypeptide
GDKLRTSFLAFNMDTVDDLAFLLKAVKFRERVLQRGLVARIYYKNALWEGPGVKELKLPAHNHMSNLGSVPCSSSHSFRDCKHGTVNTCCNLMRVPEPEPHHQAASGFPGFRNCVHNEHLV

SEQ ID NO: 5419 - protein, 215 aa, Artificial Sequence
  Synthetic polypeptide
MSNFYEERTTMIAARDLQEFVPFGRDHCKHHPNALNLQLRQLQPASELWSSDGAAGLVGSLQEVTIHEKQKESWQLRKGVSEIGEDVDYDEELYVAGNMVIWSKGSKSQALAVYKAFTVDSPVQQALWCDFIISQDKSEKAYSSNEVEKCICILQSSCINMHSIEGKDYIASLPFQVANVWPTKYGLLFERSASSHEVPPGSPSKLDGTGGHDSK

SEQ ID NO: 5420 - protein, 531 aa, Artificial Sequence
  Synthetic polypeptide
MVAACRSVAGLLPRRRRCFPARAPLLRVALCLLCWTPAAVRAVPELGLWLETVNDKSGPLIFRKTMFNSTDIKLSVKSFHCSGPVKFTIVWHLKYHTCHNEHSNLEELFQKHKLSVDEDFCHYLKNDNCWTTKNENLDCNSDSQVFPSLNNKELINIRNVSNQERSMDVVARTQKDGFHIFIVSIKTENTDASWNLNVSLSMIGPHGYISASDWPLMIFYMVMCIVYILYGILWLTWSACYWKDILRIQFWIAAVIFLGMLEKAVFYSEYQNISNTGLSTQGLLIFAELISAIKRTLARLLVIIVSLGYGIVKPRLGTVMHRVIGLGLLYLIFAAVEGVMRVIGGSNHLAVVLDDIILAVIDSIFVWFIFISLAQTMKTLRLRKNTVKFSLYRHFKNTLIFAVLASIVFMGWTTKTFRIAKCQSDWMERWVDDAFWSFLFSLILIVIMFLWRPSANNQRYAFMPLIDDSDDEIEEFMVTSENLTEGIKLRASKSVSNGTAKPATSENFASSMSIIWELVRDAESQAYPGRS

SEQ ID NO: 5421 - protein, 31 aa, Artificial Sequence
  Synthetic polypeptide
MVPSSPRALFLLLLILACPEPRASQRVLTNP

SEQ ID NO: 5422 - protein, 299 aa, Artificial Sequence
  Synthetic polypeptide
MYTFVVRDENSSVYAEVSRLLLATGHWKRLRRDNPRFNLMLGERNRLPFGRLGHEPGLVQLVNYYRGADKLCRKASLVKLIKTSPELAESCTWFPESYVIYPTNLKTPVAPAQNGIQPPISNSRTDEREFFLASYNRKKEDGEGNVWIAKSSAGAKGEGILISSEASELLDFIDNQGQVHVIQKYLEHPLLLEPGHRKFDIRSWVLVDHQYNIYLYREGVLRTASEPYHVDNFQDKTCHLTNHCIQKEYSKNYGKYEEGNEMFFKEFNQYLTSALNITLESSILLQIKHIIREKPRTRL

SEQ ID NO: 5423 - protein, 347 aa, Artificial Sequence
  Synthetic polypeptide
MYTFVVRDENSSVYAEVSRLLLATGHWKRLRRDNPRFNLMLGERNRLPFGRLGHEPGLVQLVNYYRGADKLCRKASLVKLIKTSPELAESCTWFPESYVIYPTNLKTPVAPAQNGIQPPISNSRTDEREFFLASYNRKKEDGEGNVWIAKSSAGAKGEGILISSEASELLDFIDNQGQVHVIQKYLEHPLLLEPGHRKFDIRSWVLVDHQYNIYLYREGVLRTASEPYHVDNFQDKTCHLTNHCIQKEYSKNYGKYEEGNEMFFKEFNQYLTSALNITLESSILLQIKHIIRNCLLSVEPAISTKHLPYQSFQLFGFDFMVDEELKVWLIEVNGAPACAQEKPRTRL

SEQ ID NO: 5424 - protein, 197 aa, Artificial Sequence
  Synthetic polypeptide
MATLITSTTAATAASGPLVDYLWMLILGFIIAFVLAFSVGANDVANSFGTAVGSGVVTLKQACILASIFETVGSVLLGAKVSETIRKGLIDVEMYNSTQGLLMAGSVSAMFGSAVWQLVASFLKLPISGTHCIVGATIGFSLVAKGQEGVKWSELIKIVMSWFVSPLLSGIMSGILFFLVRAFILHKHLSVLYIIPY

SEQ ID NO: 5425 - protein, 2 aa, Artificial Sequence
  Synthetic polypeptide
MN

SEQ ID NO: 5426 - protein, 11 aa, Artificial Sequence
  Synthetic polypeptide
FILPGSCIHPP

SEQ ID NO: 5427 - protein, 24 aa, Artificial Sequence
  Synthetic polypeptide
YSSWFVHSSSISICQYFTLFHTRR

SEQ ID NO: 5428 - protein, 17 aa, Artificial Sequence
  Synthetic polypeptide
RAFILHKHLSVLYIIPY

SEQ ID NO: 5429 - protein, 977 aa, Artificial Sequence
  Synthetic polypeptide
MMGDYRLPDHPQPMEILNLYLGDSLEPHPGECPRETCSHEDPPEPFEEQTWATDPPEPTRQNVPPWGSGVELTHLGSWVHQDGLEPCQEQTRATDPPESTRQDAPPWGSGVELTHLGSPSAQREHRQNTASPGSPVNSHLPGSPKQNRSTSTQVVFWAGILQAQMCVLDLEEELEKTEGLKAGLKCCLPTPPVDLPGDTGLHSSPPENEDSGEDSSEPEGEGQAWLREGTPDSSPQWGAEEESMFFSNPLFLASPCSENSASGECFSWGASDSHAGVRTGPESPATLEPPLPEDTVLWELESEPDLGDGAAISGHCTPPFPVPIYKPHSICWASVAAAEGAPAAPPGHGESEGDRLGPAPSAAPCVDEALTWESGCVGSDLGPAAHPVQPWASLSPEGWQRGGPFWPQVTLNSQDRDEREGGHPQESLPCTLAPCPWRSPASSPEPSSPESESRGPGPRPSPASSQEGSPQLQHHSSGILPKWTLDASQSSLLETDGEQPSSLKKKEAGEAPKPGEEVKSEGTARPAETGDVQPDIHLTSAEHENLRTPMNSSWLPGSPMPQAQSPEEGQRPPAGDKLANGVRNNKVAWNLASRLYRLEGFRKSEVAAYLQKNNDFSRAVAEEYLSFFQFGGQSLDRALRSFLQALVLSGETQERERILYQFSRRFHHCNPGIFPSVDSVHTLTCAIMLLNTDLHGQNIGKSMSCQEFITNLNGLRDGGNFPKELLKALYWSIRSEKLEWAVDEEDTARPEKAQPSLPAGKMSKPFLQLAQDPTVPTYKQGILARKMHQDADGKKTPWGKRGWKMFHTLLRGMVLYFLKQGEDHCLEGESLVGQMVDEPVGVHHSLATPATHYTKKPHVFQLRTADWRLYLFQAPTAKEMSSWIARINLAAATHSAPPFPAAVGSQRRFVRPILPVGPAQSSLEEQHRSHENCLDAAADDLLDLQRNLPERRGRGRELEEHRLRKEYLEYEDTAQRN

SEQ ID NO: 5430 - protein, 948 aa, Artificial Sequence
  Synthetic polypeptide
MMGDYRLPDHPQPMEILNLYLGDSLEPHPGECPRETCSHEDPPEPFEEQTWATDPPEPTRQNVPPWGSGVELTHLGSWVHQDGLEPCQEQTRATDPPESTRQDAPPWGSGVELTHLGSPSAQREHRQNTASPGSPVNSHLPGSPKQNRSTSTQVVFWAGILQAQMCVLDLEEELEKTEGLKAGLKCCLPTPPVDLPGDTGLHSSPPENEDSGEDSSEPEGEGQAWLREGTPDSSPQWGAEEESMFFSNPLFLASPCSENSASGECFSWGASDSHAGVRTGPESPATLEPPLPEDTVLWELESEPDLGDGAAISGHCTPPFPVPIYKPHSICWASVAAAEGAPAAPPGHGESEGDRLGPAPSAAPCVDEALTWESGCVGSDLGPAAHPVQPWASLSPEGWQRGGPFWPQVTLNSQDREPSSPESESRGPGPRPSPASSQEGSPQLQHHSSGILPKWTLDASQSSLLETDGEQPSSLKKKEAGEAPKPGEEVKSEGTARPAETGDVQPDIHLTSAEHENLRTPMNSSWLPGSPMPQAQSPEEGQRPPAGDKLANGVRNNKVAWNLASRLYRLEGFRKSEVAAYLQKNNDFSRAVAEEYLSFFQFGGQSLDRALRSFLQALVLSGETQERERILYQFSRRFHHCNPGIFPSVDSVHTLTCAIMLLNTDLHGQNIGKSMSCQEFITNLNGLRDGGNFPKELLKALYWSIRSEKLEWAVDEEDTARPEKAQPSLPAGKMSKPFLQLAQDPTVPTYKQGILARKMHQDADGKKTPWGKRGWKMFHTLLRGMVLYFLKGEDHCLEGESLVGQMVDEPVGVHHSLATPATHYTKKPHVFQLRTADWRLYLFQAPTAKEMSSWIARINLAAATHSAPPFPAAVGSQRRFVRPILPVGPAQSSLEEQHRSHENCLDAAADDLLDLQRNLPERRGRGRELEEHRLRKEYLEYEDTAQRN

SEQ ID NO: 5431 - protein, 150 aa, Artificial Sequence
  Synthetic polypeptide
MHQDADGKKTPWGKRGWKMFHTLLRGMVLYFLKGEDHCLEGESLVGQMVDEPVGVHHSLATPATHYTKKPHVFQLRTADWRLYLFQAPRSSIDPTRTAWTLPRTTCWIYRGTCRSGGAVAASWRSTACGRSTWSTRTQPRETEPEFAAMF

SEQ ID NO: 5432 - protein, 111 aa, Artificial Sequence
  Synthetic polypeptide
MSRPPPTGKMPGAPETAPGDGAGASRQRKLEALIRDPRSPINVESLLDGLNSLVLDLDFPALRKNKNIDNFLNRYEKIVKKIRGLQMKAEDYDVVKVIGRGAFGEVQLHYS

SEQ ID NO: 5433 - protein, 25 aa, Artificial Sequence
  Synthetic polypeptide
MKAEDYDVVKVIGRGAFGEVQLHYS

SEQ ID NO: 5434 - protein, 255 aa, Artificial Sequence
  Synthetic polypeptide
MVPPRRHRGAGRPGVLSSSPPFRLRSAKFSGIALEDLRRALKTRLQMVCVFVMNRMNSQNSGFTQRRRMALGIVILLLVDVIWVASSELTSYVFTQYNKPFFSTFAKTSMFVLYLLGFIIWKPWRQQCTRGLRGKHAAFFADAEGYFAACTTDTTMNSSLSEPLYVPVKFHDLPSEKPESTNIDTEKTPKKSRVRFSNIMEIRQLPSSHALEAKLSRMSYPVKEQESILKTVGKLTATQVAKISFFFCFVPSYTT

SEQ ID NO: 5435 - protein, 249 aa, Artificial Sequence
  Synthetic polypeptide
MDSSGWRGVLSSSPPFRLRSAKFSGIALEDLRRALKTRLQMVCVFVMNRMNSQNSGFTQRRRMALGIVILLLVDVIWVASSELTSYVFTQYNKPFFSTFAKTSMFVLYLLGFIIWKPWRQQCTRGLRGKHAAFFADAEGYFAACTTDTTMNSSLSEPLYVPVKFHDLPSEKPESTNIDTEKTPKKSRVRFSNIMEIRQLPSSHALEAKLSRMSYPVKEQESILKTVGKLTATQVAKISFFFCFVPSYTT

SEQ ID NO: 5436 - protein, 56 aa, Artificial Sequence
  Synthetic polypeptide
MSRPPPTGKMPGAPETAPGDGAGASRQRKLEALIRDPRSPINVESLLSYLALRQCM

SEQ ID NO: 5437 - protein, 365 aa, Artificial Sequence
  Synthetic polypeptide
MGNSYAGQLKTTRFEEVLHNSIEASLRSNNLVPRPIFSQLYLEAEQQLAALEGGSRVDNEEEEEEGEGGLETNGPPNPFQLHPLPEGCCTTDGFCQAGKDLRLVSISNEPMDVPAGFLLVGVKSPSLPDHLLVCAVDKRFLPDDNGHNALLGFSGNCVGCGKKGFCYFTEFSNHINLKLTTQPKKQKHLKYYLVRNAQGTLTKGPLICWKGSEFRSRQIPASTCSSSLFPALESTAAFPSEPVPGTNPSILMGAQQAGPASDHPSLNAAMGPAVFNGKDSPKCQQLAKNNLLALPRPSALGILSNSGPPKKRHKGWSPESPSAPDGGCPQGGGNRAKYGISKRRLNYWGKDGRNELKGAVDLRNL

SEQ ID NO: 5438 - protein, 1123 aa, Artificial Sequence
  Synthetic polypeptide
MGNSYAGQLKTTRFEEVLHNSIEASLRSNNLVPRPIFSQLYLEAEQQLAALEGGSRVDNEEEEEEGEGGLETNGPPNPFQLHPLPEGCCTTDGFCQAGKDLRLVSISNEPMDVPAGFLLVGVKSPSLPDHLLVCAVDKRFLPDDNGHNALLGFSGNCVGCGKKGFCYFTEFSNHINLKLTTQPKKQKHLKYYLVRNAQGTLTKGPLICWKGSEFRSRQIPASTCSSSLFPALESTAAFPSEPVPGTNPSILMGAQQAGPASDHPSLNAAMGPAVFNGKDSPKCQQLAKNNLLALPRPSALGILSNSGPPKKRHKGWSPESPSAPDGGCPQGGGNRAKYESAGMSCVPQVGLVGPASVTFPVVASGEPVSVPDNLLKICKAKPVIFKGHGNFPYLCGNLNDVVVSPLLYTCYQNSQSVSRAYEQYGASAIQPISEEMQLLLTVYYLVQLAADQVPLMEDLEQIFLRSWRESHLTEIRQYQQAPPQPFPPAPSAAAPVTSAQLPWLASLAASSCNDSVHVIECAYSLAEGLSEMFRLLVEGKLAKTNYVVIICACRSAAIDSCIAVTGKYQARILSESLLTPAEYQKEVNYELVTGKVDSLGAFFSTLCPEGDIDILLDKFHQENQGHISSSLAASSVTKAASLDVSGTPVCTSYNLEPHSIRPFQLAVAQKLLSHVCSIADSSTQNLDLGSFEKVDFLICIPPSEVTYQQTLLHVWHSGVLLELGLKKEHMTKQRVEQYVLKLDTEAQTKFKAFLQNSFQNPHTLFVLIHDHAHWDLVSSTVHNLYSQSDPSVGLVDRLLNCREVKEAPNIVTLHVTSFPYALQTQHTLISPYNEIHWPASCSNGVDLYHENKKYFGLSEFIESTLSGHSLPLLRYDSSFEAMVTALGKRFPRLHSAVIRTFVLVQHYAAALMAVSGLPQMKNYTSVETLEITQNLLNSPKQCPCGHGLMVLLRVPCSPLAVVAYERLAHVRARLALEEHFEIILGSPSSGVTVGKHFVKQLRMWQKIEDVEWRPQTYLELEGLPCILIFSGMDPHGESLPRSLRYCDLRLINSSCLVRTALEQELGLAAYFVSNEVPLEKGARNEALESDAEKLSSTDNEDEELGTEASACSSVKCRWKGLPA

SEQ ID NO: 5439 - protein, 121 aa, Artificial Sequence
  Synthetic polypeptide
MWQKIEDVEWRPQTYLELEGLPCILIFSGMDPHGESLPRSLRYCDLRLINSSCLVRTALEQELGLAAYFVSNEVPLEKGARNEALESDAEKLSSTDNEDEELGTEASACSSVKCRWKGLPA

SEQ ID NO: 5440 - protein, 751 aa, Artificial Sequence
  Synthetic polypeptide
MGEQDGIRSSSWETSQGKSSPDSAWSWIPIMRDPGWIRNVWSSNINVQTMNYVGQLAGQVFVTVKELYKGLNPATLSGCIDIIVIRQPNGNLQCSPFHVRFGKMGVLRSREKVVDIEINGESVDLHMKLGDNGEAFFVQETDNDQEVIPMHLATSPILSEGASRMECQLKRGSVDRMRGLDPSTPAQVIAPSETPSSSSVVKKRRKRRRKSQLDSLKRDDNMNTSEDEDMFPIEMSSDEAMELLESSRTLPNDIPPFQDDIPEENLSLAVIYPQSASYPNSDREWSPTPSSLVDCKRTAPHLAVAAEGGLSSSCPPQSSLFHPSESPSGSRPSTPKSDSELVSKSTERTGQKNPEMLWLWGELPQAAKSSSPHKMKESSPLSSRKICDKSHFQAIHSESSDTFSDQSPTLVGGALLDQNKPQTEMQFVNEEDLETLGAAAPLLPMIEELKPPSASVVQTANKTDSPSRKRDKRSRHLGADGVYLDDLTDMDPEVAALYFPKNGDPSGLAKHASDNGARSANQSPQSVGSSGVDSGVESTSDGLRDLPSIAISLCGGLSDHREITKDAFLEQAVSYQQFVDNPAIIDDPNLVVKIGSKYYNWTTAAPLLLAMQAFQKPLPKATVESIMRDKMPKKGGRWWFSWRGRNTTIKEESKPEQCLAGKAHSTGEQPPQLSLATREFSRDLMVLQTSGISPACTHSVLLPCEEGTCFSFAFSHDCKFPEASPAMWNCESINTSFLYKLPSLGYFFIAV

SEQ ID NO: 5441 - protein, 708 aa, Artificial Sequence
  Synthetic polypeptide
MSRVQTMNYVGQLAGQVFVTVKELYKGLNPATLSGCIDIIVIRQPNGNLQCSPFHVRFGKMGVLRSREKVVDIEINGESVDLHMKLGDNGEAFFVQETDNDQEVIPMHLATSPILSEGASRMECQLKRGSVDRMRGLDPSTPAQVIAPSETPSSSSVVKKRRKRRRKSQLDSLKRDDNMNTSEDEDMFPIEMSSDEAMELLESSRTLPNDIPPFQDDIPEENLSLAVIYPQSASYPNSDREWSPTPSSLVDCKRTAPHLAVAAEGGLSSSCPPQSSLFHPSESPSGSRPSTPKSDSELVSKSTERTGQKNPEMLWLWGELPQAAKSSSPHKMKESSPLSSRKICDKSHFQAIHSESSDTFSDQSPTLVGGALLDQNKPQTEMQFVNEEDLETLGAAAPLLPMIEELKPPSASVVQTANKTDSPSRKRDKRSRHLGADGVYLDDLTDMDPEVAALYFPKNGDPSGLAKHASDNGARSANQSPQSVGSSGVDSGVESTSDGLRDLPSIAISLCGGLSDHREITKDAFLEQAVSYQQFVDNPAIIDDPNLVVKIGSKYYNWTTAAPLLLAMQAFQKPLPKATVESIMRDKMPKKGGRWWFSWRGRNTTIKEESKPEQCLAGKAHSTGEQPPQLSLATREFSRDLMVLQTSGISPACTHSVLLPCEEGTCFSFAFSHDCKFPEASPAMWNCESINTSFLYKLPSLGYFFIAV

SEQ ID NO: 5442 - protein, 672 aa, Artificial Sequence
  Synthetic polypeptide
MSRVQTMNYVGQLAGQVFVTVKELYKGLNPATLSGCIDIIVIRQPNGNLQCSPFHVRFGKMGVLRSREKVVDIEINGESVDLHMKLGDNGEAFFVQETDNDQEVIPMHLATSPILSEGASRMECQLKRGSVDRMRGLDPSTPAQVIAPSETPSSSSVVKKRRKRRRKSQLDSLKRDDNMNTSEDEDMFPIEMSSDEAMELLESSRTLPNDIPPFQDDIPEENLSLAVIYPQSASYPNSDREWSPTPSPSGSRPSTPKSDSELVSKSTERTGQKNPEMLWLWGELPQAAKSSSPHKMKESSPLSSRKICDKSHFQAIHSESSDTFSDQSPTLVGGALLDQNKPQTEMQFVNEEDLETLGAAAPLLPMIEELKPPSASVVQTANKTDSPSRKRDKRSRHLGADGVYLDDLTDMDPEVAALYFPKNGDPSGLAKHASDNGARSANQSPQSVGSSGVDSGVESTSDGLRDLPSIAISLCGGLSDHREITKDAFLEQAVSYQQFVDNPAIIDDPNLVVKIGSKYYNWTTAAPLLLAMQAFQKPLPKATVESIMRDKMPKKGGRWWFSWRGRNTTIKEESKPEQCLAGKAHSTGEQPPQLSLATREFSRDLMVLQTSGISPACTHSVLLPCEEGTCFSFAFSHDCKFPEASPAMWNCESINTSFLYKLPSLGYFFIAV

SEQ ID NO: 5443 - protein, 666 aa, Artificial Sequence
  Synthetic polypeptide
MNYVGQLAGQVFVTVKELYKGLNPATLSGCIDIIVIRQPNGNLQCSPFHVRFGKMGVLRSREKVVDIEINGESVDLHMKLGDNGEAFFVQETDNDQEVIPMHLATSPILSEGASRMECQLKRGSVDRMRGLDPSTPAQVIAPSETPSSSSVVKKRRKRRRKSQLDSLKRDDNMNTSEDEDMFPIEMSSDEAMELLESSRTLPNDIPPFQDDIPEENLSLAVIYPQSASYPNSDREWSPTPSPSGSRPSTPKSDSELVSKSTERTGQKNPEMLWLWGELPQAAKSSSPHKMKESSPLSSRKICDKSHFQAIHSESSDTFSDQSPTLVGGALLDQNKPQTEMQFVNEEDLETLGAAAPLLPMIEELKPPSASVVQTANKTDSPSRKRDKRSRHLGADGVYLDDLTDMDPEVAALYFPKNGDPSGLAKHASDNGARSANQSPQSVGSSGVDSGVESTSDGLRDLPSIAISLCGGLSDHREITKDAFLEQAVSYQQFVDNPAIIDDPNLVVKIGSKYYNWTTAAPLLLAMQAFQKPLPKATVESIMRDKMPKKGGRWWFSWRGRNTTIKEESKPEQCLAGKAHSTGEQPPQLSLATREFSRDLMVLQTSGISPACTHSVLLPCEEGTCFSFAFSHDCKFPEASPAMWNCESINTSFLYKLPSLGYFFIAV

SEQ ID NO: 5444 - protein, 396 aa, Artificial Sequence
  Synthetic polypeptide
MLWLWGELPQAAKSSSPHKMKESSPLSSRKICDKSHFQAIHSESSDTFSDQSPTLVGGALLDQNKPQTEMQFVNEEDLETLGAAAPLLPMIEELKPPSASVVQTANKTDSPSRKRDKRSRHLGADGVYLDDLTDMDPEVAALYFPKNGDPSGLAKHASDNGARSANQSPQSVGSSGVDSGVESTSDGLRDLPSIAISLCGGLSDHREITKDAFLEQAVSYQQFVDNPAIIDDPNLVVKIGSKYYNWTTAAPLLLAMQAFQKPLPKATVESIMRDKMPKKGGRWWFSWRGRNTTIKEESKPEQCLAGKAHSTGEQPPQLSLATREFSRDLMVLQTSGISPACTHSVLLPCEEGTCFSFAFSHDCKFPEASPAMWNCESINTSFLYKLPSLGYFFIAV

SEQ ID NO: 5445 - protein, 167 aa, Artificial Sequence
  Synthetic polypeptide
MQAFQKPLPKSSCLSYLHVILDAIRFCFSKIFNAQIATVESIMRDKMPKKGGRWWFSWRGRNTTIKEESKPEQCLAGKAHSTGEQPPQLSLATREFSRDLMVLQTSGISPACTHSVLLPCEEGTCFSFAFSHDCKFPEASPAMWNCESINTSFLYKLPSLGYFFIAV

SEQ ID NO: 5446 - protein, 193 aa, Artificial Sequence
  Synthetic polypeptide
IDDPNLVVKIGSKYYNWTTAAPLLLAMQAFQKPLPKSSCLSYLHVILDAIRFCFSKIFNAQIATVESIMRDKMPKKGGRWWFSWRGRNTTIKEESKPEQCLAGKAHSTGEQPPQLSLATREFSRDLMVLQTSGISPACTHSVLLPCEEGTCFSFAFSHDCKFPEASPAMWNCESINTSFLYKLPSLGYFFIAV

SEQ ID NO: 5447 - protein, 365 aa, Artificial Sequence
  Synthetic polypeptide
MPEEMDKPLISLHLVDSDSSLAKVPDEAPKVGILGSGDFARSLATRLVGSGFKVVVGSRNPKRTARLFPSAAQVTFQEEAVSSPEVIFVAVFREHYSSLCSLSDQLAGKILVDVSNPTEQEHLQHRESNAEYLASLFPTCTVVKAFNVISAWTLQAGPRDGNRQVPICGDQPEAKRAVSEMALAMGFMPVDMGSLASAWEVEAMPLRLLPAWKVPTLLALGLFVCFYAYNFVRDVLQPYVQESQNKFFKLPVSVVNTTLPCVAYVLLSLVYLPGVLAAALQLRRGTKYQRFPDWLDHWLQHRKQIGLLSFFCAALHALYSFCLPLRRAHRYDLVNLAVKQNKSTSISQCFTENTLTSRNSATRSS

SEQ ID NO: 5448 - protein, 375 aa, Artificial Sequence
  Synthetic polypeptide
MSHQPAVATKMPEEMDKPLISLHLVDSDSSLAKVPDEAPKVGILGSGDFARSLATRLVGSGFKVVVGSRNPKRTARLFPSAAQVTFQEEAVSSPEVIFVAVFREHYSSLCSLSDQLAGKILVDVSNPTEQEHLQHRESNAEYLASLFPTCTVVKAFNVISAWTLQAGPRDGNRQVPICGDQPEAKRAVSEMALAMGFMPVDMGSLASAWEVEAMPLRLLPAWKVPTLLALGLFVCFYAYNFVRDVLQPYVQESQNKFFKLPVSVVNTTLPCVAYVLLSLVYLPGVLAAALQLRRGTKYQRFPDWLDHWLQHRKQIGLLSFFCAALHALYSFCLPLRRAHRYDLVNLAVKQNKSTSISQCFTENTLTSRNSATRSS

SEQ ID NO: 5449 - protein, 214 aa, Artificial Sequence
  Synthetic polypeptide
MAVVKTPSRGLKNAKEPFNNASPHLLKNLVEEPKKRKEVPNHLLESKVYAKLVNNKVIQARPGIIHFGGYQVEKQHQQILHLVNVSNEDTRVHILPPQTKYFEINYVRKEHHLVPGLSLTVTVTFSPDEWRYYYDCIRVHCKGDDTLLVPIHAYPVMNSLDFPSFINLSNVLLGESKTYVIPLQCSCPVDFEFYITLIQSHQAFAIEPTSDFFQ

SEQ ID NO: 5450 - protein, 35 aa, Artificial Sequence
  Synthetic polypeptide
VIPLQCSCPVDFEFYITLIQSHQAFAIEPTSDFFQ

SEQ ID NO: 5451 - protein, 292 aa, Artificial Sequence
  Synthetic polypeptide
MLSFFRRTLGRRSMRKHAEKERLREAQRAATHIPAAGDSKSIITCRVSLLDGTDVSVDLPKKAKGQELFDQIMYHLDLIESDYFGLRFMDSAQVAHWLDGTKSIKKQVKIGSPYCLHLRVKFYSSEPNNLREELTRYLFVLQLKQDILSGKLDCPFDTAVQLAAYNLQAELGDYDLAEHSPELVSEFRFVPIQTEEMELAIFEKWKEYRGQTPAQAETNYLNKAKWLEMYGVDMHVVKARDGNDYSLGLTPTGVLVFEGDTKIGLFFWPKITRLDFKKNKLTLVVVEDDDQP

SEQ ID NO: 5452 - protein, 64 aa, Artificial Sequence
  Synthetic polypeptide
MKQRQSALQWVICVSQPQKTSEMAANKSKGQSSLALHKVIMVGSGGVGKSALTLQFMYDEHYLQ

SEQ ID NO: 5453 - protein, 42 aa, Artificial Sequence
  Synthetic polypeptide
MAANKSKGQSSLALHKVIMVGSGGVGKSALTLQFMYDEHYLQ

SEQ ID NO: 5454 - protein, 55 aa, Artificial Sequence [sequence omitted]

SEQ ID NO: 5455 - protein, 47 aa, Artificial Sequence
  Synthetic polypeptide
ASEKQEAKSGILEAAGFPDPGKKASPLVVAAAAAAAVAAQGVSFSMK

SEQ ID NO: 5456 - protein, 259 aa, Artificial Sequence
  Synthetic polypeptide
MLFWHTQPEHYNQHNSGSYLRDVLALPIFKQEEPQLSPENEARLPPLQYVLCAATSPAVKLHEETLTYLNQGQSYEIRLLENRKLGDFQDLNTKYVKSIIRVVFHDRRLQYTEHQQLEGWRWSRPGDRILDIDIPLSVGILDPRASPTQLNAVEFLWDPAKRASAFIQVHCISTEFTPRKHGGEKGVPFRVQIDTFKQNENGEYTEHLHSASCQIKVFKPKGADRKQKTDREKMEKRTAQEKEKYQPSYETTILTEEAQ

SEQ ID NO: 5457 - protein, 288 aa, Artificial Sequence
  Synthetic polypeptide
MLFWHTQPEHYNQHNSGSYLRDVLALPIFKQEEPQLSPENEARLPPLQYVLCAATSPAVKLHEETLTYLNQGQSYEIRLLENRKLGDFQDLNTKYVKSIIRVVFHDRRLQYTEHQQLEGWRWSRPGDRILDIDIPLSVGILDPRASPTQLNAVEFLWDPAKRASAFIQVHCISTEFTPRKHGGEKGVPFRVQIDTFKQNENGEYTEHLHSASCQIKVFKPKGADRKQKTDREKMEKRTAQEKEKYQPSYETTILTEEKLFVNNWLVSFFLSRGPKNHMTVMFPLWFYC

SEQ ID NO: 5458 - protein, 767 aa, Artificial Sequence
  Synthetic polypeptide
MEPRMESCLAQVLQKDVGKRLQVGQELIDYFSDKQKSADLEHDQTMLDKLVDGLATSWVNSSNYKVVLLGMDILSALVTRLQDRFKAQIGTVLPSLIDRLGDAKDSVREQDQTLLLKIMDQAANPQYVWDRMLGGFKHKNFRTREGICLCLIATLNASGAQTLTLSKIVPHICNLLGDPNSQVRDAAINSLVEIYRHVGERVRADLSKKGLPQSRLNVIFTKFDEVQKSGNMIQSANDKNFDDEDSVDGNRPSSASSTSSKAPPSSRRNVGMGTTRRLGSSTLGSKSSAAKEGAGAVDEEDFIKAFDDVPVVQIYSSRDLEESINKIREILSDDKHDWEQRVNALKKIRSLLLAGAAEYDNFFQHLRLLDGAFKLSAKDLRSQVVREACITLGHLSSVLGNKFDHGAEAIMPTIFNLIPNSAKIMATSGVVAVRLIIRHTHIPRLIPVITSNCTSKSVAVRRRCFEFLDLLLQEWQTHSLERHISVLAETIKKGIHDADSEARIEARKCYWGFHSHFSREAEHLYHTLESSYQKALQSHLKNSDSIVSLPQSDRSSSSSQESLNRPLSAKRSPTGSTTSRASTVSTKSVSTTGSLQRSRSDIDVNAAASAKSKVSSSSGTTPFSSAAALPPGSYASLGRIRTRRQSSGSATNVASTPDNRGRSRAKVVSQSQRSRSANPAGAGSRSSSPGKLLGSGYGGLTGGSSRGPPVTPSSEKRSKIPRSQGCSRETSPNRIGLGRVQWLTPVIPALREAEVDESLEVRSWRPA

SEQ ID NO: 5459 - protein, 536 aa, Artificial Sequence
  Synthetic polypeptide
MLQNCSDKNFDDEDSVDGNRPSSASSTSSKAPPSSRRNVGMGTTRRLGSSTLGSKSSAAKEGAGAVDEEDFIKAFDDVPVVQIYSSRDLEESINKIREILSDDKHDWEQRVNALKKIRSLLLAGAAEYDNFFQHLRLLDGAFKLSAKDLRSQVVREACITLGHLSSVLGNKFDHGAEAIMPTIFNLIPNSAKIMATSGVVAVRLIIRHTHIPRLIPVITSNCTSKSVAVRRRCFEFLDLLLQEWQTHSLERHISVLAETIKKGIHDADSEARIEARKCYWGFHSHFSREAEHLYHTLESSYQKALQSHLKNSDSIVSLPQSDRSSSSSQESLNRPLSAKRSPTGSTTSRASTVSTKSVSTTGSLQRSRSDIDVNAAASAKSKVSSSSGTTPFSSAAALPPGSYASLGRIRTRRQSSGSATNVASTPDNRGRSRAKVVSQSQRSRSANPAGAGSRSSSPGKLLGSGYGGLTGGSSRGPPVTPSSEKRSKIPRSQGCSRETSPNRIGLGRVQWLTPVIPALREAEVDESLEVRSWRPA

SEQ ID NO: 5460 - protein, 775 aa, Artificial Sequence
  Synthetic polypeptide
MEPRMESCLAQVLQKDVGKRLQVGQELIDYFSDKQKSADLEHDQTMLDKLVDGLATSWVNSSNYKVVLLGMDILSALVTRLQDRFKAQIGTVLPSLIDRLGDAKDSVREQDQTLLLKIMDQAANPQYVWDRMLGGFKHKNFRTREGICLCLIATLNASGAQTLTLSKIVPHICNLLGDPNSQVRDAAINSLVEIYRHVGERVRADLSKKGLPQSRLNVIFTKFDEVQKSGNMIQSANDKNFDDEDSVDGNRPSSASSTSSKAPPSSRRNVGMGTTRRLGSSTLGSKSSAAKEGAGAVDEEDFIKAFDDVPVVQIYSSRDLEESINKIREILSDDKHDWEQRVNALKKIRSLLLAGAAEYDNFFQHLRLLDGAFKLSAKDLRSQVVREACITLGHLSSVLGNKFDHGAEAIMPTIFNLIPNSAKIMATSGVVAVRLIIRHTHIPRLIPVITSNCTSKSVAVRRRCFEFLDLLLQEWQTHSLERHISVLAETIKKGIHDADSEARIEARKCYWGFHSHFSREAEHLYHTLESSYQKALQSHLKNSDSIVSLPQSDRSSSSSQESLNRPLSAKRSPTGSTTSRASTVSTKSVSTTGSLQRSRSDIDVNAAASAKSKVSSSSGTTPFSSAAALPPGSYASLDGTTTKAEGRIRTRRQSSGSATNVASTPDNRGRSRAKVVSQSQRSRSANPAGAGSRSSSPGKLLGSGYGGLTGGSSRGPPVTPSSEKRSKIPRSQGCSRETSPNRIGLGRVQWLTPVIPALREAEVDESLEVRSWRPA

SEQ ID NO: 5461 - protein, 774 aa, Artificial Sequence
  Synthetic polypeptide
MEPRMESCLAQVLQKDVGKRLQVGQELIDYFSDKQKSADLEHDQTMLDKLVDGLATSWVNSSNYKVVLLGMDILSALVTRLQDRFKAQIGTVLPSLIDRLGDAKDSVREQDQTLLLKIMDQAANPQYVWDRMLGGFKHKNFRTREGICLCLIATLNASGAQTLTLSKIVPHICNLLGDPNSQVRDAAINSLVEIYRHVGERVRADLSKKGLPQSRLNVIFTKFDEVQKSGNMIQSANDKNFDDEDSVDGNRPSSASSTSSKAPPSSRRNVGMGTTRRLGSSTLGSKSSAAKEGAGAVDEEDFIKAFDDVPVVQIYSSRDLEESINKIREILSDDKHDWEQRVNALKKIRSLLLAGAAEYDNFFQHLRLLDGAFKLSAKDLRSQVVREACITLGHLSSVLGNKFDHGAEAIMPTIFNLIPNSAKIMATSGVVAVRLIIRHTHIPRLIPVITSNCTSKSVAVRRRCFEFLDLLLQEWQTHSLERHISVLAETIKKGIHDADSEARIEARKCYWGFHSHFSREAEHLYHTLESSYQKALQSHLKNSDSIVSLPQSDRSSSSSQESLNRPLSAKRSPTGSTTSRASTVSTKSVSTTGSLQRSRSDIDVNAAASAKSKVSSSSGTTPFSSAAALPPGSYASLESRHMREDMEYIGLDSGRIRTRRQSSGSATNVASTPDNRGRSRAKVVSQSQPGSRSSSPGKLLGSGYGGLTGGSSRGPPVTPSSEKRSKIPRSQGCSRETSPNRIGLGRVQWLTPVIPALREAEVDESLEVRSWRPA

SEQ ID NO: 5462 - protein, 543 aa, Artificial Sequence
  Synthetic polypeptide
MTTGKDKNFDDEDSVDGNRPSSASSTSSKAPPSSRRNVGMGTTRRLGSSTLGSKSSAAKEGAGAVDEEDFIKAFDDVPVVQIYSSRDLEESINKIREILSDDKHDWEQRVNALKKIRSLLLAGAAEYDNFFQHLRLLDGAFKLSAKDLRSQVVREACITLGHLSSVLGNKFDHGAEAIMPTIFNLIPNSAKIMATSGVVAVRLIIRHTHIPRLIPVITSNCTSKSVAVRRRCFEFLDLLLQEWQTHSLERHISVLAETIKKGIHDADSEARIEARKCYWGFHSHFSREAEHLYHTLESSYQKALQSHLKNSDSIVSLPQSDRSSSSSQESLNRPLSAKRSPTGSTTSRASTVSTKSVSTTGSLQRSRSDIDVNAAASAKSKVSSSSGTTPFSSAAALPPGSYASLDGTTTKAEGRIRTRRQSSGSATNVASTPDNRGRSRAKVVSQSQRSRSANPAGAGSRSSSPGKLLGSGYGGLTGGSSRGPPVTPSSEKRSKIPRSQGCSRETSPNRIGLGRVQWLTPVIPALREAEVDESLEVRSWRPA

SEQ ID NO: 5463 - protein, 12 aa, Artificial Sequence
  Synthetic polypeptide
LQNLMKSRNLET

SEQ ID NO: 5464 - protein, 108 aa, Artificial Sequence
  Synthetic polypeptide
PLFACPLVCSHNQGSRSANPAGAGSRSSSPGKLLGSGYGGLTGGSSRGPPVTPSSEKRSKIPRSQGCSRETSPNRIGLGRVQWLTPVIPALREAEVDESLEVRSWRPA

SEQ ID NO: 5465 - protein, 37 aa, Artificial Sequence
  Synthetic polypeptide
MAAGGSDPRAGDVEEDASQLIFPKATWMELEAIHLSN

SEQ ID NO: 5466 - protein, 191 aa, Artificial Sequence
  Synthetic polypeptide
MNIHRSTPITIARYGRSRNKTQDFEELSSIRSAEPSQSFSPNLGSPSPPETPNLSHCVSCIGKYLLLEPLEGDHVFRAVHLHSGEELVCKVFDISCYQESLAPCFCLSAHSNINQITEIILGETKAYVFFERSYGDMHSFVRTCKKLREEEAARLFYQIASAVAHCHDGGLVLRDLKLRKFIFKDEERNGP

SEQ ID NO: 5467 - protein, 55 aa, Artificial Sequence
  Synthetic polypeptide
MHSFVRTCKKLREEEAARLFYQIASAVAHCHDGGLVLRDLKLRKFIFKDEERNGP

SEQ ID NO: 5468 - protein, 140 aa, Artificial Sequence
  Synthetic polypeptide
MSRSLDSARSFLERLEARGGREGAVLAGEFSDIQACSAAWKADGVCSTVAGSRPENVRKNRYKDVLPYDQTRVILSLLQEEGHSDYINGNFIRGVDGSLAYIATQGPLPHTLLDFWRLVWEFGVKVILMACREIENGRFL

SEQ ID NO: 5469 - protein, 38 aa, Artificial Sequence
  Synthetic polypeptide
MNPVYSPGSSGVPYANAKGIGYPAWAMKVKLCLKRRQR

SEQ ID NO: 5470 - protein, 34 aa, Artificial Sequence
  Synthetic polypeptide
MNPVYSPGSSGVPYANAKGIGYPEKLARCGDTHL

SEQ ID NO: 5471 - protein, 203 aa, Artificial Sequence
  Synthetic polypeptide
MEGKRQLEKRDFGKRLSLDSSLVEYMDSNKYIEHLLTQLEEQHRSLWREKLAVARLQREVAQRTSEGAMHEKLIHELEEERHLRLQSEKRLQEVTLESERNRIQMRSLQQQFSRMEETVRNLLQSQGSPEQKKEETVNIMVYQEKLSEEERKHKEALEDLHMVVDEDSRSESSSTDEGKEKTKLLLERLKALEKHGWNWRPLS

SEQ ID NO: 5472 - protein, 124 aa, Artificial Sequence
  Synthetic polypeptide
MEGKRQLEKRDFGKRLSLDSSLVEYMDSNKYIEHLLTQLEEQHRSLWREKLAVARLQREVAQRTSEGAMHEKLIHELEEERHLRLQSEKRLQEVTLESERNRIQMRSLQQQFSRIHRGGCNVKM

SEQ ID NO: 5473 - protein, 13 aa, Artificial Sequence
  Synthetic polypeptide
DSLRKGTLEKGCL

SEQ ID NO: 5474 - protein, 360 aa, Artificial Sequence
  Synthetic polypeptide
MEGKRQLEKRDFGKRLSLDSSLVEYMDSNKYIEHLLTQLEEQHRSLWREKLAVARLQREVAQRTSEGAMHEKLIHELEEERHLRLQSEKRLQEVTLESERNRIQMRSLQQQFSRDVKDLFKENYKPLLKEIKEDTNKWKNIPCSWVGRINIVKMAILPKVIYRFNAIPIKLPMTFFTELEKTTLKFIWNQKRARIAKSILSQKNKAGGIALPDFKLYYKATVTKTAWYWYQNRDIDQWNRTEPSEITPHIYNYLIFDKPEKNKQWGKDSLFNKWCWENWLAICRKLKLDPFLTPYTKINSRWIKGLNVRPKTIKTLEENLGITIQDIGVGKDFMSKTPKAMATKAKIDKWDLIKLKSFCI

SEQ ID NO: 5475 - protein, 13 aa, Artificial Sequence
  Synthetic polypeptide
DSLRKGTLEKGCL

SEQ ID NO: 5476 - protein, 116 aa, Artificial Sequence
  Synthetic polypeptide
MEGKRQLEKRDFGKRLSLDSSLVEYMDSNKYIEHLLTQLEEQHRSLWREKLAVARLQREVAQRTSEGAMVCLTRAPEGSTKHGKEQPVPATAKTCQIVKTIDARKKLHQLTSKITS

SEQ ID NO: 5477 - protein, 13 aa, Artificial Sequence
  Synthetic polypeptide
DSLRKGTLEKGCL

SEQ ID NO: 5478 - protein, 13 aa, Artificial Sequence
  Synthetic polypeptide
DSLRKGTLEKGCL

SEQ ID NO: 5479 - protein, 24 aa, Artificial Sequence
  Synthetic polypeptide
MEGKRQLEKRDFGKRLSLDSSLVA

SEQ ID NO: 5480 - protein, 472 aa, Artificial Sequence
  Synthetic polypeptide
MALFTPWKLSSQKLGFFLVTFGFIWGMMLLHFTIQQRTQPESSSMLREQILDLSKRYIKALAEENRNVVDGPYAGVMTAYDLKKTLAVLLDNILQRIGKLESKVDNLVVNGTGTNSTNSTTAVPSLVALEKINVADIINGAQEKCVLPPMDGYPHCEGKIKWMKDMWRSDPCYADYGVDGSTCSFFIYLSEVENWCPHLPWRAKNPYEEADHNSLAEIRTDFNILYSMMKKHEEFRWMRLRIRRMADAWIQAIKSLAEKQNLEKRKRKKVLVHLGLLTKESGFKIAETAFSGGPLGELVQWSDLITSLYLLGHDIRISASLAELKEIMKKVVGNRSGCPTVGDRIVELIYIDIVGLAQFKKTLGPSWVHYQCMLRVLDSFGTEPEFNHANYAQSKGHKTPWGKWNLNPQQFYTMFPHTPDNSFLGFVVEQHLNSSDIHHINEIKRQNQSLVYGKVDSFWKGTSDSVWRQFWL

SEQ ID NO: 5481 - protein, 233 aa, Artificial Sequence
  Synthetic polypeptide
MEPAAGIQRRSSQGPTVPPPPRGHAPPAAAPGPAPLSSPVREPPQLEEERQVRISESGQFSDGLEDRGLLESSTRLKPHEAQNYRKKALWVSWFSIIVTLALAVAAFTVSVMRYSASAFGFAFDAILDVLSSAIVLWRYSNAAAVHSAHREYIACVILGVIFLLSSICIVVKAIHDLSTRLLPEVDDFLFSVSILSGILCSILAVLKFMLGKVLTSRALITDVFSSESRDDDD

SEQ ID NO: 5482 - protein, 188 aa, Artificial Sequence
  Synthetic polypeptide
MEPAAGIQRRSSQGPTVPPPPRGHAPPAAAPGPAPLSSPVREPPQLEEERQVRISESGQFSDGLEDRGLLESSTRLKPHEAQNYRKKALWVSWFSIIVTLALAVAAFTVSVMRYSASAFGFAFDAILDVLSSAIVLWRYSNAAAVHSAHREYIACVILGVIFLLSSICIVVKAIHDLSTRLLPEVVNG

SEQ ID NO: 5483 - protein, 169 aa, Artificial Sequence
  Synthetic polypeptide
MASGRGASSRWFFTREQLENTPSRRCGVEADKELSCRQQAANLIQEMGQRLNVSQLTINTAIVYMHRFYMHHSFTKFNKNIISSTALFLAAKVEEQARKLEHVIKVAHACLHPLEPLLDTKCDAYLQQTQELVILETIMLQTLATSCCYCSELTCYEYPRKMLCDTCHL

SEQ ID NO: 5484 - protein, 31 aa, Artificial Sequence
  Synthetic polypeptide
MLQTLATSCCYCSELTCYEYPRKMLCDTCHL

SEQ ID NO: 5485 - protein, 146 aa, Artificial Sequence
  Synthetic polypeptide
MASGRGASSRWFFTREQLENTPSRRCGVEADKELSCRQQAANLIQEMGQRLNVSQLTINTAIVYMHRFYMHHSFTKFNKNIISSTALFLAAKVEEQARKLEHVIKVAHACLHPLEPLLDTKCDAYLQQTQELVILETIMLQTLGLL

SEQ ID NO: 5486 - protein, 8 aa, Artificial Sequence
  Synthetic polypeptide
MLQTLGLL

SEQ ID NO: 5487 - protein, 113 aa, Artificial Sequence
  Synthetic polypeptide
MLQTLASKDLAQTSYFMATNSLHLTTFCLQYKPTVIACVCIHLACKWSNWEIPVSTDGKHWWEYVDPTVTLELLDGCVTAPLACSLPHCDKSMNVTCWIIRLFLVVLAGWLRT

SEQ ID NO: 5488 - protein, 97 aa, Artificial Sequence
  Synthetic polypeptide
MATNSLHLTTFCLQYKPTVIACVCIHLACKWSNWEIPVSTDGKHWWEYVDPTVTLELLDGCVTAPLACSLPHCDKSMNVTCWIIRLFLVVLAGWLRT

SEQ ID NO: 5489 - protein, 272 aa, Artificial Sequence
  Synthetic polypeptide
MASGRGASSRWFFTREQLENTPSRRCGVEADKELSCRQQAANLIQEMGQRLNVSQLTINTAIVYMHRFYMHHSFTKFNKNIISSTALFLAAKVEEQARKLEHVIKVAHACLHPLEPLLDTKCDAYLQQTQELVILETIMLQTLGFEITIEHPHTDVVKCTQLVRASKDLAQTSYFMATNSLHLTTFCLQYKPTVIACVCIHLACKWSNWEIPVSTDGKHWWEYVDPTVTLELLDGCVTAPLACSLPHCDKSMNVTCWIIRLFLVVLAGWLRT

SEQ ID NO: 5490 - protein, 37 aa, Artificial Sequence
  Synthetic polypeptide
QQSASYNLLSSVQTNSDSMCMHSFGLQMVQLGDPCIN

SEQ ID NO: 5491 - protein, 5 aa, Artificial Sequence
  Synthetic polypeptide
DPCIN

SEQ ID NO: 5492 - protein, 66 aa, Artificial Sequence
  Synthetic polypeptide
MAADSEPESEVFEITDFTTASEWERFISKVEEVLNDWKLIGNSLGKPLEKHCSQQRRLETNPNVHQ

SEQ ID NO: 5493 - protein, 788 aa, Artificial Sequence
  Synthetic polypeptide
MAADSEPESEVFEITDFTTASEWERFISKVEEVLNDWKLIGNSLGKPLEKGIFTSGTWEEKSDEISFADFKFSVTHHYLVQESTDKEGKDELLEDVVPQSMQDLLGMNNDFPPRAHCLVRWYGLREFVVIAPAAHSDAVLSESKCNLLLSSVSIALGNTGCQVPLFVQIHHKWRRMYVGECQGPGVRTDFEMVHLRKVPNQYTHLSGLLDIFKSKIGCPLTPLPPVSIAIRFTYVLQDWQQYFWPQQPPDIDALVGGEVGGLEFGKLPFGACEDPISELHLATTWPHLTEGIIVDNDVYSDLDPIQAPHWSVRVRKAENPQCLLGDFVTEFFKICRRKESTDEILGRSAFEEEGKETADITHALSKLTEPASVPIHKLSVSNMVHTAKKKIRKHRGVEESPLNNDVLNTILLFLFPDAVSEKPLDGTTSTDNNNPPSESEDYNLYNQFKSAPSDSLTYKLALCLCMINFYHGGLKGVAHLWQEFVLEMRFRWENNFLIPGLASGPPDLRCCLLHQKLQMLNCCIERKKARDEGKKTSASDVTNIYPGDAGKAGDQLVPDNLKETDKEKGEVGKSWDSWSDSEEEFFECLSDTEELKGNGQESGKKGGPKEMANLRPEGRLYQHGKLTLLHNGEPLYIPVTQEPAPMTEDLLEEQSEVLAKLGTSAEGAHLRARMQSACLLSDMESFKAANPGCSLEDFVRWYSPRDYIEEEVIDEKGNVVLKGELSARMKIPSNMWVEAWETAKPIPARRQRRLFDDTREAEKEIQIFWDKGHECATYSEIIRNKFMS

SEQ ID NO: 5494 - protein, 744 aa, Artificial Sequence
  Synthetic polypeptide
MFSLISGIFTSGTWEEKSDEISFADFKFSVTHHYLVQESTDKEGKDELLEDVVPQSMQDLLGMNNDFPPRAHCLVRWYGLREFVVIAPAAHSDAVLSESKCNLLLSSVSIALGNTGCQVPLFVQIHHKWRRMYVGECQGPGVRTDFEMVHLRKVPNQYTHLSGLLDIFKSKIGCPLTPLPPVSIAIRFTYVLQDWQQYFWPQQPPDIDALVGGEVGGLEFGKLPFGACEDPISELHLATTWPHLTEGIIVDNDVYSDLDPIQAPHWSVRVRKAENPQCLLGDFVTEFFKICRRKESTDEILGRSAFEEEGKETADITHALSKLTEPASVPIHKLSVSNMVHTAKKKIRKHRGVEESPLNNDVLNTILLFLFPDAVSEKPLDGTTSTDNNNPPSESEDYNLYNQFKSAPSDSLTYKLALCLCMINFYHGGLKGVAHLWQEFVLEMRFRWENNFLIPGLASGPPDLRCCLLHQKLQMLNCCIERKKARDEGKKTSASDVTNIYPGDAGKAGDQLVPDNLKETDKEKGEVGKSWDSWSDSEEEFFECLSDTEELKGNGQESGKKGGPKEMANLRPEGRLYQHGKLTLLHNGEPLYIPVTQEPAPMTEDLLEEQSEVLAKLGTSAEGAHLRARMQSACLLSDMESFKAANPGCSLEDFVRWYSPRDYIEEEVIDEKGNVVLKGELSARMKIPSNMWVEAWETAKPIPARRQRRLFDDTREAEKEIQIFWDKGHECATYSEIIRNKFMS

SEQ ID NO: 5495 - protein, 344 aa, Artificial Sequence
  Synthetic polypeptide
MPRVHNIKKSLTPHISCVTNESDNLLDFLPDRLRAKLLPFQKDGIIFALKRNGRCMVADEMGLGKTIQAIGITYFYKEEWPLLIVVPSSLRYPWTEEIEKWIPELSPEEINVIQNKTDVRRMSTSKVTVLGYGLLTADAKTLIDALNNQNFKVVIVDESHYMKSRNATRSRILLPIVQKARRAILLTGTPALGRPEELFMQIEALFPQKFGRWTDYAKRYCNAHIRYFGKRPQWDCRGASNLNELHQLLSDIMIRRLKTEVLTQLPPKVRQRIPFDLPSAAAKELNTSFEEWEKIMRTPNSGAMETVMGLITRMFKQTAIAKIGRMNKNSSTKYLLSSGDSPNT

SEQ ID NO: 5496 - protein, 344 aa, Artificial Sequence
  Synthetic polypeptide
MPRVHNIKKSLTPHISCVTNESDNLLDFLPDRLRAKLLPFQKDGIIFALKRNGSRIDCDQMGLGKTIQAIGITYFYKEEWPLLIVVPSSLRYPWTEEIEKWIPELSPEEINVIQNKTDVRRMSTSKVTVLGYGLLTADAKTLIDALNNQNFKVVIVDESHYMKSRNATRSRILLPIVQKARRAILLTGTPALGRPEELFMQIEALFPQKFGRWTDYAKRYCNAHIRYFGKRPQWDCRGASNLNELHQLLSDIMIRRLKTEVLTQLPPKVRQRIPFDLPSAAAKELNTSFEEWEKIMRTPNSGAMETVMGLITRMFKQTAIAKIGRMNKNSSTKYLLSSGDSPNT

SEQ ID NO: 5497 - protein, 108 aa, Artificial Sequence
  Synthetic polypeptide
MPRVHNIKKSLTPHISCVTNESDNLLDFLPDRLRAKLLPFQKDGIIFALKRNGRPLYSLRQNNIEIRSVNNPTVGCKCSSRRKDHTSLTLNQKLEMIMLSEEGRSKWI

SEQ ID NO: 5498 - protein, 9 aa, Artificial Sequence
  Synthetic polypeptide
QQTPRRGCQ

SEQ ID NO: 5499 - protein, 663 aa, Artificial Sequence
  Synthetic polypeptide
MRMSDTVTVKDETATMKDLEAEVKDTTRVENLIKSENYGKILVEKNEHCIENNIDLQEKIQIQLTQSFEKEEKPSKDEAEKEKASDKLPRKMLSRDSSQEYTDSTGIDLHEFLVNTLKNNPRDRMMLLKLEQEILDFIGNNESPRKKFPPMTSYHRMLLHRVAAYFGLDHNVDQSGKSVIVNKTSNTRIPDQKFNEHIKDDKGEDFQKRYILKRDNSSFDKDDNQMRIRLKDDRRSKSIEEREEEYQRARDRIFSQDSLCSQENYIIDKRLQDEDASSTQQRRQIFRVNKDASGRSTNSHQSSTENELKYSEPRPWSSTDSDSSLRNLKPAVTKASSFSGISVLTRGDSSGSSKSIGRLSKTGQPFINPDGSPVVYNPPMTQQPVRSQVPGPPQPPLPAPPQQPAANHIFSQQDNLGSQFSHMSLARQPSADGSDPHAAMFQSTVVLQSPQQSGYIMTAAPPPHPPPPPPPPPPPPPLPPGQPVPTAGYPASGHPVSQPVLQQQGYIQQPSPQMPACYCAPGHYHSSQPQYRPVPSVHYNSHLNQPLPQPAQQTGYQVIPNQQQNYQGIVGVQQPQSQSLVSGQPNSIGNQIQGVVIPYTSVPTYQVSLPQGSQGIPHQTYQQPVMFPNQSNQGSMPTTGMPVYYSVIPPGQQNNLRYGGSRL

SEQ ID NO: 5500 - protein, 662 aa, Artificial Sequence
  Synthetic polypeptide
MRMSDTVTVKDETATMKDLEAEVKDTTRVENLIKSENYGKILVEKNEHCIENNIDLQEKIQIQLTQSFEKEEKPSKDEAEKEKASDKLPRKMLSRDSSQEYTDSTGIDLHEFLVNTLKNNPRDRMMLLKLEQEILDFIGNNESPRKKFPPMTSYHRMLLHRVAAYFGLDHNVDQSGKSVIVNKTSNTRIPDQKFNEHIKDDKGEDFQKRYILKRDNSSFDKDDNQMRIRLKDDRRSKSIEEREEEYQRARDRIFSQDSLCSQENYIIDKRLQDEDASSTQQRRQIFRVNKDASGRSTNSHQSSTENELKYSEPRPWSSTDSDSSLRNLKPAVTKASSFSGISVLTRGDSSGSSKSIGRLSKTGQPFINPDGSPVVYNPPMTQQPVRSQVPGPPQPPLPAPPQQPAANHIFSQDNLGSQFSHMSLARQPSADGSDPHAAMFQSTVVLQSPQQSGYIMTAAPPPHPPPPPPPPPPPPPLPPGQPVPTAGYPASGHPVSQPVLQQQGYIQQPSPQMPACYCAPGHYHSSQPQYRPVPSVHYNSHLNQPLPQPAQQTGYQVIPNQQQNYQGIVGVQQPQSQSLVSGQPNSIGNQIQGVVIPYTSVPTYQVSLPQGSQGIPHQTYQQPVMFPNQSNQGSMPTTGMPVYYSVIPPGQQNNLRYGGSRL

SEQ ID NO: 5501 - protein, 791 aa, Artificial Sequence
  Synthetic polypeptide
MRMSDTVTVKDETATMKDLEAEVKDTTRVENLIKSENYGKILVEKNEHCIENNIDLQRPLQSFGQTGKRSKSSSKLKLVRSLAVCEESPPPPAPEISQENQEKIQIQLTQSFEKEEKPSKDEAEKEKASDKLPRKMLSRDSSQEYTDSTGIDLHEFLVNTLKNNPRDRMMLLKLEQEILDFIGNNESPRKKFPPMTSYHRMLLHRVAAYFGLDHNVDQSGKSVIVNKTSNTRIPDQKFNEHIKDDKGEDFQKRYILKRDNSSFDKDDNQMRIRLKDDRRSKSIEEREEEYQRARDRIFSQDSLCSQENYIIDKRLQDEDASSTQQRRQIFRVNKDASGRSTNSHQSSTENELKYSEPRPWSSTDSDSSLRNLKPAVTKASSFSGISVLTRGDSSGSSKSIGRLSKTGSESSGSVGSSTGSLSHIQQPLPGTALSQSSHGAPVVYPTVSTHSSLSFDGGLNGQVASPSTSFFLLPLEAAGIPPGSILINPQTGQPFINPDGSPVVYNPPMTQQPVRSQVPGPPQPPLPAPPQQPAANHIFSQDNLGSQFSHMSLARQPSADGSDPHAAMFQSTVVLQSPQQSGYIMTAAPPPHPPPPPPPPPPPPPLPPGQPVPTAGYPASGHPVSQPVLQQQGYIQQPSPQMPACYCAPGHYHSSQPQYRPVPSVHYNSHLNQPLPQPAQQTGYQVIPNQQQNYQGIVGVQQPQSQSLVSGQPNSIGNQIQGVVIPYTSVPTYQVSLPQGSQGIPHQTYQQPVMFPNQSNQGSMPTTGMPVYYSVIPPGQQNNLRYGGSRL

SEQ ID NO: 5502 - protein, 736 aa, Artificial Sequence
  Synthetic polypeptide
MGLLLPDYRWFTTVDILADNCEKEPWIILFYFCGTPQSQIQRTHQEKIQIQLTQSFEKEEKPSKDEAEKEKASDKLPRKMLSRDSSQEYTDSTGIDLHEFLVNTLKNNPRDRMMLLKLEQEILDFIGNNESPRKKFPPMTSYHRMLLHRVAAYFGLDHNVDQSGKSVIVNKTSNTRIPDQKFNEHIKDDKGEDFQKRYILKRDNSSFDKDDNQMRIRLKDDRRSKSIEEREEEYQRARDRIFSQDSLCSQENYIIDKRLQDEDASSTQQRRQIFRVNKDASGRSTNSHQSSTENELKYSEPRPWSSTDSDSSLRNLKPAVTKASSFSGISVLTRGDSSGSSKSIGRLSKTGSESSGSVGSSTGSLSHIQQPLPGTALSQSSHGAPVVYPTVSTHSSLSFDGGLNGQVASPSTSFFLLPLEAAGIPPGSILINPQTGQPFINPDGSPVVYNPPMTQQPVRSQVPGPPQPPLPAPPQQPAANHIFSQQDNLGSQFSHMSLARQPSADGSDPHAAMFQSTVVLQSPQQSGYIMTAAPPPHPPPPPPPPPPPPPLPPGQPVPTAGYPASGHPVSQPVLQQQGYIQQPSPQMPACYCAPGHYHSSQPQYRPVPSVHYNSHLNQPLPQPAQQTGYQVIPNQQQNYQGIVGVQQPQSQSLVSGQPNSIGNQIQGVVIPYTSVPTYQVSLPQGSQGIPHQTYQQPVMFPNQSNQGSMPTTGMPVYYSVIPPGQQNNLRYGGSRL

SEQ ID NO: 5503 - protein, 792 aa, Artificial Sequence
  Synthetic polypeptide
MRMSDTVTVKDETATMKDLEAEVKDTTRVENLIKSENYGKILVEKNEHCIENNIDLQRPLQSFGQTGKRSKSSSKLKLVRSLAVCEESPPPPAPEISQENQEKIQIQLTQSFEKEEKPSKDEAEKEKASDKLPRKMLSRDSSQEYTDSTGIDLHEFLVNTLKNNPRDRMMLLKLEQEILDFIGNNESPRKKFPPMTSYHRMLLHRVAAYFGLDHNVDQSGKSVIVNKTSNTRIPDQKFNEHIKDDKGEDFQKRYILKRDNSSFDKDDNQMRIRLKDDRRSKSIEEREEEYQRARDRIFSQDSLCSQENYIIDKRLQDEDASSTQQRRQIFRVNKDASGRSTNSHQSSTENELKYSEPRPWSSTDSDSSLRNLKPAVTKASSFSGISVLTRGDSSGSSKSIGRLSKTGSESSGSVGSSTGSLSHIQQPLPGTALSQSSHGAPVVYPTVSTHSSLSFDGGLNGQVASPSTSFFLLPLEAAGIPPGSILINPQTGQPFINPDGSPVVYNPPMTQQPVRSQVPGPPQPPLPAPPQQPAANHIFSQQDNLGSQFSHMSLARQPSADGSDPHAAMFQSTVVLQSPQQSGYIMTAAPPPHPPPPPPPPPPPPPLPPGQPVPTAGYPASGHPVSQPVLQQQGYIQQPSPQMPACYCAPGHYHSSQPQYRPVPSVHYNSHLNQPLPQPAQQTGYQVIPNQQQNYQGIVGVQQPQSQSLVSGQPNSIGNQIQGVVIPYTSVPTYQVSLPQGSQGIPHQTYQQPVMFPNQSNQGSMPTTGMPVYYSVIPPGQQNNLRYGGSRL

SEQ ID NO: 5504 - protein, 3 aa, Artificial Sequence
  Synthetic polypeptide
VRA

SEQ ID NO: 5505 - protein, 9 aa, Artificial Sequence
  Synthetic polypeptide
QQTPRRGCQ

SEQ ID NO: 5506 - protein, 3 aa, Artificial Sequence
  Synthetic polypeptide
VRA

SEQ ID NO: 5507 - protein, 675 aa, Artificial Sequence
  Synthetic polypeptide
MRMSDTVTVKDETATMKDLEAEVKDTTRVENLIKSENYGKILVEKNEHCIENNIDLQEKIQIQLTQSFEKEEKPSKDEAEKEKASDKLPRKMLSRDSSQEYTDSTGIDLHEFLVNTLKNNPRDRMMLLKLEQEILDFIGNNESPRKKFPPMTSYHRMLLHRVAAYFGLDHNVDQSGKSVIVNKTSNTRIPDQKFNEHIKDDKGEDFQKRYILKRDNSSFDKDDNQMRIRLKDDRRSKSIEEREEEYQRARDRIFSQDSLCSQENYIIDKRLQDEDASSTQQRRQIFRVNKDASGRSTNSHQSSTENELKYSEPRPWSSTDSDSSLRNLKPAVTKASSFSGISVLTRGDSSGSSKSIGRLSKTGQPFINPDGSPVVYNPPMTQQPVRSQVPGPPQPPLPAPPQQPAANHIFSQQDNLGSQFSHMSLARQPSADGSDPHAAMFQSTVVLQSPQQSGYIMTAAPPPHPPPPPPPPPPPPPLPPGQPVPTAGYPASGHPVSQPVLQQQGYIQQPSPQMPACYCAPGHYHSSQPQYRPVPSVHYNSHLNQPLPQPAQQTGYQVIPNQQQNYQGIVGVQQPQSQSLVSGQPNSIGNQIQGVVIPYTSVPTYQVSLPQGSQGIPHQTYQQPVMFPNQSNQGSMPTTGMPVYYSVIPPGQQNNLRNRDFKHTKAELIASHLAL

SEQ ID NO: 5508 - protein, 674 aa, Artificial Sequence
  Synthetic polypeptide
MRMSDTVTVKDETATMKDLEAEVKDTTRVENLIKSENYGKILVEKNEHCIENNIDLQEKIQIQLTQSFEKEEKPSKDEAEKEKASDKLPRKMLSRDSSQEYTDSTGIDLHEFLVNTLKNNPRDRMMLLKLEQEILDFIGNNESPRKKFPPMTSYHRMLLHRVAAYFGLDHNVDQSGKSVIVNKTSNTRIPDQKFNEHIKDDKGEDFQKRYILKRDNSSFDKDDNQMRIRLKDDRRSKSIEEREEEYQRARDRIFSQDSLCSQENYIIDKRLQDEDASSTQQRRQIFRVNKDASGRSTNSHQSSTENELKYSEPRPWSSTDSDSSLRNLKPAVTKASSFSGISVLTRGDSSGSSKSIGRLSKTGQPFINPDGSPVVYNPPMTQQPVRSQVPGPPQPPLPAPPQQPAANHIFSQDNLGSQFSHMSLARQPSADGSDPHAAMFQSTVVLQSPQQSGYIMTAAPPPHPPPPPPPPPPPPPLPPGQPVPTAGYPASGHPVSQPVLQQQGYIQQPSPQMPACYCAPGHYHSSQPQYRPVPSVHYNSHLNQPLPQPAQQTGYQVIPNQQQNYQGIVGVQQPQSQSLVSGQPNSIGNQIQGVVIPYTSVPTYQVSLPQGSQGIPHQTYQQPVMFPNQSNQGSMPTTGMPVYYSVIPPGQQNNLRNRDFKHTKAELIASHLAL

SEQ ID NO: 5509 - protein, 803 aa, Artificial Sequence
  Synthetic polypeptide
MRMSDTVTVKDETATMKDLEAEVKDTTRVENLIKSENYGKILVEKNEHCIENNIDLQRPLQSFGQTGKRSKSSSKLKLVRSLAVCEESPPPPAPEISQENQEKIQIQLTQSFEKEEKPSKDEAEKEKASDKLPRKMLSRDSSQEYTDSTGIDLHEFLVNTLKNNPRDRMMLLKLEQEILDFIGNNESPRKKFPPMTSYHRMLLHRVAAYFGLDHNVDQSGKSVIVNKTSNTRIPDQKFNEHIKDDKGEDFQKRYILKRDNSSFDKDDNQMRIRLKDDRRSKSIEEREEEYQRARDRIFSQDSLCSQENYIIDKRLQDEDASSTQQRRQIFRVNKDASGRSTNSHQSSTENELKYSEPRPWSSTDSDSSLRNLKPAVTKASSFSGISVLTRGDSSGSSKSIGRLSKTGSESSGSVGSSTGSLSHIQQPLPGTALSQSSHGAPVVYPTVSTHSSLSFDGGLNGQVASPSTSFFLLPLEAAGIPPGSILINPQTGQPFINPDGSPVVYNPPMTQQPVRSQVPGPPQPPLPAPPQQPAANHIFSQDNLGSQFSHMSLARQPSADGSDPHAAMFQSTVVLQSPQQSGYIMTAAPPPHPPPPPPPPPPPPPLPPGQPVPTAGYPASGHPVSQPVLQQQGYIQQPSPQMPACYCAPGHYHSSQPQYRPVPSVHYNSHLNQPLPQPAQQTGYQVIPNQQQNYQGIVGVQQPQSQSLVSGQPNSIGNQIQGVVIPYTSVPTYQVSLPQGSQGIPHQTYQQPVMFPNQSNQGSMPTTGMPVYYSVIPPGQQNNLRNRDFKHTKAELIASHLAL

SEQ ID NO: 5510 - protein, 748 aa, Artificial Sequence
  Synthetic polypeptide
MGLLLPDYRWFTTVDILADNCEKEPWIILFYFCGTPQSQIQRTHQEKIQIQLTQSFEKEEKPSKDEAEKEKASDKLPRKMLSRDSSQEYTDSTGIDLHEFLVNTLKNNPRDRMMLLKLEQEILDFIGNNESPRKKFPPMTSYHRMLLHRVAAYFGLDHNVDQSGKSVIVNKTSNTRIPDQKFNEHIKDDKGEDFQKRYILKRDNSSFDKDDNQMRIRLKDDRRSKSIEEREEEYQRARDRIFSQDSLCSQENYIIDKRLQDEDASSTQQRRQIFRVNKDASGRSTNSHQSSTENELKYSEPRPWSSTDSDSSLRNLKPAVTKASSFSGISVLTRGDSSGSSKSIGRLSKTGSESSGSVGSSTGSLSHIQQPLPGTALSQSSHGAPVVYPTVSTHSSLSFDGGLNGQVASPSTSFFLLPLEAAGIPPGSILINPQTGQPFINPDGSPVVYNPPMTQQPVRSQVPGPPQPPLPAPPQQPAANHIFSQQDNLGSQFSHMSLARQPSADGSDPHAAMFQSTVVLQSPQQSGYIMTAAPPPHPPPPPPPPPPPPPLPPGQPVPTAGYPASGHPVSQPVLQQQGYIQQPSPQMPACYCAPGHYHSSQPQYRPVPSVHYNSHLNQPLPQPAQQTGYQVIPNQQQNYQGIVGVQQPQSQSLVSGQPNSIGNQIQGVVIPYTSVPTYQVSLPQGSQGIPHQTYQQPVMFPNQSNQGSMPTTGMPVYYSVIPPGQQNNLRNRDFKHTKAELIASHLAL

SEQ ID NO: 5511 - protein, 804 aa, Artificial Sequence
  Synthetic polypeptide
MRMSDTVTVKDETATMKDLEAEVKDTTRVENLIKSENYGKILVEKNEHCIENNIDLQRPLQSFGQTGKRSKSSSKLKLVRSLAVCEESPPPPAPEISQENQEKIQIQLTQSFEKEEKPSKDEAEKEKASDKLPRKMLSRDSSQEYTDSTGIDLHEFLVNTLKNNPRDRMMLLKLEQEILDFIGNNESPRKKFPPMTSYHRMLLHRVAAYFGLDHNVDQSGKSVIVNKTSNTRIPDQKFNEHIKDDKGEDFQKRYILKRDNSSFDKDDNQMRIRLKDDRRSKSIEEREEEYQRARDRIFSQDSLCSQENYIIDKRLQDEDASSTQQRRQIFRVNKDASGRSTNSHQSSTENELKYSEPRPWSSTDSDSSLRNLKPAVTKASSFSGISVLTRGDSSGSSKSIGRLSKTGSESSGSVGSSTGSLSHIQQPLPGTALSQSSHGAPVVYPTVSTHSSLSFDGGLNGQVASPSTSFFLLPLEAAGIPPGSILINPQTGQPFINPDGSPVVYNPPMTQQPVRSQVPGPPQPPLPAPPQQPAANHIFSQQDNLGSQFSHMSLARQPSADGSDPHAAMFQSTVVLQSPQQSGYIMTAAPPPHPPPPPPPPPPPPPLPPGQPVPTAGYPASGHPVSQPVLQQQGYIQQPSPQMPACYCAPGHYHSSQPQYRPVPSVHYNSHLNQPLPQPAQQTGYQVIPNQQQNYQGIVGVQQPQSQSLVSGQPNSIGNQIQGVVIPYTSVPTYQVSLPQGSQGIPHQTYQQPVMFPNQSNQGSMPTTGMPVYYSVIPPGQQNNLRNRDFKHTKAELIASHLAL

SEQ ID NO: 5512 - protein, 717 aa, Artificial Sequence
  Synthetic polypeptide
MRMSDTVTVKDETATMKDLEAEVKDTTRVENLIKSENYGKILVEKNEHCIENNIDLQEKIQIQLTQSFEKEEKPSKDEAEKEKASDKLPRKMLSRDSSQEYTDSTGIDLHEFLVNTLKNNPRDRMMLLKLEQEILDFIGNNESPRKKFPPMTSYHRMLLHRVAAYFGLDHNVDQSGKSVIVNKTSNTRIPDQKFNEHIKDDKGEDFQKRYILKRDNSSFDKDDNQMRIRLKDDRRSKSIEEREEEYQRARDRIFSQDSLCSQENYIIDKRLQDEDASSTQQRRQIFRVNKDASGRSTNSHQSSTENELKYSEPRPWSSTDSDSSLRNLKPAVTKASSFSGISVLTRGDSSGSSKSIGRLSKTGQPFINPDGSPVVYNPPMTQQPVRSQVPGPPQPPLPAPPQQPAANHIFSQQDNLGSQFSHMSLARQPSADGSDPHAAMFQSTVVLQSPQQSGYIMTAAPPPHPPPPPPPPPPPPPLPPGQPVPTAGYPASGHPVSQPVLQQQGYIQQPSPQMPACYCAPGHYHSSQPQYRPVPSVHYNSHLNQPLPQPAQQTGYQVIPNQQQNYQGIVGVQQPQSQSLVSGQPNSIGNQIQGVVIPYTSVPTYQVSLPQGSQGIPHQTYQQPVMFPNQSNQGSMPTTGMPVYYSVIPPGQQNNLRSANTLLDDGWFILMRWSEYAPSQDQSFSRSIRDIFVVNCVYDTYPPISQAEGIFSIKYIM

SEQ ID NO: 5513 - protein, 716 aa, Artificial Sequence
  Synthetic polypeptide
MRMSDTVTVKDETATMKDLEAEVKDTTRVENLIKSENYGKILVEKNEHCIENNIDLQEKIQIQLTQSFEKEEKPSKDEAEKEKASDKLPRKMLSRDSSQEYTDSTGIDLHEFLVNTLKNNPRDRMMLLKLEQEILDFIGNNESPRKKFPPMTSYHRMLLHRVAAYFGLDHNVDQSGKSVIVNKTSNTRIPDQKFNEHIKDDKGEDFQKRYILKRDNSSFDKDDNQMRIRLKDDRRSKSIEEREEEYQRARDRIFSQDSLCSQENYIIDKRLQDEDASSTQQRRQIFRVNKDASGRSTNSHQSSTENELKYSEPRPWSSTDSDSSLRNLKPAVTKASSFSGISVLTRGDSSGSSKSIGRLSKTGQPFINPDGSPVVYNPPMTQQPVRSQVPGPPQPPLPAPPQQPAANHIFSQDNLGSQFSHMSLARQPSADGSDPHAAMFQSTVVLQSPQQSGYIMTAAPPPHPPPPPPPPPPPPPLPPGQPVPTAGYPASGHPVSQPVLQQQGYIQQPSPQMPACYCAPGHYHSSQPQYRPVPSVHYNSHLNQPLPQPAQQTGYQVIPNQQQNYQGIVGVQQPQSQSLVSGQPNSIGNQIQGVVIPYTSVPTYQVSLPQGSQGIPHQTYQQPVMFPNQSNQGSMPTTGMPVYYSVIPPGQQNNLRSANTLLDDGWFILMRWSEYAPSQDQSFSRSIRDIFVVNCVYDTYPPISQAEGIFSIKYIM

SEQ ID NO: 5514 - protein, 845 aa, Artificial Sequence
  Synthetic polypeptide
MRMSDTVTVKDETATMKDLEAEVKDTTRVENLIKSENYGKILVEKNEHCIENNIDLQRPLQSFGQTGKRSKSSSKLKLVRSLAVCEESPPPPAPEISQENQEKIQIQLTQSFEKEEKPSKDEAEKEKASDKLPRKMLSRDSSQEYTDSTGIDLHEFLVNTLKNNPRDRMMLLKLEQEILDFIGNNESPRKKFPPMTSYHRMLLHRVAAYFGLDHNVDQSGKSVIVNKTSNTRIPDQKFNEHIKDDKGEDFQKRYILKRDNSSFDKDDNQMRIRLKDDRRSKSIEEREEEYQRARDRIFSQDSLCSQENYIIDKRLQDEDASSTQQRRQIFRVNKDASGRSTNSHQSSTENELKYSEPRPWSSTDSDSSLRNLKPAVTKASSFSGISVLTRGDSSGSSKSIGRLSKTGSESSGSVGSSTGSLSHIQQPLPGTALSQSSHGAPVVYPTVSTHSSLSFDGGLNGQVASPSTSFFLLPLEAAGIPPGSILINPQTGQPFINPDGSPVVYNPPMTQQPVRSQVPGPPQPPLPAPPQQPAANHIFSQDNLGSQFSHMSLARQPSADGSDPHAAMFQSTVVLQSPQQSGYIMTAAPPPHPPPPPPPPPPPPPLPPGQPVPTAGYPASGHPVSQPVLQQQGYIQQPSPQMPACYCAPGHYHSSQPQYRPVPSVHYNSHLNQPLPQPAQQTGYQVIPNQQQNYQGIVGVQQPQSQSLVSGQPNSIGNQIQGVVIPYTSVPTYQVSLPQGSQGIPHQTYQQPVMFPNQSNQGSMPTTGMPVYYSVIPPGQQNNLRSANTLLDDGWFILMRWSEYAPSQDQSFSRSIRDIFVVNCVYDTYPPISQAEGIFSIKYIM

SEQ ID NO: 5515 - protein, 790 aa, Artificial Sequence
  Synthetic polypeptide
MGLLLPDYRWFTTVDILADNCEKEPWIILFYFCGTPQSQIQRTHQEKIQIQLTQSFEKEEKPSKDEAEKEKASDKLPRKMLSRDSSQEYTDSTGIDLHEFLVNTLKNNPRDRMMLLKLEQEILDFIGNNESPRKKFPPMTSYHRMLLHRVAAYFGLDHNVDQSGKSVIVNKTSNTRIPDQKFNEHIKDDKGEDFQKRYILKRDNSSFDKDDNQMRIRLKDDRRSKSIEEREEEYQRARDRIFSQDSLCSQENYIIDKRLQDEDASSTQQRRQIFRVNKDASGRSTNSHQSSTENELKYSEPRPWSSTDSDSSLRNLKPAVTKASSFSGISVLTRGDSSGSSKSIGRLSKTGSESSGSVGSSTGSLSHIQQPLPGTALSQSSHGAPVVYPTVSTHSSLSFDGGLNGQVASPSTSFFLLPLEAAGIPPGSILINPQTGQPFINPDGSPVVYNPPMTQQPVRSQVPGPPQPPLPAPPQQPAANHIFSQQDNLGSQFSHMSLARQPSADGSDPHAAMFQSTVVLQSPQQSGYIMTAAPPPHPPPPPPPPPPPPPLPPGQPVPTAGYPASGHPVSQPVLQQQGYIQQPSPQMPACYCAPGHYHSSQPQYRPVPSVHYNSHLNQPLPQPAQQTGYQVIPNQQQNYQGIVGVQQPQSQSLVSGQPNSIGNQIQGVVIPYTSVPTYQVSLPQGSQGIPHQTYQQPVMFPNQSNQGSMPTTGMPVYYSVIPPGQQNNLRSANTLLDDGWFILMRWSEYAPSQDQSFSRSIRDIFVVNCVYDTYPPISQAEGIFSIKYIM

SEQ ID NO: 5516 - protein, 846 aa, Artificial Sequence
  Synthetic polypeptide
MRMSDTVTVKDETATMKDLEAEVKDTTRVENLIKSENYGKILVEKNEHCIENNIDLQRPLQSFGQTGKRSKSSSKLKLVRSLAVCEESPPPPAPEISQENQEKIQIQLTQSFEKEEKPSKDEAEKEKASDKLPRKMLSRDSSQEYTDSTGIDLHEFLVNTLKNNPRDRMMLLKLEQEILDFIGNNESPRKKFPPMTSYHRMLLHRVAAYFGLDHNVDQSGKSVIVNKTSNTRIPDQKFNEHIKDDKGEDFQKRYILKRDNSSFDKDDNQMRIRLKDDRRSKSIEEREEEYQRARDRIFSQDSLCSQENYIIDKRLQDEDASSTQQRRQIFRVNKDASGRSTNSHQSSTENELKYSEPRPWSSTDSDSSLRNLKPAVTKASSFSGISVLTRGDSSGSSKSIGRLSKTGSESSGSVGSSTGSLSHIQQPLPGTALSQSSHGAPVVYPTVSTHSSLSFDGGLNGQVASPSTSFFLLPLEAAGIPPGSILINPQTGQPFINPDGSPVVYNPPMTQQPVRSQVPGPPQPPLPAPPQQPAANHIFSQQDNLGSQFSHMSLARQPSADGSDPHAAMFQSTVVLQSPQQSGYIMTAAPPPHPPPPPPPPPPPPPLPPGQPVPTAGYPASGHPVSQPVLQQQGYIQQPSPQMPACYCAPGHYHSSQPQYRPVPSVHYNSHLNQPLPQPAQQTGYQVIPNQQQNYQGIVGVQQPQSQSLVSGQPNSIGNQIQGVVIPYTSVPTYQVSLPQGSQGIPHQTYQQPVMFPNQSNQGSMPTTGMPVYYSVIPPGQQNNLRSANTLLDDGWFILMRWSEYAPSQDQSFSRSIRDIFVVNCVYDTYPPISQAEGIFSIKYIM

SEQ ID NO: 5517 - protein, 9 aa, Artificial Sequence
  Synthetic polypeptide
QQTPRRGCQ

SEQ ID NO: 5518 - protein, 3 aa, Artificial Sequence
  Synthetic polypeptide
VRA

SEQ ID NO: 5519 - protein, 805 aa, Artificial Sequence
  Synthetic polypeptide
MRMSDTVTVKDETATMKDLEAEVKDTTRVENLIKSENYGKILVEKNEHCIENNIDLQEKIQIQLTQSFEKEEKPSKDEAEKEKASDKLPRKMLSRDSSQEYTDSTGIDLHEFLVNTLKNNPRDRMMLLKLEQEILDFIGNNESPRKKFPPMTSYHRMLLHRVAAYFGLDHNVDQSGKSVIVNKTSNTRIPDQKFNEHIKDDKGEDFQKRYILKRDNSSFDKDDNQMRIRLKDDRRSKSIEEREEEYQRARDRIFSQDSLCSQENYIIDKRLQDEDASSTQQRRQIFRVNKDASGRSTNSHQSSTENELKYSEPRPWSSTDSDSSLRNLKPAVTKASSFSGISVLTRGDSSGSSKSIGRLSKTGQPFINPDGSPVVYNPPMTQQPVRSQVPGPPQPPLPAPPQQPAANHIFSQQDNLGSQFSHMSLARQPSADGSDPHAAMFQSTVVLQSPQQSGYIMTAAPPPHPPPPPPPPPPPPPLPPGQPVPTAGYPASGHPVSQPVLQQQGYIQQPSPQMPACYCAPGHYHSSQPQYRPVPSVHYNSHLNQPLPQPAQQTGYQVIPNQQQNYQGIVGVQQPQSQSLVSGQPNSIGNQIQGVVIPYTSVPTYQVSLPQGSQGIPHQTYQQPVMFPNQSNQGSMPTTGMPVYYSVIPPGQQNNLSSSVGYLQHPGSEQVQFPRTTSPCSSQQLQGHQCTAGPPPPPGGGMVMMQLSVPNNPQSCAHSPPQWKQNKYYCDHQRGQKCVEFSSVDNIVQHSPQLSSPIISPAQSPAPAQLSTLKTVRPSGPPLSIMPQFSRPFVPGQAKHGGLYL

SEQ ID NO: 5520 - protein, 804 aa, Artificial Sequence
  Synthetic polypeptide
MRMSDTVTVKDETATMKDLEAEVKDTTRVENLIKSENYGKILVEKNEHCIENNIDLQEKIQIQLTQSFEKEEKPSKDEAEKEKASDKLPRKMLSRDSSQEYTDSTGIDLHEFLVNTLKNNPRDRMMLLKLEQEILDFIGNNESPRKKFPPMTSYHRMLLHRVAAYFGLDHNVDQSGKSVIVNKTSNTRIPDQKFNEHIKDDKGEDFQKRYILKRDNSSFDKDDNQMRIRLKDDRRSKSIEEREEEYQRARDRIFSQDSLCSQENYIIDKRLQDEDASSTQQRRQIFRVNKDASGRSTNSHQSSTENELKYSEPRPWSSTDSDSSLRNLKPAVTKASSFSGISVLTRGDSSGSSKSIGRLSKTGQPFINPDGSPVVYNPPMTQQPVRSQVPGPPQPPLPAPPQQPAANHIFSQDNLGSQFSHMSLARQPSADGSDPHAAMFQSTVVLQSPQQSGYIMTAAPPPHPPPPPPPPPPPPPLPPGQPVPTAGYPASGHPVSQPVLQQQGYIQQPSPQMPACYCAPGHYHSSQPQYRPVPSVHYNSHLNQPLPQPAQQTGYQVIPNQQQNYQGIVGVQQPQSQSLVSGQPNSIGNQIQGVVIPYTSVPTYQVSLPQGSQGIPHQTYQQPVMFPNQSNQGSMPTTGMPVYYSVIPPGQQNNLSSSVGYLQHPGSEQVQFPRTTSPCSSQQLQGHQCTAGPPPPPGGGMVMMQLSVPNNPQSCAHSPPQWKQNKYYCDHQRGQKCVEFSSVDNIVQHSPQLSSPIISPAQSPAPAQLSTLKTVRPSGPPLSIMPQFSRPFVPGQAKHGGLYL

SEQ ID NO: 5521 - protein, 933 aa, Artificial Sequence
  Synthetic polypeptide
MRMSDTVTVKDETATMKDLEAEVKDTTRVENLIKSENYGKILVEKNEHCIENNIDLQRPLQSFGQTGKRSKSSSKLKLVRSLAVCEESPPPPAPEISQENQEKIQIQLTQSFEKEEKPSKDEAEKEKASDKLPRKMLSRDSSQEYTDSTGIDLHEFLVNTLKNNPRDRMMLLKLEQEILDFIGNNESPRKKFPPMTSYHRMLLHRVAAYFGLDHNVDQSGKSVIVNKTSNTRIPDQKFNEHIKDDKGEDFQKRYILKRDNSSFDKDDNQMRIRLKDDRRSKSIEEREEEYQRARDRIFSQDSLCSQENYIIDKRLQDEDASSTQQRRQIFRVNKDASGRSTNSHQSSTENELKYSEPRPWSSTDSDSSLRNLKPAVTKASSFSGISVLTRGDSSGSSKSIGRLSKTGSESSGSVGSSTGSLSHIQQPLPGTALSQSSHGAPVVYPTVSTHSSLSFDGGLNGQVASPSTSFFLLPLEAAGIPPGSILINPQTGQPFINPDGSPVVYNPPMTQQPVRSQVPGPPQPPLPAPPQQPAANHIFSQDNLGSQFSHMSLARQPSADGSDPHAAMFQSTVVLQSPQQSGYIMTAAPPPHPPPPPPPPPPPPPLPPGQPVPTAGYPASGHPVSQPVLQQQGYIQQPSPQMPACYCAPGHYHSSQPQYRPVPSVHYNSHLNQPLPQPAQQTGYQVIPNQQQNYQGIVGVQQPQSQSLVSGQPNSIGNQIQGVVIPYTSVPTYQVSLPQGSQGIPHQTYQQPVMFPNQSNQGSMPTTGMPVYYSVIPPGQQNNLSSSVGYLQHPGSEQVQFPRTTSPCSSQQLQGHQCTAGPPPPPGGGMVMMQLSVPNNPQSCAHSPPQWKQNKYYCDHQRGQKCVEFSSVDNIVQHSPQLSSPIISPAQSPAPAQLSTLKTVRPSGPPLSIMPQFSRPFVPGQAKHGGLYL

SEQ ID NO: 5522 - protein, 878 aa, Artificial Sequence
  Synthetic polypeptide
MGLLLPDYRWFTTVDILADNCEKEPWIILFYFCGTPQSQIQRTHQEKIQIQLTQSFEKEEKPSKDEAEKEKASDKLPRKMLSRDSSQEYTDSTGIDLHEFLVNTLKNNPRDRMMLLKLEQEILDFIGNNESPRKKFPPMTSYHRMLLHRVAAYFGLDHNVDQSGKSVIVNKTSNTRIPDQKFNEHIKDDKGEDFQKRYILKRDNSSFDKDDNQMRIRLKDDRRSKSIEEREEEYQRARDRIFSQDSLCSQENYIIDKRLQDEDASSTQQRRQIFRVNKDASGRSTNSHQSSTENELKYSEPRPWSSTDSDSSLRNLKPAVTKASSFSGISVLTRGDSSGSSKSIGRLSKTGSESSGSVGSSTGSLSHIQQPLPGTALSQSSHGAPVVYPTVSTHSSLSFDGGLNGQVASPSTSFFLLPLEAAGIPPGSILINPQTGQPFINPDGSPVVYNPPMTQQPVRSQVPGPPQPPLPAPPQQPAANHIFSQQDNLGSQFSHMSLARQPSADGSDPHAAMFQSTVVLQSPQQSGYIMTAAPPPHPPPPPPPPPPPPPLPPGQPVPTAGYPASGHPVSQPVLQQQGYIQQPSPQMPACYCAPGHYHSSQPQYRPVPSVHYNSHLNQPLPQPAQQTGYQVIPNQQQNYQGIVGVQQPQSQSLVSGQPNSIGNQIQGVVIPYTSVPTYQVSLPQGSQGIPHQTYQQPVMFPNQSNQGSMPTTGMPVYYSVIPPGQQNNLSSSVGYLQHPGSEQVQFPRTTSPCSSQQLQGHQCTAGPPPPPGGGMVMMQLSVPNNPQSCAHSPPQWKQNKYYCDHQRGQKCVEFSSVDNIVQHSPQLSSPIISPAQSPAPAQLSTLKTVRPSGPPLSIMPQFSRPFVPGQAKHGGLYL

SEQ ID NO: 5523 - protein, 934 aa, Artificial Sequence
  Synthetic polypeptide
MRMSDTVTVKDETATMKDLEAEVKDTTRVENLIKSENYGKILVEKNEHCIENNIDLQRPLQSFGQTGKRSKSSSKLKLVRSLAVCEESPPPPAPEISQENQEKIQIQLTQSFEKEEKPSKDEAEKEKASDKLPRKMLSRDSSQEYTDSTGIDLHEFLVNTLKNNPRDRMMLLKLEQEILDFIGNNESPRKKFPPMTSYHRMLLHRVAAYFGLDHNVDQSGKSVIVNKTSNTRIPDQKFNEHIKDDKGEDFQKRYILKRDNSSFDKDDNQMRIRLKDDRRSKSIEEREEEYQRARDRIFSQDSLCSQENYIIDKRLQDEDASSTQQRRQIFRVNKDASGRSTNSHQSSTENELKYSEPRPWSSTDSDSSLRNLKPAVTKASSFSGISVLTRGDSSGSSKSIGRLSKTGSESSGSVGSSTGSLSHIQQPLPGTALSQSSHGAPVVYPTVSTHSSLSFDGGLNGQVASPSTSFFLLPLEAAGIPPGSILINPQTGQPFINPDGSPVVYNPPMTQQPVRSQVPGPPQPPLPAPPQQPAANHIFSQQDNLGSQFSHMSLARQPSADGSDPHAAMFQSTVVLQSPQQSGYIMTAAPPPHPPPPPPPPPPPPPLPPGQPVPTAGYPASGHPVSQPVLQQQGYIQQPSPQMPACYCAPGHYHSSQPQYRPVPSVHYNSHLNQPLPQPAQQTGYQVIPNQQQNYQGIVGVQQPQSQSLVSGQPNSIGNQIQGVVIPYTSVPTYQVSLPQGSQGIPHQTYQQPVMFPNQSNQGSMPTTGMPVYYSVIPPGQQNNLSSSVGYLQHPGSEQVQFPRTTSPCSSQQLQGHQCTAGPPPPPGGGMVMMQLSVPNNPQSCAHSPPQWKQNKYYCDHQRGQKCVEFSSVDNIVQHSPQLSSPIISPAQSPAPAQLSTLKTVRPSGPPLSIMPQFSRPFVPGQAKHGGLYL

SEQ ID NO: 5524 - protein, 9 aa, Artificial Sequence
  Synthetic polypeptide
QQTPRRGCQ

SEQ ID NO: 5525 - protein, 426 aa, Artificial Sequence
  Synthetic polypeptide
MLWFQGAIPAAIATAKRSGAVFVVFVAGDDEQSTQMAASWEDDKVTEASSNSFVAIKIDTKSEACLQFSQIYPVVCVPSSFFIGDSGIPLEVIAGSVSADELVTRIHKVRQMHLLKSETSVANGSQSESSVSTPSASFEPNNTCENSQSRNAELCEIPPTSDTKSDTATGGESAGHATSSQEPSGCSDQRPAEDLNIRVERLTKKLEERREEKRKEEEQREIKKEIERRKTGKEMLDYKRKQEEELTKRMLEERNREKAEDRAARERIKQQIALDRAERAARFAKTKEEVEAAKAAALLAKQAEMEVKRESYARERRVPRLFSGKEESFQQKVLGQLNIYMQNNEFGPLPHTMYKINLMDHLPKSKTIKYIFLEEKRGIYFCDLGVANGLLDMALKAQEQNLKIGKSHFQNLKLSCFEGYHQESAK

SEQ ID NO: 5526 - protein, 168 aa, Artificial Sequence
  Synthetic polypeptide
MPSASASRKSQEKPREIMDAAEDYAKERYGISSMIQSQEKPDRVLVRVRDLTIQKADEVVWVRARVHTSRAKGKQCFLVLRQQQFNVQALVAVGDHASKQMVKFAANINKESIVDVEGVVRKVNQKIGSCTQQDVELHVQKERSSSPATQQSWTENDFDKLREEGFRR

SEQ ID NO: 5527 - protein, 68 aa, Artificial Sequence
  Synthetic polypeptide
MVKFAANINKESIVDVEGVVRKVNQKIGSCTQQDVELHVQKERSSSPATQQSWTENDFDKLREEGFRR

SEQ ID NO: 5528 - protein, 135 aa, Artificial Sequence
  Synthetic polypeptide
MIQSQEKPDRVLVRVRDLTIQKADEVVWVRARVHTSRAKGKQCFLVLRQQQFNVQALVAVGDHASKQMVKFAANINKESIVDVEGVVRKVNQKIGSCTQQDVELHVQKERSSSPATQQSWTENDFDKLREEGFRR

SEQ ID NO: 5529 - protein, 65 aa, Artificial Sequence
  Synthetic polypeptide
RAETGREGEAPLACLTEACEGGWCPLPSSVSRCPAPAPAARVRRSRGRSWTRRKIMLKRDMEYLQ

SEQ ID NO: 5530 - protein, 354 aa, Artificial Sequence
  Synthetic polypeptide
MEPSSLELPADTVQRIAAELKCHPTDERVALHLDEEDKLRHFRECFYIPKIQDLPPVDLSLVNKDENAIYFLGNSLGLQPKMVKTYLEEELDKWAKIAAYGHEVGKRPWITGDESIVGLMKDIVGANEKEIALMNALTVNLHLLMLSFFKPTPKRYKILLEAKAFPSDHYAIESQLQLHGLNIEESMRMIKPREGEETLRIEDILEVIEKEGDSIAVILFSGVHFYTGQHFNIPAITKAGQAKGCYVGFDLAHAVGNVELYLHDWGVDFACWCSYKYLNAGAGGIAGAFIHEKHAHTIKPAIVIPSVGAGAWWEVMGQWGLSLCYSHDGEFLMKYSCLKVCSTFSFSLFLLLWP

SEQ ID NO: 5531 - protein, 100 aa, Artificial Sequence
  Synthetic polypeptide
MQKSTNSDTSVETLNSTRQGTGAVQMRIKNANSHHDRLSQSKSMILTDVGKVTEPISRHRRNHSQHILKDVIPPLEQLMVEKEGYLQKAKIADGGKKLSP

SEQ ID NO: 5532 - protein, 4 aa, Artificial Sequence
  Synthetic polypeptide
MLSL

SEQ ID NO: 5533 - protein, 238 aa, Artificial Sequence
  Synthetic polypeptide
MIILIYLFLLLWEDTQGWGFKDGIFHNSIWLERAAGVYHREARSGKYKLTYAEAKAVCEFEGGHLATYKQLEAARKIGFHVCAAGWMAKGRVGYPIVKPGPNCGFGKTGIIDYGIRLNRSERWDAYCYNPHAKECGGVFTDPKQIFKSPGFPNEYEDNQICYWHIRLKYGQRIHLSFLDFDLEDDPGCLADYVEIYDSYDDVHGFVGRYCGDELPDDIISTAHACDPNILGSWGRRIT

SEQ ID NO: 5534 - protein, 52 aa, Artificial Sequence
  Synthetic polypeptide
MGNAGSMDSQQTDFRAHNVPLKLPMPEPGELEERFAIVLYDIWPTVAPQVEI

SEQ ID NO: 5535 - protein, 895 aa, Artificial Sequence
  Synthetic polypeptide
MGNAGSMDSQQTDFRAHNVPLKLPMPEPGELEERFAIVLNAMNLPPDKARLLRQYDNEKKWELICDQERFQVKNPPHTYIQKLKGYLDPAVTRKKFRRRVQESTQVLRELEISLRTNHIGWVREFLNEENKGLDVLVEYLSFAQYAVTFDFESVESTVESSVDKSKPWSRSIEDLHRGSNLPSPVGNSVSRSGRHSALRYNTLPSRRTLKNSRLVSKKDDVHVCIMCLRAIMNYQYGFNMVMSHPHAVNEIALSLNNKNPRTKALVLELLAAVCLVRGGHEIILSAFDNFKEVCGEKQRFEKLMEHFRNEDNNIDFMVASMQFINIVVHSVEDMNFRVHLQYEFTKLGLDEYLDKLKHTESDKLQVQIQAYLDNVFDVGALLEDAETKNAALERVEELEENISHLSEKLQDTENEAMSKIVELEKQLMQRNKELDVVREIYKDANTQVHTLRKMVKEKEEAIQRQSTLEKKIHELEKQGTIKIQKKGDGDIAILPVVASGTLSMGSEVVAGNSVGPTMGAASSGPLPPPPPPLPPSSDTPETVQNGPVTPPMPPPPPPPPPPPPPPPPPPPPPLPGPAAETVPAPPLAPPLPSAPPLPGTSSPTVVFNSGLAAVKIKKPIKTKFRMPVFNWVALKPNQINGTVFNEIDDERILEDLNVDEFEEIFKTKAQGPAIDLSSSKQKIPQKGSNKVTLLEANRAKNLAITLRKAGKTADEICKAIHVFDLKTLPVDFVECLMRFLPTENEVKVLRLYERERKPLENLSDEDRFMMQFSKIERLMQKMTIMAFIGNFAESIQMLTPQLHAIIAASVSIKSSQKLKKILEIILALGNYMNSSKRGAVYGFKLQSLDLLLDTKSTDRKQTLLHYISNVVKEKYHQVSLFYNELHYVEKAAAAP

SEQ ID NO: 5536 - protein, 270 aa, Artificial Sequence
  Synthetic polypeptide
MPVFNWVALKPNQINGTVFNEIDDERILEDLNVDEFEEIFKTKAQGPAIDLSSSKQKIPQKGSNKVTLLEANRAKNLAITLRKAGKTADEICKAIHVFDLKTLPVDFVECLMRFLPTENEVKVLRLYERERKPLENLSDEDRFMMQFSKIERLMQKMTIMAFIGNFAESIQMLTPQLHAIIAASVSIKSSQKLKKILEIILALGNYMNSSKRGAVYGFKLQSLDLLLDTKSTDRKQTLLHYISNVVKEKYHQVSLFYNELHYVEKAAAAP

SEQ ID NO: 5537 - protein, 219 aa, Artificial Sequence
  Synthetic polypeptide
MSFAESGWRSALRRRGPGTPGPVARPSYSSFTQGDSWGEGEVDEEEGCDQVARDLRAEFSAGAWSEPRKRSVLPPDGNGSPVLPDKRNGIFPAAAGSRAQPRRWPVQVLSILCSLLFAILLAFLLAIAYLIVKELHAENLKNEDDVDTGLLGFWTLLIISLTAGFSCCSFSWTVTYFDSFEPGMFPPTPLSPARFNSSTPRIYPREISADSHHPPKTCS

SEQ ID NO: 5538 - protein, 218 aa, Artificial Sequence
  Synthetic polypeptide
MSFAESGWRSALRRRGPGTPGPVARPSYSSFTQGDSWGEGEVDEEEGCDQVARDLRAEFSAGAWSEPRKRSVLPPDGNGSPVLPDKRNGIFPAAAGSRAQPRRWPVQVLSILCSLLFAILLAFLLAIAYLIVKELHAENLKNEDDVDTGLLGFWTLLIISLTAGFSCCSFSWTVTYFDSFEPGMFPPTPLSPARFNSTPRIYPREISADSHHPPKTCS

SEQ ID NO: 5539 - protein, 70 aa, Artificial Sequence
  Synthetic polypeptide
MAFQKAVKGTILVGGGALATVLGLSQFAHYRRKQEFETTLGNMVKPHLFKKYENQPGLVAHTCSPSYSVG

SEQ ID NO: 5540 - protein, 520 aa, Artificial Sequence
  Synthetic polypeptide
MNRIRKFFRGSGRVLAFIFVASVIWLLFDMAALRLSFSEINTRVIKEDIVRRERIGFRVQPDQGKIFYSSIKEMKPPLRGHGKGAWGKENVRKTEESVLKVEVDLDQTQRERKMQNALGRGKVVPLWHPAHLQTLPVTPNKQKTDGRGTKPEASSHQGTPKQTTAQGAPKTSFIAAKGTQVVKISVHMGRVSLKQEPRKSHSPSSDTSKLAAERDLNVTISLSTDRPKQRSQAVANERAHPASTAVPKSGEAMALNKTKTQSKEVNANKHKANTSLPFPKFTVNSNRLRKQSINETPLGSLSKDDGARGAHGKKLNFSESHLVIITKEEEQKADPKEVSNSKTKTIFPKVLGKSQSKHISRNRSEMSSSSLAPHRVPLSQTNHALTGGLEPAKINITAKAPSTEYNQSHIKALLPEDSGTHQVLRIDVTLSPRDPKAPGQFGRPVVVPHGKEKEAERRWKEGNFNVYLSDLIPVDRAIEDTRPAGDWRTLIKIDWRSYEISLRNQLEAGKKKPHEMNSKG

SEQ ID NO: 5541 - protein, 519 aa, Artificial Sequence
  Synthetic polypeptide
MNRIRKFFRGSGRVLAFIFVASVIWLLFDMAALRLSFSEINTRVIKEDIVRRERIGFRVQPDQGKIFYSSIKEMKPPLRGHGKGAWGKENVRKTEESVLKVEVDLDQTQRERKMQNALGRGKVVPLWHPAHLQTLPVTPNKQKTDGRGTKPEASSHQGTPKQTTAQGAPKTSFIAAKGTQVVKISVHMGRVSLKQEPRKSHSPSSDTSKLAAERDLNVTISLSTDRPKQRSQAVANERAHPASTAVPKSGEAMALNKTKTQSKEVNANKHKANTSLPFPKFTVNSNRLRKQSINETPLGSLSKDDGARGAHGKKLNFSESHLVIITKEEEQKADPKEVSNSKTKTIFPKVLGKSQSKHISRNRSEMSSSSLAPHRVPLSQTNHALTGGLEPAKINITAKAPSTEYNQSHIKALLPEDSGTHQVLRIDVTLSPRDPKAPGQFGRPVVVPHGKEKEAERRWKEGNFNVYLSDLIPVDRAIEDTRPAGSLRPHQELSRWQSHASCTACRTVSQLNLFSLQIS

SEQ ID NO: 5542 - protein, 457 aa, Artificial Sequence
  Synthetic polypeptide
MCAASASPDNLVFHMKNEMRNIKYKPVDYQQLRALTEAKKLASASAKLKIRKAMLTSKLSKEQTLIKQHKQVWWQEYQRLNEVRCKMESEIKSLLNEENIGNECLCDLTNFEQELSEQQCTYLKNVINPIQQLRADLKYRQHHTLQHSHPHIEFNSMKVLEEVDFVKKQLKTVFERLRLEQQRIENDLSDWSIKILDHSLEEKTNPLSELPIELESLECPYPDLKSSILSEFYKFTQKYQKKLQDFNLQLEDIYRNCQLSEEDHWIYQAILDQYPGDLFGRRTLYLDMLQRYFPHKSRHDLVEHEKYCDQYRFAIEQQNILISNWNKNKKDFIQKAVLTLTEACATHEMESMLAKDKKKQQELCADLKAKVRQWRAHQEEVARLEMEISARRREKEEEKEKLWKKKELLQRAEKKKKIKKYWAKKKQKWQEMEMRDLQRLEELKKLIAEQSLKDRER

SEQ ID NO: 5543 - protein, 466 aa, Artificial Sequence
  Synthetic polypeptide
MNQRDQPFMTIQRNDSSDNLVFHMKNEMRNIKYKPVDYQQLRALTEAKKLASASAKLKIRKAMLTSKLSKEQTLIKQHKQVWWQEYQRLNEVRCKMESEIKSLLNEENIGNECLCDLTNFEQELSEQQCTYLKNVINPIQQLRADLKYRQHHTLQHSHPHIEFNSMKVLEEVDFVKKQLKTVFERLRLEQQRIENDLSDWSIKILDHSLEEKTNPLSELPIELESLECPYPDLKSSILSEFYKFTQKYQKKLQDFNLQLEDIYRNCQLSEEDHWIYQAILDQYPGDLFGRRTLYLDMLQRYFPHKSRHDLVEHEKYCDQYRFAIEQQNILISNWNKNKKDFIQKAVLTLTEACATHEMESMLAKDKKKQQELCADLKAKVRQWRAHQEEVARLEMEISARRREKEEEKEKLWKKKELLQRAEKKKKIKKYWAKKKQKWQEMEMRDLQRLEELKKLIAEQSLKDRER

SEQ ID NO: 5544 - protein, 338 aa, Artificial Sequence
  Synthetic polypeptide
MCAASASPDNLVFHMKNEMRNIKYKPVDYQQLRALTEAKKLASASAKLKIRKAMLTSKLSKEQTLIKQHKQVWWQEYQRLNEVRCKMESEIKSLLNEENIGNECLCDLTNFEQELSEQQCTYLKNVINPIQQLRADLKYRQHHTLQHSHPHIEFNSMKVLEEVDFVKKQLKTVFERLRLEQQRIENDLSDWSIKILDHSLEEKTNPLSELPIELESLECPYPDLKSSILSEFYKFTQKYQKKLQDFNLQLEDIYRNCQLSEEDHWIYQAILDQYPGDLFGRRTLYLDMLQRYFPHKSRHDLAGVQWRDLRSLQPPPPSRLPWPPKVLRLQPLPGHHPA

SEQ ID NO: 5545 - protein, 347 aa, Artificial Sequence
  Synthetic polypeptide
MNQRDQPFMTIQRNDSSDNLVFHMKNEMRNIKYKPVDYQQLRALTEAKKLASASAKLKIRKAMLTSKLSKEQTLIKQHKQVWWQEYQRLNEVRCKMESEIKSLLNEENIGNECLCDLTNFEQELSEQQCTYLKNVINPIQQLRADLKYRQHHTLQHSHPHIEFNSMKVLEEVDFVKKQLKTVFERLRLEQQRIENDLSDWSIKILDHSLEEKTNPLSELPIELESLECPYPDLKSSILSEFYKFTQKYQKKLQDFNLQLEDIYRNCQLSEEDHWIYQAILDQYPGDLFGRRTLYLDMLQRYFPHKSRHDLAGVQWRDLRSLQPPPPSRLPWPPKVLRLQPLPGHHPA

SEQ ID NO: 5546 - protein, 252 aa, Artificial Sequence
  Synthetic polypeptide
MESEIKSLLNEENIGNECLCDLTNFEQELSEQQCTYLKNVINPIQQLRADLKYRQHHTLQHSHPHIEFNSMKVLEEVDFVKKQLKTVFERLRLEQQRIENDLSDWSIKILDHSLEEKTNPLSELPIELESLECPYPDLKSSILSEFYKFTQKYQKKLQDFNLQLEDIYRNCQLSEEDHWIYQAILDQYPGDLFGRRTLYLDMLQRYFPHKSRHDLAGVQWRDLRSLQPPPPSRLPWPPKVLRLQPLPGHHPA

SEQ ID NO: 5547 - protein, 419 aa, Artificial Sequence
  Synthetic polypeptide
MCAASASPDNLVFHMKNEMRNIKYKPVDYQQLRALTEAKKLASASAKLKIRKAMLTSKLSKEQTLIKQHKQVWWQEYQRLNEVRCKMESEIKSLLNEENIGNECLCDLTNFEQELSEQQCTYLKNVINPIQQLRADLKYRQHHTLQHSHPHIEFNSMKVLEEVDFVKKQLKTVFERLRLEQQRIENDLSDWSIKILDHSLEEKTNPLSELPIELESLECPYPDLKSSILSEFYKFTQKYQKKLQDFNLQLEDIYRNCQLSEEDHWIYQAILDQYPGDLFGRRTLYLDMLQRYFPHKSRHDLSPSVAEAGLYCRDLGSLQLPCLILLPQPAECMGLQARAATPDWFLYFLVETGFRRVGRAGLQLLTSSDLPTSASRGAGIADGVWLTQCSMLPRLECSGVISARYNLHLPAACLGLPKC

SEQ ID NO: 5548 - protein, 428 aa, Artificial Sequence
  Synthetic polypeptide
MNQRDQPFMTIQRNDSSDNLVFHMKNEMRNIKYKPVDYQQLRALTEAKKLASASAKLKIRKAMLTSKLSKEQTLIKQHKQVWWQEYQRLNEVRCKMESEIKSLLNEENIGNECLCDLTNFEQELSEQQCTYLKNVINPIQQLRADLKYRQHHTLQHSHPHIEFNSMKVLEEVDFVKKQLKTVFERLRLEQQRIENDLSDWSIKILDHSLEEKTNPLSELPIELESLECPYPDLKSSILSEFYKFTQKYQKKLQDFNLQLEDIYRNCQLSEEDHWIYQAILDQYPGDLFGRRTLYLDMLQRYFPHKSRHDLSPSVAEAGLYCRDLGSLQLPCLILLPQPAECMGLQARAATPDWFLYFLVETGFRRVGRAGLQLLTSSDLPTSASRGAGIADGVWLTQCSMLPRLECSGVISARYNLHLPAACLGLPKC

SEQ ID NO: 5549 - protein, 333 aa, Artificial Sequence
  Synthetic polypeptide
MESEIKSLLNEENIGNECLCDLTNFEQELSEQQCTYLKNVINPIQQLRADLKYRQHHTLQHSHPHIEFNSMKVLEEVDFVKKQLKTVFERLRLEQQRIENDLSDWSIKILDHSLEEKTNPLSELPIELESLECPYPDLKSSILSEFYKFTQKYQKKLQDFNLQLEDIYRNCQLSEEDHWIYQAILDQYPGDLFGRRTLYLDMLQRYFPHKSRHDLSPSVAEAGLYCRDLGSLQLPCLILLPQPAECMGLQARAATPDWFLYFLVETGFRRVGRAGLQLLTSSDLPTSASRGAGIADGVWLTQCSMLPRLECSGVISARYNLHLPAACLGLPKC

SEQ ID NO: 5550 - protein, 105 aa, Artificial Sequence
  Synthetic polypeptide
MPAPEQASLVEEGQPQTRQEAASTGPGMEPETTATTILASVKEQELQFQRLTRELEVERQIVASQLERCRLGAESPSIASTSSTEKSFPWRSTGEWCEPERQSLQ

SEQ ID NO: 5551 - protein, 41 aa, Artificial Sequence
  Synthetic polypeptide
DVGLEQNHQASPAPAQLRSHFLGDQQENGVNPRGRACNERR

SEQ ID NO: 5552 - protein, 31 aa, Artificial Sequence
  Synthetic polypeptide
MLRAALPALLLPLLGLAAAAVAGERSSITEI

SEQ ID NO: 5553 - protein, 58 aa, Artificial Sequence
  Synthetic polypeptide
MLLSPSLLLLLLLGAPRGCAEGVAAALTPERLLEWQEVPFASHHDSEDSPAMLNCESN

SEQ ID NO: 5554 - protein, 764 aa, Artificial Sequence
  Synthetic polypeptide
MGIELLCLFFLFLGRNDHVQGGCALGGAETCEDCLLIGPQCAWCAQENFTHPSGVGERCDTPANLLAKGCQLNFIENPVSQVEILKNKPLSVGRQKNSSDIVQIAPQSLILKLRPGGAQTLQVHVRQTEDYPVDLYYLMDLSASMDDDLNTIKELGSRLSKEMSKLTSNFRLGFGSFVEKPVSPFVKTTPEEIANPCSSIPYFCLPTFGFKHILPLTNDAERFNEIVKNQKISANIDTPEGGFDAIMQAAVCKEKIGWRNDSLHLLVFVSDADSHFGMDSKLAGIVIPNDGLCHLDSKNEYSMSTVLEYPTIGQLIDKLVQNNVLLIFAVTQEQVHLYENYAKLIPGATVGLLQKDSGNILQLIISAYEELRSEVELEVLGDTEGLNLSFTAICNNGTLFQHQKKCSHMKVGDTASFSVTVNIPHCERRSRHIIIKPVGLGDALELLVSPECNCDCQKEVEVNSSKCHHGNGSFQCGVCACHPGHMGPRCECGEDMLSTDSCKEAPDHPSCSGRGDCYCGQCICHLSPYGNIYGPYCQCDNFSCVRHKGLLCGGNGDCDCGECVCRSGWTGEYCNCTTSTDSCVSEDGVLCSGRGDCVCGKCVCTNPGASGPTCERCPTCGDPCNSKRSCIECHLSAAGQAREECVDKCKLAGATISEEEDFSKDGSVSCSLQGENECLITFLITTDNEGKTIIHSINEKDCPKPPNIPMIMLGVSLAILLIGVVLLCIWKLLVSFHDRKEVAKFEAERSKAKWQTDGGDTFSA

SEQ ID NO: 5555 - protein, 722 aa, Artificial Sequence
  Synthetic polypeptide
MITYKNFTHPSGVGERCDTPANLLAKGCQLNFIENPVSQVEILKNKPLSVGRQKNSSDIVQIAPQSLILKLRPGGAQTLQVHVRQTEDYPVDLYYLMDLSASMDDDLNTIKELGSRLSKEMSKLTSNFRLGFGSFVEKPVSPFVKTTPEEIANPCSSIPYFCLPTFGFKHILPLTNDAERFNEIVKNQKISANIDTPEGGFDAIMQAAVCKEKIGWRNDSLHLLVFVSDADSHFGMDSKLAGIVIPNDGLCHLDSKNEYSMSTVLEYPTIGQLIDKLVQNNVLLIFAVTQEQVHLYENYAKLIPGATVGLLQKDSGNILQLIISAYEELRSEVELEVLGDTEGLNLSFTAICNNGTLFQHQKKCSHMKVGDTASFSVTVNIPHCERRSRHIIIKPVGLGDALELLVSPECNCDCQKEVEVNSSKCHHGNGSFQCGVCACHPGHMGPRCECGEDMLSTDSCKEAPDHPSCSGRGDCYCGQCICHLSPYGNIYGPYCQCDNFSCVRHKGLLCGGNGDCDCGECVCRSGWTGEYCNCTTSTDSCVSEDGVLCSGRGDCVCGKCVCTNPGASGPTCERCPTCGDPCNSKRSCIECHLSAAGQAREECVDKCKLAGATISEEEDFSKDGSVSCSLQGENECLITFLITTDNEGKTIIHSINEKDCPKPPNIPMIMLGVSLAILLIGVVLLCIWKLLVSFHDRKEVAKFEAERSKAKWQTDGGDTFSA

SEQ ID NO: 5556 - protein, 657 aa, Artificial Sequence
  Synthetic polypeptide
MGIELLCLFFLFLGRNDHVQGGCALGGAETCEDCLLIGPQCAWCAQENFTHPSGVGERCDTPANLLAKGCQLNFIENPVSQVEILKNKPLSVGRQKNSSDIVQIAPQSLILKLRPGGAQTLQVHVRQTEDYPVDLYYLMDLSASMDDDLNTIKELGSRLSKEMSKLTSNFRLGFGSFVEKPVSPFVKTTPEEIANPCSSIPYFCLPTFGFKHILPLTNDAERFNEIVKNQKISANIDTPEGGFDAIMQAAVCKEKIGWRNDSLHLLVFVSDADSHFGMDSKLAGIVIPNDGLCHLDSKNEYSMSTVLEYPTIGQLIDKLVQNNVLLIFAVTQEQVHLYENYAKLIPGATVGLLQKDSGNILQLIISAYEELRSEVELEVLGDTEGLNLSFTAICNNGTLFQHQKKCSHMKVGDTASFSVTVNIPHCERRSRHIIIKPVGLGDALELLVSPECNCDCQKEVEVNSSKCHHGNGSFQCGVCACHPGHMGPRCECGEDMLSTDSCKEAPDHPSCSGRGDCYCGQCICHLSPYGNIYGPYCQCDNFSCVRHKGLLCGDFSKDGSVSCSLQGENECLITFLITTDNEGKTIIHSINEKDCPKPPNIPMIMLGVSLAILLIGVVLLCIWKLLVSFHDRKEVAKFEAERSKAKWQTDGGDTFSA

SEQ ID NO: 5557 - protein, 33 aa, Artificial Sequence
  Synthetic polypeptide
MGKVWKQQMYPQYATYYYPQYLQAKLHFLASLQ

SEQ ID NO: 5558 - protein, 337 aa, Artificial Sequence
  Synthetic polypeptide
MKTWVKIVFGVATSAVLALLVMCIVLRPSRVHNSEENTMRALTLKDILNGTFSYKTFFPNWISGQEYLHQSADNNIVLYNIETGQSYTILSNRTMKSVNASNYGLSPDRQFVYLESDYSKLWRYSYTATYYIYDLSNGEFVRGNELPRPIQYLCWSPVGSKLAYVYQNNIYLKQRPGDPPFQITFNGRENKIFNGIPDWVYEEEMLATKYALWWSPNGKFLAYAEFNDTDIPVIAYSYYGDEQYPRTINIPYPKAGAKNPVVRIFIIDTTYPAYVGPQEVPVPAMIASSDYYFSWLTWVTDERVCLQWLKRVQNVSVLSICDFREDWQTWDCPKLFF

SEQ ID NO: 5559 - protein, 312 aa, Artificial Sequence
  Synthetic polypeptide
MKTWVKIVFGVATSAVLALLVMCIVLRPSRVHNSEENTMRALTLKDILNGTFSYKTFFPNWISGQEYLHQSADNNIVLYNIETGQSYTILSNRTMLWRYSYTATYYIYDLSNGEFVRGNELPRPIQYLCWSPVGSKLAYVYQNNIYLKQRPGDPPFQITFNGRENKIFNGIPDWVYEEEMLATKYALWWSPNGKFLAYAEFNDTDIPVIAYSYYGDEQYPRTINIPYPKAGAKNPVVRIFIIDTTYPAYVGPQEVPVPAMIASSDYYFSWLTWVTDERVCLQWLKRVQNVSVLSICDFREDWQTWDCPKLFF

SEQ ID NO: 5560 - protein, 100 aa, Artificial Sequence
  Synthetic polypeptide
MKTWVKIVFGVATSAVLALLVMCIVLRPSRALFTIAKTWNQPKCPSMIDWIKKMWHIYTMEYYAAMGHAGTWLKLETIILSKLTQKQKTEHCMFSLISGS

SEQ ID NO: 5561 - protein, 79 aa, Artificial Sequence
  Synthetic polypeptide
MCIVLRPSRALFTIAKTWNQPKCPSMIDWIKKMWHIYTMEYYAAMGHAGTWLKLETIILSKLTQKQKTEHCMFSLISGS

SEQ ID NO: 5562 - protein, 1306 aa, Artificial Sequence
  Synthetic polypeptide
MAQALLVPPGPESFRLFTRESLAAIEKRAAEEKAKKPKKEQDNDDENKPKPNSDLEAGKNLPFIYGDIPPEMVSEPLEDLDPYYINKKTFIVMNKGKAIFRFSATSALYILTPLNPVRKIAIKILVHSLFSMLIMCTILTNCVFMTLSNPPDWTKNVEYTFTGIYTFESLIKILARGFCLEDFTFLRDPWNWLDFSVIVMAYVTEFVSLGNVSALRTFRVLRALKTISVIPGLKTIVGALIQSVKKLSDVMILTVFCLSVFALIGLQLFMGNLRNKCLQWPPSDSAFETNTTSYFNGTMDSNGTFVNVTMSTFNWKDYIGDDSHFYVLDGQKDPLLCGNGSDAGQCPEGYICVKAGRNPNYGYTSFDTFSWAFLSLFRLMTQDYWENLYQLTLRAAGKTYMIFFVLVIFLGSFYLVNLILAVVAMAYEEQNQATLEEAEQKEAEFQQMLEQLKKQQEEAQAVAAASAASRDFSGIGGLGELLESSSEASKLSSKSAKEWRNRRKKRRQREHLEGNNKGERDSFPKSESEDSVKRSSFLFSMDGNRLTSDKKFCSPHQSLLSIRGSLFSPRRNSKTSIFSFRGRAKDVGSENDFADDEHSTFEDSESRRDSLFVPHRHGERRNSNVSQASMSSRMVPGLPANGKMHSTVDCNGVVSLVGGPSALTSPTGQLPPEGTTTETEVRKRRLSSYQISMEMLEDSSGRQRAVSIASILTNTMEELEESRQKCPPCWYRFANVFLIWDCCDAWLKVKHLVNLIVMDPFVDLAITICIVLNTLFMAMEHYPMTEQFSSVLTVGNLVFTGIFTAEMVLKIIAMDPYYYFQEGWNIFDGIIVSLSLMELGLSNVEGLSVLRSFRLLRVFKLAKSWPTLNMLIKIIGNSVGALGNLTLVLAIIVFIFAVVGMQLFGKSYKECVCKINDDCTLPRWHMNDFFHSFLIVFRVLCGEWIETMWDCMEVAGQTMCLIVFMLVMVIGNLVVLNLFLALLLSSFSSDNLAATDDDNEMNNLQIAVGRMQKGIDYVKNKMRECFQKAFFRKPKVIEIHEGNKIDSCMSNNTGIEISKELNYLRDGNGTTSGVGTGSSVEKYVIDENDYMSFINNPSLTVTVPIAVGESDFENLNTEEFSSESELEESKEKLNATSSSEGSTVDVVLPREGEQAETEPEEDLKPEACFTEGCIKKFPFCQVSTEEGKGKIWWNLRKTCYSIVEHNWFETFIVFMILLSSGALAFEDIYIEQRKTIKTMLEYADKVFTYIFILEMLLKWVAYGFQTYFTNAWCWLDFLIVDARCHLQPFCLSPLTTNQSASSSPFY

SEQ ID NO: 5563 - protein, 1306 aa, Artificial Sequence
  Synthetic polypeptide
MAQALLVPPGPESFRLFTRESLAAIEKRAAEEKAKKPKKEQDNDDENKPKPNSDLEAGKNLPFIYGDIPPEMVSEPLEDLDPYYINKKTFIVMNKGKAIFRFSATSALYILTPLNPVRKIAIKILVHSLFSMLIMCTILTNCVFMTLSNPPDWTKNVEYTFTGIYTFESLIKILARGFCLEDFTFLRDPWNWLDFSVIVMAYVTEFVDLGNVSALRTFRVLRALKTISVIPGLKTIVGALIQSVKKLSDVMILTVFCLSVFALIGLQLFMGNLRNKCLQWPPSDSAFETNTTSYFNGTMDSNGTFVNVTMSTFNWKDYIGDDSHFYVLDGQKDPLLCGNGSDAGQCPEGYICVKAGRNPNYGYTSFDTFSWAFLSLFRLMTQDYWENLYQLTLRAAGKTYMIFFVLVIFLGSFYLVNLILAVVAMAYEEQNQATLEEAEQKEAEFQQMLEQLKKQQEEAQAVAAASAASRDFSGIGGLGELLESSSEASKLSSKSAKEWRNRRKKRRQREHLEGNNKGERDSFPKSESEDSVKRSSFLFSMDGNRLTSDKKFCSPHQSLLSIRGSLFSPRRNSKTSIFSFRGRAKDVGSENDFADDEHSTFEDSESRRDSLFVPHRHGERRNSNVSQASMSSRMVPGLPANGKMHSTVDCNGVVSLVGGPSALTSPTGQLPPEGTTTETEVRKRRLSSYQISMEMLEDSSGRQRAVSIASILTNTMEELEESRQKCPPCWYRFANVFLIWDCCDAWLKVKHLVNLIVMDPFVDLAITICIVLNTLFMAMEHYPMTEQFSSVLTVGNLVFTGIFTAEMVLKIIAMDPYYYFQEGWNIFDGIIVSLSLMELGLSNVEGLSVLRSFRLLRVFKLAKSWPTLNMLIKIIGNSVGALGNLTLVLAIIVFIFAVVGMQLFGKSYKECVCKINDDCTLPRWHMNDFFHSFLIVFRVLCGEWIETMWDCMEVAGQTMCLIVFMLVMVIGNLVVLNLFLALLLSSFSSDNLAATDDDNEMNNLQIAVGRMQKGIDYVKNKMRECFQKAFFRKPKVIEIHEGNKIDSCMSNNTGIEISKELNYLRDGNGTTSGVGTGSSVEKYVIDENDYMSFINNPSLTVTVPIAVGESDFENLNTEEFSSESELEESKEKLNATSSSEGSTVDVVLPREGEQAETEPEEDLKPEACFTEGCIKKFPFCQVSTEEGKGKIWWNLRKTCYSIVEHNWFETFIVFMILLSSGALAFEDIYIEQRKTIKTMLEYADKVFTYIFILEMLLKWVAYGFQTYFTNAWCWLDFLIVDARCHLQPFCLSPLTTNQSASSSPFY

SEQ ID NO: 5564 - protein, 1257 aa, Artificial Sequence
  Synthetic polypeptide
MAQALLVPPGPESFRLFTRESLAAIEKRAAEEKAKKPKKEQDNDDENKPKPNSDLEAGKNLPFIYGDIPPEMVSEPLEDLDPYYINKKTFIVMNKGKAIFRFSATSALYILTPLNPVRKIAIKILVHSLFSMLIMCTILTNCVFMTLSNPPDWTKNVEYTFTGIYTFESLIKILARGFCLEDFTFLRDPWNWLDFSVIVMAYVTEFVSLGNVSALRTFRVLRALKTISVIPGLKTIVGALIQSVKKLSDVMILTVFCLSVFALIGLQLFMGNLRNKCLQWPPSDSAFETNTTSYFNGTMDSNGTFVNVTMSTFNWKDYIGDDSHFYVLDGQKDPLLCGNGSDAGQCPEGYICVKAGRNPNYGYTSFDTFSWAFLSLFRLMTQDYWENLYQLTLRAAGKTYMIFFVLVIFLGSFYLVNLILAVVAMAYEEQNQATLEEAEQKEAEFQQMLEQLKKQQEEAQAVAAASAASRDFSGIGGLGELLESSSEASKLSSKSAKEWRNRRKKRRQREHLEGNNKGERDSFPKSESEDSVKRSSFLFSMDGNRLTSDKKFCSPHQSLLSIRGSLFSPRRNSKTSIFSFRGRAKDVGSENDFADDEHSTFEDSESRRDSLFVPHRHGERRNSNGTTTETEVRKRRLSSYQISMEMLEDSSGRQRAVSIASILTNTMEELEESRQKCPPCWYRFANVFLIWDCCDAWLKVKHLVNLIVMDPFVDLAITICIVLNTLFMAMEHYPMTEQFSSVLTVGNLVFTGIFTAEMVLKIIAMDPYYYFQEGWNIFDGIIVSLSLMELGLSNVEGLSVLRSFRLLRVFKLAKSWPTLNMLIKIIGNSVGALGNLTLVLAIIVFIFAVVGMQLFGKSYKECVCKINDDCTLPRWHMNDFFHSFLIVFRVLCGEWIETMWDCMEVAGQTMCLIVFMLVMVIGNLVVLNLFLALLLSSFSSDNLAATDDDNEMNNLQIAVGRMQKGIDYVKNKMRECFQKAFFRKPKVIEIHEGNKIDSCMSNNTGIEISKELNYLRDGNGTTSGVGTGSSVEKYVIDENDYMSFINNPSLTVTVPIAVGESDFENLNTEEFSSESELEESKEKLNATSSSEGSTVDVVLPREGEQAETEPEEDLKPEACFTEGCIKKFPFCQVSTEEGKGKIWWNLRKTCYSIVEHNWFETFIVFMILLSSGALAFEDIYIEQRKTIKTMLEYADKVFTYIFILEMLLKWVAYGFQTYFTNAWCWLDFLIVDARCHLQPFCLSPLTTNQSASSSPFY

SEQ ID NO: 5565 - protein, 1257 aa, Artificial Sequence
  Synthetic polypeptide
MAQALLVPPGPESFRLFTRESLAAIEKRAAEEKAKKPKKEQDNDDENKPKPNSDLEAGKNLPFIYGDIPPEMVSEPLEDLDPYYINKKTFIVMNKGKAIFRFSATSALYILTPLNPVRKIAIKILVHSLFSMLIMCTILTNCVFMTLSNPPDWTKNVEYTFTGIYTFESLIKILARGFCLEDFTFLRDPWNWLDFSVIVMAYVTEFVDLGNVSALRTFRVLRALKTISVIPGLKTIVGALIQSVKKLSDVMILTVFCLSVFALIGLQLFMGNLRNKCLQWPPSDSAFETNTTSYFNGTMDSNGTFVNVTMSTFNWKDYIGDDSHFYVLDGQKDPLLCGNGSDAGQCPEGYICVKAGRNPNYGYTSFDTFSWAFLSLFRLMTQDYWENLYQLTLRAAGKTYMIFFVLVIFLGSFYLVNLILAVVAMAYEEQNQATLEEAEQKEAEFQQMLEQLKKQQEEAQAVAAASAASRDFSGIGGLGELLESSSEASKLSSKSAKEWRNRRKKRRQREHLEGNNKGERDSFPKSESEDSVKRSSFLFSMDGNRLTSDKKFCSPHQSLLSIRGSLFSPRRNSKTSIFSFRGRAKDVGSENDFADDEHSTFEDSESRRDSLFVPHRHGERRNSNGTTTETEVRKRRLSSYQISMEMLEDSSGRQRAVSIASILTNTMEELEESRQKCPPCWYRFANVFLIWDCCDAWLKVKHLVNLIVMDPFVDLAITICIVLNTLFMAMEHYPMTEQFSSVLTVGNLVFTGIFTAEMVLKIIAMDPYYYFQEGWNIFDGIIVSLSLMELGLSNVEGLSVLRSFRLLRVFKLAKSWPTLNMLIKIIGNSVGALGNLTLVLAIIVFIFAVVGMQLFGKSYKECVCKINDDCTLPRWHMNDFFHSFLIVFRVLCGEWIETMWDCMEVAGQTMCLIVFMLVMVIGNLVVLNLFLALLLSSFSSDNLAATDDDNEMNNLQIAVGRMQKGIDYVKNKMRECFQKAFFRKPKVIEIHEGNKIDSCMSNNTGIEISKELNYLRDGNGTTSGVGTGSSVEKYVIDENDYMSFINNPSLTVTVPIAVGESDFENLNTEEFSSESELEESKEKLNATSSSEGSTVDVVLPREGEQAETEPEEDLKPEACFTEGCIKKFPFCQVSTEEGKGKIWWNLRKTCYSIVEHNWFETFIVFMILLSSGALAFEDIYIEQRKTIKTMLEYADKVFTYIFILEMLLKWVAYGFQTYFTNAWCWLDFLIVDARCHLQPFCLSPLTTNQSASSSPFY

SEQ ID NO: 5566 - protein, 26 aa, Artificial Sequence
  Synthetic polypeptide
MKCALFLRVKILQRVCRSRYIVHAAM

SEQ ID NO: 5567 - protein, 235 aa, Artificial Sequence
  Synthetic polypeptide
MRDPLTDCPYNKVYKNLKEFSQNGENFCKQVTSVLQQRANLEISYAKGLQKLASKLSKALQNTRKSCVSSAWAWASEGMKSTADLHQKLGKAIELEAIKPTYQVLNVQEKKRKSLDNEVEKTANLVISNWNQQIKAKKKLMVSTKKHEALFQLVESSKQSMTEKEKRKLLNKLTKSTEKLEKEDENYYQKNMAGYSTRLKWENTLENCYQAYILQKNVHLYSKSDAQECLWENCL

SEQ ID NO: 5568 - protein, 157 aa, Artificial Sequence
  Synthetic polypeptide
MKSTADLHQKLGKAIELEAIKPTYQVLNVQEKKRKSLDNEVEKTANLVISNWNQQIKAKKKLMVSTKKHEALFQLVESSKQSMTEKEKRKLLNKLTKSTEKLEKEDENYYQKNMAGYSTRLKWENTLENCYQAYILQKNVHLYSKSDAQECLWENCL

SEQ ID NO: 5569 - protein, 207 aa, Artificial Sequence
  Synthetic polypeptide
MRDPLTDCPYNKVYKNLKEFSQNGENFCKQVTSVLQQSCVSSAWAWASEGMKSTADLHQKLGKAIELEAIKPTYQVLNVQEKKRKSLDNEVEKTANLVISNWNQQIKAKKKLMVSTKKHEALFQLVESSKQSMTEKEKRKLLNKLTKSTEKLEKEDENYYQKNMAGYSTRLKWENTLENCYQAYILQKNVHLYSKSDAQECLWENCL

SEQ ID NO: 5570 - protein, 3966 aa, Artificial Sequence
  Synthetic polypeptide
MDRGPAAVACTLLLALVACLAPASGQECDSAHFRCGSGHCIPADWRCDGTKDCSDDADEIGCAVVTCQQGYFKCQSEGQCIPNSWVCDQDQDCDDGSDERQDCSQSTCSSHQITCSNGQCIPSEYRCDHVRDCPDGADENDCQYPTCEQLTCDNGACYNTSQKCDWKVDCRDSSDEINCTEICLHNEFSCGNGECIPRAYVCDHDNDCQDGSDEHACNYPTCGGYQFTCPSGRCIYQNWVCDGEDDCKDNGDEDGCESGPHDVHKCSPREWSCPESGRCISIYKVCDGILDCPGREDENNTSTGKYCSMTLCSALNCQYQCHETPYGGACFCPPGYIINHNDSRTCVEFDDCQIWGICDQKCESRPGRHLCHCEEGYILERGQYCKANDSFGEASIIFSNGRDLLIGDIHGRSFRILVESQNRGVAVGVAFHYHLQRVFWTDTVQNKVFSVDINGLNIQEVLNVSVETPENLAVDWVNNKIYLVETKVNRIDMVNLDGSYRVTLITENLGHPRGIAVDPTVGYLFFSDWESLSGEPKLERAFMDGSNRKDLVKTKLGWPAGVTLDMISKRVYWVDSRFDYIETVTYDGIQRKTVVHGGSLIPHPFGVSLFEGQVFFTDWTKMAVLKANKFTETNPQVYYQASLRPYGVTVYHSLRQPYATNPCKDNNGGCEQVCVLSHRTDNDGLGFRCKCTFGFQLDTDERHCIAVQNFLIFSSQVAIRGIPFTLSTQEDVMVPVSGNPSFFVGIDFDAQDSTIFFSDMSKHMIFKQKIDGTGREILAANRVENVESLAFDWISKNLYWTDSHYKSISVMRLADKTRRTVVQYLNNPRSVVVHPFAGYLFFTDWFRPAKIMRAWSDGSHLLPVINTTLGWPNGLAIDWAASRLYWVDAYFDKIEHSTFDGLDRRRLGHIEQMTHPFGLAIFGEHLFFTDWRLGAIIRVRKADGGEMTVIRSGIAYILHLKSYDVNIQTGSNACNQPTHPNGDCSHFCFPVPNFQRVCGCPYGMRLASNHLTCEGDPTNEPPTEQCGLFSFPCKNGRCVPNYYLCDGVDDCHDNSDEQLCGTLNNTCSSSAFTCGHGECIPAHWRCDKRNDCVDGSDEHNCPTHAPASCLDTQYTCDNHQCISKNWVCDTDNDCGDGSDEKNCNSTETCQPSQFNCPNHRCIDLSFVCDGDKDCVDGSDEVGCVLNCTASQFKCASGDKCIGVTNRCDGVFDCSDNSDEAGCPTRPPGMCHSDEFQCQEDGICIPNFWECDGHPDCLYGSDEHNACVPKTCPSSYFHCDNGNCIHRAWLCDRDNDCGDMSDEKDCPTQPFRCPSWQWQCLGHNICVNLSVVCDGIFDCPNGTDESPLCNGNSCSDFNGGCTHECVQEPFGAKCLCPLGFLLANDSKTCEDIDECDILGSCSQHCYNMRGSFRCSCDTGYMLESDGRTCKVTASESLLLLVASQNKIIADSVTSQVHNIYSLVENGSYIVAVDFDSISGRIFWSDATQGKTWSAFQNGTDRRVVFDSSIILTETIAIDWVGRNLYWTDYALETIEVSKIDGSHRTVLISKNLTNPRGLALDPRMNEHLLFWSDWGHHPRIERASMDGSMRTVIVQDKIFWPCGLTIDYPNRLLYFMDSYLDYMDFCDYNGHHRRQVIASDLIIRHPYALTLFEDSVYWTDRATRRVMRANKWHGGNQSVVMYNIQWPLGIVAVHPSKQPNSVNPCAFSRCSHLCLLSSQGPHFYSCVCPSGWSLSPDLLNCLRDDQPFLITVRQHIIFGISLNPEVKSNDAMVPIAGIQNGLDVEFDDAEQYIYWVENPGEIHRVKTDGTNRTVFASISMVGPSMNLALDWISRNLYSTNPRTQSIEVLTLHGDIRYRKTLIANDGTALGVGFPIGITVDPARGKLYWSDQGTDSGVPAKIASANMDGTSVKTLFTGNLEHLECVTLDIEEQKLYWAVTGRGVIERGNVDGTDRMILVHQLSHPWGIAVHDSFLYYTDEQYEVIERVDKATGANKIVLRDNVPNLRGLQVYHRRNAAESSNGCSNNMNACQQICLPVPGGLFSCACATGFKLNPDNRSCSPYNSFIVVSMLSAIRGFSLELSDHSETMVPVAGQGRNALHVDVDVSSGFIYWCDFSSSVASDNAIRRIKPDGSSLMNIVTHGIGENGVRGIAVDWVAGNLYFTNAFVSETLIEVLRINTTYRRVLLKVTVDMPRHIVVDPKNRYLFWADYGQRPKIERSFLDCTNRTVLVSEGIVTPRGLAVDRSDGYVYWVDDSLDIIARIRINGENSEVIRYGSRYPTPYGITVFENSIIWVDRNLKKIFQASKEPENTEPPTVIRDNINWLRDVTIFDKQVQPRSPAEVNNNPCLENNGGCSHLCFALPGLHTPKCDCAFGTLQSDGKNCAISTENFLIFALSNSLRSLHLDPENHSPPFQTINVERTVMSLDYDSVSDRIYFTQNLASGVGQISYATLSSGIHTPTVIASGIGTADGIAFDWITRRIYYSDYLNQMINSMAEDGSNRTVIARVPKPRAIVLDPCQGYLYWADWDTHAKIERATLGGNFRVPIVNSSLVMPSGLTLDYEEDLLYWVDASLQRIERSTLTGVDREVIVNAAVHAFGLTLYGQYIYWTDLYTQRIYRANKYDGSGQIAMTTNLLSQPRGINTVVKNQKQQCNNPCEQFNGGCSHICAPGPNGAECQCPHEGNWYLANNRKHCIVDNGERCGASSFTCSNGRCISEEWKCDNDNDCGDGSDEMESVCALHTCSPTAFTCANGRCVQYSYRCDYYNDCGDGSDEAGCLFRDCNATTEFMCNNRRCIPREFICNGVDNCHDNNTSDEKNCPDRTCQSGYTKCHNSNICIPRVYLCDGDNDCGDNSDENPTYCTTHTCSSSEFQCASGRCIPQHWYCDQETDCFDASDEPASCGHSERTCLADEFKCDGGRCIPSEWICDGDNDCGDMSDEDKRHQCQNQNCSDSEFLCVNDRPPDRRCIPQSWVCDGDVDCTDGYDENQNCTRRTCSENEFTCGYGLCIPKIFRCDRHNDCGDYSDERGCLYQTCQQNQFTCQNGRCISKTFVCDEDNDCGDGSDELMHLCHTPEPTCPPHEFKCDNGRCIEMMKLCNHLDDCLDNSDEKGCGINECHDPSISGCDHNCTDTLTSFYCSCRPGYKLMSDKRTCVDIDECTEMPFVCSQKCENVIGSYICKCAPGYLREPDGKTCRQNSNIEPYLIFSNRYYLRNLTIDGYFYSLILEGLDNVVALDFDRVEKRLYWIDTQRQVIERMFLNKTNKETIINHRLPAAESLAVDWVSRKLYWLDARLDGLFVSDLNGGHRRMLAQHCVDANNTFCFDNPRGLALHPQYGYLYWADWGHRAYIGRVGMDGTNKSVIISTKLEWPNGITIDYTNDLLYWADAHLGYIEYSDLEGHHRHTVYDGALPHPFAITIFEDTIYWTDWNTRTVEKGNKYDGSNRQTLVNTTHRPFDIHVYHPYRQPIVSNPCGTNNGGCSHLCLIKPGGKGFTCECPDDFRTLQLSGSTYCMPMCSSTQFLCANNEKCIPIWWKCDGQKDCSDGSDELALCPQRFCRLGQFQCSDGNCTSPQTLCNAHQNCPDGSDEDRLLCENHHCDSNEWQCANKRCIPESWQCDTFNDCEDNSDEDSSHCASRTCRPGQFRCANGRCIPQAWKCDVDNDCGDHSDEPIEECMSSAHLCDNFTEFSCKTNYRCIPKWAVCNGVDDCRDNSDEQGCEERTCHPVGDFRCKNHHCIPLRWQCDGQNDCGDNSDEENCAPRECTESEFRCVNQQCIPSRWICDHYNDCGDNSDERDCEMRTCHPEYFQCTSGHCVHSELKCDGSADCLDASDEADCPTRFPDGAYCQATMFECKNHVCIPPYWKCDGDDDCGDGSDEELHLCLDVPCNSPNRFRCDNNRCIYSHEVCNGVDDCGDGTDETEEHCRKPTPKPCTEYEYKCGNGHCIPHDNVCDDADDCGDWSDELGCRKRR

SEQ ID NO: 5571 - protein, 29 aa, Artificial Sequence
  Synthetic polypeptide
MDTSSEMLVRFGRRCGRAKESTGMSLSAV

SEQ ID NO: 5572 - protein, 11 aa, Artificial Sequence
  Synthetic polypeptide
CQNMYSAWFYI

SEQ ID NO: 5573 - protein, 1555 aa, Artificial Sequence
  Synthetic polypeptide
MAAAAAAAVGGQQPSQPELPAPGLALDKAATAAHLKAALSRPDNRAGAEELQALLERVLSAERPLAAAAGGEDAAAAGGGGGPGAAEEEALEWCKCLLAGGGGYDEFCAAVRAYDPAALCGLVWTANFVAYRCRTCGISPCMSLCAECFHQGDHTGHDFNMFRSQAGGACDCGDSNVMRESGFCKRHQIKSSSNIPCVPKDLLMMSEFVLPRFIFCLIQYLREGYNEPAADGPSEKDLNKVLQLLEPQISFLEDLTKMGGAMRSVLTQVLTNQQNYKDLTSGLGENACVKKSHEKYLIALKSSGLTYPEDKLVYGVQEPSAGTSSLAVQGFIGATGTLGQVDSSDEDDQDGSQGLGKRKRVKLSSGTKDQSIMDVLKHKSFLEELLFWTIKYEFPQKMVTFLLNMLPDQEYKVAFTKTFVQHYAFIMKTLKKSHESDTMSNRIVHISVQLFSNEELARQVTEECQLLDIMVTVLLYMMESCLIKSELQDEENSLHVVVNCGEALLKNNTYWPLVSDFINILSHQSVAKRFLEDHGLLVTWMNFVSFFQGMNLNKRELNEHVEFESQTYYAAFAAELEACAQPMWGLLSHCKVRETQEYTRNVVRYCLEALQDWFDAINFVDEPAPNQVTFHLPLHRYYAMFLSKAVKCQELDLDSVLPDQEMLMKLMIHPLQIQASLAEIHSNMWVRNGLQIKGQAMTYVQSHFCNSMIDPDIYLLQVCASRLDPDYFISSVFERFKVVDLLTMASQHQNTVLDAEHERSMLEGALTFLVILLSLRLHLGMSDDEILRAEMVAQLCMNDRTHSSLLDLIPENPNPKSGIIPGSYSFESVLSAVADFKAPVFEPGGSMQQGMYTPKAEVWDQEFDPVMVILRTVYRRDVQSAMDRYTAFLKQSGKFPGNPWPPYKKRTSLHPSYKGLMRLLHCKTLHIVLFTLLYKILMDHQNLSEHVLCMVLYLIELGLENSAEEESDEEASVGGPERCHDSWFPGSNLVSNMRHFINYVRVRVPETAPEVKRDSPASTSSDNLGSLQNSGTAQVFSLVAERRKKFQEIINRSSSEANQVVRPKTSSKWSAPGSAPQLTTAILEIKESILSLLIKLHHKLSGKQNSYYPPWLDDIEILIQPEIPKYSHGDGITAVERILLKAASQSRMNKRIIEEICRKVTPPVPPKKVTAAEKKTLDKEERRQKARERQQKLLAEFASRQKSFMETAMDVDSPENDIPMEITTAEPQVSEAVYDCVICGQSGPSSEDRPTGLVVLLQASSVLGQCRDNVEPKKLPISEEEQIYPWDTCAAVHDVRLSLLQRYFKDSSCLLAVSIGWEGGVYVQTCGHTLHIDCHKSYMESLRNDQVLQGFSVDKGEFTCPLCRQFANSVLPCYPGSNVENNPWQRPSNKSIQDLIKEVEELQGRPGAFPSETNLSKEMESVMKDIKNTTQKKYRDYSKTPGSPDNDFLFMYSVARTNLELELIHRGGNLCSGGASTAGKRSCLNQLFHVLALHMRLYSIDSEYNPWRKLTQLEEMNPQLGYEEQQPEVPILYHDVTSLLLIQILMMPQPLRKGG

SEQ ID NO: 5574 - protein, 376 aa, Artificial Sequence
  Synthetic polypeptide
MIASKQRQFTEVFRIMSSTFSQSRFLYAAVVTDSPENDIPMEITTAEPQVSEAVYDCVICGQSGPSSEDRPTGLVVLLQASSVLGQCRDNVEPKKLPISEEEQIYPWDTCAAVHDVRLSLLQRYFKDSSCLLAVSIGWEGGVYVQTCGHTLHIDCHKSYMESLRNDQVLQGFSVDKGEFTCPLCRQFANSVLPCYPGSNVENNPWQRPSNKSIQDLIKEVEELQGRPGAFPSETNLSKEMESVMKDIKNTTQKKYRDYSKTPGSPDNDFLFMYSVARTNLELELIHRGGNLCSGGASTAGKRSCLNQLFHVLALHMRLYSIDSEYNPWRKLTQLEEMNPQLGYEEQQPEVPILYHDVTSLLLIQILMMPQPLRKGG

SEQ ID NO: 5575 - protein, 255 aa, Artificial Sequence
  Synthetic polypeptide
LHIDCHKSYMESLRNDQVLQGFSVDKGEFTCPLCRQFANSVLPCYPGSNVENNPWQRPSNKSIQDLIKEVEELQGRPGAFPSETNLSKEMESVMKDIKNTTQKKYRDYSKTPGSPDNDFLFMYSVARTNLELELIHRGGNLCSGGASTAGKRSCLNFCFIIFPFTKSEIILCQYRKSHDKVYPKYQLFHVLALHMRLYSIDSEYNPWRKLTQLEEMNPQLGYEEQQPEVPILYHDVTSLLLIQILMMPQPLRKGG

SEQ ID NO: 5576 - protein, 273 aa, Artificial Sequence
  Synthetic polypeptide
MGPTRKPNVCSRLSRRALGCFSRDAGVVQRTNLGILRALVCQESTKFKNVWTTHSRSPIAYERGRIYFDNYRRCVSSVASEPRKLYEMPKCSKSEKIEDALLWECPVGDILPNSSDYKSSLIALTAHNWLLRISATTGKILEKIYLAPYCKFRYLSWDTPQEVIAVKSAQNRGSAVARQAGIQQHVLLYLAVFRVLPFSLVGILEINKKIFGNVTDATLSHGILIVMYSSGLVRLYSFQTIAEQKEDWIWDQNFSLLTSKGDTLLLIGGMIVG

SEQ ID NO: 5577 - protein, 289 aa, Artificial Sequence
  Synthetic polypeptide
MGPTRKPNVCSRLSRRALGCFSRDAGVVQRTNLGILRALVCQESTKFKNVWTTHSRSPIAYERGRIYFDNYRRCVSSVASEPRKLYEMPKCSKSEKIEDALLWECPVGDILPNSSDYKSSLIALTAHNWLLRISATTGKILEKIYLAPYCKFRYLSWDTPQEVIAVKSAQNRGSAVARQAGIQQHVLLYLAVFRVLPFSLVGILEINKKIFGNVTDATLSHGILIVMYSSGLVRLYSFQTIAEQFMQQKLDLGCACRWGGTTGTVGEAPFGIPCNIKITERRLDLGSEF

SEQ ID NO: 5578 - protein, 193 aa, Artificial Sequence
  Synthetic polypeptide
MSDKSELKAELERKKQRLAQIREEKKRKEEERKKKETDQKKEAVAPVQEESDLEKKRREAEALLQSMGLTPESPIVPPPMSPSSKSVSTPSEAGSQDSGDGAVGSRTLHWDTDPSVLQLHSDSDLGRGPIKLGMAKITQVDFPPREIVTYTKETQTPVMAQPKEALWEAEVGQITRGQKFETSLANMVKPHLY

SEQ ID NO: 5579 - protein, 173 aa, Artificial Sequence
  Synthetic polypeptide
MSDKSELKAELERKKQRLAQIREEKKRKEEERKKKETDQKKEAVAPVQEESDLEKKRREAEALLQSMGLTPESPIVPPPMSPSSKSVSTPSEAGSQDSGDGAVGSRRGPIKLGMAKITQVDFPPREIVTYTKETQTPVMAQPKEALWEAEVGQITRGQKFETSLANMVKPHLY

SEQ ID NO: 5580 - protein, 199 aa, Artificial Sequence
  Synthetic polypeptide
MSDKSELKAELERKKQRLAQIREEKKRKEEERKKKETDQKKEAVAPVQEESDLEKKRREAEALLQSMGLTPESPIDIAEYLVPPPMSPSSKSVSTPSEAGSQDSGDGAVGSRTLHWDTDPSVLQLHSDSDLGRGPIKLGMAKITQVDFPPREIVTYTKETQTPVMAQPKEALWEAEVGQITRGQKFETSLANMVKPHLY

SEQ ID NO: 5581 - protein, 199 aa, Artificial Sequence
  Synthetic polypeptide
MSDKSELKAELERKKQRLAQIREEKKRKEEERKKKETDQKKEAVAPVQEESDLEKKRREAEALLQSMGLTPESPIVFSEYWVPPPMSPSSKSVSTPSEAGSQDSGDGAVGSRTLHWDTDPSVLQLHSDSDLGRGPIKLGMAKITQVDFPPREIVTYTKETQTPVMAQPKEALWEAEVGQITRGQKFETSLANMVKPHLY

SEQ ID NO: 5582 - protein, 191 aa, Artificial Sequence
  Synthetic polypeptide
MSDKSELKAELERKKQRLAQIREEKKRKEEERKKKETDQKKEAVAPVQEESDLEKKRREAEALLQSMGLTPESPIAEQPLRVVTADTCLFHYLVPPPMSPSSKSVSTPSEAGSQDSGDGAVGSRRGPIKLGMAKITQVDFPPREIVTYTKETQTPVMAQPKEALWEAEVGQITRGQKFETSLANMVKPHLY

SEQ ID NO: 5583 - protein, 211 aa, Artificial Sequence
  Synthetic polypeptide
MSDKSELKAELERKKQRLAQIREEKKRKEEERKKKETDQKKEAVAPVQEESDLEKKRREAEALLQSMGLTPESPIAEQPLRVVTADTCLFHYLVPPPMSPSSKSVSTPSEAGSQDSGDGAVGSRTLHWDTDPSVLQLHSDSDLGRGPIKLGMAKITQVDFPPREIVTYTKETQTPVMAQPKEALWEAEVGQITRGQKFETSLANMVKPHLY

SEQ ID NO: 5584 - protein, 137 aa, Artificial Sequence
  Synthetic polypeptide
MSDKSELKAELERKKQRLAQIREEKKRKEEERKKKETDQKKEAVAPVQEESDLEKKRREAEALLQSMGLTPESPIDEDLLNLEWLKSRKSTFLLEKLSRIQRKLRLQLWLNPKKHFGRPRWGRSPEVRSLRPAWPTW

SEQ ID NO: 5585 - protein, 536 aa, Artificial Sequence
  Synthetic polypeptide
MAVKVQTTKRGDPHELRNIFLQYASTEVDGERYMTPEDFVQRYLGLYNDPNSNPKIVQLLAGVADQTKDGLISYQEFLAFESVLCAPDSMFIVAFQLFDKSGNGEVTFENVKEIFGQTIIHHHIPFNWDCEFIRLHFGHNRKKHLNYTEFTQFLQELQLEHARQAFALKDKSKSGMISGLDFSDIMVTIRSHMLTPFVEENLVSAAGGSISHQVSFSYFNAFNSLLNNMELVRKIYSTLAGTRKDVEVTKEEFAQSAIRYGQVTPLEIDILYQLADLYNASGRLTLADIERIAPLAEGALPYNLAELQRQQSPGLGRPIWLQIAESAYRFTLGSVAGAVGATAVYPIDLVKTRMQNQRGSGSVVGELMYKNSFDCFKKVLRYEGFFGLYRGLIPQLIGVAPEKAIKLTVNDFVRDKFTRRDGSVPLPAEVLAGGCAGGSQVIFTNPLEIVKIRLQVAGEITTGPRVSALNVLRDLGIFGLYKGAKACFLRDIPFSAIYFPVYAHCKLLLADENGHVGGLNLLAAGAMAARCSGACL

SEQ ID NO: 5586 - protein, 429 aa, Artificial Sequence
  Synthetic polypeptide
MENVKEIFGQTIIHHHIPFNWDCEFIRLHFGHNRKKHLNYTEFTQFLQELQLEHARQAFALKDKSKSGMISGLDFSDIMVTIRSHMLTPFVEENLVSAAGGSISHQVSFSYFNAFNSLLNNMELVRKIYSTLAGTRKDVEVTKEEFAQSAIRYGQVTPLEIDILYQLADLYNASGRLTLADIERIAPLAEGALPYNLAELQRQQSPGLGRPIWLQIAESAYRFTLGSVAGAVGATAVYPIDLVKTRMQNQRGSGSVVGELMYKNSFDCFKKVLRYEGFFGLYRGLIPQLIGVAPEKAIKLTVNDFVRDKFTRRDGSVPLPAEVLAGGCAGGSQVIFTNPLEIVKIRLQVAGEITTGPRVSALNVLRDLGIFGLYKGAKACFLRDIPFSAIYFPVYAHCKLLLADENGHVGGLNLLAAGAMAARCSGACL

SEQ ID NO: 5587 - protein, 71 aa, Artificial Sequence
  Synthetic polypeptide
MAVKVQTTKRGDPHELRNIFLQYASTEVDGERYMTPEDFVQRYLGLYNDPNSNPKIVQLLAGVADQTKDGK

SEQ ID NO: 5588 - protein, 28 aa, Artificial Sequence
  Synthetic polypeptide
MGSEERLCPAAHRLRCGERLCPTAPSGM

SEQ ID NO: 5589 - protein, 67 aa, Artificial Sequence
  Synthetic polypeptide
VQTTKRGDPHELRNIFLQYASTEVDGERYMTPEDFVQRYLGLYNDPNSNPKIVQLLAGVADQTKDGK

SEQ ID NO: 5590 - protein, 472 aa, Artificial Sequence
  Synthetic polypeptide
MSSLGASFVQIKFDDLQFFENCGGGSFGSVYRAKWISQDKEVAVKKLLKIEKEAEILSVLSHRNIIQFYGVILEPPNYGIVTEYASLGSLYDYINSNRSEEMDMDHIMTWATDVAKGMHYLHMEAPVKVIHRDLKSRNVVIAADGVLKICDFGASRFHNHTTHMSLVGTFPWMAPEVIQSLPVSETCDTYSYGVVLWEMLTREVPFKGLEGLQVAWLVVEKNERLTIPSSCPRSFAELLHQCWEADAKKRPSFKQIISILESMSNDTSLPDKCNSFLHNKAEWRCEIEATLERLKKLERDLSFKEQELKERERRLKMWEQKLTEQSNTPLLPSFEIGAWTEDDVYCWVQQLVRKGDSSAEMSVYASLFKENNITGKRLLLLEEEDLKDMGIVSKGHIIHFKSAIEKLTHDYINLFHFPPLIKDSGGEPEENEEKIVNLELVFGFHLKPGTGPQHCAQNPTFGSKPKCPSTDE

SEQ ID NO: 5591 - protein, 613 aa, Artificial Sequence
  Synthetic polypeptide
MTAPEKPVKQEEMAALDVDSGGGGGGGGGHGEYLQQQQQHGNGAVAAAAAAQDTQPSPLALLAATCSKIGPPSPGDDEEEAAAAAGAPAAAGATGDLASAQLGGAPNRWEVLSATPTTIKDEAGNLVQIPSAATSSGQYVLPLQNLQNQQIFSVAPGSDSSNGTVSSVQYQVIPQIQSADGQQVQIGFTGSSDNGGINQESSQIQIIPGSNQTLLASGTPSANIQNLIPQTGQVQVQGVAIGGSSFPGQTQVVANVPLGLPGNITFVPINSVDLDSLGLSGSSQTMTAGINADGHLINTGQAMDSSDNSERTGERVSPDINETNTDTDLFVPTSSSSQLPVTIDSTGILQQNTNSLTTSSGQVHSSDLQGNYIQSPVSEETQAQNIQVSTAQPVVQHLQLQESQQPTSQAQIVQGITPQTIHGVQASGQNISQQALQNLQLQLNPGTFLIQAQTVTPSGQVTWQTFQVQGVQNLQNLQIQNTAAQQITLTPVQTLTLGQVAAGGAFTSTPVSLSTGQLPNLQTVTVNSIDSAGIQLHPGENADSPADIRIKEEEPDPEEWQLSGDSTLNTNDLTHLRVQVVDEEGDQQHQEGKRLRRVACTCPNCKEGGGSLL

SEQ ID NO: 5592 - protein, 560 aa, Artificial Sequence
  Synthetic polypeptide
MAALDVDSGGGGGGGGGHGEYLQQQQQHGNGAVAAAAAAQTGDLASAQLGGAPNRWEVLSATPTTIKDEAGNLVQIPSAATSSGQYVLPLQNLQNQQIFSVAPGSDSSNGTVSSVQYQVIPQIQSADGQQVQIGFTGSSDNGGINQESSQIQIIPGSNQTLLASGTPSANIQNLIPQTGQVQVQGVAIGGSSFPGQTQVVANVPLGLPGNITFVPINSVDLDSLGLSGSSQTMTAGINADGHLINTGQAMDSSDNSERTGERVSPDINETNTDTDLFVPTSSSSQLPVTIDSTGILQQNTNSLTTSSGQVHSSDLQGNYIQSPVSEETQAQNIQVSTAQPVVQHLQLQESQQPTSQAQIVQGITPQTIHGVQASGQNISQQALQNLQLQLNPGTFLIQAQTVTPSGQVTWQTFQVQGVQNLQNLQIQNTAAQQITLTPVQTLTLGQVAAGGAFTSTPVSLSTGQLPNLQTVTVNSIDSAGIQLHPGENADSPADIRIKEEEPDPEEWQLSGDSTLNTNDLTHLRVQVVDEEGDQQHQEGKRLRRVACTCPNCKEGGGSLL

SEQ ID NO: 5593 - protein, 545 aa, Artificial Sequence
  Synthetic polypeptide
IGPPSPGDDEEEAAAAAGAPAAAGATGDLASAQLGGAPNRWEVLSATPTTIKDEAGNLVQIPSAATSSGQYVLPLQNLQNQQIFSVAPGSDSSNGTVSSVQYQVIPQIQSADGQQVQIGFTGSSDNGGINQESSQIQIIPGSNQTLLASGTPSANIQNLIPQTGQVQVQGVAIGGSSFPGQTQVVANVPLGLPGNITFVPINSVDLDSLGLSGSSQTMTAGINADGHLINTGQAMDSSDNSERTGERVSPDINETNTDTDLFVPTSSSSQLPVTIDSTGILQQNTNSLTTSSGQVHSSDLQGNYIQSPVSEETQAQNIQVSTAQPVVQHLQLQESQQPTSQAQIVQGITPQTIHGVQASGQNISQQALQNLQLQLNPGTFLIQAQTVTPSGQVTWQTFQVQGVQNLQNLQIQNTAAQQITLTPVQTLTLGQVAAGGAFTSTPVSLSTGQLPNLQTVTVNSIDSAGIQLHPGENADSPADIRIKEEEPDPEEWQLSGDSTLNTNDLTHLRVQVVDEEGDQQHQEGKRLRRVACTCPNCKEGGGSLL

SEQ ID NO: 5594 - protein, 5 aa, Artificial Sequence
  Synthetic polypeptide
LPKSP

SEQ ID NO: 5595 - protein, 80 aa, Artificial Sequence
  Synthetic polypeptide
MAKRSRGPGRRCLLALVLFCAWGTLAVVAQKPGAGCPSRCLCFRTTVRCMHLLLEAVPAVAPQTSILNCRSYPSLQQPPP

SEQ ID NO: 5596 - protein, 62 aa, Artificial Sequence
  Synthetic polypeptide
PGAPGAAACWRSCCSAPGGRWPWWPRSRAQGVRAAACASAPPCAACICCWRPCPPWRRRPPS

SEQ ID NO: 5597 - protein, 190 aa, Artificial Sequence
  Synthetic polypeptide
MPPKKGGDGIKPPPIIGRFGTSLKIGIVGLPNVGKSTFFNVLTNSQASAENFPFCTIDPNESRVPVPDERFDFLCQYHKPASKIPAFLNVVDIAGLVKGAHNGQGLGNAFLSHISACDGIFHLTRAFEDDDITHVEGSVDPIRDIEIIHEELQLKDEEMIGPIIDKLEKVAVRGGDKKLKPEYRYSLYWN

SEQ ID NO: 5598 - protein, 32 aa, Artificial Sequence
  Synthetic polypeptide
MIGPIIDKLEKVAVRGGDKKLKPEYRYSLYWN

SEQ ID NO: 5599 - protein, 210 aa, Artificial Sequence
  Synthetic polypeptide
MSRTFSAKGGRDLVEGPQYLMPPKKGGDGIKPPPIIGRFGTSLKIGIVGLPNVGKSTFFNVLTNSQASAENFPFCTIDPNESRVPVPDERFDFLCQYHKPASKIPAFLNVVDIAGLVKGAHNGQGLGNAFLSHISACDGIFHLTRAFEDDDITHVEGSVDPIRDIEIIHEELQLKDEEMIGPIIDKLEKVAVRGGDKKLKPEYRYSLYWN

SEQ ID NO: 5600 - protein, 172 aa, Artificial Sequence
  Synthetic polypeptide
MPPKKGGDGIKPPPIIGRFGTSLKIGIVGLPNVGKSTFFNVLTNSQASAENFPFCTIDPNESRVPVPDERFDFLCQYHKPASKIPAFLNVVDIAGLVKGAHNGQGLGNAFLSHISACDGIFHLTRRSFRSYPEEAIVIIGDDSSMGVIAPEDLPVGQDVEVEDSDTDDPHPV

SEQ ID NO: 5601 - protein, 192 aa, Artificial Sequence
  Synthetic polypeptide
MSRTFSAKGGRDLVEGPQYLMPPKKGGDGIKPPPIIGRFGTSLKIGIVGLPNVGKSTFFNVLTNSQASAENFPFCTIDPNESRVPVPDERFDFLCQYHKPASKIPAFLNVVDIAGLVKGAHNGQGLGNAFLSHISACDGIFHLTRRSFRSYPEEAIVIIGDDSSMGVIAPEDLPVGQDVEVEDSDTDDPHPV

SEQ ID NO: 5602 - protein, 174 aa, Artificial Sequence
  Synthetic polypeptide
MPPKKGGDGIKPPPIIGRFGTSLKIGIVGLPNVGKSTFFNVLTNSQASAENFPFCTIDPNESRVPVPDERFDFLCQYHKPASKIPAFLNVVDIAGLVKGAHNGQGLGNAFLSHISACDGIFHLTPSGRSFRSYPEEAIVIIGDDSSMGVIAPEDLPVGQDVEVEDSDTDDPHPV

SEQ ID NO: 5603 - protein, 194 aa, Artificial Sequence
  Synthetic polypeptide
MSRTFSAKGGRDLVEGPQYLMPPKKGGDGIKPPPIIGRFGTSLKIGIVGLPNVGKSTFFNVLTNSQASAENFPFCTIDPNESRVPVPDERFDFLCQYHKPASKIPAFLNVVDIAGLVKGAHNGQGLGNAFLSHISACDGIFHLTPSGRSFRSYPEEAIVIIGDDSSMGVIAPEDLPVGQDVEVEDSDTDDPHPV

SEQ ID NO: 5604 - protein, 381 aa, Artificial Sequence
  Synthetic polypeptide
MPPLATPPSVHLSLRVAGRPDRLYDEVQEVVYFPAVVHDNLGERLKCTYIEIDQVPETYAVVLSRPAWLWGAEMGANEHGVCIGNEAVWGREEVCDEEALLGMDLVRLGLERADTAEKALNVIVDLLEKYGQGGNCTEGRMVFSYHNSFLIADRNEAWILETAGKYWAAEKVQEGVRNISNQLSITTKIAREHPDMRNYAKRKGWWDGKKEFDFAAAYSYLDTAKMMTSSGRYCEGYKLLNKHKGNITFETMMEILRDKPSGINMEGEFLTTASMVSILPQDSSLPCIHFFTGTPDPERSVFKPFIFVPHISQLLDTSSPTFELEDLVKKKSHFKPDRRHPLYQKHQQALEVVNNNETPNSSETADASQLEDPCHRRRESA

SEQ ID NO: 5605 - protein, 388 aa, Artificial Sequence
  Synthetic polypeptide
MEPFSCDTFVALPPATVDNRIIFGKNSDRLYDEVQEVVYFPAVVHDNLGERLKCTYIEIDQVPETYAVVLSRPAWLWGAEMGANEHGVCIGNEAVWGREEVCDEEALLGMDLVRLGLERADTAEKALNVIVDLLEKYGQGGNCTEGRMVFSYHNSFLIADRNEAWILETAGKYWAAEKVQEGVRNISNQLSITTKIAREHPDMRNYAKRKGWWDGKKEFDFAAAYSYLDTAKMMTSSGRYCEGYKLLNKHKGNITFETMMEILRDKPSGINMEGEFLTTASMVSILPQDSSLPCIHFFTGTPDPERSVFKPFIFVPHISQLLDTSSPTFELEDLVKKKSHFKPDRRHPLYQKHQQALEVVNNNETPNSSETADASQLEDPCHRRRESA

SEQ ID NO: 5606 - protein, 119 aa, Artificial Sequence
  Synthetic polypeptide
MALTLFDTDEYRPPVWKSYLYQLQQEAPHPRRITCTCEMRLSSCKKTSSGLPLILHYGELYNYFIIYYNVIIIEIKYTLNVMCVNHSKTIPSPLTPVCRKIVKLSPTKLVPGAKKVGDH

SEQ ID NO: 5607 - protein, 304 aa, Artificial Sequence
  Synthetic polypeptide
MAEAAAAAGGTGLGAGASYGSAADRDRDPDPDRAGRRLRVLSGHLLGRPREALSTNECKARRAASAATAAPTATPAAQESGTIPKKRQEVMKWNGWGYNDSKFIFNKKGQIELTGKRYPLSGMGLPTFKEWIQNTLGVNVEHKTTSKASLNPSDTPPSVVNEDFLHDLKETNISYSQEADDRVFRAHGHCLHEIFLLREGMFERIPDIVLWPTCHDDVVKIVNLACKYNLCIIPIGGGTSVSYGLMCPADETRTIISLDTSQMNRILWVDENNLTAHVEAGITGQELERQTDQRDRKLTRIFRT

SEQ ID NO: 5608 - protein, 649 aa, Artificial Sequence
  Synthetic polypeptide
MAEAAAAAGGTGLGAGASYGSAADRDRDPDPDRAGRRLRVLSGHLLGRPREALSTNECKARRAASAATAAPTATPAAQESGTIPKKRQEVMKWNGWGYNDSKFIFNKKGQIELTGKRYPLSGMGLPTFKEWIQNTLGVNVEHKTTSKASLNPSDTPPSVVNEDFLHDLKETNISYSQEADDRVFRAHGHCLHEIFLLREGMFERIPDIVLWPTCHDDVVKIVNLACKYNLCIIPIGGGTSVSYGLMCPADETRTIISLDTSQMNRILWVDENNLTAHVEAGITGQELERQLKESGYCTGHEPDSLEFSTVGGWVSTRASGMKKNIYGNIEDLVVHIKMVTPRGIIEKSCQGPRMSTGPDIHHFIMGSEGTLGVITEATIKIRPVPEYQKYGSVAFPNFEQGVACLREIAKQRCAPASIRLMDNKQFQFGHALKPQVSSIFTSFLDGLKKFYITKFKGFDPNQLSVATLLFEGDREKVLQHEKQVYDIAAKFGGLAAGEDNGQRGYLLTYVIAYIRDLALEYYVLGESFETSAPWDRVVDLCRNVKERITRECKEKGVQFAPFSTCRVTQTYDAGACIYFYFAFNYRGISDPLTVFEQTEAAAREEILANGGSLSHHHGVRIHEDRNSSFVCCYMVAPRTVLSPSQPSIH

SEQ ID NO: 5609 - protein, 180 aa, Artificial Sequence
  Synthetic polypeptide
MAEAAAAAGGTGLGAGASYGSAADRDRDPDPDRAGRRLRVLSGHLLGRPREALSTNECKARRAASAATAAPTATPAAQESGTIPKKRQEVMKWNGWGYNDSKFIFNKKGQIELTGKRGISDPLTVFEQTEAAAREEILANGGSLSHHHGVRIHEDRNSSFVCCYMVAPRTVLSPSQPSIH

SEQ ID NO: 5610 - protein, 629 aa, Artificial Sequence
  Synthetic polypeptide
MAEAAAAAGGTGLGAGASYGSAADRDRDPDPDRAGRRLRVLSGHLLGRPREALSTNECKARRAASAATAAPTATPAAQESGTIPKKRQEVMKWNGWGYNDSKFIFNKKGQIELTGKRYPLSGMGLPTFKEWIQNTLGVNVEHKTTSKASLNPSDTPPSVVNEDFLHDLKETNISYSQEADDRVFRAHGHCLHEIFLLREGMFERIPDIVLWPTCHDDVVKIVNLACKYNLCIIPIGGGTSVSYGLMCPADETRTIISLDTSQMNRILWVDENNLTAHVEAGITGQELERQLKESGYCTGHEPDSLEFSTVGGWVSTRASGMKKNIYGNIEDLVVHIKMVTPRGIIEKSCQGPRMSTGPDIHHFIMGSEGTLGVITEATIKIRPVPEYQKYGSVAFPNFEQGVACLREIAKQRCAPASIRLMDNKQFQFGHALKPQVSSIFTSFLDGLKKFYITKFKGFDPNQLSVATLLFEGDREKVLQHEKQVYDIAAKFGGLAAGEDNGQRGYLLTYVIAYIRDLALEYYVLGESFETSAPWDRVVDLCRNVKERITRECKEKGVQFAPFSTCRVTQTYDAGACIYFYFAFNYRGISDPLTVFEQTEAAAREEILANGGSLSHHHGGLQLEGTCYES

SEQ ID NO: 5611 - protein, 160 aa, Artificial Sequence
  Synthetic polypeptide
MAEAAAAAGGTGLGAGASYGSAADRDRDPDPDRAGRRLRVLSGHLLGRPREALSTNECKARRAASAATAAPTATPAAQESGTIPKKRQEVMKWNGWGYNDSKFIFNKKGQIELTGKRGISDPLTVFEQTEAAAREEILANGGSLSHHHGGLQLEGTCYES

SEQ ID NO: 5612 - protein, 28 aa, Artificial Sequence
  Synthetic polypeptide
IFHFVESPYLTLSSLLPQGKNMKEAELC

SEQ ID NO: 5613 - protein, 792 aa, Artificial Sequence
  Synthetic polypeptide
MAASRLDFGEVETFLDRHPELFEDYLMRKGKQEMVEKWLQRHSQGQGALGPRPSLAGTSSLAHSTCRGGSSVGGGTGPNGSAHSQPLPGGGDCGGVPLSPSWAGGSRGDGNLQRRASQKELRKSFARSKAIHVNRTYDEQVTSRAQEPLSSVRRRALLRKASSLPPTTAHILSALLESRVNLPRYPPTAIDYKCHLKKHNERQFFLELVKDISNDLDLTSLSYKILIFVCLMVDADRCSLFLVEGAAAGKKTLVSKFFDVHAGTPLLPCSSTENSNEVQVPWGKGIIGYVGEHGETVNIPDAYQDRRFNDEIDKLTGYKTKSLLCMPIRSSDGEIIGVAQAINKIPEGAPFTEDDEKVMQMYLPFCGIAISNAQLFAASRKEYERSRALLEVVNDLFEEQTDLEKIVKKIMHRAQTLLKCERCSVLLLEDIESPVVKFTKSFELMSPKCSADAENSFKESMEKSSYSDWLINNSIAELVASTGLPVNISDAYQDPRFDAEADQISGFHIRSVLCVPIWNSNHQIIGVAQVLNRLDGKPFDDADQRLFEAFVIFCGLGINNTIMYDQVKKSWAKQSVALDVLSYHATCSKAEVDKFKAANIPLVSELAIDDIHFDDFSLDVDAMITAALRMFMELGMVQKFKIDYETLCRWLLTVRKNYRMVLYHNWRHAFNVCQLMFAMLTTAGFQDILTEVEILAVIVGCLCHDLDHRGTNNAFQAKSGSALAQLYGTSATLEHHHFNHAVMILQSEGHNIFANLSSKEYSDLMQLLKQSILATDLTLYFEIATREDLKCS

SEQ ID NO: 5614 - protein, 542 aa, Artificial Sequence
  Synthetic polypeptide
MLKQARRPLFRNVLSATQWKKVKITRLVQISGASLAEKQEKHQDFLIQRQTKTKDRRFNDEIDKLTGYKTKSLLCMPIRSSDGEIIGVAQAINKIPEGAPFTEDDEKVMQMYLPFCGIAISNAQLFAASRKEYERSRALLEVVNDLFEEQTDLEKIVKKIMHRAQTLLKCERCSVLLLEDIESPVVKFTKSFELMSPKCSADAENSFKESMEKSSYSDWLINNSIAELVASTGLPVNISDAYQDPRFDAEADQISGFHIRSVLCVPIWNSNHQIIGVAQVLNRLDGKPFDDADQRLFEAFVIFCGLGINNTIMYDQVKKSWAKQSVALDVLSYHATCSKAEVDKFKAANIPLVSELAIDDIHFDDFSLDVDAMITAALRMFMELGMVQKFKIDYETLCRWLLTVRKNYRMVLYHNWRHAFNVCQLMFAMLTTAGFQDILTEVEILAVIVGCLCHDLDHRGTNNAFQAKSGSALAQLYGTSATLEHHHFNHAVMILQSEGHNIFANLSSKEYSDLMQLLKQSILATDLTLYFEIATREDLKCS

SEQ ID NO: 5615 - protein, 434 aa, Artificial Sequence
  Synthetic polypeptide
MQMYLPFCGIAISNAQLFAASRKEYERSRALLEVVNDLFEEQTDLEKIVKKIMHRAQTLLKCERCSVLLLEDIESPVVKFTKSFELMSPKCSADAENSFKESMEKSSYSDWLINNSIAELVASTGLPVNISDAYQDPRFDAEADQISGFHIRSVLCVPIWNSNHQIIGVAQVLNRLDGKPFDDADQRLFEAFVIFCGLGINNTIMYDQVKKSWAKQSVALDVLSYHATCSKAEVDKFKAANIPLVSELAIDDIHFDDFSLDVDAMITAALRMFMELGMVQKFKIDYETLCRWLLTVRKNYRMVLYHNWRHAFNVCQLMFAMLTTAGFQDILTEVEILAVIVGCLCHDLDHRGTNNAFQAKSGSALAQLYGTSATLEHHHFNHAVMILQSEGHNIFANLSSKEYSDLMQLLKQSILATDLTLYFEIATREDLKCS

SEQ ID NO: 5616 - protein, 348 aa, Artificial Sequence
  Synthetic polypeptide
MSPKCSADAENSFKESMEKSSYSDWLINNSIAELVASTGLPVNISDAYQDPRFDAEADQISGFHIRSVLCVPIWNSNHQIIGVAQVLNRLDGKPFDDADQRLFEAFVIFCGLGINNTIMYDQVKKSWAKQSVALDVLSYHATCSKAEVDKFKAANIPLVSELAIDDIHFDDFSLDVDAMITAALRMFMELGMVQKFKIDYETLCRWLLTVRKNYRMVLYHNWRHAFNVCQLMFAMLTTAGFQDILTEVEILAVIVGCLCHDLDHRGTNNAFQAKSGSALAQLYGTSATLEHHHFNHAVMILQSEGHNIFANLSSKEYSDLMQLLKQSILATDLTLYFEIATREDLKCS

SEQ ID NO: 5617 - protein, 1005 aa, Artificial Sequence
  Synthetic polypeptide
MAKRKEENFSSPKNAKRPRQEELEDFDKDGDEDECKGTTLTAAEVGIIESIHLKNFMCHSMLGPFKFGSNVNFVVGNNGSGKSAVLTALIVGLGGRAVATNRGSSLKGFVKDGQNSADISITLRNRGDDAFKASVYGNSILIQQHISIDGSRSYKLKSATGSVVSTRKEELIAILDHFNIQVDNPVSVLTQEMSKQFLQSKNEGDKYKFFMKATQLEQMKEDYSYIMETKERTKEQIHQGEERLTELKRQCVEKEERFQSIAGLSTMKTNLESLKHEMAWAVVNEIEKQLNAIRDNIKIGEDRAARLDRKMEEQQVRLNEAEQKYKDIQDKLEKISEETNARAPECMALKADVVAKKRAYNEAEVLYNRSLNEYKALKKDDEQLCKRIEELKKSTDQSLEPERLERQKKISWLKERVKAFQNQENSVNQEIEQFQQAIEKDKEEHGKIKREELDVKHALSYNQRQLKELKDSKTDRLKRFGPNVPALLEAIDDAYRQGHFTYKPVGPLGACIHLRDPELALAIESCLKGLLQAYCCHNHADERVLQALMKRFYLPGTSRPPIIVSEFRNEIYDVRHRAAYHPDFPTVLTALEIDNAVVANSLIDMRGIETVLLIKNNSVARAVMQSQKPPKNCREAFTADGDQVFAGRYYSSENTRPKFLSRDVDSEISDLENEVENKTAQILNLQQHLSALEKDIKHNEELLKRCQLHYKELKMKIRKNISEIRELENIEEHQSVDIATLEDEAQENKSKMKMVEEHMEQQKENMEHLKSLKIEAENKYDAIKFKINQLSELADPLKDELNLADSEVDNQKRGKRHYEEKQKEHLDTLNKKKRELDMKEKELEEKMSQARQICPERIEVEKSASILDKEINRLRQKIQAEHASHGDREEIMRQYQEARETYLDLDSKVRTLKKFIKLLGEIMEHRFKTYQQFRRCLTLRCKLYFDNLLSQRAYCGKMNFDHKNETLSISYAWPTRNTKEHLQMKEKWSQMETWKCRRNREECKR

SEQ ID NO: 5618 - protein, 1031 aa, Artificial Sequence
  Synthetic polypeptide
MAKRKEENFSSPKNAKRPRQEELEDFDKDGDEDECKGTTLTAAEVGIIESIHLKNFMCHSMLGPFKFGSNVNFVVGNNGSWSAVVRSRLNATSASQVQAILLFQPCGKSAVLTALIVGLGGRAVATNRGSSLKGFVKDGQNSADISITLRNRGDDAFKASVYGNSILIQQHISIDGSRSYKLKSATGSVVSTRKEELIAILDHFNIQVDNPVSVLTQEMSKQFLQSKNEGDKYKFFMKATQLEQMKEDYSYIMETKERTKEQIHQGEERLTELKRQCVEKEERFQSIAGLSTMKTNLESLKHEMAWAVVNEIEKQLNAIRDNIKIGEDRAARLDRKMEEQQVRLNEAEQKYKDIQDKLEKISEETNARAPECMALKADVVAKKRAYNEAEVLYNRSLNEYKALKKDDEQLCKRIEELKKSTDQSLEPERLERQKKISWLKERVKAFQNQENSVNQEIEQFQQAIEKDKEEHGKIKREELDVKHALSYNQRQLKELKDSKTDRLKRFGPNVPALLEAIDDAYRQGHFTYKPVGPLGACIHLRDPELALAIESCLKGLLQAYCCHNHADERVLQALMKRFYLPGTSRPPIIVSEFRNEIYDVRHRAAYHPDFPTVLTALEIDNAVVANSLIDMRGIETVLLIKNNSVARAVMQSQKPPKNCREAFTADGDQVFAGRYYSSENTRPKFLSRDVDSEISDLENEVENKTAQILNLQQHLSALEKDIKHNEELLKRCQLHYKELKMKIRKNISEIRELENIEEHQSVDIATLEDEAQENKSKMKMVEEHMEQQKENMEHLKSLKIEAENKYDAIKFKINQLSELADPLKDELNLADSEVDNQKRGKRHYEEKQKEHLDTLNKKKRELDMKEKELEEKMSQARQICPERIEVEKSASILDKEINRLRQKIQAEHASHGDREEIMRQYQEARETYLDLDSKVRTLKKFIKLLGEIMEHRFKTYQQFRRCLTLRCKLYFDNLLSQRAYCGKMNFDHKNETLSISYAWPTRNTKEHLQMKEKWSQMETWKCRRNREECKR

SEQ ID NO: 5619 - protein, 978 aa, Artificial Sequence
  Synthetic polypeptide
MAKRKEENFSSPKNAKRPRQEELEDFDKDGDEDECKGTTLTAAEVGIIESIHLKNFMCHSMLGPFKFGSNVNFVVGNNGSGKSAVLTALIVGLGGRAVATNRGSSLKGFVKDGQNSADISITLRNRGDDAFKASVYGNSILIQQHISIDGSRSYKLKSATGSVVSTRKEELIAILDHFNIQVDNPVSVLTQEMSKQFLQSKNEGDKYKFFMKATQLEQMKEDYSYIMETKERTKEQIHQGEERLTELKRQCVEKEERFQSIAGLSTMKTNLESLKHEMAWAVVNEIEKQLNAIRDNIKIGEDRAARLDRKMEEQQVRLNEAEQKYKDIQDKLEKISEETNARAPECMALKADVVAKKRAYNEAEVLYNRSLNEYKALKKDDEQLCKRIEELKKSTDQSLEPERLERQKKISWLKERVKAFQNQENSVNQEIEQFQQAIEKDKEEHGKIKREELDVKHALSYNQRQLKELKDSKTDRLKRFGPNVPALLEAIDDAYRQGHFTYKPVGPLGACIHLRDPELALAIESCLKGLLQAYCCHNHADERVLQALMKRFYLPGTSRPPIIVSEFRNEIYDVRHRAAYHPDFPTVLTALEIDNAVVANSLIDMRGIETVLLIKNNSVARAVMQSQKPPKNCREAFTADGDQVFAGRYYSSENTRPKFLSRDVDSEISDLENEVENKTAQILNLQQHLSALEKDIKHNEELLKRCQLHYKELKMKIRKNISEIRELENIEEHQSVDIATLEDEAQENKSKMKMVEEHMEQQKENMEHLKSLKIEAENKYDAIKFKINQLSELADPLKDELNLADSEVDNQKRGKRHYEEKQKEHLDTLNKKKRELDMKEKELEEKMSQARQICPERIEVEKSASILDKEINRLRQKIQAEHASHGDREEIMRQYQEARETYLDLDSKVRTLKKFIKLLGEIMEHRFKTYQQFRRCLTLRCKLYFDNLLSQRAYCGKMNFDHKNETLSISFSDKQKLK

SEQ ID NO: 5620 - protein, 1004 aa, Artificial Sequence
  Synthetic polypeptide
MAKRKEENFSSPKNAKRPRQEELEDFDKDGDEDECKGTTLTAAEVGIIESIHLKNFMCHSMLGPFKFGSNVNFVVGNNGSWSAVVRSRLNATSASQVQAILLFQPCGKSAVLTALIVGLGGRAVATNRGSSLKGFVKDGQNSADISITLRNRGDDAFKASVYGNSILIQQHISIDGSRSYKLKSATGSVVSTRKEELIAILDHFNIQVDNPVSVLTQEMSKQFLQSKNEGDKYKFFMKATQLEQMKEDYSYIMETKERTKEQIHQGEERLTELKRQCVEKEERFQSIAGLSTMKTNLESLKHEMAWAVVNEIEKQLNAIRDNIKIGEDRAARLDRKMEEQQVRLNEAEQKYKDIQDKLEKISEETNARAPECMALKADVVAKKRAYNEAEVLYNRSLNEYKALKKDDEQLCKRIEELKKSTDQSLEPERLERQKKISWLKERVKAFQNQENSVNQEIEQFQQAIEKDKEEHGKIKREELDVKHALSYNQRQLKELKDSKTDRLKRFGPNVPALLEAIDDAYRQGHFTYKPVGPLGACIHLRDPELALAIESCLKGLLQAYCCHNHADERVLQALMKRFYLPGTSRPPIIVSEFRNEIYDVRHRAAYHPDFPTVLTALEIDNAVVANSLIDMRGIETVLLIKNNSVARAVMQSQKPPKNCREAFTADGDQVFAGRYYSSENTRPKFLSRDVDSEISDLENEVENKTAQILNLQQHLSALEKDIKHNEELLKRCQLHYKELKMKIRKNISEIRELENIEEHQSVDIATLEDEAQENKSKMKMVEEHMEQQKENMEHLKSLKIEAENKYDAIKFKINQLSELADPLKDELNLADSEVDNQKRGKRHYEEKQKEHLDTLNKKKRELDMKEKELEEKMSQARQICPERIEVEKSASILDKEINRLRQKIQAEHASHGDREEIMRQYQEARETYLDLDSKVRTLKKFIKLLGEIMEHRFKTYQQFRRCLTLRCKLYFDNLLSQRAYCGKMNFDHKNETLSISFSDKQKLK

SEQ ID NO: 5621 - protein, 510 aa, Artificial Sequence
  Synthetic polypeptide
MAASRLDFGEVETFLDRHPELFEDYLMRKGKQEMVEKWLQRHSQGQGALGPRPSLAGTSSLAHSTCRGGSSVGGGTGPNGSAHSQPLPGGGDCGGVPLSPSWAGGSRGDGNLQRRASQKELRKSFARSKAIHVNRTYDEQVTSRAQEPLSSVRRRALLRKASSLPPTTAHILSALLESRVNLPRYPPTAIDYKCHLKKHNERQFFLELVKDISNDLDLTSLSYKILIFVCLMVDADRCSLFLVEGAAAGKKTLVSKFFDVHAGTPLLPCSSTENSNEVQVPWGKGIIGYVGEHGETVNIPDAYQDRRFNDEIDKLTGYKTKSLLCMPIRSSDGEIIGVAQAINKIPEGAPFTEDDEKVMQMYLPFCGIAISNAQLFAASRKEYERSRALLEVVNDLFEEQTDLEKIVKKIMHRAQTLLKCERCSVLLLEDIESPVVKFTKSFELMSPKCSADAENSNNEGRNSQEDEVVLYLVTEIHLHGSPNTCQVMQLKAGEIAKALIISEINFKTRG

SEQ ID NO: 5622 - protein, 260 aa, Artificial Sequence
  Synthetic polypeptide
MLKQARRPLFRNVLSATQWKKVKITRLVQISGASLAEKQEKHQDFLIQRQTKTKDRRFNDEIDKLTGYKTKSLLCMPIRSSDGEIIGVAQAINKIPEGAPFTEDDEKVMQMYLPFCGIAISNAQLFAASRKEYERSRALLEVVNDLFEEQTDLEKIVKKIMHRAQTLLKCERCSVLLLEDIESPVVKFTKSFELMSPKCSADAENSNNEGRNSQEDEVVLYLVTEIHLHGSPNTCQVMQLKAGEIAKALIISEINFKTRG

SEQ ID NO: 5623 - protein, 152 aa, Artificial Sequence
  Synthetic polypeptide
MQMYLPFCGIAISNAQLFAASRKEYERSRALLEVVNDLFEEQTDLEKIVKKIMHRAQTLLKCERCSVLLLEDIESPVVKFTKSFELMSPKCSADAENSNNEGRNSQEDEVVLYLVTEIHLHGSPNTCQVMQLKAGEIAKALIISEINFKTRG

SEQ ID NO: 5624 - protein, 66 aa, Artificial Sequence
  Synthetic polypeptide
MSPKCSADAENSNNEGRNSQEDEVVLYLVTEIHLHGSPNTCQVMQLKAGEIAKALIISEINFKTRG

SEQ ID NO: 5625 - protein, 28 aa, Artificial Sequence
  Synthetic polypeptide
IFHFVESPYLTLSSLLPQGKNMKEAELC

SEQ ID NO: 5626 - protein, 670 aa, Artificial Sequence
  Synthetic polypeptide
MAKRKEENFSSPKNAKRPRQEELEDFDKDGDEDECKGTTLTAAEVGIIESIHLKNFMCHSMLGPFKFGSNVNFVVGNNGSGKSAVLTALIVGLGGRAVATNRGSSLKGFVKDGQNSADISITLRNRGDDAFKASVYGNSILIQQHISIDGSRSYKLKSATGSVVSTRKEELIAILDHFNIQVDNPVSVLTQEMSKQFLQSKNEGDKYKFFMKATQLEQMKEDYSYIMETKERTKEQIHQGEERLTELKRQCVEKEERFQSIAGLSTMKTNLESLKHEMAWAVVNEIEKQLNAIRDNIKIGEDRAARLDRKMEEQQVRLNEAEQKYKDIQDKLEKISEETNARAPECMALKADVVAKKRAYNEAEVLYNRSLNEYKALKKDDEQLCKRIEELKKSTDQSLEPERLERQKKISWLKERVKAFQNQENSVNQEIEQFQQAIEKDKEEHGKIKREELDVKHALSYNQRQLKELKDSKTDRLKRFGPNVPALLEAIDDAYRQGHFTYKPVGPLGACIHLRDPELALAIESCLKGLLQAYCCHNHADERVLQALMKRFYLPGTSRPPIIVSEFRNEIYDVRHRVILDSFLLPHILLAVLQKYIQDLTTCVVTLLAHAIIMFPLRIAQADLPASGYLAPQSQYSSQRKVRSCCASAQRTLNFAVFLITGLTVTSRPG

SEQ ID NO: 5627 - protein, 696 aa, Artificial Sequence
  Synthetic polypeptide
MAKRKEENFSSPKNAKRPRQEELEDFDKDGDEDECKGTTLTAAEVGIIESIHLKNFMCHSMLGPFKFGSNVNFVVGNNGSWSAVVRSRLNATSASQVQAILLFQPCGKSAVLTALIVGLGGRAVATNRGSSLKGFVKDGQNSADISITLRNRGDDAFKASVYGNSILIQQHISIDGSRSYKLKSATGSVVSTRKEELIAILDHFNIQVDNPVSVLTQEMSKQFLQSKNEGDKYKFFMKATQLEQMKEDYSYIMETKERTKEQIHQGEERLTELKRQCVEKEERFQSIAGLSTMKTNLESLKHEMAWAVVNEIEKQLNAIRDNIKIGEDRAARLDRKMEEQQVRLNEAEQKYKDIQDKLEKISEETNARAPECMALKADVVAKKRAYNEAEVLYNRSLNEYKALKKDDEQLCKRIEELKKSTDQSLEPERLERQKKISWLKERVKAFQNQENSVNQEIEQFQQAIEKDKEEHGKIKREELDVKHALSYNQRQLKELKDSKTDRLKRFGPNVPALLEAIDDAYRQGHFTYKPVGPLGACIHLRDPELALAIESCLKGLLQAYCCHNHADERVLQALMKRFYLPGTSRPPIIVSEFRNEIYDVRHRVILDSFLLPHILLAVLQKYIQDLTTCVVTLLAHAIIMFPLRIAQADLPASGYLAPQSQYSSQRKVRSCCASAQRTLNFAVFLITGLTVTSRPG

SEQ ID NO: 5628 - protein, 99 aa, Artificial Sequence
  Synthetic polypeptide
YDVRHRVILDSFLLPHILLAVLQKYIQDLTTCVVTLLAHAIIMFPLRIAQADLPASGYLAPQSQYSSQRKVRSCCASAQRTLNFAVFLITGLTVTSRPG

SEQ ID NO: 5629 - protein, 698 aa, Artificial Sequence
  Synthetic polypeptide
MSSDEKGISPAHKTSTPTHRSASSSTSSQRDSRQSIHILERTASSSTEPSVSRQLLEPEPVPLSKEADSWEIIEGLKIGQTNVQKPDKHEGFMLKKRKWPLKGWHKRFFVLDNGMLKYSKAPLDIQKGKVHGSIDVGLSVMSIKKKARRIDLDTEEHIYHLKVKSQDWFDAWVSKLRHHRLYRQNEIVRSPRDASFHIFPSTSTAESSPAANVSVMDGKMQPNSFPWQSPLPCSNSLPATCTTGQSKVAAWLQDSEEMDRCAEDLAHCQSNLVELSKLLQNLEILQRTQSAPNFTDMQANCVDISKKDKRVTRRWRTKSVSKDTKIQLQVPFSATMSPVRLHSSNPNLCADIEFQTPPSHLTDPLESSTDYTKLQEEFCLIAQKVHSLLKSAFNSIAIEKEKLKQMVSEQDHSKGHSTQMARLRQSLSQAGEQIHVSLPLSQQVANESRLSMSESVSEFFDAQEVLLSASSSENEASDDESYISDVSDNISEDNTSVADNISRQILNGELTGGAFRNGRRACLPAPCPDTSNINLWNILRNNIGKDLSKVSMPVELNEPLNTLQHLCEEMEYSELLDKASETDDPYERMVLVAAFAVSGYCSTYFRAGSKPFNPVLGETYECIREDKGFRFFSEQVSHHPPISACHCESKNFVFWQDIRWKNKFWGKSMEILPVGTLNVMLPKPGTVAHACNSSTLGG

SEQ ID NO: 5630 - protein, 759 aa, Artificial Sequence
  Synthetic polypeptide
MSSDEKGISPAHKTSTPTHRSASSSTSSQRDSRQSIHILERTASSSTEPSVSRQLLEPEPVPLSKEADSWEIIEGLKIGQTNVQKPDKHEGFMLKKRKWPLKGWHKRFFVLDNGMLKYSKAPLDIQKGKVHGSIDVGLSVMSIKKKARRIDLDTEEHIYHLKVKSQDWFDAWVSKLRHHRLYRQNEIVRSPRDASFHIFPSTSTAESSPAANVSVMDGKMQPNSFPWQSPLPCSNSLPATCTTGQSKVAAWLQDSEEMDRCAEDLAHCQSNLVELSKLLQNLEILQRTQSAPNFTDMQANCVDISKKDKRVTRRWRTKSVSKDTKIQLQEGPPAKGQFSTTRRRQRLAAAVATTVPFSATMSPVRLHSSNPNLCADIEFQTPPSHLTDPLESSTDYTKLQEEFCLIAQKVHSLLKSAFNSIAIEKEKLKQMVSEQDHSKGHSTQMARLRQSLSQALNQNAELRSRLNRIHSESIICDQVVSVNIIPSPDEAGEQIHVSLPLSQQVANESRLSMSESVSEFFDAQEVLLSASSSENEASDDESYISDVSDNISEDNTSVADNISRQILNGELTGGAFRNGRRACLPAPCPDTSNINLWNILRNNIGKDLSKVSMPVELNEPLNTLQHLCEEMEYSELLDKASETDDPYERMVLVAAFAVSGYCSTYFRAGSKPFNPVLGETYECIREDKGFRFFSEQVSHHPPISACHCESKNFVFWQDIRWKNKFWGKSMEILPVGTLNVMLPKPGTVAHACNSSTLGG

SEQ ID NO: 5631 - protein, 703 aa, Artificial Sequence
  Synthetic polypeptide
MSSDEKGISPAHKTSTPTHRSASSSTSSQRDSRQSIHILERTASSSTEPSVSRQLLEPEPVPLSKEADSWEIIEGLKIGQTNVQKPDKHEGFMLKKRKWPLKGWHKRFFVLDNGMLKYSKAPLDIQKGKVHGSIDVGLSVMSIKKKARRIDLDTEEHIYHLKVKSQDWFDAWVSKLRHHRLYRQNEIVRSPRDASFHIFPSTSTAESSPAANVSVMDGKMQPNSFPWQSPLPCSNSLPATCTTGQSKVAAWLQDSEEMDRCAEDLAHCQSNLVELSKLLQNLEILQRTQSAPNFTDMQVPFSATMSPVRLHSSNPNLCADIEFQTPPSHLTDPLESSTDYTKLQEEFCLIAQKVHSLLKSAFNSIAIEKEKLKQMVSEQDHSKGHSTQMARLRQSLSQALNQNAELRSRLNRIHSESIICDQVVSVNIIPSPDEAGEQIHVSLPLSQQVANESRLSMSESVSEFFDAQEVLLSASSSENEASDDESYISDVSDNISEDNTSVADNISRQILNGELTGGAFRNGRRACLPAPCPDTSNINLWNILRNNIGKDLSKVSMPVELNEPLNTLQHLCEEMEYSELLDKASETDDPYERMVLVAAFAVSGYCSTYFRAGSKPFNPVLGETYECIREDKGFRFFSEQVSHHPPISACHCESKNFVFWQDIRWKNKFWGKSMEILPVGTLNVMLPKPGTVAHACNSSTLGG

SEQ ID NO: 5632 - protein, 734 aa, Artificial Sequence
  Synthetic polypeptide
MSSDEKGISPAHKTSTPTHRSASSSTSSQRDSRQSIHILERTASSSTEPSVSRQLLEPEPVPLSKEADSWEIIEGLKIGQTNVQKPDKHEGFMLKKRKWPLKGWHKRFFVLDNGMLKYSKAPLDIQKGKVHGSIDVGLSVMSIKKKARRIDLDTEEHIYHLKVKSQDWFDAWVSKLRHHRLYRQNEIVRSPRDASFHIFPSTSTAESSPAANVSVMDGKMQPNSFPWQSPLPCSNSLPATCTTGQSKVAAWLQDSEEMDRCAEDLAHCQSNLVELSKLLQNLEILQRTQSAPNFTDMQANCVDISKKDKRVTRRWRTKSVSKDTKIQLQVPFSATMSPVRLHSSNPNLCADIEFQTPPSHLTDPLESSTDYTKLQEEFCLIAQKVHSLLKSAFNSIAIEKEKLKQMVSEQDHSKGHSTQMARLRQSLSQALNQNAELRSRLNRIHSESIICDQVVSVNIIPSPDEAGEQIHVSLPLSQQVANESRLSMSESVSEFFDAQEVLLSASSSENEASDDESYISDVSDNISEDNTSVADNISRQILNGELTGGAFRNGRRACLPAPCPDTSNINLWNILRNNIGKDLSKVSMPVELNEPLNTLQHLCEEMEYSELLDKASETDDPYERMVLVAAFAVSGYCSTYFRAGSKPFNPVLGETYECIREDKGFRFFSEQVSHHPPISACHCESKNFVFWQDIRWKNKFWGKSMEILPVGTLNVMLPKPGTVAHACNSSTLGG

SEQ ID NO: 5633 - protein, 738 aa, Artificial Sequence
  Synthetic polypeptide
MHQLSLIRGNRGRSIHILERTASSSTEPSVSRQLLEPEPVPLSKEADSWEIIEGLKIGQTNVQKPDKHEGFMLKKRKWPLKGWHKRFFVLDNGMLKYSKAPLDIQKGKVHGSIDVGLSVMSIKKKARRIDLDTEEHIYHLKVKSQDWFDAWVSKLRHHRLYRQNEIVRSPRDASFHIFPSTSTAESSPAANVSVMDGKMQPNSFPWQSPLPCSNSLPATCTTGQSKVAAWLQDSEEMDRCAEDLAHCQSNLVELSKLLQNLEILQRTQSAPNFTDMQANCVDISKKDKRVTRRWRTKSVSKDTKIQLQEGPPAKGQFSTTRRRQRLAAAVATTVPFSATMSPVRLHSSNPNLCADIEFQTPPSHLTDPLESSTDYTKLQEEFCLIAQKVHSLLKSAFNSIAIEKEKLKQMVSEQDHSKGHSTQMARLRQSLSQALNQNAELRSRLNRIHSESIICDQVVSVNIIPSPDEAGEQIHVSLPLSQQVANESRLSMSESVSEFFDAQEVLLSASSSENEASDDESYISDVSDNISEDNTSVADNISRQILNGELTGGAFRNGRRACLPAPCPDTSNINLWNILRNNIGKDLSKVSMPVELNEPLNTLQHLCEEMEYSELLDKASETDDPYERMVLVAAFAVSGYCSTYFRAGSKPFNPVLGETYECIREDKGFRFFSEQVSHHPPISACHCESKNFVFWQDIRWKNKFWGKSMEILPVGTLNVMLPKPGTVAHACNSSTLGG

SEQ ID NO: 5634 - protein, 120 aa, Artificial Sequence
  Synthetic polypeptide
MNMANFLRGFEEKGIKNDRPEDQLSKEKKKILFSFCEVCNIQLNSAAQAQVHSNGKSHRKRVKQLSDGQPPPPAQASPSSNSSTGLPIFKKLRRKRKMSHDTMETNQQNPKCKTFYRTND

SEQ ID NO: 5635 - protein, 115 aa, Artificial Sequence
  Synthetic polypeptide
MSSDRQRSDDESPSTSSGSSDADQRDPAAPEPEEQEERKPSATQQKKNTKLSSKTTAKLSTSAKRIQKELAEITLDPPPNCSSSAIVSVSVFYVWPKRVLLLLLWPRETKRLDTP

SEQ ID NO: 5636 - protein, 370 aa, Artificial Sequence
  Synthetic polypeptide
MAWEARREPGPRRAAVRETVMLLLCLGVPTGRPYNVDTESALLYQGPHNTLFGYSVVLHSHGANRWLLVGAPTANWLANASVINPGAIYRCRIGKNPGQTCEQLQLGSPNGEPCGKTCLEERDNQWLGVTLSRQPGENGSIVTCGHRWKNIFYIKNENKLPTGGCYGVPPDLRTELSKRIAPCYQDYVKKFGENFASCQAGISSFYTKDLIVMGAPGSSYWTGSLFVYNITTNKYKAFLDKQNQVKFGSYLGYSVGAGHFRSQHTTEVVGGAPQHEQIGKAYIFSIDEKELNILHEMKGKKLGSYFGASVCAVDLNADGFSDLLVGAPMQSTIREEGRVFVYINSGSYRCLVERDCLSCLPWFHQGLEES

SEQ ID NO: 5637 - protein, 644 aa, Artificial Sequence
  Synthetic polypeptide
MAWEARREPGPRRAAVRETVMLLLCLGVPTGRPYNVDTESALLYQGPHNTLFGYSVVLHSHGANRWLLVGAPTANWLANASVINPGAIYRCRIGKNPGQTCEQLQLGSPNGEPCGKTCLEERDNQWLGVTLSRQPGENGSIVTCGHRWKNIFYIKNENKLPTGGCYGVPPDLRTELSKRIAPCYQDYVKKFGENFASCQAGISSFYTKDLIVMGAPGSSYWTGSLFVYNITTNKYKAFLDKQNQVKFGSYLGYSVGAGHFRSQHTTEVVGGAPQHEQIGKAYIFSIDEKELNILHEMKGKKLGSYFGASVCAVDLNADGFSDLLVGAPMQSTIREEGRVFVYINSGSGAVMNAMETNLVGSDKYAARFGESIVNLGDIDNDGFEDVAIGAPQEDDLQGAIYIYNGRADGISSTFSQRIEGLQISKSLSMFGQSISGQIDADNNGYVDVAVGAFRSDSAVLLRTRPVVIVDASLSHPESVNRTKFDCVENGWPSVCIDLTLCFSYKGKEVPGYIVLFYNMSLDVNRKAESPPRFYFSSNGTSDVITGSIQVSSREANCRTHQAFMRKDVRDILTPIQIEAAYHLGPHVISKRSTEEFPPLQPILQQKKEKDIMKKTINFARFCAHENCSADLQVSAKIGFLKCCL

SEQ ID NO: 5638 - protein, 143 aa, Artificial Sequence
  Synthetic polypeptide
MGVWLNKDDYIRDLKRIILCFLIVYMAILVGTDQDFYSLLGVSKTASSREIRQAFKKLALKLHPDKNPNNPNAHGDFLKINRAYEVLKDEDLRKKYDKYGEKGLEDNQGGQYESWNYYRYDFGIYDDDPEIITLERREFGLER

SEQ ID NO: 5639 - protein, 141 aa, Artificial Sequence
  Synthetic polypeptide
MGVWLNKDDYIRDLKRIILCFLIVYMAILVGTDQDFYSLLGVSKTASSREIRQAFKKLALKLHPDKNPNNPNAHGDFLKINRAYEVLKDEDLRKKYDKYGEKGLEDNQGGQYESWNYYRYDFGIYDDDPEIITLERREFER

SEQ ID NO: 5640 - protein, 198 aa, Artificial Sequence
  Synthetic polypeptide
MVCGSPGGMLLLRAGLLALAALCLLRVPGARAAACEPVRIPLCKSLPWNMTKMPNHLHHSTQANAILAIEQFEGLLGTHCSPDLLFFLCAMYAPICTIDFQHEPIKPCKSVCERARQGCEPILIKYRHSWPENLACEELPVYDRGVCISPEAIVTADGADFPMDSSNGNCRGASSVPIMCPTCLSQSLECSRCPIFAE

SEQ ID NO: 5641 - protein, 72 aa, Artificial Sequence
  Synthetic polypeptide
MMLGSPTSPKPGVNAQFLPGFLMGDLPAPVTPQPRSISGPSVGVMEMRSPLLAECSLWISSIGITWELIRTV

SEQ ID NO: 5642 - protein, 89 aa, Artificial Sequence
  Synthetic polypeptide
MAAFAVEPQGPALGSEPMMLGSPTSPKPGVNAQFLPGFLMGDLPAPVTPQPRSISGPSVGVMEMRSPLLAECSLWISSIGITWELIRTV

SEQ ID NO: 5643 - protein, 6705 aa, Artificial Sequence
  Synthetic polypeptide
MKFQLWSSQIRPLGPIFPALRALYALARAAPQEATALLGPLPLEAWNAGGGAEVVGLWPFLVRSGQRDNGVLEKESGAGEEGAEGAVPAMELYLGACSKPAKVAVTKTVASVLAADTQQCRDGVHKTHFAGVGPAQLLDLPLGVKLPVIPGSNAVFYTTNFGEKLFRPSYGFNLTDPYCRLLENQYKSLHDPHLKAYYKRKDILKRLKKGGYITSNNKVVCTLRELNKYRQYLTSLKLDFERNYIKEQRILAKQLHNIPENNQIPQHCDVAQVQNWLLKEGTESIKDQERLMRHRYLDMISRKLEQLERTAEEQRLFLMDREERRQREHTRRKLTLRRKIEEEWKTKEMLLLTRMAEDVKREERIEEQQHRNREESDRKKQDLLEKKMAYHLQKMQDTGFNGEDIGKNTFKYRGQDGTHASPKNKKKTSEDIMLVYPAGDQNTYKETHGHTANAAHQRQNSSNNFTKKNSASVVYQADVQDNGINQKRDGMVSKNSSIFDDRGGINISGQGSIISAQVSPTRNFSRVSQAFLDPSKEEKETNADWDGRPTKRSSYLCESGPQAHATDPGIFSSPVYTNMQQNLLQNCLQEKVTSEELNIIIQNVMTWVVATVTSILYPAITKYEKRLQNNTYPVSDDSILSSDSSSFCSTCSEDFTYRSYTSATTKTFQAEPCAFVVDTSVRRPTTPIKPPPAHVEKTVVGKTCHIKGQSIISKHKYNKTNLLYSYPKLRSCKSDSHLLASFETGTKKSKDATTETDSLGSSLHCDKTAKAMDEMKNLKNVFVNFKCYLKGETEVILESILREIMSDLTQAIPSLSSVTAEVFVEQCEREKEILLSNAHIPSVASEIVENMLEKLESAVEKKCVEMFSQDLSVDIKPSLAASDELLTSSNGKPLKNSMPHTLDPMCDIAEDMVHAILEKLMTLVSFKQNEFLHLKDTNKLSCQQHKTDPICMFLQRAGKNKSSLESDEASLIVNEEVQNLISNIFSQSSLVAYIEEAINAILGYIQTELNNERIIASEETVVLLQLLEDILFQLHQEPVNESFQKSRQPRISSPSDTKEKYRLTGTRLSNSPRSGRPFPPINVPGMVLYSDDENEEIDNIVKNVLDSTFKDEKVKSQEQIPNHWFTKGNTCFECKRNIKPPTKPGSRSKAAFHDWELKTEPPSTNHEDILKKKLSSNKDISTFSQDQKHQIEKASENIVTSILKEMLKDISSVPFGHLDSKTGSEASVLVSEKPQGLSHQEWIDQMFSVSEISTVAQEITDSVLNILHKASNYISNTTKSSISSSVHQISLHNSDTEHIVKEAPNKYPLKTWFDSEKKMKYLSLFDVDPEKPPWLKSGKSEPKPVDDINDKIIRTIFKRLKSFICPKLHMGFKSSLRSQLSKYTAKIVNIVLCAIQNELELHKENLNLREIDHTKSLTDKGFFANTDKKLESLVTSIDDDILASPLLTCIYDMLLSSENAHQRSISLSSRKPKSATDSVDVQSILPNRQDKKSFHKYLATPCTHHSVNGGNHIKENAKLQVLERIGETLHEMLSKLLGTHLHSQLSCSQQSREMTNKNQKMAAALQSNIQLISKAILDYILAKLCGVDMDTSFASCGLKAISESLDIDNPSFASIIEKMAKSTKIISSIVSRRVQEDNKEETKSKAKPVAPVSSKTPSTKEMHPNKLKAVASDILNMVFAKLEGFANGHLEILGAINDGNKKSNKIGWEYESTNISRDTHEASFLSALYMHAKKVSSAILKVIQTELNVTSSDLKTSVENPPPETQILKYVVKLILDAVSSDMFNEMESEGGGIETYRYRPTYGSLPGGAESDSFLEDDAYTAKKIIDERSPQREEVKTRSLKQWALEKTLNKIEVKLKEPHISPIAPIIRNILNEIFQSTLINQLNVLSLSHSNFNGMPHNVDEPTPQTSVQFMDKMMDPLLSEADITIVTDNIVRTVFHKLYSAAMTERNVRENRYKTITFSANVSSHEHTYKGKSSVTALDENPCTFQSRFSVADKETKVNLAEDIVQAILTNLETFATSKVKSLFYSQVNFTVPVALPIQQDHSTLSKALSAKDSYSDEQFSCCSVDHTKSGKTNLCQLSLSKLNTYALQVARRNLQGIKQELDKERENPFLTHDIGISESIASQIVNALLDIISRKGKCDKNSSDKEIDLDQQKGVIEKLLNETKYRKVLQLQIQDTIEGILCDIYEKTLFQNNLSFATPTLKCSIADKHSEENSEMFMEGANKIIPKLSVPKSDVILISNDIVNIVLHNLSSAATLVINAKNPTSARLPLTFCDTFPKIDCQQPLKGSKTERKTERFSYSRNQKSAYADDNQITVVEKEDTQKSATDSCEENANFITKTIFKRLESFATERIDSLITLAFQSKEKSFVIPELENCKQNDSIFYDSSQVESDVNVLKISATETILSQELTDFTFVGRREKLGSTIHLSQARLKTYADVIASAILKLIKNDLDLEIQKIYPYQNNILFQENIIVSEIVDSMLKMLDDKRSVKEICFNSKENSNFSQLALSNEILLGHKEKERSTKQSLFTKYPLEQNQMILENKRQIIVLEEIFMRNGESKNKEKGELLIAVEELLNKLYQRVREVTGHLPPLNETANFISNSKIKTSDTTQKNSFQSHINSVANDIVESVLGKMYLVVVTSLYENNKSRTEVEISDHNDSLLMKPLRFRETKQAGKISNSPRYAISQAYSYVDSQNISVMENTLLPYLPLQVKKDLIQMVLNKITNFVSLPLKVSPKDNPKPCFKAHLKTRSKITTLPKFTKKTHLGLSAAKAKSKTKLGPGEKTLKDSRSKTAIGLSHIMSAGDAKNLLDTKLPTSELKIYAKDIIINILETIVKEFGKVKQTKALPSDQIIAAGKIVNTVLQELYVTNNCNLAYPMKSSHLRLSQGNIGTGSLPKQQACFYLENVSSQLEHIFPREGIFKKLFDKWQTESNDKENEKCKLLMIAENVLTEISIKAKELEYSLSLLNLPPLENCESRFYNHFKGASTRAEDTKAQINMFGREIVEMLLEKLQLCFLSQIPTPDSEETLSNSKEHITAKSKYGFPNKHSLSSLPIYNTKTKDQISVGSSNQIVQEIVETVLNMLESFVDLQFKHISKYEFSEIVKMPIENLSSIQQKLLNKKMLPKLQPLKMFSDKSESNTINFKENIQNILLRVHSFHSQLLTYAVNIISDMLAVIKNKLDNEISQMEPSSISILKENIVASEIIGTLMDQCTYFNESLIQNLSRESLFQGAENAYTVNQVELATNMKMFTSKLKEGSLGINPSQVSKTGFVFCSDEDMKEKYRVSSDLPTSVRSSVEDTVKNSEPTKRPDSETMPSCSTRNKVQDHRPRESNFGSFDQTMKGNSYLPEGSFLQKLLRKASDSTEAALKQVLSFIEMGKGENLRVFHYENLKPVVEPNQIQTTISPLKICLAAENIVNTVLSSCGFPSQPHTNENREIMKPFFISKQSSLSEVSGGQKDNEKSLLRMQDKKINYIPEEENENLEASREDSSFLQKLKKKEYPKIETVKEVEAFTFADHEMGSNEVHLIARHVTTSVVTYLKNFETTVFSEEKMSVSTWSRKKYESKQFLRNIYDDSSIYQCCEHLTESVLYHLTSSISDGTKKGREKEKAWEIQEATFSKIISIHSQVFESRSISIGELALCISEIIIKILFNNKIIQADIAQKMVAIPTKYTYCPGIVSGGFDDLFQDLLVGVIHVLSKEIEVDYHFESNVRNKSFSMHRNNSVPLCNKINRQASPRDWQFSTQQIGQLFQKNKLSYLACKLNSLVGNLKTSESKEVVNKVFNIVSDLFSPDECLDTGMDSGKIQRTYFYSSNNEQPNSILTNNLQLSSKSVFLLNVVCEKLIRILLEECTSTAFPDKGSVSEETSAEECQLLKMLQSVEDGKSDYRKGGMDCECLQVDYMSDLLENVAEIDQDLLTSDSMLTIISHSLVKSLMDKLSHSIQQAPESLPFANKHLNYRTREIQSSFIKARKSELIELGQSKSSLELRSYDSNSLTVSLNNPSVVSSKIQAPFNKHCAVKSSSVSPFERQRTKEMDKVAIHNKLHQEGIYAGVYSATFLEGIISELFFNLSMSLWGKNKNITVSWLNEMNTLFVNNVVNEFNNAQVTVLRNAEERLCFPPVHTETVSKIVDSVYYDVLQQYELKVACGNNPVYDNASIAEQITNGILLEILDYKLPSCFKEHLIPHSYYPLKPEIILQKLQSNLTEFTSLPRSSSDYSTMLSHSFLEDVIRRLLSQLIPPPITCSSLGKKYLMSSDFNEMSTCIINKVMSAISKHKIWFTIYDNQYLYTGKNLQKMVDSVYCNILQMSDSLVSIQKSIVSRSPIMIDQIASFIIQEIIENHLQPFLSGEVLCHPRTPLDPVSTIVTQVLSEVIESHRPQKQSPLDIHLDSFVREIVARLLSKIFSPKHNTEIELKNMTQRIVNSINRHFNKAKIHILYDDKEQAFFSFNTDIVDELATSVYRNALKQHGLDLAVDKESEDSGIFVENITNLIVAAISDYLLHPLFSGDFSASTYSNSVAENIVQDILSNISKSTEPSQSVPLYNTLLPYTFLEDMIRVLLSKLFSSASSLVLNRDTQKDISRVNFNDIASNLVSDIRMKVSQHEIRFSKEEEETKFIYSEDDIQHLVDSVFANVVQTSGSQESAVQNITSSNDILIDRIAGFIIKHICQKHLQPFVSGKSLSSSDTYFDDERRQLFYTSVYSSTFLEDVISGVLRKIFHRVVGIVQTKSIRDSEDELFEKAEELIHLITGEFSKAQVSIIDNTEERLCLPPVERDVVKTIVDMVYSKVLQEYEMEVVPNKDFLNDTKTLAARITNIILAEIFDFQIHPDLIANLPFKSHSKLSANVLIQRVQYDISKSRFQRQASTMYTTMLSHSHLEKIVTQLTSQISPLNTSAEQSDTTKSDLSNTVIKLINEIMSIISKHEICIIKYGNKKQSMISAKDIQSMVDSIYADLSHSNIYQSITKDKKSISDIPVSKIASFIIKEIFNHHIQSFLSEDKTLLLAAVDQTYKLKAIDPKQRELSFIVNSSVFLEEVISELLCKILYAFSHNMLVTENPDRVKLKLTRIVTTLVNSIVLEFTTSEILVADNFDKNLCFSERYKEMVQKIVNSVYGKVLDQYKSLIQIHRVIQSDTICFGRKIYYLLLEEIYDYQVQSLVSGELESSSYSYPQADNIIRNVLNIITKDSHALPPYITVLPHSLLEDMVYRLLGHVFPSTHTENELKEKKFPPDDEFVEAASKLTDEIIKEISEHEIRLSMAEDNAESMQLEPIENLVDSICNNILKTSEFQAEVQKDADKKGCSFLSKLAGFIMKEIMYHHLQPFLHGEESSFSDLSDYDHVSELAKSGKEKTQPSLYSATFLEDIIIDLVHKFCSLLIITEDSKKNEMAELDIMGLALKLANSLIREFKKSDIKVLPNAEKMFSFPPIDKETVDKISNFVYEQFIEKCTSHDIQKGDESNIAIGMIAALTQKAISAFRIQPLFSGDWSSTFFSFLNPDNITQRVQHLPQNTFTQISRCAKENQLSLPDQSYKDTSSTPDCKNMMSTLEINRGTMNRKKSFKTKDTSVKKGDIQNPVLSSINAIMKSGMINLTSGLATGVTNKKEVDENKVGICTQKHSENVSKVTSTTTVKSKDTQEPNLSETFNNNEIEKKRNLIPTDKKGKDDEIYTHFSLIIDDTEYEKEVLGSDSEIGYKKKIDNARESSFKKDDKLFQLSSLKSKRNLGTTTDTLEIRIRTSSNEGRRDSPTQTCRDEEHHSDYEHVQNVIENIFEDVLELSSSPEPAYYSKLSYDQSPPGDNVLNVIQEISRDSAQSVTTKKVSSSTNKNISAKEKEEEEREKEKVREEIKSEPSKPDDPQNQRESKPGIFPAKFLEDVITEMVKQLIFSSIPETQIQDRCQNVSDKQNQAKLYDTAMKLINSLLKEFSDAQIKVFRPDKGNQFPGGKVSSVPKVPPRYKEPTTDEAPSSIKIKSADKMPPMHKMMRKPSSDKIPSIDKTLVNKVVHSSVCNILNDYGSQDSIWKNINSNGENLARRLTSAVINEIFQRQVNLIFCDEVSVSACLPLESKDVVKKVQKLAQTASKECQTSSPYTIILPHKFLENVISALFSKIFSTISSTKTKEPEDNLSTELNFLQMKLVSAVATEISQDKYMTIQYVETLQSDDDEIIQLVVQSVYNNLLPQFGSQEIIQNCVTSGCKILSENIVDLVLREVASNQLQSYFCGELTPHQCVEVENIVEKILKDVFQTTDVPLPKPSHADKLSYNIIEEIAVKFLSKLLSIFPKVHKERTKSLETDMQKITSKVLNSVQEFISKSKIKLVPPTKESPTVPVADNATIENIVNSIYTSVLKHSGSYTSVFKDLMGKSNVLSDTIGFLMVNAISNSEFQPQVEEEVSNSELVLEAVKIMEKVIKIIDELKSKEKSSSRKGLTLDAKLLEEVLALFLAKLIRLPSSSSKDEKNLSKTELNKIASQLSKLVTAEISRSSISLIASDPEEHCLNPENTERIYQVVDSVYSNILQQSGTNKEFYYDIKDTNTAFPKKVASLIIDGVSSFPLDTINSTISNADLSGELDVNRIVQKAQEHAFNVIPELEQEKLDQNLSEEESPIKIVPHVGKKPVKIDPKIISEHLAVISIKTQPLEKLKQECLKRTGHSIAELRRASISGRNYSLGSPDLEKRKTERRTSLDKTGRLDVKPLEQWKNVLT

SEQ ID NO: 5644 - protein, 6616 aa, Artificial Sequence
  Synthetic polypeptide
MELYLGACSKPAKVAVTKTVASVLAADTQQCRDGVHKTHFAGVGPAQLLDLPLGVKLPVIPGSNAVFYTTNFGEKLFRPSYGFNLTDPYCRLLENQYKSLHDPHLKAYYKRKDILKRLKKGGYITSNNKVVCTLRELNKYRQYLTSLKLDFERNYIKEQRILAKQLHNIPENNQIPQHCDVAQVQNWLLKEGTESIKDQERLMRHRYLDMISRKLEQLERTAEEQRLFLMDREERRQREHTRRKLTLRRKIEEEWKTKEMLLLTRMAEDVKREERIEEQQHRNREESDRKKQDLLEKKMAYHLQKMQDTGFNGEDIGKNTFKYRGQDGTHASPKNKKKTSEDIMLVYPAGDQNTYKETHGHTANAAHQRQNSSNNFTKKNSASVVYQADVQDNGINQKRDGMVSKNSSIFDDRGGINISGQGSIISAQVSPTRNFSRVSQAFLDPSKEEKETNADWDGRPTKRSSYLCESGPQAHATDPGIFSSPVYTNMQQNLLQNCLQEKVTSEELNIIIQNVMTWVVATVTSILYPAITKYEKRLQNNTYPVSDDSILSSDSSSFCSTCSEDFTYRSYTSATTKTFQAEPCAFVVDTSVRRPTTPIKPPPAHVEKTVVGKTCHIKGQSIISKHKYNKTNLLYSYPKLRSCKSDSHLLASFETGTKKSKDATTETDSLGSSLHCDKTAKAMDEMKNLKNVFVNFKCYLKGETEVILESILREIMSDLTQAIPSLSSVTAEVFVEQCEREKEILLSNAHIPSVASEIVENMLEKLESAVEKKCVEMFSQDLSVDIKPSLAASDELLTSSNGKPLKNSMPHTLDPMCDIAEDMVHAILEKLMTLVSFKQNEFLHLKDTNKLSCQQHKTDPICMFLQRAGKNKSSLESDEASLIVNEEVQNLISNIFSQSSLVAYIEEAINAILGYIQTELNNERIIASEETVVLLQLLEDILFQLHQEPVNESFQKSRQPRISSPSDTKEKYRLTGTRLSNSPRSGRPFPPINVPGMVLYSDDENEEIDNIVKNVLDSTFKDEKVKSQEQIPNHWFTKGNTCFECKRNIKPPTKPGSRSKAAFHDWELKTEPPSTNHEDILKKKLSSNKDISTFSQDQKHQIEKASENIVTSILKEMLKDISSVPFGHLDSKTGSEASVLVSEKPQGLSHQEWIDQMFSVSEISTVAQEITDSVLNILHKASNYISNTTKSSISSSVHQISLHNSDTEHIVKEAPNKYPLKTWFDSEKKMKYLSLFDVDPEKPPWLKSGKSEPKPVDDINDKIIRTIFKRLKSFICPKLHMGFKSSLRSQLSKYTAKIVNIVLCAIQNELELHKENLNLREIDHTKSLTDKGFFANTDKKLESLVTSIDDDILASPLLTCIYDMLLSSENAHQRSISLSSRKPKSATDSVDVQSILPNRQDKKSFHKYLATPCTHHSVNGGNHIKENAKLQVLERIGETLHEMLSKLLGTHLHSQLSCSQQSREMTNKNQKMAAALQSNIQLISKAILDYILAKLCGVDMDTSFASCGLKAISESLDIDNPSFASIIEKMAKSTKIISSIVSRRVQEDNKEETKSKAKPVAPVSSKTPSTKEMHPNKLKAVASDILNMVFAKLEGFANGHLEILGAINDGNKKSNKIGWEYESTNISRDTHEASFLSALYMHAKKVSSAILKVIQTELNVTSSDLKTSVENPPPETQILKYVVKLILDAVSSDMFNEMESEGGGIETYRYRPTYGSLPGGAESDSFLEDDAYTAKKIIDERSPQREEVKTRSLKQWALEKTLNKIEVKLKEPHISPIAPIIRNILNEIFQSTLINQLNVLSLSHSNFNGMPHNVDEPTPQTSVQFMDKMMDPLLSEADITIVTDNIVRTVFHKLYSAAMTERNVRENRYKTITFSANVSSHEHTYKGKSSVTALDENPCTFQSRFSVADKETKVNLAEDIVQAILTNLETFATSKVKSLFYSQVNFTVPVALPIQQDHSTLSKALSAKDSYSDEQFSCCSVDHTKSGKTNLCQLSLSKLNTYALQVARRNLQGIKQELDKERENPFLTHDIGISESIASQIVNALLDIISRKGKCDKNSSDKEIDLDQQKGVIEKLLNETKYRKVLQLQIQDTIEGILCDIYEKTLFQNNLSFATPTLKCSIADKHSEENSEMFMEGANKIIPKLSVPKSDVILISNDIVNIVLHNLSSAATLVINAKNPTSARLPLTFCDTFPKIDCQQPLKGSKTERKTERFSYSRNQKSAYADDNQITVVEKEDTQKSATDSCEENANFITKTIFKRLESFATERIDSLITLAFQSKEKSFVIPELENCKQNDSIFYDSSQVESDVNVLKISATETILSQELTDFTFVGRREKLGSTIHLSQARLKTYADVIASAILKLIKNDLDLEIQKIYPYQNNILFQENIIVSEIVDSMLKMLDDKRSVKEICFNSKENSNFSQLALSNEILLGHKEKERSTKQSLFTKYPLEQNQMILENKRQIIVLEEIFMRNGESKNKEKGELLIAVEELLNKLYQRVREVTGHLPPLNETANFISNSKIKTSDTTQKNSFQSHINSVANDIVESVLGKMYLVVVTSLYENNKSRTEVEISDHNDSLLMKPLRFRETKQAGKISNSPRYAISQAYSYVDSQNISVMENTLLPYLPLQVKKDLIQMVLNKITNFVSLPLKVSPKDNPKPCFKAHLKTRSKITTLPKFTKKTHLGLSAAKAKSKTKLGPGEKTLKDSRSKTAIGLSHIMSAGDAKNLLDTKLPTSELKIYAKDIIINILETIVKEFGKVKQTKALPSDQIIAAGKIVNTVLQELYVTNNCNLAYPMKSSHLRLSQGNIGTGSLPKQQACFYLENVSSQLEHIFPREGIFKKLFDKWQTESNDKENEKCKLLMIAENVLTEISIKAKELEYSLSLLNLPPLENCESRFYNHFKGASTRAEDTKAQINMFGREIVEMLLEKLQLCFLSQIPTPDSEETLSNSKEHITAKSKYGFPNKHSLSSLPIYNTKTKDQISVGSSNQIVQEIVETVLNMLESFVDLQFKHISKYEFSEIVKMPIENLSSIQQKLLNKKMLPKLQPLKMFSDKSESNTINFKENIQNILLRVHSFHSQLLTYAVNIISDMLAVIKNKLDNEISQMEPSSISILKENIVASEIIGTLMDQCTYFNESLIQNLSRESLFQGAENAYTVNQVELATNMKMFTSKLKEGSLGINPSQVSKTGFVFCSDEDMKEKYRVSSDLPTSVRSSVEDTVKNSEPTKRPDSETMPSCSTRNKVQDHRPRESNFGSFDQTMKGNSYLPEGSFLQKLLRKASDSTEAALKQVLSFIEMGKGENLRVFHYENLKPVVEPNQIQTTISPLKICLAAENIVNTVLSSCGFPSQPHTNENREIMKPFFISKQSSLSEVSGGQKDNEKSLLRMQDKKINYIPEEENENLEASREDSSFLQKLKKKEYPKIETVKEVEAFTFADHEMGSNEVHLIARHVTTSVVTYLKNFETTVFSEEKMSVSTWSRKKYESKQFLRNIYDDSSIYQCCEHLTESVLYHLTSSISDGTKKGREKEKAWEIQEATFSKIISIHSQVFESRSISIGELALCISEIIIKILFNNKIIQADIAQKMVAIPTKYTYCPGIVSGGFDDLFQDLLVGVIHVLSKEIEVDYHFESNVRNKSFSMHRNNSVPLCNKINRQASPRDWQFSTQQIGQLFQKNKLSYLACKLNSLVGNLKTSESKEVVNKVFNIVSDLFSPDECLDTGMDSGKIQRTYFYSSNNEQPNSILTNNLQLSSKSVFLLNVVCEKLIRILLEECTSTAFPDKGSVSEETSAEECQLLKMLQSVEDGKSDYRKGGMDCECLQVDYMSDLLENVAEIDQDLLTSDSMLTIISHSLVKSLMDKLSHSIQQAPESLPFANKHLNYRTREIQSSFIKARKSELIELGQSKSSLELRSYDSNSLTVSLNNPSVVSSKIQAPFNKHCAVKSSSVSPFERQRTKEMDKVAIHNKLHQEGIYAGVYSATFLEGIISELFFNLSMSLWGKNKNITVSWLNEMNTLFVNNVVNEFNNAQVTVLRNAEERLCFPPVHTETVSKIVDSVYYDVLQQYELKVACGNNPVYDNASIAEQITNGILLEILDYKLPSCFKEHLIPHSYYPLKPEIILQKLQSNLTEFTSLPRSSSDYSTMLSHSFLEDVIRRLLSQLIPPPITCSSLGKKYLMSSDFNEMSTCIINKVMSAISKHKIWFTIYDNQYLYTGKNLQKMVDSVYCNILQMSDSLVSIQKSIVSRSPIMIDQIASFIIQEIIENHLQPFLSGEVLCHPRTPLDPVSTIVTQVLSEVIESHRPQKQSPLDIHLDSFVREIVARLLSKIFSPKHNTEIELKNMTQRIVNSINRHFNKAKIHILYDDKEQAFFSFNTDIVDELATSVYRNALKQHGLDLAVDKESEDSGIFVENITNLIVAAISDYLLHPLFSGDFSASTYSNSVAENIVQDILSNISKSTEPSQSVPLYNTLLPYTFLEDMIRVLLSKLFSSASSLVLNRDTQKDISRVNFNDIASNLVSDIRMKVSQHEIRFSKEEEETKFIYSEDDIQHLVDSVFANVVQTSGSQESAVQNITSSNDILIDRIAGFIIKHICQKHLQPFVSGKSLSSSDTYFDDERRQLFYTSVYSSTFLEDVISGVLRKIFHRVVGIVQTKSIRDSEDELFEKAEELIHLITGEFSKAQVSIIDNTEERLCLPPVERDVVKTIVDMVYSKVLQEYEMEVVPNKDFLNDTKTLAARITNIILAEIFDFQIHPDLIANLPFKSHSKLSANVLIQRVQYDISKSRFQRQASTMYTTMLSHSHLEKIVTQLTSQISPLNTSAEQSDTTKSDLSNTVIKLINEIMSIISKHEICIIKYGNKKQSMISAKDIQSMVDSIYADLSHSNIYQSITKDKKSISDIPVSKIASFIIKEIFNHHIQSFLSEDKTLLLAAVDQTYKLKAIDPKQRELSFIVNSSVFLEEVISELLCKILYAFSHNMLVTENPDRVKLKLTRIVTTLVNSIVLEFTTSEILVADNFDKNLCFSERYKEMVQKIVNSVYGKVLDQYKSLIQIHRVIQSDTICFGRKIYYLLLEEIYDYQVQSLVSGELESSSYSYPQADNIIRNVLNIITKDSHALPPYITVLPHSLLEDMVYRLLGHVFPSTHTENELKEKKFPPDDEFVEAASKLTDEIIKEISEHEIRLSMAEDNAESMQLEPIENLVDSICNNILKTSEFQAEVQKDADKKGCSFLSKLAGFIMKEIMYHHLQPFLHGEESSFSDLSDYDHVSELAKSGKEKTQPSLYSATFLEDIIIDLVHKFCSLLIITEDSKKNEMAELDIMGLALKLANSLIREFKKSDIKVLPNAEKMFSFPPIDKETVDKISNFVYEQFIEKCTSHDIQKGDESNIAIGMIAALTQKAISAFRIQPLFSGDWSSTFFSFLNPDNITQRVQHLPQNTFTQISRCAKENQLSLPDQSYKDTSSTPDCKNMMSTLEINRGTMNRKKSFKTKDTSVKKGDIQNPVLSSINAIMKSGMINLTSGLATGVTNKKEVDENKVGICTQKHSENVSKVTSTTTVKSKDTQEPNLSETFNNNEIEKKRNLIPTDKKGKDDEIYTHFSLIIDDTEYEKEVLGSDSEIGYKKKIDNARESSFKKDDKLFQLSSLKSKRNLGTTTDTLEIRIRTSSNEGRRDSPTQTCRDEEHHSDYEHVQNVIENIFEDVLELSSSPEPAYYSKLSYDQSPPGDNVLNVIQEISRDSAQSVTTKKVSSSTNKNISAKEKEEEEREKEKVREEIKSEPSKPDDPQNQRESKPGIFPAKFLEDVITEMVKQLIFSSIPETQIQDRCQNVSDKQNQAKLYDTAMKLINSLLKEFSDAQIKVFRPDKGNQFPGGKVSSVPKVPPRYKEPTTDEAPSSIKIKSADKMPPMHKMMRKPSSDKIPSIDKTLVNKVVHSSVCNILNDYGSQDSIWKNINSNGENLARRLTSAVINEIFQRQVNLIFCDEVSVSACLPLESKDVVKKVQKLAQTASKECQTSSPYTIILPHKFLENVISALFSKIFSTISSTKTKEPEDNLSTELNFLQMKLVSAVATEISQDKYMTIQYVETLQSDDDEIIQLVVQSVYNNLLPQFGSQEIIQNCVTSGCKILSENIVDLVLREVASNQLQSYFCGELTPHQCVEVENIVEKILKDVFQTTDVPLPKPSHADKLSYNIIEEIAVKFLSKLLSIFPKVHKERTKSLETDMQKITSKVLNSVQEFISKSKIKLVPPTKESPTVPVADNATIENIVNSIYTSVLKHSGSYTSVFKDLMGKSNVLSDTIGFLMVNAISNSEFQPQVEEEVSNSELVLEAVKIMEKVIKIIDELKSKEKSSSRKGLTLDAKLLEEVLALFLAKLIRLPSSSSKDEKNLSKTELNKIASQLSKLVTAEISRSSISLIASDPEEHCLNPENTERIYQVVDSVYSNILQQSGTNKEFYYDIKDTNTAFPKKVASLIIDGVSSFPLDTINSTISNADLSGELDVNRIVQKAQEHAFNVIPELEQEKLDQNLSEEESPIKIVPHVGKKPVKIDPKIISEHLAVISIKTQPLEKLKQECLKRTGHSIAELRRASISGRNYSLGSPDLEKRKTERRTSLDKTGRLDVKPLEQWKNVLT

SEQ ID NO: 5645 - protein, 436 aa, Artificial Sequence
  Synthetic polypeptide
MAFPPRRRLRLGPRGLPLLLSGLLLPLCRAFNLDVDSPAEYSGPEGSYFGFAVDFFVPSASSRMFLLVGAPKANTTQPGIVEGGQVLKCDWSSTRRCQPIEFDATGNRDYAKDDPLEFKSHQWFGASVRSKQDKILACAPLYHWRTEMKQEREPVGTCFLQDGTKTVEYAPCRSQDIDADGQGFCQGGFSIDFTKADRVLLGGPGSFYWQGQLISDQVAEIVSKYDPNVYSIKYNNQLATRTAQAIFDDSYLGYSVAVGDFNGDGIDDFVSGVPRAARTLGMVYIYDGKNMSSLYNFTGEQMAAYFGFSVAATDINGDDYADVFIGAPLFMDRGSDGKLQEVGQVSVSLQRASGDFQTTKLNGFEVFARFGSAIAPLGDLDQDGFNGIIKRDIENKTIKLCSKILYSPKVIMCSFLSVLFQKKQRKKKKSRKEHLK

SEQ ID NO: 5646 - protein, 400 aa, Artificial Sequence
  Synthetic polypeptide
MAFPPRRRLRLGPRGLPLLLSGLLLPLCRAFNLDVDSPAEYSGPEGSYFGFAVDFFVPSASSRMFLLVGAPKANTTQPGIVEGGQVLKCDWSSTRRCQPIEFDATGNRDYAKDDPLEFKSHQWFGASVRSKQDKILACAPLYHWRTEMKQEREPVGTCFLQDGTKTVEYAPCRSRQLISDQVAEIVSKYDPNVYSIKYNNQLATRTAQAIFDDSYLGYSVAVGDFNGDGIDDFVSGVPRAARTLGMVYIYDGKNMSSLYNFTGEQMAAYFGFSVAATDINGDDYADVFIGAPLFMDRGSDGKLQEVGQVSVSLQRASGDFQTTKLNGFEVFARFGSAIAPLGDLDQDGFNGIIKRDIENKTIKLCSKILYSPKVIMCSFLSVLFQKKQRKKKKSRKEHLK

SEQ ID NO: 5647 - protein, 390 aa, Artificial Sequence
  Synthetic polypeptide
MLLGTLLLILYILMLCRMFLLVGAPKANTTQPGIVEGGQVLKCDWSSTRRCQPIEFDATGNRDYAKDDPLEFKSHQWFGASVRSKQDKILACAPLYHWRTEMKQEREPVGTCFLQDGTKTVEYAPCRSQDIDADGQGFCQGGFSIDFTKADRVLLGGPGSFYWQGQLISDQVAEIVSKYDPNVYSIKYNNQLATRTAQAIFDDSYLGYSVAVGDFNGDGIDDFVSGVPRAARTLGMVYIYDGKNMSSLYNFTGEQMAAYFGFSVAATDINGDDYADVFIGAPLFMDRGSDGKLQEVGQVSVSLQRASGDFQTTKLNGFEVFARFGSAIAPLGDLDQDGFNGIIKRDIENKTIKLCSKILYSPKVIMCSFLSVLFQKKQRKKKKSRKEHLK

SEQ ID NO: 5648 - protein, 63 aa, Artificial Sequence
  Synthetic polypeptide
MNRAFSRKKDKTWMHTPEALSKHFIPYNAKTCLAPPFAFCHDCKYPEAFPSRGTVSGLNLFSL

SEQ ID NO: 5649 - protein, 141 aa, Artificial Sequence
  Synthetic polypeptide
MNRAFSRKKDKTWMHTPEALSKHFIPYNAKFLGSTEVEQPKGTEVVRDAVRKLKFARHIKKSEGQKIPKVELQISIYGVKILEPKTKEVQHNCQLHRISFCADDKTDKRIFTFICKDSESNKHLCYVFDSEKCARRGGSRL

SEQ ID NO: 5650 - protein, 59 aa, Artificial Sequence
  Synthetic polypeptide
MKQLPAATVRLLSSSQIITSVVSVVKELIENSLDAGATSVDVKLHFGKLRQEDRLEPGV

SEQ ID NO: 5651 - protein, 149 aa, Artificial Sequence
  Synthetic polypeptide
MKQLPAATVRLLSSSQIITSVVSVVKELIENSLDAGATSVDVKLENYGFDKIEVRDNGEGIKAVDAPVMAMKYYTSKINSHEDLENLTTYGFRGEALGSICCIAEVLITTRTAADNFSTQYVLDGSGHILSQKPSHLGQEIHKSVALFT

SEQ ID NO: 5652 - protein, 88 aa, Artificial Sequence
  Synthetic polypeptide
MKQLPAATVRLLSSSQIITSVVSVVKELIENSLDAGATSVDVKLVLITTRTAADNFSTQYVLDGSGHILSQKPSHLGQEIHKSVALFT

SEQ ID NO: 5653 - protein, 153 aa, Artificial Sequence
  Synthetic polypeptide
MKQLPAATVRLLSSSQIITSVVSVVKELIENSLDAGATSVDVKLENYGFDKIEVRDNGEGIKAVDAPVMAMKYYTSKINSHEDLENLTTYGFRGEALGSICCIAEVLITTRTAADNFSTQYVLDGSGHILSQKPSHLGQGNIWQYLEIFDCHN

SEQ ID NO: 5654 - protein, 92 aa, Artificial Sequence
  Synthetic polypeptide
MKQLPAATVRLLSSSQIITSVVSVVKELIENSLDAGATSVDVKLVLITTRTAADNFSTQYVLDGSGHILSQKPSHLGQGNIWQYLEIFDCHN

SEQ ID NO: 5655 - protein, 806 aa, Artificial Sequence
  Synthetic polypeptide
MKQLPAATVRLLSSSQIITSVVSVVKELIENSLDAGATSVDVKLENYGFDKIEVRDNGEGIKAVDAPVMAMKYYTSKINSHEDLENLTTYGFRGEALGSICCIAEVLITTRTAADNFSTQYVLDGSGHILSQKPSHLGQGTTVTALRLFKNLPVRKQFYSTAKKCKDEIKKIQDLLMSFGILKPDLRIVFVHNKAVIWQKSRVSDHKMALMSVLGTAVMNNMESFQYHSEESQIYLSGFLPKCDADHSFTSLSTPERSFIFINSRPVHQKDILKLIRHHYNLKCLKESTRLYPVFFLKIDVPTADVDVNLTPDKSQVLLQNKESVLIALENLMTTCYGPLPSTNSYENNKTDVSAADIVLSKTAETDVLFNKVESSGKNYSNVDTSVIPFQNDMHNDESGKNTDDCLNHQISIGDFGYGHCSSEISNIDKNTKNAFQDISMSNVSWENSQTEYSKTCFISSVKHTQSENGNKDHIDESGENEEEAGLENSSEISADEWSRGNILKNSVGENIEPVKILVPEKSLPCKVSNNNYPIPEQMNLNEDSCNKKSNVIDNKSGKVTAYDLLSNRVIKKPMSASALFVQDHRPQFLIENPKTSLEDATLQIEELWKTLSEEEKLKYEEKATKDLERYNSQMKRAIEQESQMSLKDGRKKIKPTSAWNLAQKHKLKTSLSNQPKLDELLQSQIEKRRSQNIKMVQIPFSMKNLKINFKKQNKVDLEEKDEPCLIHNLRFPDAWLMTSKTEVMLLNPYRVEEALLFKRLLENHKLPAEPLEKPIMLTERPGAVAHACNPSTLGGQGGWITRSGV

SEQ ID NO: 5656 - protein, 630 aa, Artificial Sequence
  Synthetic polypeptide
MSFGILKPDLRIVFVHNKAVIWQKSRVSDHKMALMSVLGTAVMNNMESFQYHSEESQIYLSGFLPKCDADHSFTSLSTPERSFIFINSRPVHQKDILKLIRHHYNLKCLKESTRLYPVFFLKIDVPTADVDVNLTPDKSQVLLQNKESVLIALENLMTTCYGPLPSTNSYENNKTDVSAADIVLSKTAETDVLFNKVESSGKNYSNVDTSVIPFQNDMHNDESGKNTDDCLNHQISIGDFGYGHCSSEISNIDKNTKNAFQDISMSNVSWENSQTEYSKTCFISSVKHTQSENGNKDHIDESGENEEEAGLENSSEISADEWSRGNILKNSVGENIEPVKILVPEKSLPCKVSNNNYPIPEQMNLNEDSCNKKSNVIDNKSGKVTAYDLLSNRVIKKPMSASALFVQDHRPQFLIENPKTSLEDATLQIEELWKTLSEEEKLKYEEKATKDLERYNSQMKRAIEQESQMSLKDGRKKIKPTSAWNLAQKHKLKTSLSNQPKLDELLQSQIEKRRSQNIKMVQIPFSMKNLKINFKKQNKVDLEEKDEPCLIHNLRFPDAWLMTSKTEVMLLNPYRVEEALLFKRLLENHKLPAEPLEKPIMLTERPGAVAHACNPSTLGGQGGWITRSGV

SEQ ID NO: 5657 - protein, 767 aa, Artificial Sequence
  Synthetic polypeptide
MKQLPAATVRLLSSSQIITSVVSVVKELIENSLDAGATSVDVKLENYGFDKIEVRDNGEGIKAVDAPVMAMKYYTSKINSHEDLENLTTYGFRGEALGSICCIAEVLITTRTAADNFSTQYVLDGSGHILSQKPSHLGQGTTVTALRLFKNLPVRKQFYSTAKKCKDEIKKIQDLLMSFGILKPDLRIVFVHNKIYLSGFLPKCDADHSFTSLSTPERSFIFINSRPVHQKDILKLIRHHYNLKCLKESTRLYPVFFLKIDVPTADVDVNLTPDKSQVLLQNKESVLIALENLMTTCYGPLPSTNSYENNKTDVSAADIVLSKTAETDVLFNKVESSGKNYSNVDTSVIPFQNDMHNDESGKNTDDCLNHQISIGDFGYGHCSSEISNIDKNTKNAFQDISMSNVSWENSQTEYSKTCFISSVKHTQSENGNKDHIDESGENEEEAGLENSSEISADEWSRGNILKNSVGENIEPVKILVPEKSLPCKVSNNNYPIPEQMNLNEDSCNKKSNVIDNKSGKVTAYDLLSNRVIKKPMSASALFVQDHRPQFLIENPKTSLEDATLQIEELWKTLSEEEKLKYEEKATKDLERYNSQMKRAIEQESQMSLKDGRKKIKPTSAWNLAQKHKLKTSLSNQPKLDELLQSQIEKRRSQNIKMVQIPFSMKNLKINFKKQNKVDLEEKDEPCLIHNLRFPDAWLMTSKTEVMLLNPYRVEEALLFKRLLENHKLPAEPLEKPIMLTERPGAVAHACNPSTLGGQGGWITRSGV

SEQ ID NO: 5658 - protein, 194 aa, Artificial Sequence
  Synthetic polypeptide
MILNSLRYEEKATKDLERYNSQMKRAIEQESQMSLKDGRKKIKPTSAWNLAQKHKLKTSLSNQPKLDELLQSQIEKRRSQNIKMVQIPFSMKNLKINFKKQNKVDLEEKDEPCLIHNLRFPDAWLMTSKTEVMLLNPYRVEEALLFKRLLENHKLPAEPLEKPIMLTERPGAVAHACNPSTLGGQGGWITRSGV

SEQ ID NO: 5659 - protein, 614 aa, Artificial Sequence
  Synthetic polypeptide
MSGFSPELIDYLEGKISFEEFERRREERKTREKKSLQEKGKLSAEENPDDSEVPSSSGINSTKSQDKDVNEGETSDGVRKSVHKVFASMLGENEDDEEEEEEEEEEEEEEETPEQPTAGDVFVLEMVLNRETKKMMKEKRPRSKLPRALRGLMGEANIRFARGEREEAILMCMEIIRQAPLAYEPFSTLAMIYEDQGDMEKSLQFELIAAHLNPSDTEEWVRLAEMSLEQDNIKQAIFCYTKALKYEPTNVRYLWERSSLYEQMGDHKMAMDGYRRILNLLSPSDGERFMQLARDMAKSYYEANDVTSAINIIDEAFSKHQGLVSMEDVNIAAELYISNKQYDKALEIITDFSGIVLEKKTSEEGTSEENKAPENVTCTIPDGVPIDITVKLMVCLVHLNILEPLNPLLTTLVEQNPEDMGDLYLDVAEAFLDVGEYNSALPLLSALVCSERYNLAVVWLRHAECLKALGYMERAAESYGKVVDLAPLHLDARISLSTLQQQLGQPEKALEALEPMYDPDTLAQDANAAQQELKLLLHRSTLLFSQGKMYGYVDTLLTMLAMLLKVAMNRAQVCLISSSKSGERHLYLIKVSRDKISDSNDQESANCDAKDGTV

SEQ ID NO: 5660 - protein, 137 aa, Artificial Sequence
  Synthetic polypeptide
SYGKVVDLAPLHLDARISLSTLQQQLGQPEKALEALEPMYDPDTLAQDANAAQQELKLLLHRSTLLFSQGKMYGYVDTLLTMLAMLLKVAMNRAQVCLISSSKSGERHLYLIKVSRDKISDSNDQESANCDAKDGTV

SEQ ID NO: 5661 - protein, 366 aa, Artificial Sequence
  Synthetic polypeptide
KKGYTPLHAAASNGQINVVKHLLNLGVEIDEINVYGNTALHIACYNGQDAVVNELIDYGANVNQPNNNGFTPLHFAAASTHGALCLELLVNNGADVNIQSKDGKSPLHMTAVHGRFTRSQTLIQNGGEIDCVDKDGNTPLHVAARYGHELLINTLITSGADTAKCGIHSMFPLHLAALNAHSDCCRKLLSSGQKYSIVSLFSNEHVLSAGFEIDTPDKFGRTCLHAAAAGGNVECIKLLQSSGADFHKKDKCGRTPLHYAAANCHFHCIETLVTTGANVNETDDWGRTALHYAAASDMDRNKTILGNAHDNSEELERARELKEKEATLCLEFLLQNDANPSIRDKEGYNSIHYAAAYGHRQCLELS

SEQ ID NO: 5662 - protein, 543 aa, Artificial Sequence
  Synthetic polypeptide
QPPLVQAIFSGDPEEIRMLIHKTEDVNTLDSEKRTPLHVAAFLGDAEIIELLILSGARVNAKDNMWLTPLHRAVASRSEEAVQVLIKHSADVNARDKNWQTPLHVAAANKAVKCAEVIIPLLSSVNVSDRGGRTALHHAALNGHVEMVNLLLAKGANINAFDKKDRRALHWAAYMGHLDVVALLINHGAEVTCKDKKGYTPLHAAASNGQINVVKHLLNLGVEIDEINVYGNTALHIACYNGQDAVVNELIDYGANVNQPNNNGFTPLHFAAASTHGALCLELLVNNGADVNIQSKDGKSPLHMTAVHGRFTRSQTLIQNGGEIDCVDKDGNTPLHVAARYGHELLINTLITSGADTAKCGIHSMFPLHLAALNAHSDCCRKLLSSGFEIDTPDKFGRTCLHAAAAGGNVECIKLLQSSGADFHKKDKCGRTPLHYAAANCHFHCIETLVTTGANVNETDDWGRTALHYAAASDMDRNKTILGNAHDNSEELERARELKEKEATLCLEFLLQNDANPSIRDKEGYNSIHYAAAYGHRQCLELS

SEQ ID NO: 5663 - protein, 526 aa, Artificial Sequence
  Synthetic polypeptide
LLIYKTEIISTLDSEKRTPLHVAAFLGDAEIIELLILSGARVNAKDNMWLTPLHRAVASRSEEAVQVLIKHSADVNARDKNWQTPLHVAAANKAVKCAEVIIPLLSSVNVSDRGGRTALHHAALNGHVEMVNLLLAKGANINAFDKKDRRALHWAAYMGHLDVVALLINHGAEVTCKDKKGYTPLHAAASNGQINVVKHLLNLGVEIDEINVYGNTALHIACYNGQDAVVNELIDYGANVNQPNNNGFTPLHFAAASTHGALCLELLVNNGADVNIQSKDGKSPLHMTAVHGRFTRSQTLIQNGGEIDCVDKDGNTPLHVAARYGHELLINTLITSGADTAKCGIHSMFPLHLAALNAHSDCCRKLLSSGFEIDTPDKFGRTCLHAAAAGGNVECIKLLQSSGADFHKKDKCGRTPLHYAAANCHFHCIETLVTTGANVNETDDWGRTALHYAAASDMDRNKTILGNAHDNSEELERARELKEKEATLCLEFLLQNDANPSIRDKEGYNSIHYAAAYGHRQCLELS

SEQ ID NO: 5664 - protein, 526 aa, Artificial Sequence
  Synthetic polypeptide
MLIHKTEDVNTLDSEKRTPLHVAAFLGDAEIIELLILSGARVNAKDNMWLTPLHRAVASRSEEAVQVLIKHSADVNARDKNWQTPLHVAAANKAVKCAEVIIPLLSSVNVSDRGGRTALHHAALNGHVEMVNLLLAKGANINAFDKKDRRALHWAAYMGHLDVVALLINHGAEVTCKDKKGYTPLHAAASNGQINVVKHLLNLGVEIDEINVYGNTALHIACYNGQDAVVNELIDYGANVNQPNNNGFTPLHFAAASTHGALCLELLVNNGADVNIQSKDGKSPLHMTAVHGRFTRSQTLIQNGGEIDCVDKDGNTPLHVAARYGHELLINTLITSGADTAKCGIHSMFPLHLAALNAHSDCCRKLLSSGFEIDTPDKFGRTCLHAAAAGGNVECIKLLQSSGADFHKKDKCGRTPLHYAAANCHFHCIETLVTTGANVNETDDWGRTALHYAAASDMDRNKTILGNAHDNSEELERARELKEKEATLCLEFLLQNDANPSIRDKEGYNSIHYAAAYGHRQCLELS

SEQ ID NO: 5665 - protein, 226 aa, Artificial Sequence
  Synthetic polypeptide
SKDGKSPLHMTAVHGRFTRSQTLIQNGGEIDCVDKDGNTPLHVAARYGHELLINTLITSGADTAKCGIHSMFPLHLAALNAHSDCCRKLLSSGFEIDTPDKFGRTCLHAAAAGGTPLHYAAANCHFHCIETLVTTGANVNETDDWGRTALHYAAASDMDRNKTILGNAHDNSEELERARELKEKEATLCLEFLLQNDANPSIRDKEGYNSIHYAAAYGHRQCLELS

SEQ ID NO: 5666 - protein, 551 aa, Artificial Sequence
  Synthetic polypeptide
MAVLKLTDQPPLVQAIFSGDPEEIRMLIHKTEDVNTLDSEKRTPLHVAAFLGDAEIIELLILSGARVNAKDNMWLTPLHRAVASRSEEAVQVLIKHSADVNARDKNWQTPLHVAAANKAVKCAEVIIPLLSSVNVSDRGGRTALHHAALNGHVEMVNLLLAKGANINAFDKKDRRALHWAAYMGHLDVVALLINHGAEVTCKDKKGYTPLHAAASNGQINVVKHLLNLGVEIDEINVYGNTALHIACYNGQDAVVNELIDYGANVNQPNNNGFTPLHFAAASTHGALCLELLVNNGADVNIQSKDGKSPLHMTAVHGRFTRSQTLIQNGGEIDCVDKDGNTPLHVAARYGHELLINTLITSGADTAKCGIHSMFPLHLAALNAHSDCCRKLLSSGFEIDTPDKFGRTCLHAAAAGGNVECIKLLQSSGADFHKKDKCGRTPLHYAAANCHFHCIETLVTTGANVNETDDWGRTALHYAAASDMDRNKTILGNAHDNSEELERARELKEKEATLCLEFLLQNDANPSIRDKEGYNSIHYAAAYGHRQCLELS

SEQ ID NO: 5667 - protein, 479 aa, Artificial Sequence
  Synthetic polypeptide
MWLTPLHRAVASRSEEAVQVLIKHSADVNARDKNWQTPLHVAAANKAVKCAEVIIPLLSSVNVSDRGGRTALHHAALNGHVEMVNLLLAKGANINAFDKKDRRALHWAAYMGHLDVVALLINHGAEVTCKDKKGYTPLHAAASNGQINVVKHLLNLGVEIDEINVYGNTALHIACYNGQDAVVNELIDYGANVNQPNNNGFTPLHFAAASTHGALCLELLVNNGADVNIQSKDGKSPLHMTAVHGRFTRSQTLIQNGGEIDCVDKDGNTPLHVAARYGHELLINTLITSGADTAKCGIHSMFPLHLAALNAHSDCCRKLLSSGFEIDTPDKFGRTCLHAAAAGGNVECIKLLQSSGADFHKKDKCGRTPLHYAAANCHFHCIETLVTTGANVNETDDWGRTALHYAAASDMDRNKTILGNAHDNSEELERARELKEKEATLCLEFLLQNDANPSIRDKEGYNSIHYAAAYGHRQCLELS

SEQ ID NO: 5668 - protein, 28 aa, Artificial Sequence
  Synthetic polypeptide
MAVLKLTDQIRSFLSLGLYLDHCRILAT

SEQ ID NO: 5669 - protein, 71 aa, Artificial Sequence
  Synthetic polypeptide
MAVLKLTDQLSCNHKEMAANNQGWQSEKMVRAWTYDDITKPLNYLVTDLLSLGPPTSRDFVKRDKSNVQIA

SEQ ID NO: 5670 - protein, 18 aa, Artificial Sequence
  Synthetic polypeptide
MAVLKLTDQHGTGTKTDI

SEQ ID NO: 5671 - protein, 9 aa, Artificial Sequence
  Synthetic polypeptide
MAGCGGSRL

SEQ ID NO: 5672 - protein, 71 aa, Artificial Sequence
  Synthetic polypeptide
MSSSRVGLRLAACLLNVSEAGRKYIVENIAKAALLDKNGKKHPQVSVLNIFSDQDYKRSVITIATSVDKLG

SEQ ID NO: 5673 - protein, 112 aa, Artificial Sequence
  Synthetic polypeptide
MWGFRLLRSPPLLLLLPQLGIGNASSCSQARTMNPGGSGGARCSLSAEVRRRQCLQLSTVPGADPQRSNELLLLAAAGEGLERQDLPGDPAKEEPQPPPQHHVLYFPGDVQC

SEQ ID NO: 5674 - protein, 68 aa, Artificial Sequence
  Synthetic polypeptide
MAELNTHVNVKEKIYAVRSVVPNKSNNEIVLVLQQFDFNVDKAVQAFVDAVTHACSPSTSEGEGGQIT

SEQ ID NO: 5675 - protein, 98 aa, Artificial Sequence
  Synthetic polypeptide
MDPFCHSSSETRLLSGTLLWIPRAYSTRSKMAELNTHVNVKEKIYAVRSVVPNKSNNEIVLVLQQFDFNVDKAVQAFVDAVTHACSPSTSEGEGGQIT

SEQ ID NO: 5676 - protein, 76 aa, Artificial Sequence
  Synthetic polypeptide
MAYSTRSKMAELNTHVNVKEKIYAVRSVVPNKSNNEIVLVLQQFDFNVDKAVQAFVDAVTHACSPSTSEGEGGQIT

SEQ ID NO: 5677 - protein, 63 aa, Artificial Sequence
  Synthetic polypeptide
MAGGQTNMIYAVRSVVPNKSNNEIVLVLQQFDFNVDKAVQAFVDAVTHACSPSTSEGEGGQIT

SEQ ID NO: 5678 - protein, 196 aa, Artificial Sequence
  Synthetic polypeptide
MECPVMETGSLFTSGIKRHLKDKRISKTTKLNVSLASKIKTKILNNSSIFKISLKHNNRALAQALSREKENSRRITTEKMLLQKEVEKLNFENTFLRLKLNNLNKKLIDIEALMNNNLITAIEMSSLSEFHQSSFLLSASKKKRISKQCKLMRLPFASRTWWLMPVIPALWEAEAGGSRGQEIETILANMVKPRLY

SEQ ID NO: 5679 - protein, 195 aa, Artificial Sequence
  Synthetic polypeptide
MECPVMETGSLFTSGIKRHLKDKRISKTTKLNVSLASKIKTKILNNSSIFKISLKHNNRALAQALSREKENSRRITTEKMLLQKEVEKLNFENTFLRLKLNNLNKKLIDIEALMNNNLITAIEMSSLSEFHQSSFLLSASKKKRISKQCKLMRLPFARTWWLMPVIPALWEAEAGGSRGQEIETILANMVKPRLY

SEQ ID NO: 5680 - protein, 455 aa, Artificial Sequence
  Synthetic polypeptide
MFFYLSKKISIPNNVKLQCVSWNKEQGFIACGGEDGLLKVLKLETQTDDAKLRGLAAPSNLSMNQTLEGHSGSVQVVTWNEQYQKLTTSDENGLIIVWMLYKGSWIEEMINNRNKSVVRSMSWNADGQKICIVYEDGAVIVGSVDGNRIWGKDLKGIQLSHVTWSADSKVLLFGMANGEIHIYDNQGNFMIKMKLSCLVNVTGAISIAGIHWYHGTEGYVEPDCPCLAVCFDNGRCQIMRHENDQNPVLIDTGMYVVGIQWNHMGSVLAVAGFQKAAMQDKDVNIVQFYTPFGEHLGTLKVPGKEISALSWEGGGLKIALAVDSFIYFANIRPNYKWGYCSNTVVYAYTRPDRPEYCVVFWDTKNNEKYVKYVKGLISITTCGDFCILATKADENHPQNTGSQALSFEVGVWKSSQENSTCSREKPSKDTEIESPQGNSPAHHLTVKTPVSEAHL

SEQ ID NO: 5681 - protein, 7 aa, Artificial Sequence
  Synthetic polypeptide
RVYSYPM

SEQ ID NO: 5682 - protein, 491 aa, Artificial Sequence
  Synthetic polypeptide
MSKPELKEDKMLEVHFVGDDDVLNHILDREGGAKLKKERAQLLVNPKKIIKKPEYDLEEDDQEVLKDQNYVEIMGRDVQESLKNGSATGGGNKVYSFQNRKHSEKMAKLASELAKTPQKSVSFSLKNDPEITINVPQSSKGHSASDKVQPKNNDKSEFLSTAPRSLRKRLIVPRSHSDSESEYSASNSEDDEGVAQEHEEDTNAVIFSQKIQAQNRVVSAPVGKETPSKRMKRDKTSDLVEEYFEAHSSSKVLTSDRTLQKLKRAKLDQQTLRNLLSKVSPSFSAELKQLNQQYEKLFHKWMLQLHLGFNIVLYGLGSKRDLLERFRTTMLQDSIHVVINGFFPGISVKSVLNSITEEVLDHMGTFRSILDQLDWIVNKFKEDSSLELFLLIHNLDSQMLRGEKSQQIIGQLSSLHNIYLIASIDHLNAPLMWDHAKQSLFNWLWYETTTYSPYTEETSYENSLLVKQSGSLPLSSLTHVLRSLTPNASLS

SEQ ID NO: 5683 - protein, 129 aa, Artificial Sequence
  Synthetic polypeptide
MSKPELKEDKMLEVHFVGDDDVLNHILDREGGAKLKKERAQLLVNPKKIIKKPEYDLEEDDQEVLKDQNYVEIMGRDVQESLKNGSATGGGNKVYSFQNRKHSEKMAKLGMVAHTYNPNTLRGKGKRIT

SEQ ID NO: 5684 - protein, 72 aa, Artificial Sequence
  Synthetic polypeptide
MFFYLSKKISIPNNVKLQCVSWNKEQGFIACGGEDGLLKVLKLETQTDDAKLRGLAAPSNLSMNQTLEGHSD

SEQ ID NO: 5685 - protein, 126 aa, Artificial Sequence
  Synthetic polypeptide
MLGTDRCVVEEWLSEFKALPDTQITSYAATLHRKKTLVPALYKVIQDSNNELLEPVCHQLFELYRSSEVRLKRFTLQFLPELMWVYLRLTVSRDRQSNGCIEALLLGIYNLHFRRPRWEDHLSPGV

SEQ ID NO: 5686 - protein, 230 aa, Artificial Sequence
  Synthetic polypeptide
MSAEVIHQVEEALDTDEKEMLLFLCRDVAIDVVPPNVRDLLDILRERGKLSVGDLAELLYRVRRFDLLKRILKMDRKAVETHLLRNPHLVSDYRVLMAEIGEDLDKSDVSSLIFLMKDYMGRGKISKEKSFLDLVVELEKLNLVAPDQLDLLEKCLKNIHRIDLKTKIQKYKQSVQGAGTSYRNVLQAAIQKSLKDPSNNFRVWWCMPVIPATCEAEAGESLEPERRRLS

SEQ ID NO: 5687 - protein, 134 aa, Artificial Sequence
  Synthetic polypeptide
MAEIGEDLDKSDVSSLIFLMKDYMGRGKISKEKSFLDLVVELEKLNLVAPDQLDLLEKCLKNIHRIDLKTKIQKYKQSVQGAGTSYRNVLQAAIQKSLKDPSNNFRVWWCMPVIPATCEAEAGESLEPERRRLS

SEQ ID NO: 5688 - protein, 262 aa, Artificial Sequence
  Synthetic polypeptide
MDFSRNLYDIGEQLDSEDLASLKFLSLDYIPQRKQEPIKDALMLFQRLQEKRMLEESNLSFLKELLFRINRLDLLITYLNTRKEEMERELQTPGRAQISAYRVMLYQISEEVSRSELRSFKFLLQEEISKCKLDDDMNLLDIFIEMEKRVILGEGKLDILKRVCAQINKSLLKIINDYEEFSKGEELCGVMTISDSPREQDSESQTLDKVYQMKSKPRGYCLIINNHNFAKAREKVPKLHSIRDRNGTHLDAEPATILILPS

SEQ ID NO: 5689 - protein, 277 aa, Artificial Sequence
  Synthetic polypeptide
MDFSRNLYDIGEQLDSEDLASLKFLSLDYIPQRKQEPIKDALMLFQRLQEKRMLEESNLSFLKELLFRINRLDLLITYLNTRKEEMERELQTPGRAQISAYRVMLYQISEEVSRSELRSFKFLLQEEISKCKLDDDMNLLDIFIEMEKRVILGEGKLDILKRVCAQINKSLLKIINDYEEFSKERSSSLEGSPDEFSNGEELCGVMTISDSPREQDSESQTLDKVYQMKSKPRGYCLIINNHNFAKAREKVPKLHSIRDRNGTHLDAEPATILILPS

SEQ ID NO: 5690 - protein, 294 aa, Artificial Sequence
  Synthetic polypeptide
MDFSRNLYDIGEQLDSEDLASLKFLSLDYIPQRKQEPIKDALMLFQRLQEKRMLEESNLSFLKELLFRINRLDLLITYLNTRKEEMERELQTPGRAQISAYRFHFCRMSWAEANSQCQTQSVPFWRRVDHLLIRVMLYQISEEVSRSELRSFKFLLQEEISKCKLDDDMNLLDIFIEMEKRVILGEGKLDILKRVCAQINKSLLKIINDYEEFSKGEELCGVMTISDSPREQDSESQTLDKVYQMKSKPRGYCLIINNHNFAKAREKVPKLHSIRDRNGTHLDAEPATILILPS

SEQ ID NO: 5691 - protein, 159 aa, Artificial Sequence
  Synthetic polypeptide
MLYQISEEVSRSELRSFKFLLQEEISKCKLDDDMNLLDIFIEMEKRVILGEGKLDILKRVCAQINKSLLKIINDYEEFSKGEELCGVMTISDSPREQDSESQTLDKVYQMKSKPRGYCLIINNHNFAKAREKVPKLHSIRDRNGTHLDAEPATILILPS

SEQ ID NO: 5692 - protein, 336 aa, Artificial Sequence
  Synthetic polypeptide
MEGGRRARVVIESKRNFFLGAFPTPFPAEHVELGRLGDSETAMVPGKGGADYILLPFKKMDFSRNLYDIGEQLDSEDLASLKFLSLDYIPQRKQEPIKDALMLFQRLQEKRMLEESNLSFLKELLFRINRLDLLITYLNTRKEEMERELQTPGRAQISAYRVMLYQISEEVSRSELRSFKFLLQEEISKCKLDDDMNLLDIFIEMEKRVILGEGKLDILKRVCAQINKSLLKIINDYEEFSKERSSSLEGSPDEFSNGEELCGVMTISDSPREQDSESQTLDKVYQMKSKPRGYCLIINNHNFAKAREKVPKLHSIRDRNGTHLDAEPATILILPS

SEQ ID NO: 5693 - protein, 1342 aa, Artificial Sequence
  Synthetic polypeptide
MDSKKRSSTEAEGSKERGLVHIWQAGSFPITPERLPGWGGKTVLQAALGVKHGVLLTEDGEVYSFGTLPWRSGPVEICPSSPILENALVGQYVITVATGSFHSGAVTDNGVAYMWGENSAGQCAVANQQYVPEPNPVSIADSEASPLLAVRILQLACGEEHTLALSISREIWAWGTGCQLGLITTAFPVTKPQKVEHLAGRVVLQVACGAFHSLALVQCLPSQDLKPVPERCNQCSQLLITMTDKEDHVIISDSHCCPLGVTLTESQAENHASTALSPSTETLDRQEEVFENTLVANDQSVATELNAVSAQITSSDAMSSQQNVMGTTEISSARNIPSYPDTQAVNEYLRKLSDHSVREDSEHGEKPVPSQPLLEEAIPNLHSPPTTSTSALNSLVVSCASAVGVRVAATYEAGALSLKKVMNFYSTTPCETGAQAGSSAIGPEGLKDSREEQVKQESMQGKKSSSLVDIREEETEGGSRRLSLPGLLSQVSPRLLRKAARVKTRTVVLTPTYSGEADALLPSLRTEVWTWGKGKEGQLGHGDVLPRLQPLCVKCLDGKEVIHLEAGGYHSLALTAKSQVYSWGSNTFGQLGHSDFPTTVPRLAKISSENGVWSIAAGRDYSLFLVDTEDFQPGLYYSGRQDPTEGDNLPENHSGSKTPVLLSCSKLGYISRVTAGKDSYLALVDKNIMGYIASLHELATTERRFYSKLSDIKSQILRPLLSLENLGTTTTVQLLQEVASRFSKLCYLIGQHGASLSSFLHGVKEARSLVILKHSSLFLDSYTEYCTSITNFLVMGGFQLLAKPAIDFLNKNQELLQDLSEVNDENTQLMEILNTLFFLPIRRLHNYAKVLLKLATCFEVASPEYQKLQDSSSCYECLALHLGRKRKEAEYTLGFWKTFPGKMTDSLRKPERRLLCESSNRALSLQHAGRFSVNWFILFNDALVHAQFSTHHVFPLATLWAEPLSEEAGGVNGLKITTPEEQFTLISSTPQEKTKWLRAISQAVDQALRGMSDLPPYGSGSSVQRQEPPISRSAKYTFYKDPRLKDATYDGRWLSGKPHGRGVLKWPDGKMYSGMFRNGLEDGYGEYRIPNKAMNKEDHYVGHWKEGKMCGQGVYSYASGEVFEGCFQDNMRHGHGLLRSGKLTSSSPSMFIGQWVMDKKAGYGVFDDITRGEKYMGMWQDDVCQGNGVVVTQFGLYYEGNFHLNKMMGNGVLLSEDDTIYEGEFSDDWTLSGKGTLTMPNGDYIEGYFSGEWGSGIKITGTYFKPSLYESDKDRPKVFRKLGNLAVPADEKWKAVFDECWRQLGCEGPGQGEVWKAWDNIAVALTTSRRQHRDSLQDLLWQ

SEQ ID NO: 5694 - protein, 8 aa, Artificial Sequence
  Synthetic polypeptide
MSDQGCED

SEQ ID NO: 5695 - protein, 35 aa, Artificial Sequence
  Synthetic polypeptide
MLEAWNLNLSHYLKLSCTPTAAKLRVKSRTQPLLR

SEQ ID NO: 5696 - protein, 281 aa, Artificial Sequence
  Synthetic polypeptide
MEQSNDSLRVNHNDGEESKTSAQVFEHLICMDSRDSSFGQNDSPTVLPITTREANNSLISQNIPGPLTQTQTLSAEQFHLVDQNGQAIQYELQSLGESNAQMMIVASPTENGQVLRVIPPTQTGMAQVIIPQGQLVDVNSPRDVPEEKPSNRNLPTVRVDTLADNTSNYILHPQTSFPLPKKSVTGMLEEPLLGPLQPLSSNTPIWACRLRSCEKIGDSYRGYCVSETELESVLTFHKQQTQSVWGTRQSPSPAKPATRLMWKSQYVPYDGIPFVNAGSCL

SEQ ID NO: 5697 - protein, 251 aa, Artificial Sequence
  Synthetic polypeptide
MDSRDSSFGQNDSPTVLPITTREANNSLISQNIPGPLTQTQTLSAEQFHLVDQNGQAIQYELQSLGESNAQMMIVASPTENGQVLRVIPPTQTGMAQVIIPQGQLVDVNSPRDVPEEKPSNRNLPTVRVDTLADNTSNYILHPQTSFPLPKKSVTGMLEEPLLGPLQPLSSNTPIWACRLRSCEKIGDSYRGYCVSETELESVLTFHKQQTQSVWGTRQSPSPAKPATRLMWKSQYVPYDGIPFVNAGSCL

SEQ ID NO: 5698 - protein, 179 aa, Artificial Sequence
  Synthetic polypeptide
MIVASPTENGQVLRVIPPTQTGMAQVIIPQGQLVDVNSPRDVPEEKPSNRNLPTVRVDTLADNTSNYILHPQTSFPLPKKSVTGMLEEPLLGPLQPLSSNTPIWACRLRSCEKIGDSYRGYCVSETELESVLTFHKQQTQSVWGTRQSPSPAKPATRLMWKSQYVPYDGIPFVNAGSCL

SEQ ID NO: 5699 - protein, 193 aa, Artificial Sequence
  Synthetic polypeptide
MLEAWNLNLSHYLKMIVASPTENGQVLRVIPPTQTGMAQVIIPQGQLVDVNSPRDVPEEKPSNRNLPTVRVDTLADNTSNYILHPQTSFPLPKKSVTGMLEEPLLGPLQPLSSNTPIWACRLRSCEKIGDSYRGYCVSETELESVLTFHKQQTQSVWGTRQSPSPAKPATRLMWKSQYVPYDGIPFVNAGSCL

SEQ ID NO: 5700 - protein, 205 aa, Artificial Sequence
  Synthetic polypeptide
MEQSNDSLRVNHNDGEESKTSAQVFEMIVASPTENGQVLRVIPPTQTGMAQVIIPQGQLVDVNSPRDVPEEKPSNRNLPTVRVDTLADNTSNYILHPQTSFPLPKKSVTGMLEEPLLGPLQPLSSNTPIWACRLRSCEKIGDSYRGYCVSETELESVLTFHKQQTQSVWGTRQSPSPAKPATRLMWKSQYVPYDGIPFVNAGSCL

SEQ ID NO: 5701 - protein, 434 aa, Artificial Sequence
  Synthetic polypeptide
MNHDFQALALESRGMGELLPTKKFWEPDDSTKDGQKGIFLGDDEWRETAWGASHHSMSQPIMVQRRSGQGFHGNSEVNAILSPRSESGGLGVSMVEYVLSSSPADKLDSRFRKGNFGTRDAETDGPEKGDQKGKASPFEEDQNRDLKQGDDDDSKINGRGLPNGMDADCKDFNRTPGSRQASPTEVVERLGPNTNPSEGLGPLPNPTANKPLVEEFSNPETQNLDAMEQVGLESLQFDYPGNQVPMDSSGATVGLFDYNSQQQLFQRTNALTVQQLTAAQQQQYALAAAQQPHIAGVFSAGLAPAAFVPNPYIISAAPPGTDPYTAAGLAAAATLAGPAVVPPQYYGVPWGVYPANLFQQQAAAAANNTASQQAASQAQPGQQQVLRAGAGQRPLTPNQGQQGQQAESLAAAAAANPTLAFGQGLATGMPENLH

SEQ ID NO: 5702 - protein, 325 aa, Artificial Sequence
  Synthetic polypeptide
RFRKGNFGTRDAETDGPEKGDQKGKASPFEEDQNRDLKQGDDDDSKINGRGLPNGMDADCKDFNRTPGSRQASPTEVVERLGPNTNPSEGLGPLPNPTANKPLVEEFSNPETQNLDAMEQVGLESLQFDYPGNQVPMDSSGATVGLFDYNSQQQLFQRTNALTVQQLTAAQQQQYALAAAQQPHIAGVFSAGLAPAAFVPNPYIISAAPPGTDPYTAAGLAAAATLAGPAVVPPQYYGVPWGVYPANLFQQQAAAAANNTASQQAASQAQPGQQQVLRAGAGQRPLTPNQGQQGQQAESLAAAAAANPTLAFGQGLATGMPENLH

SEQ ID NO: 5703 - protein, 378 aa, Artificial Sequence
  Synthetic polypeptide
MSQPIMVQRRSGQGFHGNSEVNAILSPRSESGGLGVSMVEYVLSSSPADKLDSRFRKGNFGTRDAETDGPEKGDQKGKASPFEEDQNRDLKQGDDDDSKINGRGLPNGMDADCKDFNRTPGSRQASPTEVVERLGPNTNPSEGLGPLPNPTANKPLVEEFSNPETQNLDAMEQVGLESLQFDYPGNQVPMDSSGATVGLFDYNSQQQLFQRTNALTVQQLTAAQQQQYALAAAQQPHIAGVFSAGLAPAAFVPNPYIISAAPPGTDPYTAAGLAAAATLAGPAVVPPQYYGVPWGVYPANLFQQQAAAAANNTASQQAASQAQPGQQQVLRAGAGQRPLTPNQGQQGQQAESLAAAAAANPTLAFGQGLATGMPENLH

SEQ ID NO: 5704 - protein, 328 aa, Artificial Sequence
  Synthetic polypeptide
MNHDFQALALESRGMGELLPTKKFWEPDDSTKDGQKGIFLGDDEWRETAWGASHHSMSQPIMVQRRSGQGFHGNSEVNAILSPRSESGGLGVSMVEYVLSSSPADKLDSRFRKGNFGTRDAETDGPEKGDQKGKASPFEEDQNRDLKQGDDDDSKINGRGLPNGMDADCKDFNRTPGSRQASPTEVVERLGPNTNPSEGLGPLPNPTANKPLVEEFSNPETQNLDAMEQVGLESLQFDYPGNQVPMDSSGATVGLFDYNSQQQLFQRTNALTVQQLTAAQQQQYALAAAQQPHIGWRVFRMFDNVLFWQECKWHSYFWNVNWYSFPGK

SEQ ID NO: 5705 - protein, 219 aa, Artificial Sequence
  Synthetic polypeptide
RFRKGNFGTRDAETDGPEKGDQKGKASPFEEDQNRDLKQGDDDDSKINGRGLPNGMDADCKDFNRTPGSRQASPTEVVERLGPNTNPSEGLGPLPNPTANKPLVEEFSNPETQNLDAMEQVGLESLQFDYPGNQVPMDSSGATVGLFDYNSQQQLFQRTNALTVQQLTAAQQQQYALAAAQQPHIGWRVFRMFDNVLFWQECKWHSYFWNVNWYSFPGK

SEQ ID NO: 5706 - protein, 272 aa, Artificial Sequence
  Synthetic polypeptide
MSQPIMVQRRSGQGFHGNSEVNAILSPRSESGGLGVSMVEYVLSSSPADKLDSRFRKGNFGTRDAETDGPEKGDQKGKASPFEEDQNRDLKQGDDDDSKINGRGLPNGMDADCKDFNRTPGSRQASPTEVVERLGPNTNPSEGLGPLPNPTANKPLVEEFSNPETQNLDAMEQVGLESLQFDYPGNQVPMDSSGATVGLFDYNSQQQLFQRTNALTVQQLTAAQQQQYALAAAQQPHIGWRVFRMFDNVLFWQECKWHSYFWNVNWYSFPGK

SEQ ID NO: 5707 - protein, 132 aa, Artificial Sequence
  Synthetic polypeptide
MKVTVCFGRTGIVVPCKEGQLRVGELTQQALQRYLKTREKGPGYWVKIHHLEYTDGGILDPDDVLADVVEDKDKLIAVFEEQEPLHKIESPSGNPADRQSPDAFETEVAAQLAAFKPIGGEIEVTPSALKLG

SEQ ID NO: 5708 - protein, 172 aa, Artificial Sequence
  Synthetic polypeptide
MKVTVCFGRTGIVVPCKEGQLRVGELTQQALQRYLKTREKGPGYWVKIHHLEYTDGGILDPDDVLADVVEDKDKLIAVFEEQEPLHKIESPSGNPADRQSPDAFETEVAAQLAAFKPIGGEIEVTPSALKLGTPLLVRRSSDPVPGPPADTQPSASHPGGQSLKLVVPILTN

SEQ ID NO: 5709 - protein, 1575 aa, Artificial Sequence
  Synthetic polypeptide
MKVTVCFGRTGIVVPCKEGQLRVGELTQQALQRYLKTREKGPGYWVKIHHLEYTDGGILDPDDVLADVVEDKDKLIAVFEEQEPLHKIESPSGNPADRQSPDAFETEVAAQLAAFKPIGGEIEVTPSALKLGTPLLVRRSSDPVPGPPADTQPSASHPGGQSLKLVVPDSTQNLEDREVLNGVQTELLTSPRTKDTLSDMTRTVEISGEGGPLGIHVVPFFSSLSGRILGLFIRGIEDNSRSKREGLFHENECIVKINNVDLVDKTFAQAQDVFRQAMKSPSVLLHVLPPQNREQYEKSVIGSLNIFGNNDGVLKTKVPPPVHGKSGLKTANLTGTDSPETDASASLQQNKSPRVPRLGGKPSSPSLSPLMGFGSNKNAKKIKIDLKKGPEGLGFTVVTRDSSIHGPGPIFVKNILPKGAAIKDGRLQSGDRILEVNGRDVTGRTQEELVAMLRSTKQGETASLVIARQEGHFLPRELKGEPDCCALSLETSEQLTFEIPLNDSGSAGLGVSLKGNKSRETGTDLGIFIKSIIHGGAAFKDGRLRMNDQLIAVNGESLLGKSNHEAMETLRRSMSMEGNIRGMIQLVILRRPERPMEDPAECGAFSKPCFENCQNAVTTSRRNDNSILHPLGTCSPQDKQKGLLLPNDGWAESEVPPSPTPHSALGLGLEDYSHSSGVDSAVYFPDQHINFRSVTPARQPESINLKASKSMDLDRSTRQKVNKDTQELNSALHQADLIDIYRTLHPKSTEYTFFSAPHHTYSKIDHILGSKALLSKCKRTQIITNYLSDHSAIKLELRIKNLTQNRSTTWKLNNLLLNDYWVYNEMKAEIKMFFETNENKDTTYQNLWDAFKAVCRGKFIALNAHKRKQERSKIDTLTSQLKELEKQEQTHSKASRRQAITKIRAELKEIETQKTLQKINESKSWFFERINKIDRPLARLIKKKREMNQIDAIKNDKGDITTDPTEIQTTIREYYKHLYTNKLENLEEMDTFLDTYNLPRLNQEEVESLNRPITGAEIVAIINSLPTKKSPGPDGFTAEFYQRYKEELVPFLLKLFQSIEKEGILPNSFYEASIILIPKPGRDTTKKENFRPISLINIDAKILNKILAKRIQRHIKKLIHHDQVGFIPGMQGWFNIRKSINVIQHINRAKDKNHMIISIDAEKAFDKIQQPFMLKTLNKLGIDGTYFKIIRAIYDRPTANIILNGQKLEAFPLKTGTRQGCPLSPLLFNIVLEVLARAIRQEKEIKGIQLGKEEVKLSLFADDMIVYLENPIVSGQNLLKLISNFSKVSGYKINVQKSQAFLYTNNRQTESQIMSELPFTIASKRIKYLGIQLTRDGKDLFKENYKPLLNEIKEDTNKWKNIPCSWVGTINIVKMAILPRVIYRFNAIPIKLPKPFFTELEKTTLKFIWNQKRACIAKSILSQKNKAGGITLPDFKLYYKATVTKTAWYWYQNRDIDQWNRTEPSEITPHIYNYLIFDKPEKNKQWGKDSLFNKWCWENWLAICRKRKLDPFLTPYTKINSRWIKDLNIRPKTIKTLEENLGITIQDIGMGKDFMSKTPKAMATKDKIDKWDLIN

SEQ ID NO: 5710 - protein, 1513 aa, Artificial Sequence
  Synthetic polypeptide
MKVTVCFGRTGIVVPCKEGQLRVGELTQQALQRYLKTREKGPGYWVKIHHLEYTDGGILDPDDVLADVVEDKDKLIAVFEEQEPLHKIESPSGNPADRQSPDAFETEVAAQLAAFKPIGGEIEVTPSALKLGTPLLVRRSSDPVPGPPADTQPSASHPGGQSLKLVVPDSTQNLEDREVLNGVQTELLTSPRTKDTLSDMTRTVEISGEGGPLGIHVVPFFSSLSGRILGLFIRGIEDNSRSKREGLFHENECIVKINNVDLVDKTFAQAQDVFRQAMKSPSVLLHVLPPQNREQYEKSVIGSLNIFGNNDGVLKTKVPPPVHGKSGLKTANLTGTDSPETDASASLQQNKSPRVPRLGGKPSSPSLSPLMGFGSNKNAKKIKIDLKKGPEGLGFTVVTRDSSIHGPGPIFVKNILPKGAAIKDGRLQSGDRILEVNGRDVTGRTQEELVAMLRSTKQGETASLVIARQEGHFLPRELDGRLRMNDQLIAVNGESLLGKSNHEAMETLRRSMSMEGNIRGMIQLVILRRPERPMEDPAECGAFSKPCFENCQNAVTTSRRNDNSILHPLGTCSPQDKQKGLLLPNDGWAESEVPPSPTPHSALGLGLEDYSHSSGVDSAVYFPDQHINFRSVTPARQPESINLKASKSMDLDRSTRQKVNKDTQELNSALHQADLIDIYRTLHPKSTEYTFFSAPHHTYSKIDHILGSKALLSKCKRTQIITNYLSDHSAIKLELRIKNLTQNRSTTWKLNNLLLNDYWVYNEMKAEIKMFFETNENKDTTYQNLWDAFKAVCRGKFIALNAHKRKQERSKIDTLTSQLKELEKQEQTHSKASRRQAITKIRAELKEIETQKTLQKINESKSWFFERINKIDRPLARLIKKKREMNQIDAIKNDKGDITTDPTEIQTTIREYYKHLYTNKLENLEEMDTFLDTYNLPRLNQEEVESLNRPITGAEIVAIINSLPTKKSPGPDGFTAEFYQRYKEELVPFLLKLFQSIEKEGILPNSFYEASIILIPKPGRDTTKKENFRPISLINIDAKILNKILAKRIQRHIKKLIHHDQVGFIPGMQGWFNIRKSINVIQHINRAKDKNHMIISIDAEKAFDKIQQPFMLKTLNKLGIDGTYFKIIRAIYDRPTANIILNGQKLEAFPLKTGTRQGCPLSPLLFNIVLEVLARAIRQEKEIKGIQLGKEEVKLSLFADDMIVYLENPIVSGQNLLKLISNFSKVSGYKINVQKSQAFLYTNNRQTESQIMSELPFTIASKRIKYLGIQLTRDGKDLFKENYKPLLNEIKEDTNKWKNIPCSWVGTINIVKMAILPRVIYRFNAIPIKLPKPFFTELEKTTLKFIWNQKRACIAKSILSQKNKAGGITLPDFKLYYKATVTKTAWYWYQNRDIDQWNRTEPSEITPHIYNYLIFDKPEKNKQWGKDSLFNKWCWENWLAICRKRKLDPFLTPYTKINSRWIKDLNIRPKTIKTLEENLGITIQDIGMGKDFMSKTPKAMATKDKIDKWDLIN

SEQ ID NO: 5711 - protein, 64 aa, Artificial Sequence
  Synthetic polypeptide
MQKRQGYCSYCRVQYNNLEQQTLTKGKTKKEFFRQKENDSRWKLRDTGSNEEQWKGKYVGNQSK

SEQ ID NO: 5712 - protein, 259 aa, Artificial Sequence
  Synthetic polypeptide
MLTTLKPFGSVSVESKMNNKAGSFFWNLRQFSTLVSTSRTMRLCCLGLCKPKIVHSNWNILNNFHNRMQSTDIIRYLFQDAFIFKSDVGFQTKGISTLTALRIERLLYAKRLFFDSKQSLVPVDKSDDELKKVNLNHEVSNEDVLTKETKPNRISSRKLSEECNSLSDVLDAFSKAPTFPSSNYFTAMWTIAKRLSDDQKRFEKRLMFSHPAFNQLCEHMMREAKIMQYKYLLFSLHAIVKLGIPQNTILVQTLLRVTQ

SEQ ID NO: 5713 - protein, 108 aa, Artificial Sequence
  Synthetic polypeptide
MALVPYEETTEFGLQKFHKPLATFSFANHTIQIRQDWRHLGVAAVVWDAAIVLSTYLEMGAVELRGRSAVELGAGTGLVGIVAALLALKSSMKPLLVHCLLFFSGGGI

SEQ ID NO: 5714 - protein, 108 aa, Artificial Sequence
  Synthetic polypeptide
MALVPYEETTEFGLQKFHKPLATFSFANHTIQIRQDWRHLGVAAVVWDAAIVLSTYLEMGAVELRGRSAVELGAGTGLVGIVAALLALKSSMKPLLVHCLLFFSVRNQ

SEQ ID NO: 5715 - protein, 670 aa, Artificial Sequence
  Synthetic polypeptide
MEALEVDDISPALEVTEEFFSTLDSNLEKAVQQAEVYGIQEVPELVGHEVLSNITDNGAMRNVTSLGKGGMIWDHCKSRLLETKAQNVFPAKEQFMVQRGTTPDNLSWMEQKEASTFNFFNICQRRRDRPRSVNDLLDETSTFKPGHARSRSDITQVDWRVVLKTTPLQQQQQQQPLLQGPHVTRPSFLLPSPNKIEDAQGNTEHKQTFPNILKKGYLEIRKDHDSYWQSCYAELSPYNLYFYSLDSSGNQNLYATYQLSHFQSISVLGNLEARMVDTVLYDNTQLQLKAESPWEALDWGQKLWEVVHAAVPGYMGRQNELTISPGLGHHDDYTQNHSFQKKTSGLLPPSPVLDSSKQYQNILKSGTLYRLTVQNNWKAFTFVLSRAYLMAFQPGKLDEDPLLSYNVDVCLAVQMDNLDGCDSCFQVIFPQDVLRLRAETRQRAQEWMEALKIAANVARSSEQNLQVTLRNKPKDQMGGHELRKNKRQSVTTSFLSILTTLSLERGLTAQSFKCAGCQRSIGLSNGKAKVCNYSGWYYCSSCHVDDSFLIPARIVHNWDTSKYKVSKQAKEFLEYVYEEPLIDIQQENAMLYHHAEPLAAVLRLRQRLKSLRAYLFSCRAAVAEDLRRRIFPREYLLQQIHLYSLADLQQVKSNRKFHSGAGMTGTPNTC

SEQ ID NO: 5716 - protein, 32 aa, Artificial Sequence
  Synthetic polypeptide
ESKPLCHVPAFTLPEHICFRQPGGQDGGYCFV

SEQ ID NO: 5717 - protein, 677 aa, Artificial Sequence
  Synthetic polypeptide
MEALEVDDISPALEVTEEFFSTLDSNLEKAVQQAEVYGIQEVPELVGHEVLSNITDNGAMRNVTSLGKGGMIWDHCKSRLLETKAQNVFPAKEQFMVQRGTTPDNLSWMEQKEASTFNFFNICQRRRDRPRSVNDLLDETSTFKPGHARSRSDITQVDWRVVLKTTPLQQQQQQQPLLQGPHVTRPSFLLPSPNKIEDAQGNTEHKQTFPNILKKGYLEIRKDHDSYWQSCYAELSPYNLYFYSLDSSGNQNLYATYQLSHFQSISVLGNLEARMVDTVLYDNTQLQLKAESPWEALDWGQKLWEVVHAAVPGYMGRQNELTISPGLGHHDDYTQNHSFQKKTSGLLPPSPVLDSSKQYQNILKSGTLYRLTVQNNWKAFTFVLSRAYLMAFQPGKLDEDPLLSYNVDVCLAVQMDNLDGCDSCFQVIFPQDVLRLRAETRQRAQEWMEALKIAANVARSSEQNLQVTLRNKPKDQMGGHELRKNKRQSVTTSFLSILTTLSLERGLTAQSFKCAGCQRSIGLSNGKAKVCNYSGWYYCSSCHVDDSFLIPARIVHNWDTSKYKVSKQAKEFLEYVYEEPLIDIQQENAMLYHHAEPLAAVLRLRQRLKSLRAYLFSCRAAVAEDLRRRNDQQHALVMLNVFGEFSPENTSFNRSTCIHLPTCSRLNQTESFIPVLV

SEQ ID NO: 5718 - protein, 345 aa, Artificial Sequence
  Synthetic polypeptide
MAGLGASLHVWGWLMLGSCLLARAQLDSDGTITIEEQIVLVLKAKVQCELNITAQLQEGEGNCFPEWDGLICWPRGTVGKISAVPCPPYIYDFNHKGVAFRHCNPNGTWDFMHSLNKTWANYSDCLRFLQPDISIGKQEFFERLYVMYTVGYSISFGSLAVAILIIGYFRRLHCTRNYIHMHLFVSFMLRATSIFVKDRVVHAHIGVKELESLIMQDDPQNSIEATSVDKSQYIGCKIAVVMFIYFLATNYYWILVEGLYLHNLIFVAFFSDTKYLWGFILIGWGFPAAFVAAWAVARATLADARCWELSAGDIKWIYQAPILAAIGIGRLLCMDKIPATASLTP

SEQ ID NO: 5719 - protein, 2166 aa, Artificial Sequence
  Synthetic polypeptide
MVKRKSSEGQEQDGGRGIPLPIQTFLWRQTSAFLRPKLGKQYEASCVSFERVLVENKLHGLSPALSEAIQSISRWELVQAALPHVLHCTATLLSNRNKLGHQDKLGVAETKLLHTLHWMLLEAPQDCNNERFGGTDRGSSWGGSSSAFIHQVENQGSPGQPCQSSSNDEEENNRRKIFQNSMATVELFVFLFAPLVHRIKESDLTFRLASGLVIWQPMWEHRQPGVSGFTALVKPIRNIITAKRSSPINSQSRTCESPNQDARHLEGLQVVCETFQSDSISPKATISGCHRGNSFDGSLSSQTSQERGPSHSRASLVIPPCQRSRYATYFDVAVLRCLLQPHWSEEGTQWSLMYYLQRLRHMLEEKPEKPPEPDIPLLPRPRSSSMVAAAPSLVNTHKTQDLTMKCNEEEKSLSSEAFSKVSLTNLRRSAVPDLSSDLGMNIFKKFKSRKEDRERKGSIPFHHTGKRRPRRMGVPFLLHEDHLDVSPTRSTFSFGSFSGLGEDRRGIEKGGWQTTILGKLTRRGSSDAATEMESLSARHSHSHHTLVSDLPDPSNSHGENTVKEVRSQISTITVATFNTTLASFNVGYADFFNEHMRKLCNQVPIPEMPHEPLACANLPRSLTDSCINYSYLEDTEHIDGTNNFVHKNGMLDLSVVLKAVYLVLNHDISSRICDVALNIVECLLQLGVVPCVEKNRKKSENKENETLEKRPSEGAFQFKGVSGSSTCGFGGPAVSGAGDGGGEEGGGGDGGGGGGDGGGGGGGGGGPYEKNDKNQEKDESTPVSNHRLALTMLIKIVKSLGCAYGCGEGHRGLSGDRLRHQVFRENAQNCLTKLYKLDKMQFRQTMRDYVNKDSLNNVVDFLHALLGFCMEPVTDNKAGFGNNFTTVDNKSTAQNVEGIIVSAMFKSLITRCASTTHELHSPENLGLYCDIRQLVQFIKEAHGNVFRRVALSALLDSAEKLAPGKKVEENEQESKPAGSKRSEAGSIVDKGQVSSAPEECRSFMSGRPSQTPEHDEQMQGANLGRKDFWRKMFKSQSAASDTSSQSEQDTSECTTAHSGTTSDRRARSRSRRISLRKKLKLPIGKRNWLKRSSLSGLADGVEDLLDISSVDRLSFIRQSSKVKFTSAVKLSEGGPGSGMENGRDEEENFFKRLGCHSFDDHLSPNQDGGKSKNVVNLGAIRQGMKRFQFLLNCCEPGTIPDASILAAALDLEAPVVARAALFLECARFVHRCNRGNWPEWMKGHHVNITKKGLSRGRSPIVGNKRNQKLQWNAAKLFYQWGDAIGVRLNELCHGESESPANLLGLIYDEETKRRLRKEDEEEDFLDDSTVNPSKCGCPFALKMAACQLLLEITTFLRETFSCLPRPRTEPLVDLESCRLRLDPELDRHRYERKISFAGVLDENEDSKDSLHSSSHTLKSDAGVEEKKEGSPWSASEPSIEPEGMSNAGAEENYHRNMSWLHVMILLCNQQSFICTHVDYCHPHCYLHHSRSCARLVRAIKLLYGDSVDSLRESSNISSVALRGKKQKECSDKSCLRTPSLKKRVSDANLEGKKDSGMLKYIRLQVMSLSPAPLSLLIKAAPILTEEMYGDIQPAAWELLLSMDEHMAGAAAAMFLLCAVKVPEAVSDMLMSEFHHPETVQRLNAVLKFHTLWRFRYQVWPRMEEGAQQIFKIPPPSINFTLPSPVLGMPSVPMFDPPWVPQCSGSVQDPINEDQSKSFSARAVSRSHQRAEHILKNLQQEEEKKRLGREASLITAIPITQEACYEPTCTPNSEPEEEVEEVTNLASRRLSVSPSCTSSTSHRNYSFRRGSVWSVRSAVSAEDEEHTTEHTPNHHVPQPPQAVFPACICAAVLPIVHLMEDGEVREDGVAVSAVAQQVLWNCLIEDPSTVLRHFLEKLTISNRQDELMYMLRKLLLNIGDFPAQTSHILFNYLVGLIMYFVRTPCEWGMDAISATLTFLWEVVGYVEGLFFKDLKQTMKKEQCEVKLLVTASMPGTKTLVVHGQNECDIPTQLPVHEDTQFEALLKECLEFFNIPESQSTHYFLMDKRWNLIHYNKTYVRDIYPFRRSVSPQLNLVHMHPEKGQELIQKQVFTRKLEEVGRVLFLISLTQKIPTAHKQSHVSMLQEDLLRLPSFPRSAIDAEFSLFSDPQDVYLAVKHCQCLLCLTH

SEQ ID NO: 5720 - protein, 2161 aa, Artificial Sequence
  Synthetic polypeptide
MVKRKSSEGQEQDGGRGIPLPIQTFLWRQTSAFLRPKLGKQYEASCVSFERVLVENKLHGLSPALSEAIQSISRWELVQAALPHVLHCTATLLSNRNKLGHQDKLGVAETKLLHTLHWMLLEAPQDCNNERFGGTDRGSSWGGSSSAFIHQVENQGSPGQPCQSSSNDEEENNRRKIFQNSMATVELFVFLFAPLVHRIKESDLTFRLASGLVIWQPMWEHRQPGVSGFTALVKPIRNIITAKRSSPINSQSRTCESPNQDARHLEGLQVVCETFQSDSISPKATISGCHRGNSFDGSLSSQTSQERGPSHSRASLVIPPCQRSRYATYFDVAVLRCLLQPHWSEEGTQWSLMYYLQRLRHMLEEKPEKPPEPDIPLLPRPRSSSMVAAAPSLVNTHKTQDLTMKCNEEEKSLSSEAFSKVSLTNLRRSAVPDLSSDLGMNIFKKFKSRKEDRERKGSIPFHHTGKRRPRRMGVPFLLHEDHLDVSPTRSTFSFGSFSGLGEDRRGIEKGGWQTTILGKLTRRGSSDAATEMESLSARHSHSHHTLVSDLPDPSNSHGENTVKEVRSQISTITVATFNTTLASFNVGYADFFNEHMRKLCNQVPIPEMPHEPLACANLPRSLTDSCINYSYLEDTEHIDGTNNFVHKNGMLDLSVVLKAVYLVLNHDISSRICDVALNIVECLLQLGVVPCVEKNRKKSENKENETLEKRPSEGAFQFKGVSGSSTCGFGGPAVSGAGDGGGEEGGGGDGGGGGGDGGGGGGGGGGPYEKNDKNQEKDESTPVSNHRLALTMLIKIVKSLGCAYGCGEGHRGLSGDRLRHQAQNCLTKLYKLDKMQFRQTMRDYVNKDSLNNVVDFLHALLGFCMEPVTDNKAGFGNNFTTVDNKSTAQNVEGIIVSAMFKSLITRCASTTHELHSPENLGLYCDIRQLVQFIKEAHGNVFRRVALSALLDSAEKLAPGKKVEENEQESKPAGSKRSEAGSIVDKGQVSSAPEECRSFMSGRPSQTPEHDEQMQGANLGRKDFWRKMFKSQSAASDTSSQSEQDTSECTTAHSGTTSDRRARSRSRRISLRKKLKLPIGKRNWLKRSSLSGLADGVEDLLDISSVDRLSFIRQSSKVKFTSAVKLSEGGPGSGMENGRDEEENFFKRLGCHSFDDHLSPNQDGGKSKNVVNLGAIRQGMKRFQFLLNCCEPGTIPDASILAAALDLEAPVVARAALFLECARFVHRCNRGNWPEWMKGHHVNITKKGLSRGRSPIVGNKRNQKLQWNAAKLFYQWGDAIGVRLNELCHGESESPANLLGLIYDEETKRRLRKEDEEEDFLDDSTVNPSKCGCPFALKMAACQLLLEITTFLRETFSCLPRPRTEPLVDLESCRLRLDPELDRHRYERKISFAGVLDENEDSKDSLHSSSHTLKSDAGVEEKKEGSPWSASEPSIEPEGMSNAGAEENYHRNMSWLHVMILLCNQQSFICTHVDYCHPHCYLHHSRSCARLVRAIKLLYGDSVDSLRESSNISSVALRGKKQKECSDKSCLRTPSLKKRVSDANLEGKKDSGMLKYIRLQVMSLSPAPLSLLIKAAPILTEEMYGDIQPAAWELLLSMDEHMAGAAAAMFLLCAVKVPEAVSDMLMSEFHHPETVQRLNAVLKFHTLWRFRYQVWPRMEEGAQQIFKIPPPSINFTLPSPVLGMPSVPMFDPPWVPQCSGSVQDPINEDQSKSFSARAVSRSHQRAEHILKNLQQEEEKKRLGREASLITAIPITQEACYEPTCTPNSEPEEEVEEVTNLASRRLSVSPSCTSSTSHRNYSFRRGSVWSVRSAVSAEDEEHTTEHTPNHHVPQPPQAVFPACICAAVLPIVHLMEDGEVREDGVAVSAVAQQVLWNCLIEDPSTVLRHFLEKLTISNRQDELMYMLRKLLLNIGDFPAQTSHILFNYLVGLIMYFVRTPCEWGMDAISATLTFLWEVVGYVEGLFFKDLKQTMKKEQCEVKLLVTASMPGTKTLVVHGQNECDIPTQLPVHEDTQFEALLKECLEFFNIPESQSTHYFLMDKRWNLIHYNKTYVRDIYPFRRSVSPQLNLVHMHPEKGQELIQKQVFTRKLEEVGRVLFLISLTQKIPTAHKQSHVSMLQEDLLRLPSFPRSAIDAEFSLFSDPQDVYLAVKHCQCLLCLTH

SEQ ID NO: 5721 - protein, 83 aa, Artificial Sequence
  Synthetic polypeptide
MASGCKIGPSILNSDLANLGAECLRMLDSGADYLHLDVMDGPGVVAHTYNPCTSGSQRQRITCGQKFETSLGNSENSSLLKKK

SEQ ID NO: 5722 - protein, 106 aa, Artificial Sequence
  Synthetic polypeptide
MASGCKIGPSILNSDLANLGAECLRMLDSGADYLHLDVMDGHFVPNITFGHPVVESLRKQLGQDPFFGRVWWPIPIIPALREASVRGSLVARSSRPAWETVRTHLY

SEQ ID NO: 5723 - protein, 142 aa, Artificial Sequence
  Synthetic polypeptide
MAQRAFPNPYADYNKSLAEGYFDAAGRLTPEFSQRLTNKIRELLQQMERGLKSADPRDGTGYTGWAGIAVLYLHLYDVFGDPAYLQLAHGYVKQSLNCLTKRSITFLCGDAGPLAVAAVLYHKMNNEKQAEDCITRCSGSHL

SEQ ID NO: 5724 - protein, 865 aa, Artificial Sequence
  Synthetic polypeptide
MPQIIKMTRILTAFKVVRTLKTGFGFTNVTAHQKWKFSRPGIRLLSVKAQTAHIVLEDGTKMKGYSFGHPSSVAGEVVFNTGLGGYPEAITDPAYKGQILTMANPIIGNGGAPDTTALDELGLSKYLESNGIKVSGLLVLDYSKDYNHWLATKSLGQWLQEEKVPAIYGVDTRMLTKIIRDKGTMLGKIEFEGQPVDFVDPNKQNLIAEVSTKDVKVYGKGNPTKVVAVDCGIKNNVIRLLVKRGAEVHLVPWNHDFTKMEYDGILIAGGPGNPALAEPLIQNVRKILESDRKEPLFGISTGNLITGLAAGAKTYKMSMANRGQNQPVLNITNKQAFITAQNHGYALDNTLPAGWKPLFVNVNDQTNEGIMHESKPFFAVQFHPEVTPGPIDTEYLFDSFFSLIKKGKATTITSVLPKPALVASRVEVSKVLILGSGGLSIGQAGEFDYSGSQAVKAMKEENVKTVLMNPNIASVQTNEVGLKQADTVYFLPITPQFVTEVIKAEQPDGLILGMGGQTALNCGVELFKRGVLKEYGVKVLGTSVESIMATEDRQLFSDKLNEINEKIAPSFAVESIEDALKAADTIGYPVMIRSAYALGGLGSGICPNRETLMDLSTKAFAMTNQILVEKSVTGWKEIEYEVVRDADDNCVTVCNMENVDAMGVHTGDSVVVAPAQTLSNAEFQMLRRTSINVVRHLGIVGECNIQFALHPTSMEYCIIEVNARLSRSSALASKATGYPLAFIAAKIALGIPLPEIKNVVSGKTSACFEPSLDYMVTKIPRWDLDRFHGTSSRIGSSMKSVGEVMAIGRTFEESFQKALRMCHPSIEGFTPRLPMNKEWPSNLDLRKELSEPSSTRIYAIAKGHG

SEQ ID NO: 5725 - protein, 859 aa, Artificial Sequence
  Synthetic polypeptide
MTRILTAFKVVRTLKTGFGFTNVTAHQKWKFSRPGIRLLSVKAQTAHIVLEDGTKMKGYSFGHPSSVAGEVVFNTGLGGYPEAITDPAYKGQILTMANPIIGNGGAPDTTALDELGLSKYLESNGIKVSGLLVLDYSKDYNHWLATKSLGQWLQEEKVPAIYGVDTRMLTKIIRDKGTMLGKIEFEGQPVDFVDPNKQNLIAEVSTKDVKVYGKGNPTKVVAVDCGIKNNVIRLLVKRGAEVHLVPWNHDFTKMEYDGILIAGGPGNPALAEPLIQNVRKILESDRKEPLFGISTGNLITGLAAGAKTYKMSMANRGQNQPVLNITNKQAFITAQNHGYALDNTLPAGWKPLFVNVNDQTNEGIMHESKPFFAVQFHPEVTPGPIDTEYLFDSFFSLIKKGKATTITSVLPKPALVASRVEVSKVLILGSGGLSIGQAGEFDYSGSQAVKAMKEENVKTVLMNPNIASVQTNEVGLKQADTVYFLPITPQFVTEVIKAEQPDGLILGMGGQTALNCGVELFKRGVLKEYGVKVLGTSVESIMATEDRQLFSDKLNEINEKIAPSFAVESIEDALKAADTIGYPVMIRSAYALGGLGSGICPNRETLMDLSTKAFAMTNQILVEKSVTGWKEIEYEVVRDADDNCVTVCNMENVDAMGVHTGDSVVVAPAQTLSNAEFQMLRRTSINVVRHLGIVGECNIQFALHPTSMEYCIIEVNARLSRSSALASKATGYPLAFIAAKIALGIPLPEIKNVVSGKTSACFEPSLDYMVTKIPRWDLDRFHGTSSRIGSSMKSVGEVMAIGRTFEESFQKALRMCHPSIEGFTPRLPMNKEWPSNLDLRKELSEPSSTRIYAIAKGHG

SEQ ID NO: 5726 - protein, 408 aa, Artificial Sequence
  Synthetic polypeptide
MKEENVKTVLMNPNIASVQTNEVGLKQADTVYFLPITPQFVTEVIKAEQPDGLILGMGGQTALNCGVELFKRGVLKEYGVKVLGTSVESIMATEDRQLFSDKLNEINEKIAPSFAVESIEDALKAADTIGYPVMIRSAYALGGLGSGICPNRETLMDLSTKAFAMTNQILVEKSVTGWKEIEYEVVRDADDNCVTVCNMENVDAMGVHTGDSVVVAPAQTLSNAEFQMLRRTSINVVRHLGIVGECNIQFALHPTSMEYCIIEVNARLSRSSALASKATGYPLAFIAAKIALGIPLPEIKNVVSGKTSACFEPSLDYMVTKIPRWDLDRFHGTSSRIGSSMKSVGEVMAIGRTFEESFQKALRMCHPSIEGFTPRLPMNKEWPSNLDLRKELSEPSSTRIYAIAKGHG

SEQ ID NO: 5727 - protein, 301 aa, Artificial Sequence
  Synthetic polypeptide
MAAQRGMPSSAVRVLEEALGMGLTAAGDARDTADAVAAEGAYYLEQVTITEASEDDYEYEEIPDDNFSIPEGEEDLAKAIQMAQEQATDTEILERKTVLPSKHAVPEVIEDFLCNFLIKMGMTRTLDCFQSEWYELIQKGVTELRTVGNVPDVYTQIMLLENENKNLKKDLKHYKQAADKAREDLLKIQKERDFHRMHHKRIVQEKNKLINDLKGLKLHYASYEPTIRVLHEKHHTLLKEKMLTSLERDKVVGQISGLQETLKKLQRGHSYHGPQIKVASKRIKYLGIQLTRDVKDLFKEN

SEQ ID NO: 5728 - protein, 270 aa, Artificial Sequence
  Synthetic polypeptide
MGVGTKARASHWRRLLSLGATPEEPLLDFKIPDDNFSIPEGEEDLAKAIQMAQEQATDTEILERKTVLPSKHAVPEVIEDFLCNFLIKMGMTRTLDCFQSEWYELIQKGVTELRTVGNVPDVYTQIMLLENENKNLKKDLKHYKQAADKAREDLLKIQKERDFHRMHHKRIVQEKNKLINDLKGLKLHYASYEPTIRVLHEKHHTLLKEKMLTSLERDKVVGQISGLQETLKKLQRGHSYHGPQIKVASKRIKYLGIQLTRDVKDLFKEN

SEQ ID NO: 5729 - protein, 207 aa, Artificial Sequence
  Synthetic polypeptide
MTMNMKRYQMTILASQKVKKIWQKQFRWPKNRLQILKFWYELIQKGVTELRTVGNVPDVYTQIMLLENENKNLKKDLKHYKQAADKAREDLLKIQKERDFHRMHHKRIVQEKNKLINDLKGLKLHYASYEPTIRVLHEKHHTLLKEKMLTSLERDKVVGQISGLQETLKKLQRGHSYHGPQIKVASKRIKYLGIQLTRDVKDLFKEN

SEQ ID NO: 5730 - protein, 346 aa, Artificial Sequence
  Synthetic polypeptide
MAPGQLALFSVSDKTGLVEFARNLTALGLNLVASGGTAKALRDAGLAVRDVSELTGFPEMLGGRVKTLHPAVHAGILARNIPEDNADMARLDFNLIRVVACNLYPFVKTVASPGVTVEEAVEQIDIGGVTLLRAAAKNHARVTVVCEPEDYVVVSTEMQSSESKDTSLETRRQLALKAFTHTAQYDEAISDYFRKQYSKGVSQMPLRYGMNPHQTPAQLYTLQPKLPITVLNGAPGFINLCDALNAWQLVKELKEALGIPAAASFKHVSPAGAAVGIPLSEDEAKVCMVYDLYKTLTPISAAYARARGRAQCLTPVVPGLWEAEAGRSRGQEIETILANTVKPRLY

SEQ ID NO: 5731 - protein, 287 aa, Artificial Sequence
  Synthetic polypeptide
MLGGRVKTLHPAVHAGILARNIPEDNADMARLDFNLIRVVACNLYPFVKTVASPGVTVEEAVEQIDIGGVTLLRAAAKNHARVTVVCEPEDYVVVSTEMQSSESKDTSLETRRQLALKAFTHTAQYDEAISDYFRKQYSKGVSQMPLRYGMNPHQTPAQLYTLQPKLPITVLNGAPGFINLCDALNAWQLVKELKEALGIPAAASFKHVSPAGAAVGIPLSEDEAKVCMVYDLYKTLTPISAAYARARGRAQCLTPVVPGLWEAEAGRSRGQEIETILANTVKPRLY

SEQ ID NO: 5732 - protein, 345 aa, Artificial Sequence
  Synthetic polypeptide
MSSLSALFSVSDKTGLVEFARNLTALGLNLVASGGTAKALRDAGLAVRDVSELTGFPEMLGGRVKTLHPAVHAGILARNIPEDNADMARLDFNLIRVVACNLYPFVKTVASPGVTVEEAVEQIDIGGVTLLRAAAKNHARVTVVCEPEDYVVVSTEMQSSESKDTSLETRRQLALKAFTHTAQYDEAISDYFRKQYSKGVSQMPLRYGMNPHQTPAQLYTLQPKLPITVLNGAPGFINLCDALNAWQLVKELKEALGIPAAASFKHVSPAGAAVGIPLSEDEAKVCMVYDLYKTLTPISAAYARARGRAQCLTPVVPGLWEAEAGRSRGQEIETILANTVKPRLY

SEQ ID NO: 5733 - protein, 596 aa, Artificial Sequence
  Synthetic polypeptide
MAPGQLALFSVSDKTGLVEFARNLTALGLNLVASGGTAKALRDAGLAVRDVSELTGFPEMLGGRVKTLHPAVHAGILARNIPEDNADMARLDFNLIRVVACNLYPFVKTVASPGVTVEEAVEQIDIGGVTLLRAAAKNHARVTVVCEPEDYVVVSTEMQSSESKDTSLETRRQLALKAFTHTAQYDEAISDYFRKQYSKGVSQMPLRYGMNPHQTPAQLYTLQPKLPITVLNGAPGFINLCDALNAWQLVKELKEALGIPAAASFKHVSPAGAAVGIPLSEDEAKVCMVYDLYKTLTPISAAYARARGADRMSSFGDFVALSDVCDVPTAKIISREVSDGIIAPGYEEEALTILSKKKNGNYCVLQMDQSYKPDENEVRTLFGLHLSQKRNNGVVDKSLFSNVVTKNKDLPESALRDLIVATIAVKYTQSNSVCYAKNGQVIGIGAGQQSRIHCTRLAGDKANYWWLRHHPQVLSMKFKTGVKRAEISNAIDQYVTGTIGEDEDLIKWKALFEEVPELLTEAEKKEWVEKLTEVSISSDAFFPFRDNVDRAKRLNHEKNIRYNLAEGLYKIPSYCQDHQKEKHEKLSCLEGPKEMW

SEQ ID NO: 5734 - protein, 537 aa, Artificial Sequence
  Synthetic polypeptide
MLGGRVKTLHPAVHAGILARNIPEDNADMARLDFNLIRVVACNLYPFVKTVASPGVTVEEAVEQIDIGGVTLLRAAAKNHARVTVVCEPEDYVVVSTEMQSSESKDTSLETRRQLALKAFTHTAQYDEAISDYFRKQYSKGVSQMPLRYGMNPHQTPAQLYTLQPKLPITVLNGAPGFINLCDALNAWQLVKELKEALGIPAAASFKHVSPAGAAVGIPLSEDEAKVCMVYDLYKTLTPISAAYARARGADRMSSFGDFVALSDVCDVPTAKIISREVSDGIIAPGYEEEALTILSKKKNGNYCVLQMDQSYKPDENEVRTLFGLHLSQKRNNGVVDKSLFSNVVTKNKDLPESALRDLIVATIAVKYTQSNSVCYAKNGQVIGIGAGQQSRIHCTRLAGDKANYWWLRHHPQVLSMKFKTGVKRAEISNAIDQYVTGTIGEDEDLIKWKALFEEVPELLTEAEKKEWVEKLTEVSISSDAFFPFRDNVDRAKRLNHEKNIRYNLAEGLYKIPSYCQDHQKEKHEKLSCLEGPKEMW

SEQ ID NO: 5735 - protein, 595 aa, Artificial Sequence
  Synthetic polypeptide
MSSLSALFSVSDKTGLVEFARNLTALGLNLVASGGTAKALRDAGLAVRDVSELTGFPEMLGGRVKTLHPAVHAGILARNIPEDNADMARLDFNLIRVVACNLYPFVKTVASPGVTVEEAVEQIDIGGVTLLRAAAKNHARVTVVCEPEDYVVVSTEMQSSESKDTSLETRRQLALKAFTHTAQYDEAISDYFRKQYSKGVSQMPLRYGMNPHQTPAQLYTLQPKLPITVLNGAPGFINLCDALNAWQLVKELKEALGIPAAASFKHVSPAGAAVGIPLSEDEAKVCMVYDLYKTLTPISAAYARARGADRMSSFGDFVALSDVCDVPTAKIISREVSDGIIAPGYEEEALTILSKKKNGNYCVLQMDQSYKPDENEVRTLFGLHLSQKRNNGVVDKSLFSNVVTKNKDLPESALRDLIVATIAVKYTQSNSVCYAKNGQVIGIGAGQQSRIHCTRLAGDKANYWWLRHHPQVLSMKFKTGVKRAEISNAIDQYVTGTIGEDEDLIKWKALFEEVPELLTEAEKKEWVEKLTEVSISSDAFFPFRDNVDRAKRLNHEKNIRYNLAEGLYKIPSYCQDHQKEKHEKLSCLEGPKEMW

SEQ ID NO: 5736 - protein, 6 aa, Artificial Sequence
  Synthetic polypeptide
NIFAGI

SEQ ID NO: 5737 - protein, 111 aa, Artificial Sequence
  Synthetic polypeptide
RARWLMPIIPALWEAEDEDLIKWKALFEEVPELLTEAEKKEWVEKLTEVSISSDAFFPFRDNVDRAKRLNHEKNIRYNLAEGLYKIPSYCQDHQKEKHEKLSCLEGPKEMW

SEQ ID NO: 5738 - protein, 1329 aa, Artificial Sequence
  Synthetic polypeptide
MLRGPGPGLLLLAVQCLGTAVPSTGASKSKRQAQQMVQPQSPVAVSQSKPGCYDNGKHYQINQQWERTYLGNALVCTCYGGSRGFNCESKPEAEETCFDKYTGNTYRVGDTYERPKDSMIWDCTCIGAGRGRISCTIANRCHEGGQSYKIGDTWRRPHETGGYMLECVCLGNGKGEWTCKPIAEKCFDHAAGTSYVVGETWEKPYQGWMMVDCTCLGEGSGRITCTSRNRCNDQDTRTSYRIGDTWSKKDNRGNLLQCICTGNGRGEWKCERHTSVQTTSSGSGPFTDVRAAVYQPQPHPQPPPYGHCVTDSGVVYSVGMQWLKTQGNKQMLCTCLGNGVSCQETAVTQTYGGNSNGEPCVLPFTYNGRTFYSCTTEGRQDGHLWCSTTSNYEQDQKYSFCTDHTVLVQTRGGNSNGALCHFPFLYNNHNYTDCTSEGRRDNMKWCGTTQNYDADQKFGFCPMAAHEEICTTNEGVMYRIGDQWDKQHDMGHMMRCTCVGNGRGEWTCIAYSQLRDQCIVDDITYNVNDTFHKRHEEGHMLNCTCFGQGRGRWKCDPVDQCQDSETGTFYQIGDSWEKYVHGVRYQCYCYGRGIGEWHCQPLQTYPSSSGPVEVFITETPSQPNSHPIQWNAPQPSHISKYILRWRPKNSVGRWKEATIPGHLNSYTIKGLKPGVVYEGQLISIQQYGHQEVTRFDFTTTSTSTPVTSNTVTGETTPFSPLVATSESVTEITASSFVVSWVSASDTVSGFRVEYELSEEGDEPQYLDLPSTATSVNIPDLLPGRKYIVNVYQISEDGEQSLILSTSQTTAPDAPPDTTVDQVDDTSIVVRWSRPQAPITGYRIVYSPSVEGSSTELNLPETANSVTLSDLQPGVQYNITIYAVEENQESTPVVIQQETTGTPRSDTVPSPRDLQFVEVTDVKVTIMWTPPESAVTGYRVDVIPVNLPGEHGQRLPISRNTFAEVTGLSPGVTYYFKVFAVSHGRESKPLTAQQTTKLDAPTNLQFVNETDSTVLVRWTPPRAQITGYRLTVGLTRRGQPRQYNVGPSVSKYPLRNLQPASEYTVSLVAIKGNQESPKATGVFTTLQPGSSIPPYNTEVTETTIVITWTPAPRIGFKLGVRPSQGGEAPREVTSDSGSIVVSGLTPGVEYVYTIQVLRDGQERDAPIVNKVVTPLSPPTNLHLEANPDTGVLTVSWERSTTPDITGYRITTTPTNGQQGNSLEEVVHADQSSCTFDNLSPGLEYNVSVYTVKDDKESVPISDTIIPAVPPPTDLRFTNIGPDTMRVTWAPPPSIDLTNFLVRYSPVKNEEDVAELSISPSDNAVVLTRLL

SEQ ID NO: 5739 - protein, 1420 aa, Artificial Sequence
  Synthetic polypeptide
MLRGPGPGLLLLAVQCLGTAVPSTGASKSKRQAQQMVQPQSPVAVSQSKPGCYDNGKHYQINQQWERTYLGNALVCTCYGGSRGFNCESKPEAEETCFDKYTGNTYRVGDTYERPKDSMIWDCTCIGAGRGRISCTIANRCHEGGQSYKIGDTWRRPHETGGYMLECVCLGNGKGEWTCKPIAEKCFDHAAGTSYVVGETWEKPYQGWMMVDCTCLGEGSGRITCTSRNRCNDQDTRTSYRIGDTWSKKDNRGNLLQCICTGNGRGEWKCERHTSVQTTSSGSGPFTDVRAAVYQPQPHPQPPPYGHCVTDSGVVYSVGMQWLKTQGNKQMLCTCLGNGVSCQETAVTQTYGGNSNGEPCVLPFTYNGRTFYSCTTEGRQDGHLWCSTTSNYEQDQKYSFCTDHTVLVQTRGGNSNGALCHFPFLYNNHNYTDCTSEGRRDNMKWCGTTQNYDADQKFGFCPMAAHEEICTTNEGVMYRIGDQWDKQHDMGHMMRCTCVGNGRGEWTCIAYSQLRDQCIVDDITYNVNDTFHKRHEEGHMLNCTCFGQGRGRWKCDPVDQCQDSETGTFYQIGDSWEKYVHGVRYQCYCYGRGIGEWHCQPLQTYPSSSGPVEVFITETPSQPNSHPIQWNAPQPSHISKYILRWRPKNSVGRWKEATIPGHLNSYTIKGLKPGVVYEGQLISIQQYGHQEVTRFDFTTTSTSTPVTSNTVTGETTPFSPLVATSESVTEITASSFVVSWVSASDTVSGFRVEYELSEEGDEPQYLDLPSTATSVNIPDLLPGRKYIVNVYQISEDGEQSLILSTSQTTAPDAPPDTTVDQVDDTSIVVRWSRPQAPITGYRIVYSPSVEGSSTELNLPETANSVTLSDLQPGVQYNITIYAVEENQESTPVVIQQETTGTPRSDTVPSPRDLQFVEVTDVKVTIMWTPPESAVTGYRVDVIPVNLPGEHGQRLPISRNTFAEVTGLSPGVTYYFKVFAVSHGRESKPLTAQQTTKLDAPTNLQFVNETDSTVLVRWTPPRAQITGYRLTVGLTRRGQPRQYNVGPSVSKYPLRNLQPASEYTVSLVAIKGNQESPKATGVFTTLQPGSSIPPYNTEVTETTIVITWTPAPRIGFKLGVRPSQGGEAPREVTSDSGSIVVSGLTPGVEYVYTIQVLRDGQERDAPIVNKVVTPLSPPTNLHLEANPDTGVLTVSWERSTTPDITGYRITTTPTNGQQGNSLEEVVHADQSSCTFDNLSPGLEYNVSVYTVKDDKESVPISDTIIPEVPQLTDLSFVDITDSSIGLRWTPLNSSTIIGYRITVVAAGEGIPIFEDFVDSSVGYYTVTGLEPGIDYDISVITLINGGESAPTTLTQQTAVPPPTDLRFTNIGPDTMRVTWAPPPSIDLTNFLVRYSPVKNEEDVAELSISPSDNAVVLTRLL

SEQ ID NO: 5740 - protein, 136 aa, Artificial Sequence
  Synthetic polypeptide
MRWTPLNSSTIIGYRITVVAAGEGIPIFEDFVDSSVGYYTVTGLEPGIDYDISVITLINGGESAPTTLTQQTAVPPPTDLRFTNIGPDTMRVTWAPPPSIDLTNFLVRYSPVKNEEDVAELSISPSDNAVVLTRLL

SEQ ID NO: 5741 - protein, 1101 aa, Artificial Sequence
  Synthetic polypeptide
MLRGPGPGLLLLAVQCLGTAVPSTGASKSKRQAQQMVQPQSPVAVSQSKPGCYDNGKHYQINQQWERTYLGNALVCTCYGGSRGFNCESKPEAEETCFDKYTGNTYRVGDTYERPKDSMIWDCTCIGAGRGRISCTIANRCHEGGQSYKIGDTWRRPHETGGYMLECVCLGNGKGEWTCKPIAEKCFDHAAGTSYVVGETWEKPYQGWMMVDCTCLGEGSGRITCTSRNRCNDQDTRTSYRIGDTWSKKDNRGNLLQCICTGNGRGEWKCERHTSVQTTSSGSGPFTDVRAAVYQPQPHPQPPPYGHCVTDSGVVYSVGMQWLKTQGNKQMLCTCLGNGVSCQETAVTQTYGGNSNGEPCVLPFTYNGRTFYSCTTEGRQDGHLWCSTTSNYEQDQKYSFCTDHTVLVQTRGGNSNGALCHFPFLYNNHNYTDCTSEGRRDNMKWCGTTQNYDADQKFGFCPMAAHEEICTTNEGVMYRIGDQWDKQHDMGHMMRCTCVGNGRGEWTCIAYSQLRDQCIVDDITYNVNDTFHKRHEEGHMLNCTCFGQGRGRWKCDPVDQCQDSETGTFYQIGDSWEKYVHGVRYQCYCYGRGIGEWHCQPLQTYPSSSGPVEVFITETPSQPNSHPIQWNAPQPSHISKYILRWRPKNSVGRWKEATIPGHLNSYTIKGLKPGVVYEGQLISIQQYGHQEVTRFDFTTTSTSTPVTSNTVTGETTPFSPLVATSESVTEITASSFVVSWVSASDTVSGFRVEYELSEEGDEPQYLDLPSTATSVNIPDLLPGRKYIVNVYQISEDGEQSLILSTSQTTAPDAPPDTTVDQVDDTSIVVRWSRPQAPITGYRIVYSPSVEGSSTELNLPETANSVTLSDLQPGVQYNITIYAVEENQESTPVVIQQETTGTPRSDTVPSPRDLQFVEVTDVKVTIMWTPPESAVTGYRVDVIPVNLPGEHGQRLPISRNTFAEVTGLSPGVTYYFKVFAVSHGRESKPLTAQQTTKLDAPTNLQFVNETDSTVLVRWTPPRAQITGYRLTVGLTRRGQPRQYNVGPSVSKYPLRNLQPASEYTVSLVAIKGNQESPKATGVFTTRVMAHACNSSTLGGRGG

SEQ ID NO: 5742 - protein, 73 aa, Artificial Sequence
  Synthetic polypeptide
MAKRTKKVGIVGKYGTRYGASLRKMVKKIEISQHAKYTCSFCGKTKMKRRAVGIWHCEDLAHRKSWNQTCFIN

SEQ ID NO: 5743 - protein, 49 aa, Artificial Sequence
  Synthetic polypeptide
MVKKIEISQHAKYTCSFCGKTKMKRRAVGIWHCEDLAHRKSWNQTCFIN

SEQ ID NO: 5744 - protein, 105 aa, Artificial Sequence
  Synthetic polypeptide
MILLEVNNRIIEETLALKFENAAAGNKPEAVEVTFADFDGVLYHISNPNGDKTKVMVSISLKFYKELQAHGADELLKRVYGSFLVNPESGAVAHTCNPSTLGRPR

SEQ ID NO: 5745 - protein, 32 aa, Artificial Sequence
  Synthetic polypeptide
MHSLATAAGRDRDHVSPVDVVSPVPGQFLVQD

SEQ ID NO: 5746 - protein, 16 aa, Artificial Sequence
  Synthetic polypeptide
MHSLATAAGQGSCEPC

SEQ ID NO: 5747 - protein, 34 aa, Artificial Sequence
  Synthetic polypeptide
MHSLATAAAAVSHDHATALQLRRHSETLSQRKKK

SEQ ID NO: 5748 - protein, 405 aa, Artificial Sequence
  Synthetic polypeptide
MASLLQDQLTTDQDLLLMQEGMPMRKVRSKSWKKLRYFRLQNDGMTVWHARQARGSAKPSFSISDVETIRNGHDSELLRSLAEELPLEQGFTIVFHGRRSNLDLMANSVEEAQIWMRGLQLLVDLVTSMDHQERLDQWLSDWFQRGDKNQDGKMSFQEVQRLLHLMNVEMDQEYAFSLFQAADTSQSGTLEGEEFVQFYKALTKRAEVQELFESFSADGQKLTLLEFLDFLQEEQKERDCTSELALELIDRYEPSDSGKLRHVLSMDGFLSYLCSKDGDIFNPACLPIYQDMTQPLNHYFICSSHNTYLVGDQLCGQSSVEGYIRALKRGCRCVEVDVWDGPSGEPVVYHGHTLTSRILFKDVVATVAQYAFQEAEVCSEPRSHQCTPAWAARVKLHLKKQNKTK

SEQ ID NO: 5749 - protein, 103 aa, Artificial Sequence
  Synthetic polypeptide
MPTVSVKRDLLFQALGRTYTDEEFDELCFEFGLELDEIFWLPAANCGLKIGEYSTIRNSETERDYIHITLIIVYYFNCSILLLVVNLLLCLIYKLNFFIGMYV

SEQ ID NO: 5750 - protein, 56 aa, Artificial Sequence
  Synthetic polypeptide
MPTVSVKRDLLFQALGRTYTDEEFDELCFEFGLELDEIFFASTVLVTCSKLWFENR

SEQ ID NO: 5751 - protein, 57 aa, Artificial Sequence
  Synthetic polypeptide
MHFLTIYPNCSSGVVRAQSRTEQKNPLGLDDLGIQNLGQTVSLGEIWRHAPGRMACE

SEQ ID NO: 5752 - protein, 231 aa, Artificial Sequence
  Synthetic polypeptide
MASGLVRLLQQGHRCLLAPVAPKLVPPVRGVKKGFRAAFRFQKELERQRLLRCPPPPVRRSEKPNWDYHAEIQAFGHRLQENFSLDLLKTAFVNSCYIKSEEAKRQQLGIEKEAVLLNLKSNQELSEQGTSFSQTCLTQFLEDEYPDMPTEGIKNLVDFLTGEEVVCHVARNLAVEQLTLSEEFPVPPAVLQQTFFAVIGALLQSSGPERTALFIRGQGYCLHERYSVDVW

SEQ ID NO: 5753 - protein, 726 aa, Artificial Sequence
  Synthetic polypeptide
MSNLSKGTGSRKDTKMRIRAFPMTMDEKYVNSIWDLLKNAIQEIQRKNNSGLSFEELYRNAYTMVLHKHGEKLYTGLREVVTEHLINKVREDVLNSLNNNFLQTLNQAWNDHQTAMVMIRDILMYMDRVYVQQNNVENVYNLGLIIFRDQVVRYGCIRDHLRQTLLDMIARERKGEVVDRGAIRNACQMLMILGLEGRSVYEEDFEAPFLEMSAEFFQMESQKFLAENSASVYIKKVEARINEEIERVMHCLDKSTEEPIVKVVERELISKHMKTIVEMENSGLVHMLKNGKTEDLGCMYKLFSRVPNGLKTMCECMSSYLREQGKALVSEEGEGKNPVDYIQGLLDLKSRFDRFLLESFNNDRLFKQTIAGDFEYFLNLNSRSPEYLSLFIDDKLKKGVKGLTEQEVETILDKAMVLFRFMQEKDVFERYYKQHLARRLLTNKSVSDDSEKNMISKLKTECGCQFTSKLEGMFRDMSISNTTMDEFRQHLQATGVSLGGVDLTVRVLTTGYWPTQSATPKCNIPPAPRHAFEIFRRFYLAKHSGRQLTLQHHMGSADLNATFYGPVKKEDGSEVGVGGAQVTGSNTRKHILQVSTFQMTILMLFNNREKYTFEEIQQETDIPERELVRALQSLACGKPTQRVLTKEPKSKEIENGHIFTVNDQFTSKLHRVKIQTVAAKQGESDPERKETRQKVDDDRKHEIEAAIVRIMKSRKKMQHNVLVAEG

SEQ ID NO: 5754 - protein, 660 aa, Artificial Sequence
  Synthetic polypeptide
MSNLSKGTGSRKDTKMRIRAFPVREDVLNSLNNNFLQTLNQAWNDHQTAMVMIRDILMYMDRVYVQQNNVENVYNLGLIIFRDQVVRYGCIRDHLRQTLLDMIARERKGEVVDRGAIRNACQMLMILGLEGRSVYEEDFEAPFLEMSAEFFQMESQKFLAENSASVYIKKVEARINEEIERVMHCLDKSTEEPIVKVVERELISKHMKTIVEMENSGLVHMLKNGKTEDLGCMYKLFSRVPNGLKTMCECMSSYLREQGKALVSEEGEGKNPVDYIQGLLDLKSRFDRFLLESFNNDRLFKQTIAGDFEYFLNLNSRSPEYLSLFIDDKLKKGVKGLTEQEVETILDKAMVLFRFMQEKDVFERYYKQHLARRLLTNKSVSDDSEKNMISKLKTECGCQFTSKLEGMFRDMSISNTTMDEFRQHLQATGVSLGGVDLTVRVLTTGYWPTQSATPKCNIPPAPRHAFEIFRRFYLAKHSGRQLTLQHHMGSADLNATFYGPVKKEDGSEVGVGGAQVTGSNTRKHILQVSTFQMTILMLFNNREKYTFEEIQQETDIPERELVRALQSLACGKPTQRVLTKEPKSKEIENGHIFTVNDQFTSKLHRVKIQTVAAKQGESDPERKETRQKVDDDRKHEIEAAIVRIMKSRKKMQHNVLVAEG

SEQ ID NO: 5755 - protein, 702 aa, Artificial Sequence
  Synthetic polypeptide
MDEKYVNSIWDLLKNAIQEIQRKNNSGLSFEELYRNAYTMVLHKHGEKLYTGLREVVTEHLINKVREDVLNSLNNNFLQTLNQAWNDHQTAMVMIRDILMYMDRVYVQQNNVENVYNLGLIIFRDQVVRYGCIRDHLRQTLLDMIARERKGEVVDRGAIRNACQMLMILGLEGRSVYEEDFEAPFLEMSAEFFQMESQKFLAENSASVYIKKVEARINEEIERVMHCLDKSTEEPIVKVVERELISKHMKTIVEMENSGLVHMLKNGKTEDLGCMYKLFSRVPNGLKTMCECMSSYLREQGKALVSEEGEGKNPVDYIQGLLDLKSRFDRFLLESFNNDRLFKQTIAGDFEYFLNLNSRSPEYLSLFIDDKLKKGVKGLTEQEVETILDKAMVLFRFMQEKDVFERYYKQHLARRLLTNKSVSDDSEKNMISKLKTECGCQFTSKLEGMFRDMSISNTTMDEFRQHLQATGVSLGGVDLTVRVLTTGYWPTQSATPKCNIPPAPRHAFEIFRRFYLAKHSGRQLTLQHHMGSADLNATFYGPVKKEDGSEVGVGGAQVTGSNTRKHILQVSTFQMTILMLFNNREKYTFEEIQQETDIPERELVRALQSLACGKPTQRVLTKEPKSKEIENGHIFTVNDQFTSKLHRVKIQTVAAKQGESDPERKETRQKVDDDRKHEIEAAIVRIMKSRKKMQHNVLVAEG

SEQ ID NO: 5756 - protein, 29 aa, Artificial Sequence
  Synthetic polypeptide
MSNLSKGTGSRKDTKMRIRAFPWKTVNLE

SEQ ID NO: 5757 - protein, 645 aa, Artificial Sequence
  Synthetic polypeptide
MISSKMMSSNPEEDPLDTFLQYIEDMGMKAYDGLVIQNASDIARENDRLRNETNLAYLKEKNEKRRRQEEAIKRIGGEVGRGHEGSYVGKHFRMGFMTMPAPQDRLPHPCSSGFSVRSQSLHSVGGTDDDSSCGSRRQPPPKPKRDPSTKLSTSSETVSSTAASKSGKTPERTEASAKPRPHSDEYSKKIPPPKPKRNPNTQLSTSFDETYIKKHGPRRTSLPRDSSLSQMGSPAGDPEEEEPVYIEMVGNILRDFRKEDDDQSEAVYEEMKYPIFDDLGQDAKCDFDHHSCSSQCATPTVPDLDFAKASVPCPPKGLLCDIPPPFPNLLSHRPPLLVFPPAPVHCSPNSDESPLTPLEVTKLPVLENVSYMKQPAGASPSTLPSHVPGHAKLEKEQAAALGPASATPALSSSPPPPSTLYRTQSPHGYPKSHSTSPSPVSMGRSLTPLSLKRPPPYDAVHSGSLSRSSPSVPHSTPRPVSQDGAKMVNAAVNTYGAAPGGSRSRTPTSPLEELTSLFSSGRSLLRKSSSGRRSKEPAEKSTEELKVRSHSTEPLPKLDNKERGHHGASSSREPVKAQEWDGTPGTPVVTSRLGRCSVSPTLLAGNHSSEPKVSCKLGRSASTSGVPPPSVTPLRQSSDLQQSQI

SEQ ID NO: 5758 - protein, 79 aa, Artificial Sequence
  Synthetic polypeptide
MWQPATERLQTQKRHREGHCEDQGRNRSYGIISQGMPRIAGNHLMLEESRTCSSPELLDGVWPCQPLHFGLPASEMVRD

SEQ ID NO: 5759 - protein, 554 aa, Artificial Sequence
  Synthetic polypeptide
MFTMTRAMEEALFQHFMHQKLGIAYAIHKPFPFFEGLLDNSIITKRMYMESLEACRNLIPVSRVVHNILTQLERTFNLSLLVTLFSQINLREYPNLVTIYRSFKRVGASYEWQSRDTPILLEAPTGLAEGSSLHTPLALPPPQPPQPSCSPCAPRVSEPGTSSQQSDEILSESPSPSDPVLPLPALIQEGRSTSVTNDKLTSKMNAEEDSEEMPSLLTSTVQVASDNLIPQIRDKEDPQEMPHSPLGSMPEIRDNSPEPNDPEEPQEVSSTPSDKKGKKRKRCIWSTPKRRHKKKSLPGGTASSRHGIQKKLKRVDQVPQKKDDSTCNSTVETRAQKARTECARKSRSEEIIDGTSEMNEGKRSQKTPSTPRRVTQGAASPGHGIQEKLQVVDKVTQRKDDSTWNSEVMMRVQKARTKCARKSRLKEKKKEKDICSSSKRRFQKNIHRRGKPKSDTVDFHCSKLPVTCGEAKGILYKKKMKHGSSVKCIRNEDGTWLTPNEFEVEGKGRNAKNWKRNIRCEGMTLGELLKEWWCAPVVPAKAEVGGLLEPRSSR

SEQ ID NO: 5760 - protein, 552 aa, Artificial Sequence
  Synthetic polypeptide
MFTMTRAMEEALFQHFMHQKLGIAYAIHKPFPFFEGLLDNSIITKRMYMESLEACRNLIPVSRVVHNILTQLERTFNLSLLVTLFSQINLREYPNLVTIYRSFKRVGASYEWQSRDTPILLEAPTGLAEGSSLHTPLALPPPQPPQPSCSPCAPRVSEPGTSSQQSDEILSESPSPSDPVLPLPALIQEGRSTSVTNDKLTSKMNAEEDSEEMPSLLTSTVQVASDNLIPQIRDKEDPQEMPHSPLGSMPEIRDNSPEPNDPEEPQEVSSTPSDKKGKKRKRCIWSTPKRRHKKKSLPGASSRHGIQKKLKRVDQVPQKKDDSTCNSTVETRAQKARTECARKSRSEEIIDGTSEMNEGKRSQKTPSTPRRVTQGAASPGHGIQEKLQVVDKVTQRKDDSTWNSEVMMRVQKARTKCARKSRLKEKKKEKDICSSSKRRFQKNIHRRGKPKSDTVDFHCSKLPVTCGEAKGILYKKKMKHGSSVKCIRNEDGTWLTPNEFEVEGKGRNAKNWKRNIRCEGMTLGELLKEWWCAPVVPAKAEVGGLLEPRSSR

SEQ ID NO: 5761 - protein, 560 aa, Artificial Sequence
  Synthetic polypeptide
MGRGFRMFTMTRAMEEALFQHFMHQKLGIAYAIHKPFPFFEGLLDNSIITKRMYMESLEACRNLIPVSRVVHNILTQLERTFNLSLLVTLFSQINLREYPNLVTIYRSFKRVGASYEWQSRDTPILLEAPTGLAEGSSLHTPLALPPPQPPQPSCSPCAPRVSEPGTSSQQSDEILSESPSPSDPVLPLPALIQEGRSTSVTNDKLTSKMNAEEDSEEMPSLLTSTVQVASDNLIPQIRDKEDPQEMPHSPLGSMPEIRDNSPEPNDPEEPQEVSSTPSDKKGKKRKRCIWSTPKRRHKKKSLPGGTASSRHGIQKKLKRVDQVPQKKDDSTCNSTVETRAQKARTECARKSRSEEIIDGTSEMNEGKRSQKTPSTPRRVTQGAASPGHGIQEKLQVVDKVTQRKDDSTWNSEVMMRVQKARTKCARKSRLKEKKKEKDICSSSKRRFQKNIHRRGKPKSDTVDFHCSKLPVTCGEAKGILYKKKMKHGSSVKCIRNEDGTWLTPNEFEVEGKGRNAKNWKRNIRCEGMTLGELLKEWWCAPVVPAKAEVGGLLEPRSSR

SEQ ID NO: 5762 - protein, 256 aa, Artificial Sequence
  Synthetic polypeptide
MPEIRDNSPEPNDPEEPQEVSSTPSDKKGKKRKRCIWSTPKRRHKKKSLPGEIIDGTSEMNEGKRSQKTPSTPRRVTQGAASPGHGIQEKLQVVDKVTQRKDDSTWNSEVMMRVQKARTKCARKSRLKEKKKEKDICSSSKRRFQKNIHRRGKPKSDTVDFHCSKLPVTCGEAKGILYKKKMKHGSSVKCIRNEDGTWLTPNEFEVEGKGRNAKNWKRNIRCEGMTLGELLKEWWCAPVVPAKAEVGGLLEPRSSR

SEQ ID NO: 5763 - protein, 326 aa, Artificial Sequence
  Synthetic polypeptide
MFTMTRAMEEALFQHFMHQKLGIAYAIHKPFPFFEGLLDNSIITKRMYMESLEACRNLIPVSRVVHNILTQLERTFNLSLLVTLFSQINLREYPNLVTIYRSFKRVGASYEWQSRDTPILLEAPTGLAEGSSLHTPLALPPPQPPQPSCSPCAPRVSEPGTSSQQSDEILSESPSPSDPVLPLPALIQEGRSTSVTNDKLTSKMNAEEDSEEMPSLLTSTVQVASDNLIPQIRDKEDPQEMPHSPLGSMPEIRDNSPEPNDPEEPQEVSSTPSDKKELSGKSWKTLLTYFLYTASESQQCWREFHSRAECTHWSSWFQHKSSLLTV

SEQ ID NO: 5764 - protein, 332 aa, Artificial Sequence
  Synthetic polypeptide
MGRGFRMFTMTRAMEEALFQHFMHQKLGIAYAIHKPFPFFEGLLDNSIITKRMYMESLEACRNLIPVSRVVHNILTQLERTFNLSLLVTLFSQINLREYPNLVTIYRSFKRVGASYEWQSRDTPILLEAPTGLAEGSSLHTPLALPPPQPPQPSCSPCAPRVSEPGTSSQQSDEILSESPSPSDPVLPLPALIQEGRSTSVTNDKLTSKMNAEEDSEEMPSLLTSTVQVASDNLIPQIRDKEDPQEMPHSPLGSMPEIRDNSPEPNDPEEPQEVSSTPSDKKELSGKSWKTLLTYFLYTASESQQCWREFHSRAECTHWSSWFQHKSSLLTV

SEQ ID NO: 5765 - protein, 78 aa, Artificial Sequence
  Synthetic polypeptide
MPEIRDNSPEPNDPEEPQEVSSTPSDKKELSGKSWKTLLTYFLYTASESQQCWREFHSRAECTHWSSWFQHKSSLLTV

SEQ ID NO: 5766 - protein, 242 aa, Artificial Sequence
  Synthetic polypeptide
MVAEIQNVEGQNLQEQVCPEPIFRFFRENKVEIASAITRPFPFLMGLRDRSFISEQMYEHFQEAFRNLVPVTRVMYCVLSELEKTFGWSHLEALFSRINLMAYPDLNEIYRSFQNVCYEHSPLQMNNVNDLEDRPRLLPYGKQENSNACHEMDDIAVPQEALSSSPRCEPGFSSESCEQLALPKAGGGDAEDAPSLLPGGGVSCKLAIQIDEGESEEMPKLLPYDTEGTSIQDTSKSTYHLS

SEQ ID NO: 5767 - protein, 262 aa, Artificial Sequence [sequence omitted]

SEQ ID NO: 5768 - protein, 259 aa, Artificial Sequence
  Synthetic polypeptide
MAQQGQQGQMASGDSNLNFRMVAEIQNVEGQNLQEQVCPEPIFRFFRENKVEIASAITRPFPFLMGLRDRSFISEQMYEHFQEAFRNLVPVTRVMYCVLSELEKTFGWSHLEALFSRINLMAYPDLNEIYRSFQNVCYEHSPLQMNNVNDLEDRPRLLPYGKQENSNACHEMDDIAVPQEALSSSPRCEPGFSSESCEQLALPKAGGGDAEDAPSLLPVSCKLAIQIDEGESEEMPKLLPYDTEGTSIQDTSKSTYHLS

SEQ ID NO: 5769 - protein, 561 aa, Artificial Sequence
  Synthetic polypeptide
MVAEIQNVEGQNLQEQVCPEPIFRFFRENKVEIASAITRPFPFLMGLRDRSFISEQMYEHFQEAFRNLVPVTRVMYCVLSELEKTFGWSHLEALFSRINLMAYPDLNEIYRSFQNVCYEHSPLQMNNVNDLEDRPRLLPYGKQENSNACHEMDDIAVPQEALSSSPRCEPGFSSESCEQLALPKAGGGDAEDAPSLLPGGGVSCKLAIQIDEGESEEMPKLLPYDTEETFDLKTPQVTNEGEPEKGLCLLPGEGEEGSDDCSEMCDGEERQEASSSLARRGSVSSELENHPMNEEGESEELASSLLYDNVPGAEQSAYENEKCSCVMCFSEEVPGSPEARTESDQACGTMDTVDIANNSTLGKPKRKRRKKRGHGWSRMRMRRQENSQQNDNSKADGQVVSSEKKANVNLKDLSKIRGRKRGKPGTRFTQSDRAAQKRVRSRASRKHKDETVDFKAPLLPVTCGGVKGILHKKKLQQGILVKCIQTEDGKWFTPTEFEIKGGHARSKNWRLSVRCGGWPLRWLMENGFLPDPPRIRYRKKKRILKSQNNSSVDPCMDRTAC

SEQ ID NO: 5770 - protein, 616 aa, Artificial Sequence
  Synthetic polypeptide
MAQQGQQGQMASGDSNLNFRMVAEIQNVEGQNLQEQVCPEPIFRFFRENKVEIASAITRPFPFLMGLRDRSFISEQMYEHFQEAFRNLVPVTRVMYCVLSELEKTFGWSHLEALFSRINLMAYPDLNEIYRSFQNVCYEHSPLQMNNVNDLEDRPRLLPYGKQENSNACHEMDDIAVPQEALSSSPRCEPGFSSESCEQLALPKAGGGDAEDAPSLLPGGGETFDLKTPQVTNEGEPEKGLCLLPGEGEEGSDDCSEMCDGEEPQEASSSLARCGSVSCLSAETFDLKTPQVTNEGEPEKELSLLPGEGEEGSDDCSEMCDGEERQEASSSLARRGSVSSELENHPMNEEGESEELASSLLYDNVPGAEQSAYENEKCSCVMCFSEEVPGSPEARTESDQACGTMDTVDIANNSTLGKPKRKRRKKRGHGWSRMRMRRQENSQQNDNSKADGQVVSSEKKANVNLKDLSKIRGRKRGKPGTRFTQSDRAAQKRVRSRASRKHKDETVDFKAPLLPVTCGGVKGILHKKKLQQGILVKCIQTEDGKWFTPTEFEIKGGHARSKNWRLSVRCGGWPLRWLMENGFLPDPPRIRYRKKKRILKSQNNSSVDPCMDRTAC

SEQ ID NO: 5771 - protein, 692 aa, Artificial Sequence
  Synthetic polypeptide
MAQQGQQGQMASGDSNLNFRMVAEIQNVEGQNLQEQVCPEPIFRFFRENKVEIASAITRPFPFLMGLRDRSFISEQMYEHFQEAFRNLVPVTRVMYCVLSELEKTFGWSHLEALFSRINLMAYPDLNEIYRSFQNVCYEHSPLQMNNVNDLEDRPRLLPYGKQENSNACHEMDDIAVPQEALSSSPRCEPGFSSESCEQLALPKAGGGDAEDAPSLLPGGGVSCKLAIQIDEGESEEMPKLLPYDTEVLESNGMIDAARTYSTAPGEKQGEEEGRNSPRKRNQDKEKYQESPEGRDKETFDLKTPQVTNEGEPEKGLCLLPGEGEEGSDDCSEMCDGEEPQEASSSLARCGSVSCLSAETFDLKTPQVTNEGEPEKELSLLPGEGEEGSDDCSEMCDGEERQEASSSLARRGSVSSELENHPMNEEGESEELASSLLYDNVPGAEQSAYENEKCSCVMCFSEEVPGSPEARTESDQACGTMDTVDIANNSTLGKPKRKRRKKRGHGWSRMRMRRQENSQQNDNSKADGQVVSSEKKANVNLKDLSKIRGRKRGKPGTRFTQSDRAAQKRVRSRASRKHKDETVDFKAPLLPVTCGGVKGILHKKKLQQGILVKCIQTEDGKWFTPTEFEIKGGHARSKNWRLSVRCGGWPLRWLMENGFLPDPPRIRYRKKKRILKSQNNSSVDPCMDRTAC

SEQ ID NO: 5772 - protein, 578 aa, Artificial Sequence
  Synthetic polypeptide
MAQQGQQGQMASGDSNLNFRMVAEIQNVEGQNLQEQVCPEPIFRFFRENKVEIASAITRPFPFLMGLRDRSFISEQMYEHFQEAFRNLVPVTRVMYCVLSELEKTFGWSHLEALFSRINLMAYPDLNEIYRSFQNVCYEHSPLQMNNVNDLEDRPRLLPYGKQENSNACHEMDDIAVPQEALSSSPRCEPGFSSESCEQLALPKAGGGDAEDAPSLLPVSCKLAIQIDEGESEEMPKLLPYDTEETFDLKTPQVTNEGEPEKGLCLLPGEGEEGSDDCSEMCDGEERQEASSSLARRGSVSSELENHPMNEEGESEELASSLLYDNVPGAEQSAYENEKCSCVMCFSEEVPGSPEARTESDQACGTMDTVDIANNSTLGKPKRKRRKKRGHGWSRMRMRRQENSQQNDNSKADGQVVSSEKKANVNLKDLSKIRGRKRGKPGTRFTQSDRAAQKRVRSRASRKHKDETVDFKAPLLPVTCGGVKGILHKKKLQQGILVKCIQTEDGKWFTPTEFEIKGGHARSKNWRLSVRCGGWPLRWLMENGFLPDPPRIRYRKKKRILKSQNNSSVDPCMDRTAC

SEQ ID NO: 5773 - protein, 632 aa, Artificial Sequence
  Synthetic polypeptide
MAQQGQQGQMASGDSNLNFRMVAEIQNVEGQNLQEQVCPEPIFRFFRENKVEIASAITRPFPFLMGLRDRSFISEQMYEHFQEAFRNLVPVTRVMYCVLSELEKTFGWSHLEALFSRINLMAYPDLNEIYRSFQNVCYEHSPLQMNNVNDLEDRPRLLPYGKQENSNACHEMDDIAVPQEALSSSPRCEPGFSSESCEQLALPKAGGGDAEDAPSLLPGGGVLESNGMIDAARTYSTAPGEKQGEEEGRNSPRKRNQDKEKYQESPEGRDKETFDLKTPQVTNEGEPEKGLCLLPGEGEEGSDDCSEMCDGEEPQEASSSLARCGSEGSDDCSEMCDGEERQEASSSLARRGSVSSELENHPMNEEGESEELASSLLYDNVPGAEQSAYENEKCSCVMCFSEEVPGSPEARTESDQACGTMDTVDIANNSTLGKPKRKRRKKRGHGWSRMRMRRQENSQQNDNSKADGQVVSSEKKANVNLKDLSKIRGRKRGKPGTRFTQSDRAAQKRVRSRASRKHKDETVDFKAPLLPVTCGGVKGILHKKKLQQGILVKCIQTEDGKWFTPTEFEIKGGHARSKNWRLSVRCGGWPLRWLMENGFLPDPPRIRYRKKKRILKSQNNSSVDPCMDRTAC

SEQ ID NO: 5774 - protein, 665 aa, Artificial Sequence
  Synthetic polypeptide
MAQQGQQGQMASGDSNLNFRMVAEIQNVEGQNLQEQVCPEPIFRFFRENKVEIASAITRPFPFLMGLRDRSFISEQMYEHFQEAFRNLVPVTRVMYCVLSELEKTFGWSHLEALFSRINLMAYPDLNEIYRSFQNVCYEHSPLQMNNVNDLEDRPRLLPYGKQENSNACHEMDDIAVPQEALSSSPRCEPGFSSESCEQLALPKAGGGDAEDAPSLLPGGGVSCKLAIQIDEGESEEMPKLLPYDTEVLESNGMIDAARTYSTAPGEKQGEEEGRNSPRKRNQDKEKYQESPEGRDKETFDLKTPQVTNEGEPEKGLCLLPGEGEEGSDDCSEMCDGEEPQEASSSLARCGSVSCLSAETFDLKTPQVTNEGEPEKELSLLPGEGEVSSELENHPMNEEGESEELASSLLYDNVPGAEQSAYENEKCSCVMCFSEEVPGSPEARTESDQACGTMDTVDIANNSTLGKPKRKRRKKRGHGWSRMRMRRQENSQQNDNSKADGQVVSSEKKANVNLKDLSKIRGRKRGKPGTRFTQSDRAAQKRVRSRASRKHKDETVDFKAPLLPVTCGGVKGILHKKKLQQGILVKCIQTEDGKWFTPTEFEIKGGHARSKNWRLSVRCGGWPLRWLMENGFLPDPPRIRYRKKKRILKSQNNSSVDPCMDRTAC

SEQ ID NO: 5775 - protein, 12 aa, Artificial Sequence
  Synthetic polypeptide
MAGGGGDLSTRC

SEQ ID NO: 5776 - protein, 48 aa, Artificial Sequence
  Synthetic polypeptide
MAGGGGDLSTRRLNECISPVANEMNHLPAHSHDLQRFLERNKFNERCT

SEQ ID NO: 5777 - protein, 712 aa, Artificial Sequence
  Synthetic polypeptide
MAGGGGDLSTRRLNECISPVANEMNHLPAHSHDLQRMFTEDQGVDDRLLYDIVFKHFKRNKVEISNAIKKTFPFLEGLRDRDLITNKMFEDSQDSCRNLVPVQRVVYNVLSELEKTFNLPVLEALFSDVNMQEYPDLIHIYKGFENVIHDKLPLQESEEEEREERSGLQLSLEQGTGENSFRSLTWPPSGSPSHAGTTPPENGLSEHPCETEQINAKRKDTTSDKDDSLGSQQTNEQCAQKAEPTESCEQIAVQVNNGDAGREMPCPLPCDEESPEAELHNHGIQINSCSVRLVDIKKEKPFSNSKVECQAQARTHHNQASDIIVISSEDSEGSTDVDEPLEVFISAPRSEPVINNDNPLESNDEKEGQEATCSRPQIVPEPMDFRKLSTFRESFKKRVIGQDHDFSESSEEEAPAEASSGALRSKHGEKAPMTSRSTSTWRIPSRKRRFSSSDFSDLSNGEELQETCSSSLRRGSGSQPQEPENKKCSCVMCFPKGVPRSQEARTESSQASDMMDTMDVENNSTLEKHSGKRRKKRRHRSKVNGLQRGRKKDRPRKHLTLNNKVQKKRWQQRGRKANTRPLKRRRKRGPRIPKDENINFKQSELPVTCGEVKGTLYKERFKQGTSKKCIQSEDKKWFTPREFEIEGDRGASKNWKLSIRCGGYTLKVLMENKFLPEPPSTRKKRILESHNNTLVDPCRPFLRKPTIRPLRL

SEQ ID NO: 5778 - protein, 3 aa, Artificial Sequence
  Synthetic polypeptide
HSI

SEQ ID NO: 5779 - protein, 670 aa, Artificial Sequence
  Synthetic polypeptide
MITSAAGIISLLDEDEPQLKEFALHKLNAVVNDFWAEISESVDKIEVLYEDEGFRSRQFAALVASKVFYHLGAFEESLNYALGAGDLFNVNDNSEYVETIIAKCIDHYTKQCVENADLPEGEKKPIDQRLEGIVNKMFQRCLDDHKYKQAIGIALETRRLDVFEKTILESNDVPGMLAYSLKLCMSLMQNKQFRNKVLRVLVKIYMNLEKPDFINVCQCLIFLDDPQAVSDILEKLVKEDNLLMAYQICFDLYESASQQFLSSVIQNLRTVGTPIASVPGSTNTGTVPGSEKDSDSMETEEKTSSAFVGKTPEASPEPKDQTLKMIKILSGEMAIELHLQFLIRNNNTDLMILKNTKDAVRNSVCHTATVIANSFMHCGTTSDQFLRDNLEWLARATNWAKFTATASLGVIHKGHEKEALQLMATYLPKDTSPGSAYQEGGGLYALGLIHANHGGDIIDYLLNQLKNASNDIVRHGGSLGLGLAAMGTARQDVYDLLKTNLYQDDAVTGEAAGLALGLVMLGSKNAQAIEDMVGYAQETQHEKILRGLAVGIALVMYGRMEEADALIESLCRDKDPILRRSGMYTVAMAYCGSGNNKAIRRLLHVAVSDVNDDVRRAAVESLGFILFRHGGTRLYSQLLRRLRWENHLNPGGRGCSEPRSHHCPPRSATK

SEQ ID NO: 5780 - protein, 8 aa, Artificial Sequence
  Synthetic polypeptide
QGKQLAWP

SEQ ID NO: 5781 - protein, 878 aa, Artificial Sequence
  Synthetic polypeptide
MITSAAGIISLLDEDEPQLKEFALHKLNAVVNDFWAEISESVDKIEVLYEDEGFRSRQFAALVASKVFYHLGAFEESLNYALGAGDLFNVNDNSEYVETIIAKCIDHYTKQCVENADLPEGEKKPIDQRLEGIVNKMFQRCLDDHKYKQAIGIALETRRLDVFEKTILESNDVPGMLAYSLKLCMSLMQNKQFRNKVLRVLVKIYMNLEKPDFINVCQCLIFLDDPQAVSDILEKLVKEDNLLMAYQICFDLYESASQQFLSSVIQNLRTVGTPIASVPGSTNTGTVPGSEKDSDSMETEEKTSSAFVGKTPEASPEPKDQTLKMIKILSGEMAIELHLQFLIRNNNTDLMILKNTKDAVRNSVCHTATVIANSFMHCGTTSDQFLRDNLEWLARATNWAKFTATASLGVIHKGHEKEALQLMATYLPKDTSPGSAYQEGGGLYALGLIHANHGGDIIDYLLNQLKNASNDIVRHGGSLGLGLAAMGTARQDVYDLLKTNLYQDDAVTGEAAGLALGLVMLGSKNAQAIEDMVGYAQETQHEKILRGLAVGIALVMYGRMEEADALIESLCRDKDPILRRSGMYTVAMAYCGSGNNKAIRRLLHVAVSDVNDDVRRAAVESLGFILFRTPEQCPSVVSLLSESYNPHVRYGAAMALGICCAGTGNKEAINLLEPMTNDPVNYVRQGALIASALIMIQQTEITCPKVNQFRQLYSKVINDKHDDVMAKFGAILAQGILDAGGHNVTISLQSRTGHTHMPSVVGVLVFTQFWFWFPLSHFLSLAYTPTCVIGLNKDLKVSTAVLSITAKAKKKEKEKEKKEEEKMEVDEAEKKEEKEKKKEPEPNFQLLDNPARVMPAQLKVLTMPETCRYQPFKPFSLL

SEQ ID NO: 5782 - protein, 909 aa, Artificial Sequence
  Synthetic polypeptide
MITSAAGIISLLDEDEPQLKEFALHKLNAVVNDFWAEISESVDKIEVLYEDEGFRSRQFAALVASKVFYHLGAFEESLNYALGAGDLFNVNDNSEYVETIIAKCIDHYTKQCVENADLPEGEKKPIDQRLEGIVNKMFQRCLDDHKYKQAIGIALETRRLDVFEKTILESNDVPGMLAYSLKLCMSLMQNKQFRNKVLRVLVKIYMNLEKPDFINVCQCLIFLDDPQAVSDILEKLVKEDNLLMAYQICFDLYESASQQFLSSVIQNLRTVGTPIASVPGSTNTGTVPGSEKDSDSMETEEKTSSAFVGKTPEASPEPKDQTLKMIKILSGEMAIELHLQFLIRNNNTDLMILKNTKDAVRNSVCHTATVIANSFMHCGTTSDQFLRDNLEWLARATNWAKFTATASLGVIHKGHEKEALQLMATYLPKDTSPGSAYQEGGGLYALGLIHANHGGDIIDYLLNQLKNASNDIVRHGGSLGLGLAAMGTARQDVYDLLKTNLYQDDAVTGEAAGLALGLVMLGSKNAQAIEDMVGYAQETQHEKILRGLAVGIALVMYGRMEEADALIESLCRDKDPILRRSGMYTVAMAYCGSGNNKAIRRLLHVAVSDVNDDVRRAAVESLGFILFRTPEQCPSVVSLLSESYNPHVRYGAAMALGICCAGTGNKEAINLLEPMTNDPVNYVRQGALIASALIMIQQTEITCPKVNQFRQLYSKVINDKHDDVMAKFGAILAQGILDAGGHNVTISLQSRTGHTHMPSVVGVLVFTQFWFWFPLSHFLSLAYTPTCVIGLNKDLKMPKVQYKSNCKPSTFAYPAPLEVPKEKEKEKVSTAVLSITAKAKKKEKEKEKKEEEKMEVDEAEKKEEKEKKKEPEPNFQLLDNPARVMPAQLKVLTMPETCRYQPFKPFSLL

SEQ ID NO: 5783 - protein, 882 aa, Artificial Sequence
  Synthetic polypeptide
MITSAAGIISLLDEDEPQLKEFALHKLNAVVNDFWAEISESVDKIEVLYEDEGFRSRQFAALVASKVFYHLGAFEESLNYALGAGDLFNVNDNSEYVETIIAKCIDHYTKQCVENADLPEGEKKPIDQRLEGIVNKMFQRCLDDHKYKQAIGIALETRRLDVFEKTILESNDVPGMLAYSLKLCMSLMQNKQFRNKVLRVLVKIYMNLEKPDFINVCQCLIFLDDPQAVSDILEKLVKEDNLLMAYQICFDLYESASQQFLSSVIQNLRTVGTPIASVPGSTNTGTVPGSEKDSDSMETEEKTSSAFVGKTPEASPEPKDQTLKMIKILSGEMAIELHLQFLIRNNNTDLMILKNTKDAVRNSVCHTATVIANSFMHCGTTSDQFLRDNLEWLARATNWAKFTATASLGVIHKGHEKEALQLMATYLPKDTSPGSAYQEGGGLYALGLIHANHGGDIIDYLLNQLKNASNDIVRHGGSLGLGLAAMGTARQDVYDLLKTNLYQDDAVTGEAAGLALGLVMLGSKNAQAIEDMVGYAQETQHEKILRGLAVGIALVMYGRMEEADALIESLCRDKDPILRRSGMYTVAMAYCGSGNNKAIRRLLHVAVSDVNDDVRRAAVESLGFILFRTPEQCPSVVSLLSESYNPHVRYGAAMALGICCAGTGNKEAINLLEPMTNDPVNYVRQGALIASALIMIQQTEITCPKVNQFRQLYSKVINDKHDDVMAKFGAILAQGILDAGGHNVTISLQSRTGHTHMPSVVGVLVFTQFWFWFPLSHFLSLAYTPTCVIGLNKDLKVSTAVLSITAKAKKKEKEKEKKEEEKMEVDEAEKKEEKEKKKEPEPNFQLLDNPARVMPAQLKVLTMPETCRYQPFKPRLPSLTQK

SEQ ID NO: 5784 - protein, 913 aa, Artificial Sequence
  Synthetic polypeptide
MITSAAGIISLLDEDEPQLKEFALHKLNAVVNDFWAEISESVDKIEVLYEDEGFRSRQFAALVASKVFYHLGAFEESLNYALGAGDLFNVNDNSEYVETIIAKCIDHYTKQCVENADLPEGEKKPIDQRLEGIVNKMFQRCLDDHKYKQAIGIALETRRLDVFEKTILESNDVPGMLAYSLKLCMSLMQNKQFRNKVLRVLVKIYMNLEKPDFINVCQCLIFLDDPQAVSDILEKLVKEDNLLMAYQICFDLYESASQQFLSSVIQNLRTVGTPIASVPGSTNTGTVPGSEKDSDSMETEEKTSSAFVGKTPEASPEPKDQTLKMIKILSGEMAIELHLQFLIRNNNTDLMILKNTKDAVRNSVCHTATVIANSFMHCGTTSDQFLRDNLEWLARATNWAKFTATASLGVIHKGHEKEALQLMATYLPKDTSPGSAYQEGGGLYALGLIHANHGGDIIDYLLNQLKNASNDIVRHGGSLGLGLAAMGTARQDVYDLLKTNLYQDDAVTGEAAGLALGLVMLGSKNAQAIEDMVGYAQETQHEKILRGLAVGIALVMYGRMEEADALIESLCRDKDPILRRSGMYTVAMAYCGSGNNKAIRRLLHVAVSDVNDDVRRAAVESLGFILFRTPEQCPSVVSLLSESYNPHVRYGAAMALGICCAGTGNKEAINLLEPMTNDPVNYVRQGALIASALIMIQQTEITCPKVNQFRQLYSKVINDKHDDVMAKFGAILAQGILDAGGHNVTISLQSRTGHTHMPSVVGVLVFTQFWFWFPLSHFLSLAYTPTCVIGLNKDLKMPKVQYKSNCKPSTFAYPAPLEVPKEKEKEKVSTAVLSITAKAKKKEKEKEKKEEEKMEVDEAEKKEEKEKKKEPEPNFQLLDNPARVMPAQLKVLTMPETCRYQPFKPRLPSLTQK

SEQ ID NO: 5785 - protein, 599 aa, Artificial Sequence
  Synthetic polypeptide
MGDILAHESELLGLVKEYLDFAEFEDTLKTFSKECKIKGKPLCKTVGGSFRDSKSLTIQKDLVAAFDNGDQKVFFDLWEEHISSSIRDGDSFAQKLEFYLHIHFAIYLLKYSVGRPDKEELDEKISYFKTYLETKGAALSQTTEFLPFYALPFVPNPMVHPSFKELFQDSWTPELKLKLIKFLALISKASNTPKLLTIYKENGQSNKEILQQLHQQLVEAERRSVTYLKRYNKIQADYHNLIGVTAELVDSLEATVSGKMITPEYLQSVCVRLFSNQMRQSLAHSVDFTRPGTASTMLRASLAPVKLKDVPLLPSLDYEKLKKDLILGSDRLKAFLLQALRWRLTTSHPGEQRETVLQAYISNDLLDCYSHNQRSVLQLLHSTSDVVRQYMARLINAFASLAEGRLYLAQNTKVLQMLEGRLKEEDKDIITRENVLGALQKFSLRRPLQTAMIQDGLIFWLVDVLKDPDCLSDYTLEYSVALLMNLCLRSTGKNMCAKVAGLVLKVLSDLLGHENHEIQPYVNGALYSILSVPSIREEARAMGMEDILRCFIKEGNAEMIRQIEFIIKQLNSEELPDGVLESDDDEDEDDETRCGGSCL

SEQ ID NO: 5786 - protein, 444 aa, Artificial Sequence
  Synthetic polypeptide
MVKLAKAGKNQGDPKKMAPPPKEVEEDSEDEEMSEDEEDDSSGEEVVIPQKKGKKAAATSAKKVVVSPTKKVAVATPAKKAAVTPGKKAAATPAKKTVTPAKAVTTPGKKGATPGKALVATPGKKGAAIPAKGAKNGKNAKKEDSDEEEDDDSEEDEEDDEDEDEDEDEIEPAAMKAAAAAPASEDEDDEDDEDDEDDDDDEEDDSEEEAMETTPAKGKKAAKVVPVKAKNVAEDEDEEEDDEDEDDDDDEDDEDDDDEDDEEEEEEEEEEPVKEAPGKRKKEMAKQKAAPEAKKQKVEGTEPTTAFNLFVGNLNFNKSAPELKTGISDVFAKNDLAVVDVRIGMTRKFGYVDFESAEDLEKALELTGLKVFGNEIKLEKPKGKDSKKERDARTLLAKNLPYKVTQDELKEVFEDAAEIRLVSKDGKSKGRVILDSLTCKFVPQ

SEQ ID NO: 5787 - protein, 45 aa, Artificial Sequence
  Synthetic polypeptide
LPYKVTQDELKEVFEDAAEIRLVSKDGKSKGRVILDSLTCKFVPQ

SEQ ID NO: 5788 - protein, 414 aa, Artificial Sequence
  Synthetic polypeptide
MLGPCMLLLLLLLGLRLQLSLGIIPVEEENPDFWNREAAEALGAAKKLQPAQTAAKNLIIFLGDGMGVSTVTAARILKGQKKDKLGPEIPLAMDRFPYVALSKTYNVDKHVPDSGATATAYLCGVKGNFQTIGLSAAARFNQCNTTRGNEVISVMNRAKKAGKSVGVVTTTRVQHASPAGTYAHTVNRNWYSDADVPASARQEGCQDIATQLISNMDIDVILGGGRKYMFRMGTPDPEYPDDYSQGGTRLDGKNLVQEWLAKRQGARYVWNRTELMQASLDPSVTHLMGLFEPGDMKYEIHRDSTLDPSLMEMTEAALRLLSRNPRGFFLFVEGGRIDHGHHESRAYRALTETIMFDDAIERAGQLTSEEDTLSLVTADHSHVFSFGGYPLRGSSIFGMAAQHLQSQHFGRKSG

SEQ ID NO: 5789 - protein, 453 aa, Artificial Sequence
  Synthetic polypeptide
MLGPCMLLLLLLLGLRLQLSLGIIPVEEENPDFWNREAAEALGAAKKLQPAQTAAKNLIIFLGDGMGVSTVTAARILKGQKKDKLGPEIPLAMDRFPYVALSKTYNVDKHVPDSGATATAYLCGVKGNFQTIGLSAAARFNQCNTTRGNEVISVMNRAKKAGKSVGVVTTTRVQHASPAGTYAHTVNRNWYSDADVPASARQEGCQDIATQLISNMDIDVILGGGRKYMFRMGTPDPEYPDDYSQGGTRLDGKNLVQEWLAKRQGARYVWNRTELMQASLDPSVTHLMGLFEPGDMKYEIHRDSTLDPSLMEMTEAALRLLSRNPRGFFLFVEGGRIDHGHHESRAYRALTETIMFDDAIERAGQLTSEEDTLSLVTADHSHVFSFGGYPLRGSSIFGLAPGKARDRKAYTVLLYGNGPGYVLKDGARPDVTESESGMAAQHLQSQHFGRKSG

SEQ ID NO: 5790 - protein, 25 aa, Artificial Sequence
  Synthetic polypeptide
MNNKFDAVGTVTPFVVEFGGCNEVM

SEQ ID NO: 5791 - protein, 135 aa, Artificial Sequence
  Synthetic polypeptide
MGELQYDAGRDGFIDLMELKLMMEKLGAPQTHLGLKSMIKEVDEDFDGKLSFREFLLIFHKAAAGELQEDSGLMALAKLSEIDVALEGVKGAKNFFEAKVDYFSLLKTQLRDYLQEASLMLPGQVRCPFSGLPFP

SEQ ID NO: 5792 - protein, 231 aa, Artificial Sequence
  Synthetic polypeptide
MASEELACKLERRLRREEAEESGPQLAPLGAPAPEPKPEPEPPARAPTASADAELSAQLSRRLDINEGAARPRRCRVFNPYTEFPEFSRRLIKDLESMFKLYDAGRDGFIDLMELKLMMEKLGAPQTHLGLKSMIKEVDEDFDGKLSFREFLLIFHKAAAGELQEDSGLMALAKLSEIDVALEGVKGAKNFFEAKVDYFSLLKTQLRDYLQEASLMLPGQVRCPFSGLPFP

SEQ ID NO: 5793 - protein, 119 aa, Artificial Sequence
  Synthetic polypeptide
MELKLMMEKLGAPQTHLGLKSMIKEVDEDFDGKLSFREFLLIFHKAAAGELQEDSGLMALAKLSEIDVALEGVKGAKNFFEAKVDYFSLLKTQLRDYLQEASLMLPGQVRCPFSGLPFP

SEQ ID NO: 5794 - protein, 183 aa, Artificial Sequence
  Synthetic polypeptide
MAAETQTLNFGPEWLRALSSGGSITSPPLSPALPKYKLADYRYGREEMLALFLKDNKIPSDLLDKEFLPILQEEPLPPLALVPFTEEEQRNFSMSVNSAAVLRLTGRGGGGTVVGAPRGRSSSRGRGRGRGECGFYQRSFDEVEGVFGRGGGREMHRSQSWEERGDRRFEKPGRKDVASGIPL

SEQ ID NO: 5795 - protein, 959 aa, Artificial Sequence
  Synthetic polypeptide
MSLFLRVVFSFTMFGDLFEEEYSTVSNNQYGKGKKLKTKALEPPAPREFTNLSGIRNQGGTCYLNSLLQTLHFTPEFREALFSLGPEELGLFEDKDKPDAKVRIIPLQLQRLFAQLLLLDQEAASTADLTDSFGWTSNEEMRQHDVQELNRILFSALETSLVGTSGHDLIYRLYHGTIVNQIVCKECKNVSERQEDFLDLTVAVKNVSGLEDALWNMYVEEEVFDCDNLYHCGTCDRLVKAAKSAKLRKLPPFLTVSLLRFNFDFVKCERYKETSCYTFPLRINLKPFCEQSELDDLEYIYDLFSVIIHKGGCYGGHYHVYIKDVDHLGNWQFQEEKSKPDVNLKDLQSEEEIDHPLMILKAILLEENNLIPVDQLGQKLLKKIGISWNKKYRKQHGPLRKFLQLHSQIFLLSSDESTVRLLKNSSLQAESDFQRNDQQIFKMLPPESPGLNNSISCPHWFDINDSKVQPIREKDIEQQFQGKESAYMLFYRKSQLQRPPEARANPRYGVPCHLLNEMDAANIELQTKRAECDSANNTFELHLHLGPQYHFFNGALHPVVSQTESVWDLTFDKRKTLGDLRQSIFQLLEFWEGDMVLSVAKLVPAGLHIYQSLGGDELTLCETEIADGEDIFVWNGVEVGGVHIQTGIDCEPLLLNVLHLDTSSDGEKCCQVIESPHVFPANAEVGTVLTALAIPAGVIFINSAGCPGGEGWTAIPKEDMRKTFREQGLRNGSSILIQDSHDDNSLLTKEEKWVTSMNEIDWLHVKNLCQLESEEKQVKISATVNTMVFDIRIKAIKELKLMKELADNSCLRPIDRNGKLLCPVPDSYTLKEAELKMGSSLGLCLGKAPSSSQLFLFFAMGSDVQPGTEMEIVVEETISVRDLCPLIQVGKSDQPGSSRVPLAPRLWLPNTIFYKQEPGHLRIMAGYISRSGNKMSLKHLTITESSEAAIQDHWNHQRD

SEQ ID NO: 5796 - protein, 947 aa, Artificial Sequence
  Synthetic polypeptide
MFGDLFEEEYSTVSNNQYGKGKKLKTKALEPPAPREFTNLSGIRNQGGTCYLNSLLQTLHFTPEFREALFSLGPEELGLFEDKDKPDAKVRIIPLQLQRLFAQLLLLDQEAASTADLTDSFGWTSNEEMRQHDVQELNRILFSALETSLVGTSGHDLIYRLYHGTIVNQIVCKECKNVSERQEDFLDLTVAVKNVSGLEDALWNMYVEEEVFDCDNLYHCGTCDRLVKAAKSAKLRKLPPFLTVSLLRFNFDFVKCERYKETSCYTFPLRINLKPFCEQSELDDLEYIYDLFSVIIHKGGCYGGHYHVYIKDVDHLGNWQFQEEKSKPDVNLKDLQSEEEIDHPLMILKAILLEENNLIPVDQLGQKLLKKIGISWNKKYRKQHGPLRKFLQLHSQIFLLSSDESTVRLLKNSSLQAESDFQRNDQQIFKMLPPESPGLNNSISCPHWFDINDSKVQPIREKDIEQQFQGKESAYMLFYRKSQLQRPPEARANPRYGVPCHLLNEMDAANIELQTKRAECDSANNTFELHLHLGPQYHFFNGALHPVVSQTESVWDLTFDKRKTLGDLRQSIFQLLEFWEGDMVLSVAKLVPAGLHIYQSLGGDELTLCETEIADGEDIFVWNGVEVGGVHIQTGIDCEPLLLNVLHLDTSSDGEKCCQVIESPHVFPANAEVGTVLTALAIPAGVIFINSAGCPGGEGWTAIPKEDMRKTFREQGLRNGSSILIQDSHDDNSLLTKEEKWVTSMNEIDWLHVKNLCQLESEEKQVKISATVNTMVFDIRIKAIKELKLMKELADNSCLRPIDRNGKLLCPVPDSYTLKEAELKMGSSLGLCLGKAPSSSQLFLFFAMGSDVQPGTEMEIVVEETISVRDLCPLIQVGKSDQPGSSRVPLAPRLWLPNTIFYKQEPGHLRIMAGYISRSGNKMSLKHLTITESSEAAIQDHWNHQRD

SEQ ID NO: 5797 - protein, 36 aa, Artificial Sequence
  Synthetic polypeptide
WEVHWDCVLEKHQVRLSCSCFLQWGVTFNLGQKWKS

SEQ ID NO: 5798 - protein, 123 aa, Artificial Sequence
  Synthetic polypeptide
MGSSLGLCLGKAPSSSQLFLFFAMGSDVQPGTEMEIVVEETISVRDLCPLIQVGKSDQPGSSRVPLAPRLWLPNTIFYKQEPGHLRIMAGYISRSGNKMSLKHLTITESSEAAIQDHWNHQRD

SEQ ID NO: 5799 - protein, 295 aa, Artificial Sequence
  Synthetic polypeptide
MARTGWTSPIPLCVSLLLTCGFAEAGKLLVVPMDGSHWFTMQSVVEKLILRGHEVVVVMPEVSWQLGKSLNCTVKTYSTSYTLEDLDREFMDFADAQWKAQVRSLFSLFLSSSNGFFNLFFSHCRSLFNDRKLVEYLKESSFDAVFLDPFDACGLIVAKYFSLPSVVFARGIACHYLEEGAQCPAPLSYVPRILLGFSDAMTFKERVRNHIMHLEEHLFCQYFSKNALEIASEILQTPVTAYDLYSHTSIWLLRTDFVLDYPKPVMPNMIFIGGINCHQGKPLPMINGIEWRIQK

SEQ ID NO: 5800 - protein, 30 aa, Artificial Sequence
  Synthetic polypeptide
MPNMVFIGGINCKKRKDLSQKLAGYGGRRL

SEQ ID NO: 5801 - protein, 297 aa, Artificial Sequence
  Synthetic polypeptide
MACLLRSFQRISAGVFFLALWGMVVGDKLLVVPQDGSHWLSMKDIVEVLSDRGHEIVVVVPEVNLLLKESKYYTRKIYPVPYDQEELKNRYQSFGNNHFAERSFLTAPQTEYRNNMIVIGLYFINCQSLLQDRDTLNFFKESKFDALFTDPALPCGVILAEYLGLPSVYLFRGFPCSLEHTFSRSPDPVSYIPRCYTKFSDHMTFSQRVANFLVNLLEPYLFYCLFSKYEELASAVLKRDVDIITLYQKVSVWLLRYDFVLEYPRPVMPNMVFIGGINCKKRKDLSQKLAGYGGRRL

SEQ ID NO: 5802 - protein, 77 aa, Artificial Sequence
  Synthetic polypeptide
LFYCLFSKYEELASAVLKRDVDIITLYQKVSVWLLRYDFVLEYPRPVMPNMVFIGGINCKKRKDLSQKLAGYGGRRL

SEQ ID NO: 5803 - protein, 24 aa, Artificial Sequence
  Synthetic polypeptide
MPNMVFIGGINCKKRKDLSQHYSQ

SEQ ID NO: 5804 - protein, 291 aa, Artificial Sequence
  Synthetic polypeptide
MACLLRSFQRISAGVFFLALWGMVVGDKLLVVPQDGSHWLSMKDIVEVLSDRGHEIVVVVPEVNLLLKESKYYTRKIYPVPYDQEELKNRYQSFGNNHFAERSFLTAPQTEYRNNMIVIGLYFINCQSLLQDRDTLNFFKESKFDALFTDPALPCGVILAEYLGLPSVYLFRGFPCSLEHTFSRSPDPVSYIPRCYTKFSDHMTFSQRVANFLVNLLEPYLFYCLFSKYEELASAVLKRDVDIITLYQKVSVWLLRYDFVLEYPRPVMPNMVFIGGINCKKRKDLSQHYSQ

SEQ ID NO: 5805 - protein, 71 aa, Artificial Sequence
  Synthetic polypeptide
LFYCLFSKYEELASAVLKRDVDIITLYQKVSVWLLRYDFVLEYPRPVMPNMVFIGGINCKKRKDLSQHYSQ

SEQ ID NO: 5806 - protein, 292 aa, Artificial Sequence
  Synthetic polypeptide
MAVESQGGRPLVLGLLLCVLGPVVSHAGKILLIPVDGSHWLSMLGAIQQLQQRGHEIVVLAPDASLYIRDGAFYTLKTYPVPFQREDVKESFVSLGHNVFENDSFLQRVIKTYKKIKKDSAMLLSGCSHLLHNKELMASLAESSFDVMLTDPFLPCSPIVAQYLSLPTVFFLHALPCSLEFEATQCPNPFSYVPRPLSSHSDHMTFLQRVKNMLIAFSQNFLCDVVYSPYATLASEFLQREVTVQDLLSSASVWLFRSDFVKDYPRPIMPNMVFVGGINCLHQNPLSQHYSQ

SEQ ID NO: 5807 - protein, 841 aa, Artificial Sequence
  Synthetic polypeptide
MAAQRIRAANSNGLPRCKSEGTLIDLSEGFSETSFNDIKVPSPSALLVDNPTPFGNAKEVIAIKDYCPTNFTTLKFSKGDHLYVLDTSGGEWWYAHNTTEMGYIPSSYVQPLNYRNSTLSDSGMIDNLPDSPDEVAKELELLGGWTDDKKVPGRMYSNNPFWNGVQTNPFLNGNVPVMPSLDELNPKSTVDLLLFDAGTSSFTESSSATTNSTGNIFDELPVTNGLHAEPPVRRDNPFFRSKRSYSLSELSVLQAKSDAPTSSSFFTGLKSPAPEQFQSREDFRTAWLNHRKLARSCHDLDLLGQSPGWGQTQAVETNIVCKLDSSGGAVQLPDTSISIHVPEGHVAPGETQQISMKALLDPPLELNSDRSCSISPVLEVKLSNLEVKTSIILEMKVSAEIKNDLFSKSTVGLQCLRSDSKEGPYVSVPLNCSCGDTVQAQLHNLEPCMYVAVVAHGPSILYPSTVWDFINKKVTVGLYGPKHIHPSFKTVVTIFGHDCAPKTLLVSEVTRQAPNPAPVALQLWGKHQFVLSRPQDLKVCMFSNMTNYEVKASEQAKVVRGFQLKLGKVSRLIFPITSQNPNELSDFTLRVQVKDDQEAILTQFCVQTPQPPPKSAIKPSGQRRFLKKNEVGKIILSPFATTTKYPTFQDRPVSSLKFGKLLKTVVRQNKNHYLLEYKKGDGIALLSEERVRLRGQLWTKEWYIGYYQGRVGLVHTKNVLVVGRARPSLCSGPELSTSVLLEQILRPCKFLTYIYASVRTLLMENISSWRSFADALGYVNLPLTFFCRAELDSEPERVASVLEKLKEDCNNTENKERKSFQKELVMPGVLVCTCSPSYLGG

SEQ ID NO: 5808 - protein, 475 aa, Artificial Sequence
  Synthetic polypeptide
MNYQQQLANSAAIRAEIQRFESVHPNIYSIYELLERVEEPVLQNQIREHVIAIEDAFVNSQEWTLSRSVPELKVGIVGNLASGKSALVHRYLTGTYVQEESPEGGRFKKEIVVDGQSYLLLIRDEGGPPEAQFAMWVDAVIFVFSLEDEISFQTVYHYYSRMANYRNTSEIPLVLVGTQDAISSANPRVIDDARARKLSNDLKRCTYYETCATYGLNVERVFQDVAQKIVATRKKQQLSIGPCKSLPNSPSHSSVCSAQVSAVHISQTSNGGGSLSDYSSSVPSTPSTSQKELRIDVPPTANTPTPVRKQSKRRSNLFTSRKGSDPDKEKKGLESRADSIGSGRAIPIKQGMLLKRSGKSLNKEWKKKYVTLCDNGVLTYHPSLHDYMQNVHGKEIDLLRTTVKVPGKRPPRATSACAPISSPKTNGLSKDMSSLHISPNSGQVQWLTPVTPALWEAKMGESPEVRSSRPACPTW

SEQ ID NO: 5809 - protein, 740 aa, Artificial Sequence
  Synthetic polypeptide
MYLLDGSGEPASPPADAMPRGTPPRKTVYRISVTMVRKEQLAAPGSGGPDPRPVRRPRPARSPDAPGRLEEEAEEAEGAEEPEGPRPRAWDFRTFRTRSTGQLELGRLRPCARGLEPADLAGSAPAEEEGRGSPASGSPDVEGARAAPLRRSLSFRHWSGPEAPQGRTLGGGRRHSSSGSLAWAPCDEAAAGTTLEPATATQPASEKRNTLDVGEVLSKNDALSDLERWERSKSKNRTLDNSDLQRLERARAAAGAGAASEHRLLRFFSGIFARRDGGPGGGPSPRSGASRPRGYFSLRRAPAEAHSSSAESIDGSPRRDAFVNSQEWTLSRSVPELKVGIVGNLASGKSALVHRYLTGTYVQEESPEGGRFKKEIVVDGQSYLLLIRDEGGPPEAQFAMWVDAVIFVFSLEDEISFQTVYHYYSRMANYRNTSEIPLVLVGTQDAISSANPRVIDDARARKLSNDLKRCTYYETCATYGLNVERVFQDVAQKIVATRKKQQLSIGPCKSLPNSPSHSSVCSAQVSAVHISQTSNGGGSLSDYSSSVPSTPSTSQKELRIDVPPTANTPTPVRKQSKRRSNLFTSRKGSDPDKEKKGLESRADSIGSGRAIPIKQGMLLKRSGKSLNKEWKKKYVTLCDNGVLTYHPSLHDYMQNVHGKEIDLLRTTVKVPGKRPPRATSACAPISSPKTNGLSKDMSSLHISPNSGQVQWLTPVTPALWEAKMGESPEVRSSRPACPTW

SEQ ID NO: 5810 - protein, 314 aa, Artificial Sequence
  Synthetic polypeptide
MANYRNTSEIPLVLVGTQDAISSANPRVIDDARARKLSNDLKRCTYYETCATYGLNVERVFQDVAQKIVATRKKQQLSIGPCKSLPNSPSHSSVCSAQVSAVHISQTSNGGGSLSDYSSSVPSTPSTSQKELRIDVPPTANTPTPVRKQSKRRSNLFTSRKGSDPDKEKKGLESRADSIGSGRAIPIKQGMLLKRSGKSLNKEWKKKYVTLCDNGVLTYHPSLHDYMQNVHGKEIDLLRTTVKVPGKRPPRATSACAPISSPKTNGLSKDMSSLHISPNSGQVQWLTPVTPALWEAKMGESPEVRSSRPACPTW

SEQ ID NO: 5811 - protein, 6 aa, Artificial Sequence
  Synthetic polypeptide
EICHPV

SEQ ID NO: 5812 - protein, 3 aa, Artificial Sequence
  Synthetic polypeptide
LQP

SEQ ID NO: 5813 - protein, 343 aa, Artificial Sequence
  Synthetic polypeptide
MGKKLDLSKLTDEEAQHVLEVVQRDFDLRRKEEERLEALKGKIKKESSKRELLSDTAHLNETHCARCLQPYQLLVNSKRQCLECGLFTCKSCGRVHPEEQGWICDPCHLARVVKIGSLEWYYEHVKARFKRFGSAKVIRSLHGRLQGGAGPELISEERSGDSDQTDEDGEPGSEAQAQAQPFGSKKKRLLSVHDFDFEGDSDDSTQPQGHSLHLSSVPEARDSPQSLTDESCSEKAAPHKAEGLEEADTGASGCHSHPEEQPTSISPSRHGALAELCPPGGSHRMALGTAAALGSNVIRNEQLPLQYLADVDTSDEESIRAHVMASHHSKRRGRASSESQMNG

SEQ ID NO: 5814 - protein, 303 aa, Artificial Sequence
  Synthetic polypeptide
MGKKLDLSKLTDEEAQHVLEVVQRDFDLRRKEEERLEALKGKIKKESSKRELLSDTAHLNETHCARCLQPYQLLVNSKRQCLECGLFTCKSCGRVHPEEQGWICDPCHLARVVKIGSLEWYYEHVKARFKRFGSAKVIRSLHGRLQGGAGPELISEERSGDSDQTDEDGEPGSEAQAQAQPFGSKSLTDESCSEKAAPHKAEGLEEADTGASGCHSHPEEQPTSISPSRHGALAELCPPGGSHRMALGTAAALGSNVIRNEQLPLQYLADVDTSDEESIRAHVMASHHSKRRGRASSESQMNG

SEQ ID NO: 5815 - protein, 33 aa, Artificial Sequence
  Synthetic polypeptide
PDTAPWLSSARLEAPTGWPWGLLLHSLSGFHCK

SEQ ID NO: 5816 - protein, 1 aa, Artificial Sequence
  Synthetic polypeptide
L

SEQ ID NO: 5817 - protein, 66 aa, Artificial Sequence
  Synthetic polypeptide
MDMGTQGSGRKRLPNRERLTAEDDALNQIAREPTSRITSLGVTTPHLKSQLPTSHPVTCTSCLSML

SEQ ID NO: 5818 - protein, 129 aa, Artificial Sequence
  Synthetic polypeptide
MPGSSGAGMEAAVAPGRDAPAPAASQPSGCGKHNSPERKVYMDYNATTPLEPEVIQAMTKAMWEAWGNPSSPYSAGRKAKDIINAARESLAKMIGGKPQDIIFTSGGTEPTQCEDDEDEDLYDDLLPLN

SEQ ID NO: 5819 - protein, 121 aa, Artificial Sequence
  Synthetic polypeptide
MEAAVAPGRDAPAPAASQPSGCGKHNSPERKVYMDYNATTPLEPEVIQAMTKAMWEAWGNPSSPYSAGRKAKDIINAARESLAKMIGGKPQDIIFTSGGTEPTQCEDDEDEDLYDDLLPLN

SEQ ID NO: 5820 - protein, 36 aa, Artificial Sequence
  Synthetic polypeptide
DGGGRGAGEGCAGTRGESAQRLRETQLAGEESLYGL

SEQ ID NO: 5821 - protein, 109 aa, Artificial Sequence
  Synthetic polypeptide
APAASQPSGCGKHNSPERKVYMDYNATTPLEPEVIQAMTKAMWEAWGNPSSPYSAGRKAKDIINAARESLAKMIGGKPQDIIFTSGGTEPTQCEDDEDEDLYDDLLPLN

SEQ ID NO: 5822 - protein, 337 aa, Artificial Sequence
  Synthetic polypeptide
MPGSSGAGMEAAVAPGRDAPAPAASQPSGCGKHNSPERKVYMDYNATTPLEPEVIQAMTKAMWEAWGNPSSPYSAGRKAKDIINAARESLAKMIGGKPQDIIFTSGGTESNNLVIHSVVKHFHANQTSKGHTGGHHSPVKGAKPHFITSSVEHDSIRLPLEHLVEEQVAAVTFVPVSKVSGQAEVDDILAAVRPTTRLVTIMLANNETGIVMPVPEISQRIKALNQERVAAGLPPILVHTDAAQALGKQRVDVEDLGVDFLTIVGHKFYGPRIGALYIRGLGEFTPLYPMLFGGGQERNFRPGAEEAGKPDMLVRADTKMPQPKPVLSSQWTRKGMA

SEQ ID NO: 5823 - protein, 247 aa, Artificial Sequence
  Synthetic polypeptide
FSNPFCGETFPRKPDLKGTHRWAPQPSEGGQAPFHYFLGGTRLHPAAPGAPGGRTSGSLLNVKMMKMKTFMMICFHLINTVTFVPVSKVSGQAEVDDILAAVRPTTRLVTIMLANNETGIVMPVPEISQRIKALNQERVAAGLPPILVHTDAAQALGKQRVDVEDLGVDFLTIVGHKFYGPRIGALYIRGLGEFTPLYPMLFGGGQERNFRPGAEEAGKPDMLVRADTKMPQPKPVLSSQWTRKGMA

SEQ ID NO: 5824 - protein, 329 aa, Artificial Sequence
  Synthetic polypeptide
MEAAVAPGRDAPAPAASQPSGCGKHNSPERKVYMDYNATTPLEPEVIQAMTKAMWEAWGNPSSPYSAGRKAKDIINAARESLAKMIGGKPQDIIFTSGGTESNNLVIHSVVKHFHANQTSKGHTGGHHSPVKGAKPHFITSSVEHDSIRLPLEHLVEEQVAAVTFVPVSKVSGQAEVDDILAAVRPTTRLVTIMLANNETGIVMPVPEISQRIKALNQERVAAGLPPILVHTDAAQALGKQRVDVEDLGVDFLTIVGHKFYGPRIGALYIRGLGEFTPLYPMLFGGGQERNFRPGAEEAGKPDMLVRADTKMPQPKPVLSSQWTRKGMA

SEQ ID NO: 5825 - protein, 235 aa, Artificial Sequence
  Synthetic polypeptide
MEAAVAPGRDAPAPAASQPSGCGKHNSPERKVYMDYNATTPLEPEVIQAMTKAMWEAWGNPSSPYSAAVTFVPVSKVSGQAEVDDILAAVRPTTRLVTIMLANNETGIVMPVPEISQRIKALNQERVAAGLPPILVHTDAAQALGKQRVDVEDLGVDFLTIVGHKFYGPRIGALYIRGLGEFTPLYPMLFGGGQERNFRPGAEEAGKPDMLVRADTKMPQPKPVLSSQWTRKGMA

SEQ ID NO: 5826 - protein, 41 aa, Artificial Sequence
  Synthetic polypeptide
RTSGSGHLCPGVQGERAGRGGRHPRGSPPDHTPRDHHAGQQ

SEQ ID NO: 5827 - protein, 159 aa, Artificial Sequence
  Synthetic polypeptide
VSGQAEVDDILAAVRPTTRLVTIMLANNETGIVMPVPEISQRIKALNQERVAAGLPPILVHTDAAQALGKQRVDVEDLGVDFLTIVGHKFYGPRIGALYIRGLGEFTPLYPMLFGGGQERNFRPGAEEAGKPDMLVRADTKMPQPKPVLSSQWTRKGMA

SEQ ID NO: 5828 - protein, 46 aa, Artificial Sequence
  Synthetic polypeptide
SFMVPGLAHFIYEDLVNLPLSTLCYLEVDKNGISGQVLKKPANLIC

SEQ ID NO: 5829 - protein, 41 aa, Artificial Sequence; identical to SEQ ID NO: 5826
  Synthetic polypeptide

SEQ ID NO: 5830 - protein, 393 aa, Artificial Sequence
  Synthetic polypeptide
MPGSSGAGMEAAVAPGRDAPAPAASQPSGCGKHNSPERKVYMDYNATTPLEPEVIQAMTKAMWEAWGNPSSPYSAGRKAKDIINAARESLAKMIGGKPQDIIFTSGGTESNNLVIHSVVKHFHANQTSKGHTGGHHSPVKGAKPHFITSSVEHDSIRLPLEHLVEEQVAAVTFVPVSKVSGQAEVDDILAAVRPTTRLVTIMLANNETGIVMPVPEISQRIKALNQERVAAGLPPILVHTDAAQALGKQRVDVEDLGVDFLTIVGHKFYGPRIGALYIRGLGEFTPLYPMLFGGGQERNFRPGQMLQGKLCCHAYPHLQRWSGKPRLPPIQAVTRYPTPPPGVSRRPGREPGLRHSHHGVSRDHIGILDPHLSVTGSVLPLGVNISQVKNLDV

SEQ ID NO: 5831 - protein, 303 aa, Artificial Sequence
  Synthetic polypeptide
FSNPFCGETFPRKPDLKGTHRWAPQPSEGGQAPFHYFLGGTRLHPAAPGAPGGRTSGSLLNVKMMKMKTFMMICFHLINTVTFVPVSKVSGQAEVDDILAAVRPTTRLVTIMLANNETGIVMPVPEISQRIKALNQERVAAGLPPILVHTDAAQALGKQRVDVEDLGVDFLTIVGHKFYGPRIGALYIRGLGEFTPLYPMLFGGGQERNFRPGQMLQGKLCCHAYPHLQRWSGKPRLPPIQAVTRYPTPPPGVSRRPGREPGLRHSHHGVSRDHIGILDPHLSVTGSVLPLGVNISQVKNLDV

SEQ ID NO: 5832 - protein, 385 aa, Artificial Sequence
  Synthetic polypeptide
MEAAVAPGRDAPAPAASQPSGCGKHNSPERKVYMDYNATTPLEPEVIQAMTKAMWEAWGNPSSPYSAGRKAKDIINAARESLAKMIGGKPQDIIFTSGGTESNNLVIHSVVKHFHANQTSKGHTGGHHSPVKGAKPHFITSSVEHDSIRLPLEHLVEEQVAAVTFVPVSKVSGQAEVDDILAAVRPTTRLVTIMLANNETGIVMPVPEISQRIKALNQERVAAGLPPILVHTDAAQALGKQRVDVEDLGVDFLTIVGHKFYGPRIGALYIRGLGEFTPLYPMLFGGGQERNFRPGQMLQGKLCCHAYPHLQRWSGKPRLPPIQAVTRYPTPPPGVSRRPGREPGLRHSHHGVSRDHIGILDPHLSVTGSVLPLGVNISQVKNLDV

SEQ ID NO: 5833 - protein, 291 aa, Artificial Sequence
  Synthetic polypeptide
MEAAVAPGRDAPAPAASQPSGCGKHNSPERKVYMDYNATTPLEPEVIQAMTKAMWEAWGNPSSPYSAAVTFVPVSKVSGQAEVDDILAAVRPTTRLVTIMLANNETGIVMPVPEISQRIKALNQERVAAGLPPILVHTDAAQALGKQRVDVEDLGVDFLTIVGHKFYGPRIGALYIRGLGEFTPLYPMLFGGGQERNFRPGQMLQGKLCCHAYPHLQRWSGKPRLPPIQAVTRYPTPPPGVSRRPGREPGLRHSHHGVSRDHIGILDPHLSVTGSVLPLGVNISQVKNLDV

SEQ ID NO: 5834 - protein, 215 aa, Artificial Sequence
  Synthetic polypeptide
VSGQAEVDDILAAVRPTTRLVTIMLANNETGIVMPVPEISQRIKALNQERVAAGLPPILVHTDAAQALGKQRVDVEDLGVDFLTIVGHKFYGPRIGALYIRGLGEFTPLYPMLFGGGQERNFRPGQMLQGKLCCHAYPHLQRWSGKPRLPPIQAVTRYPTPPPGVSRRPGREPGLRHSHHGVSRDHIGILDPHLSVTGSVLPLGVNISQVKNLDV

SEQ ID NO: 5835 - protein, 66 aa, Artificial Sequence
  Synthetic polypeptide
SFMVPGLAHFIYEDLVNLPLSTLCYLEVDKNGISGQARCYRGNCAATPIHTCKDGVGNPDFHQYRL

SEQ ID NO: 5836 - protein, 353 aa, Artificial Sequence
  Synthetic polypeptide
MEKQRALVAAKDGDVATLERLLEAGALGPGITDALGAGLVHHATRAGHLDCVKFLVQRAQLPGNQRAHNGATPAHDAAATGSLAELCWLVREGGCGLQDQDASGVSPLHLAARFGHPVLVEWLLHEGHSATLETREGARPLHHAAVSGDLTCLKLLTAAHGSSVNRRTRSGASPLYLACQEGHLHLAQFLVKDCGADVHLRALDGMSALHAAAARGHYSLVVWLVTFTDIGLTARDNEGATALHFAARGGHTPILDRLLLMGTPILRDSWGGTPLHDAAENGQMECCQTLVSHHVDPSLRDEDGYTAADLAEYHGHRDCAQYLREVAQPDTDLVYPTGPQPLERDRAQQVFAE

SEQ ID NO: 5837 - protein, 913 aa, Artificial Sequence
  Synthetic polypeptide
MSSQSHPDGLSGRDQPVELLNPARVNHMPSTVDVATALPLQVAPSAVPMDLRLDHQFSLPVAEPALREQQLQQELLALKQKQQIQRQILIAEFQRQHEQLSRQHEAQLHEHIKQQQEMLAMKHQQELLEHQRKLERHRQEQELEKQHREQKLQQLKNKEKGKESAVASTEVKMKLQEFVLNKKKALAHRNLNHCISSDPRYWYGKTQHSSLDQSSPPQSGVSTSYNHPVLGMYDAKDDFPLRKTASEPNLKLRSRLKQKVAERRSSPLLRRKDGPVVTALKKRPLDVTDSACSSAPGSGPSSPNNSSGSVSAENGIAPAVPSIPAETSLAHRLVAREGSAAPLPLYTSPSLPNITLGLPATGPSAGTAGQQDAERLTLPALQQRLSLFPGTHLTPYLSTSPLERDGGAAHSPLLQHMVLLEQPPAQAPLVTGLGALPLHAQSLVGADRVSPSIHKLRQHRPLGRTQSAPLPQNAQALQHLVIQQQHQQFLEKHKQQFQQQQLQMNKIIPKPSEPARQPESHPEETEEELREHQALLDEPYLDRLPGQKEAHAQAGVQVKQEPIESDEEEAEPPREVEPGQRQPSEQELLFRQQALLLEQQRIHQLRNYQASMEAAGIPVSFGGHRPLSRAQSSPASATFPVSVQEPPTKPRFTTGLVYDTLMLKHQCTCGSSSSHPEHAGRIQSIWSRLQETGLRGKCECIRGRKATLEELQTVHSEAHTLLYGTNPLNRQKLDSKKLLGSLASVFVRLPCGGVGVDSDTIWNEVHSAGAARLAVGCVVELVFKVATGELKNGFAVVRPPGHHAEESTPMGFCYFNSVAVAAKLLQQRLSVSKILIVDWDVHHGNGTQQAFYSDPSVLYMSLHRYDDGNFFPGSGAPDEVGTGPGVGFNVNMAFTGGLDPPMGDAEYLAAFRI

SEQ ID NO: 5838 - protein, 497 aa, Artificial Sequence
  Synthetic polypeptide
MVLLEQPPAQAPLVTGLGALPLHAQSLVGADRVSPSIHKLRQHRPLGRTQSAPLPQNAQALQHLVIQQQHQQFLEKHKQQFQQQQLQMNKIIPKPSEPARQPESHPEETEEELREHQALLDEPYLDRLPGQKEAHAQAGVQVKQEPIESDEEEAEPPREVEPGQRQPSEQELLFRQQALLLEQQRIHQLRNYQASMEAAGIPVSFGGHRPLSRAQSSPASATFPVSVQEPPTKPRFTTGLVYDTLMLKHQCTCGSSSSHPEHAGRIQSIWSRLQETGLRGKCECIRGRKATLEELQTVHSEAHTLLYGTNPLNRQKLDSKKLLGSLASVFVRLPCGGVGVDSDTIWNEVHSAGAARLAVGCVVELVFKVATGELKNGFAVVRPPGHHAEESTPMGFCYFNSVAVAAKLLQQRLSVSKILIVDWDVHHGNGTQQAFYSDPSVLYMSLHRYDDGNFFPGSGAPDEVGTGPGVGFNVNMAFTGGLDPPMGDAEYLAAFRI

SEQ ID NO: 5839 - protein, 7 aa, Artificial Sequence
  Synthetic polypeptide
LCLSTGH

SEQ ID NO: 5840 - protein, 149 aa, Artificial Sequence
  Synthetic polypeptide
DIENAYKKTFLPEMSEKCEVLQYSAREAQDSKKVVEDIEYLKFDKGPWLKQDNRTLYHLRLLVQDKFEVLNYTSIPIFLPEVTIGAHQTDRVLHQFREKERSWRRIRMLTRAAGNSLAGWTKAWKDSGIGRSGTRRSGVEAARGPDGVT

SEQ ID NO: 5841 - protein, 384 aa, Artificial Sequence
  Synthetic polypeptide
MALRLLKLAATSASARVVAAGAQRVRGIHSSVQCKLRYGMWHFLLGDKASKRLTERSRVITVDGNICTGKGKLAKEIAEKLGFKHFPEAGIHYPDSTTGDGKPLATDYNGNCSLEKFYDDPRSNDGNSYRLQSWLYSSRLLQYSDALEHLLTTGQGVVLERSIFSDFVFLEAMYNQGFIRKQCVDHYNEVKSVTICDYLPPHLVIYIDVPVPEVQRRIQKKGDPHEMKITSAYLQDIENAYKKTFLPEMSEKCEVLQYSAREAQDSKKVVEDIEYLKFDKGPWLKQDNRTLYHLRLLVQDKFEVLNYTSIPIFLPEVTIGAHQTDRVLHQFREKERSWRRIRMLTRAAGNSLAGWTKAWKDSGIGRSGTRRSGVEAARGPDGVT

SEQ ID NO: 5842 - protein, 288 aa, Artificial Sequence
  Synthetic polypeptide
MALRLLKLAATSASARVVAAGAQRVRGIHSSVQCKLRYGMWHFLLGDKASKRLTERSRVITVDGNICTGKGKLAKEIAEKLGFKHFPEAGIHYPDSTTGDGKPLATDYNGNCSLEKFYDDPRSNDGNSYRLQSWLYSSRLLQYSDALEHLLTTGQGVVLERSIFSDFVFLEAMYNQGFIRKQLKNVRFYNILQGKLKIQKRVQDKFEVLNYTSIPIFLPEVTIGAHQTDRVLHQFREKERSWRRIRMLTRAAGNSLAGWTKAWKDSGIGRSGTRRSGVEAARGPDGVT

SEQ ID NO: 5843 - protein, 147 aa, Artificial Sequence
  Synthetic polypeptide
ENAYKKTFLPEMSEKCEVLQYSAREAQDSKKVVEDIEYLKFDKGPWLKQDNRTLYHLRLLVQDKFEVLNYTSIPIFLPEVTIGAHQTDRVLHQFREKERSWRRIRMLTRAAGNSLAGWTKAWKDSGIGRSGTRRSGVEAARGPDGVT

SEQ ID NO: 5844 - protein, 414 aa, Artificial Sequence
  Synthetic polypeptide
MALRLLKLAATSASARVVAAGAQRVRGIHSSVQCKLRYGMWHFLLGDKASKRLTERSRVITVDGNICTGKGKLAKEIAEKLGFKHFPEAGIHYPDSTTGDGKPLATDYNGNCSLEKFYDDPRSNDGNSYRLQSWLYSSRLLQYSDALEHLLTTGQGVVLERSIFSDFVFLEAMYNQGFIRKQCESALQTHFWTGVAGASGKLESGSSEEVLLINERGGRSKPGVDHYNEVKSVTICDYLPPHLVIYIDVPVPEPHEMKITSAYLQDIENAYKKTFLPEMSEKCEVLQYSAREAQDSKKVVEDIEYLKFDKGPWLKQDNRTLYHLRLLVQDKFEVLNYTSIPIFLPEVTIGAHQTDRVLHQFREKERSWRRIRMLTRAAGNSLAGWTKAWKDSGIGRSGTRRSGVEAARGPDGVT

SEQ ID NO: 5845 - protein, 104 aa, Artificial Sequence
  Synthetic polypeptide
DIENAYKKTFLPEMSEKCEVLQYSAREAQDSKKVVEDIEYLKFDKGPWLKQDNRTLYHLRLLVQDKFEVLNYTSIPIFLPEVTIGAHQTDRVLHQFREAAIIPT

SEQ ID NO: 5846 - protein, 339 aa, Artificial Sequence
  Synthetic polypeptide
MALRLLKLAATSASARVVAAGAQRVRGIHSSVQCKLRYGMWHFLLGDKASKRLTERSRVITVDGNICTGKGKLAKEIAEKLGFKHFPEAGIHYPDSTTGDGKPLATDYNGNCSLEKFYDDPRSNDGNSYRLQSWLYSSRLLQYSDALEHLLTTGQGVVLERSIFSDFVFLEAMYNQGFIRKQCVDHYNEVKSVTICDYLPPHLVIYIDVPVPEVQRRIQKKGDPHEMKITSAYLQDIENAYKKTFLPEMSEKCEVLQYSAREAQDSKKVVEDIEYLKFDKGPWLKQDNRTLYHLRLLVQDKFEVLNYTSIPIFLPEVTIGAHQTDRVLHQFREAAIIPT

SEQ ID NO: 5847 - protein, 243 aa, Artificial Sequence
  Synthetic polypeptide
MALRLLKLAATSASARVVAAGAQRVRGIHSSVQCKLRYGMWHFLLGDKASKRLTERSRVITVDGNICTGKGKLAKEIAEKLGFKHFPEAGIHYPDSTTGDGKPLATDYNGNCSLEKFYDDPRSNDGNSYRLQSWLYSSRLLQYSDALEHLLTTGQGVVLERSIFSDFVFLEAMYNQGFIRKQLKNVRFYNILQGKLKIQKRVQDKFEVLNYTSIPIFLPEVTIGAHQTDRVLHQFREAAIIPT

SEQ ID NO: 5848 - protein, 7 aa, Artificial Sequence
  Synthetic polypeptide
LCLSTGH

SEQ ID NO: 5849 - protein, 102 aa, Artificial Sequence
  Synthetic polypeptide
ENAYKKTFLPEMSEKCEVLQYSAREAQDSKKVVEDIEYLKFDKGPWLKQDNRTLYHLRLLVQDKFEVLNYTSIPIFLPEVTIGAHQTDRVLHQFREAAIIPT

SEQ ID NO: 5850 - protein, 369 aa, Artificial Sequence
  Synthetic polypeptide
MALRLLKLAATSASARVVAAGAQRVRGIHSSVQCKLRYGMWHFLLGDKASKRLTERSRVITVDGNICTGKGKLAKEIAEKLGFKHFPEAGIHYPDSTTGDGKPLATDYNGNCSLEKFYDDPRSNDGNSYRLQSWLYSSRLLQYSDALEHLLTTGQGVVLERSIFSDFVFLEAMYNQGFIRKQCESALQTHFWTGVAGASGKLESGSSEEVLLINERGGRSKPGVDHYNEVKSVTICDYLPPHLVIYIDVPVPEPHEMKITSAYLQDIENAYKKTFLPEMSEKCEVLQYSAREAQDSKKVVEDIEYLKFDKGPWLKQDNRTLYHLRLLVQDKFEVLNYTSIPIFLPEVTIGAHQTDRVLHQFREAAIIPT

SEQ ID NO: 5851 - protein, 641 aa, Artificial Sequence
  Synthetic polypeptide
MEGAHASLSLEDEVSGAGSRQRPLEGKGGETPAAEEPGSLKNYAVFATRDVSAAPEKEEEEAEGPLRAQDLRESYIQLVQGVQEWQDGCMYQGEFGLNMKLGYGKFSWPTGESYHGQFYRDHCHGLGTYMWPDGSSFTGTFYLSHREGYGTMYMKTRLFQTHCHNDIVNLLLDCGADVNKCSDEGLTALSMCFLLHYPAQSFKPNVAERTIPEPQEPPKFPVVPILSSSFMDTNLESLYYEVNVPSQGSYELRPPPAPLLLPRVSGSHEGGHFQDTGQCGGSIDHRSSSLKGDSPLVKGSLGHVESGLEDVLGNTDRGSLCSAETKFESNVCVCDFSIELSQAMLERSAQSHSLLKMASPSPCTSSFDKGTMRRMALSMIERRKRWRTIKLLLRRGADPNLCCVPMQVLFLAVKAGDVDGVRLLLEHGARTDICFPPQLSTLTPLHIAAALPGEEGVQIVELLLHAITDVDAKASDEDDTYKPGKLDLLPSSLKLSNEPGPPQAYYSTDTALPEEGGRTALHMACEREDDNKIDRLISHGADILKPVMLRQGEKEAVGTAVDYGYFRFFQDRRIARCPFHTLMPAERETFLARKRLLEYMGLQLRQAVFAKESQWDPTWLYLCKRAQGGRNSIPDQYSQEH

SEQ ID NO: 5852 - protein, 632 aa, Artificial Sequence
  Synthetic polypeptide
MYQGEFGLNMKLGYGKFSWPTGESYHGQFYRDHCHGLGTYMWPDGSSFTGTFYLSHREGYGTMYMKTRLFQTHCHNDIVNLLLDCGADVNKCSDEGLTALSMCFLLHYPAQSFKPNVAERTIPEPQEPPKFPVVPILSSSFMDTNLESLYYEVNVPSQGSYELRPPPAPLLLPRVSGSHEGGHFQDTGQCGGSIDHRSSSLKGDSPLVKGSLGHVESGLEDVLGNTDRGSLCSAETKFESNVCVCDFSIELSQAMLERSAQSHSLLKMASPSPCTSSFDKGTMRRMALSMIERRKRWRTIKLLLRRGADPNLCCVPMQVLFLAVKAGDVDGVRLLLEHGARTDICFPPQLSTLTPLHIAAALPGEEGVQIVELLLHAITDVDAKASDEDDTYKPGKLDLLPSSLKLSNEPGPPQAYYSTDTALPEEGGRTALHMACEREDDNKCARDIVRLLLSHGANPNLLWSGHSPLSLSIASGNELVVKELLTQGADPNLPLTKGLGSALCVACDLTYEHQRNMDSKLALIDRLISHGADILKPVMLRQGEKEAVGTAVDYGYFRFFQDRRIARCPFHTLMPAERETFLARKRLLEYMGLQLRQAVFAKESQWDPTWLYLCKRAQGGRNSIPDQYSQEH

SEQ ID NO: 5853 - protein, 862 aa, Artificial Sequence
  Synthetic polypeptide
MYQGEFGLNMKLGYGKFSWPTGESYHGQFYRDHCHGLGTYMWPDGSSFTGTFYLSHREGYGTMYMKTRLFQGLYKADQRFGPGVETYPDGSQDVGLWFREQLIKLCTQIPSGFSLLRYPEFSSFITHSPARISLSEEEKTEWGLQEGQDPFFYDYKRFLLNDNLTLPPEMYVYSTNSDHLPMTSSFRKELDARIFLNEIPPFVEDGEPWFIINETPLLVKIQKQTYKFRNKPAHTSWNMGAILEGKRSGFAPCGPKEQLSMEMILKAEEGNHEWICRILKDNFASADVADAKGYTVLAAAATHCHNDIVNLLLDCGADVNKCSDEGLTALSMCFLLHYPAQSFKPNVAERTIPEPQEPPKFPVVPILSSSFMDTNLESLYYEVNVPSQGSYELRPPPAPLLLPRVSGSHEGGHFQDTGQCGGSIDHRSSSLKGDSPLVKGSLGHVESGLEDVLGNTDRGSLCSAETKFESNVCVCDFSIELSQAMLERSAQSHSLLKMASPSPCTSSFDKGTMRRMALSMIERRKRWRTIKLLLRRGADPNLCCVPMQVLFLAVKAGDVDGVRLLLEHGARTDICFPPQLSTLTPLHIAAALPGEEGVQIVELLLHAITDVDAKASDEDDTYKPGKLDLLPSSLKLSNEPGPPQAYYSTDTALPEEGGRTALHMACEREDDNKCARDIVRLLLSHGANPNLLWSGHSPLSLSIASGNELVVKELLTQGADPNLPLTKGLGSALCVACDLTYEHQRNMDSKLALIDRLISHGADILKPVMLRQGEKEAVGTAVDYGYFRFFQDRRIARCPFHTLMPAERETFLARKRLLEYMGLQLRQAVFAKESQWDPTWLYLCKRAQGGRNSIPDQYSQEH

SEQ ID NO: 5854 - protein, 623 aa, Artificial Sequence
  Synthetic polypeptide
MEGAHASLSLEDEVSGAGSRQRPLEGKGGETPAAEEPGSLKNYAVFATRDVSAAPEKEEEEAEGPLRAQDLRESYIQLVQGVQEWQDGCMYQGEFGLNMKLGYGKFSWPTGESYHGQFYRDHCHGLGTYMWPDGSSFTGTFYLSHREGYGTMYMKTRLFQTHCHNDIVNLLLDCGADVNKCSDEGLTALSMCFLLHYPAQSFKPNVAERTIPEPQEPPKFPVVPILSSSFMDTNLESLYYELSQAMLERSAQSHSLLKMASPSPCTSSFDKGTMRRMALSMIERRKRWRTIKLLLRRGADPNLCCVPMQVLFLAVKAGDVDGVRLLLEHGARTDICFPPQLSTLTPLHIAAALPGEEGVQIVELLLHAITDVDAKASDEDDTYKPGKLDLLPSSLKLSNEPGPPQAYYSTDTALPEEGGRTALHMACEREDDNKCARDIVRLLLSHGANPNLLWSGHSPLSLSIASGNELVVKELLTQGADPNLPLTKGLGSALCVACDLTYEHQRNMDSKLALIDRLISHGADILKPVMLRQGEKEAVGTAVDYGYFRFFQDRRIARCPFHTLMPAERETFLARKRLLEYMGLQLRQAVFAKESQWDPTWLYLCKRAQGGRNSIPDQYSQEH

SEQ ID NO: 5855 - protein, 638 aa, Artificial Sequence
  Synthetic polypeptide
MEGAHASLSLEDEVSGAGSRQRPLEGKGGETPAAEEPGSLKNYAVFATRDVSAAPEKEEEEAEGPLRAQDLRESYIQLVQGVQEWQDGCMYQGEFGLNMKLGYGKFSWPTGESYHGQFYRDHCHGLGTYMWPDGSSFTGTFYLSHREGYGTMYMKTRLFQTHCHNDIVNLLLDCGADVNKCSDEGLTALSMCFLLHYPAQSFKPNVAERTIPEPQEPPKFPVVPILSSSFMDTNLESLYYEVNVPSQGSYELRPPPAPLLLPRVSGSHEGGHFQDTGQCGGSIDHRSSSLKGDSPLVKGSLGHVESGLEDVLGNTDRGSLCSAETKFESNVCVCDFSIELSQAMLERSAQSHSLLKMASPSPCTSSFDKGTMRRMALSMIERRKRWRTIKLLLRRGADPNLCCVPMQVLFLAVKAGDVDGVRLLLEHGARTDICFPPQLSTLTPLHIAAALPGEEGVQIVELLLHAITDVDAKASDEDDTYKPGKVVKELLTQGADPNLPLTKGLGSALCVACDLTYEHQRNMDSKLALIDRLISHGADILKPVMLRQGEKEAVGTAVDYGYFRFFQDRRIARCPFHTLMPAERETFLARKRLLEYMGLQLRQAVFAKESQWDPTWLYLCKRAQGGRNSIPDQYSQEH

SEQ ID NO: 5856 - protein, 764 aa, Artificial Sequence
  Synthetic polypeptide
MAAHVGSRCASRSSAGSSNTGTRSSATPGARGPGCWRETLTHSVTPARASCSSAPAARALPRKSEGATRTNGGGWKTTDMEGAHASLSLEDEVSGAGSRQRPLEGKGGETPAAEEPGSLKNYAVFATRDVSAAPEKEEEEAEGPLRAQDLRESYIQLVQGVQEWQDGCMYQGEFGLNMKLGYGKFSWPTGESYHGQFYRDHCHGLGTYMWPDGSSFTGTFYLSHREGYGTMYMKTRLFQTHCHNDIVNLLLDCGADVNKCSDEGLTALSMCFLLHYPAQSFKPNVAERTIPEPQEPPKFPVVPILSSSFMDTNLESLYYEVNVPSQGSYELRPPPAPLLLPRVSGSHEGGHFQDTGQCGGSIDHRSSSLKGDSPLVKGSLGHVESGLEDVLGNTDRGSLCSAETKFESNVCVCDFSIELSQAMLERSAQSHSLLKMASPSPCTSSFDKGTMRRMALSMIERRKRWRTIKLLLRRGADPNLCCVPMQVLFLAVKAGDVDGVRLLLEHGARTDICFPPQLSTLTPLHIAAALPGEEGVQIVELLLHAITDVDAKASDEDDTYKPGKLDLLPSSLKLSNEPGPPQAYYSTDTALPEEGGRTALHMACEREDDNKVVKELLTQGADPNLPLTKGLGSALCVACDLTYEHQRNMDSKLALIDRLISHGADILKPVMLRQGEKEAVGTAVDYGYFRFFQDRRIARCPFHTLMPAERETFLARKRLLEYMGLQLRQAVFAKESQWDPTWLYLCKRAQGGRNSIPDQYSQEH

SEQ ID NO: 5857 - protein, 951 aa, Artificial Sequence
  Synthetic polypeptide
MEGAHASLSLEDEVSGAGSRQRPLEGKGGETPAAEEPGSLKNYAVFATRDVSAAPEKEEEEAEGPLRAQDLRESYIQLVQGVQEWQDGCMYQGEFGLNMKLGYGKFSWPTGESYHGQFYRDHCHGLGTYMWPDGSSFTGTFYLSHREGYGTMYMKTRLFQGLYKADQRFGPGVETYPDGSQDVGLWFREQLIKLCTQIPSGFSLLRYPEFSSFITHSPARISLSEEEKTEWGLQEGQDPFFYDYKRFLLNDNLTLPPEMYVYSTNSDHLPMTSSFRKELDARIFLNEIPPFVEDGEPWFIINETPLLVKIQKQTYKFRNKPAHTSWNMGAILEGKRSGFAPCGPKEQLSMEMILKAEEGNHEWICRILKDNFASADVADAKGYTVLAAAATHCHNDIVNLLLDCGADVNKCSDEGLTALSMCFLLHYPAQSFKPNVAERTIPEPQEPPKFPVVPILSSSFMDTNLESLYYEVNVPSQGSYELRPPPAPLLLPRVSGSHEGGHFQDTGQCGGSIDHRSSSLKGDSPLVKGSLGHVESGLEDVLGNTDRGSLCSAETKFESNVCVCDFSIELSQAMLERSAQSHSLLKMASPSPCTSSFDKGTMRRMALSMIERRKRWRTIKLLLRRGADPNLCCVPMQVLFLAVKAGDVDGVRLLLEHGARTDICFPPQLSTLTPLHIAAALPGEEGVQIVELLLHAITDVDAKASDEDDTYKPGKLDLLPSSLKLSNEPGPPQAYYSTDTALPEEGGRTALHMACEREDDNKCARDIVRLLLSHGANPNLLWSGHSPLSLSIASGNELVVKELLTQGADPNLPLTKGLGSALCVACDLTYEHQRNMDSKLALIDRLISHGADILKPVMLRQGEKEAVGTAVDYGYFRFFQDRRIARCPFHTLMPAERETFLARKRLLEYMGLQLRQAVFAKESQWDPTWLYLCKRAQGGRNSIPDQYSQEH

SEQ ID NO: 5858 - protein, 5 aa, Artificial Sequence
  Synthetic polypeptide
APSTR

SEQ ID NO: 5859 - protein, 632 aa, Artificial Sequence
  Synthetic polypeptide
MEGAHASLSLEDEVSGAGSRQRPLEGKGGETPAAEEPGSLKNYAVFATRDVSAAPEKEEEEAEGPLRAQDLRESYIQLVQGVQEWQDGCMYQGEFGLNMKLGYGKFSWPTGESYHGQFYRDHCHGLGTYMWPDGSSFTGTFYLSHREGYGTMYMKTRLFQTHCHNDIVNLLLDCGADVNKCSDEGLTALSMCFLLHYPAQSFKPNVAERTIPEPQEPPKFPVVPILSSSFMDTNLESLYYEVNVPSQGSYELRPPPAPLLLPRVSGSHEGGHFQDTGQCGGSIDHRSSSLKGDSPLVKGSLGHVESGLEDVLGNTDRGSLCSAETKFESNVCVCDFSIELSQAMLERSAQSHSLLKMASPSPCTSSFDKGTMRRMALSMIERRKRWRTIKLLLRRGADPNLCCVPMQVLFLAVKAGDVDGVRLLLEHGARTDICFPPQLSTLTPLHIAAALPGEEGVQIVELLLHAITDVDAKASDEDDTYKPGKLDLLPSSLKLSNEPGPPQAYYSTDTALPEEGGRTALHMACEREDDNKIDRLISHGADILKPVMLRQGEKEAVGTAVDYGYFRFFQDRRIARCPFHTLMPAERETFLARKRLLEYMGLQLRQAVFAKESQWDPTWLYLCKREQRQFQA

SEQ ID NO: 5860 - protein, 623 aa, Artificial Sequence
  Synthetic polypeptide
MYQGEFGLNMKLGYGKFSWPTGESYHGQFYRDHCHGLGTYMWPDGSSFTGTFYLSHREGYGTMYMKTRLFQTHCHNDIVNLLLDCGADVNKCSDEGLTALSMCFLLHYPAQSFKPNVAERTIPEPQEPPKFPVVPILSSSFMDTNLESLYYEVNVPSQGSYELRPPPAPLLLPRVSGSHEGGHFQDTGQCGGSIDHRSSSLKGDSPLVKGSLGHVESGLEDVLGNTDRGSLCSAETKFESNVCVCDFSIELSQAMLERSAQSHSLLKMASPSPCTSSFDKGTMRRMALSMIERRKRWRTIKLLLRRGADPNLCCVPMQVLFLAVKAGDVDGVRLLLEHGARTDICFPPQLSTLTPLHIAAALPGEEGVQIVELLLHAITDVDAKASDEDDTYKPGKLDLLPSSLKLSNEPGPPQAYYSTDTALPEEGGRTALHMACEREDDNKCARDIVRLLLSHGANPNLLWSGHSPLSLSIASGNELVVKELLTQGADPNLPLTKGLGSALCVACDLTYEHQRNMDSKLALIDRLISHGADILKPVMLRQGEKEAVGTAVDYGYFRFFQDRRIARCPFHTLMPAERETFLARKRLLEYMGLQLRQAVFAKESQWDPTWLYLCKREQRQFQA

SEQ ID NO: 5861 - protein, 853 aa, Artificial Sequence
  Synthetic polypeptide
MYQGEFGLNMKLGYGKFSWPTGESYHGQFYRDHCHGLGTYMWPDGSSFTGTFYLSHREGYGTMYMKTRLFQGLYKADQRFGPGVETYPDGSQDVGLWFREQLIKLCTQIPSGFSLLRYPEFSSFITHSPARISLSEEEKTEWGLQEGQDPFFYDYKRFLLNDNLTLPPEMYVYSTNSDHLPMTSSFRKELDARIFLNEIPPFVEDGEPWFIINETPLLVKIQKQTYKFRNKPAHTSWNMGAILEGKRSGFAPCGPKEQLSMEMILKAEEGNHEWICRILKDNFASADVADAKGYTVLAAAATHCHNDIVNLLLDCGADVNKCSDEGLTALSMCFLLHYPAQSFKPNVAERTIPEPQEPPKFPVVPILSSSFMDTNLESLYYEVNVPSQGSYELRPPPAPLLLPRVSGSHEGGHFQDTGQCGGSIDHRSSSLKGDSPLVKGSLGHVESGLEDVLGNTDRGSLCSAETKFESNVCVCDFSIELSQAMLERSAQSHSLLKMASPSPCTSSFDKGTMRRMALSMIERRKRWRTIKLLLRRGADPNLCCVPMQVLFLAVKAGDVDGVRLLLEHGARTDICFPPQLSTLTPLHIAAALPGEEGVQIVELLLHAITDVDAKASDEDDTYKPGKLDLLPSSLKLSNEPGPPQAYYSTDTALPEEGGRTALHMACEREDDNKCARDIVRLLLSHGANPNLLWSGHSPLSLSIASGNELVVKELLTQGADPNLPLTKGLGSALCVACDLTYEHQRNMDSKLALIDRLISHGADILKPVMLRQGEKEAVGTAVDYGYFRFFQDRRIARCPFHTLMPAERETFLARKRLLEYMGLQLRQAVFAKESQWDPTWLYLCKREQRQFQA

SEQ ID NO: 5862 - protein, 614 aa, Artificial Sequence
  Synthetic polypeptide
MEGAHASLSLEDEVSGAGSRQRPLEGKGGETPAAEEPGSLKNYAVFATRDVSAAPEKEEEEAEGPLRAQDLRESYIQLVQGVQEWQDGCMYQGEFGLNMKLGYGKFSWPTGESYHGQFYRDHCHGLGTYMWPDGSSFTGTFYLSHREGYGTMYMKTRLFQTHCHNDIVNLLLDCGADVNKCSDEGLTALSMCFLLHYPAQSFKPNVAERTIPEPQEPPKFPVVPILSSSFMDTNLESLYYELSQAMLERSAQSHSLLKMASPSPCTSSFDKGTMRRMALSMIERRKRWRTIKLLLRRGADPNLCCVPMQVLFLAVKAGDVDGVRLLLEHGARTDICFPPQLSTLTPLHIAAALPGEEGVQIVELLLHAITDVDAKASDEDDTYKPGKLDLLPSSLKLSNEPGPPQAYYSTDTALPEEGGRTALHMACEREDDNKCARDIVRLLLSHGANPNLLWSGHSPLSLSIASGNELVVKELLTQGADPNLPLTKGLGSALCVACDLTYEHQRNMDSKLALIDRLISHGADILKPVMLRQGEKEAVGTAVDYGYFRFFQDRRIARCPFHTLMPAERETFLARKRLLEYMGLQLRQAVFAKESQWDPTWLYLCKREQRQFQA

SEQ ID NO: 5863 - protein, 629 aa, Artificial Sequence
  Synthetic polypeptide
MEGAHASLSLEDEVSGAGSRQRPLEGKGGETPAAEEPGSLKNYAVFATRDVSAAPEKEEEEAEGPLRAQDLRESYIQLVQGVQEWQDGCMYQGEFGLNMKLGYGKFSWPTGESYHGQFYRDHCHGLGTYMWPDGSSFTGTFYLSHREGYGTMYMKTRLFQTHCHNDIVNLLLDCGADVNKCSDEGLTALSMCFLLHYPAQSFKPNVAERTIPEPQEPPKFPVVPILSSSFMDTNLESLYYEVNVPSQGSYELRPPPAPLLLPRVSGSHEGGHFQDTGQCGGSIDHRSSSLKGDSPLVKGSLGHVESGLEDVLGNTDRGSLCSAETKFESNVCVCDFSIELSQAMLERSAQSHSLLKMASPSPCTSSFDKGTMRRMALSMIERRKRWRTIKLLLRRGADPNLCCVPMQVLFLAVKAGDVDGVRLLLEHGARTDICFPPQLSTLTPLHIAAALPGEEGVQIVELLLHAITDVDAKASDEDDTYKPGKVVKELLTQGADPNLPLTKGLGSALCVACDLTYEHQRNMDSKLALIDRLISHGADILKPVMLRQGEKEAVGTAVDYGYFRFFQDRRIARCPFHTLMPAERETFLARKRLLEYMGLQLRQAVFAKESQWDPTWLYLCKREQRQFQA

SEQ ID NO: 5864 - protein, 755 aa, Artificial Sequence
  Synthetic polypeptide
MAAHVGSRCASRSSAGSSNTGTRSSATPGARGPGCWRETLTHSVTPARASCSSAPAARALPRKSEGATRTNGGGWKTTDMEGAHASLSLEDEVSGAGSRQRPLEGKGGETPAAEEPGSLKNYAVFATRDVSAAPEKEEEEAEGPLRAQDLRESYIQLVQGVQEWQDGCMYQGEFGLNMKLGYGKFSWPTGESYHGQFYRDHCHGLGTYMWPDGSSFTGTFYLSHREGYGTMYMKTRLFQTHCHNDIVNLLLDCGADVNKCSDEGLTALSMCFLLHYPAQSFKPNVAERTIPEPQEPPKFPVVPILSSSFMDTNLESLYYEVNVPSQGSYELRPPPAPLLLPRVSGSHEGGHFQDTGQCGGSIDHRSSSLKGDSPLVKGSLGHVESGLEDVLGNTDRGSLCSAETKFESNVCVCDFSIELSQAMLERSAQSHSLLKMASPSPCTSSFDKGTMRRMALSMIERRKRWRTIKLLLRRGADPNLCCVPMQVLFLAVKAGDVDGVRLLLEHGARTDICFPPQLSTLTPLHIAAALPGEEGVQIVELLLHAITDVDAKASDEDDTYKPGKLDLLPSSLKLSNEPGPPQAYYSTDTALPEEGGRTALHMACEREDDNKVVKELLTQGADPNLPLTKGLGSALCVACDLTYEHQRNMDSKLALIDRLISHGADILKPVMLRQGEKEAVGTAVDYGYFRFFQDRRIARCPFHTLMPAERETFLARKRLLEYMGLQLRQAVFAKESQWDPTWLYLCKREQRQFQA

SEQ ID NO: 5865 - protein, 942 aa, Artificial Sequence
  Synthetic polypeptide
MEGAHASLSLEDEVSGAGSRQRPLEGKGGETPAAEEPGSLKNYAVFATRDVSAAPEKEEEEAEGPLRAQDLRESYIQLVQGVQEWQDGCMYQGEFGLNMKLGYGKFSWPTGESYHGQFYRDHCHGLGTYMWPDGSSFTGTFYLSHREGYGTMYMKTRLFQGLYKADQRFGPGVETYPDGSQDVGLWFREQLIKLCTQIPSGFSLLRYPEFSSFITHSPARISLSEEEKTEWGLQEGQDPFFYDYKRFLLNDNLTLPPEMYVYSTNSDHLPMTSSFRKELDARIFLNEIPPFVEDGEPWFIINETPLLVKIQKQTYKFRNKPAHTSWNMGAILEGKRSGFAPCGPKEQLSMEMILKAEEGNHEWICRILKDNFASADVADAKGYTVLAAAATHCHNDIVNLLLDCGADVNKCSDEGLTALSMCFLLHYPAQSFKPNVAERTIPEPQEPPKFPVVPILSSSFMDTNLESLYYEVNVPSQGSYELRPPPAPLLLPRVSGSHEGGHFQDTGQCGGSIDHRSSSLKGDSPLVKGSLGHVESGLEDVLGNTDRGSLCSAETKFESNVCVCDFSIELSQAMLERSAQSHSLLKMASPSPCTSSFDKGTMRRMALSMIERRKRWRTIKLLLRRGADPNLCCVPMQVLFLAVKAGDVDGVRLLLEHGARTDICFPPQLSTLTPLHIAAALPGEEGVQIVELLLHAITDVDAKASDEDDTYKPGKLDLLPSSLKLSNEPGPPQAYYSTDTALPEEGGRTALHMACEREDDNKCARDIVRLLLSHGANPNLLWSGHSPLSLSIASGNELVVKELLTQGADPNLPLTKGLGSALCVACDLTYEHQRNMDSKLALIDRLISHGADILKPVMLRQGEKEAVGTAVDYGYFRFFQDRRIARCPFHTLMPAERETFLARKRLLEYMGLQLRQAVFAKESQWDPTWLYLCKREQRQFQA

SEQ ID NO: 5866 - protein, 5 aa, Artificial Sequence
  Synthetic polypeptide
APSTR

SEQ ID NO: 5867 - protein, 363 aa, Artificial Sequence
  Synthetic polypeptide
MRHGVAWALLVAAALGLGARGVRGAVALADFYPFGAERGDAVTPKQDDGGSGLRPLSVPFPFFGAEHSGLYVNNNGIISFLKEVSQFTPVAFPIAKDRCVVAAFWADVDNRRAGDVYYREATDPAMLRRATEDVRHYFPELLDFNATWVFVATWYRVTFFGGSSSSPVNTFQTVLITDGKLSFTIFNYESIVWTTGTHASSGGNATGLGGIAAQAGFNAGDGQRYFSIPGSRTADMAEVETTTNVGVPGRWAFRIDDAQVRVGGCGHTTSVCLALRPCLNGGKCIDDCVTGNPSYTCSCLSGFTGRRCHLDVNECASQPCQNGGTCTHGINSFRCQCPAGFGGPTCETATILDRMHGVAVRGL

SEQ ID NO: 5868 - protein, 42 aa, Artificial Sequence
  Synthetic polypeptide
QPAPCFRRERMCLPALSEWWDLYSRHQQFPLPVPGWLWGTHL

SEQ ID NO: 5869 - protein, 15 aa, Artificial Sequence
  Synthetic polypeptide
DPPVRQLQSWTECME

SEQ ID NO: 5870 - protein, 76 aa, Artificial Sequence
  Synthetic polypeptide
MSKQQPTQFINPETPGYVGFANLPNQVHRKSVKKGFEFTLMVVGHKRHYGPPPCLFSNYSLWRKPALPALNRVLPV

SEQ ID NO: 5871 - protein, 36 aa, Artificial Sequence
  Synthetic polypeptide
MVVGHKRHYGPPPCLFSNYSLWRKPALPALNRVLPV

SEQ ID NO: 5872 - protein, 87 aa, Artificial Sequence
  Synthetic polypeptide
MEFNSNVKSWSFSLQQPTQFINPETPGYVGFANLPNQVHRKSVKKGFEFTLMVVGHKRHYGPPPCLFSNYSLWRKPALPALNRVLPV

SEQ ID NO: 5873 - protein, 82 aa, Artificial Sequence
  Synthetic polypeptide
MSKQQPTQFINPETPGYVGFANLPNQVHRKSVKKGFEFTLMVVGHKRHYGPPPCLFSNYSLWRKPAVMSREHSSSLTGKPTK

SEQ ID NO: 5874 - protein, 42 aa, Artificial Sequence
  Synthetic polypeptide
MVVGHKRHYGPPPCLFSNYSLWRKPAVMSREHSSSLTGKPTK

SEQ ID NO: 5875 - protein, 93 aa, Artificial Sequence
  Synthetic polypeptide
MEFNSNVKSWSFSLQQPTQFINPETPGYVGFANLPNQVHRKSVKKGFEFTLMVVGHKRHYGPPPCLFSNYSLWRKPAVMSREHSSSLTGKPTK

SEQ ID NO: 5876 - protein, 267 aa, Artificial Sequence
  Synthetic polypeptide
MGEIEGTYRVLQTAGMRLGAQTPVGVSTLEPGQTLLPRMQEKHLHLRVKLLDNTMEIFDIEPKCDGQVLLTQVWKRLNLVECDYFGMEFQNTQSYWIWLEPMKPIIRQIRRPKNVVLRLAVKFFPPDPGQLQEEYTRYLFALQLKRDLLEERLTCADTTAALLTSHLLQSEIGDYDETLDREHLKVNEYLPGQQHCLEKILEFHQKHVGQTPAESDFQVLEIARKLEMYGIRFHMASDREGTKIQLAVSHMGVLVFQEDPRWLIRSN

SEQ ID NO: 5877 - protein, 261 aa, Artificial Sequence
  Synthetic polypeptide
MDAATLTYDTLRFAEFEDFPETSEPVWILGRKYSIFTEKDEILSDVASRLWFTYRKNFPAIGGTGPTSDTGWGCMLRCGQMIFAQALVCRHLGRDWRWTQRKRQPDSYFSVLNAFIDRKDSYYSIHQIAQMGVGEGKSIGQWYGPNTVAQVLKKLAVFDTWSSLAVHIAMDNTVVMEEIRRLCRTSVPCAGATAFPADSDRHCNGFPAGAEVTNRPSPWRPLVLLIPLRLGLTDINEAYVETLKEAELAVTRDHAIALHPG

SEQ ID NO: 5878 - protein, 187 aa, Artificial Sequence
  Synthetic polypeptide
MLRCGQMIFAQALVCRHLGRDWRWTQRKRQPDSYFSVLNAFIDRKDSYYSIHQIAQMGVGEGKSIGQWYGPNTVAQVLKKLAVFDTWSSLAVHIAMDNTVVMEEIRRLCRTSVPCAGATAFPADSDRHCNGFPAGAEVTNRPSPWRPLVLLIPLRLGLTDINEAYVETLKEAELAVTRDHAIALHPG

SEQ ID NO: 5879 - protein, 247 aa, Artificial Sequence
  Synthetic polypeptide
MWHLDFGLHTGKTFQPLPFIIVVYPGAGRRWGLVLSLASHRRRTEAGGGTGPTSDTGWGCMLRCGQMIFAQALVCRHLGRDWRWTQRKRQPDSYFSVLNAFIDRKDSYYSIHQIAQMGVGEGKSIGQWYGPNTVAQVLKKLAVFDTWSSLAVHIAMDNTVVMEEIRRLCRTSVPCAGATAFPADSDRHCNGFPAGAEVTNRPSPWRPLVLLIPLRLGLTDINEAYVETLKEAELAVTRDHAIALHPG

SEQ ID NO: 5880 - protein, 210 aa, Artificial Sequence
  Synthetic polypeptide
MDAATLTYDTLRFAEFEDFPETSEPVWILGRKYSIFTEKDEILSDVASRLWFTYRKNFPAIGGTGPTSDTGWGCMLRCGQMIFAQALVCRHLGRDWRWTQRKRQPDSYFSVLNAFIDRKDSYYSIHQIGRLCRTSVPCAGATAFPADSDRHCNGFPAGAEVTNRPSPWRPLVLLIPLRLGLTDINEAYVETLKEAELAVTRDHAIALHPG

SEQ ID NO: 5881 - protein, 98 aa, Artificial Sequence
  Synthetic polypeptide
TFAQVCLVSESMSPFLGRLCRTSVPCAGATAFPADSDRHCNGFPAGAEVTNRPSPWRPLVLLIPLRLGLTDINEAYVETLKEAELAVTRDHAIALHPG

SEQ ID NO: 5882 - protein, 340 aa, Artificial Sequence
  Synthetic polypeptide
MLPRRPLAWPAWLLRGAPGAAGSWGRPVGPLARRGCCSAPGTPEVPLTRERYPVRRLPFSTVSKQDLAAFERIVPGGVVTDPEALQAPNVDWLRTLRGCSKVLLRPRTSEEVSHILRHCHERNLAVNPQGGNTGMVGGSVPVFDEIILSTARMNRVLSFHSVSGILVCQAGCVLEELSRYVEERDFIMPLDLGAKGSCHIGGNVATNAGGLRFLRYGSLHGTVLGLEVVLADGTVLDCLTSLRKDNTGYDLKQLFIGSEGTLGIITTVSILCPPKPRAVNVAFLVTCVPPACGPGSPRPARLPHPALRTPVQVSAPSLCACETFSLENSSLISTCLCIAS

SEQ ID NO: 5883 - protein, 5 aa, Artificial Sequence
  Synthetic polypeptide
FCVLL

SEQ ID NO: 5884 - protein, 168 aa, Artificial Sequence
  Synthetic polypeptide
MKNVDSDDLVTGTLPKLKSSKEWLEPKPLCFMEVLAKEDTEAAIQSILYKENSVIKELDKYLQHHAFLNARRKEMLYKRWVDCVADPLQKKIIEKVCSHKKIKKRRQGELDGFLKHVNKKGNAFIEHYDPKEYDPFYMSKKDPNFLKNDLQTIVIKSWVFGGYFLENE

SEQ ID NO: 5885 - protein, 73 aa, Artificial Sequence
  Synthetic polypeptide
MEVLAKEDTEAAIQSILYKENSVIKGNAFIEHYDPKEYDPFYMSKKDPNFLKNDLQTIVIKSWVFGGYFLENE

SEQ ID NO: 5886 - protein, 153 aa, Artificial Sequence
  Synthetic polypeptide
MKNVDSDDLVTGTLPKLKSSKEWLEPKPLCFMEVLAKEDTEAAIQSILYKENSVIKELDKYLQHHAFLNARRKEMLYKRWVDCVADPLQKKIIEKVCSHKKIKKRRQGELDGFLKHVNKKGNAFIEHYDPKEYDPFYMSKKDPNFLKKNQNSE

SEQ ID NO: 5887 - protein, 58 aa, Artificial Sequence
  Synthetic polypeptide
MEVLAKEDTEAAIQSILYKENSVIKGNAFIEHYDPKEYDPFYMSKKDPNFLKKNQNSE

SEQ ID NO: 5888 - protein, 670 aa, Artificial Sequence
  Synthetic polypeptide
MPRNQGFSEPEYSAEYSAEYSVSLPSDPDRGVGRTHEISVRNSGSCLCLPRFMRLTFVPESLENLYQTYFKRQRHETLLVLVVFAALFDCYVVVMCAVVFSSDKLASLAVAGIGLVLDIILFVLCKKGLLPDRVTRRVLPYVLWLLITAQIFSYLGLNFARAHAASDTVGWQVFFVFSFFITLPLSLSPIVIISVVSCVVHTLVLGVTVAQQQQEELKGMQLLREILANVFLYLCAIAVGIMSYYMADRKHRKAFLEARQSLEVKMNLEEQSQQQENLMLSILPKHVADEMLKDMKKDESQKDQQQFNTMYMYRHENVSILFADIVGFTQLSSACSAQELVKLLNELFARFDKLAAKYHQLRIKILGDCYYCICGLPDYREDHAVCSILMGLAMVEAISYVREKTKTGVDMRVGVHTGTVLGGVLGQKRWQYDVWSTDVTVANKMEAGGIPGRVHISQSTMDCLKGEFDVEPGDGGSRCDYLEEKGIETYLIIASKPEVKKTATQNGLNGSALPNGAPASSKSSSPALIETKEPNGSAHSSGSTSEKPEEQDAQADNPSFPNPRRRLRLQDLADRVVDASEDEHELNQLLNEALLERESAQVVKKRNTFLLSMRFMDPEMETRYSVEKEKQSGAAFSCSCVVLLCTALVEILIDPWPLQAPAASVSSSVK

SEQ ID NO: 5889 - protein, 303 aa, Artificial Sequence
  Synthetic polypeptide
MGLAMVEAISYVREKTKTGVDMRVGVHTGTVLGGVLGQKRWQYDVWSTDVTVANKMEAGGIPGGSKIEERLYSCVVAPTLRLRWERVHISQSTMDCLKGEFDVEPGDGGSRCDYLEEKGIETYLIIASKPEVKKTATQNGLNGSALPNGAPASSKSSSPALIETKEPNGSAHSSGSTSEKPEEQDAQADNPSFPNPRRRLRLQDLADRVVDASEDEHELNQLLNEALLERESAQVVKKRNTFLLSMRFMDPEMETRYSVEKEKQSGAAFSCSCVVLLCTALVEILIDPWPLQAPAASVSSSVK

SEQ ID NO: 5890 - protein, 363 aa, Artificial Sequence
  Synthetic polypeptide
QLSSACSAQELVKLLNELFARFDKLAAKYHQLRIKILGDCYYCICGLPDYREDHAVCSILMGLAMVEAISYVREKTKTGVDMRVGVHTGTVLGGVLGQKRWQYDVWSTDVTVANKMEAGGIPGGSKIEERLYSCVVAPTLRLRWERVHISQSTMDCLKGEFDVEPGDGGSRCDYLEEKGIETYLIIASKPEVKKTATQNGLNGSALPNGAPASSKSSSPALIETKEPNGSAHSSGSTSEKPEEQDAQADNPSFPNPRRRLRLQDLADRVVDASEDEHELNQLLNEALLERESAQVVKKRNTFLLSMRFMDPEMETRYSVEKEKQSGAAFSCSCVVLLCTALVEILIDPWPLQAPAASVSSSVK

SEQ ID NO: 5891 - protein, 293 aa, Artificial Sequence
  Synthetic polypeptide
MPRNQGFSEPEYSAEYSAEYSVSLPSDPDRGVGRTHEISVRNSGSCLCLPRFMRLTFVPESLENLYQTYFKRQRHETLLVLVVFAALFDCYVVVMCAVVFSSDKLASLAVAGIGLVLDIILFVLCKKGLLPDRVTRRVLPYVLWLLITAQIFSYLGLNFARAHAASDTVGWQVFFVFSFFITLPLSLSPIVIISVVSCVVHTLVLGVTVAQQQQEELKGMQLLRELKPAETMEHAYVLKKYIQDEYLPYVFVSFAYLCVMPRQHGVLVNSQCLGVEQDAKQAQNNMSHPQLSK

SEQ ID NO: 5892 - protein, 243 aa, Artificial Sequence
  Synthetic polypeptide
MIEAFRDNGLNTLDHTTEISVSRLETVISSIYYQLNKRLPSTHQISVEQSISLLLNFMIAAYDSEGRGKLTVFSVKAMLATMCGGKMLDKLRYVFSQMSDSNGLMIFSKFDQFLKEVLKLPTAVFEGPSFGYTEHSVRTCFPQQRKIMLNMFLDTMMADPPPQCLVWLPLMHRLAHVENVFHPVECSYCRCESMMGFRYRCQQCHNYQLCQNCFWRGHAGGPHSNQHQMKEHSSWAGHDGSHL

SEQ ID NO: 5893 - protein, 300 aa, Artificial Sequence
  Synthetic polypeptide
MIEESGNKRKTMAEKRQLFIEMRAQNFDVIRLSTYRTACKLRFVQKRCNLHLVDIWNMIEAFRDNGLNTLDHTTEISVSRLETVISSIYYQLNKRLPSTHQISVEQSISLLLNFMIAAYDSEGRGKLTVFSVKAMLATMCGGKMLDKLRYVFSQMSDSNGLMIFSKFDQFLKEVLKLPTAVFEGPSFGYTEHSVRTCFPQQRKIMLNMFLDTMMADPPPQCLVWLPLMHRLAHVENVFHPVECSYCRCESMMGFRYRCQQCHNYQLCQNCFWRGHAGGPHSNQHQMKEHSSWAGHDGSHL

SEQ ID NO: 5894 - protein, 96 aa, Artificial Sequence
  Synthetic polypeptide
MLNMFLDTMMADPPPQCLVWLPLMHRLAHVENVFHPVECSYCRCESMMGFRYRCQQCHNYQLCQNCFWRGHAGGPHSNQHQMKEHSSWAGHDGSHL

SEQ ID NO: 5895 - protein, 84 aa, Artificial Sequence
  Synthetic polypeptide
MREKGRRKKGRTWAEAAKTVLEKYPNTPMSHKEILQVIQREGLKEISISEAELEDCLSPGVRGCRVLRRCYCTPALVTEQEAVL

SEQ ID NO: 5896 - protein, 56 aa, Artificial Sequence
  Synthetic polypeptide
MSHKEILQVIQREGLKEISISEAELEDCLSPGVRGCRVLRRCYCTPALVTEQEAVL

SEQ ID NO: 5897 - protein, 68 aa, Artificial Sequence
  Synthetic polypeptide
MREKGRRKKGRTWAEAAKTVRWQAPVFGRLRQKNRSNPGGGDCSELRSRYCTAAWATRAKLRLKKKKK

SEQ ID NO: 5898 - protein, 206 aa, Artificial Sequence
  Synthetic polypeptide
MAKKTYDLLFKLLLIGDSGVGKTCVLFRFSDDAFNTTFISTIGIDFKIKTVELQGKKIKLQIWDTAGQERFHTITTSYYRGAMGIMLVYDITNGKSFENISKWLRNIDENIMKIWRNYTAEDAIVIEKAMKAIKHKTVTSCWRKLCTDVEHDFTGFVAEPVKEFMKETVDKTRANRHQPEESTEDDLMKMPVLPNQRWTIRKKAKK

SEQ ID NO: 5899 - protein, 20 aa, Artificial Sequence
  Synthetic polypeptide
MTLVSGWLLYGWIIVSEFKN

SEQ ID NO: 5900 - protein, 936 aa, Artificial Sequence
  Synthetic polypeptide
MIKTEKSYPERRLRGVLEELSCGCCRFLSLADKDQGHSSRTRLDRERLKSCMRELENMGQQARMLRAQVKRHTVRDKLRLCQNFLQKLRFLADEPQHSIPDIFIWMMSNNKRVAYARVPSKDLLFSIVEEETGKDCAKVKTLFLKLPGKRGFGSAGWTVQAKVELYLWLGLSKQRKEFLCGLPCGFQEVKAAQGLGLHAFPPVSLVYTKKQAFQLRAHMYQARSLFAADSSGLSDPFARVFFINQSQCTEVLNETLCPTWDQMLVFDNLELYGEAHELRDDPPIIVIEIYDQDSMGKADFMGRTFAKPLVKMADEAYCPPRFPPQLEYYQIYRGNATAGDLLAAFELLQIGPAGKADLPPINGPVDVDRGPIMPVPMGIRPVLSKYRVEVLFWGLRDLKRVNLAQVDRPRVDIECAGKGVQSSLIHNYKKNPNFNTLVKWFEVDLPENELLHPPLNIRVVDCRAFGRYTLVGSHAVSSLRRFIYRPPDRSAPSWNTTGEVVVTMEPEVPIKKLETMVKLDATSEAVVKVDVAEEEKEKKKKKKGTAEEPEEEEPDESMLDWWSKYFASIDTMKEQLRQQEPSGIDLEEKEEVDNTEGLKGSMKGKEKARAAKEEKKKKTQSSGSGQGSEAPEKKKPKIDELKVYPKELESEFDNFEDWLHTFNLLRGKTGDDEDGSTEEERIVGRFKGSLCVYKVPLPEDVSREAGYDSTYGMFQGIPSNDPINVLVRVYVVRATDLHPADINGKADPYIAIRLGKTDIRDKENYISKQLNPVFGKSFDIEASFPMESMLTVAVYDWDLVGTDDLIGETKIDLENRFYSKHRATCGIAQTYSTHGYNIWRDPMKPSQILTRLCKDGKVDGPHFGPPGRVKVANRVFTGPSEIEDENGQRKPTDEHVALLALRHWEDIPRAGCRLVPEHVETRPLLNPDKPGIEQKL

SEQ ID NO: 5901 - protein, 1013 aa, Artificial Sequence
  Synthetic polypeptide
MMTDTQDGPSESSQIMRSLTPLINREEAFGEAGEAGLWPSITHTPDSQEEGLNDIQEMIKTEKSYPERRLRGVLEELSCGCCRFLSLADKDQGHSSRTRLDRERLKSCMRELENMGQQARMLRAQVKRHTVRDKLRLCQNFLQKLRFLADEPQHSIPDIFIWMMSNNKRVAYARVPSKDLLFSIVEEETGKDCAKVKTLFLKLPGKRGFGSAGWTVQAKVELYLWLGLSKQRKEFLCGLPCGFQEVKAAQGLGLHAFPPVSLVYTKKQAFQLRAHMYQARSLFAADSSGLSDPFARVFFINQSQCTEVLNETLCPTWDQMLVFDNLELYGEAHELRDDPPIIVIEIYDQDSMGKADFMGRTFAKPLVKMADEAYCPPRFPPQLEYYQIYRGNATAGDLLAAFELLQIGPAGKADLPPINGPVDVDRGPIMPVPMGIRPVLSKYRVEVLFWGLRDLKRVNLAQVDRPRVDIECAGKGVQSSLIHNYKKNPNFNTLVKWFEVDLPENELLHPPLNIRVVDCRAFGRYTLVGSHAVSSLRRFIYRPPDRSAPSWNTTVRLLRRCRVLCNGGSSSHSTGEVVVTMEPEVPIKKLETMVKLDATSEAVVKVDVAEEEKEKKKKKKGTAEEPEEEEPDESMLDWWSKYFASIDTMKEQLRQQEPSGIDLEEKEEVDNTEGLKGSMKGKEKARAAKEEKKKKTQSSGSGQGSEAPEKKKPKIDELKVYPKELESEFDNFEDWLHTFNLLRGKTGDDEDGSTEEERIVGRFKGSLCVYKVPLPEDVSREAGYDSTYGMFQGIPSNDPINVLVRVYVVRATDLHPADINGKADPYIAIRLGKTDIRDKENYISKQLNPVFGKSFDIEASFPMESMLTVAVYDWDLVGTDDLIGETKIDLENRFYSKHRATCGIAQTYSTHGYNIWRDPMKPSQILTRLCKDGKVDGPHFGPPGRVKVANRVFTGPSEIEDENGQRKPTDEHVALLALRHWEDIPRAGCRLVPEHVETRPLLNPDKPGIEQKL

SEQ ID NO: 5902 - protein, 1703 aa, Artificial Sequence
  Synthetic polypeptide
MALLIHLKTVSELRGRGDRIAKVTFRGQSFYSRVLENCEDVADFDETFRWPVASSIDRNEMLEIQVFNYSKVFSNKLIGTFRMVLQKVVEESHVEVTDTLIDDNNAIIKTSLCVEVRYQATDGTVGSWDDGDFLGDESLQEEEKDSQETDGLLPGSRPSSRPPGEKSFRRAGRSVFSAMKLGKNRSHKEEPQRPDEPAVLEMEDLDHLAIRLGDGLDPDSVSLASVTALTTNVSNKRSKPDIKMEPSAGRPMDYQVSITVIEARQLVGLNMDPVVCVEVGDDKKYTSMKESTNCPYYNEYFVFDFHVSPDVMFDKIIKISVIHSKNLLRSGTLVGSFKMDVGTVYSQPEHQFHHKWAILSDPDDISSGLKGYVKCDVAVVGKGDNIKTPHKANETDEDDIEGNLLLPEGVPPERQWARFYVKIYRAEGLPRMNTSLMANVKKAFIGENKDLVDPYVQVFFAGQKGKTSVQKSSYEPLWNEQVVFTDLFPPLCKRMKVQIRDSDKVNDVAIGTHFIDLRKISNDGDKGFLPTLGPAWVNMYGSTRNYTLLDEHQDLNEGLGEGVSFRARLLLGLAVEIVDTSNPELTSSTEVQVEQATPISESCAGKMEEFFLFGAFLEASMIDRRNGDKPITFEVTIGNYGNEVDGLSRPQRPRPRKEPGDEEEVDLIQNASDDEAGDAGDLASVSSTPPMRPQVTDRNYFHLPYLERKPCIYIKSWWPDQRRRLYNANIMDHIADKLEEGLNDIQEMIKTEKSYPERRLRGVLEELSCGCCRFLSLADKDQGHSSRTRLDRERLKSCMRELENMGQQARMLRAQVKRHTVRDKLRLCQNFLQKLRFLADEPQHSIPDIFIWMMSNNKRVAYARVPSKDLLFSIVEEETGKDCAKVKTLFLKLPGKRGFGSAGWTVQAKVELYLWLGLSKQRKEFLCGLPCGFQEVKAAQGLGLHAFPPVSLVYTKKQAFQLRAHMYQARSLFAADSSGLSDPFARVFFINQSQCTEVLNETLCPTWDQMLVFDNLELYGEAHELRDDPPIIVIEIYDQDSMGKADFMGRTFAKPLVKMADEAYCPPRFPPQLEYYQIYRGNATAGDLLAAFELLQIGPAGKADLPPINGPVDVDRGPIMPVPMGIRPVLSKYRVEVLFWGLRDLKRVNLAQVDRPRVDIECAGKGVQSSLIHNYKKNPNFNTLVKWFEVDLPENELLHPPLNIRVVDCRAFGRYTLVGSHAVSSLRRFIYRPPDRSAPSWNTTVRLLRRCRVLCNGGSSSHSTGEVVVTMEPEVPIKKLETMVKLDATSEAVVKVDVAEEEKEKKKKKKGTAEEPEEEEPDESMLDWWSKYFASIDTMKEQLRQQEPSGIDLEEKEEVDNTEGLKGSMKGKEKARAAKEEKKKKTQSSGSGQGSEAPEKKKPKIDELKVYPKELESEFDNFEDWLHTFNLLRGKTGDDEDGSTEEERIVGRFKGSLCVYKVPLPEDVSREAGYDSTYGMFQGIPSNDPINVLVRVYVVRATDLHPADINGKADPYIAIRLGKTDIRDKENYISKQLNPVFGKSFDIEASFPMESMLTVAVYDWDLVGTDDLIGETKIDLENRFYSKHRATCGIAQTYSTHGYNIWRDPMKPSQILTRLCKDGKVDGPHFGPPGRVKVANRVFTGPSEIEDENGQRKPTDEHVALLALRHWEDIPRAGCRLVPEHVETRPLLNPDKPGIEQKL

SEQ ID NO: 5903 - protein, 60 aa, Artificial Sequence
  Synthetic polypeptide
MGRRRAPELYRAPFPLYALQVDPSTGLLIAAGGGGAAKTGIKNGVICEAQMREKRLEKPL

SEQ ID NO: 5904 - protein, 43 aa, Artificial Sequence
  Synthetic polypeptide
TPDGCKRGPAQPGRPAAAIAPQSSAHLSPAPAGGHLCGGGSGA

SEQ ID NO: 5905 - protein, 1847 aa, Artificial Sequence
  Synthetic polypeptide
MAALVLEDGSVLRGQPFGAAVSTAGEVVFQTGMVGYPEALTDPSYKAQILVLTYPLIGNYGIPPDEMDEFGLCKWFESSGIHVAALVVGECCPTPSHWSATRTLHEWLQQHGIPGLQGVDTRELTKKLREQGSLLGKLVQNGTEPSSLPFLDPNARPLVPEVSIKTPRVFNTGGAPRILALDCGLKYNQIRCLCQRGAEVTVVPWDHALDSQEYEGLFLSNGPGDPASYPSVVSTLSRVLSEPNPRPVFGICLGHQLLALAIGAKTYKMRYGNRGHNQPCLLVGSGRCFLTSQNHGFAVETDSLPADWAPLFTNANDGSNEGIVHNSLPFFSVQFHPEHQAGPSDMELLFDIFLETVKEATAGNPGGQTVRERLTERLCPPGIPTPGSGLPPPRKVLILGSGGLSIGQAGEFDYSGSQAIKALKEENIQTLLINPNIATVQTSQGLADKVYFLPITPHYVTQVIRNERPDGVLLTFGGQTALNCGVELTKAGVLARYGVRVLGTPVETIELTEDRRAFAARMAEIGEHVAPSEAANSLEQAQAAAERLGYPVLVRAAFALGGLGSGFASNREELSALVAPAFAHTSQVLVDKSLKGWKEIEYEVVRDAYGNCVTVCNMENLDPLGIHTGESIVVAPSQTLNDREYQLLRQTAIKVTQHLGIVGECNVQYALNPESEQYYIIEVNARLSRSSALASKATGYPLAYVAAKLALGIPLPELRNSVTGGTAAFEPSVDYCVVKIPRWDLSKFLRVSTKIGSCMKSVGEVMGIGRSFEEAFQKALRMVDENCVGFDHTVKPVSDMELETPTDKRIFVVAAALWAGYSVDRLYELTRIDRWFLHRMKRIIAHAQLLEQHRGQPLPPDLLQQAKCLGFSDKQIALAVLSTELAVRKLRQELGICPAVKQIDTVAAEWPAQTNYLYLTYWGTTHDLTFRTPHVLVLGSGVYRIGSSVEFDWCAVGCIQQLRKMGYKTIMVNYNPETVSTDYDMCDRLYFDEISFEVVMDIYELENPEGVILSMGGQLPNNMAMALHRQQCRVLGTSPEAIDSAENRFKFSRLLDTIGISQPQWRELSDLESARQFCQTVGYPCVVRPSYVLSGAAMNVAYTDGDLERFLSSAAAVSKEHPVVISKFIQEAKEIDVDAVASDGVVAAIAISEHVENAGVHSGDATLVTPPQDITAKTLERIKAIVHAVGQELQVTGPFNLQLIAKDDQLKVIECNVRVSRSFPFVSKTLGVDLVALATRVIMGEEVEPVGLMTGSGVVGVKVPQFSFSRLAGADVVLGVEMTSTGEVAGFGESRCEAYLKAMLSTGFKIPKKNILLTIGSYKNKSELLPTVRLLESLGYSLYASLGTADFYTEHGVKVTAVDWHFEEAVDGECPPQRSILEQLAEKNFELVINLSMRGAGGRRLSSFVTKGYRTRRLAADFSVPLIIDIKCTKLFVEALGQIGPAPPLKVHVDCMTSQKLVRLPGLIDVHVHLREPGGTHKEDFASGTAAALAGGITMVCAMPNTRPPIIDAPALALAQKLAEAGARCDFALFLGASSENAGTLGTVAGSAAGLKLYLNETFSELRLDSVVQWMEHFETWPSHLPIVAHAEQQTVAAVLMVAQLTQRSVHICHVARKEEILLIKAAKARGLPVTCEVAPHHLFLSHDDLERLGPGKGEVRPELGSRQDVEALWENMAVIDCFASDHAPHTLEEKCGSRPPPGFPGLETMLPLLLTAVSEGRLSLDDLLQRLHHNPRRIFHLPPQEDTYVEVDLEHEWTIPSHMPFSKAHWTPFEGQKVKGTVRRVVLRGEVAYIDGQVLVPPGYGQDVRKWPQGAVPQLPPSAPATSEMTTPGVVVHICNPSYLGG

SEQ ID NO: 5906 - protein, 1784 aa, Artificial Sequence
  Synthetic polypeptide
MAALVLEDGSVLRGQPFGAAVSTAGEVVFQTGMVGYPEALTDPSYKAQILVLTYPLIGNYGIPPDEMDEFGLCKWFESSGIHVAALVVGECCPTPSHWSATRTLHEWLQQHGIPGLQGVDTRELTKKLREQGSLLGKLVQNGTEPSSLPFLDPNARPLVPEVSIKTPRVFNTGGAPRILALDCGLKYNQIRCLCQRGAEVTVVPWDHALDSQEYEGLFLSNGPGDPASYPSVVSTLSRVLSEPNPRPVFGICLGHQLLALAIGAKTYKMRYGNRGHNQPCLLVGSGRCFLTSQNHGFAVETDSLPADWAPLFTNANDGSNEGIVHNSLPFFSVQFHPEHQAGPSDMELLFDIFLETVKEATAGNPGGQTVRERLTERLCPPGIPTPGSGLPPPRKVLILGSGGLSIGQAGEFDYSGSQAIKALKEENIQTLLINPNIATVQTSQGLADKVYFLPITPHYVTQVIRNERPDGVLLTFGGQTALNCGVELTKAGVLARYGVRVLGTPVETIELTEDRRAFAARMAEIGEHVAPSEAANSLEQAQAAAERLGYPVLVRAAFALGGLGSGFASNREELSALVAPAFAHTSQVLVDKSLKGWKEIEYEVVRDAYGNCVTYYIIEVNARLSRSSALASKATGYPLAYVAAKLALGIPLPELRNSVTGGTAAFEPSVDYCVVKIPRWDLSKFLRVSTKIGSCMKSVGEVMGIGRSFEEAFQKALRMVDENCVGFDHTVKPVSDMELETPTDKRIFVVAAALWAGYSVDRLYELTRIDRWFLHRMKRIIAHAQLLEQHRGQPLPPDLLQQAKCLGFSDKQIALAVLSTELAVRKLRQELGICPAVKQIDTVAAEWPAQTNYLYLTYWGTTHDLTFRTPHVLVLGSGVYRIGSSVEFDWCAVGCIQQLRKMGYKTIMVNYNPETVSTDYDMCDRLYFDEISFEVVMDIYELENPEGVILSMGGQLPNNMAMALHRQQCRVLGTSPEAIDSAENRFKFSRLLDTIGISQPQWRELSDLESARQFCQTVGYPCVVRPSYVLSGAAMNVAYTDGDLERFLSSAAAVSKEHPVVISKFIQEAKEIDVDAVASDGVVAAIAISEHVENAGVHSGDATLVTPPQDITAKTLERIKAIVHAVGQELQVTGPFNLQLIAKDDQLKVIECNVRVSRSFPFVSKTLGVDLVALATRVIMGEEVEPVGLMTGSGVVGVKVPQFSFSRLAGADVVLGVEMTSTGEVAGFGESRCEAYLKAMLSTGFKIPKKNILLTIGSYKNKSELLPTVRLLESLGYSLYASLGTADFYTEHGVKVTAVDWHFEEAVDGECPPQRSILEQLAEKNFELVINLSMRGAGGRRLSSFVTKGYRTRRLAADFSVPLIIDIKCTKLFVEALGQIGPAPPLKVHVDCMTSQKLVRLPGLIDVHVHLREPGGTHKEDFASGTAAALAGGITMVCAMPNTRPPIIDAPALALAQKLAEAGARCDFALFLGASSENAGTLGTVAGSAAGLKLYLNETFSELRLDSVVQWMEHFETWPSHLPIVAHAEQQTVAAVLMVAQLTQRSVHICHVARKEEILLIKAAKARGLPVTCEVAPHHLFLSHDDLERLGPGKGEVRPELGSRQDVEALWENMAVIDCFASDHAPHTLEEKCGSRPPPGFPGLETMLPLLLTAVSEGRLSLDDLLQRLHHNPRRIFHLPPQEDTYVEVDLEHEWTIPSHMPFSKAHWTPFEGQKVKGTVRRVVLRGEVAYIDGQVLVPPGYGQDVRKWPQGAVPQLPPSAPATSEMTTPGVVVHICNPSYLGG

SEQ ID NO: 5907 - protein, 1856 aa, Artificial Sequence
  Synthetic polypeptide
MAALVLEDGSVLRGQPFGAAVSTAGEVVFQTGMVGYPEALTDPSYKAQILVLTYPLIGNYGIPPDEMDEFGLCKWFESSGIHVAALVVGECCPTPSHWSATRTLHEWLQQHGIPGLQGVDTRELTKKLREQGSLLGKLVQNGTEPSSLPFLDPNARPLVPEVSIKTPRVFNTGGAPRILALDCGLKYNQIRCLCQRGAEVTVVPWDHALDSQEYEGLFLSNGPGDPASYPSVVSTLSRVLSEPNPRPVFGICLGHQLLALAIGAKTYKMRYGNRGHNQPCLLVGSGRCFLTSQNHGFAVETDSLPADWAPLFTNANDGSNEGIVHNSLPFFSVQFHPEHQAGPSDMELLFDIFLETVKEATAGNPGGQTVRERLTERLCPPGIPTPGSGLPPPRKVLILGSGGLSIGQAGEFDYSGSQAIKALKEENIQTLLINPNIATVQTSQGLADKVYFLPITPHYVTQVIRNERPDGVLLTFGGQTALNCGVELTKAGVLARYGVRVLGTPVETIELTEDRRAFAARMAEIGEHVAPSEAANSLEQAQAAAERLGYPVLVRAAFALGGLGSGFASNREELSALVAPAFAHTSQVLVDKSLKGWKEIEYEVVRDAYGNCVTVCNMENLDPLGIHTGESIVVAPSQTLNDREYQLLRQTAIKVTQHLGIVGECNVQYALNPESEQYYIIEVNARLSRSSALASKATGYPLAYVAAKLALGIPLPELRNSVTGGTAAFEPSVDYCVVKIPRWDLSKFLRVSTKIGSCMKSVGEVMGIGRSFEEAFQKALRMVDENCVGFDHTVKPVSDMELETPTDKRIFVVAAALWAGYSVDRLYELTRIDRWFLHRMKRIIAHAQLLEQHRGQPLPPDLLQQAKCLGFSDKQIALAVLSTELAVRKLRQELGICPAVKQIDTVAAEWPAQTNYLYLTYWGTTHDLTFRTPHVLVLGSGVYRIGSSVEFDWCAVGCIQQLRKMGYKTIMVNYNPETVSTDYDMCDRLYFDEISFEVVMDIYELENPEGVILSMGGQLPNNMAMALHRQQCRVLGTSPEAIDSAENRFKFSRLLDTIGISQPQWRELSDLESARQFCQTVGYPCVVRPSYVLSGAAMNVAYTDGDLERFLSSAAAVSKEHPVVISKFIQEAKEIDVDAVASDGVVAAIAISEHVENAGVHSGDATLVTPPQDITAKTLERIKAIVHAVGQELQVTGPFNLQLIAKDDQLKVIECNVRVSRSFPFVSKTLGVDLVALATRVIMGEEVEPVGLMTGSGVVGVKVPQFSFSRLAGADVVLGVEMTSTGEVAGFGESRCEAYLKAMLSTGFKIPKKNILLTIGSYKNKSELLPTVRLLESLGYSLYASLGTADFYTEHGVKVTAVDWHFEEAVDGECPPQRSILEQLAEKNFELVINLSMRGAGGRRLSSFVTKGYRTRRLAADFSVPLIIDIKCTKLFVEALGQIGPAPPLKVHVDCMTSQKLVRLPGLIDVHVHLREPGGTHKEDFASGTAAALAGGITMVCAMPNTRPPIIDAPALALAQKLAEAGARCDFALFLGASSENAGTLGTVAGSAAGLKLYLNETFSELRLDSVVQWMEHFETWPSHLPIVAHAEQQTVAAVLMVAQLTQRSVHICHVARKEEILLIKAAKARGLPVTCEVAPHHLFLSHDDLERLGPGKGEVRPELGSRQDVEALWENMAVIDCFASDHAPHTLEEKCGSRPPPGFPGLETMLPLLLTAVSEGRLSLDDLLQRLHHNPRRIFHLPPQEDTYVEVDLEHEWTIPSHMPFSKAHWTPFEGQKVKGTVRRVVLRGEVAYIDGQVLVPPGYGQDVRKWPQGAVPQLPPSAPATSEMTTKVTPLHSSLSDRTRLRLKRKKKKQ

SEQ ID NO: 5908 - protein, 1793 aa, Artificial Sequence
  Synthetic polypeptide
MAALVLEDGSVLRGQPFGAAVSTAGEVVFQTGMVGYPEALTDPSYKAQILVLTYPLIGNYGIPPDEMDEFGLCKWFESSGIHVAALVVGECCPTPSHWSATRTLHEWLQQHGIPGLQGVDTRELTKKLREQGSLLGKLVQNGTEPSSLPFLDPNARPLVPEVSIKTPRVFNTGGAPRILALDCGLKYNQIRCLCQRGAEVTVVPWDHALDSQEYEGLFLSNGPGDPASYPSVVSTLSRVLSEPNPRPVFGICLGHQLLALAIGAKTYKMRYGNRGHNQPCLLVGSGRCFLTSQNHGFAVETDSLPADWAPLFTNANDGSNEGIVHNSLPFFSVQFHPEHQAGPSDMELLFDIFLETVKEATAGNPGGQTVRERLTERLCPPGIPTPGSGLPPPRKVLILGSGGLSIGQAGEFDYSGSQAIKALKEENIQTLLINPNIATVQTSQGLADKVYFLPITPHYVTQVIRNERPDGVLLTFGGQTALNCGVELTKAGVLARYGVRVLGTPVETIELTEDRRAFAARMAEIGEHVAPSEAANSLEQAQAAAERLGYPVLVRAAFALGGLGSGFASNREELSALVAPAFAHTSQVLVDKSLKGWKEIEYEVVRDAYGNCVTYYIIEVNARLSRSSALASKATGYPLAYVAAKLALGIPLPELRNSVTGGTAAFEPSVDYCVVKIPRWDLSKFLRVSTKIGSCMKSVGEVMGIGRSFEEAFQKALRMVDENCVGFDHTVKPVSDMELETPTDKRIFVVAAALWAGYSVDRLYELTRIDRWFLHRMKRIIAHAQLLEQHRGQPLPPDLLQQAKCLGFSDKQIALAVLSTELAVRKLRQELGICPAVKQIDTVAAEWPAQTNYLYLTYWGTTHDLTFRTPHVLVLGSGVYRIGSSVEFDWCAVGCIQQLRKMGYKTIMVNYNPETVSTDYDMCDRLYFDEISFEVVMDIYELENPEGVILSMGGQLPNNMAMALHRQQCRVLGTSPEAIDSAENRFKFSRLLDTIGISQPQWRELSDLESARQFCQTVGYPCVVRPSYVLSGAAMNVAYTDGDLERFLSSAAAVSKEHPVVISKFIQEAKEIDVDAVASDGVVAAIAISEHVENAGVHSGDATLVTPPQDITAKTLERIKAIVHAVGQELQVTGPFNLQLIAKDDQLKVIECNVRVSRSFPFVSKTLGVDLVALATRVIMGEEVEPVGLMTGSGVVGVKVPQFSFSRLAGADVVLGVEMTSTGEVAGFGESRCEAYLKAMLSTGFKIPKKNILLTIGSYKNKSELLPTVRLLESLGYSLYASLGTADFYTEHGVKVTAVDWHFEEAVDGECPPQRSILEQLAEKNFELVINLSMRGAGGRRLSSFVTKGYRTRRLAADFSVPLIIDIKCTKLFVEALGQIGPAPPLKVHVDCMTSQKLVRLPGLIDVHVHLREPGGTHKEDFASGTAAALAGGITMVCAMPNTRPPIIDAPALALAQKLAEAGARCDFALFLGASSENAGTLGTVAGSAAGLKLYLNETFSELRLDSVVQWMEHFETWPSHLPIVAHAEQQTVAAVLMVAQLTQRSVHICHVARKEEILLIKAAKARGLPVTCEVAPHHLFLSHDDLERLGPGKGEVRPELGSRQDVEALWENMAVIDCFASDHAPHTLEEKCGSRPPPGFPGLETMLPLLLTAVSEGRLSLDDLLQRLHHNPRRIFHLPPQEDTYVEVDLEHEWTIPSHMPFSKAHWTPFEGQKVKGTVRRVVLRGEVAYIDGQVLVPPGYGQDVRKWPQGAVPQLPPSAPATSEMTTKVTPLHSSLSDRTRLRLKRKKKKQ

SEQ ID NO: 5909 - protein, 43 aa, Artificial Sequence; identical to SEQ ID NO: 5904
  Synthetic polypeptide

SEQ ID NO: 5910 - protein, 720 aa, Artificial Sequence
  Synthetic polypeptide
MHLKHLRTLLSPQDGAAKVTCMAWSQNNAKFAVCTVDRVVLLYDEHGERRDKFSTKPADMKYGRKSYMVKGMAFSPDSTKIAIGQTDNIIYVYKIGEDWGDKKVICNKFIQTSAVTCLQWPAEYIIVFGLAEGKVRLANTKTNKSSTIYGTESYVVSLTTNCSGKGILSGHADGTIVRYFFDDEGSGESQGKLVNHPCPPYALAWATNSIVAAGCDRKIVAYGKEGHMLQTFDYSRDPQEREFTTAVSSPGGQSVVLGSYDRLRVFNWIPRRSIWEEAKPKEITNLYTITALAWKRDGSRLCVGTLCGGVEQFDCCLRRSIYKNKFELTYVGPSQVIVKNLSSGTRVVLKSHYGYEVEEVKILGKERYLVAHTSETLLLGDLNTNRLSEIAWQGSGGNEKYFFENENVCMIFNAGELTLVEYGNNDTLGSVRTEFMNPHLISVRINERCQRGTEDNKKLAYLIDIKTIAIVDLIGGYNIGTVSHESRVDWLELNETGHKLLFRDRKLRLHLYDIESCSKTMILNFCSYMQWVPGSDVLVAQNRNSLCVWYNIEAPERVTMFTIRGDVIGLERGGGKTEVMVMEGVTTVAYTLDEGLIEFGTAIDDGNYIRATAFLETLEMTPETEAMWKTLSKLALEARQLHIAERCFSALGQVAKARFLHETNEIADQVSREYGGEGTDFYQVRARLAMLEKNYKLAEMIFLEQPGVVAHACNPSYSGG

SEQ ID NO: 5911 - protein, 11 aa, Artificial Sequence
  Synthetic polypeptide
MSSRLGAVPAR

SEQ ID NO: 5912 - protein, 25 aa, Artificial Sequence
  Synthetic polypeptide
MFLSAVFFAKSKSKCLQTMACRMFL

SEQ ID NO: 5913 - protein, 39 aa, Artificial Sequence
  Synthetic polypeptide
MAASGEPQRQWQEEVAAVVVVGSCMTDLVSWCMITYLSF

SEQ ID NO: 5914 - protein, 212 aa, Artificial Sequence
  Synthetic polypeptide
MTEAEVRGLCIKSREIFLSQPILLELEAPLKICGDIHGQYTDLLRLFEYGGFPPEANYLFLGDYVDRGKQSLETICLLLAYKIKYPENFFLLRGNHECASINRIYGFYDECKRRFNIKLWKTFTDCFNCLPIAAIVDEKIFCCHGGLSPDLQSMEQIRRIMRPTDVPDTVGLLPTPLPSITKKLALRSDDLIVSGTFLVFVLLPLFMAHFLL

SEQ ID NO: 5915 - protein, 240 aa, Artificial Sequence
  Synthetic polypeptide
MADGELNVDSLITRLLEVRGCRPGKIVQMTEAEVRGLCIKSREIFLSQPILLELEAPLKICGDIHGQYTDLLRLFEYGGFPPEANYLFLGDYVDRGKQSLETICLLLAYKIKYPENFFLLRGNHECASINRIYGFYDECKRRFNIKLWKTFTDCFNCLPIAAIVDEKIFCCHGGLSPDLQSMEQIRRIMRPTDVPDTVGLLPTPLPSITKKLALRSDDLIVSGTFLVFVLLPLFMAHFLL

SEQ ID NO: 5916 - protein, 355 aa, Artificial Sequence
  Synthetic polypeptide
MGTRDDVPEAKVLVPVAVYCGSIPRTSAGPRVLPPGSINSSLPHGEGSLQPEPRALLNNEEPSQLLRGLGQLGGLKLDTPSKGWQARNGHPRNLRALSLGDQPLVLLPSPESEANSVARDTIQIKDKLKKRRLSEGLAASSRASLDPGGGPQGVPLHSTIPRATSQRLLRVPRPMPLIQSIPTTPEASGVKEKGLDLPGSIPGPHELRPGAQEAQISWQYLHCNDEKMQKSLGAIVIPPIPKARTVAATPSRVPGSLPSPLPPGQGVLTGLRAPRTRLARGSGPREKTPASLEPKPLASPIRDRPAAAKKPALPFSQSAPTLTAFSFDCAREACPPLKEEDQKEIGTKALVHTPH

SEQ ID NO: 5917 - protein, 37 aa, Artificial Sequence
  Synthetic polypeptide
MHSRGREIVVLLNPWSINEAVSSYCTYFIKQDSKSFG

SEQ ID NO: 5918 - protein, 184 aa, Artificial Sequence
  Synthetic polypeptide
MVSWKGIYFILTLFWGSFFGSIFMLSPFLPLMFVNPSWYRWINNRLVATWLTLPVALLETMFGVKVIITGDAFVPGERSVIIMNHRTRMDWMFLWNCLMRYSYLRLEKICLKASLKGVPGFGWAMQAAAYIFIHRKWKDDKSHFEDMIDYFCDIHEPLQLLIFPEGTDLTGVVVHPWNPSYSGG

SEQ ID NO: 5919 - protein, 222 aa, Artificial Sequence
  Synthetic polypeptide
MHSRGREIVVLLNPWSINEAVSSYCTYFIKQDSKSFGIMVSWKGIYFILTLFWGSFFGSIFMLSPFLPLMFVNPSWYRWINNRLVATWLTLPVALLETMFGVKVIITGDAFVPGERSVIIMNHRTRMDWMFLWNCLMRYSYLRLEKICLKASLKGVPGFGWAMQAAAYIFIHRKWKDDKSHFEDMIDYFCDIHEPLQLLIFPEGTDLTGVVVHPWNPSYSGG

SEQ ID NO: 5920 - protein, 1053 aa, Artificial Sequence
  Synthetic polypeptide
MTADKLVFFVNGRKVVEKNADPETTLLAYLRRKLGLSGTKLGCGEGGCGACTVMLSKYDRLQNKIVHFSANACLAPICSLHHVAVTTVEGIGSTKTRLHPVQERIAKSHGSQCGFCTPGIVMSMYTLLRNQPEPTMEEIENAFQGNLCRCTGYRPILQGFRTFARDGGCCGGDGNNPNCCMNQKKDHSVSLSPSLFKPEEFTPLDPTQEPIFPPELLRLKDTPRKQLRFEGERVTWIQASTLKELLDLKAQHPDAKLVVGNTEIGIEMKFKNMLFPMIVCPAWIPELNSVEHGPDGISFGAACPLSIVEKTLVDAVAKLPAQKTEVFRGVLEQLRWFAGKQVKSVASVGGNIITASPISDLNPVFMASGAKLTLVSRGTRRTVQMDHTFFPGYRKTLLSPEEILLSIEIPYSREGEYFSAFKQASRREDDIAKVTSGMRVLFKPGTTEVQELALCYGGMANRTISALKTTQRQLSKLWKEELLQDVCAGLAEELHLPPDAPGGMVDFRCTLTLSFFFKFYLTVLQKLGQENLEDKCGKLDPTFASATLLFQKDPPADVQLFQEVPKGQSEEDMVGRPLPHLAADMQASGEAVYCDDIPRYENELSLRLVTSTRAHAKIKSIDTSEAKKVPGFVCFISADDVPGSNITGICNDETVFAKDKVTCVGHIIGAVVADTPEHTQRAAQGVKITYEELPAIITIEDAIKNNSFYGPELKIEKGDLKKGFSEADNVVSGEIYIGGQEHFYLETHCTIAVPKGEAGEMELFVSTQNTMKTQSFVAKMLGVPANRIVVRVKRMGGGFGGKETRSTVVSTAVALAAYKTGRPVRCMLDRDEDMLITGGRHPFLARYKVGFMKTGTVVALEVDHFSNVGNTQDLSQSIMERALFHMDNCYKIPNIRGTGRLCKTNLPSNTAFRGFGGPQGMLIAECWMSEVAVTCGMPAEEVRRKNLYKEGDLTHFNQKLEGFTLPRCWEECLASSQYHARKSEVDKFNKENCWKKRGLCIIPTKFGISFTVPFLNQAGALLHVYTDGSVLLTHGGTEMGQGLHTKMVQELAR

SEQ ID NO: 5921 - protein, 311 aa, Artificial Sequence
  Synthetic polypeptide
MTADKLVFFVNGRKVVEKNADPETTLLAYLRRKLGLSGTKLGCGEGGCGACTVMLSKYDRLQNKIVHFSANACLAPICSLHHVAVTTVEGIGSTKTRLHPVQERIAKSHGSQCGFCTPGIVMSMYTLLRNQPEPTMEEIENAFQGNLCRCTGYRPILQGFRTFARDGGCCGGDGNNPNCCMNQKKDHSVSLSPSLFKPEEFTPLDPTQEPIFPPELLRLKDTPRKQLRFEGERVTWIQASTLKELLDLKAQHPDAKLVVGNTEIGIEMKFKNMLFPMIVCPAWIPELNSVEHGPDGHSTTLGPHFLIHGKL

SEQ ID NO: 5922 - protein, 199 aa, Artificial Sequence
  Synthetic polypeptide
MSWKILLFGVINLICTGFLLMWCSSTNSIALTAYTYLTIFDLFSLMTCLISYWVTLRKPSPVYSFGFERLEVLAVFASTVLAQLGALFILKESAERFLEQPEIHTGRLLVGTFVALCFNLFTMLSIRNKPFAYVSEAASTSWLQEHVADLSRSLCGIIPGLSSIFLPRMNPFVLIDLAGAFALCITYMLIEIKCLHLKN

SEQ ID NO: 5923 - protein, 268 aa, Artificial Sequence
  Synthetic polypeptide
MGTIHLFRKPQRSFFGKLLREFRLVAADRRSWKILLFGVINLICTGFLLMWCSSTNSIALTAYTYLTIFDLFRDGVSPFWLGWSQTPDLKWSTHLGLPKCWDNRRELPCLSNSLMTCLISYWVTLRKPSPVYSFGFERLEVLAVFASTVLAQLGALFILKESAERFLEQPEIHTGRLLVGTFVALCFNLFTMLSIRNKPFAYVSEAASTSWLQEHVADLSRSLCGIIPGLSSIFLPRMNPFVLIDLAGAFALCITYMLIEIKCLHLKN

SEQ ID NO: 5924 - protein, 31 aa, Artificial Sequence
  Synthetic polypeptide
MNPFVLIDLAGAFALCITYMLIEIKCLHLKN

SEQ ID NO: 5925 - protein, 228 aa, Artificial Sequence
  Synthetic polypeptide
MGTIHLFRKPQRSFFGKLLREFRLVAADRRSWKILLFGVINLICTGFLLMWCSSTNSIALTAYTYLTIFDLFSLMTCLISYWVTLRKPSPVYSFGFERLEVLAVFASTVLAQLGALFILKESAERFLEQPEIHTGRLLVGTFVALCFNLFTMLSIRNKPFAYVSEAASTSWLQEHVADLSRSLCGIIPGLSSIFLPRMNPFVLIDLAGAFALCITYMLIEIKCLHLKN

SEQ ID NO: 5926 - protein, 154 aa, Artificial Sequence
  Synthetic polypeptide
MTCLISYWVTLRKPSPVYSFGFERLEVLAVFASTVLAQLGALFILKESAERFLEQPEIHTGRLLVGTFVALCFNLFTMLSIRNKPFAYVSEAASTSWLQEHVADLSRSLCGIIPGLSSIFLPRMNPFVLIDLAGAFALCITYMLIEIKCLHLKN

SEQ ID NO: 5927 - protein, 207 aa, Artificial Sequence
  Synthetic polypeptide
MQPPGPPPAYAPTNGDFTFVSSADAEDLSGSIASPDVKLNLGGDFIKESTATTFLRQRGYGWLLEVEDDDPEDNKPLLEELDIDLKDIYYKIRCVLMPMPSLGFNRQVVRDNPDFWGPLAVVLFFSMISLYGQFRVVSWIITIWIFGSLTIFLLARVLGGEVAYGQVLGVIGYSLLPLIVIAPVLLVVGSFEVVSTLIKGSLQRVYI

SEQ ID NO: 5928 - protein, 16 aa, Artificial Sequence
  Synthetic polypeptide
PLYFWWLDHLKWCLHL

SEQ ID NO: 5929 - protein, 118 aa, Artificial Sequence
  Synthetic polypeptide
MEDDAPVIYGLEFQARALTPQTAETDAIRFLVGTQSLKYDNQIHIIDFDDENNIINKNVLLHQAGEIWHISASPADRGVLTTCYNRTFCCVLSLDSFGALGKSAAQLFIALATCLSVP

SEQ ID NO: 5930 - protein, 4505 aa, Artificial Sequence
  Synthetic polypeptide
MVTGGGAAPPGTVTEPLPSVIVLSAGRKMAAAAAAASGPGCSSAAGAGAAGVSEWLVLRDGCMHCDADGLHSLSYHPALNAILAVTSRGTIKVIDGTSGATLQASALSAKPGGQVKCQYISAVDKVIFVDDYAVGCRKDLNGILLLDTALQTPVSKQDDVVQLELPVTEAQQLLSACLEKVDISSTEGYDLFITQLKDGLKNTSHETAANHKVAKWATVTFHLPHHVLKSIASAIVNELKKINQNVAALPVASSVMDRLSYLLPSARPELGVGPGRSVDRSLMYSEANRRETFTSWPHVGYRWAQPDPMAQAGFYHQPASSGDDRAMCFTCSVCLVCWEPTDEPWSEHERHSPNCPFVKGEHTQNVPLSVTLATSPAQFPCTDGTDRISCFGSGSCPHFLAAATKRGKICIWDVSKLMKVHLKFEINAYDPAIVQQLILSGDPSSGVDSRRPTLAWLEDSSSCSDIPKLEGDSDDLLEDSDSEEHSRSDSVTGHTSQKEAMEVSLDITALSILQQPEKLQWEIVANVLEDTVKDLEELGANPCLTNSKSEKTKEKHQEQHNIPFPCLLAGGLLTYKSPATSPISSNSHRSLDGLSRTQGESISEQGSTDNESCTNSELNSPLVRRTLPVLLLYSIKESDEKAGKIFSQMNNIMSKSLHDDGFTVPQIIEMELDSQEQLLLQDPPVTYIQQFADAAANLTSPDSEKWNSVFPKPGTLVQCLRLPKFAEEENLCIDSITPCADGIHLLVGLRTCPVESLSAINQVEALNNLNKLNSALCNRRKGELESNLAVVNGANISVIQHESPADVQTPLIIQPEQRNVSGGYLVLYKMNYATRIVTLEEEPIKIQHIKDPQDTITSLILLPPDILDNREDDCEEPIEDMQLTSKNGFEREKTSDISTLGHLVITTQGGYVKILDLSNFEILAKVEPPKKEGTEEQDTFVSVIYCSGTDRLCACTKGGELHFLQIGGTCDDIDEADILVDGSLSKGIEPSSEGSKPLSNPSSPGISGVDLLVDQPFTLEILTSLVELTRFETLTPRFSATVPPCWVEVQQEQQQRRHPQHLHQQHHGDAAQHTRTWKLQTDSNSWDEHVFELVLPKACMVGHVDFKFVLNSNITNIPQIQVTLLKNKAPGLGKVNALNIEVEQNGKPSLVDLNEEMQHMDVEESQCLRLCPFLEDHKEDILCGPVWLASGLDLSGHAGMLTLTSPKLVKGMAGGKYRSFLIHVKAVNERGTEEICNGGMRPVVRLPSLKHQSNKGYSLASLLAKVAAGKEKSSNVKNENTSGTRKSENLRGCDLLQEVSVTIRRFKKTSISKERVQRCAMLQFSEFHEKLVNTLCRKTDDGQITEHAQSLVLDTLCWLAGVHSNGPGSSKEGNENLLSKTRKFLSDIVRVCFFEAGRSIAHKCARFLALCISNGKCDPCQPAFGPVLLKALLDNMSFLPAATTGGSVYWYFVLLNYVKDEDLAGCSTACASLLTAVSRQLQDRLTPMEALLQTRYGLYSSPFDPVLFDLEMSGSSCKNVYNSSIGVQSDEIDLSDVLSGNGKVSSCTAAEGSFTSLTGLLEVEPLHFTCVSTSDGTRIERDDAMSSFGVTPAVGGLSSGTVGEASTALSSAAQVALQSLSHAMASAEQQLQVLQEKQQQLLKLQQQKAKLEAKLHQTTAAAAAAASAVGPVHNSVPSNPVAAPGFFIHPSDVIPPTPKTTPLFMTPPLTPPNEAVSVVINAELAQLFPGSVIDPPAVNLAAHNKNSNKSRMNPLGSGLALAISHASHFLQPPPHQSIIIERMHSGARRFVTLDFGRPILLTDVLIPTCGDLASLSIDIWTLGEEVDGRRLVVATDISTHSLILHDLIPPPVCRFMKITVIGRYGSTNARAKIPLGFYYGHTYILPWESELKLMHDPLKGEGESANQPEIDQHLAMMVALQEDIQCRYNLACHRLETLLQSIDLPPLNSANNAQYFLRKPDKAVEEDSRVFSAYQDCIQLQLQLNLAHNAVQRLKVALGASRKMLSETSNPEDLIQTSSTEQLRTIIRYLLDTLLSLLHASNGHSVPAVLQSTFHAQACEELFKHLCISGTPKIRLHTGLLLVQLCGGERWWGQFLSNVLQELYNSEQLLIFPQDRVFMLLSCIGQRSLSNSGVLESLLNLLDNLLSPLQPQLPMHRRTEGVLDIPMISWVVMLVSRLLDYVATVEDEAAAAKKPLNGNQWSFINNNLHTQSLNRSSKGSSSLDRLYSRKIRKQLVHHKQQLNLLKAKQKALVEQMEKEKIQSNKGSSYKLLVEQAKLKQATSKHFKDLIRLRRTAEWSRSNLDTEVTTAKESPEIEPLPFTLAHERCISVVQKLVLFLLSMDFTCHADLLLFVCKVLARIANATRPTIHLCEIVNEPQLERLLLLLVGTDFNRGDISWGGAWAQYSLTCMLQDILAGELLAPVAAEAMEEGTVGDDVGATAGDSDDSLQQSSVQLLETIDEPLTHDITGAPPLSSLEKDKEIDLELLQDLMEVDIDPLDIDLEKDPLAAKVFKPISSTWYDYWGADYGTYNYNPYIGGLGIPVAKPPANTEKNGSQTVSVSVSQALDARLEVGLEQQAELMLKMMSTLEADSILQALTNTSPTLSQSPTGTDDSLLGGLQAANQTSQLIIQLSSVPMLNVCFNKLFSMLQVHHVQLESLLQLWLTLSLNSSSTGNKENGADIFLYNANRIPVISLNQASITSFLTVLAWYPNTLLRTWCLVLHSLTLMTNMQLNSGSSSAIGTQESTAHLLVSDPNLIHVLVKFLSGTSPHGTNQHSPQVGPTATQAMQEFLTRLQVHLSSTCPQIFSEFLLKLIHILSTERGAFQTGQGPLDAQVKLLEFTLEQNFEVVSVSTISAVIESVTFLVHHYITCSDKVMSRSGSDSSVGARACFGGLFANLIRPGDAKAVCGEMTRDQLMFDLLKLVNILVQLPLSGNREYSARVSVTTNTTDSVSDEEKVSGGKDGNGSSTSVQGSPAYVADLVLANQQIMSQILSALGLCNSSAMAMIIGASGLHLTKHENFHGGLDAISVGDGLFTILTTLSKKASTVHMMLQPILTYMACGYMGRQGSLATCQLSEPLLWFILRVLDTSDALKAFHDMGGVQLICNNMVTSTRAIVNTARSMVSTIMKFLDSGPNKAVDSTLKTRILASEPDNAEGIHNFAPLGTITSSSPTAQPAEVLLQATPPHRRARSAAWSYIFLPEEAWCDLTIHLPAAVLLKEIHIQPHLASLATCPSSVSVEVSADGVNMLPLSTPVVTSGLTYIKIQLVKAEVASAVCLRLHRPRDASTLGLSQIKLLGLTAFGTTSSATVNNPFLPSEDQVSKTSIGWLRLLHHCLTHISDLEGMMASAAAPTANLLQTCAALLMSPYCGMHSPNIEVVLVKIGLQSTRIGLKLIDILLRNCAASGSDPTDLNSPLLFGRLNGLSSDSTIDILYQLGTTQDPGTKDRIQALLKWVSDSARVAAMKRSGRMNYMCPNSSTVEYGLLMPSPSHLHCVAAILWHSYELLVEYDLPALLDQELFELLFNWSMSLPCNMVLKKAVDSLLCSMCHVHPNYFSLLMGWMGITPPPVQCHHRLSMTDDSKKQDLSSSLTDDSKNAQAPLALTESHLATLASSSQSPEAIKQLLDSGLPSLLVRSLASFCFSHISSSESIAQSIDISQDKLRRHHVPQQCNKMPITADLVAPILRFLTEVGNSHIMKDWLGGSEVNPLWTALLFLLCHSGSTSGSHNLGAQQTSARSASLSSAATTGLTTQQRTAIENATVAFFLQCISCHPNNQKLMAQVLCELFQTSPQRGNLPTSGNISGFIRRLFLQLMLEDEKVTMFLQSPCPLYKGRINATSHVIQHPMYGAGHKFRTLHLPVSTTLSDVLDRVSDTPSITAKLISEQKDDKEKKNHEEKEKVKAENGFQDNYSVVVASGLKSQSKRAVSATPPRPPSRRGRTIPDKIGSTSGAEAANKIITVPVFHLFHKLLAGQPLPAEMTLAQLLTLLYDRKLPQGYRSIDLTVKLGSRVITDPSLSKTDSYKRLHPEKDHGDLLASCPEDEALTPGDECMDGILDESLLETCPIQSPLQVFAGMGGLALIAERLPMLYPEVIQQVSAPVVTSTTQEKPKDSDQFEWVTIEQSGELVYEAPETVAAEPPPIKSAVQTMSPIPAHSLAAFGLFLRLPGYAEVLLKERKHAQCLLRLVLGVTDDGEGSHILQSPSANVLPTLPFHVLRSLFSTTPLTTDDGVLLRRMALEIGALHLILVCLSALSHHSPRVPNSSVNQTEPQVSSSHNPTSTEEQQLYWAKGTGFGTGSTASGWDVEQALTKQRLEEEHVTCLLQVLASYINPVSSAVNGEAQSSHETRGQNSNALPSVLLELLSQSCLIPAMSSYLRNDSVLDMARHVPLYRALLELLRAIASCAAMVPLLLPLSTENGEEEEEQSECQTSVGTLLAKMKTCVDTYTNRLRSKRENVKTGVKPDASDQEPEGLTLLVPDIQKTAEIVYAATTSLRQANQALWED

SEQ ID NO: 5931 - protein, 357 aa, Artificial Sequence
  Synthetic polypeptide
MWTPELAILRGFPTEAERQQWKQEGVVGSESGSFLQLLLEGNYEAIFLNSMTQNIFNSTTTAEEKIDSYLEKQVVTFLDYSTDLDTTERQQLIFLLGVSSLQLFVQSNWTGPPVDLHPQDFLSSVLFQQFSEVKGLDAFVLSLLTLDGESIYSLTSKPILLLLARIILVNVRHKLTAIQSLPWWTLRCVNIHQHLLEERSPLLFTLAENCIDQVMKLQNLFVDDSGRYLAIQFHLECAYVFLYYYEYRKAKDQLDIAKDISQLQIDLTGALGKRTRFQENYVAQLILDVRREGDVLSNCEFTPAPTPQEHLTKNLELNDDTILNDIKLADCEQFQMPDLCAEEIAIILGIWCGVLCL

SEQ ID NO: 5932 - protein, 231 aa, Artificial Sequence
  Synthetic polypeptide
MAGAWLRWGLLLWAGLLASSAHGRLRRITYVVHPGPGLAAGALPLSGPPRSRTFNVALNARYSRSSAAAGAPSRASPGVPSERTRRTSKPGGAALQGLRPPPPPPPEPARPAVPGGQLHPNPGGHPAAAPFTKQGRQVVRSKVPQETQSGGGSRLQVHQKQQLQGVNVCGGRCCHGWSKAPGSQRCTKQICGTLSLREMIWGIWWKKLLSGKLFKRRQNIKVWKICSLMMK

SEQ ID NO: 5933 - protein, 575 aa, Artificial Sequence
  Synthetic polypeptide
MAGAWLRWGLLLWAGLLASSAHGRLRRITYVVHPGPGLAAGALPLSGPPRSRTFNVALNARYSRSSAAAGAPSRASPGVPSERTRRTSKPGGAALQGLRPPPPPPPEPARPAVPGGQLHPNPGGHPAAAPFTKQGRQVVRSKVPQETQSGGGSRLQVHQKQQLQGVNVCGGRCCHGWSKAPGSQRCTKPSCVPPCQNGGMCLRPQLCVCKPGTKGKACETIAAQDTSSPVFGGQSPGAASSWGPPEQAAKHTSSKKADTLPRVSPVAQMTLTLKPKPSVGLPQQIHSQVTPLSSQSVVIHHGQTQEYVLKPKYFPAQKGISGEQSTEGSFPLRYVQDQVAAPFQLSNHTGRIKVVFTPSICKVTCTKGSCQNSCEKGNTTTLISENGHAADTLTATNFRVVICHLPCMNGGQCSSRDKCQCPPNFTGKLCQIPVHGASVPKLYQHSQQPGKALGTHVIHSTHTLPLTVTSQQGVKVKFPPNIVNIHVKHPPEASVQIHQVSRIDGPTGQKTKEAQPGQSQVSYQGLPVQKTQTIHSTYSHQQVIPHVYPVAAKTQLGRCFQETIGSQAGCCGSCL

SEQ ID NO: 5934 - protein, 249 aa, Artificial Sequence
  Synthetic polypeptide
MDTKLMCLLFFFSLPPLLVSNHTGRIKVVFTPSICKVTCTKGSCQNSCEKGNTTTLISENGHAADTLTATNFRVVICHLPCMNGGQCSSRDKCQCPPNFTGKLCQIPVHGASVPKLYQHSQQPGKALGTHVIHSTHTLPLTVTSQQGVKVKFPPNIVNIHVKHPPEASVQIHQVSRIDGPTGQKTKEAQPGQSQVSYQGLPVQKTQTIHSTYSHQQVIPHVYPVAAKTQLGRCFQETIGSQAGCCGSCL

SEQ ID NO: 5935 - protein, 91 aa, Artificial Sequence
  Synthetic polypeptide
MEDDAPVIYGLEFQARALTPQTAETDAIRFLVGTQSLKYDNQIHIIDFDDENNIINKNVLLHQAGEIWHISASPADRGVLTTCYNRSLSVP

SEQ ID NO: 5936 - protein, 444 aa, Artificial Sequence
  Synthetic polypeptide
MGSSGLGKAATLDELLCTCIEMFDDNGELDNSYLPRIVLLMHRWYLSSTELAEKLLCMYRNATGESCNEFRLKICYFMRYWILKFPAEFNLDLGLIRMTEEFREVASQLGYEKHVSLIDISSIPSYDWMRRVTQRKKVSKKGKACLLFDHLEPIELAEHLTFLEHKSFRRISFTDYQSYVIHGCLENNPTLERSIALFNGISKWVQLMVLSKPTPQQRAEVITKFINVAKKLLQLKNFNTLMAVVGGLSHSSISRLKETHSHLSSEVTKNWNEMTELVSSNGNYCNYRKAFADCDGFKIPILGVHLKDLIAVHVIFPDWTEENKVNIVKMHQLSVTLSELVSLQNASHHLEPNMDLINLLTLSLDLYHTEDDIYKLSLVLEPRNSKSQPTSPTTPNKPVVPLEWALGVMPKPDPTVINKHIRKLVEPGRQSETPSEKKKKKRKE

SEQ ID NO: 5937 - protein, 443 aa, Artificial Sequence
  Synthetic polypeptide
MGSSGLGKAATLDELLCTCIEMFDDNGELDNSYLPRIVLLMHRWYLSSTELAEKLLCMYRNATGESCNEFRLKICYFMRYWILKFPAEFNLDLGLIRMTEEFREVASQLGYEKHVSLIDISSIPSYDWMRRVTQRKKVSKKGKACLLFDHLEPIELAEHLTFLEHKSFRRISFTDYQSYVIHGCLENNPTLERSIALFNGISKWVQLMVLSKPTPQQRAEVITKFINVAKKLLQLKNFNTLMAVVGGLSHSSISRLKETHSHLSSEVTKNWNEMTELVSSNGNYCNYRKAFADCDGFKIPILGVHLKDLIAVHVIFPDWTEENKVNIVKMHQLSVTLSELVSLQNASHHLEPNMDLINLLTLSLDLYHTEDDIYKLSLVLEPRNSKSPTSPTTPNKPVVPLEWALGVMPKPDPTVINKHIRKLVEPGRQSETPSEKKKKKRKE

SEQ ID NO: 5938 - protein, 153 aa, Artificial Sequence
  Synthetic polypeptide
ADCDGFKIPILGVHLKDLIAVHVIFPDWTEENKVNIVKMHQLSVTLSELVSLQNASHHLEPNMDLINLLTLSLDLYHTEDDIYKLSLVLEPRNSKSQPTSPTTPNKPVVPLEWALGVMPKPDPTVINKHIRKLVEPGRQSETPSEKKKKKRKE

SEQ ID NO: 5939 - protein, 36 aa, Artificial Sequence
  Synthetic polypeptide
MEDDAPVIYGLEFQPSPSSFTPTWNSSQEHSLVSLL

SEQ ID NO: 5940 - protein, 39 aa, Artificial Sequence
  Synthetic polypeptide
MEDDAPVIYGLEFQEIQPLLRLLGADSSQLGPAPGIALS

SEQ ID NO: 5941 - protein, 30 aa, Artificial Sequence
  Synthetic polypeptide
MEDDAPVIYGLEFQAVVYSLRFSFRKSSHF

SEQ ID NO: 5942 - protein, 230 aa, Artificial Sequence
  Synthetic polypeptide
MSWLLFLAHRVALAALPCRRGSRGFGMFYAVRRGRKTGVFLTWNECRAQVDRFPAARFKKFATEDEAWAFVRKSASPEVSEGHENQHGQESEAKASKRLREPLDGDGHESAEPYAKHMKPSVEPAPPVSRDTFSYMGDFVVVYTDGCCSSNGRRRPRAGIGVYWGPGHPLNVGIRLPGRQTNQRAEIHAACKAIEQAKTQNINKLVLYTDSMFTINGTGDAVRSGSGSYF

SEQ ID NO: 5943 - protein, 459 aa, Artificial Sequence
  Synthetic polypeptide
MYLVAGDRGLAGCGHLLVSLLGLLLLLARSGTRALVCLPCDESKCEEPRNCPGSIVQGVCGCCYTCASQRNESCGGTFGIYGTCDRGLRCVIRPPLNGDSLTEYEAGVCEDENWTDDQLLGFKPCNENLIAGCNIINGKCECNTIRTCSNPFEFPSQDMCLSALKRIEEEKPDCSKARCEVQFSPRCPEDSVLIEGYAPPGECCPLPSRCVCNPAGCLRKVCQPGNLNILVSKASGKPGECCDLYECKPVFGVDCRTVECPPVQQTACPPDSYETQVRLTADGCCTLPTRCECLSGLCGFPVCEVGSTPRIVSRGDGTPGKCCDVFECVNDTKPACVFNNVEYYDGDMFRMDNCRFCRCQGGVAICFTAQCGEINCERYYVPEGECCPVCEDPVYPFNNPAGCYANGLILAHGDRWREDDCTFCQCVNGERHCVATVCGQTCTNPVKVPGECCPVCEAL

SEQ ID NO: 5944 - protein, 128 aa, Artificial Sequence
  Synthetic polypeptide
MSANNSPPSAQKSVLPTAIPAVLPAASPCSSPKTGLSARLSNGSFSAPSLTNSRGSVHTVSFLLQIGLTRESVTIEAQELSLSAVKDLVCSIVYQKIVSSWKIRTILSLQTVGPVSCTYRTCKKYAFL

SEQ ID NO: 5945 - protein, 410 aa, Artificial Sequence
  Synthetic polypeptide
MPYSTNKELILGIMVGTAGISLLLLWYHKVRKPGIAMKLPEFLSLGNTFNSITLQDEIHDDQGTTVIFQERQLQILEKLNELLTNMEELKEEIRFLKEAIPKLEEYIQDELGGKITVHKISPQHRARKRRLPTIQSSATSNSSEEAESEGGYITANTDTEEQSFPVPKAFNTRVEELNLDVLLQKVDHLRMSESGKSESFELLRDHKEKFRDEIEFMWRFARAYGDMYELSTNTQEKKHYANIGKTLSERAINRAPMNGHCHLWYAVLCGYVSEFEGLQNKINYGHLFKEHLDIAIKLLPEEPFLYYLKGRYCYTVSKLSWIEKKMAATLFGKIPSSTVQEALHNFLKAEELCPGYSNPNYMYLAKCYTDLEENQNALKFCNLALLLPTVTKEDKEAQKEMQKIMTSLKS

SEQ ID NO: 5946 - protein, 265 aa, Artificial Sequence
  Synthetic polypeptide
MGKCLRYITANTDTEEQSFPVPKAFNTRVEELNLDVLLQKVDHLRMSESGKSESFELLRDHKEKFRDEIEFMWRFARAYGDMYELSTNTQEKKHYANIGKTLSERAINRAPMNGHCHLWYAVLCGYVSEFEGLQNKINYGHLFKEHLDIAIKLLPEEPFLYYLKGRYCYTVSKLSWIEKKMAATLFGKIPSSTVQEALHNFLKAEELCPGYSNPNYMYLAKCYTDLEENQNALKFCNLALLLPTVTKEDKEAQKEMQKIMTSLKS

SEQ ID NO: 5947 - protein, 7 aa, Artificial Sequence
  Synthetic polypeptide
SFVWLCI

SEQ ID NO: 5948 - protein, 230 aa, Artificial Sequence
  Synthetic polypeptide
MASVTRAVFGELPSGGGTVEKFQLQSDLLRVDIISWGCTITALEVKDRQGRASDVVLGFAELEGYLQKQPYFGAVIGRVANRIAKGTFKVDGKEYHLAINKEPNSLHGGVRGFDKVLWTPRVLSNGVQFSRISPDGEEGYPGELKVWVTYTLDGGELIVNYRAQASQATPVNLTNHSYFNLAGQASPNINDHEVTIEADTYLPVDETLIPTGCVRWLMPVNPALWEAEVD

SEQ ID NO: 5949 - protein, 203 aa, Artificial Sequence
  Synthetic polypeptide
LLRVDIISWGCTITALEVKDRQGRASDVVLGFAELEGYLQKQPYFGAVIGRVANRIAKGTFKVDGKEYHLAINKEPNSLHGGVRGFDKVLWTPRVLSNGVQFSRISPDGEEGYPGELKVWVTYTLDGGELIVNYRAQASQATPVNLTNHSYFNLAGQASPNINDHEVTIEADTYLPVDETLIPTGCVRWLMPVNPALWEAEVD

SEQ ID NO: 5950 - protein, 110 aa, Artificial Sequence
  Synthetic polypeptide
RVLSNGVQFSRISPDGEEGYPGELKVWVTYTLDGGELIVNYRAQASQATPVNLTNHSYFNLAGQASPNINDHEVTIEADTYLPVDETLIPTGCVRWLMPVNPALWEAEVD

SEQ ID NO: 5951 - protein, 217 aa, Artificial Sequence
  Synthetic polypeptide
MASVTRAVFGELPSGGGTVEKFQLQSDLLRVDIISWGCTITALEVKDRQGRASDVVLGFAELEGYLQKQPYFGAVIGRVANRIAKGTFKVDGKEYHLAINKEPNSLHGGVRGFDKVLWTPRVLSNGVQFSRISPDGEEGYPGELKVWVTYTLDGGELIVNYRAQASQATPVNLTNHSYFNLAGQASPNINDHEVTIEADTYLPVDETLIPTDMLRTT

SEQ ID NO: 5952 - protein, 190 aa, Artificial Sequence
  Synthetic polypeptide
LLRVDIISWGCTITALEVKDRQGRASDVVLGFAELEGYLQKQPYFGAVIGRVANRIAKGTFKVDGKEYHLAINKEPNSLHGGVRGFDKVLWTPRVLSNGVQFSRISPDGEEGYPGELKVWVTYTLDGGELIVNYRAQASQATPVNLTNHSYFNLAGQASPNINDHEVTIEADTYLPVDETLIPTDMLRTT

SEQ ID NO: 5953 - protein, 97 aa, Artificial Sequence
  Synthetic polypeptide
RVLSNGVQFSRISPDGEEGYPGELKVWVTYTLDGGELIVNYRAQASQATPVNLTNHSYFNLAGQASPNINDHEVTIEADTYLPVDETLIPTDMLRTT

SEQ ID NO: 5954 - protein, 404 aa, Artificial Sequence
  Synthetic polypeptide
MQAQQLPYEFFSEENAPKWRGLLVPALKKVQGQVHPTLESNDDALQYVEELILQLLNMLCQAQPRSASDVEERVQKSFPHPIDKWAIADAQSAIEKRKRRNPLSLPVEKIHPLLKEVLGYKIDHQVSVYIVAVLEYISADILKLVGNYVRNIRHYEITKQDIKVAMCADKVLMDMFHQDVEDINILSLTDEEPSTSGEQTYYDLVKAFMAEIRQYIRELNLIIKVFREPFVSNSKLFSANDVENIFSRIVDIHELSVKLLGHIEDTVEMTDEGSPHPLVGSCFEDLAEELAFDPYESYARDILRPGFHDRFLSQLSKPGAALYLQSIGEGFKEAVQYVLPRLLLAPVYHCLHYFELLKILRKLRQENHLNLGGEGCSEPRSRHCTSAWAKRAKLHLEKKKKKKK

SEQ ID NO: 5955 - protein, 347 aa, Artificial Sequence
  Synthetic polypeptide
MLCQAQPRSASDVEERVQKSFPHPIDKWAIADAQSAIEKRKRRNPLSLPVEKIHPLLKEVLGYKIDHQVSVYIVAVLEYISADILKLVGNYVRNIRHYEITKQDIKVAMCADKVLMDMFHQDVEDINILSLTDEEPSTSGEQTYYDLVKAFMAEIRQYIRELNLIIKVFREPFVSNSKLFSANDVENIFSRIVDIHELSVKLLGHIEDTVEMTDEGSPHPLVGSCFEDLAEELAFDPYESYARDILRPGFHDRFLSQLSKPGAALYLQSIGEGFKEAVQYVLPRLLLAPVYHCLHYFELLKILRKLRQENHLNLGGEGCSEPRSRHCTSAWAKRAKLHLEKKKKKKK

SEQ ID NO: 5956 - protein, 307 aa, Artificial Sequence
  Synthetic polypeptide
MNPGFDLSRRNPQEDFELIQRIGSGTYGDVYKARNVNTGELAAIKVIKLEPGEDFAVVQQEIIMMKDCKHPNIVAYFGSYLRRDKLWICMEFCGGGSLQDIYHVTGPLSELQIAYVSRETLQGLYYLHSKGKMHRDIKGANILLTDNGHVKLADFGVSAQITATIAKRKSFIGTPYWMAPEVAAVERKGGYNQLCDLWAVGITAIELAELQPPMFDLHPMRALFLMTKSNFQPPKLKDKMKWSNSFHHFVKMALTKNPKKRPTAEKLLQHPFVTQHLTRSLAIELLDKVNNPDHSTYHDFDDDDPEK

SEQ ID NO: 5957 - protein, 244 aa, Artificial Sequence
  Synthetic polypeptide
MMKDCKHPNIVAYFGSYLRRDKLWICMEFCGGGSLQDIYHVTGPLSELQIAYVSRETLQGLYYLHSKGKMHRDIKGANILLTDNGHVKLADFGVSAQITATIAKRKSFIGTPYWMAPEVAAVERKGGYNQLCDLWAVGITAIELAELQPPMFDLHPMRALFLMTKSNFQPPKLKDKMKWSNSFHHFVKMALTKNPKKRPTAEKLLQHPFVTQHLTRSLAIELLDKVNNPDHSTYHDFDDDDPEK

SEQ ID NO: 5958 - protein, 77 aa, Artificial Sequence
  Synthetic polypeptide
FQPPKLKDKMKWSNSFHHFVKMALTKNPKKRPTAEKLLQHPFVTQHLTRSLAIELLDKVNNPDHSTYHDFDDDDPEK

SEQ ID NO: 5959 - protein, 404 aa, Artificial Sequence
  Synthetic polypeptide
MSEARGEPGSGPEAGARFFCTAGRGLEPFVMREVRARLAATQVEYISGKVFFTTCSDLNMLKKLKSAERLFLLIKKQFPLIISSVSKGKIFNEMQRLINEDPGSWLNAISIWKNLLELDAKKEKLSQRDDNQLKRKVGENEIIAKKLKIEQMQKIEENRDCQLEKQIKEETLEQRDFTTKSEKFQEEEFQNDIEKAIDTHNQNDLTFRVSCRCSGTIGKAFTAQEVGKVIGIAIMKHFGWKADLRNPQLEIFIHLNDIYSVVGIPVFRVSLASRAYIKTAGLRSTIAWAMASLADIKAGAFVLDPMCGLGTILLEAAKEWPDVYYVGADVSDSQLLGTWDNLKAAGLEDKIELLKISVIARCLIWPTPYSARFMKLPGCPFGKSEGNVESDGVGVYEICVENRG

SEQ ID NO: 5960 - protein, 374 aa, Artificial Sequence
  Synthetic polypeptide
MREVRARLAATQVEYISGKVFFTTCSDLNMLKKLKSAERLFLLIKKQFPLIISSVSKGKIFNEMQRLINEDPGSWLNAISIWKNLLELDAKKEKLSQRDDNQLKRKVGENEIIAKKLKIEQMQKIEENRDCQLEKQIKEETLEQRDFTTKSEKFQEEEFQNDIEKAIDTHNQNDLTFRVSCRCSGTIGKAFTAQEVGKVIGIAIMKHFGWKADLRNPQLEIFIHLNDIYSVVGIPVFRVSLASRAYIKTAGLRSTIAWAMASLADIKAGAFVLDPMCGLGTILLEAAKEWPDVYYVGADVSDSQLLGTWDNLKAAGLEDKIELLKISVIARCLIWPTPYSARFMKLPGCPFGKSEGNVESDGVGVYEICVENRG

SEQ ID NO: 5961 - protein, 360 aa, Artificial Sequence
  Synthetic polypeptide
MLADKHAKEIEEESETTVEADLTDKQKHQLKHRELFLSRQYESLPATHIRGKCSVALLNETESVLSYLDKEDTFFYSLVYDPSLKTLLADKGEIRVGPRYQADIPEMLLEGESDEREQSKLEVKVWDPNSPLTDRQIDQFLVVARAVGTFARALDCSSSVRQPSLHMSAAAASRDITLFHAMDTLYRHSYDLSSAISVLVPLGGPVLCRDEMEEWSASEASLFEEALEKYGKDFNDIRQDFLPWKSLTSIIEYYYMWKTTDRYVQQKRLKAAEAESKLKQVYIPTYKPNPNQISTSNGKPGAVNGAVGTTFQPQNPLLGRACESCYGRVLWLMPVIPALWEAEAGESPEVRSSRPAWPTW

SEQ ID NO: 5962 - protein, 417 aa, Artificial Sequence
  Synthetic polypeptide
MAANMYRVGDYVYFENSSSNPYLIRRIEELNKTASGNVEAKVVCFYRRRDISNTLIMLADKHAKEIEEESETTVEADLTDKQKHQLKHRELFLSRQYESLPATHIRGKCSVALLNETESVLSYLDKEDTFFYSLVYDPSLKTLLADKGEIRVGPRYQADIPEMLLEGESDEREQSKLEVKVWDPNSPLTDRQIDQFLVVARAVGTFARALDCSSSVRQPSLHMSAAAASRDITLFHAMDTLYRHSYDLSSAISVLVPLGGPVLCRDEMEEWSASEASLFEEALEKYGKDFNDIRQDFLPWKSLTSIIEYYYMWKTTDRYVQQKRLKAAEAESKLKQVYIPTYSKPNPNQISTSNGKPGAVNGAVGTTFQPQNPLLGRACESCYGRVLWLMPVIPALWEAEAGESPEVRSSRPAWPTW

SEQ ID NO: 5963 - protein, 416 aa, Artificial Sequence
  Synthetic polypeptide
MAANMYRVGDYVYFENSSSNPYLIRRIEELNKTASGNVEAKVVCFYRRRDISNTLIMLADKHAKEIEEESETTVEADLTDKQKHQLKHRELFLSRQYESLPATHIRGKCSVALLNETESVLSYLDKEDTFFYSLVYDPSLKTLLADKGEIRVGPRYQADIPEMLLEGESDEREQSKLEVKVWDPNSPLTDRQIDQFLVVARAVGTFARALDCSSSVRQPSLHMSAAAASRDITLFHAMDTLYRHSYDLSSAISVLVPLGGPVLCRDEMEEWSASEASLFEEALEKYGKDFNDIRQDFLPWKSLTSIIEYYYMWKTTDRYVQQKRLKAAEAESKLKQVYIPTYKPNPNQISTSNGKPGAVNGAVGTTFQPQNPLLGRACESCYGRVLWLMPVIPALWEAEAGESPEVRSSRPAWPTW

SEQ ID NO: 5964 - protein, 29 aa, Artificial Sequence
  Synthetic polypeptide
KSCFVGYRKVLRYFINWSRVNPNVNQRMS

SEQ ID NO: 5965 - protein, 993 aa, Artificial Sequence
  Synthetic polypeptide
MSSCRSLCCGDISQSAVLFLCQGTLAMLDWQNGSMGRSGEALLLDTAHVLFTLSSQIKEPTLEMFLSRILASWTNSAIQVLESSSPSLTDSLNGNSSIVGRLLEYVYTHWEHPLDALRHQTKIMFKNLLQMHRLTVEGADFVPDPFFVELTESLLRLEWHIKGKYTCLGCLVECIGVEHILAIDKTIPSQILEVMGDQSLVPYASDLLETMFRNHKSHLKSQTAESSWIDQWHETWVSPLLFILCEGNLDQKSYVIDYYLPKLLSYSPESLQYMVKILQTSIDAKTGQEQSFPSLGSCNSRGALGALMACLRIARAHGHLQSATDTWENLVSDARIKQGLIHQHCQVRIDTLGLLCESNRSTEIVSMEEMQWIQFFITYNLNSQSPGVRQQICSLLKKLFCRIQESSQVLYKLEQSKSKREPENELTKQHPSVSLQQYKNFMSSICNSLFEALFPGSSYSTRFSALTILGSIAEVFHVPEGRIYTVYQLSHDIDVGRFQTLMECFTSTFEDVKILAFDLLMKLSKTAVHFQDSGKLQGLFQAALELSTSTKPYDCVTASYLLNFLIWQDALPSSLSAYLTQQVACDNGDRPAAVVERNTLMVIKCLMENLEEEVSQAENSLLQAAAAFPMYGRVHCITGALQKLSLNSLQLVSEWRPVVEKLLLMSYRLSTVVSPVIQSSSPEGLIPMDTDSESASRLQMILNEIQPRDTNDYFNQAKILKEHDSFDMKDLNASVVNIDTSTEIKGKEVKTCDVTAQMVLVCCWRSMKEVALLLGMLCQLLPMQPVPESSDGLLTVEQVKEIGDYFKQHLLQSRHRGAFELAYTGFVKLTEVLNRCPNVSLQKLPEQWLWSVLEEIKCSDPSSKLCATRRSAGIPFYIQALLASEPKKGRMDLLKITMKELISLAGPTDDIQSTVPQVHALNILRALFRDTRLGENIIPYVADGAKAAILGFTSPVWAVRNSSTLLFSALITRIFGVKRAKDEHSKTNSMKTD

SEQ ID NO: 5966 - protein, 1283 aa, Artificial Sequence
  Synthetic polypeptide
MGVKKKKEMQVAALTICHQDLETLKSFADVEGKNLASLLLHCVQLTDGVSQIHYIKQIVPLLEKADKNGMCDPTIQSCLDILAGIYLSLSLKNPLKKVLASSLNSLPDFFLPEAMHRFTSRLQEELNTTDLYSYRKVTDNISSCMENFNLGRASVNNLLKNVLHFLQKSLIEILEENRKCAGNHIIQTQLMNDLLVGIRVSMMLVQKVQDFQGNLWKTSDSPIWQNMCGLLSIFTKVLSDDDLLQTVQSTSGLAIILFIKTMFHPSEKIPHLISSVLLRSVDCTSVPEWFMSSCRSLCCGDISQSAVLFLCQGTLAMLDWQNGSMGRSGEALLLDTAHVLFTLSSQIKEPTLEMFLSRILASWTNSAIQVLESSSPSLTDSLNGNSSIVGRLLEYVYTHWEHPLDALRHQTKIMFKNLLQMHRLTVEGADFVPDPFFVELTESLLRLEWHIKGKYTCLGCLVECIGVEHILAIDKTIPSQILEVMGDQSLVPYASDLLETMFRNHKSHLKSQTAESSWIDQWHETWVSPLLFILCEGNLDQKSYVIDYYLPKLLSYSPESLQYMVKILQTSIDAKTGQEQSFPSLGSCNSRGALGALMACLRIARAHGHLQSATDTWENLVSDARIKQGLIHQHCQVRIDTLGLLCESNRSTEIVSMEEMQWIQFFITYNLNSQSPGVRQQICSLLKKLFCRIQESSQVLYKLEQSKSKREPENELTKQHPSVSLQQYKNFMSSICNSLFEALFPGSSYSTRFSALTILGSIAEVFHVPEGRIYTVYQLSHDIDVGRFQTLMECFTSTFEDVKILAFDLLMKLSKTAVHFQDSGKLQGLFQAALELSTSTKPYDCVTASYLLNFLIWQDALPSSLSAYLTQQVACDNGDRPAAVVERNTLMVIKCLMENLEEEVSQAENSLLQAAAAFPMYGRVHCITGALQKLSLNSLQLVSEWRPVVEKLLLMSYRLSTVVSPVIQSSSPEGLIPMDTDSESASRLQMILNEIQPRDTNDYFNQAKILKEHDSFDMKDLNASVVNIDTSTEIKGKEVKTCDVTAQMVLVCCWRSMKEVALLLGMLCQLLPMQPVPESSDGLLTVEQVKEIGDYFKQHLLQSRHRGAFELAYTGFVKLTEVLNRCPNVSLQKLPEQWLWSVLEEIKCSDPSSKLCATRRSAGIPFYIQALLASEPKKGRMDLLKITMKELISLAGPTDDIQSTVPQVHALNILRALFRDTRLGENIIPYVADGAKAAILGFTSPVWAVRNSSTLLFSALITRIFGVKRAKDEHSKTNSMKTD

SEQ ID NO: 5967 - protein, 29 aa, Artificial Sequence
  Synthetic polypeptide
KSCFVGYRKVLRYFINWSRVNPNVNQRMS

SEQ ID NO: 5968 - protein, 994 aa, Artificial Sequence
  Synthetic polypeptide
MSSCRSLCCGDISQSAVLFLCQGTLAMLDWQNGSMGRSGEALLLDTAHVLFTLSSQIKEPTLEMFLSRILASWTNSAIQVLESSSPSLTDSLNGNSSIVGRLLEYVYTHWEHPLDALRHQTKIMFKNLLQMHRLTVEGADFVPDPFFVELTESLLRLEWHIKGKYTCLGCLVECIGVEHILAIDKTIPSQILEVMGDQSLVPYASDLLETMFRNHKSHLKSQTAESSWIDQWHETWVSPLLFILCEGNLDQKSYVIDYYLPKLLSYSPESLQYMVKILQTSIDAKTGQEQSFPSLGSCNSRGALGALMACLRIARAHGHLQSATDTWENLVSDARIKQGLIHQHCQVRIDTLGLLCESNRSTEIVSMEEMQWIQFFITYNLNSQSPGVRQQICSLLKKLFCRIQESSQVLYKLEQSKSKREPENELTKQHPSVSLQQYKNFMSSICNSLFEALFPGSSYSTRFSALTILGSIAEVFHVPEGRIYTVYQLSHDIDVGRFQTLMECFTSTFEDVKILAFDLLMKLSKTAVHFQDSGKLQGLFQAALELSTSTKPYDCVTASYLLNFLIWQDALPSSLSAYLTQQVACDNGDRPAAVVERNTLMVIKCLMENLEEEVSQAENSLLQAAAAFPMYGRVHCITGALQKLSLNSLQLVSEWRPVVEKLLLMSYRLSTVVSPVIQSSSPEGLIPMDTDSESASRLQMILNEIQPRDTNDYFNQAKILKEHDSFDMKDLNASVVNIDTSTEIKGKEVKTCDVTAQMVLVCCWRSMKEVALLLGMLCQLLPMQPVPESSDGLLTVEQVKEIGDYFKQHLLQSRHRGAFELAYTGFVKLTEVLNRCPNVSLQKLPEQWLWSVLEEIKCSDPSSKLCATRRSAGIPFYIQALLASEPKKGRMDLLKITMKELISLAGPTDDIQSTVPQVHALNILRALFRDTRLGENIIPYVADGAKAAILGFTSPVWAVRNSSTLLFSALITRIFGVKRAKDEHSKTNSSMKTD

SEQ ID NO: 5969 - protein, 1284 aa, Artificial Sequence
  Synthetic polypeptide
MGVKKKKEMQVAALTICHQDLETLKSFADVEGKNLASLLLHCVQLTDGVSQIHYIKQIVPLLEKADKNGMCDPTIQSCLDILAGIYLSLSLKNPLKKVLASSLNSLPDFFLPEAMHRFTSRLQEELNTTDLYSYRKVTDNISSCMENFNLGRASVNNLLKNVLHFLQKSLIEILEENRKCAGNHIIQTQLMNDLLVGIRVSMMLVQKVQDFQGNLWKTSDSPIWQNMCGLLSIFTKVLSDDDLLQTVQSTSGLAIILFIKTMFHPSEKIPHLISSVLLRSVDCTSVPEWFMSSCRSLCCGDISQSAVLFLCQGTLAMLDWQNGSMGRSGEALLLDTAHVLFTLSSQIKEPTLEMFLSRILASWTNSAIQVLESSSPSLTDSLNGNSSIVGRLLEYVYTHWEHPLDALRHQTKIMFKNLLQMHRLTVEGADFVPDPFFVELTESLLRLEWHIKGKYTCLGCLVECIGVEHILAIDKTIPSQILEVMGDQSLVPYASDLLETMFRNHKSHLKSQTAESSWIDQWHETWVSPLLFILCEGNLDQKSYVIDYYLPKLLSYSPESLQYMVKILQTSIDAKTGQEQSFPSLGSCNSRGALGALMACLRIARAHGHLQSATDTWENLVSDARIKQGLIHQHCQVRIDTLGLLCESNRSTEIVSMEEMQWIQFFITYNLNSQSPGVRQQICSLLKKLFCRIQESSQVLYKLEQSKSKREPENELTKQHPSVSLQQYKNFMSSICNSLFEALFPGSSYSTRFSALTILGSIAEVFHVPEGRIYTVYQLSHDIDVGRFQTLMECFTSTFEDVKILAFDLLMKLSKTAVHFQDSGKLQGLFQAALELSTSTKPYDCVTASYLLNFLIWQDALPSSLSAYLTQQVACDNGDRPAAVVERNTLMVIKCLMENLEEEVSQAENSLLQAAAAFPMYGRVHCITGALQKLSLNSLQLVSEWRPVVEKLLLMSYRLSTVVSPVIQSSSPEGLIPMDTDSESASRLQMILNEIQPRDTNDYFNQAKILKEHDSFDMKDLNASVVNIDTSTEIKGKEVKTCDVTAQMVLVCCWRSMKEVALLLGMLCQLLPMQPVPESSDGLLTVEQVKEIGDYFKQHLLQSRHRGAFELAYTGFVKLTEVLNRCPNVSLQKLPEQWLWSVLEEIKCSDPSSKLCATRRSAGIPFYIQALLASEPKKGRMDLLKITMKELISLAGPTDDIQSTVPQVHALNILRALFRDTRLGENIIPYVADGAKAAILGFTSPVWAVRNSSTLLFSALITRIFGVKRAKDEHSKTNSSMKTD

SEQ ID NO: 5970 - protein, 609 aa, Artificial Sequence
  Synthetic polypeptide
MSSCRSLCCGDISQSAVLFLCQGTLAMLDWQNGSMGRSGEALLLDTAHVLFTLSSQIKEPTLEMFLSRILASWTNSAIQVLESSSPSLTDSLNGNSSIVGRLLEYVYTHWEHPLDALRHQTKIMFKNLLQMHRLTVEGADFVPDPFFVELTESLLRLEWHIKGKYTCLGCLVECIGVEHILAIDKTIPSQILEVMGDQSLVPYASDLLETMFRNHKSHLKSQTAESSWIDQWHETWVSPLLFILCEGNLDQKSYVIDYYLPKLLSYSPESLQYMVKILQTSIDAKTGQEQSFPSLGSCNSRGALGALMACLRIARAHGHLQSATDTWENLVSDARIKQGLIHQHCQVRIDTLGLLCESNRSTEIVSMEEMQWIQFFITYNLNSQSPGVRQQICSLLKKLFCRIQESSQVLYKLEQSKSKREPENELTKQHPSVSLQQYKNFMSSICNSLFEALFPGSSYSTRFSALTILGSIAEVFHVPEGRIYTVYQLSHDIDVGRFQTLMECFTSTFEDVKILAFDLLMKLSKTAVHFQDSGKLQGLFQAALELSTSTKPYDCVTASYLLNFLIWQDALPSSLSAYLTQQVACDNGDRPAAVVERNTLMDLPTLDVS

SEQ ID NO: 5971 - protein, 899 aa, Artificial Sequence
  Synthetic polypeptide
MGVKKKKEMQVAALTICHQDLETLKSFADVEGKNLASLLLHCVQLTDGVSQIHYIKQIVPLLEKADKNGMCDPTIQSCLDILAGIYLSLSLKNPLKKVLASSLNSLPDFFLPEAMHRFTSRLQEELNTTDLYSYRKVTDNISSCMENFNLGRASVNNLLKNVLHFLQKSLIEILEENRKCAGNHIIQTQLMNDLLVGIRVSMMLVQKVQDFQGNLWKTSDSPIWQNMCGLLSIFTKVLSDDDLLQTVQSTSGLAIILFIKTMFHPSEKIPHLISSVLLRSVDCTSVPEWFMSSCRSLCCGDISQSAVLFLCQGTLAMLDWQNGSMGRSGEALLLDTAHVLFTLSSQIKEPTLEMFLSRILASWTNSAIQVLESSSPSLTDSLNGNSSIVGRLLEYVYTHWEHPLDALRHQTKIMFKNLLQMHRLTVEGADFVPDPFFVELTESLLRLEWHIKGKYTCLGCLVECIGVEHILAIDKTIPSQILEVMGDQSLVPYASDLLETMFRNHKSHLKSQTAESSWIDQWHETWVSPLLFILCEGNLDQKSYVIDYYLPKLLSYSPESLQYMVKILQTSIDAKTGQEQSFPSLGSCNSRGALGALMACLRIARAHGHLQSATDTWENLVSDARIKQGLIHQHCQVRIDTLGLLCESNRSTEIVSMEEMQWIQFFITYNLNSQSPGVRQQICSLLKKLFCRIQESSQVLYKLEQSKSKREPENELTKQHPSVSLQQYKNFMSSICNSLFEALFPGSSYSTRFSALTILGSIAEVFHVPEGRIYTVYQLSHDIDVGRFQTLMECFTSTFEDVKILAFDLLMKLSKTAVHFQDSGKLQGLFQAALELSTSTKPYDCVTASYLLNFLIWQDALPSSLSAYLTQQVACDNGDRPAAVVERNTLMDLPTLDVS

SEQ ID NO: 5972 - protein, 29 aa, Artificial Sequence
  Synthetic polypeptide
KSCFVGYRKVLRYFINWSRVNPNVNQRMS

SEQ ID NO: 5973 - protein, 122 aa, Artificial Sequence
  Synthetic polypeptide
MPSETLWEIAKAEVEKRGINGSEGDGAEIAEKFVFFIGSKNGGKTTIILRCLDRDEPPKPTLALEYTYGRRAKGHNTPKDIAHFWELGGGTSLLDLISIPITGDTLRPGVVAYTCNPNTLGG

SEQ ID NO: 5974 - protein, 32 aa, Artificial Sequence
  Synthetic polypeptide
GELMEVKVMELKLQKNLFSSLAVKMGERLLLF

SEQ ID NO: 5975 - protein, 152 aa, Artificial Sequence
  Synthetic polypeptide
MESRVADAGTGETARAAGGSPAVGCTTRGPVVSAPLGAARWKLLRQVLKQKHLDDCLRHVSVRRFESFNLFSVTEGKERETEEEVGAWVQYTSIFCPEYSISLRHNSGSLNVEDVLTSFDNTGNVCLRLWNDTHLHLTSGSEIHLEQFVSSL

SEQ ID NO: 5976 - protein, 15 aa, Artificial Sequence
  Synthetic polypeptide
RRPWEPPGGSSCGRF

SEQ ID NO: 5977 - protein, 10 aa, Artificial Sequence
  Synthetic polypeptide
MPATCICKKI

SEQ ID NO: 5978 - protein, 8 aa, Artificial Sequence
  Synthetic polypeptide
ATCICKKI

SEQ ID NO: 5979 - protein, 210 aa, Artificial Sequence
  Synthetic polypeptide
MESRVADAGTGETARAAGGSPAVGCTTRGPVVSAPLGAARWKLLRQVLKQKHLDDCLRHVSVRRFESFNLFSVTEGKERETEEEVGAWVQYTSIFCPEYSISLRHNSGSLNVEDVLTSFDNTGNVCIWPSEEVLAYYCLKHNNIFRALAVCELGGGMTCLAGLMVAISADVKEVLLTDGNEKAIRNVQDIITRNQKAGVFKTQKISSCGS

SEQ ID NO: 5980 - protein, 169 aa, Artificial Sequence
  Synthetic polypeptide
MVVFNGLLKIKICEAVSLKPTAWSLRHAVGPRPQTFLLDPYIALNVDDSRIGQTATKQKTNSPAWHDEFVTDVCNGRKIELAVFHDAPIGYDDFVANCTIQFEELLQNGSRHFEDWIDLEPEGRVYVIIDLSGSSGEECKLPRTRILSKLFIIVSPASWNSAWHTVPAQ

SEQ ID NO: 5981 - protein, 168 aa, Artificial Sequence
  Synthetic polypeptide
MAHGPGALMLKCVVVGDGAVGKTCLLMSYANDAFPEEYVPTVFDHYAVSVTVGGKQYLLGLYDTAGQEDYDRLRPLSYPMTDVFLICFSVVNPASFQNVKEEWVPELKEYAPNVPFLLIGTQIDLRDDPKTLARLNDMKEKPICVEQGQKLAKEVSAQIPHPQCDLVP

SEQ ID NO: 5982 - protein, 89 aa, Artificial Sequence
  Synthetic polypeptide
MTDVFLICFSVVNPASFQNVKEEWVPELKEYAPNVPFLLIGTQIDLRDDPKTLARLNDMKEKPICVEQGQKLAKEVSAQIPHPQCDLVP

SEQ ID NO: 5983 - protein, 190 aa, Artificial Sequence
  Synthetic polypeptide
MAHGPGALMLKCVVVGDGAVGKTCLLMSYANDAFPEEYVPTVFDHYAVSVTVGGKQYLLGLYDTAGQEDYDRLRPLSYPMTDVFLICFSVVNPASFQNVKEEWVPELKEYAPNVPFLLIGTQIDLRDDPKTLARLNDMKEKPICVEQGQKLAKEHLQPSALYSLPCASYPADVSTCGRHTAGTLLFRSVH

SEQ ID NO: 5984 - protein, 111 aa, Artificial Sequence
  Synthetic polypeptide
MTDVFLICFSVVNPASFQNVKEEWVPELKEYAPNVPFLLIGTQIDLRDDPKTLARLNDMKEKPICVEQGQKLAKEHLQPSALYSLPCASYPADVSTCGRHTAGTLLFRSVH

SEQ ID NO: 5985 - protein, 194 aa, Artificial Sequence
  Synthetic polypeptide
MAHGPGALMLKCVVVGDGAVGKTCLLMSYANDAFPEEYVPTVFDHYAVSVTVGGKQYLLGLYDTAGQEDYDRLRPLSYPMTDVFLICFSVVNPASFQNVKEEWVPELKEYAPNVPFLLIGTQIDLRDDPKTLARLNDMKEKPICVEQGQKLAKEQMSAHVDATQQGLCSFVQFTDISPGPKQCLTYSRYPVNMW

SEQ ID NO: 5986 - protein, 115 aa, Artificial Sequence
  Synthetic polypeptide
MTDVFLICFSVVNPASFQNVKEEWVPELKEYAPNVPFLLIGTQIDLRDDPKTLARLNDMKEKPICVEQGQKLAKEQMSAHVDATQQGLCSFVQFTDISPGPKQCLTYSRYPVNMW

SEQ ID NO: 5987 - protein, 163 aa, Artificial Sequence
  Synthetic polypeptide
MKDNDIKRLLYTHLLCIFSIILSVFIPSLFLENFSILETHLTWLCICSGFVTAVNLVLYLVVKPNTSSKRSSLSHKVTGFLKCCIYFLMSCFSFHVIFVLYGAPLIELALETFLFAVILSTFTTVPCLCLLGPNLKAWLRVFSRNGNLWKEVLKKKIPFSGIY

SEQ ID NO: 5988 - protein, 33 aa, Artificial Sequence
  Synthetic polypeptide
LGPNLKAWLRVFSRNGNLWKEVLKKKIPFSGIY

SEQ ID NO: 5989 - protein, 46 aa, Artificial Sequence
  Synthetic polypeptide
MVPSSSRTPGFKQSSHHLRLPKCWDYRDTREAEAGELLEPGQQRLR

SEQ ID NO: 5990 - protein, 47 aa, Artificial Sequence
  Synthetic polypeptide
MLSVCSCRTSSGMRSQWPSARQRSSSLSTFRAWRASRELNTWRLTGR

SEQ ID NO: 5991 - protein, 10 aa, Artificial Sequence
  Synthetic polypeptide
WLRRARTAPT

SEQ ID NO: 5992 - protein, 82 aa, Artificial Sequence
  Synthetic polypeptide
MVPSSSRTPGFKQSSHHLRLPKCWDYRDDFGKLLLAEALLEQCLKENHAKIKDSMPLLEKNEPKMSEAKNYLSSILNHGRLS

SEQ ID NO: 5993 - protein, 116 aa, Artificial Sequence
  Synthetic polypeptide
MAAKGAHGSYLKVESELERCRAEGHWDRMPELVRQLQTLSMPGGGGNRRGSPSAAFTFPDTDDFGKLLLAEALLEQCLKENHAKIKDSMPLLEKNEPKMSEAKNYLSSILNHGRLS

SEQ ID NO: 5994 - protein, 14 aa, Artificial Sequence
  Synthetic polypeptide
PCQNKRLHAFAGEE

SEQ ID NO: 5995 - protein, 235 aa, Artificial Sequence
  Synthetic polypeptide
MVPSSSRTPGFKQSSHHLRLPKCWDYRDDFGKLLLAEALLEQCLKENHAKIKDSMPLLEKNEPKMSEAKNYLSSILNHGRLSPQYMCEAMLILGKLHYVEGSYRDAISMYARAGIDDMSMENKPLYQMRLLSEAFVIKGLSLERLPNSIASRFRLTEREEEVITCFERASWIAQVFLQELEKTTNNSTSRHLKGCHPLDYELTYFLEAALQSAYVKNLKKGFGKLRQEDCWSPQV

SEQ ID NO: 5996 - protein, 269 aa, Artificial Sequence
  Synthetic polypeptide
MAAKGAHGSYLKVESELERCRAEGHWDRMPELVRQLQTLSMPGGGGNRRGSPSAAFTFPDTDDFGKLLLAEALLEQCLKENHAKIKDSMPLLEKNEPKMSEAKNYLSSILNHGRLSPQYMCEAMLILGKLHYVEGSYRDAISMYARAGIDDMSMENKPLYQMRLLSEAFVIKGLSLERLPNSIASRFRLTEREEEVITCFERASWIAQVFLQELEKTTNNSTSRHLKGCHPLDYELTYFLEAALQSAYVKNLKKGFGKLRQEDCWSPQV

SEQ ID NO: 5997 - protein, 10 aa, Artificial Sequence
  Synthetic polypeptide
WLRRARTAPT

SEQ ID NO: 5998 - protein, 94 aa, Artificial Sequence
  Synthetic polypeptide
MAVQPKETLQLESAAEVGFVRFFQGMPEKPTTTVRLFDRGDFYTAHGEDALLAAREVFKTQGVIKYMGPAGSYAERTYLVLNETLDWNFELMLK

SEQ ID NO: 5999 - protein, 28 aa, Artificial Sequence
  Synthetic polypeptide
MGPAGSYAERTYLVLNETLDWNFELMLK

SEQ ID NO: 6000 - protein, 128 aa, Artificial Sequence
  Synthetic polypeptide
MNSVRAANRRPRRVSRPRPVQQQQQQPPQQPPPQPPQQQPPQQQPPPPPQQQQQQQPPPPPPPPPPLPQERNNVGERGTVAHACNLSTVGGRGRWITRSEVRDQPGQRGEAPSVLKIQRLAGLGGECL

SEQ ID NO: 6001 - protein, 424 aa, Artificial Sequence
  Synthetic polypeptide
MASAELQGKYQKLAQEYSKLRAQNQVLKKGVVDEQANSAALKEQLKMKDQSLRKLQQEMDSLTFRNLQLAKRVELLQDELALSEPRGKKNKKSGESSSQLSQEQKSVFDEDLQKKIEENERLHIQFFEADEQHKHVEAELRSRLATLETEAAQHQAVVDGLTRKYMETIEKLQNDKAKLEVKSQTLEKEAKECRLRTEECQLQLKTLHEDLSGRLEESLSIINEKVPFNDTKYSQYNALNVPLHNRRHQLKMRDIAGQALAFVQDLVTALLNFHTYTEQRIQIFPVDSAIDTISPLNQKFSQYLHENASYVRPLEEGMLHLFESITEDTVTVLETTVKLKTFSEHLTSYICFLRKILPYQLKSLEEECESSLCTSALRARNLELSQDMKKMTAVFEKLQTYIALLALPRPGAVAHACNPSTLGG

SEQ ID NO: 6002 - protein, 9 aa, Artificial Sequence
  Synthetic polypeptide
TLNLLHMFS

SEQ ID NO: 6003 - protein, 846 aa, Artificial Sequence
  Synthetic polypeptide
MGENLAKKIMFFLLTIKLILNHILDNSEDDTKSLFLIIKIIGDLLQFQGSHKHEFDSRWKSFNLVKKSMENRLHGKKQHIRALLIDRVMLQHELRTLTVEGCEYKKIHQDMIRDLLRLSTSSYSQVRNKAQQTFFAALGAYNFCCRDIIPLVLEFLRPDRQGVTQQQFKGALYCLLGNHSGVCLANLHDWDCIVQTWPAIVSSGLSQAMSLEKPSIVRLFDDLAEKIHRQYETIGLDFTIPKSCVEIAELLQQSKNPSINQILLSPEKIKEGIKRQQEKNADALRNYENLVDTLLDGVEQRNLPWKFEHIGIGLLSLLLRDDRVLPLRAIRFFVENLNHDAIVVRKMAISAVAGILKQLKRTHKKLTINPCEISGCPKPTQIIAGDRPDNHWLHYDSKTIPRTKKEWESSCFVEKTHWGYYTWPKNMVVYAGVEEQPKLGRSREDMTEAEQIIFDHFSDPKFVEQLITFLSLEDRKGKDKFNPRRFCLFKGIFRNFDDAFLPVLKPHLEHLVADSHESTQRCVAEIIAGLIRGSKHWTFEKVEKLWELLCPLLRTALSNITVETYNDWGACIATSCESRDPRKLHWLFELLLESPLSGEGGSFVDACRLYVLQGGLAQQEWRVPELLHRLLKYLEPKLTQVYKNVRERIGSVLTYIFMIDVSLPNTTPTISPHVPEFTARILEKLKPLMDVDEEIQNHVMEENGIGEEDERTQGIKLLKTILKWLMASAGRSFSTAVTEQLQLLPLFFKIAPVENDNSYDELKRDAKLCLSLMSQGLLYPHQVPLVLQVLKQTARSSSWHARYTVLTYLQTMVFYNLFIFLNNEDAVKDIRWLVISLLEDEQLEKI

SEQ ID NO: 6004 - protein, 1702 aa, Artificial Sequence
  Synthetic polypeptide
MEPAERAGVGEPPEPGGRPEPGPRGFVPQKEIVYNKLLPYAERLDAESDLQLAQIKCNLGRAVQLQELWPGGLFWTRKLSTYIRLYGRKFSKEDHVLFIKLLYELVSIPKLEISMMQGFARLLINLLKKKELLSRADLELPWRPLYDMVERILYSKTEHLGLNWFPNSVENILKTLVKSCRPYFPADATAEMLEEWRPLMCPFDVTMQKAITYFEIFLPTSLPPELHHKGFKLWFDELIGLWVSVQNLPQWEGQLVNLFARLATDNIGYIDWDPYVPKIFTRILRSLNLPVGSSQVLVPRFLTNAYDIGHAVIWITAMMGGPSKLVQKHLAGLFNSITSFYHPSNNGRWLNKLMKLLQRLPNSVVRRLHRERYKKPSWLTPVPDSHKLTDQDVTDFVQCIIQPVLLAMFSKTGSLEAAQALQNLALMRPELVIPPVLERTYPALETLTEPHQLTATLSCVIGVARSLVSGGRWFPEGPTHMLPLLMRALPGVDPNDFSKCMITFQFIATFSTLVPLVDCSSVLQERNDLTEVERELCSATAEFEDFVLQFMDRCFGLIESSTLEQTREETETEKMTHLESLVELGLSSTFSTILTQCSKEIFMVALQKVFNFSTSHIFETRVAGRMVADMCRAAVKCCPEESLKLFVPHCCSVITQLTMNDDVLNDEELDKELLWNLQLLSEITRVDGRKLLLYREQLVKILQRTLHLTCKQGYTLSCNLLHHLLRSTTLIYPTEYCSVPGGFDKPPSEYFPIKDWGKPGDLWNLGIQWHVPSSEEVSFAFYLLDSFLQPELVKLQHCGDGKLEMSRDDILQSLTIVHNCLIGSGNLLPPLKGEPVTNLVPSMVSLEETKLYTGLEYDLSRENHREVIATVIRKLLNHILDNSEDDTKSLFLIIKIIGDLLQFQGSHKHEFDSRWKSFNLVKKSMENRLHGKKQHIRALLIDRVMLQHELRTLTVEGCEYKKIHQDMIRDLLRLSTSSYSQVRNKAQQTFFAALGAYNFCCRDIIPLVLEFLRPDRQGVTQQQFKGALYCLLGNHSGVCLANLHDWDCIVQTWPAIVSSGLSQAMSLEKPSIVRLFDDLAEKIHRQYETIGLDFTIPKSCVEIAELLQQSKNPSINQILLSPEKIKEGIKRQQEKNADALRNYENLVDTLLDGVEQRNLPWKFEHIGIGLLSLLLRDDRVLPLRAIRFFVENLNHDAIVVRKMAISAVAGILKQLKRTHKKLTINPCEISGCPKPTQIIAGDRPDNHWLHYDSKTIPRTKKEWESSCFVEKTHWGYYTWPKNMVVYAGVEEQPKLGRSREDMTEAEQIIFDHFSDPKFVEQLITFLSLEDRKGKDKFNPRRFCLFKGIFRNFDDAFLPVLKPHLEHLVADSHESTQRCVAEIIAGLIRGSKHWTFEKVEKLWELLCPLLRTALSNITVETYNDWGACIATSCESRDPRKLHWLFELLLESPLSGEGGSFVDACRLYVLQGGLAQQEWRVPELLHRLLKYLEPKLTQVYKNVRERIGSVLTYIFMIDVSLPNTTPTISPHVPEFTARILEKLKPLMDVDEEIQNHVMEENGIGEEDERTQGIKLLKTILKWLMASAGRSFSTAVTEQLQLLPLFFKIAPVENDNSYDELKRDAKLCLSLMSQGLLYPHQVPLVLQVLKQTARSSSWHARYTVLTYLQTMVFYNLFIFLNNEDAVKDIRWLVISLLEDEQLEKI

SEQ ID NO: 6005 - protein, 555 aa, Artificial Sequence
  Synthetic polypeptide
MGENLAKKIMFFLLTIKLILNHILDNSEDDTKSLFLIIKIIGDLLQFQGSHKHEFDSRWKSFNLVKKSMENRLHGKKQHIRALLIDRVMLQHELRTLTVEGCEYKKIHQDMIRDLLRLSTSSYSQVRNKAQQTFFAALGAYNFCCRDIIPLVLEFLRPDRQGVTQQQFKGALYCLLGNHSGVCLANLHDWDCIVQTWPAIVSSGLSQAMSLEKPSIVRLFDDLAEKIHRQYETIGLDFTIPKSCVEIAELLQQSKNPSINQILLSPEKIKEGIKRQQEKNADALRNYENLVDTLLDGVEQRNLPWKFEHIGIGLLSLLLRDDRVLPLRAIRFFVENLNHDAIVVRKMAISAVAGILKQLKRTHKKLTINPCEISGCPKPTQIIAGDRPDNHWLHYDSKTIPRTKKEWESSCFVEKTHWGYYTWPKNMVVYAGVEEQPKLGRSREDMTEAEQIIFDHFSDPKFVEQLITFLSLEDRKGKDKFNPRRFCLFKGIFRNFDDAFLPVLKPHLEHLVADSHESTQRCVAEIIAGLIRGSKHWTFEKGIVAHTYSPCSLEG

SEQ ID NO: 6006 - protein, 1411 aa, Artificial Sequence
  Synthetic polypeptide
MEPAERAGVGEPPEPGGRPEPGPRGFVPQKEIVYNKLLPYAERLDAESDLQLAQIKCNLGRAVQLQELWPGGLFWTRKLSTYIRLYGRKFSKEDHVLFIKLLYELVSIPKLEISMMQGFARLLINLLKKKELLSRADLELPWRPLYDMVERILYSKTEHLGLNWFPNSVENILKTLVKSCRPYFPADATAEMLEEWRPLMCPFDVTMQKAITYFEIFLPTSLPPELHHKGFKLWFDELIGLWVSVQNLPQWEGQLVNLFARLATDNIGYIDWDPYVPKIFTRILRSLNLPVGSSQVLVPRFLTNAYDIGHAVIWITAMMGGPSKLVQKHLAGLFNSITSFYHPSNNGRWLNKLMKLLQRLPNSVVRRLHRERYKKPSWLTPVPDSHKLTDQDVTDFVQCIIQPVLLAMFSKTGSLEAAQALQNLALMRPELVIPPVLERTYPALETLTEPHQLTATLSCVIGVARSLVSGGRWFPEGPTHMLPLLMRALPGVDPNDFSKCMITFQFIATFSTLVPLVDCSSVLQERNDLTEVERELCSATAEFEDFVLQFMDRCFGLIESSTLEQTREETETEKMTHLESLVELGLSSTFSTILTQCSKEIFMVALQKVFNFSTSHIFETRVAGRMVADMCRAAVKCCPEESLKLFVPHCCSVITQLTMNDDVLNDEELDKELLWNLQLLSEITRVDGRKLLLYREQLVKILQRTLHLTCKQGYTLSCNLLHHLLRSTTLIYPTEYCSVPGGFDKPPSEYFPIKDWGKPGDLWNLGIQWHVPSSEEVSFAFYLLDSFLQPELVKLQHCGDGKLEMSRDDILQSLTIVHNCLIGSGNLLPPLKGEPVTNLVPSMVSLEETKLYTGLEYDLSRENHREVIATVIRKLLNHILDNSEDDTKSLFLIIKIIGDLLQFQGSHKHEFDSRWKSFNLVKKSMENRLHGKKQHIRALLIDRVMLQHELRTLTVEGCEYKKIHQDMIRDLLRLSTSSYSQVRNKAQQTFFAALGAYNFCCRDIIPLVLEFLRPDRQGVTQQQFKGALYCLLGNHSGVCLANLHDWDCIVQTWPAIVSSGLSQAMSLEKPSIVRLFDDLAEKIHRQYETIGLDFTIPKSCVEIAELLQQSKNPSINQILLSPEKIKEGIKRQQEKNADALRNYENLVDTLLDGVEQRNLPWKFEHIGIGLLSLLLRDDRVLPLRAIRFFVENLNHDAIVVRKMAISAVAGILKQLKRTHKKLTINPCEISGCPKPTQIIAGDRPDNHWLHYDSKTIPRTKKEWESSCFVEKTHWGYYTWPKNMVVYAGVEEQPKLGRSREDMTEAEQIIFDHFSDPKFVEQLITFLSLEDRKGKDKFNPRRFCLFKGIFRNFDDAFLPVLKPHLEHLVADSHESTQRCVAEIIAGLIRGSKHWTFEKGIVAHTYSPCSLEG

SEQ ID NO: 6007 - protein, 53 aa, Artificial Sequence
  Synthetic polypeptide
MLLTQSLFGGLFPRTRETMRRLSAGRKCTEHSHLEVSVPKIEISHGKLVKCLL

SEQ ID NO: 6008 - protein, 28 aa, Artificial Sequence
  Synthetic polypeptide
MLLTQSLFGGLFPRTRETMRRMPLFLAW

SEQ ID NO: 6009 - protein, 311 aa, Artificial Sequence
  Synthetic polypeptide
MNQKLLKLENLLRFHTIYRQLHSLCQRRALRQWRHGFSSAYPVWTAQLCAWPWPTDVLTGAALSQYRLLVTKKEEGPWKSQLSSTKSKKVVEVWIGMTIEELARAMEKNTDYVYEALLNTDIDIDSLEADSHLDEVWIKEVITKAGMKLKWSKLKQDKVRKNKDAVRRPQADPALLTPRSPVVTIMGHVDHGKTTLLDKFRKTQVAAVETGGITQHIGAFLVSLPSGEKITFLDTPGHAAFSAMRARGAQVTDIVVLVVAADDGVMKQTVESIQHAKDAQGWEWGLTPGIPALWEAEAGGSPEVIGSSRPA

SEQ ID NO: 6010 - protein, 252 aa, Artificial Sequence
  Synthetic polypeptide
MNQKLLKLENLLRFHTIYRQLHSLCQRRALRQWRHGFSSAYPVWTAQLCAWPWPTDVLTGAALSQYRLLVTKKEEGPWKSQLSSTKSKKVVEVWIGMTIEELARAMEKNTDYVYEALLNTDIDIDSLEADSHLDEVWIKEVITKAGMKLKWSKLKQDKVRKNKDAVRRPQADPALLTPRSPVVTIMGHVDHGKTTLLDKFRKTQVAAVETGGITQHIGAFLGWEWGLTPGIPALWEAEAGGSPEVIGSSRPA

SEQ ID NO: 6011 - protein, 90 aa, Artificial Sequence
  Synthetic polypeptide
MENEIFTPLLEQFMTSPLVTWVKTFGPLAAGNGTNLDEYVALVDGVFLNQVMLQMDMDEVGNHHSQQTLARTKNQTPHVLTHRWELNNEN

SEQ ID NO: 6012 - protein, 511 aa, Artificial Sequence
  Synthetic polypeptide
MSDTRRRVKVYTLNEDRQWDDRGTGHVSSTYVEELKGMSLLVRAESDGSLLLESKINPNTAYQKQQDTLIVWSEAENYDLALSFQEKAGCDEIWEKICQVQGKDPSVEVTQDLIDESEEERFEEMPETSHLIDLPTCELNKLEEIADLVTSVLSSPIRREKLALALENEGYIKKLLQLFQACENLENTEGLHHLYEIIRGILFLNKATLFEVMFSDECIMDVVGCLEYDPALAQPKRHREFLTKTAKFKEVIPITDSELRQKIHQTYRVQYIQDIILPTPSVFEENFLSTLTSFIFFNKVEIVSMLQEDEKFLSEVFAQLTDEATDDDKRRELVNFFKEFCAFSQTLQPQNRDAFFKTLAKLGILPALEIVMGMDDLQVRSAATDIFSYLVEFSPSMVREFVMQEAQQSDDDILLINVVIEQMICDTDPELGGAVQLMGLLRTLIDPENMLATTNKTEKSEFLNFFYNHCMHVLTAPLLTNTSEDKCEKDNIVGSNKNNTICPAKRGGSHL

SEQ ID NO: 6013 - protein, 543 aa, Artificial Sequence
  Synthetic polypeptide
MSDTRRRVKVYTLNEDRQWDDRGTGHVSSTYVEELKGMSLLVRAESDGSLLLESKINPNTAYQKQQDTLIVWSEAENYDLALSFQEKAGCDEIWEKICQVQGKDPSVEVTQDLIDESEEERFEEMPETSHLIDLPTCELNKLEEIADLVTSVLSSPIRREKLALALENEGYIKKLLQLFQACENLENTEGLHHLYEIIRGILFLNKATLFEVMFSDECIMDVVGCLEYDPALAQPKRHREFLTKTAKFKEVIPITDSELRQKIHQTYRVQYIQDIILPTPSVFEENFLSTLTSFIFFNKVEIVSMLQEDEKFLSEVFAQLTDEATDDDKRRELVNFFKEFCAFSQTLQPQNRDAFFKTLAKLGILPALEIVMGMDDLQVRSAATDIFSYLVEFSPSMVREFVMQEAQQSDDDILLINVVIEQMICDTDPELGGAVQLMGLLRTLIDPENMLATTNKTEKSEFLNFFYNHCMHVLTAPLLTNTSEDKCEKDFFLKHYRYSWSFICTPSHSHSHSTPSSSISQDNIVGSNKNNTICPAKRGGSHL

SEQ ID NO: 6014 - protein, 512 aa, Artificial Sequence
  Synthetic polypeptide
MAACRYCCSCLRLRPLSDGPFLLPRRDRALTQLQVRALWSSAGSRAVAVDLGNRKLEISSGKLARFADGSAVVQSGDTAVMVTAVSKTKPSPSQFMPLVVDYRQKAAAAGRIPTNYLRREIGTSDKEILTSRIIDRSIRPLFPAGYFYDTQVLCNLLAVDGVNEPDVLAINGASVALSLSDIPWNGPVGAVRIGIIDGEYVVNPTRKEMSSSTLNLVVAGAPKSQIVMLEASAENILQQDFCHAIKVGVKYTQQIIQGIQQLVKETGVTKRTPQKLFTPSPEIVKYTHKLAMERLYAVFTDYEHDKVSRDEAVNKIRLDTEEQLKEKFPEADPYEIIESFNVVAKEVFRSIVLNEYKRCDGRDLTSLRNVSCEVDMFKTLHGSALFQRGQTQVLCTVTFDSLESGIKSDQVITAINGIKDKNFMLHYEFPPYATNEIGKVTGLNRRELGHGALAEKALYPVIPRDFPFTIRVTSEVLESNGSSSMASACGGSLALMDSESSRIDSNHQGSFD

SEQ ID NO: 6015 - protein, 205 aa, Artificial Sequence
  Synthetic polypeptide
MPPKRNEKYKLPIPFPEGKVLDDMEGNQWVLGKKIGSGGFGLIYLAFPTNKPEKDARHVVKVEYQENGPLFSELKFYQRVAKKDCIKKWIERKQLDYLGIPLFYGSGLTEFKGRSYRFMVMERLGIDLQKISGQNGTFKKSTVLQLGIRMLDVLEYIHENEYVHGDIKAANLLLGYKNPDQALQKVFQKIVCYHRRGQLHACYCP

SEQ ID NO: 6016 - protein, 182 aa, Artificial Sequence
  Synthetic polypeptide
MEGNQWVLGKKIGSGGFGLIYLAFPTNKPEKDARHVVKVEYQENGPLFSELKFYQRVAKKDCIKKWIERKQLDYLGIPLFYGSGLTEFKGRSYRFMVMERLGIDLQKISGQNGTFKKSTVLQLGIRMLDVLEYIHENEYVHGDIKAANLLLGYKNPDQALQKVFQKIVCYHRRGQLHACYCP

SEQ ID NO: 6017 - protein, 190 aa, Artificial Sequence
  Synthetic polypeptide
MAVTEASLLRQCPLLLPQNRSKTVYEGFISAQGRDFHLRIVLPEDLQLKNARLLCSWQLRTILSGYHRIVQQRMQHSPDLMSFMMELKMLLEVALKNRQELYALPPPPQFYSSLIEEIGTLGWDKLVYADTCFSTIKLKAEDASGREHLITLKLKAKYPAESPDYFVDFPVPFCASWTPQVNSPQKLTKL

SEQ ID NO: 6018 - protein, 73 aa, Artificial Sequence
  Synthetic polypeptide
MRDSSRLRLVYADTCFSTIKLKAEDASGREHLITLKLKAKYPAESPDYFVDFPVPFCASWTPQVNSPQKLTKL

SEQ ID NO: 6019 - protein, 185 aa, Artificial Sequence
  Synthetic polypeptide
MAVTEASLLRQCPLLLPQNRSKTVYEGFISAQGRDFHLRIVLPEDLQLKNARLLCSWQLRTILSGYHRIVQQRMQHSPDLMSFMMELKMLLEVALKNRQELYALPPPPQFYSSLIEEIGTLGWDKLVYADTCFSTIKLKAEDASGREHLITLKLKAKYPAESPDYFVDFPVPFCASWTPQKLTKL

SEQ ID NO: 6020 - protein, 68 aa, Artificial Sequence
  Synthetic polypeptide
MRDSSRLRLVYADTCFSTIKLKAEDASGREHLITLKLKAKYPAESPDYFVDFPVPFCASWTPQKLTKL

SEQ ID NO: 6021 - protein, 126 aa, Artificial Sequence
  Synthetic polypeptide
MAVTEASLLRQCPLLLPQNRSKTVYEGFISAQEVALKNRQELYALPPPPQFYSSLIEEIGTLGWDKLVYADTCFSTIKLKAEDASGREHLITLKLKAKYPAESPDYFVDFPVPFCASWTPQKLTKL

SEQ ID NO: 6022 - protein, 24 aa, Artificial Sequence
  Synthetic polypeptide
GGDGSEPVAPVPPASAPEPVENRV

SEQ ID NO: 6023 - protein, 24 aa, Artificial Sequence
  Synthetic polypeptide
GGDGSEPVAPVPPASAPEPVENRV

SEQ ID NO: 6024 - protein, 150 aa, Artificial Sequence
  Synthetic polypeptide
MAVTEASLLRQCPLLLPQNRSKTVYEGFISAQGRDFHLRIVLPEDLQLKNARLLCSWQLRTILSGYHRIVQQRMQHSPDLMSFMMELKMLLEVALKNRQELYALPPPPQFYSSLIEEIGTLGWDNHQKLEEARNRFSPRASRGSTSLLTP

SEQ ID NO: 6025 - protein, 91 aa, Artificial Sequence
  Synthetic polypeptide
MAVTEASLLRQCPLLLPQNRSKTVYEGFISAQEVALKNRQELYALPPPPQFYSSLIEEIGTLGWDNHQKLEEARNRFSPRASRGSTSLLTP

SEQ ID NO: 6026 - protein, 677 aa, Artificial Sequence
  Synthetic polypeptide
MASGAYNPYIEIIEQPRQRGMRFRYKCEGRSAGSIPGEHSTDNNRTYPSIQIMNYYGKGKVRITLVTKNDPYKPHPHDLVGKDCRDGYYEAEFGQERRPLFFQNLGIRCVKKKEVKEAIITRIKAGINPFNVPEKQLNDIEDCDLNVVRLCFQVFLPDEHGNLTTALPPVVSNPIYDNRAPNTAELRICRVNKNCGSVRGGDEIFLLCDKVQKDDIEVRFVLNDWEAKGIFSQADVHRQVAIVFKTPPYCKAITEPVTVKMQLRRPSDQEVSESMDFRYLPDEKDTYGNKAKKQKTTLLFQKLCQDHVETGFRHVDQDGLELLTSGDPPTLASQSAGITVNFPERPRPGLLGSIGEGRYFKKEPNLFSHDAVVREMPTGVSSQAESYYPSPGPISSGLSHHASMAPLPSSSWSSVAHPTPRSGNTNPLSSFSTRTLPSNSQELEKTTLKFIWNQKRAHIAKSILSQKNKAGGITLPDFKLYYKATVTKTAWYWYQNRDIDHWNRTEPSEITPHIYNYLIFDKPEKNKQWGKDSLFNKWCWENWLAICRKLKLDPFLTPYTKINSRWIKDLNVRPKTIKTLEENLGITIQDIGMGKDFMSKTPKAMATKAKIDKWDLIKLKSCCTAKETTIRVNRQPTKWEKIFATYLSDKGLISRIYNELKQIYKKKTTPSKSGRRT

SEQ ID NO: 6027 - protein, 645 aa, Artificial Sequence
  Synthetic polypeptide
MASGAYNPYIEIIEQPRQRGMRFRYKCEGRSAGSIPGEHSTDNNRTYPSIQIMNYYGKGKVRITLVTKNDPYKPHPHDLVGKDCRDGYYEAEFGQERRPLFFQNLGIRCVKKKEVKEAIITRIKAGINPFNVPEKQLNDIEDCDLNVVRLCFQVFLPDEHGNLTTALPPVVSNPIYDNRAPNTAELRICRVNKNCGSVRGGDEIFLLCDKVQKDDIEVRFVLNDWEAKGIFSQADVHRQVAIVFKTPPYCKAITEPVTVKMQLRRPSDQEVSESMDFRYLPDEKDTYGNKAKKQKTTLLFQKLCQDHVNFPERPRPGLLGSIGEGRYFKKEPNLFSHDAVVREMPTGVSSQAESYYPSPGPISSGLSHHASMAPLPSSSWSSVAHPTPRSGNTNPLSSFSTRTLPSNSQELEKTTLKFIWNQKRAHIAKSILSQKNKAGGITLPDFKLYYKATVTKTAWYWYQNRDIDHWNRTEPSEITPHIYNYLIFDKPEKNKQWGKDSLFNKWCWENWLAICRKLKLDPFLTPYTKINSRWIKDLNVRPKTIKTLEENLGITIQDIGMGKDFMSKTPKAMATKAKIDKWDLIKLKSCCTAKETTIRVNRQPTKWEKIFATYLSDKGLISRIYNELKQIYKKKTTPSKSGRRT

SEQ ID NO: 6028 - protein, 600 aa, Artificial Sequence
  Synthetic polypeptide
MSRGYSENNNFLNNNNQMVLDMILYPLIGIPQTINWETIARLVPGLTPKECAKRFDELKSSGSSPVDNQYNSLMAAGESPVETLATYIKSSLLDIHGEFQETPVGHDAVSKTGRHSIASTRNCSSESENCTTHNGGEMTEESEGPNMVIHVCDEAKNLKEDFTCPRDLLISEMKYFAEYLSMDAQRWEEVDISVHCDVHIFNWLIKYIKRNTKENKDCEMPTLEPGNVISILISSEFLKMDSLVEQCIQYCHKNMNAIVATPCNMNCINANLLTRIADLFSHNEVDDLKDKKDKFKSKLFCKKIERLFDPEYLNPDSRSNAATLYRCCLCKKLLTKETERRIPCIPGKINVDRRGNIVYIHIRDKTWDVHEYLNSLFEELKSWRDVYWRLWGTINWLTCSRCYQAFLCIEFSHCQYHSETVVYPTAASSLNTVGTGIYPCCNQKVLRFDPTQLTKGCKVRDHMVTLRDQGEGGDLPSCPTARMLDDLHKYRDVIVVPFSKDTVSDVGVGLCDEKGIECDVLLEPNTPWGPKTGELNAFLSLKNWTLQLKQQSLFSEEEEYTTGSEVTEDEVGDEEEVSKKQTTWEAEARESLKPLKQRLQ

SEQ ID NO: 6029 - protein, 678 aa, Artificial Sequence
  Synthetic polypeptide
MSRGYSENNNFLNNNNQMVLDMILYPLIGIPQTINWETIARLVPGLTPKECAKRFDELKSSGSSPVDNQYNSLMAAGESPVETLATYIKSSLLDIHGEFQETPVGHDAVSKTGRHSIASTRNCSSESENCTTHNGGEMTEESEGPNMVIHVCDEAKNLKEDFTCPRDLLISEMKYFAEYLSMDAQRWEEVDISVHCDVHIFNWLIKYIKRNTKENKDCEMPTLEPGNVISILISSEFLKMDSLVEQCIQYCHKNMNAIVATPCNMNCINANLLTRIADLFSHNEVDDLKDKKDKFKSKLFCKKIERLFDPEYLNPDSRSNAATLYRCCLCKKLLTKETERRIPCIPGKINVDRRGNIVYIHIRDKTWDVHEYLNSLFEELKSWRDVYWRLWGTINWLTCSRCYQAFLCIEFSHCQYHSETVVYPTAASSLNTVGTGIYPCCNQKVLRFDPTQLTKGCKVRDHMVTLRDQGEGGDLPSCPTARMLDDLHKYRDVIVVPFSKDTVSDVGVGLCDEKGIECDVLLEPNTPWGPKTGELNAFLSLKNWTLQLKQQSLFSEEEEYTTGSEVTEDEVGDEEEVSKKQRKKEKPKKFTRQPKKQVSSPCAQRKEKALEKSASRDVSPFVMSMQKNKWDATRSLRFNQDAQREDDQRRMTEITGHLIKMRLGDLDRVKSKEAKEET

SEQ ID NO: 6030 - protein, 10 aa, Artificial Sequence
  Synthetic polypeptide
RGRKWQRIQI

SEQ ID NO: 6031 - protein, 2552 aa, Artificial Sequence
  Synthetic polypeptide
MCENCADLVEVLNEISDVEGGDGLQLRKEHTLKIFTYINSWTQRQCLCCFKEYKHLEIFNQVVCALINLVIAQVQVLRDQLCKHCTTINIDSTWQDESNQAEEPLNIDRECNEGSTERQKSIEKKSNSTRICNLTEEESSKSSDPFSLWSTDEKEKLLLCVAKIFQIQFPLYTAYKHNTHPTIEDISTQESNILGAFCDMNDVEVPLHLLRYVCLFCGKNGLSLMKDCFEYGTPETLPFLIAHAFITVVSNIRIWLHIPAVMQHIIPFRTYVIRYLCKLSDQELRQSAARNMADLMWSTVKEPLDTTLCFDKESLDLAFKYFMSPTLTMRLAGLSQITNQLHTFNDVCNNESLVSDTETSIAKELADWLISNNVVEHIFGPNLHIEIIKQCQVILNFLAAEGRLSTQHIDCIWAAAQLKHCSRYIHDLFPSLIKNLDPVPLRHLLNLVSALEPSVHTEQTLYLASMLIKALWNNALAAKAQLSKQSSFASLLNTNIPIGNKKEEEELRRTAPSPWSPAASPQSSDNSDTHQSGGSDIEMDEQLINRTKHVQQRLSDTEESMQGSSDETANSGEDGSSGPGSSSGHSDGSSNEVNSSHASQSAGSPGSEVQSEDIADIEALKEEDEDDDHGHNPPKSSCGTDLRNRKLESQAGICLGDSQGMSERNGTSSGTGKDLVFNTESLPSVDNRMRMLDACSHSEDPEHDISGEMNATHIAQGSQESCITRTGDFLGETIGNELFNCRQFIGPQHHHHHHHHHHHHDGHMVDDMLSADDVSCSSSQVSAKSEKNMADFDGEESGCEEELVQINSHAELTSHLQQHLPNLASIYHEHLSQGPVVHKHQFNSNAVTDINLDNVCKKGNTLLWDIVQDEDAVNLSEGLINEAEKLLCSLVCWFTDRQIRMRFIEGCLENLGNNRSVVISLRLLPKLFGTFQQFGSSYDTHWITMWAEKELNMMKLFFDNLVYYIQTVREGRQKHALYSHSAEVQVRLQFLTCVFSTLGSPDHFRLSLEQVDILWHCLVEDSECYDDALHWFLNQVRSKDQHAMGMETYKHLFLEKMPQLKPETISMTGLNLFQHLCNLARLATSAYDGCSNSELCGMDQFWGIALRAQSGDVSRAAIQYINSYYINGKTGLEKEQEFISKCMESLMIASSSLEQESHSSLMVIERGLLMLKTHLEAFRRRFAYHLRQWQIEGTGISSHLKALSDKQSLPLRVVCQPAGLPDKMTIEMYPSDQVADLRAEVTHWYENLQKEQINQQAQLQEFGQSNRKGEFPGGLMGPVRMISSGHELTTDYDEKALHELGFKDMQMVFVSLGAPRRERKGEGVQLPASCLPPPQKDNIPMLLLLQEPHLTTLFDLLEMLASFKPPSGKVAVDDSESLRCEELHLHAENLSRRVWELLMLLPTCPNMLMAFQNISDEQSNDGFNWKELLKIKSAHKLLYALEIIEALGKPNRRIRRESTGSYSDLYPDSDDSSEDQVENSKNSWSCKFVAAGGLQQLLEIFNSGILEPKEQESWTVWQLDCLACLLKLICQFAVDPSDLDLAYHDVFAWSGIAESHRKRTWPGKSRKAAGDHAKGLHIPRLTEVFLVLVQGTSLIQRLMSVAYTYDNLAPRVLKAQSDHRSRHEVSHYSMWLLVSWAHCCSLVKSSLADSDHLQDWLKKLTLLIPETAVRHESCSGLYKLSLSGLDGGDSINRSFLLLAASTLLKFLPDAQALKPIRIDDYEEEPILKPGCKEYFWLLCKLVDNIHIKDASQTTLLDLDALARHLADCIRSREILDHQDGNVEDDGLTGLLRLATSVVKHKPPFKFSREGQEFLRDIFNLLFLLPSLKDRQQPKCKSHSSRAAAYDLLVEMVKGSVENYRLIHNWVMAQHMQSHAPYKWDYWPHEDVRAECRFVGLTNLGATCYLASTIQQLYMIPEARQAVFTAKYSEDMKHKTTLLELQKMFTYLMESECKAYNPRPFCKTYTMDKQPLNTGEQKDMTEFFTDLITKIEEMSPELKNTVKSLFGGVITNNVVSLDCEHVSQTAEEFYTVRCQVADMKNIYESLDEVTIKDTLEGDNMYTCSHCGKKVRAEKRACFKKLPRILSFNTMRYTFNMVTMMKEKVNTHFSFPLRLDMTPYTEDFLMGKSERKEGFKEVSDHSKDSESYEYDLIGVTVHTGTADGGHYYSFIRDIVNPHAYKNNKWYLFNDAEVKPFDSAQLASECFGGEMTTKTYDSVTDKFMDFSFEKTHSAYMLFYKRMEPEEENGREYKFDVSSELLEWIWHDNMQFLQDKNIFEHTYFGFMWQLCSCIPSTLPDPKAVSLMTAKLSTSFVLETFIHSKEKPTMLQWIELLTKQFNNSQAACEWFLDRMADDDWWPMQILIKCPNQIVRQMFQRLCIHVIQRLRPVHAHLYLQPGMEDGSDDMDTSVEDIGGRSCVTRFVRTLLLIMEHGVKPHSKHLTEYFAFLYEFAKMGEEESQFLLSLQAISTMVHFYMGTKGPENPQVEVLSEEEGEEEEEEEDILSLAEEKYRPAALEKMIALVALLVEQSRSERNLCPKYRKMYMQICLLKPCF

SEQ ID NO: 6032 - protein, 830 aa, Artificial Sequence
  Synthetic polypeptide
EEPILKPGCKEYFWLLCKLVDNIHIKDASQTTLLDLDALARHLADCIRSREILDHQDGNVEDDGLTGLLRLATSVVKHKPPFKFSREGQEFLRDIFNLLFLLPSLKDRQQPKCKSHSSRAAAYDLLVEMVKGSVENYRLIHNWVMAQHMQSHAPYKWDYWPHEDVRAECRFVGLTNLGATCYLASTIQQLYMIPEARQAVFTAKYSEDMKHKTTLLELQKMFTYLMESECKAYNPRPFCKTYTMDKQPLNTGEQKDMTEFFTDLITKIEEMSPELKNTVKSLFGGVITNNVVSLDCEHVSQTAEEFYTVRCQVADMKNIYESLDEVTIKDTLEGDNMYTCSHCGKKVRAEKRACFKKLPRILSFNTMRYTFNMVTMMKEKVNTHFSFPLRLDMTPYTEDFLMGKSERKEGFKEVSDHSKDSESYEYDLIGVTVHTGTADGGHYYSFIRDIVNPHAYKNNKWYLFNDAEVKPFDSAQLASECFGGEMTTKTYDSVTDKFMDFSFEKTHSAYMLFYKRMEPEEENGREYKFDVSSELLEWIWHDNMQFLQDKNIFEHTYFGFMWQLCSCIPSTLPDPKAVSLMTAKLSTSFVLETFIHSKEKPTMLQWIELLTKQFNNSQAACEWFLDRMADDDWWPMQILIKCPNQIVRQMFQRLCIHVIQRLRPVHAHLYLQPGMEDGSDDMDTSVEDIGGRSCVTRFVRTLLLIMEHGVKPHSKHLTEYFAFLYEFAKMGEEESQFLLSLQAISTMVHFYMGTKGPENPQVEVLSEEEGEEEEEEEDILSLAEEKYRPAALEKMIALVALLVEQSRSERNLCPKYRKMYMQICLLKPCF

SEQ ID NO: 6033 - protein, 1305 aa, Artificial Sequence
  Synthetic polypeptide
MCENCADLVEVLNEISDVEGGDGLQLRKEHTLKIFTYINSWTQRQCLCCFKEYKHLEIFNQVVCALINLVIAQVQVLRDQLCKHCTTINIDSTWQDESNQAEEPLNIDRECNEGSTERQKSIEKKSNSTRICNLTEEESSKSSDPFSLWSTDEKEKLLLCVAKIFQIQFPLYTAYKHNTHPTIEDISTQESNILGAFCDMNDVEVPLHLLRYVCLFCGKNGLSLMKDCFEYGTPETLPFLIAHAFITVVSNIRIWLHIPAVMQHIIPFRTYVIRYLCKLSDQELRQSAARNMADLMWSTVKEPLDTTLCFDKESLDLAFKYFMSPTLTMRLAGLSQITNQLHTFNDVCNNESLVSDTETSIAKELADWLISNNVVEHIFGPNLHIEIIKQCQVILNFLAAEGRLSTQHIDCIWAAAQLKHCSRYIHDLFPSLIKNLDPVPLRHLLNLVSALEPSVHTEQTLYLASMLIKALWNNALAAKAQLSKQSSFASLLNTNIPIGNKKEEEELRRTAPSPWSPAASPQSSDNSDTHQSGGSDIEMDEQLINRTKHVQQRLSDTEESMQGSSDETANSGEDGSSGPGSSSGHSDGSSNEVNSSHASQSAGSPGSEVQSEDIADIEALKEEDEDDDHGHNPPKSSCGTDLRNRKLESQAGICLGDSQGMSERNGTSSGTGKDLVFNTESLPSVDNRMRMLDACSHSEDPEHDISGEMNATHIAQGSQESCITRTGDFLGETIGNELFNCRQFIGPQHHHHHHHHHHHHDGHMVDDMLSADDVSCSSSQVSAKSEKNMADFDGEESGCEEELVQINSHAELTSHLQQHLPNLASIYHEHLSQGPVVHKHQFNSNAVTDINLDNVCKKGNTLLWDIVQDEDAVNLSEGLINEAEKLLCSLVCWFTDRQIRMRFIEGCLENLGNNRSVVISLRLLPKLFGTFQQFGSSYDTHWITMWAEKELNMMKLFFDNLVYYIQTVREGRQKHALYSHSAEVQVRLQFLTCVFSTLGSPDHFRLSLEQVDILWHCLVEDSECYDDALHWFLNQVRSKDQHAMGMETYKHLFLEKMPQLKPETISMTGLNLFQHLCNLARLATSAYDGCSNSELCGMDQFWGIALRAQSGDVSRAAIQYINSYYINGKTGLEKEQEFISKCMESLMIASSSLEQESHSSLMVIERGLLMLKTHLEAFRRRFAYHLRQWQIEGTGISSHLKALSDKQSLPLRVVCQPAGLPDKMTIEMYPSDQVADLRAEVTHWYENLQKEQINQQAQLQEFGQSNRKGEFPELDYFKVHMKPKKGPHCQDNPKPKEQSWRHHAT

SEQ ID NO: 6034 - protein, 215 aa, Artificial Sequence
  Synthetic polypeptide
MASVWKRLQRVGKHASKFQFVASYQELMVECTKKWQPDKLVVVWTRRSRRKSSKAHSWQPGIKNPYRGVVVWPVPENIEITVTLFKDPHAEEFEDKEWTFVIENESPSGRRKALATSSINMKQYASPMPTQTDVKLKFKPLSKKVVSAALQFSLSCIFLREGKATDEDMQSLASLMSMKQADIGNLDDFEEDNEDDDENRVNQEEKAAKITELGS

SEQ ID NO: 6035 - protein, 95 aa, Artificial Sequence
  Synthetic polypeptide
MKQYASPMPTQTDVKLKFKPLSKKVVSAALQFSLSCIFLREGKATDEDMQSLASLMSMKQADIGNLDDFEEDNEDDDENRVNQEEKAAKITELGS

SEQ ID NO: 6036 - protein, 38 aa, Artificial Sequence
  Synthetic polypeptide
MRREFCWDAYSKAAGSRASSPLPRQTFTARNAKGNSSG

SEQ ID NO: 6037 - protein, 30 aa, Artificial Sequence
  Synthetic polypeptide
ARVLLGRLLQSGRESRFFPTPETDLHCKKC

SEQ ID NO: 6038 - protein, 136 aa, Artificial Sequence
  Synthetic polypeptide
MFSPDQENHPSKAPVKYGELIVLGYNGSLPNGDRGRRKSRFALFKRPKANGVKPSTVHIACTPQAAKAISNKDQHSISYTLSRAQTVVVEYTHDSNTDMFQSKSSQLKEGLVAGNKHDQKQGVIADNLTEKKQENI

SEQ ID NO: 6039 - protein, 96 aa, Artificial Sequence
  Synthetic polypeptide
MSSMNPEYDYLFKLLLIGDSGVGKSCLLLRFADDTYTESYISTIGVDFKIRTIELDGKTIKLQIMEMGCHVVSCPMGKRLTCEELREASRKQPVKN

SEQ ID NO: 6040 - protein, 96 aa, Artificial Sequence
  Synthetic polypeptide
MSCLHPTSDYLFKLLLIGDSGVGKSCLLLRFADDTYTESYISTIGVDFKIRTIELDGKTIKLQIMEMGCHVVSCPMGKRLTCEELREASRKQPVKN

SEQ ID NO: 6041 - protein, 69 aa, Artificial Sequence
  Synthetic polypeptide
MSSMNPEYDYLFKLLLIGDSGVGKSCLLLRFAVRWLTPVIPALWEAETGGSQGQEIETILANTVKPRLY

SEQ ID NO: 6042 - protein, 69 aa, Artificial Sequence
  Synthetic polypeptide
MSCLHPTSDYLFKLLLIGDSGVGKSCLLLRFAVRWLTPVIPALWEAETGGSQGQEIETILANTVKPRLY

SEQ ID NO: 6043 - protein, 233 aa, Artificial Sequence
  Synthetic polypeptide
MTEETHPDDDSYIVRVKAVVMTRDDSSGGWFPQEGGGISRVGVCKVMHPEGNGRSGFLIHGERQKDKLVVLECYVRKDLVYTKANPTFHHWKVDNRKFGLTFQSPADARAFDRGVRKAIEDLIEGSTTSSSTIHNEAELGDDDVFTTATDSSSNSSQKREQPTRTISSPTSCEHRRIYTLGHLHDSYPTDHYHLDQVQWLMPVIPALWEAEAGGSQGQEIETILVNTVKPRVY

SEQ ID NO: 6044 - protein, 230 aa, Artificial Sequence
  Synthetic polypeptide
MASPGSDSYIVRVKAVVMTRDDSSGGWFPQEGGGISRVGVCKVMHPEGNGRSGFLIHGERQKDKLVVLECYVRKDLVYTKANPTFHHWKVDNRKFGLTFQSPADARAFDRGVRKAIEDLIEGSTTSSSTIHNEAELGDDDVFTTATDSSSNSSQKREQPTRTISSPTSCEHRRIYTLGHLHDSYPTDHYHLDQVQWLMPVIPALWEAEAGGSQGQEIETILVNTVKPRVY

SEQ ID NO: 6045 - protein, 248 aa, Artificial Sequence
  Synthetic polypeptide
MALCSLISSWASGFRSDDDQERRGDSYIVRVKAVVMTRDDSSGGWFPQEGGGISRVGVCKVMHPEGNGRSGFLIHGERQKDKLVVLECYVRKDLVYTKANPTFHHWKVDNRKFGLTFQSPADARAFDRGVRKAIEDLIEGSTTSSSTIHNEAELGDDDVFTTATDSSSNSSQKREQPTRTISSPTSCEHRRIYTLGHLHDSYPTDHYHLDQVQWLMPVIPALWEAEAGGSQGQEIETILVNTVKPRVY

SEQ ID NO: 6046 - protein, 145 aa, Artificial Sequence
  Synthetic polypeptide
MSRRRKHDDSPSPKKTPHKTVAAEECGSVVEPGRRRLRSARGSWPCGAREGPPGPVRQREQPPTAALCSKSNPEERYETPKRALKMDSLSSSFSSPNDPDGQNDIFWDQNSPLTKQLGKGRKKQIYTTDSDEISHIVNRIAPQAW

SEQ ID NO: 6047 - protein, 817 aa, Artificial Sequence
  Synthetic polypeptide
MKKFFDSRREQGGSGLGSGSSGGGGSTSGLGSGYIGRVFGIGRQQVTVDEVLAEGGFAIVFLVRTSNGMKCALKRMFVNNEHDLQVCKREIQIMRDLSGHKNIVGYIDSSINNVSSGDVWEVLILMDFCRGGQVVNLMNQRLQTGFTENEVLQIFCDTCEAVARLHQCKTPIIHRDLKVENILLHDRGHYVLCDFGSATNKFQNPQTEGVNAVEDEIKKYTTLSYRAPEMVNLYSGKIITTKADIWALGCLLYKLCYFTLPFGESQVAICDGNFTIPDNSRYSQDMHCLIRYMLEPDPDKRPDIYQVSYFSFKLLKKECPIPNVQNSPIPAKLPEPVKASEAAAKKTQPKARLTDPIPTTETSIAPRQRPKAGQTQPNPGILPIQPALTPRKRATVQPPPQAAGSSNQPGLLASVPQPKPQAPPSQPLPQTQAKQPQAPPTPQQTPSTQAQGLPAQAQATPQHQQQLFLKQQQQQQQPPPAQQQPAGTFYQQQQAQTQQFQAVHPATQKPAIAQFPVVSQGGSQQQLMQNFYQQQQQQQQQQQQQQLATALHQQQLMTQQAALQQKPTMAAGQQPQPQPAAAPQPAPAQEPAIQAPVRQQPKVQTTPPPAVQGQKVGSLTPPSSPKTQRAGHRRILSDVTHSAVFGVPASKSTQLLQAAAAEASLNKSKSATTTPSGSPRTSQQNVYNPSEGSTWNPFDDDNFSKLTAEELLNKDFAKLGEGKHPEKLGGSAESLIPGFQSTQGDAFATTSFSAGTAEKRKGGQTVDSGLPLLSVSDPFIPLQVPDAPDSARLHPGEINSLVAHTKPVWWSLHTDAN

SEQ ID NO: 6048 - protein, 785 aa, Artificial Sequence
  Synthetic polypeptide
MKKFFDSRREQGGSGLGSGSSGGGGSTSGLGSGYIGRVFGIGRQQVTVDEVLAEGGFAIVFLVRTSNGMKCALKRMFVNNEHDLQVCKREIQIMRDLSGHKNIVGYIDSSINNVSSGDVWEVLILMDFCRGGQVVNLMNQRLQTGFTENEVLQIFCDTCEAVARLHQCKTPIIHRDLKVENILLHDRGHYVLCDFGSATNKFQNPQTEGVNAVEDEIKKYTTLSYRAPEMVNLYSGKIITTKADIWALGCLLYKLCYFTLPFGESQVAICDGNFTIPDNSRYSQDMHCLIRYMLEPDPDKRPDIYQVSYFSFKLLKKECPIPNVQNSPIPAKLPEPVKASEAAAKKTQPKARLTDPIPTTETSIAPRQRPKAGQTQPNPGILPIQPALTPRKRATVQPPPQAAGSSNQPGLLASVPQPKPQAPPSQPLPQTQAKQPQAPPTPQQTPSTQAQGLPAQAQATPQHQQQLFLKQQQQQQQPPPAQQQPAGTFYQQQQAQTQQFQAVHPATQKPAIAQFPVVSQGGSQQQLMQNFYQQQQQQQQQQQQQQLATALHQQQLMTQQAALQQKPTMAAGQQPQPQPAAAPQPAPAQEPAIQAPVRQQPKVQTTPPPAVQGQKVGSLTPPSSPKTQRAGHRRILSDVTHSAVFGVPASKSTQLLQAAAAEASLNKSKSATTTPSGSPRTSQQNVYNPSEGSTWNPFDDDNFSKLTAEELLNKDFAKLGEGKHPEKLGGSAESLIPGFQSTQGDAFATTSFSAGTDSARLHPGEINSLVAHTKPVWWSLHTDAN

SEQ ID NO: 6049 - protein, 259 aa, Artificial Sequence
  Synthetic polypeptide
MGSLSSRVLRQPRPALAQQAQGARAGGSARRPDTGDDAAGHGFCYCAGSHKRKRSSGSFCYCHPDSETDEDEEEGDEQQRLLNTPRRKKLKSTSKYIYQTLFLNGENSDIKICALGEEWSLHKIYLCQSGYFSSMFSGSWKESSMNIIELEIPDQNIDVEALQVAFGSLYRDDVLIKPSRVVAILAAACLLQLDGLIQQCGETMKETVNVKTVCGYYTSAGTYGLDSVKKKCLEWLLNNLMTHQNVELFKELSPSYSGG

SEQ ID NO: 6050 - protein, 438 aa, Artificial Sequence
  Synthetic polypeptide
MGSLSSRVLRQPRPALAQQAQGARAGGSARRPDTGDDAAGHGFCYCAGSHKRKRSSGSFCYCHPDSETDEDEEEGDEQQRLLNTPRRKKLKSTSKYIYQTLFLNGENSDIKICALGEEWSLHKIYLCQSGYFSSMFSGSWKESSMNIIELEIPDQNIDVEALQVAFGSLYRDDVLIKPSRVVAILAAACLLQLDGLIQQCGETMKETVNVKTVCGYYTSAGTYGLDSVKKKCLEWLLNNLMTHQNVELFKELSINVMKQLIGSSNLFVMQVEMDIYTALKKWMFLQLVPSWNGSLKQLLTETDVWFSKQRKDFEGMAFLETEQGKPFVSVFRHLRLQYIISDLASARIIEQDAVVPSEWLSSVYKQQWFAMLRAEQDSEVGPQEINKEELEGNSMRCGRKLAKDGEVRWLTPIIPALWKAEMGGSLEARSSRPAWPTW

SEQ ID NO: 6051 - protein, 416 aa, Artificial Sequence
  Synthetic polypeptide
MGSLSSRVLRQPRPALAQQAQGARAGGSARRPDTGDDAAGHGFCYCAGSHKRKRSSGSFCYCHPDSETDEDEEEGDEQQRLLNTPRRKKLKSTSKYIYQTLFLNGENSDIKICALGEEWSLHKIYLCQSGYFSSMFSGSWKESSMNIIELEIPDQNIDVEALQVAFGSLYRDDVLIKPSRVVAILAAACLLQLDGLIQQCGETMKETVNVKTVCGYYTSAGTYGLDSVKKKCLEWLLNNLMTHQNVELFKELSINVMKQLIGSSNLFVMQVEMDIYTALKKWMFLQLVPSWNGSLKQLLTETDVWFSKQRKDFEGMAFLETEQGKPFVSVFRHLRLQYIISDLASARIIEQDAVVPSEWLSSVYKQQWFAMLRAEQDSEVGPQEINKEELEGNSMRCGRKLAKDGEGCTPCLHPDR

SEQ ID NO: 6052 - protein, 110 aa, Artificial Sequence
  Synthetic polypeptide
MMVQGQEYEAGGSVIHPLNLHMKRFVKDLGLSAVQASGGLLGIYNGETLVFEESNWFIINVIKLVWRYGFQSLRMHMWVEDVLDKFMSFRYWRPGSHHYTPAWVTEQDSI

SEQ ID NO: 6053 - protein, 187 aa, Artificial Sequence
  Synthetic polypeptide
MGRVVAELVSSLLGLWLLLCSCGCPEGAELRAPPDKIAIIGAGIGGTSAAYYLRQKFGKDVKIDLFEREEVGGRLATMMVQGQEYEAGGSVIHPLNLHMKRFVKDLGLSAVQASGGLLGIYNGETLVFEESNWFIINVIKLVWRYGFQSLRMHMWVEDVLDKFMSFRYWRPGSHHYTPAWVTEQDSI

SEQ ID NO: 6054 - protein, 109 aa, Artificial Sequence
  Synthetic polypeptide
MVQGQEYEAGGSVIHPLNLHMKRFVKDLGLSAVQASGGLLGIYNGETLVFEESNWFIINVIKLVWRYGFQSLRMHMWVEDVLDKFMSFRYWRPGSHHYTPAWVTEQDSI

SEQ ID NO: 6055 - protein, 34 aa, Artificial Sequence
  Synthetic polypeptide
MVPSAGQLALFALGIVLAACQALENSTSPLSGSP

SEQ ID NO: 6056 - protein, 40 aa, Artificial Sequence
  Synthetic polypeptide
MFKIGRGALDLFSELLSFGGIVLAACQALENSTSPLSGSP

SEQ ID NO: 6057 - protein, 147 aa, Artificial Sequence
  Synthetic polypeptide
MGDGGAERDRGPARRAESGGGGGRCGDRSGAGDLRADGGGHSPTEVAGTSASSPAGSRESGADSDGQPGPGEADHCRRILVRDAKGTIREIVLPKGLDLDRPKRTRTSFTAEQLYRLEMEFQRCQYVVGRERTELARQLNLSETQVI

SEQ ID NO: 6058 - protein, 163 aa, Artificial Sequence
  Synthetic polypeptide
MGDGGAERDRGPARRAESGGGGGRCGDRSGAGDLRADGGGHSPTEVAGTSASSPAGSRESGADSDGQPGPGEADHCRRILVRDAKGTIREIVLPKGLDLDRPKRTRTSFTAEQLYRLEMEFQRCQYVVGRERTELARQLNLSETQHLAMPGLHQMLDISVLPE

SEQ ID NO: 6059 - protein, 805 aa, Artificial Sequence
  Synthetic polypeptide
MSRPRFNPRGDFPLQRPRAPNPSGMRPPGPFMRPGSMGLPRFYPAGRARGIPHRFAGHESYQNMGPQRMNVQVTQHRTDPRLTKEKLDFHEAQQKKGKPHGSRWDDEPHISASVAVKQSSVTQVTEQSPKVQSRYTKESASSILASFGLSNEDLEELSRYPDEQLTPENMPLILRDIRMRKMGRRLPNLPSQSRNKETLGSEAVSSNVIDYGHASKYGYTEDPLEVRIYDPEIPTDEVENEFQSQQNISASVPNPNVICNSMFPVEDVFRQMDFPGESSNNRSFFSVESGTKMSGLHISGGQSVLEPIKSVNQSINQTVSQTMSQSLIPPSMNQQPFSSELISSVSQQERIPHEPVINSSNVHVGSRGSKKNYQSQADIPIRSPFGIVKASWLPKFSHADAQKMKRLPTPSMMNDYYAASPRIFPHLCSLCNVECSHLKDWIQHQNTSTHIESCRQLRQQYPDWNPEILPSRRNEGNRKENETPRRRSHSPSPRRSRRSSSSHRFRRSRSPMHYMYRPRSRSPRICHRFISRYRSRSRSRSPYRIRNPFRGSPKCFRSVSPERMSRRSVRSSDRKKALEDVVQRSGHGTEFNKQKHLEAADKGHSPAQKPKTSSGTKPSVKPTSATKSDSNLGGHSIRCKSKNLEDDTLSECKQVSDKAVSLQRKLRKEQSLHYGSVLLITELPEDGCTEEDVRKLFQPFGKVNDVLIVPYRKEAYLEMEFKEAITAIMKYIETTPLTIKGKSVKICVPGKKKAQNKEVKKKTLESKKVSASTLKRDADASKAVEIVTSTSAGTLIKNKKPQPKR

SEQ ID NO: 6060 - protein, 838 aa, Artificial Sequence
  Synthetic polypeptide
MSRPRFNPRGDFPLQRPRAPNPSGMRPPGPFMRPGSMGLPRFYPAGRARGIPHRFAGHESYQNMGPQRMNVQVTQHRTDPRLTKEKLDFHEAQQKKGKPHGSRWDDEPHISASVAVKQSSVTQVTEQSPKVQSRYTKESASSILASFGLSNEDLEELSRYPDEQLTPENMPLILRDIRMRKMGRRLPNLPSQSRNKETLGSEAVSSNVIDYGHASKYGYTEDPLEVRIYDPEIPTDEVENEFQSQQNISASVPNPNVICNSMFPVEDVFRQMDFPGESSNNRSFFSVESGTKMSGLHISGGQSVLEPIKSVNQSINQTVSQTMSQSLIPPSMNQQPFSSELISSVSQQERIPHEPVINSSNVHVGSRGSKKNYQSQADIPIRSPFGIVKASWLPKFSHADAQKMKRLPTPSMMNDYYAASPRIFPHLCSLCNVECSHLKDWIQHQNTSTHIESCRQLRQQYPDWNPEILPSRRNEGNRKENETPRRRSHSPSPRRSRRSSSSHRFRRSRSPMHYMYRPRSRSPRICHRFISRYRSRSRSRSPYRIRNPFRGSPKCFRSVSPERMSRRSVRSSDRKKALEDVVQRSGHGTEFNKQKHLEAADKGHSPAQKPKTSSGTKPSVKPTSATKSDSNLGGHSIRCKSKNLEDDTLSECKQVSDKAVSLQRKLRKEQSLHYGSVLLITELPEDGCTEEDVRKLFQPFGKVNDVLIVPYRKEAYLEMEFKEAITAIMKYIETTPLTIKGKSVKICVPGKKKAQNKEVKKKTLESKKVSASTLKRDADASKAVEIVTSTSAAPAYWGCVLSSASLRPSSFLAALTQNTCVCVLFSSVARPESVDQTQ

SEQ ID NO: 6061 - protein, 817 aa, Artificial Sequence
  Synthetic polypeptide
MSRPRFNPRGDFPLQRPRAPNPSGMRPPGPFMRPGSMGLPRFYPAGRARGIPHRFAGHESYQNMGPQRMNVQVTQHRTDPRLTKEKLDFHEAQQKKGKPHGSRWDDEPHISASVAVKQSSVTQVTEQSPKVQSRYTKESASSILASFGLSNEDLEELSRYPDEQLTPENMPLILRDIRMRKMGRRLPNLPSQSRNKETLGSEAVSSNVIDYGHASKYGYTEDPLEVRIYDPEIPTDEVENEFQSQQNISASVPNPNVICNSMFPVEDVFRQMDFPGESSNNRSFFSVESGTKMSGLHISGGQSVLEPIKSVNQSINQTVSQTMSQSLIPPSMNQQPFSSELISSVSQQERIPHEPVINSSNVHVGSRGSKKNYQSQADIPIRSPFGIVKASWLPKFSHADAQKMKRLPTPSMMNDYYAASPRIFPHLCSLCNVECSHLKDWIQHQNTSTHIESCRQLRQQYPDWNPEILPSRRNEGNRKENETPRRRSHSPSPRRSRRSSSSHRFRRSRSPMHYMYRPRSRSPRICHRFISRYRSRSRSRSPYRIRNPFRGSPKCFRSVSPERMSRRSVRSSDRKKALEDVVQRSGHGTEFNKQKHLEAADKGHSPAQKPKTSSGTKPSVKPTSATKSDSNLGGHSIRCKSKNLEDDTLSECKQVSDKAVSLQRKLRKEQSLHYGSVLLITELPEDGCTEEDVRKLFQPFGKVNDVLIVPYRKEAYLEMEFKEAITAIMKYIETTPLTIKGKSVKICVPGKKKAQNKEVKKKTLESKKVSASTLKRDADASKAVEIVTSTSAAKTGQAKASVAKVNKSTARHGGSRL

SEQ ID NO: 6062 - protein, 997 aa, Artificial Sequence
  Synthetic polypeptide
MSRPRFNPRGDFPLQRPRAPNPSGMRPPGPFMRPGSMGLPRFYPAGRARGIPHRFAGHESYQNMGPQRMNVQVTQHRTDPRLTKEKLDFHEAQQKKGKPHGSRWDDEPHISASVAVKQSSVTQVTEQSPKVQSRYTKESASSILASFGLSNEDLEELSRYPDEQLTPENMPLILRDIRMRKMGRRLPNLPSQSRNKETLGSEAVSSNVIDYGHASKYGYTEDPLEVRIYDPEIPTDEVENEFQSQQNISASVPNPNVICNSMFPVEDVFRQMDFPGESSNNRSFFSVESGTKMSGLHISGGQSVLEPIKSVNQSINQTVSQTMSQSLIPPSMNQQPFSSELISSVSQQERIPHEPVINSSNVHVGSRGSKKNYQSQADIPIRSPFGIVKASWLPKFSHADAQKMKRLPTPSMMNDYYAASPRIFPHLCSLCNVECSHLKDWIQHQNTSTHIESCRQLRQQYPDWNPEILPSRRNEGNRKENETPRRRSHSPSPRRSRRSSSSHRFRRSRSPMHYMYRPRSRSPRICHRFISRYRSRSRSRSPYRIRNPFRGSPKCFRSVSPERMSRRSVRSSDRKKALEDVVQRSGHGTEFNKQKHLEAADKGHSPAQKPKTSSGTKPSVKPTSATKSDSNLGGHSIRCKSKNLEDDTLSECKQVSDKAVSLQRKLRKEQSLHYGSVLLITELPEDGCTEEDVRKLFQPFGKVNDVLIVPYRKEAYLEMEFKEAITAIMKYIETTPLTIKGKSVKICVPGKKKAQNKEVKKKTLESKKVSASTLKRDADASKAVEIVTSTSAAKTGQAKASVAKVNKSTGKSASSVKSVVTVAVKGNKASIKTAKSGGKKSLEAKKTGNVKNKDSNKPVTIPENSEIKTSIEVKATENCAKEAISDAALEATENEPLNKETEEMCVMLVSNLPNKGYSVEEVYDLAKPFGGLKDILILSSHKKAYIEINRKAAESMVKFYTCFPVLMDGNQLSISMAPENMNIKDEVWWLTLVIPAL

SEQ ID NO: 6063 - protein, 249 aa, Artificial Sequence
  Synthetic polypeptide
MTTTRYRPTWDLALDPLVSCKLCLGEYPVEQMTTIAQCQCIFCTLCLKQYVELLIKEGLETAISCPDAACPKQGHLQENEIECMVAAEIMQRYKKLQFEREVLFDPCRTWCPASTCQAVCQLQDVGLQTPQPVQCKACRMEFCSTCKASWHPGQGCPETMPITFLPGETSAAFKMEEDDAPIKRCPKCKVYIERDEGCAQMMCKNCKHAFCWYCLESLDDDFLLIHYDKGPCRNKLGHSRASVIWHRTQ

SEQ ID NO: 6064 - protein, 27 aa, Artificial Sequence
  Synthetic polypeptide
GTGPPGTWPSTRWCLASSVLGSTQWSR

SEQ ID NO: 6065 - protein, 27 aa, Artificial Sequence
  Synthetic polypeptide
GTGPPGTWPSTRWCLASSVLGSTQWSR

SEQ ID NO: 6066 - protein, 304 aa, Artificial Sequence
  Synthetic polypeptide
MTTTRYRPTWDLALDPLVSCKLCLGEYPVEQMTTIAQCQCIFCTLCLKQYVELLIKEGLETAISCPDAACPKQGHLQENEIECMVAAEIMQRYKKLQFEREVLFDPCRTWCPASTCQAVCQLQDVGLQTPQPVQCKACRMEFCSTCKASWHPGQGCPETMPITFLPGETSAAFKMEEDDAPIKRCPKCKVYIERDEGCAQMMCKNCKHAFCWYCLESLDDDFLLIHYDKGPCRNKLGHSRASVIWHRTQVVDQRFSACLCHLEIARWYIKINSVSFNPRRKSGVHQNRKGQPRSPGGEPGKQSL

SEQ ID NO: 6067 - protein, 673 aa, Artificial Sequence
  Synthetic polypeptide
MERGKMAEAESLETAAEHERILREIESTDTACIGPTLRSVYDGEEHGRFMEKLETRIRNHDREIEKMCNFHYQGFVDSITELLKVRGEAQKLKNQVTDTNRKLQHEGKELVIAMEELKQCRLQQRNISATVDKLMLCLPVLEMYSKLRDQMKTKRHYPALKTLEHLEHTYLPQVSHYRFCKVMVDNIPKLREEIKDVSMSDLKDFLESIRKHSDKIGETAMKQAQQQRNLDNIVLQQPRIGSKRKSKKDAYIIFDTEIESTSPKSEQDSGILDVEDEEDDEEVPGAQDLVDFSPVYRCLHIYSVLGARETFENYYRKQRRKQARLVLQPPSNMHETLDGYRKYFNQIVGFFVVEDHILHTTQGLVNRAYIDELWEMALSKTIAALRTHSSYCSDPNLVLDLKNLIVLFADTLQVYGFPVNQLFDMLLEIRDQYSETLLKKWAGIFRNILDSDNYSPIPVTSEEMYKKVVGQFPFQDIELEKQPFPKKFPFSEFVPKVYNQIKEFIYACLKFSEDLHLSSTEVDDMIRKSTNLLLTRTLSNSLQNVIKRKNIGLTELVQIIINTTHLEKSCKYLEEFITNITNVLPETVHTTKLYGTTTFKDARHAAEEEIYTNLNQKIDQFLQLADYDWMTGDLGNKASDYLVDLIAFLRSTFAVFTHLPEIGLHQTPNLLIP

SEQ ID NO: 6068 - protein, 91 aa, Artificial Sequence
  Synthetic polypeptide
MERGKMAEAESLETAAEHERILREIESTDTACIGPTLRAKNIAKLQNQPKCISMDEWIKKTRYTQWNTVRLQKRMKSCHLQQGGWNWMSFC

SEQ ID NO: 6069 - protein, 2 aa, Artificial Sequence
  Synthetic polypeptide
GG

SEQ ID NO: 6070 - protein, 360 aa, Artificial Sequence
  Synthetic polypeptide
MADTATTASAAAASAASASSDAPPFQLGKPRFQQTSFYGRFRHFLDIIDPRTLFVTERRLREAVQLLEDYKHGTLRPGVTNEQLWSAQKIKQAILHPDTNEKIFMPFRMSGYIPFGTPIVVGLLLPNQTLASTVFWQWLNQSHNACVNYANRNATKPSPASKFIQGYLGAVISAVSIAVGLNVLVQKANKFTPATRLLIQRFVPFPAVASANICNVVLMRYGELEEGIDVLDSDGNLVGSSKIAARHALLETALTRVVLPMPILVLPPIVMSMLEKTALLQARPRLLLPVQSLVCLAAFGLALPLAISLFPQMSEIETSQLEPEIAQATSSRTVVYNKGFLHSLSETRRLDQGVPTGSSS

SEQ ID NO: 6071 - protein, 2 aa, Artificial Sequence
  Synthetic polypeptide
GG

SEQ ID NO: 6072 - protein, 280 aa, Artificial Sequence
  Synthetic polypeptide
MADTATTASAAAASAASASSDAPPFQLGKPRFQQTSFYGRFRHFLDIIDPRTLFVTERRLREAVQLLEDYKHGTLRPGVTNEQLWSAQKIKQAILHPDTNEKIFMPFRMSGYIPFGTPIVVGLLLPNQTLASTVFWQWLNQSHNACVNYANRNATKPSPASKFIQGYLGAVISAVSIAVGLNVLVQKANKFTPATRLLIQRFVPFPAVASANICNVVLMRYGELEEGIDVLDSDGNLVGSSKIAARHALLETALTRVVLPMPILVLPPIVMSMLEKMSSP

SEQ ID NO: 6073 - protein, 456 aa, Artificial Sequence
  Synthetic polypeptide
MDKLIVDGRGKATISNDGATILKLLDVVHPAAKTLVDIAKSQDAEVGDGTTSVTLLAAEFLKQVKPYVEEGLHPQIIIRAFRTATQLAVNKIKEIAVTVKKADKVEQRKLLEKCAMTALSSKLISQQKAFFAKMVVDAVMMLDDLLQLKMIGIKKVQGGALEDSQLVAGVAFKKTFSYAGFEMQPKKYHNPKIALLNVELELKAEKDNAEIRVHTVEDYQAIVDAEWNILYDKLEKIHHSGAKVVLSKLPIGDVATQYFADRDMFCAGRVPEEDLKRTMMACGGSIQTSVNALSADVLGRCQVFEETQIGGERYNFFTGCPKAKTCTFILRGGAEQFMEETERSLHDAIMIVRRAIKNDSVVAGGGAIEMELSKYLRDYSRTIPGKQQLLIGAYAKALEIIPRQLCDNAGFDATNILNKLRARHAQVRWLTPVIPTFGRPRWADHEVRSSRPAWPT

SEQ ID NO: 6074 - protein, 413 aa, Artificial Sequence
  Synthetic polypeptide
MMVGDGTTSVTLLAAEFLKQVKPYVEEGLHPQIIIRAFRTATQLAVNKIKEIAVTVKKADKVEQRKLLEKCAMTALSSKLISQQKAFFAKMVVDAVMMLDDLLQLKMIGIKKVQGGALEDSQLVAGVAFKKTFSYAGFEMQPKKYHNPKIALLNVELELKAEKDNAEIRVHTVEDYQAIVDAEWNILYDKLEKIHHSGAKVVLSKLPIGDVATQYFADRDMFCAGRVPEEDLKRTMMACGGSIQTSVNALSADVLGRCQVFEETQIGGERYNFFTGCPKAKTCTFILRGGAEQFMEETERSLHDAIMIVRRAIKNDSVVAGGGAIEMELSKYLRDYSRTIPGKQQLLIGAYAKALEIIPRQLCDNAGFDATNILNKLRARHAQVRWLTPVIPTFGRPRWADHEVRSSRPAWPT

SEQ ID NO: 6075 - protein, 500 aa, Artificial Sequence
  Synthetic polypeptide
MMPTPVILLKEGTDSSQGIPQLVSNISACQVIAEAVRTTLGPRGMDKLIVDGRGKATISNDGATILKLLDVVHPAAKTLVDIAKSQDAEVGDGTTSVTLLAAEFLKQVKPYVEEGLHPQIIIRAFRTATQLAVNKIKEIAVTVKKADKVEQRKLLEKCAMTALSSKLISQQKAFFAKMVVDAVMMLDDLLQLKMIGIKKVQGGALEDSQLVAGVAFKKTFSYAGFEMQPKKYHNPKIALLNVELELKAEKDNAEIRVHTVEDYQAIVDAEWNILYDKLEKIHHSGAKVVLSKLPIGDVATQYFADRDMFCAGRVPEEDLKRTMMACGGSIQTSVNALSADVLGRCQVFEETQIGGERYNFFTGCPKAKTCTFILRGGAEQFMEETERSLHDAIMIVRRAIKNDSVVAGGGAIEMELSKYLRDYSRTIPGKQQLLIGAYAKALEIIPRQLCDNAGFDATNILNKLRARHAQVRWLTPVIPTFGRPRWADHEVRSSRPAWPT

SEQ ID NO: 6076 - protein, 296 aa, Artificial Sequence
  Synthetic polypeptide
MMDSQLVAGVAFKKTFSYAGFEMQPKKYHNPKIALLNVELELKAEKDNAEIRVHTVEDYQAIVDAEWNILYDKLEKIHHSGAKVVLSKLPIGDVATQYFADRDMFCAGRVPEEDLKRTMMACGGSIQTSVNALSADVLGRCQVFEETQIGGERYNFFTGCPKAKTCTFILRGGAEQFMEETERSLHDAIMIVRRAIKNDSVVAGGGAIEMELSKYLRDYSRTIPGKQQLLIGAYAKALEIIPRQLCDNAGFDATNILNKLRARHAQVRWLTPVIPTFGRPRWADHEVRSSRPAWPT

SEQ ID NO: 6077 - protein, 400 aa, Artificial Sequence
  Synthetic polypeptide
MAEFLKQVKPYVEEGLHPQIIIRAFRTATQLAVNKIKEIAVTVKKADKVEQRKLLEKCAMTALSSKLISQQKAFFAKMVVDAVMMLDDLLQLKMIGIKKVQGGALEDSQLVAGVAFKKTFSYAGFEMQPKKYHNPKIALLNVELELKAEKDNAEIRVHTVEDYQAIVDAEWNILYDKLEKIHHSGAKVVLSKLPIGDVATQYFADRDMFCAGRVPEEDLKRTMMACGGSIQTSVNALSADVLGRCQVFEETQIGGERYNFFTGCPKAKTCTFILRGGAEQFMEETERSLHDAIMIVRRAIKNDSVVAGGGAIEMELSKYLRDYSRTIPGKQQLLIGAYAKALEIIPRQLCDNAGFDATNILNKLRARHAQVRWLTPVIPTFGRPRWADHEVRSSRPAWPT

SEQ ID NO: 6078 - protein, 372 aa, Artificial Sequence
  Synthetic polypeptide
MWRKVYTPRSSFELSAQPPSWEQRKLLEKCAMTALSSKLISQQKAFFAKMVVDAVMMLDDLLQLKMIGIKKVQGGALEDSQLVAGVAFKKTFSYAGFEMQPKKYHNPKIALLNVELELKAEKDNAEIRVHTVEDYQAIVDAEWNILYDKLEKIHHSGAKVVLSKLPIGDVATQYFADRDMFCAGRVPEEDLKRTMMACGGSIQTSVNALSADVLGRCQVFEETQIGGERYNFFTGCPKAKTCTFILRGGAEQFMEETERSLHDAIMIVRRAIKNDSVVAGGGAIEMELSKYLRDYSRTIPGKQQLLIGAYAKALEIIPRQLCDNAGFDATNILNKLRARHAQVRWLTPVIPTFGRPRWADHEVRSSRPAWPT

SEQ ID NO: 6079 - protein, 893 aa, Artificial Sequence
  Synthetic polypeptide
MTTGLSDQQVVCDLDHRAVEALLQAVRKRMAGASPAVPHERARLTGGAAAVEPACRGGGGAMASLDLPYRCPRCGEHKRFRSLSSLRAHLEYSHTYETLYILSKTNSICDGAAAAAAAAAAASGFPLAPEPAALLAVPGARREVFESTSFQGKEQAAGPSPAAPHLLHHHHHHAPLAHFPGDLVPASLPCEELAEPGLVPAAAARYALREIEIPLGELFARKSVASSACSTPPPGPGPGPCPGPASASPASPSPADVAYEEGLARLKIRALEKLEVDRRLERLSEEVEQKIAGQVGRLQAELERKAAELETARQESARLGREKEELEERASELSRQVDVSVELLASLKQDLVHKEQELSRKQQEVVQIDQFLKETAAREASAKLRLQQFIEELLERADRAERQLQVISSSCGSTPSASLGRGGGGGGAGPNARGPGRMREHHVGPAVPNTYAVSRHGSSPSTGASSRVPAASQSSGCYDSDSLELPRPEEGAPEDSGPGGLGTRAQAANGGSERSQPPRSSGLRRQAIQNWQRRPRRHSTEGEEGDVSDVGSRTTESEAEGPLDAPRPGPAMAGPLSSCRLSARPEGGSGRGRRAERVSPSRSNEVISPEILKMRAALFCIFTYLDTRTLLHAAEVCRDWRFVARHPAVWTRVLLENARVCSKFLAMLAQWCTQAHSLTLQNLKPRQRGKKESKEEYARSTRGCLEAGLESLLKAAGGNLLILRISHCPNILTDRSLWLASCYCRALQAVTYRSATDPVGHEVIWALGAGCREIVSLQVAPLHPCQQPTRFSNRCLQMIGRCWPHLRALGVGGAGCGVQGLASLARNCMRLQVLELDHVSEITQEVAAEVCREGLKGLEMLVLTATPVTPKALLHFNTDFLGWVRGLNEMIYG

SEQ ID NO: 6080 - protein, 832 aa, Artificial Sequence
  Synthetic polypeptide
MASLDLPYRCPRCGEHKRFRSLSSLRAHLEYSHTYETLYILSKTNSICDGAAAAAAAAAAASGFPLAPEPAALLAVPGARREVFESTSFQGKEQAAGPSPAAPHLLHHHHHHAPLAHFPGDLVPASLPCEELAEPGLVPAAAARYALREIEIPLGELFARKSVASSACSTPPPGPGPGPCPGPASASPASPSPADVAYEEGLARLKIRALEKLEVDRRLERLSEEVEQKIAGQVGRLQAELERKAAELETARQESARLGREKEELEERASELSRQVDVSVELLASLKQDLVHKEQELSRKQQEVVQIDQFLKETAAREASAKLRLQQFIEELLERADRAERQLQVISSSCGSTPSASLGRGGGGGGAGPNARGPGRMREHHVGPAVPNTYAVSRHGSSPSTGASSRVPAASQSSGCYDSDSLELPRPEEGAPEDSGPGGLGTRAQAANGGSERSQPPRSSGLRRQAIQNWQRRPRRHSTEGEEGDVSDVGSRTTESEAEGPLDAPRPGPAMAGPLSSCRLSARPEGGSGRGRRAERVSPSRSNEVISPEILKMRAALFCIFTYLDTRTLLHAAEVCRDWRFVARHPAVWTRVLLENARVCSKFLAMLAQWCTQAHSLTLQNLKPRQRGKKESKEEYARSTRGCLEAGLESLLKAAGGNLLILRISHCPNILTDRSLWLASCYCRALQAVTYRSATDPVGHEVIWALGAGCREIVSLQVAPLHPCQQPTRFSNRCLQMIGRCWPHLRALGVGGAGCGVQGLASLARNCMRLQVLELDHVSEITQEVAAEVCREGLKGLEMLVLTATPVTPKALLHFNTDFLGWVRGLNEMIYG

SEQ ID NO: 6081 - protein, 789 aa, Artificial Sequence
  Synthetic polypeptide
MTTGLSDQQVVCDLDHRAVEALLQAVRKRMAGASPAVPHERARLTGGAAAVEPACRGGGGAMASLDLPYRCPRCGEHKRFRSLSSLRAHLEYSHTYETLYILSKTNSICDGAAAAAAAAAAASGFPLAPEPAALLAVPGARREVFESTSFQGKEQAAGPSPAAPHLLHHHHHHAPLAHFPGDLVPASLPCEELAEPGLVPAAAARYALREIEIPLGELFARKSVASSACSTPPPGPGPGPCPGPASASPASPSPADVAYEEGLARLKIRALEKLEVDRRLERLSEEVEQKIAGQVGRLQAELERKAAELETARQESARLGREKEELEERASELSRQVDVSVELLASLKQDLVHKEQELSRKQQEVVQIDQFLKETAAREASAKLRLQQFIEELLERADRAERQLQVISSSCGSTPSASLGRGGGGGGAGPNARGPGRMREHHVGPAVPNTYAVSRHGSSPSTGASSRVPAASQSSGCYDSDSLELPRPEEGAPEDSGPGGLGTRAQAANGGSERSQPPRSSGLRRQAIQNWQRRPRRHSTEGEEGDVSDVGSRTTESEAEGPLDAPRPGPAMAGPLSSCRLSARPEGGSGRGRRAERVSPSRSNEVISPEILKMRAALFCIFTYLDTRTLLHAAEVCRDWRFVARHPAVWTRVLLENARVCSKFLAMLAQWCTQAHSLTLQNLKPRQRGKKESKEEYARSTRGCLEAGLESLLKAAGGNLLILRISHCPNILTDRSLWLASCYCRALQAVTYRSATDPVGHEVIWALGAGCREIVSLQVAPLHPCTLRG

SEQ ID NO: 6082 - protein, 728 aa, Artificial Sequence
  Synthetic polypeptide
MASLDLPYRCPRCGEHKRFRSLSSLRAHLEYSHTYETLYILSKTNSICDGAAAAAAAAAAASGFPLAPEPAALLAVPGARREVFESTSFQGKEQAAGPSPAAPHLLHHHHHHAPLAHFPGDLVPASLPCEELAEPGLVPAAAARYALREIEIPLGELFARKSVASSACSTPPPGPGPGPCPGPASASPASPSPADVAYEEGLARLKIRALEKLEVDRRLERLSEEVEQKIAGQVGRLQAELERKAAELETARQESARLGREKEELEERASELSRQVDVSVELLASLKQDLVHKEQELSRKQQEVVQIDQFLKETAAREASAKLRLQQFIEELLERADRAERQLQVISSSCGSTPSASLGRGGGGGGAGPNARGPGRMREHHVGPAVPNTYAVSRHGSSPSTGASSRVPAASQSSGCYDSDSLELPRPEEGAPEDSGPGGLGTRAQAANGGSERSQPPRSSGLRRQAIQNWQRRPRRHSTEGEEGDVSDVGSRTTESEAEGPLDAPRPGPAMAGPLSSCRLSARPEGGSGRGRRAERVSPSRSNEVISPEILKMRAALFCIFTYLDTRTLLHAAEVCRDWRFVARHPAVWTRVLLENARVCSKFLAMLAQWCTQAHSLTLQNLKPRQRGKKESKEEYARSTRGCLEAGLESLLKAAGGNLLILRISHCPNILTDRSLWLASCYCRALQAVTYRSATDPVGHEVIWALGAGCREIVSLQVAPLHPCTLRG

SEQ ID NO: 6083 - protein, 4079 aa, Artificial Sequence
  Synthetic polypeptide
MEPEDLPWPGELEEEEEEEEEEEEEEEEAAAAAAANVDDVVVVEEVEEEAGRELDSDSHYGPQHLESIDDEEDEEAKAWLQAHPGRILPPLSPPQHRYSEGERTSLEKKTESWHCLPQEMDSSQTLDTSQTRFNVRTEDTEVTDFPSLEEGILTQSENQVKEPNRDLFCSPLLVIQDSFASPDLPLLTCLTQDQEFAPDSLFHQSELSFAPLRGIPDKSEDTEWSSRPSEVSEALFQATAEVASDLASSRFSVSQHPLIGSTAVGSQCPFLPSEQGNNEETISSVDELKIPKDCDRYDDLCSYMSWKTRKDTQWPENNLADKDQVSVATSFDITDENIATKRSDHFDAARSYGQYWTQEDSSKQAETYLTKGLQGKVESDVITLDGLNENAVVCSERVAELQRKPTRESEYHSSDLRMLRMSPDTVPKAPKHLKAGDTSKGGIAKVTQSNLKSGITTTPVDSDIGSHLSLSLEDLSQLAVSSLETTTGQHTDTLNQKTLADTHLTEETLKVTAIPEPADQKTATPTVLSSSHSHRGKPSIFYQQGLPDSHLTEEALKVSAAPGLADQTTGMSTLTSTSYSHREKPGTFYQQELPESNLTEEPLEVSAAPGPVEQKTGIPTVSSTSHSHVEDLLFFYRQTLPDGHLTDQALKVSAVSGPADQKTGTATVLSTPHSHREKPGIFYQQEFADSHQTEETLTKVSATPGPADQKTEIPAVQSSSYSQREKPSILYPQDLADSHLPEEGLKVSAVAGPADQKTGLPTVPSSAYSHREKLLVFYQQALLDSHLPEEALKVSAVSGPADGKTGTPAVTSTSSASSSLGEKPSAFYQQTLPNSHLTEEALKVSIVPGPGDQKTGIPSAPSSFYSHREKPIIFSQQTLPDFLFPEEALKVSAVSVLAAQKTGTPTVSSNSHSHSEKSSVFYQQELPDSDLPRESLKMSAIPGLTDQKTVPTPTVPSGSFSHREKPSIFYQQEWPDSYATEKALKVSTGPGPADQKTEIPAVQSSSYPQREKPSVLYPQVLSDSHLPEESLKVSAFPGPADQMTDTPAVPSTFYSQREKPGIFYQQTLPESHLPKEALKISVAPGLADQKTGTPTVTSTSYSQHREKPSIFHQQALPGTHIPEEAQKVSAVTGPGNQKTWIPRVLSTFYSQREKPGIFYQQTLPGSHIPEEAQKVSPVLGPADQKTGTPTPTSASYSHTEKPGIFYQQVLPDNHPTEEALKISVASEPVDQTTGTPAVTSTSYSQYREKPSIFYQQSLPSSHLTEEAKNVSAVPGPADQKTVIPILPSTFYSHTEKPGVFYQQVLPHSHPTEEALKISVASEPVDQTTGTPTVTSTSYSQHTEKPSIFYQQSLPGSHLTEEAKNVSAVPGPGDRKTGIPTLPSTFYSHTEKPGSFYQQVLPHSHLPEEALEVSVAPGPVDQTIGTPTVTSPSSSFGEKPIVIYKQAFPEGHLPEESLKVSVAPGPVGQTTGAPTITSPSYSQHRAKSGSFYQLALLGSQIPEEALRVSSAPGPADQTTGIPTITSTSYSFGEKPIVNYKQAFPDGHLPEEALKVSIVSGPTEKKTDIPAGPLGSSALGEKPITFYRQALLDSPLNKEVVKVSAAPGPADQKTETLPVHSTSYSNRGKPVIFYQQTLSDSHLPEEALKVPPVPGPDAQKTETPSVSSSLYSYREKPIVFYQQALPDSELTQEALKVSAVPQPADQKTGLSTVTSSFYSHTEKPNISYQQELPDSHLTEEALKVSNVPGPADQKTGVSTVTSTSYSHREKPIVSYQRELPHFTEAGLKILRVPGPADQKTGINILPSNSYPQREHSVISYEQELPDLTEVTLKAIGVPGPADQKTGIQIASSSSYSNREKASIFHQQELPDVTEEALNVFVVPGQGDRKTEIPTVPLSYYSRREKPSVISQQELPDSHLTEEALKVSPVSIPAEQKTGIPIGLSSSYSHSHKEKLKISTVHIPDDQKTEFPAATLSSYSQIEKPKISTVIGPNDQKTPSQTAFHSSYSQTVKPNILFQQQLPDRDQSKGILKISAVPELTDVNTGKPVSLSSSYFHREKSNIFSPQELPGSHVTEDVLKVSTIPGPAGQKTVLPTALPSSFSHREKPDIFYQKDLPDRHLTEDALKISSALGQADQITGLQTVPSGTYSHGENHKLVSEHVQRLIDNLNSSDSSVSSNNVLLNSQADDRVVINKPESAGFRDVGSEEIQDAENSAKTLKEIRTLLMEAENMALKRCNFPAPLARFRDISDISFIQSKKVVCFKEPSSTGVSNGDLLHRQPFTEESPSSRCIQKDIGTQTNLKCRRGIENWEFISSTTVRSPLQEAESKVSMALEETLRQYQAAKSVMRSEPEGCSGTIGNKIIIPMMTVIKSDSSSDASDGNGSCSWDSNLPESLESVSDVLLNFFPYVSPKTSITDSREEEGVSESEDGGGSSVDSLAAHVKNLLQCESSLNHAKEILRNAEEEESRVRAHAWNMKFNLAHDCGYSISELNEDDRRKVEEIKAELFGHGRTTDLSKGLQSPRGMGCKPEAVCSHIIIESHEKGCFRTLTSEHPQLDRHPCAFRSAGPSEMTRGRQNPSSCRAKHVNLSASLDQNNSHFKVWNSLQLKSHSPFQNFIPDEFKISKGLRMPFDEKMDPWLSELVEPAFVPPKEVDFHSSSQMPSPEPMKKFTTSITFSSHRHSKCISNSSVVKVGVTEGSQCTGASVGVFNSHFTEEQNPPRDLKQKTSSPSSFKMHSNSQDKEVTILAEGRRQSQKLPVDFERSFQEEKPLERSDFTGSHSEPSTRANCSNFKEIQISDNHTLISMGRPSSTLGVNRSSSRLGVKEKNVTITPDLPSCIFLEQRELFEQSKAPRADDHVRKHHSPSPQHQDYVAPDLPSCIFLEQRELFEQCKAPYVDHQMRENHSPLPQGQDSIASDLPSPISLEQCQSKAPGVDDQMNKHHFPLPQGQDCVVEKNNQHKPKSHISNINVEAKFNTVVSQSAPNHCTLAASASTPPSNRKALSCVHITLCPKTSSKLDSGTLDERFHSLDAASKARMNSEFNFDLHTVSSRSLEPTSKLLTSKPVAQDQESLGFLGPKSSLDFQVVQPSLPDSNTITQDLKTIPSQNSQIVTSRQIQVNISDFEGHSNPEGTPVFADRLPEKMKTPLSAFSEKLSSDAVTQITTESPEKTLFSSEIFINAEDRGHEIIEPGNQKLRKAPVKFASSSSVQQVTFSRGTDGQPLLLPYKPSGSTKMYYVPQLRQIPPSPDSKSDTTVESSHSGSNDAIAPDFPAQVLGTRDDDLSATVNIKHKEGIYSKRVVTKASLPVGEKPLQNENADASVQVLITGDENLSDKKQQEIHSTRAVTEAAQAKEKESLQKDTADSSAAAAAEHSAQVGDPEMKNLPDTKAITQKEEIHRKKTVPEEAWPNNKESLQINIEESECHSEFENTTRSVFRSAKFYIHHPVHLPSDQDICHESLGKSVFMRHSWKDFFQHHPDKHREHMCLPLPYQNMDKTKTDYTRIKSLSINVNLGNKEVMDTTKSQVRDYPKHNGQISDPQRDQKVTPEQTTQHTVSLNELWNKYRERQRQQRQPELGDRKELSLVDRLDRLAKILQNPITHSLQVSESTHDDSRGERSVKEWSGRQQQRNKLQKKKRFKSLEKSHKNTGELKKSKVLSHHRAGRSNQIKIEQIKFDKYILSKQPGFNYISNTSSDCRPSEESELLTDTTTNILSGTTSTVESDILTQTDREVALHERSSSVSTIDTARLIQAFGHERVCLSPRRIKLYSSITNQQRRYLEKRSKHSKKVLNTGHPLVTSEHTRRRHIQVANHVISSDSISSSASSFLSSNSTFCNKQNVHMLNKGIQAGNLEIVNGAKKHTRDVGITFPTPSSSEAKLEENSDVTSWSEEKREEKMLFTGYPEDRKLKKNKKNSHEGVSWFVPVENVESRSKKENVPNTCGPGISWFEPITKTRPWREPLREQNCQGQHLDGRGYLAGPGREAGRDLLRPFVRATLQESLQFHRPDFISRSGERIKRLKLIVQERKLQSMLQTERDALFNIDRERQGHQNRMCPLPKRVFLAIQKNKPISKKEMIQRSKRN

SEQ ID NO: 6084 - protein, 4121 aa, Artificial Sequence
  Synthetic polypeptide
MEPEDLPWPGELEEEEEEEEEEEEEEEEAAAAAAANVDDVVVVEEVEEEAGRELDSDSHYGPQHLESIDDEEDEEAKAWLQAHPGRILPPLSPPQHRYSEGERTSLEKIVPLTCHVWQQIVYQGNSRTQISDTNVVCLETTAQRGSGDDQKTESWHCLPQEMDSSQTLDTSQTRFNVRTEDTEVTDFPSLEEGILTQSENQVKEPNRDLFCSPLLVIQDSFASPDLPLLTCLTQDQEFAPDSLFHQSELSFAPLRGIPDKSEDTEWSSRPSEVSEALFQATAEVASDLASSRFSVSQHPLIGSTAVGSQCPFLPSEQGNNEETISSVDELKIPKDCDRYDDLCSYMSWKTRKDTQWPENNLADKDQVSVATSFDITDENIATKRSDHFDAARSYGQYWTQEDSSKQAETYLTKGLQGKVESDVITLDGLNENAVVCSERVAELQRKPTRESEYHSSDLRMLRMSPDTVPKAPKHLKAGDTSKGGIAKVTQSNLKSGITTTPVDSDIGSHLSLSLEDLSQLAVSSLETTTGQHTDTLNQKTLADTHLTEETLKVTAIPEPADQKTATPTVLSSSHSHRGKPSIFYQQGLPDSHLTEEALKVSAAPGLADQTTGMSTLTSTSYSHREKPGTFYQQELPESNLTEEPLEVSAAPGPVEQKTGIPTVSSTSHSHVEDLLFFYRQTLPDGHLTDQALKVSAVSGPADQKTGTATVLSTPHSHREKPGIFYQQEFADSHQTEETLTKVSATPGPADQKTEIPAVQSSSYSQREKPSILYPQDLADSHLPEEGLKVSAVAGPADQKTGLPTVPSSAYSHREKLLVFYQQALLDSHLPEEALKVSAVSGPADGKTGTPAVTSTSSASSSLGEKPSAFYQQTLPNSHLTEEALKVSIVPGPGDQKTGIPSAPSSFYSHREKPIIFSQQTLPDFLFPEEALKVSAVSVLAAQKTGTPTVSSNSHSHSEKSSVFYQQELPDSDLPRESLKMSAIPGLTDQKTVPTPTVPSGSFSHREKPSIFYQQEWPDSYATEKALKVSTGPGPADQKTEIPAVQSSSYPQREKPSVLYPQVLSDSHLPEESLKVSAFPGPADQMTDTPAVPSTFYSQREKPGIFYQQTLPESHLPKEALKISVAPGLADQKTGTPTVTSTSYSQHREKPSIFHQQALPGTHIPEEAQKVSAVTGPGNQKTWIPRVLSTFYSQREKPGIFYQQTLPGSHIPEEAQKVSPVLGPADQKTGTPTPTSASYSHTEKPGIFYQQVLPDNHPTEEALKISVASEPVDQTTGTPAVTSTSYSQYREKPSIFYQQSLPSSHLTEEAKNVSAVPGPADQKTVIPILPSTFYSHTEKPGVFYQQVLPHSHPTEEALKISVASEPVDQTTGTPTVTSTSYSQHTEKPSIFYQQSLPGSHLTEEAKNVSAVPGPGDRKTGIPTLPSTFYSHTEKPGSFYQQVLPHSHLPEEALEVSVAPGPVDQTIGTPTVTSPSSSFGEKPIVIYKQAFPEGHLPEESLKVSVAPGPVGQTTGAPTITSPSYSQHRAKSGSFYQLALLGSQIPEEALRVSSAPGPADQTTGIPTITSTSYSFGEKPIVNYKQAFPDGHLPEEALKVSIVSGPTEKKTDIPAGPLGSSALGEKPITFYRQALLDSPLNKEVVKVSAAPGPADQKTETLPVHSTSYSNRGKPVIFYQQTLSDSHLPEEALKVPPVPGPDAQKTETPSVSSSLYSYREKPIVFYQQALPDSELTQEALKVSAVPQPADQKTGLSTVTSSFYSHTEKPNISYQQELPDSHLTEEALKVSNVPGPADQKTGVSTVTSTSYSHREKPIVSYQRELPHFTEAGLKILRVPGPADQKTGINILPSNSYPQREHSVISYEQELPDLTEVTLKAIGVPGPADQKTGIQIASSSSYSNREKASIFHQQELPDVTEEALNVFVVPGQGDRKTEIPTVPLSYYSRREKPSVISQQELPDSHLTEEALKVSPVSIPAEQKTGIPIGLSSSYSHSHKEKLKISTVHIPDDQKTEFPAATLSSYSQIEKPKISTVIGPNDQKTPSQTAFHSSYSQTVKPNILFQQQLPDRDQSKGILKISAVPELTDVNTGKPVSLSSSYFHREKSNIFSPQELPGSHVTEDVLKVSTIPGPAGQKTVLPTALPSSFSHREKPDIFYQKDLPDRHLTEDALKISSALGQADQITGLQTVPSGTYSHGENHKLVSEHVQRLIDNLNSSDSSVSSNNVLLNSQADDRVVINKPESAGFRDVGSEEIQDAENSAKTLKEIRTLLMEAENMALKRCNFPAPLARFRDISDISFIQSKKVVCFKEPSSTGVSNGDLLHRQPFTEESPSSRCIQKDIGTQTNLKCRRGIENWEFISSTTVRSPLQEAESKVSMALEETLRQYQAAKSVMRSEPEGCSGTIGNKIIIPMMTVIKSDSSSDASDGNGSCSWDSNLPESLESVSDVLLNFFPYVSPKTSITDSREEEGVSESEDGGGSSVDSLAAHVKNLLQCESSLNHAKEILRNAEEEESRVRAHAWNMKFNLAHDCGYSISELNEDDRRKVEEIKAELFGHGRTTDLSKGLQSPRGMGCKPEAVCSHIIIESHEKGCFRTLTSEHPQLDRHPCAFRSAGPSEMTRGRQNPSSCRAKHVNLSASLDQNNSHFKVWNSLQLKSHSPFQNFIPDEFKISKGLRMPFDEKMDPWLSELVEPAFVPPKEVDFHSSSQMPSPEPMKKFTTSITFSSHRHSKCISNSSVVKVGVTEGSQCTGASVGVFNSHFTEEQNPPRDLKQKTSSPSSFKMHSNSQDKEVTILAEGRRQSQKLPVDFERSFQEEKPLERSDFTGSHSEPSTRANCSNFKEIQISDNHTLISMGRPSSTLGVNRSSSRLGVKEKNVTITPDLPSCIFLEQRELFEQSKAPRADDHVRKHHSPSPQHQDYVAPDLPSCIFLEQRELFEQCKAPYVDHQMRENHSPLPQGQDSIASDLPSPISLEQCQSKAPGVDDQMNKHHFPLPQGQDCVVEKNNQHKPKSHISNINVEAKFNTVVSQSAPNHCTLAASASTPPSNRKALSCVHITLCPKTSSKLDSGTLDERFHSLDAASKARMNSEFNFDLHTVSSRSLEPTSKLLTSKPVAQDQESLGFLGPKSSLDFQVVQPSLPDSNTITQDLKTIPSQNSQIVTSRQIQVNISDFEGHSNPEGTPVFADRLPEKMKTPLSAFSEKLSSDAVTQITTESPEKTLFSSEIFINAEDRGHEIIEPGNQKLRKAPVKFASSSSVQQVTFSRGTDGQPLLLPYKPSGSTKMYYVPQLRQIPPSPDSKSDTTVESSHSGSNDAIAPDFPAQVLGTRDDDLSATVNIKHKEGIYSKRVVTKASLPVGEKPLQNENADASVQVLITGDENLSDKKQQEIHSTRAVTEAAQAKEKESLQKDTADSSAAAAAEHSAQVGDPEMKNLPDTKAITQKEEIHRKKTVPEEAWPNNKESLQINIEESECHSEFENTTRSVFRSAKFYIHHPVHLPSDQDICHESLGKSVFMRHSWKDFFQHHPDKHREHMCLPLPYQNMDKTKTDYTRIKSLSINVNLGNKEVMDTTKSQVRDYPKHNGQISDPQRDQKVTPEQTTQHTVSLNELWNKYRERQRQQRQPELGDRKELSLVDRLDRLAKILQNPITHSLQVSESTHDDSRGERSVKEWSGRQQQRNKLQKKKRFKSLEKSHKNTGELKKSKVLSHHRAGRSNQIKIEQIKFDKYILSKQPGFNYISNTSSDCRPSEESELLTDTTTNILSGTTSTVESDILTQTDREVALHERSSSVSTIDTARLIQAFGHERVCLSPRRIKLYSSITNQQRRYLEKRSKHSKKVLNTGHPLVTSEHTRRRHIQVANHVISSDSISSSASSFLSSNSTFCNKQNVHMLNKGIQAGNLEIVNGAKKHTRDVGITFPTPSSSEAKLEENSDVTSWSEEKREEKMLFTGYPEDRKLKKNKKNSHEGVSWFVPVENVESRSKKENVPNTCGPGISWFEPITKTRPWREPLREQNCQGQHLDGRGYLAGPGREAGRDLLRPFVRATLQESLQFHRPDFISRSGERIKRLKLIVQERKLQSMLQTERDALFNIDRERQGHQNRMCPLPKRVFLAIQKNKPISKKEMIQRSKRN

SEQ ID NO: 6085 - protein, 316 aa, Artificial Sequence
  Synthetic polypeptide
MRNSETLERGVGGCRVFSCLGSYPGIEGAGLALLADLALGGRLLGTHMSQWHHPRSGWGRRRDFSGRSSAKKKGGNHIPERWKDYLPVGQRMPGTRFIAFKVPLQKSFEKKLAPEECFSPLDLFNKIREQNEELGLIIDLTYTQRYYKPEDLPETVPYLKIFTVGHQVPDDETIFKFKHAVNGFLKENKDNDKLIGVHCTHGLNRTGYLICRYLIDVEGVRPDDAIELFNRCRGHCLERQNYIEDLQNGPIRKNWNSSVPRSSDFEDSAHLMQPVHNKPVKQGPRYNLHQIQGHSAPRHFHTQTQSLQQSVRVHIL

SEQ ID NO: 6086 - protein, 505 aa, Artificial Sequence
  Synthetic polypeptide
MTSQPLRLAEEYGPSPGESELAVNPFDGLPFSSRYYELLKQRQALPIWAARFTFLEQLESNPTGVVLVSGEPGSGKSTQIPQWCAEFALARGFQKGQVTVTQPYPLAARSLALRVADEMDLTLGHEVGYSIPQEDCTGPNTLLRFCWDRLLLQEVASTRGTGAWGVLVLDEAQERSVASDSLQGLLQDARLEKLPGDLRVVVVTDPALEPKLRAFWGNPPIVHIPREPGERPSPIYWDTIPPDRVEAACQAVLELCRKELPGDVLVFLPSEEEISLCCESLSREVESLLLQGLPPRVLPLHPDCGRAVQAVYEDMDARKVVVTHWLADFSFSLPSIQHVIDSGLELRSVYNPRIRAEFQVLRPISKCQAEARRLRARGFPPGSCLCLYPKSFLELEAPPLPQPRVCEENLSSLVLLLKRRQIAEPGECHFLDQPAPEALMQALEDLDYLAALDDDGDLSDLGVILSEFPLAPELAKALLASCEFDCVDEMLTLAAMLTASGLPCQ

SEQ ID NO: 6087 - protein, 534 aa, Artificial Sequence
  Synthetic polypeptide
MRPVSVWQWSPWGLLLCLLCSSCLGSPSPSTGPEKKAGSQGLRFRLAGFPRKPYEGRVEIQRAGEWGTICDDDFTLQAAHILCRELGFTEATGWTHSAKYGPGTGRIWLDNLSCSGTEQSVTECASRGWGNSDCTHDEDAGVICKDQRLPGFSDSNVIEVEHHLQVEEVRIRPAVGWGRRPLPVTEGLVEVRLPDGWSQVCDKGWSAHNSHVVCGMLGFPSEKRVNAAFYRLLAQRQQHSFGLHGVACVGTEAHLSLCSLEFYRANDTARCPGGGPAVVSCVPGPVYAASSGQKKQQQSKPQGEARVRLKGGAHPGEGRVEVLKASTWGTVCDRKWDLHAASVVCRELGFGSAREALSGARMGQGMGAIHLSEVRCSGQELSLWKCPHKNITAEDCSHSQDAGVRCNLPYTGAETRIRLSGGRSQHEGRVEVQIGGPGPLRWGLICGDDWGTLEAMVACRQLGLGYANHGLQETWYWDSGNITEVVMSGVRCTGTELSLDQCAHHGTHITCKRTGTRFTAGVICSETRRSGRRL

SEQ ID NO: 6088 - protein, 389 aa, Artificial Sequence
  Synthetic polypeptide
MRPVSVWQWSPWGLLLCLLCSSCLGSPSPSTGPEKKAGSQGLRFRLAGFPRKPYEGRVEIQRAGEWGTICDDDFTLQAAHILCRELGFTEATGWTHSAKYGPGTGRIWLDNLSCSGTEQSVTECASRGWGNSDCTHDEDAGVICKDQRLPGFSDSNVIEARVRLKGGAHPGEGRVEVLKASTWGTVCDRKWDLHAASVVCRELGFGSAREALSGARMGQGMGAIHLSEVRCSGQELSLWKCPHKNITAEDCSHSQDAGVRCNLPYTGAETRIRLSGGRSQHEGRVEVQIGGPGPLRWGLICGDDWGTLEAMVACRQLGLGYANHGLQETWYWDSGNITEVVMSGVRCTGTELSLDQCAHHGTHITCKRTGTRFTAGVICSETRRSGRRL

SEQ ID NO: 6089 - protein, 478 aa, Artificial Sequence
  Synthetic polypeptide
MRPVSVWQWSPWGLLLCLLCSSCLGSPSPSTGPEKKAGSQGLRFRLAGFPRKPYEGRVEIQRAGEWGTICDDDFTLQAAHILCRELGFTEATGWTHSAKYGPGTGRIWLDNLSCSGTEQSVTECASRGWGNSDCTHDEDAGVICKDQRLPGFSDSNVIEVEHHLQVEEVRIRPAVGWGRRPLPVTEGLVEVRLPDGWSQVCDKGWSAHNSHVVCGMLGFPSEKRVNAAFYRLLAQRQQHSFGLHGVACVGTEAHLSLCSLEFYRANDTARCPGGGPAVVSCVPGPVYAASSGQKKQQQSKPQGEARVRLKGGAHPGEGRVEVLKASTWGTVCDRKWDLHAASVVCRELGFGSAREALSGARMGQGMGAIHLSEVRCSGQELSLWKCPHKNITAEDCSHSQDAGVRCNLPYTGAETRETWYWDSGNITEVVMSGVRCTGTELSLDQCAHHGTHITCKRTGTRFTAGVICSETRRSGRRL

SEQ ID NO: 6090 - protein, 565 aa, Artificial Sequence
  Synthetic polypeptide
MRPVSVWQWSPWGLLLCLLCSSCLGSPSPSTGPEKKAGSQGLRFRLAGFPRKPYEGRVEIQRAGEWGTICDDDFTLQAAHILCRELGFTEATGWTHSAKYGPGTGRIWLDNLSCSGTEQSVTECASRGWGNSDCTHDEDAGVICKDQRLPGFSDSNVIEVEHHLQVEEVRIRPAVGWGRRPLPVTEGLVEVRLPDGWSQVCDKGWSAHNSHVVCGMLGFPSEKRVNAAFYRLLAQRQQHSFGLHGVACVGTEAHLSLCSLEFYRANDTARCPGGGPAVVSCVPGPVYAASSGQKKQQQSKPQGEARVRLKGGAHPGEGRVEVLKASTWGTVCDRKWDLHAASVVCRELGFGSAREALSGARMGQGMGAIHLSEVRCSGQELSLWKCPHKNITAEDCSHSQDAGVRCNLPYTGAETRIRLSGGRSQHEGRVEVQIGGPGPLRWGLICGDDWGTLEAMVACRQLGLGYANHGLQETWYWDSGNITEVVMSGVRCTGTELSLDQCAHHGTHITCKRTGTRFTAGVICSERGQGGWITRSGIQDQPDQDGETLSLLKLQKLARRSGRRL

SEQ ID NO: 6091 - protein, 420 aa, Artificial Sequence
  Synthetic polypeptide
MRPVSVWQWSPWGLLLCLLCSSCLGSPSPSTGPEKKAGSQGLRFRLAGFPRKPYEGRVEIQRAGEWGTICDDDFTLQAAHILCRELGFTEATGWTHSAKYGPGTGRIWLDNLSCSGTEQSVTECASRGWGNSDCTHDEDAGVICKDQRLPGFSDSNVIEARVRLKGGAHPGEGRVEVLKASTWGTVCDRKWDLHAASVVCRELGFGSAREALSGARMGQGMGAIHLSEVRCSGQELSLWKCPHKNITAEDCSHSQDAGVRCNLPYTGAETRIRLSGGRSQHEGRVEVQIGGPGPLRWGLICGDDWGTLEAMVACRQLGLGYANHGLQETWYWDSGNITEVVMSGVRCTGTELSLDQCAHHGTHITCKRTGTRFTAGVICSERGQGGWITRSGIQDQPDQDGETLSLLKLQKLARRSGRRL

SEQ ID NO: 6092 - protein, 509 aa, Artificial Sequence
  Synthetic polypeptide
MRPVSVWQWSPWGLLLCLLCSSCLGSPSPSTGPEKKAGSQGLRFRLAGFPRKPYEGRVEIQRAGEWGTICDDDFTLQAAHILCRELGFTEATGWTHSAKYGPGTGRIWLDNLSCSGTEQSVTECASRGWGNSDCTHDEDAGVICKDQRLPGFSDSNVIEVEHHLQVEEVRIRPAVGWGRRPLPVTEGLVEVRLPDGWSQVCDKGWSAHNSHVVCGMLGFPSEKRVNAAFYRLLAQRQQHSFGLHGVACVGTEAHLSLCSLEFYRANDTARCPGGGPAVVSCVPGPVYAASSGQKKQQQSKPQGEARVRLKGGAHPGEGRVEVLKASTWGTVCDRKWDLHAASVVCRELGFGSAREALSGARMGQGMGAIHLSEVRCSGQELSLWKCPHKNITAEDCSHSQDAGVRCNLPYTGAETRETWYWDSGNITEVVMSGVRCTGTELSLDQCAHHGTHITCKRTGTRFTAGVICSERGQGGWITRSGIQDQPDQDGETLSLLKLQKLARRSGRRL

SEQ ID NO: 6093 - protein, 127 aa, Artificial Sequence
  Synthetic polypeptide
MRPVSVWQWSPWGLLLCLLCSSCLGSPSPSTGPEKKAGSQGLRFRLAGFPRKPYEGRVEIQRAGEWGTICDDDFTLQAAHILCRELGFTEATGWTHSAKYGPGTVFWQLCSKNDHICAHHGRAPGTQ

SEQ ID NO: 6094 - protein, 199 aa, Artificial Sequence
  Synthetic polypeptide
MHPGRTTGKGPSTHTQIDQQPPRLLIVHIALPSWADICTNLCEALQNFFSLACSLMGPSRMSLFSLYMVQDQHECILPFVQVKGNFARLQTCISELRMLQREGCFRSQGASLRLAVEDGLQQFKQYSRHVTTRAALTYTSLEITILTSQPGKEVVKQLEEGLKDTDLARVRRFQVVEVTKGILEHVDSASPVEDTSNDV

SEQ ID NO: 6095 - protein, 156 aa, Artificial Sequence
  Synthetic polypeptide
MAAAAAAGSGTPREEEGPAGEAAASQPQAPTSVPGARLSRLPLARVKALVKADPDVTLAGQEAIFILARAAELFVETIAKDAYCCAQQGKRKTLQRRDLDNAIEAVDEFAFLEGNNQECKELITSLFTTVKMEKVSLNRVIVNQIIVDTSRHILKI

SEQ ID NO: 6096 - protein, 121 aa, Artificial Sequence
  Synthetic polypeptide
MAAAAAAGSGTPREEEGPAGEAAASQPQAPTSVPGARLSRLPLARVKALVKADPDVTLAGQEAIFILARAAELFVETIAKDAYCCAQQGKRKTLQRRDLDNAIEAVDEFAFLEALFTITKI

SEQ ID NO: 6097 - protein, 48 aa, Artificial Sequence
  Synthetic polypeptide
MRLPLSHSPEHVEMALLSNILAAYSFVSGLIVCEGIRLPCNQDTEAAL

SEQ ID NO: 6098 - protein, 39 aa, Artificial Sequence
  Synthetic polypeptide
MRLPLSHSPEHVEMALLSNILAAYSFVSASLSGFSLSLG

SEQ ID NO: 6099 - protein, 237 aa, Artificial Sequence
  Synthetic polypeptide
MSPWSWFLLQTLCLLPTGAASRRGAPGTANCELKPQQSELNSFLWTIKRDPPSYFFGTIHVPYTRVWDFIPDNSKEAFLQSSIVYFELDLTDPYTISALTSCQMLPQGENLQDVLPRDIYCRLKRHLEYVKLMMPLWMTPDQRGKGLYADYLFNAIAGNWERKRPVWVMLMVNSLTEVDIKSRGVPVLDLFLAQEAERLRKQTGAVEKVEEQCHPLNGLNFSQDAARRPSPDQRPVP

SEQ ID NO: 6100 - protein, 277 aa, Artificial Sequence
  Synthetic polypeptide
MSPWSWFLLQTLCLLPTGAASRRGAPGTANCELKPQQSELNSFLWTIKRDPPSYFFGTIHVPYTRVWDFIPDNSKEAFLQSSIVYFELDLTDPYTISALTSCQMLPQGENLQDVLPRDIYCRLKRHLEYVKLMMPLWMTPDQRGKGLYADYLFNAIAGNWERKRPVWVMLMVNSLTEVDIKSRGVPVLDLFLAQEAERLRKQTGAVEKVEEQCHPLNGLNFSQHFSFLLPCDEGHVCFLFCHGCKFPEASSALQNRESIKPSSFINYPVLGMSLLAA

SEQ ID NO: 6101 - protein, 163 aa, Artificial Sequence
  Synthetic polypeptide
MPQLGGGGGGGGGGSGGGGGSSAGAAGGGDDLGANDELIPFQDEGGEEQEPSSDSASAQRDLDEVKSSLVNESENQSSSSDSEAERRPQPVRDTFQKPRDYFAEVRRPQDSAFFKGPPYPGYPFLMIPDLSSPYLSNGPLSPGGARTTMEFLGIKNHVLFSRA

SEQ ID NO: 6102 - protein, 209 aa, Artificial Sequence
  Synthetic polypeptide
MPQLGGGGGGGGGGSGGGGGSSAGAAGGGDDLGANDELIPFQDEGGEEQEPSSDSASAQRDLDEVKSSLVNESENQSSSSDSEAERRPQPVRDTFQKPRDYFAEVRRPQDSAFFKGPPYPGYPFLMIPDLSSPYLSNGPLSPGGARTYLQMKWPLLDVPSSATVKDTRSPSPAHLGRAQWFTPVIPAPWEAEAGGSPEVRSSRPAWPTW

SEQ ID NO: 6103 - protein, 59 aa, Artificial Sequence
  Synthetic polypeptide
MKWPLLDVPSSATVKDTRSPSPAHLGRAQWFTPVIPAPWEAEAGGSPEVRSSRPAWPTW

SEQ ID NO: 6104 - protein, 250 aa, Artificial Sequence
  Synthetic polypeptide
MAVSAGSARTSPSSDKVQKDKAELISGPRQDSRIGKLLGFEWTDLSSWRRLVTLLNRPTDPASLAVFRFLFGFLMVLDIPQERGLSSLDRKYLDGLDVCRFPLLDALRPLPLDWMYLVYTIMFLGALGMMLGLCYRISCVLFLLPYWYVFLLDKTSWNNHSYLYGLLAFQLTFMDANHYWSVDGLLNAHRRNAHVPLWNYAVLRGQIFIVYFIAGVKKLDADWVEGYSMEYLSRHWLFSPFNLGDRVKLR

SEQ ID NO: 6105 - protein, 193 aa, Artificial Sequence
  Synthetic polypeptide
MAVSAGSARTSPSSGFLMVLDIPQERGLSSLDRKYLDGLDVCRFPLLDALRPLPLDWMYLVYTIMFLGALGMMLGLCYRISCVLFLLPYWYVFLLDKTSWNNHSYLYGLLAFQLTFMDANHYWSVDGLLNAHRRNAHVPLWNYAVLRGQIFIVYFIAGVKKLDADWVEGYSMEYLSRHWLFSPFNLGDRVKLR

SEQ ID NO: 6106 - protein, 242 aa, Artificial Sequence
  Synthetic polypeptide
MAVSAGSARTSPSSDKVQKDKAELISGPRQDSRIGKLLGFEWTDLSSWRRLVTLLNRPTDPASLAVFRFLFGFLMVLDIPQERGLSSLDRKYLDGLDVCRFPLLDALRPLPLDWMYLVYTIMFLGALGMMLGLCYRISCVLFLLPYWYVFLLDKTSWNNHSYLYGLLAFQLTFMDANHYWSVDGLLNAHRRNAHVPLWNYAVLRGQIFIVYFIAGVKKLDADWVEGYSMEYLSRHWLFSPFN

SEQ ID NO: 6107 - protein, 185 aa, Artificial Sequence
  Synthetic polypeptide
MAVSAGSARTSPSSGFLMVLDIPQERGLSSLDRKYLDGLDVCRFPLLDALRPLPLDWMYLVYTIMFLGALGMMLGLCYRISCVLFLLPYWYVFLLDKTSWNNHSYLYGLLAFQLTFMDANHYWSVDGLLNAHRRNAHVPLWNYAVLRGQIFIVYFIAGVKKLDADWVEGYSMEYLSRHWLFSPFN

SEQ ID NO: 6108 - protein, 51 aa, Artificial Sequence
  Synthetic polypeptide
MTQNVERILARGENLEHLRNKTEDLEATPQQSRWGKESWSCEMCPPGACTP

SEQ ID NO: 6109 - protein, 77 aa, Artificial Sequence
  Synthetic polypeptide
MEEASEGGGNDRVRNLQSEVEGVKNIMTQNVERILARGENLEHLRNKTEDLEATPQQSRWGKESWSCEMCPPGACTP

SEQ ID NO: 6110 - protein, 149 aa, Artificial Sequence
  Synthetic polypeptide
MLISKNMPWRRLQGISFGMYSAEELKKLSVKSITNPRYLDSLGNPSANGLYDLALGPADSKEVCSTCVQDFSNCSGHLGHIELPLTVYNPLLFDKLYLLLRGSCLNCHMLTCPRAVIHLLLCQLRVLEVGALQAVYELERILNRVRERE

SEQ ID NO: 6111 - protein, 249 aa, Artificial Sequence
  Synthetic polypeptide
MAVVSAVRWLGLRSRLGQPLTGRRAGLCEQARSCRFYSGSATLSKVEGTDVTGIEEVVIPKKKTWDKVAVLQALASTVNRDTTAVPYVFQDDPYLMPASSLESRSFLLAKKSGENVAKFIINSYPKYFQKDIAEPHIPCLMPEYFEPQIKDISEAALKERIELRKVKASVDMFDQLLQAGTTVSLETTNSLLDLLCYYGDQEPSTDYHFQQTGQSEALEEENDETSRRKAGHQFGVTWRYSRGGGRRIT

SEQ ID NO: 6112 - protein, 214 aa, Artificial Sequence
  Synthetic polypeptide
MAVVSAVRWLGLRSRLGQPLTGRRAGLCEQARSCRFYSGSATLSKVEGTDVTGIEEVVIPKKKTWDKVAVLQALASTVNRDTTAVPYVFQDDPYLMPASSLESRSFLLAKKSGENVAKFIINSYPKYFQKDIAEPHIPEPLCLLKQQIVSWIYCVTMVTRSPQLITIFNKLDSQKHWKRKMMRHLGGKLVISLELHGATREVEAGESLKPRRWR

SEQ ID NO: 6113 - protein, 137 aa, Artificial Sequence
  Synthetic polypeptide
MGLFGKTQEKPPKELPPALASQSAKITASARPPPRLGSEERISPAAHCLGSEKRLCPAAPSGRRGAPLPGCPIWEARSASSRPPRLGGEEHLCPAAPSGRRGAPLPGRPVCEVGASARPPHLGGEGRLCPAATPSGK

SEQ ID NO: 6114 - protein, 19 aa, Artificial Sequence
  Synthetic polypeptide
MGLFGKTQEKPPKELIFIC

SEQ ID NO: 6115 - protein, 81 aa, Artificial Sequence
  Synthetic polypeptide
MRLPAQLLGLLMLWVPGSSGDVVMTQSPLSLPVTLGQPASISCRSSQSLVYSDGNTYLNWFQQRPGQSPRRLIYKEAVLHQ

SEQ ID NO: 6116 - protein, 76 aa, Artificial Sequence
  Synthetic polypeptide
MRLPAQLLGLLMLWVPGSSGDVVMTQSPLSLPVTLGQPASISCRKQFCISSCISSMILAATKCPSSALSQCHFLQP

SEQ ID NO: 6117 - protein, 172 aa, Artificial Sequence
  Synthetic polypeptide
MATTSTTGSTLLQPLSNAVQLPIDQVNFVVCQLFALLAAIWFRTYLHSSKTSSFIRHVVATLLGLYLALFCFGWYALHFLVQSGISYCIMIIIGVENMHNYCFVFALGYLTVCQVTRVYIFDYGQYSADFSGIEAINLQMFLQTEPQMSSTNNFSGGHYSCRAPSSLLSSRK

SEQ ID NO: 6118 - protein, 149 aa, Artificial Sequence
  Synthetic polypeptide
MATTSTTGSTLLQPLSNAVQLPIDQAARHMIPGCLSPSVCLTYLAESTGEKYALHFLVQSGISYCIMIIIGVENMHNYCFVFALGYLTVCQVTRVYIFDYGQYSADFSGIEAINLQMFLQTEPQMSSTNNFSGGHYSCRAPSSLLSSRK

SEQ ID NO: 6119 - protein, 141 aa, Artificial Sequence
  Synthetic polypeptide
MATTSTTGSTLLQPLSNAVQLPIDQVNFVVCQLFALLAAIWFRTYLHSSKTSSFIRHVVATLLGLYLALFCFGWYALHFLVQSGISYCIMIIIGVENMHNYCFVFALGYLTVCQVTRVYIFDYGQYSADFSGIVNAPISTL

SEQ ID NO: 6120 - protein, 118 aa, Artificial Sequence
  Synthetic polypeptide
MATTSTTGSTLLQPLSNAVQLPIDQAARHMIPGCLSPSVCLTYLAESTGEKYALHFLVQSGISYCIMIIIGVENMHNYCFVFALGYLTVCQVTRVYIFDYGQYSADFSGIVNAPISTL

SEQ ID NO: 6121 - protein, 2073 aa, Artificial Sequence
  Synthetic polypeptide
MADVTARSLQYEYKANSNLVLQADRSLIDRTRRDEPTGEVLSLVGKLEGTRMGDKAQRTKPQMQEERRAKRRKRDEDRHDINKMKGYTLLSEGIDEMVGIIYKPKTKETRETYEVLLSFIQAALGDQPRDILCGAADEVLAVLKNEKLRDKERRKEIDLLLGQTDDTRYHVLVNLGKKITDYGGDKEIQNMDDNIDETYGVNVQFESDEEEGDEDVYGEVREEASDDDMEGDEAVVRCTLSANLVASGELMSSKKKDLHPRDIDAFWLQRQLSRFYDDAIVSQKKADEVLEILKTASDDRECENQLVLLLGFNTFDFIKVLRQHRMMILYCTLLASAQSEAEKERIMGKMEADPELSKFLYQLHETEKEDLIREERSRRERVRQSRMDTDLETMDLDQGGEALAPRQVLDLEDLVFTQGSHFMANKRCQLPDGSFRRQRKGYEEVHVPALKPKPFGSEEQLLPVEKLPKYAQAGFEGFKTLNRIQSKLYRAALETDENLLLCAPTGAGKTNVALMCMLREIGKHINMDGTINVDDFKIIYIAPMRSLVQEMVGSFGKRLATYGITVAELTGDHQLCKEEISATQIIVCTPEKWDIITRKGGERTYTQLVRLIILDEIHLLHDDRGPVLEALVARAIRNIEMTQEDVRLIGLSATLPNYEDVATFLRVDPAKGLFYFDNSFRPVPLEQTYVGITEKKAIKRFQIMNEIVYEKIMEHAGKNQVLVFVHSRKETGKTARAIRDMCLEKDTLGLFLREGSASTEVLRTEAEQCKNLELKDLLPYGFAIHHAGMTRVDRTLVEDLFADKHIQVLVSTATLAWGVNLPAHTVIIKGTQVYSPEKGRWTELGALDILQMLGRAGRPQYDTKGEGILITSHGELQYYLSLLNQQLPIESQMVSKLPDMLNAEIVLGNVQNAKDAVNWLGYAYLYIRMLRSPTLYGISHDDLKGDPLLDQRRLDLVHTAALMLDKNNLVKYDKKTGNFQVTELGRIASHYYITNDTVQTYNQLLKPTLSEIELFRVFSLSSEFKNITVREEEKLELQKLLERVPIPVKESIEEPSAKINVLLQAFISQLKLEGFALMADMVYVTQSAGRLMRAIFEIVLNRGWAQLTDKTLNLCKMIDKRMWQSMCPLRQFRKLPEEVVKKIEKKNFPFERLYDLNHNEIGELIRMPKMGKTIHKYVHLFPKLELSVHLQPITRSTLKVELTITPDFQWDEKVHGSSEAFWILVEDVDSEVILHHEYFLLKAKYAQDEHLITFFVPVFEPLPPQYFIRVVSDRWLSCETQLPVSFRHLILPEKYPPPTELLDLQPLPVSALRNSAFESLYQDKFPFFNPIQTQVFNTVYNSDDNVFVGAPTGSGKTICAEFAILRMLLQSSEGRCVYITPMEALAEQVYMDWYEKFQDRLNKKVVLLTGETSTDLKLLGKGNIIISTPEKWDILSRRWKQRKNVQNINLFVVDEVHLIGGENGPVLEVICSRMRYISSQIERPIRIVALSSSLSNAKDVAHWLGCSATSTFNFHPNVRPVPLELHIQGFNISHTQTRLLSMAKPVYHAITKHSPKKPVIVFVPSRKQTRLTAIDILTTCAADIQRQRFLHCTEKDLIPYLEKLSDSTLKETLLNGVGYLHEGLSPMERRLVEQLFSSGAIQVVVASRSLCWGMNVAAHLVIIMDTQYYNGKIHAYVDYPIYDVLQMVGHANRPLQDDEGRCVIMCQGSKKDFFKKFLYEPLPVESHLDHCMHDHFNAEIVTKTIENKQDAVDYLTWTFLYRRMTQNPNYYNLQGISHRHLSDHLSELVEQTLSDLEQSKCISIEDEMDVAPLNLGMIAAYYYINYTTIELFSMSLNAKTKVRGLIEIISNAAEYENIPIRHHEDNLLRQLAQKVPHKLNNPKFNDPHVKTNLLLQAHLSRMQLSAELQSDTEEILSKAIRLIQACVDVLSSNGWLSPALAAMELAQMVTQAMWSKDSYLKQLPHFTSEHIKRCTDKGVESVFDIMEMEDEERNALLQLTDSQIADVARFCNRYPNIELSYEVVDKDSIRSGGPVVVLVQLEREEEVTGPVIAPLFPQLCVVVGTCSPSYSGG

SEQ ID NO: 6122 - protein, 600 aa, Artificial Sequence
  Synthetic polypeptide
MRYISSQIERPIRIVALSSSLSNAKDVAHWLGCSATSTFNFHPNVRPVPLELHIQGFNISHTQTRLLSMAKPVYHAITKHSPKKPVIVFVPSRKQTRLTAIDILTTCAADIQRQRFLHCTEKDLIPYLEKLSDSTLKETLLNGVGYLHEGLSPMERRLVEQLFSSGAIQVVVASRSLCWGMNVAAHLVIIMDTQYYNGKIHAYVDYPIYDVLQMVGHANRPLQDDEGRCVIMCQGSKKDFFKKFLYEPLPVESHLDHCMHDHFNAEIVTKTIENKQDAVDYLTWTFLYRRMTQNPNYYNLQGISHRHLSDHLSELVEQTLSDLEQSKCISIEDEMDVAPLNLGMIAAYYYINYTTIELFSMSLNAKTKVRGLIEIISNAAEYENIPIRHHEDNLLRQLAQKVPHKLNNPKFNDPHVKTNLLLQAHLSRMQLSAELQSDTEEILSKAIRLIQACVDVLSSNGWLSPALAAMELAQMVTQAMWSKDSYLKQLPHFTSEHIKRCTDKGVESVFDIMEMEDEERNALLQLTDSQIADVARFCNRYPNIELSYEVVDKDSIRSGGPVVVLVQLEREEEVTGPVIAPLFPQLCVVVGTCSPSYSGG

SEQ ID NO: 6123 - protein, 1398 aa, Artificial Sequence
  Synthetic polypeptide
MADVTARSLQYEYKANSNLVLQADRSLIDRTRRDEPTGEVLSLVGKLEGTRMGDKAQRTKPQMQEERRAKRRKRDEDRHDINKMKGYTLLSEGIDEMVGIIYKPKTKETRETYEVLLSFIQAALGDQPRDILCGAADEVLAVLKNEKLRDKERRKEIDLLLGQTDDTRYHVLVNLGKKITDYGGDKEIQNMDDNIDETYGVNVQFESDEEEGDEDVYGEVREEASDDDMEGDEAVVRCTLSANLVASGELMSSKKKDLHPRDIDAFWLQRQLSRFYDDAIVSQKKADEVLEILKTASDDRECENQLVLLLGFNTFDFIKVLRQHRMMILYCTLLASAQSEAEKERIMGKMEADPELSKFLYQLHETEKEDLIREERSRRERVRQSRMDTDLETMDLDQGGEALAPRQVLDLEDLVFTQGSHFMANKRCQLPDGSFRRQRKGYEEVHVPALKPKPFGSEEQLLPVEKLPKYAQAGFEGFKTLNRIQSKLYRAALETDENLLLCAPTGAGKTNVALMCMLREIGKHINMDGTINVDDFKIIYIAPMRSLVQEMVGSFGKRLATYGITVAELTGDHQLCKEEISATQIIVCTPEKWDIITRKGGERTYTQLVRLIILDEIHLLHDDRGPVLEALVARAIRNIEMTQEDVRLIGLSATLPNYEDVATFLRVDPAKGLFYFDNSFRPVPLEQTYVGITEKKAIKRFQIMNEIVYEKIMEHAGKNQVLVFVHSRKETGKTARAIRDMCLEKDTLGLFLREGSASTEVLRTEAEQCKNLELKDLLPYGFAIHHAGMTRVDRTLVEDLFADKHIQVLVSTATLAWGVNLPAHTVIIKGTQVYSPEKGRWTELGALDILQMLGRAGRPQYDTKGEGILITSHGELQYYLSLLNQQLPIESQMVSKLPDMLNAEIVLGNVQNAKDAVNWLGYAYLYIRMLRSPTLYGISHDDLKGDPLLDQRRLDLVHTAALMLDKNNLVKYDKKTGNFQVTELGRIASHYYITNDTVQTYNQLLKPTLSEIELFRVFSLSSEFKNITVREEEKLELQKLLERVPIPVKESIEEPSAKINVLLQAFISQLKLEGFALMADMVYVTQSAGRLMRAIFEIVLNRGWAQLTDKTLNLCKMIDKRMWQSMCPLRQFRKLPEEVVKKIEKKNFPFERLYDLNHNEIGELIRMPKMGKTIHKYVHLFPKLELSVHLQPITRSTLKVELTITPDFQWDEKVHGSSEAFWILVEDVDSEVILHHEYFLLKAKYAQDEHLITFFVPVFEPLPPQYFIRVVSDRWLSCETQLPVSFRHLILPEKYPPPTELLDLQPLPVSALRNSAFESLYQDKFPFFNPIQTQVFNTVYNSDDNVFVGAPTGSGKTICAEFAILRMLLQSSEGRCVYITPMEALAEQKLAGRGGVRL

SEQ ID NO: 6124 - protein, 547 aa, Artificial Sequence
  Synthetic polypeptide
MGPPGPALPATMNNSSSETRGHPHSASSPSERVFPMPLPRKAPLNIPGTPVLEDFPQNDDEKERLQRRRSRVFDLQFSTDSPRLLASPSSRSIDISATIPKFTNTQITEHYSTCIKLSTENKITTKNAFGLHLIDFMSEILKQKDTEPTNFKVAAGTLDASTKIYAVRVDAVHADVYRVLGGLGKDAPSLEEVEGHVADGSATEMGTTKKAVKPKKKHLHRTIEQNINNLNVSEADRKCEIDPMFQKTAASFDECSTAGVFLSTLHCQDYRSELLFPSDVQTLSTGEPLELPELGCVEMTDLKAPLQQCAEDRQICPSLAGFQFTQWDSETHNESVSALVDKFKKNDQVFDINAEVDESDCGDFPDGSLGDDFDANDEPDHTAVGDHEEFRSWKEPCQVQSCQEEMISLGDGDIRTMCPLLSMKPGEYSYFSPRTMSMWAGPDHWRFRPRRKQDAPSQSENKKKSTKKDFEIDFEDDIDFDVYFRKTKAATILTKSTLENQNWRATTLPTDFNYNVDTLVQLHLKPGTRKLSQPPHPSATTTHPDSQ

SEQ ID NO: 6125 - protein, 411 aa, Artificial Sequence
  Synthetic polypeptide
MSEILKQKDTEPTNFKVAAGTLDASTKIYAVRVDAVHADVYRVLGGLGKDAPSLEEVEGHVADGSATEMGTTKKAVKPKKKHLHRTIEQNINNLNVSEADRKCEIDPMFQKTAASFDECSTAGVFLSTLHCQDYRSELLFPSDVQTLSTGEPLELPELGCVEMTDLKAPLQQCAEDRQICPSLAGFQFTQWDSETHNESVSALVDKFKKNDQVFDINAEVDESDCGDFPDGSLGDDFDANDEPDHTAVGDHEEFRSWKEPCQVQSCQEEMISLGDGDIRTMCPLLSMKPGEYSYFSPRTMSMWAGPDHWRFRPRRKQDAPSQSENKKKSTKKDFEIDFEDDIDFDVYFRKTKAATILTKSTLENQNWRATTLPTDFNYNVDTLVQLHLKPGTRKLSQPPHPSATTTHPDSQ

SEQ ID NO: 6126 - protein, 536 aa, Artificial Sequence
  Synthetic polypeptide
MGPPGPETRGHPHSASSPSERVFPMPLPRKAPLNIPGTPVLEDFPQNDDEKERLQRRRSRVFDLQFSTDSPRLLASPSSRSIDISATIPKFTNTQITEHYSTCIKLSTENKITTKNAFGLHLIDFMSEILKQKDTEPTNFKVAAGTLDASTKIYAVRVDAVHADVYRVLGGLGKDAPSLEEVEGHVADGSATEMGTTKKAVKPKKKHLHRTIEQNINNLNVSEADRKCEIDPMFQKTAASFDECSTAGVFLSTLHCQDYRSELLFPSDVQTLSTGEPLELPELGCVEMTDLKAPLQQCAEDRQICPSLAGFQFTQWDSETHNESVSALVDKFKKNDQVFDINAEVDESDCGDFPDGSLGDDFDANDEPDHTAVGDHEEFRSWKEPCQVQSCQEEMISLGDGDIRTMCPLLSMKPGEYSYFSPRTMSMWAGPDHWRFRPRRKQDAPSQSENKKKSTKKDFEIDFEDDIDFDVYFRKTKAATILTKSTLENQNWRATTLPTDFNYNVDTLVQLHLKPGTRKLSQPPHPSATTTHPDSQ

SEQ ID NO: 6127 - protein, 536 aa, Artificial Sequence
  Synthetic polypeptide
MNNSSSETRGHPHSASSPSERVFPMPLPRKAPLNIPGTPVLEDFPQNDDEKERLQRRRSRVFDLQFSTDSPRLLASPSSRSIDISATIPKFTNTQITEHYSTCIKLSTENKITTKNAFGLHLIDFMSEILKQKDTEPTNFKVAAGTLDASTKIYAVRVDAVHADVYRVLGGLGKDAPSLEEVEGHVADGSATEMGTTKKAVKPKKKHLHRTIEQNINNLNVSEADRKCEIDPMFQKTAASFDECSTAGVFLSTLHCQDYRSELLFPSDVQTLSTGEPLELPELGCVEMTDLKAPLQQCAEDRQICPSLAGFQFTQWDSETHNESVSALVDKFKKNDQVFDINAEVDESDCGDFPDGSLGDDFDANDEPDHTAVGDHEEFRSWKEPCQVQSCQEEMISLGDGDIRTMCPLLSMKPGEYSYFSPRTMSMWAGPDHWRFRPRRKQDAPSQSENKKKSTKKDFEIDFEDDIDFDVYFRKTKAATILTKSTLENQNWRATTLPTDFNYNVDTLVQLHLKPGTRKLSQPPHPSATTTHPDSQ

SEQ ID NO: 6128 - protein, 723 aa, Artificial Sequence
  Synthetic polypeptide
MGPPGPALPATMNNSSSETRGHPHSASSPSERVFPMPLPRKAPLNIPGTPVLEDFPQNDDEKERLQRRRSRVFDLQFSTDSPRLLASPSSRSIDISATIPKFTNTQITEHYSTCIKLSTENKITTKNAFGLHLIDFMSEILKQKDTEPTNFKVAAGTLDASTKIYAVRVDAVHADVYRVLGGLGKDAPSLEEVEGHVADGSATEMGTTKKAVKPKKKHLHRTIEQNINNLNVSEADRKCEIDPMFQKTAASFDECSTAGVFLSTLHCQDYRSELLFPSDVQTLSTGEPLELPELGCVEMTDLKAPLQQCAEDRQICPSLAGFQFTQWDSETHNESVSALVDKFKKNDQVFDINAEVDESDCGDFPDGSLGDDFDANDEPDHTAVGDHEEFRSWKEPCQVQSCQEEMISLGDGDIRTMCPLLSMKPGEYSYFSPRTMSMWAGPDHWRFRPRRKQDAPSQSENKKKSTKKDFEIDFEDDIDFDVYFRKTKAATILTKSTLENQNWRATTLPTDFNYNVDTLVQLHLKPGTRLLKMAQGHRVETEHYEEIEDYDYNNPNDTSNFCPGLQAADSDDEDLDDLFVGPVGNSDLSPYPCHPPKTAQQNGDTPEAQGLDITTYGESNLVAEPQKVNKIEIHYAKTAKKMDMKKLKQSMWSLLTALSGKEADAEANHREAGKEAALAEVADEKMLSGLTKDLQRSLPPVMAQNLSIPLAFACLLHLANEKA

SEQ ID NO: 6129 - protein, 587 aa, Artificial Sequence
  Synthetic polypeptide
MSEILKQKDTEPTNFKVAAGTLDASTKIYAVRVDAVHADVYRVLGGLGKDAPSLEEVEGHVADGSATEMGTTKKAVKPKKKHLHRTIEQNINNLNVSEADRKCEIDPMFQKTAASFDECSTAGVFLSTLHCQDYRSELLFPSDVQTLSTGEPLELPELGCVEMTDLKAPLQQCAEDRQICPSLAGFQFTQWDSETHNESVSALVDKFKKNDQVFDINAEVDESDCGDFPDGSLGDDFDANDEPDHTAVGDHEEFRSWKEPCQVQSCQEEMISLGDGDIRTMCPLLSMKPGEYSYFSPRTMSMWAGPDHWRFRPRRKQDAPSQSENKKKSTKKDFEIDFEDDIDFDVYFRKTKAATILTKSTLENQNWRATTLPTDFNYNVDTLVQLHLKPGTRLLKMAQGHRVETEHYEEIEDYDYNNPNDTSNFCPGLQAADSDDEDLDDLFVGPVGNSDLSPYPCHPPKTAQQNGDTPEAQGLDITTYGESNLVAEPQKVNKIEIHYAKTAKKMDMKKLKQSMWSLLTALSGKEADAEANHREAGKEAALAEVADEKMLSGLTKDLQRSLPPVMAQNLSIPLAFACLLHLANEKA

SEQ ID NO: 6130 - protein, 712 aa, Artificial Sequence
  Synthetic polypeptide
MNNSSSETRGHPHSASSPSERVFPMPLPRKAPLNIPGTPVLEDFPQNDDEKERLQRRRSRVFDLQFSTDSPRLLASPSSRSIDISATIPKFTNTQITEHYSTCIKLSTENKITTKNAFGLHLIDFMSEILKQKDTEPTNFKVAAGTLDASTKIYAVRVDAVHADVYRVLGGLGKDAPSLEEVEGHVADGSATEMGTTKKAVKPKKKHLHRTIEQNINNLNVSEADRKCEIDPMFQKTAASFDECSTAGVFLSTLHCQDYRSELLFPSDVQTLSTGEPLELPELGCVEMTDLKAPLQQCAEDRQICPSLAGFQFTQWDSETHNESVSALVDKFKKNDQVFDINAEVDESDCGDFPDGSLGDDFDANDEPDHTAVGDHEEFRSWKEPCQVQSCQEEMISLGDGDIRTMCPLLSMKPGEYSYFSPRTMSMWAGPDHWRFRPRRKQDAPSQSENKKKSTKKDFEIDFEDDIDFDVYFRKTKAATILTKSTLENQNWRATTLPTDFNYNVDTLVQLHLKPGTRLLKMAQGHRVETEHYEEIEDYDYNNPNDTSNFCPGLQAADSDDEDLDDLFVGPVGNSDLSPYPCHPPKTAQQNGDTPEAQGLDITTYGESNLVAEPQKVNKIEIHYAKTAKKMDMKKLKQSMWSLLTALSGKEADAEANHREAGKEAALAEVADEKMLSGLTKDLQRSLPPVMAQNLSIPLAFACLLHLANEKA

SEQ ID NO: 6131 - protein, 2 aa, Artificial Sequence
  Synthetic polypeptide
VT

SEQ ID NO: 6132 - protein, 875 aa, Artificial Sequence
  Synthetic polypeptide
MAHRGGERDFQTSARRMGTSLLFQLSVHERELDLVFLDHSYAKPWSAHPDASSARPTRMLFVTPRRQHESTIESDVPIDVETVTSTPMPLYDNQKARSVMNECERHVIFARTDADAPPPPEDWEEHVNRTGWTMAQNKLFNKILKALQSDRLARLANEGACNEPVLRRVAVDKCARRVRQALASVSWDTKLIQWLHTTLVETLSLPMLAAYLDALQTLKGKIPTLIDRMLVSSNTKTGAAGAEALSLLLKRPWDPAVGVLSHNKPSKLPGSPLILIASSGPSSSVFPTSRRHRFWQSQLSCLGKVIPVATHLLNNGSGVGVLQCLEHMIGAVRSKVLEIHSHFPHKPIILIGWNTGALVACHVSVMEYVTAVVCLGFPLLTVDGPRGDVDDPLLDMKTPVLFVIGQNSLQCHPEAMEDFREKIRAENSLVVVGGADDNLRISKAKKKSEGLTQSMVDRCIQDEIVDFLTGVLTRAEGHMGSEPRDQDAEKKKKPRDVARRDLAFEVPERGSRPASPAAKLPASPSGSEDLSSVSSSPTSSPKTKVTTVTSAQKSSQIGSSQLLKRHVQRTEAVLTHKQAQVPISSEPPEEGEKEDLRVQLKRHHPSSPLPGSKTSKRPKIKVSLISQGDTAGGPCAPSQGSAPEAAGGKPITMTLGQASAGAKELTGLLTTAKSSSSEGGVSASPVPSVVSSSTAPSALHTLQSRLVATSPGSSLPGATSASSLLQGLSFSLQDISSKTSGLPANPSPGPAPQATSVKLPTPMQSLGAITTGTSTIVRTIPVATTLSSLGATPGGKPTAIHQLLTNGGLAKLASSLPGLAQISNQASGLKVPTTITLTLRGQPSRITTLSPMGSGAAPSEESSSQVLPSSSQQHG

SEQ ID NO: 6133 - protein, 788 aa, Artificial Sequence
  Synthetic polypeptide
MPLYDNQKARSVMNECERHVIFARTDADAPPPPEDWEEHVNRTGWTMAQNKLFNKILKALQSDRLARLANEGACNEPVLRRVAVDKCARRVRQALASVSWDTKLIQWLHTTLVETLSLPMLAAYLDALQTLKGKIPTLIDRMLVSSNTKTGAAGAEALSLLLKRPWDPAVGVLSHNKPSKLPGSPLILIASSGPSSSVFPTSRRHRFWQSQLSCLGKVIPVATHLLNNGSGVGVLQCLEHMIGAVRSKVLEIHSHFPHKPIILIGWNTGALVACHVSVMEYVTAVVCLGFPLLTVDGPRGDVDDPLLDMKTPVLFVIGQNSLQCHPEAMEDFREKIRAENSLVVVGGADDNLRISKAKKKSEGLTQSMVDRCIQDEIVDFLTGVLTRAEGHMGSEPRDQDAEKKKKPRDVARRDLAFEVPERGSRPASPAAKLPASPSGSEDLSSVSSSPTSSPKTKVTTVTSAQKSSQIGSSQLLKRHVQRTEAVLTHKQAQVPISSEPPEEGEKEDLRVQLKRHHPSSPLPGSKTSKRPKIKVSLISQGDTAGGPCAPSQGSAPEAAGGKPITMTLGQASAGAKELTGLLTTAKSSSSEGGVSASPVPSVVSSSTAPSALHTLQSRLVATSPGSSLPGATSASSLLQGLSFSLQDISSKTSGLPANPSPGPAPQATSVKLPTPMQSLGAITTGTSTIVRTIPVATTLSSLGATPGGKPTAIHQLLTNGGLAKLASSLPGLAQISNQASGLKVPTTITLTLRGQPSRITTLSPMGSGAAPSEESSSQVLPSSSQQHG

SEQ ID NO: 6134 - protein, 695 aa, Artificial Sequence
  Synthetic polypeptide
MLAAYLDALQTLKGKIPTLIDRMLVSSNTKTGAAGAEALSLLLKRPWDPAVGVLSHNKPSKLPGSPLILIASSGPSSSVFPTSRRHRFWQSQLSCLGKVIPVATHLLNNGSGVGVLQCLEHMIGAVRSKVLEIHSHFPHKPIILIGWNTGALVACHVSVMEYVTAVVCLGFPLLTVDGPRGDVDDPLLDMKTPVLFVIGQNSLQCHPEAMEDFREKIRAENSLVVVGGADDNLRISKAKKKSEGLTQSMVDRCIQDEIVDFLTGVLTRAEGHMGSEPRDQDAEKKKKPRDVARRDLAFEVPERGSRPASPAAKLPASPSGSEDLSSVSSSPTSSPKTKVTTVTSAQKSSQIGSSQLLKRHVQRTEAVLTHKQAQAQFAAFLKQNMLVRKALPPGTSSCLFVPISSEPPEEGEKEDLRVQLKRHHPSSPLPGSKTSKRPKIKVSLISQGDTAGGPCAPSQGSAPEAAGGKPITMTLGQASAGAKELTGLLTTAKSSSSEGGVSASPVPSVVSSSTAPSALHTLQSRLVATSPGSSLPGATSASSLLQGLSFSLQDISSKTSGLPANPSPGPAPQATSVKLPTPMQSLGAITTGTSTIVRTIPVATTLSSLGATPGGKPTAIHQLLTNGGLAKLASSLPGLAQISNQASGLKVPTTITLTLRGQPSRITTLSPMGSGAAPSEESSSQVLPSSSQQHG

SEQ ID NO: 6135 - protein, 50 aa, Artificial Sequence
  Synthetic polypeptide
MATPRPCADGPCCSHPSAVLGVQQTLEEMDFERAKSPAFRTNLDTEEVLG

SEQ ID NO: 6136 - protein, 356 aa, Artificial Sequence
  Synthetic polypeptide
MAGPQETVLALPLREGVQAAATVPILLYNLEDGLSDHPLDQGPRCPARRPCSPASAPAPTSPKKPKIQAPGETFPTDWSPPPVEFLNPRVLQASREAPAQRWVGVVGPQGLRRLAGELPEELEQEHLDLDPKRGLALPEKLFWNTSGLSQQAAAPEFSWGGSGSYFNNLDYLLQEKREQALEQERERLLLQECLNLNSLDLDEEEVPLTPEHRMLVEKYSVSLQTIPPVHPGETVFLPRCHPLPCILDSSLLKPRSHLEGLFLSSPPAQQLSFLRSGLLNILYLHMPDCPVSLLQWLFQLLTWPPETSLGAFGLLWDLIVDGIFLQPGSVAHACNPSTLGGRGRRIMRSGDQDHPG

SEQ ID NO: 6137 - protein, 536 aa, Artificial Sequence
  Synthetic polypeptide
MAHEREILKGMYEELKEKSHKPDVELIQHRAWRIDMVSTELESFRKASYIESGPEEFYQRFKKCFSATHIFISIKGKDSQNTAHGYLILNRTLHQQLKIKNPFLAPSSEAVRIPATLPHPGALPFPPYVAKASSDELLNLQKPLQSALGFVILRSSQNWNSKNRQRWSRTKAGQMSHGLQMAGPQETVLALPLREGVQAAATVPILLYNLEDGLSDHPLDQGPRCPARRPCSPASAPAPTSPKKPKIQAPGETFPTDWSPPPVEFLNPRVLQASREAPAQRWVGVVGPQGLRRLAGELPEELEQEHLDLDPKRGLALPEKLFWNTSGLSQQAAAPEFSWGGSGSYFNNLDYLLQEKREQALEQERERLLLQECLNLNSLDLDEEEVPLTPEHRMLVEKYSVSLQTIPPVHPGETVFLPRCHPLPCILDSSLLKPRSHLEGLFLSSPPAQQLSFLRSGLLNILYLHMPDCPVSLLQWLFQLLTWPPETSLGAFGLLWDLIVDGIFLQPGSVAHACNPSTLGGRGRRIMRSGDQDHPG

SEQ ID NO: 6138 - protein, 388 aa, Artificial Sequence
  Synthetic polypeptide
MWPRLPGAGLAPQLRRQDQRLHFTGQMSHGLQMAGPQETVLALPLREGVQAAATVPILLYNLEDGLSDHPLDQGPRCPARRPCSPASAPAPTSPKKPKIQAPGETFPTDWSPPPVEFLNPRVLQASREAPAQRWVGVVGPQGLRRLAGELPEELEQEHLDLDPKRGLALPEKLFWNTSGLSQQAAAPEFSWGGSGSYFNNLDYLLQEKREQALEQERERLLLQECLNLNSLDLDEEEVPLTPEHRMLVEKYSVSLQTIPPVHPGETVFLPRCHPLPCILDSSLLKPRSHLEGLFLSSPPAQQLSFLRSGLLNILYLHMPDCPVSLLQWLFQLLTWPPETSLGAFGLLWDLIVDGIFLQPGSVAHACNPSTLGGRGRRIMRSGDQDHPG

SEQ ID NO: 6139 - protein, 67 aa, Artificial Sequence
  Synthetic polypeptide
MGKRAGGGATGATTAAVSTSAGAGLEPAAARSGGPRSAAAGLLGALHLVMTLVVAAARAEKEGVEAA

SEQ ID NO: 6140 - protein, 3 aa, Artificial Sequence
  Synthetic polypeptide
PAS

SEQ ID NO: 6141 - protein, 18 aa, Artificial Sequence
  Synthetic polypeptide
MTLVVAAARAEKEGVEAA

SEQ ID NO: 6142 - protein, 424 aa, Artificial Sequence
  Synthetic polypeptide
MEKSGPSSTISEQQLQRQEGWINTKTDLAEQSLISSEKWLQLHGLKSNKLTLKQILSQIGFPHCEDYVASLGRPVASRYADGLFPQLYRAEDGRVYNLTAKSELIYQFVEHLTQAVESYKQRMDWLTSKSRQIFGVILEQCVTIVLDFGGILEGELDLCREALTMVLQEQVAHITEFNIIRVSQEPVKWQENATPVTEQSIATAISWVEKLTVELTVSEAGRLDALLEAGRDKTIESIYYFVVGDVPEESKELLLQRALEIPCPVYTVSFNARGEGTIAFLKDLSAKTHSRFHAFAERTECVEFPAFSTKDGDNVMTWNSRKLKGKLPPGAGVREDVFLVWQEMEEACSTLAQIQRLVAEPPKPDVATVDCGRDTCEPSPQKHMEERSCAAQREGGRLLAGKNSLIRNQRCWHLHPGLPTSERK

SEQ ID NO: 6143 - protein, 303 aa, Artificial Sequence
  Synthetic polypeptide
MEKSGPSSTISEQQLQRQEGWINTKTDLAEQSLISSEKWLQLHGLKSNKLTLKQILSQIGFPHCEDYVASLGRPVASRYADGLFPQLYRAEDGRVYNLTAKSELIYQFVEHLTQAVESYKQRMDWLTSKSRQIFGVILEQCVTIVLDFGGILEGELDLCREALTMVLQEQVAHITEFNIIRVSQEPVKWQENATPVTEQSIATAISWVEKLTVELTVSEAGRLDALLEAGRDKTELESERTCFSFGKRWRKPAARWPRSRGWWPSLPSPTWPLWTAGETPASPLPRSTWRKGRVQHREKVAVS

SEQ ID NO: 6144 - protein, 274 aa, Artificial Sequence
  Synthetic polypeptide
MWRLWGDLWLLGMLMVCFHSSTEQKMAEYTMVSQEPVKWQENATPVTEQSIATAISWVEKLTVELTVSEAGRLDALLEAGRDKTIESIYYFVVGDVPEESKELLLQRALEIPCPVYTVSFNARGEGTIAFLKDLSAKTHSRFHAFAERTECVEFPAFSTKDGDNVMTWNSRKLKGKLPPGAGVREDVFLVWQEMEEACSTLAQIQRLVAEPPKPDVATVDCGRDTCEPSPQKHMEERSCAAQREGGRLLAGKNSLIRNQRCWHLHPGLPTSERK

SEQ ID NO: 6145 - protein, 212 aa, Artificial Sequence
  Synthetic polypeptide
LKRAVELDSESRYPQALVCYQEGIDLLLQVLKGTKDNTKRCNLREKISKYMDRAENIKKYLDQEKEDGKYHKQIKIEENATGFSYESLFREYLNETVTEVWIEDPYIRHTHQLYNFLRFCEMLIKRPCKVKTIHLLTSLDEGIEQVQQSRGLQEIEESLRSHGVLLEVQYSSSIHDREIRFNNGWMIKIGRGLDYFKKPQYPMPRGNGVALN

SEQ ID NO: 6146 - protein, 230 aa, Artificial Sequence
  Synthetic polypeptide
MAKSGLRQDPQSTAAATVLKRAVELDSESRYPQALVCYQEGIDLLLQVLKGTKDNTKRCNLREKISKYMDRAENIKKYLDQEKEDGKYHKQIKIEENATGFSYESLFREYLNETVTEVWIEDPYIRHTHQLYNFLRFCEMLIKRPCKVKTIHLLTSLDEGIEQVQQSRGLQEIEESLRSHGVLLEVQYSSSIHDREIRFNNGWMIKIGRGLDYFKKPQYPMPRGNGVALN

SEQ ID NO: 6147 - protein, 201 aa, Artificial Sequence
  Synthetic polypeptide
MAKSGLRQDPQSTAAATVLKRAVELDSESRYPQALVCYQEGIDLLLQVLKGTKDNTKRCNLREKISKYMDRAENIKKYLDQEKEDGKYHKQIKIEENATGFSYESLFREYLNETVTEVWIEDPYIRHTHQGIEQVQQSRGLQEIEESLRSHGVLLEVQYSSSIHDREIRFNNGWMIKIGRGLDYFKKPQYPMPRGNGVALN

SEQ ID NO: 6148 - protein, 218 aa, Artificial Sequence
  Synthetic polypeptide
LKRAVELDSESRYPQALVCYQEGIDLLLQVLKGTKDNTKRCNLREKISKYMDRAENIKKYLDQEKEDGKYHKQIKIEENATGFSYESLFREYLNETVTEVWIEDPYIRHTHQLYNFLRFCEMLIKRPCKVKTIHLLTSLDEGIEQVQQSRGLQEIEESLRSHGVLLEVQYSSSIHDREIRFNNGWMIKIGRGLDYFKKPQVQVLIILNLKNFRLKLIY

SEQ ID NO: 6149 - protein, 236 aa, Artificial Sequence [sequence omitted]

SEQ ID NO: 6150 - protein, 207 aa, Artificial Sequence
  Synthetic polypeptide
MAKSGLRQDPQSTAAATVLKRAVELDSESRYPQALVCYQEGIDLLLQVLKGTKDNTKRCNLREKISKYMDRAENIKKYLDQEKEDGKYHKQIKIEENATGFSYESLFREYLNETVTEVWIEDPYIRHTHQGIEQVQQSRGLQEIEESLRSHGVLLEVQYSSSIHDREIRFNNGWMIKIGRGLDYFKKPQVQVLIILNLKNFRLKLIY

SEQ ID NO: 6151 - protein, 33 aa, Artificial Sequence
  Synthetic polypeptide
LKRAVELDSESRYPQALVCYQEGIDLLLQVLKG

SEQ ID NO: 6152 - protein, 51 aa, Artificial Sequence
  Synthetic polypeptide
MAKSGLRQDPQSTAAATVLKRAVELDSESRYPQALVCYQEGIDLLLQVLKG

SEQ ID NO: 6153 - protein, 110 aa, Artificial Sequence
  Synthetic polypeptide
MDLEEAEEFKERCTQCAAVSWGLTDEGKYYCTSCHNVTERYQEVTNTDLIPNTQIKALNRGLKKKNNTEKGWDWYVCEGFQYILYQQAEALKNLGVGPELKGMSCVLFTI

SEQ ID NO: 6154 - protein, 776 aa, Artificial Sequence
  Synthetic polypeptide
MGKKQKNKSEDSTKDDIDLDALAAEIEGAGAAKEQEPQKSKGKKKKEKKKQDFDEDDILKELEELSLEAQGIKADRETVAVKPTENNEEEFTSKDKKKKGQKGKKQSFDDNDSEELEDKDSKSKKTAKPKVEMYSGSDDDDDFNKLPKKAKGKAQKSNKKWDGSEEDEDNSKKIKERSRINSSGESGDESDEFLQSRKGQKKNQKNKPGPNIESGNEDDDASFKIKTVAQKKAEKKERERKKRDEEKAKLRKLKEKEELETGKKDQSKQKESQRKFEEETVKSKVTVDTGVIPASEEKAETPTAAEDDNEGDKKKKDKKKKKGEKEEKEKEKKKGPSKATVKAMQEALAKLKEEEERQKREEEERIKRLEELEAKRKEEERLEQEKRERKKQKEKERKERLKKEGKLLTKSQREARARAEATLKLLQAQGVEVPSKDSLPKKRPIYEDKKRKKIPQQLESKEVSESMELCAAVEVMEQGVPEKEETPPPVEPEEEEDTEDAGLDDWEAMASDEETEKVEGNKVHIEVKENPEEEEEEEEEEEEDEESEEEEEEEGESEGSEGDEEDEKVSDEKDSGKTLDKKPSKEMSSDSEYDSDDDRTKEERAYDKAKRRIEKRRLEHSKNVNTEKLRAPIICVLGHVDTGKTKILDKLRHTHVQDGEAGGITQQIGATNVPLEAINEQTKMIKNFDRENVRIPGMLIIDTPGHESFSNLRNRGSSLCDIAILVVDIMHGLEPQTIESINLLKSKKCPFIVALNKHPFCSSWIKECFQLSSIVT

SEQ ID NO: 6155 - protein, 150 aa, Artificial Sequence
  Synthetic polypeptide
MTMEKGMSSGEGLPSRSSQVSAGKITAKELETKQSYKEKRGGFVLVHAGAGYHSESKAKEYKHVCKRACQKAIEKLQAGALATDAVTAALVELEDVESILCAPYWLENVHMLYKLRMLTKPCWRLCKTSLSAERGEEAAEEKLNLAEIHS

SEQ ID NO: 6156 - protein, 329 aa, Artificial Sequence
  Synthetic polypeptide
MTMEKGMSSGEGLPSRSSQVSAGKITAKELETKQSYKEKRGGFVLVHAGAGYHSESKAKEYKHVCKRACQKAIEKLQAGALATDAVTAALVELEDSPFTNAGMGSNLNLLGEIECDASIMDGKSLNFGAVGALSGIKNPVSVANRLLCEGQKGKLSAGRIPPCFLVGEGAYRWAVDHGIPSCPPNIMTTRFSLAAFKRNKRKLELAERVDTDFMQLKKRRQSSEKENDSGTLDTVGAVVVDHEGNVAAAVSSGGLALKHPGRVGQAALYGCGCWAENTGAHNPYSTAVSTSGCGEHLVRTILARECSHALQAEDAHQALLETMQNKFIS

SEQ ID NO: 6157 - protein, 306 aa, Artificial Sequence
  Synthetic polypeptide
MTMEKGMSSGEGLPSRSSQVSAGKITAKELETKQSYKEKRGGFVLVHAGAGYHSESKAKEYKHVCKRACQKDSPFTNAGMGSNLNLLGEIECDASIMDGKSLNFGAVGALSGIKNPVSVANRLLCEGQKGKLSAGRIPPCFLVGEGAYRWAVDHGIPSCPPNIMTTRFSLAAFKRNKRKLELAERVDTDFMQLKKRRQSSEKENDSGTLDTVGAVVVDHEGNVAAAVSSGGLALKHPGRVGQAALYGCGCWAENTGAHNPYSTAVSTSGCGEHLVRTILARECSHALQAEDAHQALLETMQNKFIS

SEQ ID NO: 6158 - protein, 188 aa, Artificial Sequence
  Synthetic polypeptide
MPIPASPLHPPLPSLLLYLLLELAGVTHVFHVQQTEMSQTVSTGESIILSCSVPNTLPNGPVLWFKGTGPNRKLIYNFKQGNFPRVKEIGDTTKPGNTDFSTRIREISLADAGTYYCVKFIKGRAIKEYQSGRGTQVFVTGYTPWQRRGINCTKIIHPVTQQLYKQMTITSLGGCEEDQYPEFLQCII

SEQ ID NO: 6159 - protein, 161 aa, Artificial Sequence
  Synthetic polypeptide
MDIRPNHTIYINNMNDKIKKEELKRSLYALFSQFGHVVDIVALKTMKMRGQAFVIFKELGSSTNALRQLQGFPFYGKPMRIQYAKTDSDIISKMRGTFADKEKKKEKKKAKTVEQTATTTNKKPGQWLLPVIPALWEAEAGGSRSQEIETILANTVKPRLY

SEQ ID NO: 6160 - protein, 154 aa, Artificial Sequence
  Synthetic polypeptide
MYRRSYVFQTRKEQYEHADEASRAAEPERPADEGWAGATSLAALQGLGERVAAHVQRARALEQRHAGLRRQLDAFQRLGELAGPEDALARQVESNRQRVRDLEAERARLERQGTEAQRALDEFRSKYENECECQLLLKEMLERLNKWLLLESLK

SEQ ID NO: 6161 - protein, 29 aa, Artificial Sequence
  Synthetic polypeptide
MYENECECQLLLKEMLERLNKWLLLESLK

SEQ ID NO: 6162 - protein, 15 aa, Artificial Sequence
  Synthetic polypeptide
MLERLNKWLLLESLK

SEQ ID NO: 6163 - protein, 15 aa, Artificial Sequence
  Synthetic polypeptide
ILGKFFIAVRKWTNT

SEQ ID NO: 6164 - protein, 393 aa, Artificial Sequence
  Synthetic polypeptide
MAAVPELLQQQEEDRSKLRSVSVDLNVDPSLQIDIPDALSERDKVKFTVHTKTTLPTFQSPEFSVTRQHEDFVWLHDTLIETTDYAGLIIPPAPTKPDFDGPREKMQKLGEGEGSMTKEEFAKMKQELEAEYLAVFKKTVSSHEVFLQRLSSHPVLSKDRNFHVFLEYDQDLSVRRKNTKEMFGGFFKSVVKSADEVLFTGVKEVDDFFEQEKNFLINYYNRIKDSCVKADKMTRSHKNVADDYIHTAACLHSLALEEPTVIKKYLLKVAELFEKLRKVEGRVSSDEDLKLTELLRYYMLNIEAAKDLLYRRTKALIDYENSNKALDKARLKSKDVKLAEAHQQECCQKFEQLSESAKEELINFKRKRVAAFRKNLIEMSELEIKHARALAFM

SEQ ID NO: 6165 - protein, 139 aa, Artificial Sequence
  Synthetic polypeptide
MAEVKVKVQPPDADPVEIENRIIELCHQFPHGITDQVIQNEMPHIEAQQRAVAINRLLSMMTNALGLNSAIVSRKSLNPPRLGRSLFSEYPIWEFRVALLTSILMPTRWVLKSPVCFPFRINVVPPNTYHNTWHSTSIQ

SEQ ID NO: 6166 - protein, 471 aa, Artificial Sequence
  Synthetic polypeptide
MATYLEFIQQNEERDGVRFSWNVWPSSRLEATRMVVPLACLLTPLKERPDLPPVQYEPVLCSRPTCKAVLNPLCQVDYRAKLWACNFCFQRNQFPPAYGGISEVNQPAELMPQFSTIEYVIQRGAQSPLIFLYVVDTCLEEDDLQALKESLQMSLSLLPPDALVGLITFGRMVQVHELSCEGISKSYVFRGTKDLTAKQIQDMLGLTKPAMPMQQARPAQPQEHPFASSRFLQPVHKIDMNLTDLLGELQRDPWPVTQGKRPLRSTGVALSIAVGLLEGTFPNTGARIMLFTGGPPTQGPGMVVGDELKIPIRSWHDIEKDNARFMKKATKHYEMLANRTAANGHCIDIYACALDQTGLLEMKCCANLTGGYMVMGDSFNTSLFKQTFQRIFTKDFNGDFRMAFGATLDVKTSRELKIAGAIGPCVSLNVKGPCVSENELGVGGTSQWKICGLDPTSTLGIYFEVVNQGHG

SEQ ID NO: 6167 - protein, 122 aa, Artificial Sequence
  Synthetic polypeptide
MRPSGDEDRARRRRRRRRRRDLLLSQLCFLASVALLLWSLSSLREQKELDLMDLVGEDRKWMMARKLMQVNDTLTSEDAGLRNSKNCTEPALHEFPNDIFTNEDRRQGAVVLHVLCNWEKLL

SEQ ID NO: 6168 - protein, 310 aa, Artificial Sequence
  Synthetic polypeptide
MRPSGDEDRARRRRRRRRRRDLLLSQLCFLASVALLLWSLSSLREQKELDLMDLVGEDRKWMMARKLMQVNDTLTSEDAGLRNSKNCTEPALHEFPNDIFTNEDRRQGAVVLHVLCAIYMFYALAIVCDDFFVPSLEKICERLHLSEDVAGATFMAAGSSAPELFTSVIGVFITKGDVGVGTIVGSAVFNILCIIGVCGLFAGQVVALSSWCLLRDSIYYTLSVIALIVFIYDEKVSWWESLVLVLMYLIYIVIMKYNACIHQCFERRTKGAGNMVNGLANNAEIDDSSNCDATVVLLKKEGRKEGIRKE

SEQ ID NO: 6169 - protein, 309 aa, Artificial Sequence
  Synthetic polypeptide
MRPSGDEDRARRRRRRRRRRDLLLSQLCFLASVALLLWSLSSLREQKELDLMDLVGEDRKWMMARKLMQVNDTLTSEDAGLRNSKNCTEPALHEFPNDIFTNEDRRQGAVVLHVLCAIYMFYALAIVCDDFFVPSLEKICERLHLSEDVAGATFMAAGSSAPELFTSVIGVFITKGDVGVGTIVGSAVFNILCIIGVCGLFAGQVVALSSWCLLRDSIYYTLSVIALIVFIYDEKVSWWESLVLVLMYLIYIVIMKYNACIHQCFERRTKGAGNMVNGLANNAEIDDSSNCDATVVLLKKGRKEGIRKE

SEQ ID NO: 6170 - protein, 814 aa, Artificial Sequence
  Synthetic polypeptide
MLDSFSQESTLPFREARKRTSFQPVQVWRNFTASQTTESPACSGASLGEMTAWTMGARGLDKRGSFFKLIDTIASEIGELKQEMVRTDVNLENGLEPAETHSMVRHKDGGYSEEEDVKTCARDSGYDSLSNRLSILDRLLHTHPIWLQLSLSEEEAAEVLQAQPPGIFLVHKSTKMQKKVLSLRLPCEFGAPLKEFAIKESTYTFSLEGSGISFADLFRLIAFYCISRDVLPFTLKLPYAISTAKSEAQLEELAQMGLNFWSSPADSKPPNLPPPHRPLSSDGVCPASLRQLCLINGVHSIKTRTPSELECSQTNGALCFINPLFLKVHSQDLSGGLKRPSTRTPNANGTERTRSPPPRPPPPAINSLHTSPRLARTETQTSMPETVNHNKHGNVALPGTKPTPIPPPRLKKQASFLEAEGGAKTLSGGRPGAGPELELGTAGSPGGAPPEAAPGDCTRAPPPSSESRPPCHGGRQRLSDMSISTSSSDSLEFDRSMPLFGYEADTNSSLEDYEGESDQETMAPPIKSKKKRSSSFVLPKLVKSQLQKVSGVFSSFMTPEKRMVRRIAELSRDKCTYFGCLVQDYVSFLQENKECHVSSTDMLQTIRQFMTQVKNYLSQSSELDPPIESLIPEDQIDVVLEKAMHKCILKPLKGHVEAMLKDFHMADGSWKQLKENLQLVRQRNPQELGVFAPTPDFVDVEKIKVKFMTMQKMYSPEKKVMLLLRVCKLIYTVMENNSGRMYGADDFLPVLTYVIAQCDMLELDTEIEYMMELLDPSLLHGEETLNTRKQWSNDVYKILEERTWDPGISSQYST

SEQ ID NO: 6171 - protein, 332 aa, Artificial Sequence
  Synthetic polypeptide
MTAWTMGARGLDKRGSFFKLIDTIASEIGELKQEMVRTDVNLENGLEPAETHSMVRHKDGGYSEEEDVKTCARDSGYDSLSNRLSILDRLLHTHPIWLQLSLSEEEAAEVLQAQPPGIFLVHKSTKMQKKVLSLRLPCEFGAPLKEFAIKESTYNVVLEKAMHKCILKPLKGHVEAMLKDFHMADGSWKQLKENLQLVRQRNPQELGVFAPTPDFVDVEKIKVKFMTMQKMYSPEKKVMLLLRVCKLIYTVMENNSGRMYGADDFLPVLTYVIAQCDMLELDTEIEYMMELLDPSLLHGEETLNTRKQWSNDVYKILEERTWDPGISSQYST

SEQ ID NO: 6172 - protein, 164 aa, Artificial Sequence
  Synthetic polypeptide
MREKANLAVTLCNDKEEIMAQATFLDYPNWNVAKQDDWVSVFRELDSDIPCTPLNTLFMHLFVAVDEYSVGCCKEILRTVYKAVPELHFIFLIVPSYMSLGSTLITVFDQVGNIPCLTYEEDFAVHICHRHSHYPQLHVRKARLLFDVTLPLLSSSLGRSVLSS

SEQ ID NO: 6173 - protein, 210 aa, Artificial Sequence
  Synthetic polypeptide
MSVLTSPRGKVEVVHCRRTESQDVYCIKSLIRKFTCKLFGKLNIIYLLEKANLAVTLCNDKEEIMAQATFLDYPNWNVAKQDDWVSVFRELDSDIPCTPLNTLFMHLFVAVDEYSVGCCKEILRTVYKAVPELHFIFLIVPSYMSLGSTLITVFDQVGNIPCLTYEEDFAVHICHRHSHYPQLHVRKARLLFDVTLPLLSSSLGRSVLSS

SEQ ID NO: 6174 - protein, 106 aa, Artificial Sequence
  Synthetic polypeptide
MHLFVAVDEYSVGCCKEILRTVYKAVPELHFIFLIVPSYMSLGSTLITVFDQVGNIPCLTYEEDFAVHICHRHSHYPQLHVRKARLLFDVTLPLLSSSLGRSVLSS

SEQ ID NO: 6175 - protein, 282 aa, Artificial Sequence
  Synthetic polypeptide
MREKANLAVTLCNDKEEIMAQATFLDYPNWNVAKQDDWVSVFRELDSDIPCTPLNTLFMHLFVAVDEYSVGCCKEILRTVYKAVPELHFIFLIVPSYMSLGSTLITVFDQVGNIPCLTYEEDFAVHICHRHSHYPQLHVRKARVEDHDDLMPIFMRYDTILKETYGEYFLAELIEAQDEENHAVVCEVEGTAVGFMSVCSRVNMQLLHECFDLGPFHGLCFPHPDDVLESPQDLSVRRSQDAELRSSSQGSQKIVEELQEPVSPDTMENIQLVLSRKCHLLA

SEQ ID NO: 6176 - protein, 328 aa, Artificial Sequence
  Synthetic polypeptide
MSVLTSPRGKVEVVHCRRTESQDVYCIKSLIRKFTCKLFGKLNIIYLLEKANLAVTLCNDKEEIMAQATFLDYPNWNVAKQDDWVSVFRELDSDIPCTPLNTLFMHLFVAVDEYSVGCCKEILRTVYKAVPELHFIFLIVPSYMSLGSTLITVFDQVGNIPCLTYEEDFAVHICHRHSHYPQLHVRKARVEDHDDLMPIFMRYDTILKETYGEYFLAELIEAQDEENHAVVCEVEGTAVGFMSVCSRVNMQLLHECFDLGPFHGLCFPHPDDVLESPQDLSVRRSQDAELRSSSQGSQKIVEELQEPVSPDTMENIQLVLSRKCHLLA

SEQ ID NO: 6177 - protein, 238 aa, Artificial Sequence
  Synthetic polypeptide
MSLTNTKTGFSVKDILDLPDTNDEEGSVAEGPEEENEGPEPAKRAGPLGQGALDAVQSLPLKNPFYDSSDNPYTRWLASTEGLQYSLHGLAAGAPPQDSSSKSPEPSADESPDNDKETPGGGGDAGKKRKRRVLFSKAQTYELERRFRQQRYLSAPEREHLASLIRLTPTQVKIWFQNHRYKMKRARAEKEEEIGTDTQRGGHVRTWEGNATCKPRREASEETSPPDTLILDFQPPEL

SEQ ID NO: 6178 - protein, 239 aa, Artificial Sequence
  Synthetic polypeptide
MSLTNTKTGFSVKDILDLPDTNDEEGSVAEGPEEENEGPEPAKRAGPLGQGALDAVQSLPLKNPFYDSSDNPYTRWLASTEGLQYSLHGLAAGAPPQDSSSKSPEPSADESPDNDKETPGGGGDAGKKRKRRVLFSKAQTYELERRFRQQRYLSAPEREHLASLIRLTPTQVKIWFQNHRYKMKRARAEKAEEEIGTDTQRGGHVRTWEGNATCKPRREASEETSPPDTLILDFQPPEL

SEQ ID NO: 6179 - protein, 191 aa, Artificial Sequence
  Synthetic polypeptide
MSLTNTKTGFSVKDILDLPDTNDEEGSVAEGPEEENEGPEPAKRAGPLGQGALDAVQSLPLKNPFYDSSDNPYTRWLASTEGLQYSLHGLAAGAPPQDSSSKSPEPSADESPDNDKETPGGGGDAGKKRKRRVLFSKAQTYELERRFRQQRYLSAPEREHLASLIRLTPTQVKIWFQNHRYKMKRARAEKG

SEQ ID NO: 6180 - protein, 116 aa, Artificial Sequence
  Synthetic polypeptide
MMLPYPSALGDQYWEEILLPKNGENVETMKKLTQNHKAKGLPSNDTDCPQKKEGKAQIVVPVTFRDVTVIFTEAEWKRLSPEQRNLYKEVMLENYRNLLSLGDRKRDNRTHPLEMV

SEQ ID NO: 6181 - protein, 333 aa, Artificial Sequence
  Synthetic polypeptide
MRKRTEPVALEHERCAAAGSSSSGSAAAALDADCRLKQNLRLTGPAAAEPRCAADAGMKRALGRRKGVWLRLRKILFCVLGLYIAIPFLIKLCPGIQAKLIFLNFVRVPYFIDLKKPQDQGLNHTCNYYLQPEEDVTIGVWHTVPAVWWKNAQGKDQMWYEDALASSHPIILYLHGNAGTRGGDHRVELYKVLSSLGYHVVTFDYRGWGDSVGTPSERGMTYDALHVFDWIKARSGDNPVYIWGHSLGTGVATNLVRRLCERETPPDALILESPFTNIREEAKSHPFSVIYRYFPGFDWFFLDPITSSGIKFANDEKYGGIVYLWSQLHGRLS

SEQ ID NO: 6182 - protein, 101 aa, Artificial Sequence
  Synthetic polypeptide
ARSGDNPVYIWGHSLGTGVATNLVRRLCERETPPDALILESPFTNIREEAKSHPFSVIYRYFPGFDWFFLDPITSSGIKFANDEKYGGIVYLWSQLHGRLS

SEQ ID NO: 6183 - protein, 176 aa, Artificial Sequence
  Synthetic polypeptide
MWYEDALASSHPIILYLHGNAGTRGGDHRVELYKVLSSLGYHVVTFDYRGWGDSVGTPSERGMTYDALHVFDWIKARSGDNPVYIWGHSLGTGVATNLVRRLCERETPPDALILESPFTNIREEAKSHPFSVIYRYFPGFDWFFLDPITSSGIKFANDEKYGGIVYLWSQLHGRLS

SEQ ID NO: 6184 - protein, 147 aa, Artificial Sequence
  Synthetic polypeptide
MRKRTEPVALEHERCAAAGSSSSGSAAAALDADCRLKQNLRLTGPAAAEPRCAADAGMKRALGRRKGVWLRLRKILFCVLGLYIAIPFLIKLCPGIQAKLIFLNFVRVPYFIDLKKPQDQGLNHTCNYYLQPEEDVTIGVWRGGSRL

SEQ ID NO: 6185 - protein, 102 aa, Artificial Sequence
  Synthetic polypeptide
MSGGGHGGVCFLCCILLQGRKGVWLRLRKILFCVLGLYIAIPFLIKLCPGIQAKLIFLNFVRVPYFIDLKKPQDQGLNHTCNYYLQPEEDVTIGVWRGGSRL

SEQ ID NO: 6186 - protein, 26 aa, Artificial Sequence
  Synthetic polypeptide
MFCEKAMELIRELHRAPEGQLPAFNN

SEQ ID NO: 6187 - protein, 159 aa, Artificial Sequence
  Synthetic polypeptide
MREPIYMHSTMVFLPWELHTKKGPSPPEQFMAVKLSDSRIALKSGYGKYLGINSDELVGHSDAIGPREQWEPVFQNGKMALLASNSCFIRCNEAGDIEAKSKTAGEEEMIKIRSCAEKETKKKDDIPEEDKGNVKQCEINYVPKLDCTAAISAHCNLPA

SEQ ID NO: 6188 - protein, 151 aa, Artificial Sequence
  Synthetic polypeptide
MREPIYMHSTMVFLPWELHTKKGPSPPEQFMAVKLSDSRIALKSGYGKYLGINSDELVGHSDAIGPREQWEPVFQNGKMALLASNSCFIRCNEAGDIEAKSKTAGEEEMIKIRSCAEKETKKKDDIPEEDKGNVKQCEINYVVSVIACLHL

SEQ ID NO: 6189 - protein, 182 aa, Artificial Sequence
  Synthetic polypeptide
MREPIYMHSTMVFLPWELHTKKGPSPPEQFMAVKLSDSRIALKSGYGKYLGINSDELVGHSDAIGPREQWEPVFQNGKMALLASNSCFIRCNEAGDIEAKSKTAGEEEMIKIRSCAEKETKKKDDIPEEDKGNVKQCEINYVKKFQSFQDHKLKISKEESKILKKAQKDGFLHETLLDRAET

SEQ ID NO: 6190 - protein, 212 aa, Artificial Sequence
  Synthetic polypeptide
MREPIYMHSTMVFLPWELHTKKGPSPPEQFMAVKLSDSRIALKSGYGKYLGINSDELVGHSDAIGPREQWEPVFQNGKMALLASNSCFIRCNEAGDIEAKSKTAGEEEMIKIRSCAEKETKKKDDIPEEDKGNVKQCEINYVKKFQSFQDHKLKISKEESKILKKAQKDGFLHETLLDRDQATHGVPRQPRHCMQSSQTRSHCNHVSTGAQV

SEQ ID NO: 6191 - protein, 187 aa, Artificial Sequence
  Synthetic polypeptide
MREPIYMHSTMVFLPWELHTKKGPSPPEQFMAVKLSDSRIALKSGYGKYLGINSDELVGHSDAIGPREQWEPVFQNGKMALLASNSCFIRCNEAGDIEAKSKTAGEEEMIKIRSCAEKETKKKDDIPEEDKGNVKQCEINYVKKFQSFQDHKLKISKEESKILKKAQKDGFLHETLLDRKHCPPSFS

SEQ ID NO: 6192 - protein, 311 aa, Artificial Sequence
  Synthetic polypeptide
MDSWFILVLLGSGLICVSANNATTVAPSVGITRLINSSTAEPVKEEAKTSNPTSSLTSLSVAPTFSPNITLGPTYLTTVNSSDSDNGTTRTASTNSIGITISPNGTWLPDNQFTDARTEPWEGNSSTAATTPETFPPSGNSDSKDRRDETPIIAVMVALSSLLVIVFIIIVLYMLRFKKYKQAGSHSNSFRLSNGRTEDVEPQSVPLLARSPSTNRKYPPLPVDKLEEEINRRMADDNKLFREEFNALPACPIQATCEAASKEENKEKNRYVNILPYDHSRVHLTPVEGVPDSDYINASFINPGGSTPSVH

SEQ ID NO: 6193 - protein, 302 aa, Artificial Sequence
  Synthetic polypeptide
MDSWFILVLLGSGLICVSANNATTVAPSVGITRLINSSTAEPVKEEAKTSNPTSSLTSLSVAPTFSPNITLGPTYLTTVNSSDSDNGTTRTASTNSIGITISPNGTWLPDNQFTDARTEPWEGNSSTAATTPETFPPSDETPIIAVMVALSSLLVIVFIIIVLYMLRFKKYKQAGSHSNSFRLSNGRTEDVEPQSVPLLARSPSTNRKYPPLPVDKLEEEINRRMADDNKLFREEFNALPACPIQATCEAASKEENKEKNRYVNILPYDHSRVHLTPVEGVPDSDYINASFINPGGSTPSVH

SEQ ID NO: 6194 - protein, 167 aa, Artificial Sequence
  Synthetic polypeptide
MVALSSLLVIVFIIIVLYMLRRFRKAELMSRNTEKYKQAGSHSNSFRLSNGRTEDVEPQSVPLLARSPSTNRKYPPLPVDKLEEEINRRMADDNKLFREEFNALPACPIQATCEAASKEENKEKNRYVNILPYDHSRVHLTPVEGVPDSDYINASFINPGGSTPSVH

SEQ ID NO: 6195 - protein, 322 aa, Artificial Sequence
  Synthetic polypeptide
MDDAVQITKISMDSWFILVLLGSGLICVSANNATTVAPSVGITRLINSSTAEPVKEEAKTSNPTSSLTSLSVAPTFSPNITLGPTYLTTVNSSDSDNGTTRTASTNSIGITISPNGTWLPDNQFTDARTEPWEGNSSTAATTPETFPPSGNSDSKDRRDETPIIAVMVALSSLLVIVFIIIVLYMLRFKKYKQAGSHSNSFRLSNGRTEDVEPQSVPLLARSPSTNRKYPPLPVDKLEEEINRRMADDNKLFREEFNALPACPIQATCEAASKEENKEKNRYVNILPYDHSRVHLTPVEGVPDSDYINASFINPGGSTPSVH

SEQ ID NO: 6196 - protein, 312 aa, Artificial Sequence
  Synthetic polypeptide
MDSWFILVLLGSGLICVSANNATTVAPSVGITRLINSSTAEPVKEEAKTSNPTSSLTSLSVAPTFSPNITLGPTYLTTVNSSDSDNGTTRTASTNSIGITISPNGTWLPDNQFTDARTEPWEGNSSTAATTPETFPPSGNSDSKDRRDETPIIAVMVALSSLLVIVFIIIVLYMLRFKKYKQAGSHSNSFRLSNGRTEDVEPQSVPLLARSPSTNRKYPPLPVDKLEEEINRRMADDNKLFREEFNALPACPIQATCEAASKEENKEKNRYVNILPYDHSRVHLTPVEGVPDSDYINASFINVGALQVSIDG

SEQ ID NO: 6197 - protein, 303 aa, Artificial Sequence
  Synthetic polypeptide
MDSWFILVLLGSGLICVSANNATTVAPSVGITRLINSSTAEPVKEEAKTSNPTSSLTSLSVAPTFSPNITLGPTYLTTVNSSDSDNGTTRTASTNSIGITISPNGTWLPDNQFTDARTEPWEGNSSTAATTPETFPPSDETPIIAVMVALSSLLVIVFIIIVLYMLRFKKYKQAGSHSNSFRLSNGRTEDVEPQSVPLLARSPSTNRKYPPLPVDKLEEEINRRMADDNKLFREEFNALPACPIQATCEAASKEENKEKNRYVNILPYDHSRVHLTPVEGVPDSDYINASFINVGALQVSIDG

SEQ ID NO: 6198 - protein, 168 aa, Artificial Sequence
  Synthetic polypeptide
MVALSSLLVIVFIIIVLYMLRRFRKAELMSRNTEKYKQAGSHSNSFRLSNGRTEDVEPQSVPLLARSPSTNRKYPPLPVDKLEEEINRRMADDNKLFREEFNALPACPIQATCEAASKEENKEKNRYVNILPYDHSRVHLTPVEGVPDSDYINASFINVGALQVSIDG

SEQ ID NO: 6199 - protein, 323 aa, Artificial Sequence
  Synthetic polypeptide
MDDAVQITKISMDSWFILVLLGSGLICVSANNATTVAPSVGITRLINSSTAEPVKEEAKTSNPTSSLTSLSVAPTFSPNITLGPTYLTTVNSSDSDNGTTRTASTNSIGITISPNGTWLPDNQFTDARTEPWEGNSSTAATTPETFPPSGNSDSKDRRDETPIIAVMVALSSLLVIVFIIIVLYMLRFKKYKQAGSHSNSFRLSNGRTEDVEPQSVPLLARSPSTNRKYPPLPVDKLEEEINRRMADDNKLFREEFNALPACPIQATCEAASKEENKEKNRYVNILPYDHSRVHLTPVEGVPDSDYINASFINVGALQVSIDG

SEQ ID NO: 6200 - protein, 33 aa, Artificial Sequence
  Synthetic polypeptide
MTQLLLFLVALLVLGHVPSACPVPAIAGARHHA

SEQ ID NO: 6201 - protein, 242 aa, Artificial Sequence
  Synthetic polypeptide
MDSALSDPHNGSAEAGGPTNSTTRPPSTPEGIALAYGSLLLMALLPIFFGALRSVRCARGKNASDMPETITSRDAARFPIIASCTLLGLYLFFKIFSQEYINLLLSMYFFVLGILALSHTISPFMNKFFPASFPNRQYQLLFTQGSGENKEEIINYEFDTKDLVCLGLSSIVGVWYLLRKHWIANNLFGLAFSLNGVELLHLNNVSTGCILLGGLFIYDVFWVFGTNVMVTVAKSFEAPIKC

SEQ ID NO: 6202 - protein, 200 aa, Artificial Sequence
  Synthetic polypeptide
MDSALSDPHNGSAEAGGPTNSTTRPPSTPEGIALAYGSLLLMALLPIFFGALRSVRCARGKNASDMPETITSRDAARFPIIASCTLLGLYLFFKIFSQEYINLLLSMYFFVLGILALSHTISPFMNKFFPASFPNRQYQLLFTQGSGENKEEIINYEFDTKDLVCLGLSSIVGVWYLLRKVFGTNVMVTVAKSFEAPIKC

SEQ ID NO: 6203 - protein, 241 aa, Artificial Sequence
  Synthetic polypeptide
MDSALSDPHNGSAEAGGPTNSTTRPPSTPEGIALAYGSLLLMALLPIFFGALRSVRCARGKNASDMPETITSRDAARFPIIASCTLLGLYLFFKIFSQEYINLLLSMYFFVLGILALSHTISPFMNKFFPASFPNRQYQLLFTQGSGENKEEIINYEFDTKDLVCLGLSSIVGVWYLLRKHWIANNLFGLAFSLNGVELLHLNNVSTGCILLGGLFIYDVFWVFGTNVMVTVAKSFEAPIK

SEQ ID NO: 6204 - protein, 199 aa, Artificial Sequence
  Synthetic polypeptide
MDSALSDPHNGSAEAGGPTNSTTRPPSTPEGIALAYGSLLLMALLPIFFGALRSVRCARGKNASDMPETITSRDAARFPIIASCTLLGLYLFFKIFSQEYINLLLSMYFFVLGILALSHTISPFMNKFFPASFPNRQYQLLFTQGSGENKEEIINYEFDTKDLVCLGLSSIVGVWYLLRKVFGTNVMVTVAKSFEAPIK

SEQ ID NO: 6205 - protein, 309 aa, Artificial Sequence
  Synthetic polypeptide
MSQSNRELVVDFLSYKLSQKGYSWSQFSDVEENRTEAPEGTESEMETPSAINGNPSWHLADSPAVNGATGHSSSLDAREVIPMAAVKQALREAGDEFELRYRRAFSDLTSQLHITPGTAYQSFEQVVNELFRDGVNWGRIVAFFSFGGALCVESVDKEMQVLVSRIAAWMATYLNDHLEPWIQENGGWTPGDLHPAARRTLFNTKVRSCPSPAQNPTVLSQDKPKSLNGLPGPTQSGPWLPPDLITTSLLTFTGLQPHWHFSCSWSTSSVFLPLGLCTCSHSLFSDLCSACFLISFRSLIKFTSLRSCP

SEQ ID NO: 6206 - protein, 741 aa, Artificial Sequence
  Synthetic polypeptide
MSQVKSSYSYDAPSDFINFSSLDDEGDTQNIDSWFEEKANLENKLLGKNGTGGLFQGKTPLRKANLQQAIVTPLKPVDNTYYKEAEKENLVEQSIPSNACSSLEVEAAISRKTPAQPQRRSLRLSAQKDLEQKEKHHVKMKAKRCATPVIIDEILPSKKMKVSNNKKKPEEEGSAHQDTAEKNASSPEKAKGRHTVPCMPPAKQKFLKSTEEQELEKSMKMQQEVVEMRKKNEEFKKLALAGIGQPVKKSVSQVTKSVDFHFRTDERIKQHPKNQEEYKEVNFTSELRKHPSSPARVTKGCTIVKPFNLSQGKKRTFDETVSTYVPLAQQVEDFHKRTPNRYHLRSKKDDINLLPSKSSVTKICRDPQTPVLQTKHRARAVTCKSTAELEAEELEKLQQYKFKARELDPRILEGGPILPKKPPVKPPTEPIGFDLEIEKRIQERESKKKTEDEHFEFHSRPCPTKILEDVVGVPEKKVLPITVPKSPAFALKNRIRMPTKEDEEEDEPVVIKAQPVPHYGVPFKPQIPEARTVEICPFSFDSRDKERQLQKEKKIKELQKGEVPKFKALPLPHFDTINLPEKKVKNVTQIEPFCLETDRRGALKAQTWKHQLEEELRQQKEAACFKARPNTVISQEPFVPKKEKKSVAEGLSGSLVQEPFQLATEKRAKERQELEKRMAEVEAQKAQQLEEARLQEEEQKKEELARLRRELYLPHWVLLKTIWVDQHESMQSEARHVVSTV

SEQ ID NO: 6207 - protein, 777 aa, Artificial Sequence
  Synthetic polypeptide
MSQVKSSYSYDAPSDFINFSSLDDEGDTQNIDSWFEEKANLENKLLGKNGTGGLFQGKTPLRKANLQQAIVTPLKPVDNTYYKEAEKENLVEQSIPSNACSSLEVEAAISRKTPAQPQRRSLRLSAQKDLEQKEKHHVKMKAKRCATPVIIDEILPSKKMKVSNNKKKPEEEGSAHQDTAEKNASSPEKAKGRHTVPCMPPAKQKFLKSTEEQELEKSMKMQQEVVEMRKKNEEFKKLALAGIGQPVKKSVSQVTKSVDFHFRTDERIKQHPKNQEEYKEVNFTSELRKHPSSPARVTKGCTIVKPFNLSQGKKRTFDETVSTYVPLAQQVEDFHKRTPNRYHLRSKKDDIKTGSCSVTQAGVQWRDHGSLQCPTPGLKQSSCLSLPNLLPSKSSVTKICRDPQTPVLQTKHRARAVTCKSTAELEAEELEKLQQYKFKARELDPRILEGGPILPKKPPVKPPTEPIGFDLEIEKRIQERESKKKTEDEHFEFHSRPCPTKILEDVVGVPEKKVLPITVPKSPAFALKNRIRMPTKEDEEEDEPVVIKAQPVPHYGVPFKPQIPEARTVEICPFSFDSRDKERQLQKEKKIKELQKGEVPKFKALPLPHFDTINLPEKKVKNVTQIEPFCLETDRRGALKAQTWKHQLEEELRQQKEAACFKARPNTVISQEPFVPKKEKKSVAEGLSGSLVQEPFQLATEKRAKERQELEKRMAEVEAQKAQQLEEARLQEEEQKKEELARLRRELYLPHWVLLKTIWVDQHESMQSEARHVVSTV

SEQ ID NO: 6208 - protein, 55 aa, Artificial Sequence
  Synthetic polypeptide
MLSPEAERVLRYLVEVEELAEEVLADKRQIVDLDTKRNQNREGLRALQKDLSLSG

SEQ ID NO: 6209 - protein, 530 aa, Artificial Sequence
  Synthetic polypeptide
MATAMDWLPWSLLLFSLMCETSAFYVPGVAPINFHQNDPVEIKAVKLTSSRTQLPYEYYSLPFCQPSKITYKAENLGEVLRGDRIVNTPFQVLMNSEKKCEVLCSQSNKPVTLTVEQSRLVAERITEDYYVHLIADNLPVATRLELYSNRDSDDKKKEKDVQFEHGYRLGFTDVNKIYLHNHLSFILYYHREDMEEDQEHTYRVVRFEVIPQSIRLEDLKADEKSSCTLPEGTNSSPQEIDPTKENQLYFTYSVHWEESDIKWASRWDTYLTMSDVQIHWFSIINSVVVVFFLSGILSMIIIRTLRKDIANYNKEDDIEDTMEESGWKLVHGDVFRPPQYPMILSSLLGSGIQLFCMILIVIFVAMLGMLSPSSRGALMTTACFLFMFMGVFGGFSAGRLYRTLKGHRWKKGAFCTATLYPGVVFGICFVLNCFIWGKHSSGAVPFPTMVALLCMWFGISLPLVYLGYYFGFRKQPYDNPVRTNQIPRQIPEQRWYMNRFVGILMAGILPFGAMFIELFFIFSLLGGWTE

SEQ ID NO: 6210 - protein, 513 aa, Artificial Sequence
  Synthetic polypeptide
MCETSAFYVPGVAPINFHQNDPVEIKAVKLTSSRTQLPYEYYSLPFCQPSKITYKAENLGEVLRGDRIVNTPFQVLMNSEKKCEVLCSQSNKPVTLTVEQSRLVAERITEDYYVHLIADNLPVATRLELYSNRDSDDKKKEKDVQFEHGYRLGFTDVNKIYLHNHLSFILYYHREDMEEDQEHTYRVVRFEVIPQSIRLEDLKADEKSSCTLPEGTNSSPQEIDPTKENQLYFTYSVHWEESDIKWASRWDTYLTMSDVQIHWFSIINSVVVVFFLSGILSMIIIRTLRKDIANYNKEDDIEDTMEESGWKLVHGDVFRPPQYPMILSSLLGSGIQLFCMILIVIFVAMLGMLSPSSRGALMTTACFLFMFMGVFGGFSAGRLYRTLKGHRWKKGAFCTATLYPGVVFGICFVLNCFIWGKHSSGAVPFPTMVALLCMWFGISLPLVYLGYYFGFRKQPYDNPVRTNQIPRQIPEQRWYMNRFVGILMAGILPFGAMFIELFFIFSLLGGWTE

SEQ ID NO: 6211 - protein, 626 aa, Artificial Sequence
  Synthetic polypeptide
MATAMDWLPWSLLLFSLMCETSAFYVPGVAPINFHQNDPVEIKAVKLTSSRTQLPYEYYSLPFCQPSKITYKAENLGEVLRGDRIVNTPFQVLMNSEKKCEVLCSQSNKPVTLTVEQSRLVAERITEDYYVHLIADNLPVATRLELYSNRDSDDKKKEKDVQFEHGYRLGFTDVNKIYLHNHLSFILYYHREDMEEDQEHTYRVVRFEVIPQSIRLEDLKADEKSSCTLPEGTNSSPQEIDPTKENQLYFTYSVHWEESDIKWASRWDTYLTMSDVQIHWFSIINSVVVVFFLSGILSMIIIRTLRKDIANYNKEDDIEDTMEESGWKLVHGDVFRPPQYPMILSSLLGSGIQLFCMILIVIFVAMLGMLSPSSRGALMTTACFLFMFMGVFGGFSAGRLYRTLKGHRWKKGAFCTATLYPGVVFGICFVLNCFIWGKHSSGAVPFPTMVALLCMWFGISLPLVYLGYYFGFRKQPYDNPVRTNQIPRQIPEQRWYMNRFVGILMAGILPFGAMFIELFFIFSAIWENQFYYLFGFLFLVFIILVVSCSQISIVMVYFQLCAEDYRWWWRNFLVSGGSAFYVLVYAIFYFVNKPAECLRLQARAATPDWFWWRRGFAVLAGPVSSP

SEQ ID NO: 6212 - protein, 609 aa, Artificial Sequence
  Synthetic polypeptide
MCETSAFYVPGVAPINFHQNDPVEIKAVKLTSSRTQLPYEYYSLPFCQPSKITYKAENLGEVLRGDRIVNTPFQVLMNSEKKCEVLCSQSNKPVTLTVEQSRLVAERITEDYYVHLIADNLPVATRLELYSNRDSDDKKKEKDVQFEHGYRLGFTDVNKIYLHNHLSFILYYHREDMEEDQEHTYRVVRFEVIPQSIRLEDLKADEKSSCTLPEGTNSSPQEIDPTKENQLYFTYSVHWEESDIKWASRWDTYLTMSDVQIHWFSIINSVVVVFFLSGILSMIIIRTLRKDIANYNKEDDIEDTMEESGWKLVHGDVFRPPQYPMILSSLLGSGIQLFCMILIVIFVAMLGMLSPSSRGALMTTACFLFMFMGVFGGFSAGRLYRTLKGHRWKKGAFCTATLYPGVVFGICFVLNCFIWGKHSSGAVPFPTMVALLCMWFGISLPLVYLGYYFGFRKQPYDNPVRTNQIPRQIPEQRWYMNRFVGILMAGILPFGAMFIELFFIFSAIWENQFYYLFGFLFLVFIILVVSCSQISIVMVYFQLCAEDYRWWWRNFLVSGGSAFYVLVYAIFYFVNKPAECLRLQARAATPDWFWWRRGFAVLAGPVSSP

SEQ ID NO: 6213 - protein, 641 aa, Artificial Sequence
  Synthetic polypeptide
MATAMDWLPWSLLLFSLMCETSAFYVPGVAPINFHQNDPVEIKAVKLTSSRTQLPYEYYSLPFCQPSKITYKAENLGEVLRGDRIVNTPFQVLMNSEKKCEVLCSQSNKPVTLTVEQSRLVAERITEDYYVHLIADNLPVATRLELYSNRDSDDKKKEKDVQFEHGYRLGFTDVNKIYLHNHLSFILYYHREDMEEDQEHTYRVVRFEVIPQSIRLEDLKADEKSSCTLPEGTNSSPQEIDPTKENQLYFTYSVHWEESDIKWASRWDTYLTMSDVQIHWFSIINSVVVVFFLSGILSMIIIRTLRKDIANYNKEDDIEDTMEESGWKLVHGDVFRPPQYPMILSSLLGSGIQLFCMILIVIFVAMLGMLSPSSRGALMTTACFLFMFMGVFGGFSAGRLYRTLKGHRWKKGAFCTATLYPGVVFGICFVLNCFIWGKHSSGAVPFPTMVALLCMWFGISLPLVYLGYYFGFRKQPYDNPVRTNQIPRQIPEQRWYMNRFVGILMAGILPFGAMFIELFFIFSAIWENQFYYLFGFLFLVFIILVVSCSQISIVMVYFQLCAEDYRWWWRNFLVSGGSAFYVLVYAIFYFVNKPPALASQSAEIAASARPPPRLGSEECLCLAAHRLGCEEPLCLAAQSGK

SEQ ID NO: 6214 - protein, 624 aa, Artificial Sequence
  Synthetic polypeptide
MCETSAFYVPGVAPINFHQNDPVEIKAVKLTSSRTQLPYEYYSLPFCQPSKITYKAENLGEVLRGDRIVNTPFQVLMNSEKKCEVLCSQSNKPVTLTVEQSRLVAERITEDYYVHLIADNLPVATRLELYSNRDSDDKKKEKDVQFEHGYRLGFTDVNKIYLHNHLSFILYYHREDMEEDQEHTYRVVRFEVIPQSIRLEDLKADEKSSCTLPEGTNSSPQEIDPTKENQLYFTYSVHWEESDIKWASRWDTYLTMSDVQIHWFSIINSVVVVFFLSGILSMIIIRTLRKDIANYNKEDDIEDTMEESGWKLVHGDVFRPPQYPMILSSLLGSGIQLFCMILIVIFVAMLGMLSPSSRGALMTTACFLFMFMGVFGGFSAGRLYRTLKGHRWKKGAFCTATLYPGVVFGICFVLNCFIWGKHSSGAVPFPTMVALLCMWFGISLPLVYLGYYFGFRKQPYDNPVRTNQIPRQIPEQRWYMNRFVGILMAGILPFGAMFIELFFIFSAIWENQFYYLFGFLFLVFIILVVSCSQISIVMVYFQLCAEDYRWWWRNFLVSGGSAFYVLVYAIFYFVNKPPALASQSAEIAASARPPPRLGSEECLCLAAHRLGCEEPLCLAAQSGK

SEQ ID NO: 6215 - protein, 597 aa, Artificial Sequence
  Synthetic polypeptide
MSKLKSSESVRVVVRCRPMNGKEKAASYDKVVDVDVKLGQVSVKNPKGTAHEMPKTFTFDAVYDWNAKQFELYDETFRPLVDSVLQGFNGTIFAYGQTGTGKTYTMEGIRGDPEKRGVIPNSFDHIFTHISRSQNQQYLVRASYLEIYQEEIRDLLSKDQTKRLELKERPDTGVYVKDLSSFVTKSVKEIEHVMNVGNQNRSVGATNMNEHSSRSHAIFVITIECSEVGLDGENHIRVGKLNLVDLAGSERQAKTGAQGERLKEATKINLSLSALGNVISALVDGKSTHIPYRDSKLTRLLQDSLGGNAKTVMVANVGPASYNVEETLTTLRYANRAKNIKNKPRVNEDPKDALLREFQEEIARLKAQLEKRSIGRRKRREKRREGGGSGGGGEEEEEEGEEGEEEGDDKDDYWREQQEKLEIEKRAIVEDHSLVAEEKMRLLKEKEKKMEDLRREKDAAEMLGAKIKAMESKLLVGGKNIVDHTNEQQKILEQKRQEIAEQKRREREIQQQMESRDEETLELKETYSSLQQEVDIKTKKLKKLFSKLQAVKAEIHDLQEEHIKERQELEQTQNELTRELKLKYYIFYKLKVCGNPA

SEQ ID NO: 6216 - protein, 223 aa, Artificial Sequence
  Synthetic polypeptide
MVANVGPASYNVEETLTTLRYANRAKNIKNKPRVNEDPKDALLREFQEEIARLKAQLEKRSIEEKMRLLKEKEKKMEDLRREKDAAEMLGAKIKAMESKLLVGGKNIVDHTNEQQKILEQKRQEIAEQKRREREIQQQMESRDEETLELKETYSSLQQEVDIKTKKLKKLFSKLQAVKAEIHDLQEEHIKERQELEQTQNELTRELKLKYYIFYKLKVCGNPA

SEQ ID NO: 6217 - protein, 191 aa, Artificial Sequence
  Synthetic polypeptide
MKDKQKKKKERTWAEAARLVLENYSDAPMTPKQILQVIEAEGLKEMRSGTSPLACLNAMLHSNSRGGEGLFYKLPGRISLFTLKKDALQWSRHPATVEGEEPEDTADVESCGSNEASTVSGENDVSLDETSSNASCSTESQSRPLSNPRDSYRASSQANKQKKKTGVMLPRVVLTPLKVNGAHVESASGQS

SEQ ID NO: 6218 - protein, 186 aa, Artificial Sequence
  Synthetic polypeptide
MGVVNFVFRASEDLQVLENYSDAPMTPKQILQVIEAEGLKEMSGTSPLACLNAMLHSNSRGGEGLFYKLPGRISLFTLKKDALQWSRHPATVEGEEPEDTADVESCGSNEASTVSGENDVSLDETSSNASCSTESQSRPLSNPRDSYRASSQANKQKKKTGVMLPRVVLTPLKVNGAHVESASGQS

SEQ ID NO: 6219 - protein, 294 aa, Artificial Sequence
  Synthetic polypeptide
MACAGLLTVCLLRPPAPQPQPQTPRHPQLAPDPGPAGHTLFQDVFRRADKNDDGKLSFEEFQNYFADGVLSLGELQELFSGIDGHLTDNLETEKLCDYFSEHLGVYRPVLAALESLNRAVLAAMDATKLEYERASKVDQFVTRFLLRETVSQLQALQSSLEGASDTLEAQAHGWRSDAESVEAQSRLCGSRRAGRRALRSVSRSSTWSPGSSDTGRSSEAEMQWRLQVNRLQELIDQLECKVRAVGPGPHKGGPSWYPPEPGPCWRPGPHSVPSQAPRLEPLREEDLAKGPDLK

SEQ ID NO: 6220 - protein, 260 aa, Artificial Sequence
  Synthetic polypeptide
MACAGLLTVCLLRPPAPQPQPQTPRHPQLAPDPGPAGHTLFQDVFRRADKNDDGKLSFEEFQNYFADGVLSLGELQELFSGIDGHLTDNLETEKLCDYFSEHLGVYRPVLAALESLNRAVLAAMDATKLEYERASKVDQFVTRFLLRETVSQLQALQSSLEGASDTLEAQAHGWRSDAESVEAQSRLCGSRRAGRRALRSVSRSSTWSPGSSDTGRSSEAEMQWRLQVNRLQELIDQLECKAPRLEPLREEDLAKGPDLK

SEQ ID NO: 6221 - protein, 39 aa, Artificial Sequence
  Synthetic polypeptide
MQWRLQVNRLQELIDQLECKAPRLEPLREEDLAKGPDLK

SEQ ID NO: 6222 - protein, 34 aa, Artificial Sequence
  Synthetic polypeptide
MSDKLPYKVGLPGSLAPQIHTAANGVFSKDKSGL

SEQ ID NO: 6223 - protein, 604 aa, Artificial Sequence
  Synthetic polypeptide
MDVYPPRRQGLPRARSPGGSSRGSPSVSCSRLRQVQSILTQSSKSRPDGILCILGIDSRYNEGCRELANYLLFGLYNQNTSDFEKTGFSEEVLDDVIILIKSDSVHLYCNPVNFRYLLPYVAHWRNLHFHCMTENEYEDEEAAEEFKITSFVDMVRDCSRIGIPYSSQGHLQIFDMFVVEKWPIVQAFALEGIGGDGFFTMKYELQDVSLNLWNVYSKMDPMSLESLLSDDLVAFEHQWTSFFANFDTEIPFLLELSESQAGEPFRSYFSHGMISSHITENSPNRQPFVLFGNHSTRENLNAGNFNFPSEGHLVRSTGPGGSFAKHMVAQCVSPKGPLACSRTYFFGATHVPYLGGDSKLPKKTEQIRLLSQIYAAVIEAVLAGIACYAKTSSLTKAKEVAEQTLGSGLDSFELIPFKAALRSKMTFHIHAVNNQGRIVPLDSEDSLSFVKTACMAVYDIPDLLGGNGCLGSVVFSESFLTSQILVKEKDGTVTTETSSVVLTAAVPRFCSWLVEDNEVKLSEKTQQAVRGDESFLGTYLTGGEGAYLYSSNLQSWPEEGKKKPTSFLKILKSQHKNVNNFEQSAKNSQDTPEEEKQGGNLPYH

SEQ ID NO: 6224 - protein, 342 aa, Artificial Sequence
  Synthetic polypeptide
MEGCLGQELFSNHMFLTSLSSPNRQPFVLFGNHSTRENLNAGNFNFPSEGHLVRSTGPGGSFAKHMVAQCVSPKGPLACSRTYFFGATHVPYLGGDSKLPKKTEQMLLSQIYAAVIEAVLAGIACYAKTSSLTKAKEVAEQTLGSGLDSFELIPFKAALRSKMTFHIHAVNNQGRIVPLDSEDSLSFVKTACMAVYDIPDLLGGNGCLGSVVFSESFLTSQILVKEKDGTVTTETSSVVLTAAVPRFCSWLVEDNEVKLSEKTQQAVRGDESFLGTYLTGGEGAYLYSSNLQSWPEEGKKKPTSFLKILKSQHKNVNNFEQSAKNSQDTPEEEKQGGNLPYH

SEQ ID NO: 6225 - protein, 178 aa, Artificial Sequence
  Synthetic polypeptide
MSDSGSQLGSMGSLTMKSQLQITVISAKLKENKKNWFGPSPYVEVTVDGQSKKTEKCNNTNSPKWKQPLTVIVTPVSKLHFRVWSHQTLKSDVLLGTAALDIYETLKSNNMKLEEVVVTLQLGGDKEPTETIGDLSICLDGLQLESEVVTNGETTCSESMVAHTCNPSTLGSQGGRIT

SEQ ID NO: 6226 - protein, 68 aa, Artificial Sequence
  Synthetic polypeptide
MKLEEVVVTLQLGGDKEPTETIGDLSICLDGLQLESEVVTNGETTCSESMVAHTCNPSTLGSQGGRIT

SEQ ID NO: 6227 - protein, 68 aa, Artificial Sequence
  Synthetic polypeptide
MGEGWAAALQPRVLGPWCAMATLATFPGSSVCGRLCQALYVSCISSASSQLCEAEVERSPEPRRSRLQ

SEQ ID NO: 6228 - protein, 216 aa, Artificial Sequence
  Synthetic polypeptide
MAAPLVLVLVVAVTVRAALFRSSLAEFISERVEVVSPLSSWKRVVEGLSLLDLGVSPYSGAVFHETPLIIYLFHFLIDYAELVFMITDALTAIALYFAIQDFNKVVFKKQKLLLELDQYAPDVAELIRTPMEMRYIPLKVALFYLLNPYTILSCVAKSTCAINNTLIAFFILTTIKGSAFLSAIFLALATYQSLYPLTLFVPGLLYLLQVLSINNC

SEQ ID NO: 6229 - protein, 196 aa, Artificial Sequence
  Synthetic polypeptide
MAAPLVLVLVVAVTVRAALFRSSLAEFISERVEVVSPLSSWKRVVEGLSLLDLGVSPYSGAVFHEITDALTAIALYFAIQDFNKVVFKKQKLLLELDQYAPDVAELIRTPMEMRYIPLKVALFYLLNPYTILSCVAKSTCAINNTLIAFFILTTIKGSAFLSAIFLALATYQSLYPLTLFVPGLLYLLQVLSINNC

SEQ ID NO: 6230 - protein, 22 aa, Artificial Sequence
  Synthetic polypeptide
VSVPTHLVCPRTPLSPPGTEHQ

SEQ ID NO: 6231 - protein, 329 aa, Artificial Sequence
  Synthetic polypeptide
MDVYPPRRQGLPRARSPGGSSRGSPSVSCSRLRQVQSILTQSSKSRPDGILCILGIDSRYNEGCRELANYLLFGLYNQNTSDFEKTGFSEEVLDDVIILIKSDSVHLYCNPVNFRYLLPYVAHWRNLHFHCMTENEYEDEEAAEEFKITSFVDMVRDCSRIGIPYSSQGHLQIFDMFVVEKWPIVQAFALEGIGGDGFFTMKYELQDVSLNLWNVYSKMDPMSLESLLSDDLVAFEHQWTSFFANFDTEIPFLLELSESQAGEPFRSYFSHGMISSHITENSPNRQPFVLFGNHSTRENLNAGNFNFPSEGHLVRSTGPGGSFAKHMKP

SEQ ID NO: 6232 - protein, 68 aa, Artificial Sequence
  Synthetic polypeptide
MEGCLGQELFSNHMFLTSLSSPNRQPFVLFGNHSTRENLNAGNFNFPSEGHLVRSTGPGGSFAKHMKP

SEQ ID NO: 6233 - protein, 185 aa, Artificial Sequence
  Synthetic polypeptide
MAAPLVLVLVVAVTVRAALFRSSLAEFISERVEVVSPLSSWKRVVEGLSLLDLGVSPYSGAVFHETPLIIYLFHFLIDYAELVFMITDALTAIALYFAIQDFNKVVFKKQKLLLELDQYAPDVAELIRTPMEMRYIPLKVALFYLLNPYTILSCVAKSTCAINNTLIAFFILTTIKVSLSVKWGQ

SEQ ID NO: 6234 - protein, 165 aa, Artificial Sequence
  Synthetic polypeptide
MAAPLVLVLVVAVTVRAALFRSSLAEFISERVEVVSPLSSWKRVVEGLSLLDLGVSPYSGAVFHEITDALTAIALYFAIQDFNKVVFKKQKLLLELDQYAPDVAELIRTPMEMRYIPLKVALFYLLNPYTILSCVAKSTCAINNTLIAFFILTTIKVSLSVKWGQ

SEQ ID NO: 6235 - protein, 311 aa, Artificial Sequence
  Synthetic polypeptide
MDVYPPRRQGLPRARSPGGSSRGSPSVSCSRLRQVQSILTQSSKSRPDGILCILGIDSRYNEGCRELANYLLFGLYNQNTSDFEKTGFSEEVLDDVIILIKSDSVHLYCNPVNFRYLLPYVAHWRNLHFHCMTENEYEDEEAAEEFKITSFVDMVRDCSRIGIPYSSQGHLQIFDMFVVEKWPIVQAFALEGIGGDGFFTMKYELQDVSLNLWNVYSKMDPMSLESLLSDDLVAFEHQWTSFFANFDTEIPFLLELSESQAGEPFRSYFSHGMISSHITENSQVRWLMPVIPAFWEAKVGRSPEVRSSRPG

SEQ ID NO: 6236 - protein, 1965 aa, Artificial Sequence
  Synthetic polypeptide
MVLDDLPNLEDIYTSLCSSTMEDSEMDFDSGLEDDDTKSDSILEDSTIFVAFKGNIDDKDFKWKLDAILKNVPNLLHMESSKLKVQKVEPWNSVRVTFNIPREAAERLRILAQSNNQQLRDLGILSVQIEGEGAINLALAQNRSQDVRMNGPMGAGNSVRMEAGFPMASGPGIIRMNNPATVMIPPGGNVSSSMMAPGPNPELQPRTPRPASQSDAMDPLLSGLHIQQQSHPSGSLAPPHHPMQPVSVNRQMNPANFPQLQQQQQQQQQQQQQQQQQQQQQQQQQLQARPPQQHQQQQPQGIRPQFTAPTQVPVPPGWNQLPSGALQPPPAQGSLGTMTANQGWKKAPLPGPMQQQLQARPSLATVQTPSHPPPPYPFGSQQASQAHTNFPQMSNPGQFTAPQMKSLQGGPSRVPTPLQQPHLTNKSPASSPSSFQQGSPASSPTVNQTQQQMGPRPPQNNPLPQGFQQPVSSPGRNPMVQQGNVPPNFMVMQQQPPNQGPQSLHPGLGGMPKRLPPGFSAGQANPNFMQGQVPSTTATTPGNSGAPQLQANQNVQHAGGQGAGPPQNQMQVSHGPPNMMQPSLMGIHGNMNNQQAGTSGVPQVNLSNMQGQPQQGPPSQLMGMHQQIVPSQGQMVQQQGTLNPQNPMILSRAQLMPQGQMMVNPPSQNLGPSPQRMTPPKQMLSQQGPQMMAPHNQMMGPQGQVLLQQNPMIEQIMTNQMQGNKQQFNTQNQSNVMPGPAQIMRGPTPNMQGNMVQFTGQMSGQMLPQQGPVNNSPSQVMGIQGQVLRPPGPSPHMAQQHGDPATTANNDVSLSQMMPDVSIQQTNMVPPHVQAMQGNSASGNHFSGHGMSFNAPFSGAPNGNQMSCGQNPGFPVNKDVTLTSPLLVNLLQSDISAGHFGVNNKQNNTNANKPKKKKPPRKKKNSQQDLNTPDTRPAGLEEADQPPLPGEQGINLDNSGPKLPEFSNRPPGYPSQPVEQRPLQQMPPQLMQHVAPPPQPPQQQPQPQLPQQQQPPPPSQPQSQQQQQQQQQMMMMLMMQQDPKSVRLPVSQNVHPPRGPLNPDSQRMPMQQSGSVPVMVSLQGPASVPPSPDKQRMPMPVNTPLGSNSRKMVYQESPQNPSSSPLAEMASLPEASGSEAPSVPGGPNNMPSHVVLPQNQLMMTGPKPGPSPLSATQGATPQQPPVNSLPSSHGHHFPNVAAPTQTSRPKTPNRASPRPYYPQTPNNRPPSTEPSEISLSPERLNASIAGLFPPQINIPLPPRPNLNRGFDQQGLNPTTLKAIGQAPSNLTMNPSNFATPQTHKLDSVVVNSGKQSNSGATKRASPSNSRRSSPGSSRKTTPSPGRQNSKAPKLTLASQTNAALLQNVELPRNVLVSPTPLANPPVPGSFPNNSGLNPQNSTVSVAAVGGVVEDNKESLNVPQDSDCQNSQSRKEQVNIELKAVPAQEVKMVVPEDQSKKDGQPSDPNKLPSVEENKNLVSPAMREAPTSLSQLLDNSGAPNVTIKPPGLTDLEVTPPVVSGEDLKKASVIPTLQDLSSSKEPSNSLNLPHSNELCSSLVHPELSEVSSNVAPSIPPVMSRPVSSSSISTPLPPNQITVFVTSNPITTSANTSAALPTHLQSALMSTVVTMPNAGSKVMVSEGQSAAQSNARPQFITPVFINSSSIIQVMKGSQPSTIPAAPLTTNSGLMPPSVAVVGPLHIPQNIKFSSAPVPPNALSSSPAPNIQTGRPLVLSSRATPVQLPSPPCTSSPVVPSHPPVQQVKELNPDEASPQVNTSADQNTLPSSQSTTMVSPLLTNSPGSSGNRRSPVSSSKGKGKVDKIGQILLTKACKKVTGSLEKGEEQYGADGETEGQGLDTTAPGLMGTEQLSTELDSKTPTPPAPTLLKMTSSPVGPGTASAGPSLPGGALPTSVRSIVTTLVPSELISAVPTTKSNHGGIASESLAGGLVEEKVGSHPELLPSID

SEQ ID NO: 6237 - protein, 1575 aa, Artificial Sequence
  Synthetic polypeptide
MVLDDLPNLEDIYTSLCSSTMEDSEMDFDSGLEDDDTKSDSILEDSTIFVAFKGNIDDKDFKWKLDAILKNVPNLLHMESSKLKVQKVEPWNSVRVTFNIPREAAERLRILAQSNNQQLRDLGILSVQIEGEGAINLALAQNRSQDVRMNGPMGAGNSVRMEAGFPMASGPGIIRMNNPATVMIPPGGNVSSSMMAPGPNPELQPRTPRPASQSDAMDPLLSGLHIQQQSHPSGSLAPPHHPMQPVSVNRQMNPANFPQLQQQQQQQQQQQQQQQQQQQQQQQQQLQARPPQQHQQQQPQGIRPQFTAPTQVPVPPGWNQLPSGALQPPPAQGSLGTMTANQGWKKAPLPGPMQQQLQARPSLATVQTPSHPPPPYPFGSQQASQAHTNFPQMSNPGQFTAPQMKSLQGGPSRVPTPLQQPHLTNKSPASSPSSFQQGSPASSPTVNQTQQQMGPRPPQNNPLPQGFQQPVSSPGRNPMVQQGNVPPNFMVMQQQPPNQGPQSLHPGLGGMPKRLPPGFSAGQANPNFMQGQVPSTTATTPGNSGAPQLQANQNVQHAGGQGAGPPQNQMQVSHGPPNMMQPSLMGIHGNMNNQQAGTSGVPQVNLSNMQGQPQQGPPSQLMGMHQQIVPSQGQMVQQQGTLNPQNPMILSRAQLMPQGQMMVNPPSQNLGPSPQRMTPPKQMLSQQGPQMMAPHNQMMGPQGQVLLQQNPMIEQIMTNQMQGNKQQFNTQNQSNVMPGPAQIMRGPTPNMQGNMVQFTGQMSGQMLPQQGPVNNSPSQVMGIQGQVLRPPGPSPHMAQQHGDPATTANNDVSLSQMMPDVSIQQTNMVPPHVQAMQGNSASGNHFSGHGMSFNAPFSGAPNGNQMSCGQNPGFPVNKDVTLTSPLLVNLLQSDISAGHFGVNNKQNNTNANKPKKKKPPRKKKNSQQDLNTPDTRPAGLEEADQPPLPGEQGINLDNSGPKLPEFSNRPPGYPSQPVEQRPLQQMPPQLMQHVAPPPQPPQQQPQPQLPQQQQPPPPSQPQSQQQQQQQQQMMMMLMMQQDPKSVRLPVSQNVHPPRGPLNPDSQRMPMQQSGSVPVMVSLQGPASVPPSPDKQRMPMPVNTPLGSNSRKMVYQESPQNPSSSPLAEMASLPEASGSEAPSVPGGPNNMPSHVVLPQNQLMMTGPKPGPSPLSATQGATPQQPPVNSLPSSHGHHFPNVAAPTQTSRPKTPNRASPRPYYPQTPNNRPPSTEPSEISLSPERLNASIAGLFPPQINIPLPPRPNLNRGFDQQGLNPTTLKAIGQAPSNLTMNPSNFATPQTHKLDSVVVNSGKQSNSGATKRASPSNSRRSSPGSSRKTTPSPGRQNSKAPKLTLASQTNAALLQNVELPRNVLVSPTPLANPPVPGSFPNNSGLNPQNSTVSVAAVGGVVEDNKESLNVPQDSDCQNSQSRKEQVNIELKAVPAQEVKMVVPEDQSKKDGQPSDPNKLPSVEENKNLVSPAMREAPTSLSQLLDNSGAPNVTIKPPGLTDLEVTPPVVSGEDLKKASVIPTLQDLSSSKEPSNSLNLPHSNELCSSLVHPELSETEFLMCKRI

SEQ ID NO: 6238 - protein, 587 aa, Artificial Sequence
  Synthetic polypeptide
MAAENEASQESALGAYSPVDYMSITSFPRLPEDEPAPAAPLRGRKDEDAFLGDPDTDPDSFLKSARLQRLPSSSSEMGSQDGSPLRETRKDPFSAAAAECSCRQDGLTVIVTACLTFATGVTVALVMQIYFGDPQIFQQGAVVTDAARCTSLGIEVLSKQGSSVDAAVAAALCLGIVAPHSSGLGGGGVMLVHDIRRNESHLIDFRESAPGALREETLQRSWETKPGLLVGVPGMVKGLHEAHQLYGRLPWSQVLAFAAAVAQDGFNVTHDLARALAEQLPPNMSERFRETFLPSGRPPLPGSLLHRPDLAEVLDVLGTSGPAAFYAGGNLTLEMVAEAQHAGGVITEEDFSNYSALVEKPVCGVYRGHLVLSPPPPHTGPALISALNILEGFNLTSLVSREQALHWVAETLKIALALASRLGDPVYDSTITESMDDMLSKVEAAYLRGHINDSQAAPAPLLPVYELDGAPTAAQVLIMGPDDFIVAMVSSLNQPFGSGLITPSGILLNSQMLDFSWPNRTANHSAPSLENSVQPGKRPLSFLLPTVVRPAEGLCGTYLALGANGAARGLSGLTQACLSSRAVRRLR

SEQ ID NO: 6239 - protein, 59 aa, Artificial Sequence
  Synthetic polypeptide
MAAENEASQESALGAYSPVDYMSITSFPRLPEDEPAPAAPLRGRKDEDAFLGDPDTASR

SEQ ID NO: 6240 - protein, 370 aa, Artificial Sequence
  Synthetic polypeptide
MAAAPVAAGSGAGRGRRSAATVAAWGGWGGRPRPGNILLQLRQGQLTGRGLVRAVQFTETFLTERDKQSKWSGIPQLLLKLHTTSHLHSDFVECQNILKEISPLLSMEAMAFVTEERKLTQETTYPNTYIFDLFGGVDLLVEILMRPTISIRGQKLKISDEMSKDCLSILYNTCVCTEGVTKRLAEKNDFVIFLFTLMTSKKTFLQTATLIEDILGVKKEMIRLDEVPNLSSLVSNFDQQQLANFCRILAVTISEMDTGNDDKHTLLAKNAQQKKSLSLGPSAAEINQAALLSIPGFVERLCKLATRKVSESTGTASFLQELEEWYTWLDNALVLDALMRVANEESEHNQENTMRKVKREPTEWKNVFCG

SEQ ID NO: 6241 - protein, 11 aa, Artificial Sequence
  Synthetic polypeptide
MRSQSTIKKTQ

SEQ ID NO: 6242 - protein, 331 aa, Artificial Sequence
  Synthetic polypeptide
MAAAPVAAGSGAGRGRRSAATVAAWGGWGGRPRPGNILLQLRQGQLTGRGLVRAVQFTETFLTERDKQSKWSGIPQLLLKLHTTSHLHSDFVECQNILKLLVEILMRPTISIRGQKLKISDEMSKDCLSILYNTCVCTEGVTKRLAEKNDFVIFLFTLMTSKKTFLQTATLIEDILGVKKEMIRLDEVPNLSSLVSNFDQQQLANFCRILAVTISEMDTGNDDKHTLLAKNAQQKKSLSLGPSAAEINQAALLSIPGFVERLCKLATRKVSESTGTASFLQELEEWYTWLDNALVLDALMRVANEESEHNQENTMRKVKREPTEWKNVFCG

SEQ ID NO: 6243 - protein, 370 aa, Artificial Sequence
  Synthetic polypeptide
MAAAPVAAGSGAGRGRRSAATVAAWGGWGGRPRPGNILLQLRQGQLTGRGLVRAVQFTETFLTERDKQSKWSGIPQLLLKLHTTSHLHSDFVECQNILKEISPLLSMEAMAFVTEERKLTQETTYPNTYIFDLFGGVDLLVEILMRPTISIRGQKLKISDEMSKDCLSILYNTCVCTEGVTKRLAEKNDFVIFLFTLMTSKKTFLQTATLIEDILGVKKEMIRLDEVPNLSSLVSNFDQQQLANFCRILAVTISEMDTGNDDKHTLLAKNAQQKKSLSLGPSAAEINQAALLSIPGFVERLCKLATRKVSESTGTASFLQELEEWYTWLDNALVLDALMRVANEESEHNQACSCTEVLHWERQARKTRGY

SEQ ID NO: 6244 - protein, 31 aa, Artificial Sequence
  Synthetic polypeptide
MRSQSTIKLAHVQRFYTGRGKPGRLEATDPA

SEQ ID NO: 6245 - protein, 331 aa, Artificial Sequence
  Synthetic polypeptide
MAAAPVAAGSGAGRGRRSAATVAAWGGWGGRPRPGNILLQLRQGQLTGRGLVRAVQFTETFLTERDKQSKWSGIPQLLLKLHTTSHLHSDFVECQNILKLLVEILMRPTISIRGQKLKISDEMSKDCLSILYNTCVCTEGVTKRLAEKNDFVIFLFTLMTSKKTFLQTATLIEDILGVKKEMIRLDEVPNLSSLVSNFDQQQLANFCRILAVTISEMDTGNDDKHTLLAKNAQQKKSLSLGPSAAEINQAALLSIPGFVERLCKLATRKVSESTGTASFLQELEEWYTWLDNALVLDALMRVANEESEHNQACSCTEVLHWERQARKTRGY

SEQ ID NO: 6246 - protein, 353 aa, Artificial Sequence
  Synthetic polypeptide
MAAAPVAAGSGAGRGRRSAATVAAWGGWGGRPRPGNILLQLRQGQLTGRGLVRAVQFTETFLTERDKQSKWSGIPQLLLKLHTTSHLHSDFVECQNILKEISPLLSMEAMAFVTEERKLTQETTYPNTYIFDLFGGVDLLVEILMRPTISIRGQKLKISDEMSKDCLSILYNTCVCTEGVTKRLAEKNDFVIFLFTLMTSKKTFLQTATLIEDILGVKKEMIRLDEVPNLSSLVSNFDQQQLANFCRILAVTISEMDTGNDDKHTLLAKNAQQKKSLSLGPSAAEINQAALLSIPGFVERLCKLATRKVSESTGTASFLQELEEWYTWLDNALVLDALMRVANEESEHNQAPN

SEQ ID NO: 6247 - protein, 79 aa, Artificial Sequence
  Synthetic polypeptide
MRSQSTIKLQIEETKFSVSMAKRSEASFLHPAPYCTHGVEALSHILEAKNSMALITFALACSCTEVLHWERQARKTRGY

SEQ ID NO: 6248 - protein, 314 aa, Artificial Sequence
  Synthetic polypeptide
MAAAPVAAGSGAGRGRRSAATVAAWGGWGGRPRPGNILLQLRQGQLTGRGLVRAVQFTETFLTERDKQSKWSGIPQLLLKLHTTSHLHSDFVECQNILKLLVEILMRPTISIRGQKLKISDEMSKDCLSILYNTCVCTEGVTKRLAEKNDFVIFLFTLMTSKKTFLQTATLIEDILGVKKEMIRLDEVPNLSSLVSNFDQQQLANFCRILAVTISEMDTGNDDKHTLLAKNAQQKKSLSLGPSAAEINQAALLSIPGFVERLCKLATRKVSESTGTASFLQELEEWYTWLDNALVLDALMRVANEESEHNQAPN

SEQ ID NO: 6249 - protein, 146 aa, Artificial Sequence
  Synthetic polypeptide
MAAAPVAAGSGAGRGRRSAATVAAWGGWGGRPRPGNILLQLRQGQLTGRGLVRAVQFTETFLTERDKQSKWSGIPQLLLKLHTTSHLHSDFVECQNILKEISPLLSMEAMAFVTEERKLTQETTYPNTYIFDLFGGVDAGRSGSRL

SEQ ID NO: 6250 - protein, 124 aa, Artificial Sequence
  Synthetic polypeptide
MAAAPVAAGSGAGRGRRSAATVAAWGGWGGRPRPGNILLQLRQGQLTGRGLVRAVQFTETFLTERDKQSKWSGIPQLLLKLHTTSHLHSDFVECQNILKEHSSSPATEQSWMENDFDELREGFR

SEQ ID NO: 6251 - protein, 337 aa, Artificial Sequence
  Synthetic polypeptide
MPFRLLIPLGLLCALLPQHHGAPGPDGSAPDPAHYSFSLTLIDALDTLLILGNVSEFQRVVEVLQDSVDFDIDVNASVFETNIRVVGGLLSAHLLSKKAGVEVEAGWPCSGPLLRMAEEAARKLLPAFQTPTGMPYGTVNLLHGVNPGETPVTCTAGIGTFIVEFATLSSLTGDPVFEDVARVALMRLWESRSDIGLVGNHIDVLTGKWVAQDAGIGAGVDSYFEYLVKGAILLQDKKLMAMFLEYNKAIRNYTRFDDWYLWVQMYKGTVSMPVFQSLEAYWPGLQSLIGDIDNAMRTFLNYYTVWKQFGGLPEFYNIPQGYTVEKREGYPLRPGGG

SEQ ID NO: 6252 - protein, 374 aa, Artificial Sequence
  Synthetic polypeptide
MPFRLLIPLGLLCALLPQHHGAPGPDGSAPDPAHYRERVKAMFYHAYDSYLENAFPFDELRPLTCDGHDTWGSFSLTLIDALDTLLILGNVSEFQRVVEVLQDSVDFDIDVNASVFETNIRVVGGLLSAHLLSKKAGVEVEAGWPCSGPLLRMAEEAARKLLPAFQTPTGMPYGTVNLLHGVNPGETPVTCTAGIGTFIVEFATLSSLTGDPVFEDVARVALMRLWESRSDIGLVGNHIDVLTGKWVAQDAGIGAGVDSYFEYLVKGAILLQDKKLMAMFLEYNKAIRNYTRFDDWYLWVQMYKGTVSMPVFQSLEAYWPGLQSLIGDIDNAMRTFLNYYTVWKQFGGLPEFYNIPQGYTVEKREGYPLRPGGG

SEQ ID NO: 6253 - protein, 153 aa, Artificial Sequence
  Synthetic polypeptide
MEIEHTLDQMISKVGNHIDVLTGKWVAQDAGIGAGVDSYFEYLVKGAILLQDKKLMAMFLEYNKAIRNYTRFDDWYLWVQMYKGTVSMPVFQSLEAYWPGLQSLIGDIDNAMRTFLNYYTVWKQFGGLPEFYNIPQGYTVEKREGYPLRPGGG

SEQ ID NO: 6254 - protein, 98 aa, Artificial Sequence
  Synthetic polypeptide
MAMFLEYNKAIRNYTRFDDWYLWVQMYKGTVSMPVFQSLEAYWPGLQSLIGDIDNAMRTFLNYYTVWKQFGGLPEFYNIPQGYTVEKREGYPLRPGGG

SEQ ID NO: 6255 - protein, 333 aa, Artificial Sequence
  Synthetic polypeptide
MFYHAYDSYLENAFPFDELRPLTCDGHDTWGSFSLTLIDALDTLLILGNVSEFQRVVEVLQDSVDFDIDVNASVFETNIRVVGGLLSAHLLSKKAGVEVEAGWPCSGPLLRMAEEAARKLLPAFQTPTGMPYGTVNLLHGVNPGETPVTCTAGIGTFIVEFATLSSLTGDPVFEDVARVALMRLWESRSDIGLVGNHIDVLTGKWVAQDAGIGAGVDSYFEYLVKGAILLQDKKLMAMFLEYNKAIRNYTRFDDWYLWVQMYKGTVSMPVFQSLEAYWPGLQSLIGDIDNAMRTFLNYYTVWKQFGGLPEFYNIPQGYTVEKREGYPLRPGGG

SEQ ID NO: 6256 - protein, 258 aa, Artificial Sequence
  Synthetic polypeptide
MPFRLLIPLGLLCALLPQHHGAPGPDGSAPDPAHYSFSLTLIDALDTLLILGNVSEFQRVVEVLQDSVDFDIDVNASVFETNIRVVGGLLSAHLLSKKAGVEVEAGWPCSGPLLRMAEEAARKLLPAFQTPTGMPYGTVNLLHGVNPGETPVTCTAGIGTFIVEFATLSSLTGDPVFEDVARVALMRLWESRSDIGLVGNHIDVLTGKWVAQDAGIGAGVDSYFEYLVKGAILLQDKKLMAMFLGTVAHAFNPSALGS

SEQ ID NO: 6257 - protein, 295 aa, Artificial Sequence
  Synthetic polypeptide
MPFRLLIPLGLLCALLPQHHGAPGPDGSAPDPAHYRERVKAMFYHAYDSYLENAFPFDELRPLTCDGHDTWGSFSLTLIDALDTLLILGNVSEFQRVVEVLQDSVDFDIDVNASVFETNIRVVGGLLSAHLLSKKAGVEVEAGWPCSGPLLRMAEEAARKLLPAFQTPTGMPYGTVNLLHGVNPGETPVTCTAGIGTFIVEFATLSSLTGDPVFEDVARVALMRLWESRSDIGLVGNHIDVLTGKWVAQDAGIGAGVDSYFEYLVKGAILLQDKKLMAMFLGTVAHAFNPSALGS

SEQ ID NO: 6258 - protein, 74 aa, Artificial Sequence
  Synthetic polypeptide
MEIEHTLDQMISKVGNHIDVLTGKWVAQDAGIGAGVDSYFEYLVKGAILLQDKKLMAMFLGTVAHAFNPSALGS

SEQ ID NO: 6259 - protein, 19 aa, Artificial Sequence
  Synthetic polypeptide
MAMFLGTVAHAFNPSALGS

SEQ ID NO: 6260 - protein, 254 aa, Artificial Sequence
  Synthetic polypeptide
MFYHAYDSYLENAFPFDELRPLTCDGHDTWGSFSLTLIDALDTLLILGNVSEFQRVVEVLQDSVDFDIDVNASVFETNIRVVGGLLSAHLLSKKAGVEVEAGWPCSGPLLRMAEEAARKLLPAFQTPTGMPYGTVNLLHGVNPGETPVTCTAGIGTFIVEFATLSSLTGDPVFEDVARVALMRLWESRSDIGLVGNHIDVLTGKWVAQDAGIGAGVDSYFEYLVKGAILLQDKKLMAMFLGTVAHAFNPSALGS

SEQ ID NO: 6261 - protein, 149 aa, Artificial Sequence
  Synthetic polypeptide
MADDIDIEAMLEAPYKKDENKLSSANGHEERSKKRKKSKSRSRSHERKRSKSKERKRSRDRERKKSKSRERKRSRSKERRRSRSRSRDRRFRGRYRSPYSGPKFNSAIRGKIGLPHSIKLSRRRSRSKSPFRKDKSPVRKLARHGGTHL

SEQ ID NO: 6262 - protein, 127 aa, Artificial Sequence
  Synthetic polypeptide
MADDIDIEAMLEAPYKKDENKLSSANGHEERSKKRKKSKSRSRSHERKRSKSKERKRSRDRERKKSKSRERKRSRSKERRRSRSRSRDRRFRGRYRSPYRRRSRSKSPFRKDKSPVRKLARHGGTHL

SEQ ID NO: 6263 - protein, 43 aa, Artificial Sequence
  Synthetic polypeptide
KSIQKRQEPCEKISQAWWHTPVVPATREAEAEELLEPWRRRLQ

SEQ ID NO: 6264 - protein, 148 aa, Artificial Sequence
  Synthetic polypeptide
MADDIDIEAMLEAPYKKDENKLSSANGHEERSKKRKKSKSRSRSHERKRSKSKERKRSRDRERKKSKSRERKRSRSKERRRSRSRSRDRRFRGRYRSPYSGPKFNSAIRGKIGLPHSIKLRRRSRSKSPFRKDKSPVRKLARHGGTHL

SEQ ID NO: 6265 - protein, 142 aa, Artificial Sequence
  Synthetic polypeptide
MADDIDIEAMLEAPYKKDENKLSSANGHEERSKKRKKSKSRSRSHERKRSKSKERKRSRDRERKKSKSRERKRSRSKERRRSRSRSRDRRFRGRYRSPYSGPKFNSAIRGKIGLPHSIKLSRRRSRSKSPFRKDKSPVRRGG

SEQ ID NO: 6266 - protein, 120 aa, Artificial Sequence
  Synthetic polypeptide
MADDIDIEAMLEAPYKKDENKLSSANGHEERSKKRKKSKSRSRSHERKRSKSKERKRSRDRERKKSKSRERKRSRSKERRRSRSRSRDRRFRGRYRSPYRRRSRSKSPFRKDKSPVRRGG

SEQ ID NO: 6267 - protein, 48 aa, Artificial Sequence
  Synthetic polypeptide
KSIQKRQEPCEAWWLTPTIRVLLEAEAGGSRDQEIKTILANTVESHVY

SEQ ID NO: 6268 - protein, 141 aa, Artificial Sequence
  Synthetic polypeptide
MADDIDIEAMLEAPYKKDENKLSSANGHEERSKKRKKSKSRSRSHERKRSKSKERKRSRDRERKKSKSRERKRSRSKERRRSRSRSRDRRFRGRYRSPYSGPKFNSAIRGKIGLPHSIKLRRRSRSKSPFRKDKSPVRRGG

SEQ ID NO: 6269 - protein, 74 aa, Artificial Sequence
  Synthetic polypeptide
MSDSDLGEDEGLLSLAGKRKRRGNLPKESVKILRDWLYLHRYNAYPSEQEKLSLSGQTNLSVLQVAGWRGGACL

SEQ ID NO: 6270 - protein, 85 aa, Artificial Sequence
  Synthetic polypeptide
PPLPGGQKEAQGEPAQGVGEDPPGLAVLAPLQRLPLRAGEAEPFWTDQPVSAASGRVAWWCMLVVPATWEAEAEESLEPGRRRLQ

SEQ ID NO: 6271 - protein, 12 aa, Artificial Sequence
  Synthetic polypeptide
KGSAGGTCPRSR

SEQ ID NO: 6272 - protein, 24 aa, Artificial Sequence
  Synthetic polypeptide
KLSLSGQTNLSVLQVAGWRGGACL

SEQ ID NO: 6273 - protein, 111 aa, Artificial Sequence
  Synthetic polypeptide
MFEDKPHAEGAAVVAAAGEALQALCQELNLDEGSAAEALDDFTAIRGNYSLEGEVTHWLACSLYVACRKSIIPTVGKGIMEGNCVSLTRILRSAKLRRSSSCLDSPALWKA

SEQ ID NO: 6274 - protein, 45 aa, Artificial Sequence
  Synthetic polypeptide
RSRALPPARSPPSDPRSESAPARACAHAPVPQGKGIPPGRLSSGD

SEQ ID NO: 6275 - protein, 355 aa, Artificial Sequence
  Synthetic polypeptide
AGSRAATSTSRGALSQSHAQLLTRRRHSSEQVPPESEPRADFRSGKWLQEPATGDARDSRQALRARMSSKHRICSQEEVVIPCAYDSDSESVDLELSNLEIIKKGSSSIELTDLDIPDIPGLHCEPLSHSPRHLTQQDPLSEAIVEKLIQSIQKVFNGELKGELEKLKFLGDLSSLSQALPYDETAKSFIHSHIADIVHTLNVLVQEERPHSLSSSMRQEVFVTIADLSYQDVHLLLGSEDRAELFSLTIKSIITLPSVRTLTQIQEIMPNGTCNTECLYRQTFQAFSEMLQSLVVKDPHLENLDTIIKHLVPWLQSVKDHERERATASMAQVLKCLSKHLNLKSHGRNFFPSQP

SEQ ID NO: 6276 - protein, 369 aa, Artificial Sequence
  Synthetic polypeptide
MPLSRRGRGSRLAGSRAATSNLPRATALSPKHAQLLTRRRHSSEQVPPESEPRADFRSGKWLQEPATGDARDSRQALRARMSSKHRICSQEEVVIPCAYDSDSESVDLELSNLEIIKKGSSSIELTDLDIPDIPGLHCEPLSHSPRHLTQQDPLSEAIVEKLIQSIQKVFNGELKGELEKLKFLGDLSSLSQALPYDETAKSFIHSHIADIVHTLNVLVQEERPHSLSSSMRQEVFVTIADLSYQDVHLLLGSEDRAELFSLTIKSIITLPSVRTLTQIQEIMPNGTCNTECLYRQTFQAFSEMLQSLVVKDPHLENLDTIIKHLVPWLQSVKDHERERATASMAQVLKCLSKHLNLKSHGRNFFPSQP

SEQ ID NO: 6277 - protein, 49 aa, Artificial Sequence
  Synthetic polypeptide
TNPARSRALPPARSPPSDPRSESAPARACAHAPVPQGKGIPPGRLSSGD

SEQ ID NO: 6278 - protein, 130 aa, Artificial Sequence
  Synthetic polypeptide
MGSNKSKPKDASQRRRSLEPAENVHGAGGGAFPASQTPSKPASADGHRGPSAAFAPAAAEPKLFGGFNSSDTVTSPQRAGPLAGGVTTFVALYDYESRTETDLSFKKGERLQIVNNTPLSASPSLCFSLA

SEQ ID NO: 6279 - protein, 62 aa, Artificial Sequence
  Synthetic polypeptide
MSSFSESALEKKLSELSNSQQSVQTLSLWLIHHRKHAGPIVSVWHRELRKEWITEIYYVFIT

SEQ ID NO: 6280 - protein, 281 aa, Artificial Sequence
  Synthetic polypeptide
MSSFSESALEKKLSELSNSQQSVQTLSLWLIHHRKHAGPIVSVWHRELRKAKSNRKLTFLYLANDVIQNSKRKGPEFTREFESVLVDAFSHVAREADEGCKKPLERLLNIWQERSVYGGEFIQQLKLSMEDSKSPPPKATEEKKSLKRTFQQIQEEEDDDYPGSYSPQDPSAGPLLTEELIKALQDLENAASGDATVRQKIASLPQEVQDVSLLEKITDKEAAERLSKTVDEACLLLAEYNGRLAAELEDRRQLARMLVEYTQNQKDVLSEKEKKLELVTH

SEQ ID NO: 6281 - protein, 163 aa, Artificial Sequence
  Synthetic polypeptide
MFLSYRSDLPAYMFPGGSSPTTEEKKSLKRTFQQIQEEEDDDYPGSYSPQDPSAGPLLTEELIKALQDLENAASGDATVRQKIASLPQEVQDVSLLEKITDKEAAERLSKTVDEACLLLAEYNGRLAAELEDRRQLARMLVEYTQNQKDVLSEKEKKLELVTH

SEQ ID NO: 6282 - protein, 813 aa, Artificial Sequence
  Synthetic polypeptide
MYSEWRSLHLVIQNDQGHTSVLHSYPESVGREVANAVVRPLGQVLGTPSVAGSENLLKTDKEVKWTMEVICYGLTLPLDGETVKYCVDVYTDWIMALVLPKDSIPLPVIKEPNQYVQTILKHLQNLFVPRQEQGSSQIRLCLQVLRAIQKLARESSLMARETWEVLLLFLLQINDILLAPPTVQGGIAENLAEKLIGVLFEVWLLACTRCFPTPPYWKTAKEMVANWRHHPAVVEQWSKVICALTSRLLRFTYGPSFPAFKVPDEDASLIPPEMDNECVAQTWFRFLHMLSNPVDLSNPAIISSTPKFQEQFLNVSGMPQELNQYPCLKHLPQIFFRAMRGISCLVDAFLGISRPRSDSAPPTPVNRLSMPQSAAVSTTPPHNRRHRAVTVNKATMKTSTVSTAHASKVQHQTSSTSPLSSPNQTSSEPRPLPAPRRPKVNSILNLFGSWLFDAAFVHCKLHNGINRDSSMTAITTQASMEFRRKGSQMSTDTMVSNPMFDASEFPDNYEAGRAEACGTLCRIFCSKKTGEEILPAYLSRFYMLLIQGLQINDYVCHPVLASVILNSPPLFCCDLKGIDVVVPYFISALETILPDRELSKFKSYVNPTELRRSSINILLSLLPLPHHFGTVKSEVVLEGKFSNDDSSSYDKPITFLSLKLRLVNILIGALQTETDPNNTQMILGAMLNIVQDSALLEAIGCQMEMGGGENNLKSHSRTNSGISSASGGSTEPTTPDSERPAQALLRDYALNTDSAAGLLIRSIHLVTQRLNSQWRQDMSISLAALELLSGLAKGNSIKTMMRYHCKSIRMAEI

SEQ ID NO: 6283 - protein, 809 aa, Artificial Sequence
  Synthetic polypeptide
MYSEWRSLHLVIQNDQGHTSVLHSYPESVGREVANAVVRPLGQVLGTPSVAGSENLLKTDKEVKWTMEVICYGLTLPLDGETVKYCVDVYTDWIMALVLPKDSIPLPVIKEPNQYVQTILKHLQNLFVPRQEQGSSQIRLCLQVLRAIQKLARESSLMARETWEVLLLFLLQINDILLAPPTVQGGIAENLAEKLIGVLFEVWLLACTRCFPTPPYWKTAKEMVANWRHHPAVVEQWSKVICALTSRLLRFTYGPSFPAFKVPDEDASLIPPEMDNECVAQTWFRFLHMLSNPVDLSNPAIISSTPKFQEQFLNVSGMPQELNQYPCLKHLPQIFFRAMRGISCLVDAFLGISRPRSDSAPPTPVNRLSMPQSAAVSTTPPHNRRHRAVTVNKATMKTSTVSTAHASKVQHQTSSTSPLSSPNQTSSEPRPLPAPRRPKVNSILNLFGSWLFDAAFVHCKLHNGINRDSSMTAITTQASMEFRRKGSQMSTDTMVSNPMFDASEFPDNYEAGRAEACGTLCRIFCSKKTGEEILPAYLSRFYMLLIQGLQINDYVCHPVLASVILNSPPLFCCDLKGIDVVVPYFISALETILPDRELSKFKSYVNPTELRRSSINILLSLLPLPHHFGTVKSEVVLEGKFSNDDSSSYDKPITFLSLKLRLVNILIGALQTETDPNNTQMILGAMLNIVQDSALLEAIGCQMEMGGGENNLKSHSRTNSGISSASGGSTEPTTPDSERPAQALLRDYDSAAGLLIRSIHLVTQRLNSQWRQDMSISLAALELLSGLAKGNSIKTMMRYHCKSIRMAEI

SEQ ID NO: 6284 - protein, 591 aa, Artificial Sequence
  Synthetic polypeptide
MVANWRHHPAVVEQWSKVICALTSRLLRFTYGPSFPAFKVPDEDASLIPPEMDNECVAQTWFRFLHMLSNPVDLSNPAIISSTPKFQEQFLNVSGMPQELNQYPCLKHLPQIFFRAMRGISCLVDAFLGISRPRSDSAPPTPVNRLSMPQSAAVSTTPPHNRRHRAVTVNKATMKTSTVSTAHASKVQHQTSSTSPLSSPNQTSSEPRPLPAPRRPKVNSILNLFGSWLFDAAFVHCKLHNGINRDSSMTAITTQASMEFRRKGSQMSTDTMVSNPMFDASEFPDNYEAGRAEACGTLCRIFCSKKTGEEILPAYLSRFYMLLIQGLQINDYVCHPVLASVILNSPPLFCCDLKGIDVVVPYFISALETILPDRELSKFKSYVNPTELRRSSINILLSLLPLPHHFGTVKSEVVLEGKFSNDDSSSYDKPITFLSLKLRLVNILIGALQTETDPNNTQMILGAMLNIVQDSALLEAIGCQMEMGGGENNLKSHSRTNSGISSASGGSTEPTTPDSERPAQALLRDYALNTDSAAGLLIRSIHLVTQRLNSQWRQDMSISLAALELLSGLAKGNSIKTMMRYHCKSIRMAEI

SEQ ID NO: 6285 - protein, 641 aa, Artificial Sequence
  Synthetic polypeptide
INDILLAPPTVQGGIAENLAEKLIGVLFEVWLLACTRCFPTPPYWKTAKEMVANWRHHPAVVEQWSKVICALTSRLLRFTYGPSFPAFKVPDEDASLIPPEMDNECVAQTWFRFLHMLSNPVDLSNPAIISSTPKFQEQFLNVSGMPQELNQYPCLKHLPQIFFRAMRGISCLVDAFLGISRPRSDSAPPTPVNRLSMPQSAAVSTTPPHNRRHRAVTVNKATMKTSTVSTAHASKVQHQTSSTSPLSSPNQTSSEPRPLPAPRRPKVNSILNLFGSWLFDAAFVHCKLHNGINRDSSMTAITTQASMEFRRKGSQMSTDTMVSNPMFDASEFPDNYEAGRAEACGTLCRIFCSKKTGEEILPAYLSRFYMLLIQGLQINDYVCHPVLASVILNSPPLFCCDLKGIDVVVPYFISALETILPDRELSKFKSYVNPTELRRSSINILLSLLPLPHHFGTVKSEVVLEGKFSNDDSSSYDKPITFLSLKLRLVNILIGALQTETDPNNTQMILGAMLNIVQDSALLEAIGCQMEMGGGENNLKSHSRTNSGISSASGGSTEPTTPDSERPAQALLRDYALNTDSAAGLLIRSIHLVTQRLNSQWRQDMSISLAALELLSGLAKGNSIKTMMRYHCKSIRMAEI

SEQ ID NO: 6286 - protein, 262 aa, Artificial Sequence
  Synthetic polypeptide
MAANVFPFRDARAAPDPVLEAGPVAHGPLPVPLVLDNGSFQVRAGWACPGQDPGPEPRLQFRAVCARGRGGARGASGPQVGNALGSLEPLRWMLRSPFDRNVPVNLELQELLLDYSFQHLGVSSQGCVDHPIVLTEAVCNPLYSRQMMSELLFECYGIPKVAYGIDSLFSFYHNKPKNSMCSGLIISSGYQCTHVLPILEGRLDAKNCKRINLGGSQAAGYLQRLLQLKYPGHLAAITLSRMEEILHEHSYIAEDYVEGTNY

SEQ ID NO: 6287 - protein, 20 aa, Artificial Sequence
  Synthetic polypeptide
MAAPVGPVKFWRPVESLGKL

SEQ ID NO: 6288 - protein, 30 aa, Artificial Sequence
  Synthetic polypeptide
MAAPVGPVKFWRPALMTTSCTKLLSTERKN

SEQ ID NO: 6289 - protein, 254 aa, Artificial Sequence
  Synthetic polypeptide
MSGDHLHNDSQIEADFRLNDSHKHKDKHKDREHRHKEHKKEKDREKSKHSNSEHKDSEKKHKEKEKTKHKDGSSEKHKDKHKDRDKEKRKEEKVRASGDAKIKKEKENGFSSPPQIKDEPEDDGYFVPPKEDIKPLKRPRDEDDADYKPKKIKTEDTKKEKKRKLEEEEDGKLKKPKNKDKDKKVPEPDNKKKKPKKEEEQKWKWWEEERYPEGIKWKFLEHKGPVFAPPYEPLPENVKFYYDVPLLLSPAFLF

SEQ ID NO: 6290 - protein, 694 aa, Artificial Sequence
  Synthetic polypeptide
MKMKIQKKEKQLSNLKVLNHSPMSDASVNFDYKSPSPFDCSTDQEEKIEDVASHCLPQKDLYTAEEEAATLFPRKMTSHNGMEDSGGGGTGVKKKRKKKEPGDQEGAAKGSKDREPKPKRKREPKEPKEPRKAKEPKKAKEHKEPKQKDGAKKARKPREASGTKEAKEKRSCTDSAARTKSRKASKEQGPTPVEKKKKGKRKSETTVESLELDQGLTNPSLRSPEESTESTDSQKRRSGRQVKRRKYNEDLDFKVVDDDGETIAVLGAGRTSALSASTLAWQAEEPPEDDANIIEKILASKTVQEVHPGEPPFDLELFYVKYRNFSYLHCKWATMEELEKDPRIAQKIKRFRNKQAQMKHIFTEPDEDLFNPDYVEVDRILEVAHTKDAETGEEVTHYLVKWCSLPYEESTWELEEDVDPAKVKEFESLQVLPEIKHVERPASDSWQKLEKSREYKNSNQLREYQLEGMNWLLFNWYNRKNCILADEMGLGKTIQSITFLSEIFLRGIHGPFLIIAPLSTITNWEREFRTWTEMNAIVYHGSQISRQMIQQYEMVYRDAQGNPLSGVFKFHVVITTFEMILADCPELKKIHWSCVIIDEAHRLKNRNCKLLEGLKLMALEHKVLLTGTPLQNSVEELFSLLNFLEPSQFPSETAFLEEFGDLKTEEQTKDLLEDKAHIFSQVVFVVLTSTMSGI

SEQ ID NO: 6291 - protein, 40 aa, Artificial Sequence
  Synthetic polypeptide
MKMKIQKKEKQQKWKRTYTSVKKGTVQIIAHPPSGILCCC

SEQ ID NO: 6292 - protein, 467 aa, Artificial Sequence
  Synthetic polypeptide
MQSCESSGDSADDPLSRGLRRRGQPRVVVIGAGLAGLAAAKALLEQGFTDVTVLEASSHIGGRVQSVKLGHATFELGATWIHGSHGNPIYHLAEANGLLEETTDGERSVGRISLYSKNGVACYLTNHGRRIPKDVVEEFSDLYNEVYNLTQEFFRHDKPVNAESQNSVGVFTREEVRNRIRNDPDDPEATKRLKLAMIQQYLKVESCESSSHSMDEVSLSAFGEWTEIPGAHHIIPSGFMRVVELLAEGIPAHVIQLGKPVRCIHWDQASARPRGPEIEPRGVLKRQYTSFFRPGLPTEKVAAIHRLGIGTTDKIFLEFEEPFWGPECNSLQFVWEDEAESHTLTYPPELWYRKICGFDVLYPPERYGHVLSGWICGEEALVMEKCDDEAVAEICTEMLRQFTGNPNIPKPRRILRSAWGSNPYFRGSYSYTQVGSSGADVEKLAKPLPYTESSKTAGMMAHVPPAL

SEQ ID NO: 6293 - protein, 520 aa, Artificial Sequence
  Synthetic polypeptide
MQSCESSGDSADDPLSRGLRRRGQPRVVVIGAGLAGLAAAKALLEQGFTDVTVLEASSHIGGRVQSVKLGHATFELGATWIHGSHGNPIYHLAEANGLLEETTDGERSVGRISLYSKNGVACYLTNHGRRIPKDVVEEFSDLYNEVYNLTQEFFRHDKPVNAESQNSVGVFTREEVRNRIRNDPDDPEATKRLKLAMIQQYLKVESCESSSHSMDEVSLSAFGEWTEIPGAHHIIPSGFMRVVELLAEGIPAHVIQLGKPVRCIHWDQASARPRGPEIEPRGEGDHNHDTGEGGQGGEEPRGGRWDEDEQWSVVVECEDCELIPADHVIVTVSLGVLKRQYTSFFRPGLPTEKVAAIHRLGIGTTDKIFLEFEEPFWGPECNSLQFVWEDEAESHTLTYPPELWYRKICGFDVLYPPERYGHVLSGWICGEEALVMEKCDDEAVAEICTEMLRQFTGNPNIPKPRRILRSAWGSNPYFRGSYSYTQVGSSGADVEKLAKPLPYTESSKTAGMMAHVPPAL

SEQ ID NO: 6294 - protein, 377 aa, Artificial Sequence
  Synthetic polypeptide
NEVYNLTQEFFRHDKPVNAESQNSVGVFTREEVRNRIRNDPDDPEATKRLKLAMIQQYLKVESCESSSHSMDEVSLSAFGEWTEIPGAHHIIPSGFMRVVELLAEGIPAHVIQLGKPVRCIHWDQASARPRGPEIEPRGEGDHNHDTGEGGQGGEEPRGGRWDEDEQWSVVVECEDCELIPADHVIVTVSLGVLKRQYTSFFRPGLPTEKVAAIHRLGIGTTDKIFLEFEEPFWGPECNSLQFVWEDEAESHTLTYPPELWYRKICGFDVLYPPERYGHVLSGWICGEEALVMEKCDDEAVAEICTEMLRQFTGNPNIPKPRRILRSAWGSNPYFRGSYSYTQVGSSGADVEKLAKPLPYTESSKTAGMMAHVPPAL

SEQ ID NO: 6295 - protein, 459 aa, Artificial Sequence
  Synthetic polypeptide
MQSCESSGDSADDPLSRGLRRRGQPRVVVIGAGLAGLAAAKALLEQGFTDVTVLEASSHIGGRVQSVKLGHATFELGATWIHGSHGNPIYHLAEANGLLEETTDGERSVGRISLYSKNGVACYLTNHGRRIPKDVVEEFSDLYNEVYNLTQEFFRHDKPVNAESQNSVGVFTREEVRNRIRNDPDDPEATKRLKLAMIQQYLKVESCESSSHSMDEVSLSAFGEWTEIPGAHHIIPSGFMRVVELLAEGIPAHVIQLGKPVRCIHWDQASARPRGPEIEPRGVLKRQYTSFFRPGLPTEKVAAIHRLGIGTTDKIFLEFEEPFWGPECNSLQFVWEDEAESHTLTYPPELWYRKICGFDVLYPPERYGHVLSGWICGEEALVMEKCDDEAVAEICTEMLRQFTGNPNIPKPRRILRSAWGSNPYFRGSYSYTQVGSSGADVEKLAKPLPYTESSKTATK

SEQ ID NO: 6296 - protein, 512 aa, Artificial Sequence
  Synthetic polypeptide
MQSCESSGDSADDPLSRGLRRRGQPRVVVIGAGLAGLAAAKALLEQGFTDVTVLEASSHIGGRVQSVKLGHATFELGATWIHGSHGNPIYHLAEANGLLEETTDGERSVGRISLYSKNGVACYLTNHGRRIPKDVVEEFSDLYNEVYNLTQEFFRHDKPVNAESQNSVGVFTREEVRNRIRNDPDDPEATKRLKLAMIQQYLKVESCESSSHSMDEVSLSAFGEWTEIPGAHHIIPSGFMRVVELLAEGIPAHVIQLGKPVRCIHWDQASARPRGPEIEPRGEGDHNHDTGEGGQGGEEPRGGRWDEDEQWSVVVECEDCELIPADHVIVTVSLGVLKRQYTSFFRPGLPTEKVAAIHRLGIGTTDKIFLEFEEPFWGPECNSLQFVWEDEAESHTLTYPPELWYRKICGFDVLYPPERYGHVLSGWICGEEALVMEKCDDEAVAEICTEMLRQFTGNPNIPKPRRILRSAWGSNPYFRGSYSYTQVGSSGADVEKLAKPLPYTESSKTATK

SEQ ID NO: 6297 - protein, 369 aa, Artificial Sequence
  Synthetic polypeptide
NEVYNLTQEFFRHDKPVNAESQNSVGVFTREEVRNRIRNDPDDPEATKRLKLAMIQQYLKVESCESSSHSMDEVSLSAFGEWTEIPGAHHIIPSGFMRVVELLAEGIPAHVIQLGKPVRCIHWDQASARPRGPEIEPRGEGDHNHDTGEGGQGGEEPRGGRWDEDEQWSVVVECEDCELIPADHVIVTVSLGVLKRQYTSFFRPGLPTEKVAAIHRLGIGTTDKIFLEFEEPFWGPECNSLQFVWEDEAESHTLTYPPELWYRKICGFDVLYPPERYGHVLSGWICGEEALVMEKCDDEAVAEICTEMLRQFTGNPNIPKPRRILRSAWGSNPYFRGSYSYTQVGSSGADVEKLAKPLPYTESSKTATK

SEQ ID NO: 6298 - protein, 27 aa, Artificial Sequence
  Synthetic polypeptide
MMEVESSYSDFISWPVTDSGRQSSLAI

SEQ ID NO: 6299 - protein, 247 aa, Artificial Sequence
  Synthetic polypeptide
MNASGSGYPLASLYVGDLHPDVTEAMLYEKFSPAGPILSIRVCRDVATRRSLGYAYINFQQPADAERALDTMNFEMLKGQPIRIMWSQRDPGLRKSGVGNIFIKNLEDSIDNKALYDTFSTFGNILSCKVACDEHGSRGFGFVHFETHEAAQQAINTMNGMLLNDRKVFVGHFKSRREREAELGARALEFTNIYVKNLPVDVDEQGLQDLFSQFGKMLSVKVMRDNSGHSRCFGFVNFEKHEEAQKM

SEQ ID NO: 6300 - protein, 297 aa, Artificial Sequence
  Synthetic polypeptide
MNASGSGYPLASLYVGDLHPDVTEAMLYEKFSPAGPILSIRVCRDVATRRSLGYAYINFQQPADAERALDTMNFEMLKGQPIRIMWSQRDPGLRKSGVGNIFIKNLEDSIDNKALYDTFSTFGNILSCKVACDEHGSRGFGFVHFETHEAAQQAINTMNGMLLNDRKVFVGHFKSRREREAELGARALEFTNIYVKNLPVDVDEQGLQDLFSQFGKMLSVKVMRDNSGHSRCFGFVNFEKHEEAQKAVVHMNGKEVSGRLLYAGRAQKRVERQNELKRRFEQMKQDRLRRYQGCCED

SEQ ID NO: 6301 - protein, 433 aa, Artificial Sequence
  Synthetic polypeptide
MNASGSGYPLASLYVGDLHPDVTEAMLYEKFSPAGPILSIRVCRDVATRRSLGYAYINFQQPADAERALDTMNFEMLKGQPIRIMWSQRDPGLRKSGVGNIFIKNLEDSIDNKALYDTFSTFGNILSCKVACDEHGSRGFGFVHFETHEAAQQAINTMNGMLLNDRKVFVGHFKSRREREAELGARALEFTNIYVKNLPVDVDEQGLQDLFSQFGKMLSVKVMRDNSGHSRCFGFVNFEKHEEAQKAVVHMNGKEVSGRLLYAGRAQKRVERQNELKRRFEQMKQDRLRRYQGVNLYVKNLDDSIDDDKLRKEFSPYGVITSAKVMTEGGHSKGFGFVCFSSPEEATKAVTEMNGRIVGTKPLYVALAQRKEERKAILTNQYMQRLSTMRTLSNPLLGSFQQPSSYFLPAMPQMPMSTETLQNRHRLSSISPA

SEQ ID NO: 6302 - protein, 448 aa, Artificial Sequence
  Synthetic polypeptide
MNASGSGYPLASLYVGDLHPDVTEAMLYEKFSPAGPILSIRVCRDVATRRSLGYAYINFQQPADAERALDTMNFEMLKGQPIRIMWSQRDPGLRKSGVGNIFIKNLEDSIDNKALYDTFSTFGNILSCKVACDEHGSRGFGFVHFETHEAAQQAINTMNGMLLNDRKVFVGHFKSRREREAELGARALEFTNIYVKNLPVDVDEQGLQDLFSQFGKMLSVKVMRDNSGHSRCFGFVNFEKHEEAQKAVVHMNGKEVSGRLLYAGRAQKRVERQNELKRRFEQMKQDRLRRYQGVNLYVKNLDDSIDDDKLRKEFSPYGVITSAKVMTEGGHSKGFGFVCFSSPEEATKAVTEMNGRIVGTKPLYVALAQRKEERKAILTNQYMQRLSTMRTLSNPLLGSFQQPSSYFLPAMPQAQIIQHFPSLDGHFFVGCLLTSPLDVNVLRSMVWE

SEQ ID NO: 6303 - protein, 418 aa, Artificial Sequence
  Synthetic polypeptide
MNASGSGYPLASLYVGDLHPDVTEAMLYEKFSPAGPILSIRVCRDVATRRSLGYAYINFQQPADAERALDTMNFEMLKGQPIRIMWSQRDPGLRKSGVGNIFIKNLEDSIDNKALYDTFSTFGNILSCKVACDEHGSRGFGFVHFETHEAAQQAINTMNGMLLNDRKVFVGHFKSRREREAELGARALEFTNIYVKNLPVDVDEQGLQDLFSQFGKMLSVKVMRDNSGHSRCFGFVNFEKHEEAQKAVVHMNGKEVSGRLLYAGRAQKRVERQNELKRRFEQMKQDRLRRYQGVNLYVKNLDDSIDDDKLRKEFSPYGVITSAKVMTEGGHSKGFGFVCFSSPEEATKAVTEMNGRIVGTKPLYVALAQRKEERKAILTNQYMQRLSTMRTLSNPLLGSFQQPSSYFLPAMPQEHGLG

SEQ ID NO: 6304 - protein, 417 aa, Artificial Sequence
  Synthetic polypeptide
MNASGSGYPLASLYVGDLHPDVTEAMLYEKFSPAGPILSIRVCRDVATRRSLGYAYINFQQPADAERALDTMNFEMLKGQPIRIMWSQRDPGLRKSGVGNIFIKNLEDSIDNKALYDTFSTFGNILSCKVACDEHGSRGFGFVHFETHEAAQQAINTMNGMLLNDRKVFVGHFKSRREREAELGARALEFTNIYVKNLPVDVDEQGLQDLFSQFGKMLSVKVMRDNSGHSRCFGFVNFEKHEEAQKAVVHMNGKEVSGRLLYAGRAQKRVERQNELKRRFEQMKQDRLRRYQGVNLYVKNLDDSIDDDKLRKEFSPYGVITSAKVMTEGGHSKGFGFVCFSSPEEATKAVTEMNGRIVGTKPLYVALAQRKEERKAILTNQYMQRLSTMRTLSNPLLGSFQQPSSYFLPAMPQHGLG

SEQ ID NO: 6305 - protein, 126 aa, Artificial Sequence
  Synthetic polypeptide
MGATGDAEQPRGPSGAERGGLELGDAGAAGQLVLTNPWNIMIKHRQVQRRGRRSQMTTSFTDPAISMDLLRAVLQPSINEEIQTVFNKYMKFFQKAALNVRDNVGEEVDAEQLIQEACRSCLEQGE

SEQ ID NO: 6306 - protein, 121 aa, Artificial Sequence
  Synthetic polypeptide
DAEQPRGPSGAERGGLELGDAGAAGQLVLTNPWNIMIKHRQVQRRGRRSQMTTSFTDPAISMDLLRAVLQPSINEEIQTVFNKYMKFFQKAALNVRDNVGEEVDAEQLIQEACRSCLEQGE

SEQ ID NO: 6307 - protein, 86 aa, Artificial Sequence
  Synthetic polypeptide
MIKHRQVQRRGRRSQMTTSFTDPAISMDLLRAVLQPSINEEIQTVFNKYMKFFQKAALNVRDNVGEEVDAEQLIQEACRSCLEQGE

SEQ ID NO: 6308 - protein, 16 aa, Artificial Sequence
  Synthetic polypeptide
CSPASTRRSRLSSTST

SEQ ID NO: 6309 - protein, 71 aa, Artificial Sequence
  Synthetic polypeptide
MASQNRDPAATSVAAARKGAEPSGGAARGPVGKRLQQELMTLMAWWCMPVISATREAEAQESFEPWRQRLR

SEQ ID NO: 6310 - protein, 32 aa, Artificial Sequence
  Synthetic polypeptide
MTLMAWWCMPVISATREAEAQESFEPWRQRLR

SEQ ID NO: 6311 - protein, 76 aa, Artificial Sequence
  Synthetic polypeptide
MASQNRDPAATSVAAARKGAEPSGGAARGPVGKRLQQELMTLMLLGRLRHKNHLNRGDRGCGEPSAPLHSSLGDRV

SEQ ID NO: 6312 - protein, 37 aa, Artificial Sequence
  Synthetic polypeptide
MTLMLLGRLRHKNHLNRGDRGCGEPSAPLHSSLGDRV

SEQ ID NO: 6313 - protein, 158 aa, Artificial Sequence
  Synthetic polypeptide
MHRGTQEGAMASRLLHRLRHALAGDGPGEAAASPEAEQFPESSELEDDDAEGLSSRLSGTLSFTSAEDDEDDEDEDDEEAGPDQLPLGDGTSGEDAERSPPPDGQWGSQLLARQLQDFWKKSRNTLAPQRLLFEVTSANVVKDPPSNNGENAEDYSRS

SEQ ID NO: 6314 - protein, 149 aa, Artificial Sequence
  Synthetic polypeptide
MASRLLHRLRHALAGDGPGEAAASPEAEQFPESSELEDDDAEGLSSRLSGTLSFTSAEDDEDDEDEDDEEAGPDQLPLGDGTSGEDAERSPPPDGQWGSQLLARQLQDFWKKSRNTLAPQRLLFEVTSANVVKDPPSNNGENAEDYSRS

SEQ ID NO: 6315 - protein, 199 aa, Artificial Sequence
  Synthetic polypeptide
MVRLPLQCVLWGCLLTAVHPEPPTACREKQYLINSQCCSLCQPGQKLVSDCTEFTETECLPCGESEFLDTWNRETHCHQHKYCDPNLGLRVQQKGTSETDTICTCEEGWHCTSEACESCVLHRSCSPGFGVKQIATGVSDTICEPCPVGFFSNVSSAFEKCHPWTRPGAVALACNLSTLDAKAGGSLEVRSSRPASTTW

SEQ ID NO: 6316 - protein, 47 aa, Artificial Sequence
  Synthetic polypeptide
MKMKKFQTWMKPHTMRCGTSFLRGQMVEPDDATWKCAQVNSPWVNLE

SEQ ID NO: 6317 - protein, 43 aa, Artificial Sequence
  Synthetic polypeptide
MKMKKFQLMPPTHTRLPPVLDLDETTHHEVWYQLPEGPDGGAR

SEQ ID NO: 6318 - protein, 490 aa, Artificial Sequence
  Synthetic polypeptide
MGPPSLVLCLLSATVFSLLGGSSAFLSHHRLKGRFQRDRRNIRPNIILVLTDDQDVELGSMQVMNKTRRIMEQGGAHFINAFVTTPMCCPSRSSILTGKYVHNHNTYTNNENCSSPSWQAQHESRTFAVYLNSTGYRTAFFGKYLNEYNGSYVPPGWKEWVGLLKNSRFYNYTLCRNGVKEKHGSDYSKDYLTDLITNDSVSFFRTSKKMYPHRPVLMVISHAAPHGPEDSAPQYSRLFPNASQHITPSYNYAPNPDKHWIMRYTGPMKPIHMEFTNMLQRKRLQTLMSVDDSMETIYNMLVETGELDNTYIVYTADHGYHIGQFGLVKGKSMPYEFDIRVPFYVRGPNVEAGCLNPHIVLNIDLAPTILDIAGLDIPADMDGKSILKLLDTERPVNRFHLKKKMRVWRDSFLVERGKLLHKRDNDKVDAQEENFLPKYQRVKDLCQRAEYQTACEQLGQQPLDPDRVRGQVSRGCVYALSASLALADLS

SEQ ID NO: 6319 - protein, 610 aa, Artificial Sequence
  Synthetic polypeptide
MEAPSGSEPGGDGAGDCAHPDPRAPGAAAPSSGPGPCAAARESERQLRLRLCVLNEILGTERDYVGTLRFLQSAFLHRIRQNVADSVEKGLTEENVKVLFSNIEDILEVHKDFLAALEYCLHPEPQSQHELGNVFLKFKDKFCVYEEYCSNHEKALRLLVELNKIPTVRAFLLSCMLLGGRKTTDIPLEGYLLSPIQRICKYPLLLKELAKRTPGKHPDHPAVQSALQAMKTVCSNINETKRQMEKLEALEQLQSHIEGWEGSNLTDICTQLLLQGTLLKISAGNIQERAFFLFDNLLVYCKRKSRVTGSKKSTKRTKSINGSLYIFRGRINTEVMEVENVEDGTADYHSNGYTVTNGWKIHNTAKNKWFVCMAKTAEEKQKWLDAIIREREQRESLKLGMERDAYVMIAEKGEKLYHMMMNKKVNLIKDRRRKLSTVPKCFLGNEFVAWLLEIGEISKTEEGVNLGQALLENGIIHHVSDKHQFKNEQVMYRFRYDDGTYKARSELEDIMSKGVRLYCRLHSLYTPVIKDRDYHLKTYKSVLPGSKLVDWLLAQGDCQTREEAVALGVGLCNNGFMHHEHSSEPLHLQFPLPGCPACLIPAGNSVFLLS

SEQ ID NO: 6320 - protein, 801 aa, Artificial Sequence
  Synthetic polypeptide
MELSDANLQTLTEYLKKTLDPDPAIRRPAEKFLESVEGNQNYPLLLLTLLEKSQDNVIKVCASVTFKNYIKRNWRIVEDEPNKICEADRVAIKANIVHLMLSSPEQIQKQLSDAISIIGREDFPQKWPDLLTEMVNRFQSGDFHVINGVLRTAHSLFKRYRHEFKSNELWTEIKLVLDAFALPLTNLFKATIELCSTHANDASALRILFSSLILISKLFYSLNFQDLPEFFEDNMETWMNNFHTLLTLDNKLLQTDDEEEAGLLELLKSQICDNAALYAQKYDEEFQRYLPRFVTAIWNLLVTTGQEVKYDLLVSNAIQFLASVCERPHYKNLFEDQNTLTSICEKVIVPNMEFRAADEEAFEDNSEEYIRRDLEGSDIDTRRRAACDLVRGLCKFFEGPVTGIFSGYVNSMLQEYAKNPSVNWKHKDAAIYLVTSLASKAQTQKHGITQANELVNLTEFFVNHILPDLKSANVNEFPVLKADGIKYIMIFRNQVPKEHLLVSIPLLINHLQAESIVVHTYAAHALERLFTMRGPNNATLFTAAEIAPFVEILLTNLFKALTLPGSSENEYIMKAIMRSFSLLQEAIIPYIPTLITQLTQKLLAVSKNPSKPHFNHYMFEAICLSIRITCKANPAAVVNFEEALFLVFTEILQNDVQEFIPYVFQVMSLLLETHKNDIPSSYMALFPHLLQPVLWERTGNIPALVRLLQAFLERGSNTIASAAADKIPGLLGVFQKLIASKANDHQGFYLLNSIIEHMPPESVDQYRKQIFILLFQRLQNSKTTKFIKSDRVRPCLKKKKE

SEQ ID NO: 6321 - protein, 584 aa, Artificial Sequence
  Synthetic polypeptide
MLSNLNFQDLPEFFEDNMETWMNNFHTLLTLDNKLLQTDDEEEAGLLELLKSQICDNAALYAQKYDEEFQRYLPRFVTAIWNLLVTTGQEVKYDLLVSNAIQFLASVCERPHYKNLFEDQNTLTSICEKVIVPNMEFRAADEEAFEDNSEEYIRRDLEGSDIDTRRRAACDLVRGLCKFFEGPVTGIFSGYVNSMLQEYAKNPSVNWKHKDAAIYLVTSLASKAQTQKHGITQANELVNLTEFFVNHILPDLKSANVNEFPVLKADGIKYIMIFRNQVPKEHLLVSIPLLINHLQAESIVVHTYAAHALERLFTMRGPNNATLFTAAEIAPFVEILLTNLFKALTLPGSSENEYIMKAIMRSFSLLQEAIIPYIPTLITQLTQKLLAVSKNPSKPHFNHYMFEAICLSIRITCKANPAAVVNFEEALFLVFTEILQNDVQEFIPYVFQVMSLLLETHKNDIPSSYMALFPHLLQPVLWERTGNIPALVRLLQAFLERGSNTIASAAADKIPGLLGVFQKLIASKANDHQGFYLLNSIIEHMPPESVDQYRKQIFILLFQRLQNSKTTKFIKSDRVRPCLKKKKE

SEQ ID NO: 6322 - protein, 745 aa, Artificial Sequence
  Synthetic polypeptide
MELSDANLQTLTEYLKKTLDPDPAIRRPAEKFLESVEGNQNYPLLLLTLLEKSQDNVIKVCASVTFKNYIKRNWRIVEDEPNKICEADRVAIKANIVHLMLSSPEQIQKQLSDAISIIGREDFPQKWPDLLTEMVNRFQSGDFHVINGVLRTAHSLFKRYRHEFKSNELWTEIKLVLDAFALPLTNLFKATIELCSTHANDASALRILFSSLILISKLFYSLNFQDLPEFFEDNMETWMNNFHTLLTLDNKLLQTDLVSNAIQFLASVCERPHYKNLFEDQNTLTSICEKVIVPNMEFRAADEEAFEDNSEEYIRRDLEGSDIDTRRRAACDLVRGLCKFFEGPVTGIFSGYVNSMLQEYAKNPSVNWKHKDAAIYLVTSLASKAQTQKHGITQANELVNLTEFFVNHILPDLKSANVNEFPVLKADGIKYIMIFRNQVPKEHLLVSIPLLINHLQAESIVVHTYAAHALERLFTMRGPNNATLFTAAEIAPFVEILLTNLFKALTLPGSSENEYIMKAIMRSFSLLQEAIIPYIPTLITQLTQKLLAVSKNPSKPHFNHYMFEAICLSIRITCKANPAAVVNFEEALFLVFTEILQNDVQEFIPYVFQVMSLLLETHKNDIPSSYMALFPHLLQPVLWERTGNIPALVRLLQAFLERGSNTIASAAADKIPGLLGVFQKLIASKANDHQGFYLLNSIIEHMPPESVDQYRKQIFILLFQRLQNSKTTKFIKSDRVRPCLKKKKE

SEQ ID NO: 6323 - protein, 202 aa, Artificial Sequence
  Synthetic polypeptide
MPAGMTKHGSRSTSSLPPEPMEIVRSKACSRRVRLNVGGLAHEVLWRTLDRLPRTRLGKLRDCNTHDSLLEVCDDYSLDDNEYFFDRHPGAFTSILNFYRTGRLHMMEEMCALSFSQELDYWGIDEIYLESCCQARYHQKKEQMNEELKREAETLREREGEEFDNTCCAEKRKKLWDLLEKPNSSVAAKEMRIITEATMKSC

SEQ ID NO: 6324 - protein, 260 aa, Artificial Sequence
  Synthetic polypeptide
MGEKMAEEERFPNTTHEGFNVTLHTTLVVTTKLVLPTPGKPILPVQTGEQAQQEEQSSGMTIFFSLLVLAICIILVHLLIRYRLHFLPESVAVVSLGILMGAVIKIIEFKKLANWKEEEMFRPNMFFLLLLPPIIFESGYSLHKGNFFQNIGSITLFAVFGTAISAFVVGGGIYFLGQGFFFVCVCVFVCFILQADVISKLNMTDSFAFGSLISAVDPVATIAIFNALHVDPVLNMLVFGESILNDAVSIVLTNLRGGAP

SEQ ID NO: 6325 - protein, 244 aa, Artificial Sequence
  Synthetic polypeptide
MGEKMAEEERFPNTTHEGFNVTLHTTLVVTTKLVLPTPGKPILPVQTGEQAQQEEQSSGMTIFFSLLVLAICIILVHLLIRYRLHFLPESVAVVSLGILMGAVIKIIEFKKLANWKEEEMFRPNMFFLLLLPPIIFESGYSLHKGNFFQNIGSITLFAVFGTAISAFVVGGGIYFLGQADVISKLNMTDSFAFGSLISAVDPVATIAIFNALHVDPVLNMLVFGESILNDAVSIVLTNLRGGAP

SEQ ID NO: 6326 - protein, 25 aa, Artificial Sequence
  Synthetic polypeptide
MLVFGESILNDAVSIVLTNLRGGAP

SEQ ID NO: 6327 - protein, 415 aa, Artificial Sequence
  Synthetic polypeptide
MMGIGKNTTSKSMEAGSSTEGKYEDEAKHPAFFTLPVVINGGATSSGEQDNEDTELMAIYTTENGIAEKSSLAETLDSTGSLDPQRSDMIYTIEDVPPWYLCIFLGLQHYLTCFSGTIAVPFLLADAMCVGYDQWATSQLIGTIFFCVGITTLLQTTFGCRLPLFQASAFAFLAPARAILSLDKWKCNTTDVSVANGTAELLHTEHIWYPRIREIQGAIIMSSLIEVVIGLLGLPGALLKYIGPLTITPTVALIGLSGFQAAGERAGKHWGIAMLTIFLVLLFSQYARNVKFPLPIYKSKKGWTAYKLQLFKMFPIILAILVSWLLCFIFTVTDVFPPDSTKYGFYARTDARQGVLLVAPWFKVPYPCRARRDMPVTPALWGGRGRRITRGQEFKTSLANMVKPHLYKNTKMSQA

SEQ ID NO: 6328 - protein, 301 aa, Artificial Sequence
  Synthetic polypeptide
MMGIGKNTTSKSMEAGSSTEGKYEDEAKHPAFFTLPVVINGGATSSGEQDNEDTELMAIYTTENGIAEKSSLAETLDSTGSLDPQRSDMIYTIEDVPPWYLCIFLGLQHYLTCFSGTIAVPFLLADAMCVGYDQWATSQLIGTIFFCVGITTLLQTTFGCRTIFLVLLFSQYARNVKFPLPIYKSKKGWTAYKLQLFKMFPIILAILVSWLLCFIFTVTDVFPPDSTKYGFYARTDARQGVLLVAPWFKVPYPCRARRDMPVTPALWGGRGRRITRGQEFKTSLANMVKPHLYKNTKMSQA

SEQ ID NO: 6329 - protein, 46 aa, Artificial Sequence
  Synthetic polypeptide
GVRPVGHQPAHWDHFLLCGNHYFATDNVWMQDNIPSITVFSIRQKC

SEQ ID NO: 6330 - protein, 94 aa, Artificial Sequence
  Synthetic polypeptide
MSGPVPSRARVYTDVNTHRPREYWDYESHVVEWGNQDDYQLVRKLGRGKYSEVFEAINITNNEKVVVKILKSQVLEGLKWEDRLSLEVEGCTDL

SEQ ID NO: 6331 - protein, 13 aa, Artificial Sequence
  Synthetic polypeptide
MASICPFLKQWLN

SEQ ID NO: 6332 - protein, 71 aa, Artificial Sequence
  Synthetic polypeptide
MQRTGGGAPRPGRNHGLPGSLRQPDPVALLMLLVDADQPEPMRSGARELALFLTPEPGAEGCCEDSWSKWL

SEQ ID NO: 6333 - protein, 41 aa, Artificial Sequence
  Synthetic polypeptide
MLLVDADQPEPMRSGARELALFLTPEPGAEGCCEDSWSKWL

SEQ ID NO: 6334 - protein, 126 aa, Artificial Sequence
  Synthetic polypeptide
MQRTGGGAPRPGRNHGLPGSLRQPDPVALLMLLVDADQPEPMRSGARELALFLTPEPGAEAKEVEETIEGMLLRLEEFCSLADLIRSDTSQILEENIPVLKAKLTEMRGIYAKVDRLEARCSGSCL

SEQ ID NO: 6335 - protein, 96 aa, Artificial Sequence
  Synthetic polypeptide
MLLVDADQPEPMRSGARELALFLTPEPGAEAKEVEETIEGMLLRLEEFCSLADLIRSDTSQILEENIPVLKAKLTEMRGIYAKVDRLEARCSGSCL

SEQ ID NO: 6336 - protein, 925 aa, Artificial Sequence
  Synthetic polypeptide
MNAPERQPQPDGGDAPGHEPGGSPQDELDFSILFDYEYLNPNEEEPNAHKVASPPSGPAYPDDVLDYGLKPYSPLASLSGEPPGRFGEPDRVGPQKFLSAAKPAGASGLSPRIEITPSHELIQAVGPLRMRDAGLLVEQPPLAGVAASPRFTLPVPGFEGYREPLCLSPASSGSSASFISDTFSPYTSPCVSPNNGGPDDLCPQFQNIPAHYSPRTSPIMSPRTSLAEDSCLGRHSPVPRPASRSSSPGAKRRHSCAEALVALPPGASPQRSRSPSPQPSSHVAPQDHGSPAGYPPVAGSAVIMDALNSLATDSPCGIPPKMWKTSPDPSPVSAAPSKAGLPRHIYPAVEFLGPCEQGERRNSAPESILLVPPTWPKPLVPAIPICSIPVTASLPPLEWPLSSQSGSYELRIEVQPKPHHRAHYETEGSRGAVKAPTGGHPVVQLHGYMENKPLGLQIFIGTADERILKPHAFYQVHRITGKTVTTTSYEKIVGNTKVLEIPLEPKNNMRATIDCAGILKLRNADIELRKGETDIGRKNTRVRLVFRVHIPESSGRIVSLQTASNPIECSQRSAHELPMVERQDTDSCLVYGGQQMILTGQNFTSESKVVFTEKTTDGQQIWEMEATVDKDKSQPNMLFVEIPEYRNKHIRTPVKVNFYVINGKRKRSQPQHFTYHPVPAIKTEPTDEYDPTLICSPTHGGLGSQPYYPQHPMVAESPSCLVATMAPCQQFRTGLSSPDARYQQQNPAAVLYQRSKSLSPSLLGYQQPALMAAPLSLADAHRSVLVHAGSQGQSSALLHPSPTNQQASPVIHYSPTNQQLRCGSHQEFQHIMYCENFAPGTTRPGPPPVSQGQRLSPGSYPTVIQQQNATSQRAAKNGPPVSDQKEVLPAGVTIKQEQNLDQTYLDDGHPCYLLSPASANGPSSS

SEQ ID NO: 6337 - protein, 905 aa, Artificial Sequence
  Synthetic polypeptide
MQREAAFRLGHCHPLRIMGSVDQEEPNAHKVASPPSGPAYPDDVLDYGLKPYSPLASLSGEPPGRFGEPDRVGPQKFLSAAKPAGASGLSPRIEITPSHELIQAVGPLRMRDAGLLVEQPPLAGVAASPRFTLPVPGFEGYREPLCLSPASSGSSASFISDTFSPYTSPCVSPNNGGPDDLCPQFQNIPAHYSPRTSPIMSPRTSLAEDSCLGRHSPVPRPASRSSSPGAKRRHSCAEALVALPPGASPQRSRSPSPQPSSHVAPQDHGSPAGYPPVAGSAVIMDALNSLATDSPCGIPPKMWKTSPDPSPVSAAPSKAGLPRHIYPAVEFLGPCEQGERRNSAPESILLVPPTWPKPLVPAIPICSIPVTASLPPLEWPLSSQSGSYELRIEVQPKPHHRAHYETEGSRGAVKAPTGGHPVVQLHGYMENKPLGLQIFIGTADERILKPHAFYQVHRITGKTVTTTSYEKIVGNTKVLEIPLEPKNNMRATIDCAGILKLRNADIELRKGETDIGRKNTRVRLVFRVHIPESSGRIVSLQTASNPIECSQRSAHELPMVERQDTDSCLVYGGQQMILTGQNFTSESKVVFTEKTTDGQQIWEMEATVDKDKSQPNMLFVEIPEYRNKHIRTPVKVNFYVINGKRKRSQPQHFTYHPVPAIKTEPTDEYDPTLICSPTHGGLGSQPYYPQHPMVAESPSCLVATMAPCQQFRTGLSSPDARYQQQNPAAVLYQRSKSLSPSLLGYQQPALMAAPLSLADAHRSVLVHAGSQGQSSALLHPSPTNQQASPVIHYSPTNQQLRCGSHQEFQHIMYCENFAPGTTRPGPPPVSQGQRLSPGSYPTVIQQQNATSQRAAKNGPPVSDQKEVLPAGVTIKQEQNLDQTYLDDGHPCYLLSPASANGPSSS

SEQ ID NO: 6338 - protein, 706 aa, Artificial Sequence
  Synthetic polypeptide
MSPRTSLAEDSCLGRHSPVPRPASRSSSPGAKRRHSCAEALVALPPGASPQRSRSPSPQPSSHVAPQDHGSPAGYPPVAGSAVIMDALNSLATDSPCGIPPKMWKTSPDPSPVSAAPSKAGLPRHIYPAVEFLGPCEQGERRNSAPESILLVPPTWPKPLVPAIPICSIPVTASLPPLEWPLSSQSGSYELRIEVQPKPHHRAHYETEGSRGAVKAPTGGHPVVQLHGYMENKPLGLQIFIGTADERILKPHAFYQVHRITGKTVTTTSYEKIVGNTKVLEIPLEPKNNMRATIDCAGILKLRNADIELRKGETDIGRKNTRVRLVFRVHIPESSGRIVSLQTASNPIECSQRSAHELPMVERQDTDSCLVYGGQQMILTGQNFTSESKVVFTEKTTDGQQIWEMEATVDKDKSQPNMLFVEIPEYRNKHIRTPVKVNFYVINGKRKRSQPQHFTYHPVPAIKTEPTDEYDPTLICSPTHGGLGSQPYYPQHPMVAESPSCLVATMAPCQQFRTGLSSPDARYQQQNPAAVLYQRSKSLSPSLLGYQQPALMAAPLSLADAHRSVLVHAGSQGQSSALLHPSPTNQQASPVIHYSPTNQQLRCGSHQEFQHIMYCENFAPGTTRPGPPPVSQGQRLSPGSYPTVIQQQNATSQRAAKNGPPVSDQKEVLPAGVTIKQEQNLDQTYLDDGHPCYLLSPASANGPSSS

SEQ ID NO: 6339 - protein, 442 aa, Artificial Sequence
  Synthetic polypeptide
MNASSEGESFAGSVQIPGGTTVLVELTPDIHICGICKQQFNNLDAFVAHKQSGCQLTGTSAAAPSTVQFVSEETVPATQTQTTTRTITSETQTITVSAPEFVFEHGYQTYLPTESNENQTATVISLPAKSRTKKPTTPPAQKRLNCCYPGCQFKTAYGMKDMERHLKIHTGDKPHKCEVCGKCFSRKDKLKTHMRCHTGVKPYKCKTCDYAAADSSSLNKHLRIHSDERPFKCQICPYASRNSSQLTVHLRSHTASELDDDVPKANCLSTESTDTPKAPVITLPSEAREQMATLGERTFNCCYPGCHFKTVHGMKDLDRHLRIHTGDKPHKCEFCDKCFSRKDNLTMHMRCHTSVKPHKCHLCDYAAVDSSSLKKHLRIHSDERPYKCQLCPYASRNSSQLTVHLRSHTGRARWLTPVIPDFGRPRRADHEVRRSRPSWLTR

SEQ ID NO: 6340 - protein, 223 aa, Artificial Sequence
  Synthetic polypeptide
MSRRKQAKPQHLNSEEPRPARRECAEVAPQVAGEPASELDDDVPKANCLSTESTDTPKAPVITLPSEAREQMATLGERTFNCCYPGCHFKTVHGMKDLDRHLRIHTGDKPHKCEFCDKCFSRKDNLTMHMRCHTSVKPHKCHLCDYAAVDSSSLKKHLRIHSDERPYKCQLCPYASRNSSQLTVHLRSHTGRARWLTPVIPDFGRPRRADHEVRRSRPSWLTR

SEQ ID NO: 6341 - protein, 37 aa, Artificial Sequence
  Synthetic polypeptide
REDVQLLLPRLPLQNCPWHERLGPPSQNPHGRQTAQV

SEQ ID NO: 6342 - protein, 245 aa, Artificial Sequence
  Synthetic polypeptide
MRGHPSLRPPWHWASAARLEGGFLPWGYVSNALSREGLTEERTFERRPEGWEGASCAASELDDDVPKANCLSTESTDTPKAPVITLPSEAREQMATLGERTFNCCYPGCHFKTVHGMKDLDRHLRIHTGDKPHKCEFCDKCFSRKDNLTMHMRCHTSVKPHKCHLCDYAAVDSSSLKKHLRIHSDERPYKCQLCPYASRNSSQLTVHLRSHTGRARWLTPVIPDFGRPRRADHEVRRSRPSWLTR

SEQ ID NO: 6343 - protein, 42 aa, Artificial Sequence
  Synthetic polypeptide
MTELRQRVAHEPVAPPEDKIIGGSTITLSPAQWLAGAEDHRF

SEQ ID NO: 6344 - protein, 10 aa, Artificial Sequence
  Synthetic polypeptide
MSRLRHPRTR

SEQ ID NO: 6345 - protein, 239 aa, Artificial Sequence
  Synthetic polypeptide
MSSPISKSRSLAAFLQQLRSPRQPPRLVTSTAYTSPQPREVPVCPLTAGGETQNAAALPGPTSWPLLGSLLQILWKGGLKKQHDTLVEYHKKYGKIFRMKLGSFESVHLGSPCLLEALYRTESAYPQRLEIKPWKAYRDYRKEGYGLLILEGEDWQRVRSAFQKKLMKPGEVMKLDNKINEVLADFMGRIDELCDERGHVEDLYSELNKWSFENASAHTTTYTLVCIHTHKEKEMAARC

SEQ ID NO: 6346 - protein, 97 aa, Artificial Sequence
  Synthetic polypeptide
MYSCFSHREGEDWQRVRSAFQKKLMKPGEVMKLDNKINEVLADFMGRIDELCDERGHVEDLYSELNKWSFENASAHTTTYTLVCIHTHKEKEMAARC

SEQ ID NO: 6347 - protein, 360 aa, Artificial Sequence [sequence omitted]

SEQ ID NO: 6348 - protein, 171 aa, Artificial Sequence
  Synthetic polypeptide
MGCDGGTIPKRHELVKGPKKVEKVDKDAELVAQWNYCTLSQEILRRPIVACELGRLYNKDAVIEFLLDKSAEKALGKAASHIKSIKNVTELKLSDNPAWEGDKGNTKGDKHDDLQRARFICPVVGLEMNGRHRFCFLRCCGCVFSERALKEIKAEVCHTGIFSPEHVACPQ

SEQ ID NO: 6349 - protein, 201 aa, Artificial Sequence
  Synthetic polypeptide
MGCDGGTIPKRHELVKGPKKVEKIWHLKNGKEWCSLHSEGKNKNGKEWDMEYDVDKDAELVAQWNYCTLSQEILRRPIVACELGRLYNKDAVIEFLLDKSAEKALGKAASHIKSIKNVTELKLSDNPAWEGDKGNTKGDKHDDLQRARFICPVVGLEMNGRHRFCFLRCCGCVFSERALKEIKAEVCHTGIFSPEHVACPQ

SEQ ID NO: 6350 - protein, 141 aa, Artificial Sequence
  Synthetic polypeptide
MHVRSLRAAAPHSFVALWAPLFLLRSALADFSLDNEVHSSFIHRRLRSQERREMQREILSILGLPHRPRPHLQGKHNSAPMFMLDLYNAMAVEEGGGPGGQGFSYPYKAVFSTQGPPLASLQDSHFLTDADMVMSFVNLAA

SEQ ID NO: 6351 - protein, 8 aa, Artificial Sequence
  Synthetic polypeptide
PPSGQPAR

SEQ ID NO: 6352 - protein, 66 aa, Artificial Sequence
  Synthetic polypeptide
MALRELKVCLLGDTGVGKSSIVWRFVEDSFDPNINPTIGSCHLIISCMRRGTVSEMTTDSCILSPQ

SEQ ID NO: 6353 - protein, 98 aa, Artificial Sequence
  Synthetic polypeptide
MALRELKVCLLGDTGVGKSSIVWRFVEDSFDPNINPTIGASFMTKTVQYQNELHKFLIWDTAGQERTVSSLRARTAFISLLSAPWHMVLMPIGLCLLI

SEQ ID NO: 6354 - protein, 70 aa, Artificial Sequence
  Synthetic polypeptide
MALRELKVCLLGDTGVGKSSIVWRFVEDSFDPNINPTIGASFMTKTVQYQNELHKFLIWDTAGQERVYVY

SEQ ID NO: 6355 - protein, 63 aa, Artificial Sequence
  Synthetic polypeptide
MAARDATSGSLSEESSALDLPSACDIRDYVLQGPSQEANSEAFSSLEFHSFPYSSDVDPDPNY

SEQ ID NO: 6356 - protein, 110 aa, Artificial Sequence
  Synthetic polypeptide
MESHSCSPSWSTMTISAHCNLRLPSASQSVGITGVSHHIWPRIFYMTMAARDATSGSLSEESSALDLPSACDIRDYVLQGPSQEANSEAFSSLEFHSFPYSSDVDPDPNY

SEQ ID NO: 6357 - protein, 226 aa, Artificial Sequence
  Synthetic polypeptide
MLALRVARGSWGALRGAAWAPGTRPSKRRACWALLPPVPCCLGCLAERWRLRPAALGLRLPGIGQRNHCSGAGKAAPRPAAGAGAAAEAPGGQWGPASTPSLYENPWTIPNMLSMTRIGLAPVLGYLIIEEDFNIALGVFALAGLTDLLDGFIARNWANQRSALGSALDPLADKILISILYVSLTYADLIPEIATATPAFSNHHTDQSAAVNIEVRSSTSKKIMTH

SEQ ID NO: 6358 - protein, 127 aa, Artificial Sequence
  Synthetic polypeptide
MPQYENPWTIPNMLSMTRIGLAPVLGYLIIEEDFNIALGVFALAGLTDLLDGFIARNWANQRSALGSALDPLADKILISILYVSLTYADLIPEIATATPAFSNHHTDQSAAVNIEVRSSTSKKIMTH

SEQ ID NO: 6359 - protein, 54 aa, Artificial Sequence
  Synthetic polypeptide
MPIAFNEPLSFLQRITEYMEHVYLIHRASCQPQPLERMQPGAVLHACNASYLGG

SEQ ID NO: 6360 - protein, 146 aa, Artificial Sequence
  Synthetic polypeptide
MNGEEEFFDAVTGFDSDNSSGEFSEANQKVTGMIDLDTSKNNRIGKTGERPSQENGIQKHRTSLPAPMFSRSDFSVWTILKKCVGLELSKITMPIAFNEPLSFLQRITEYMEHVYLIHRASCQPQPLERMQPGAVLHACNASYLGG

SEQ ID NO: 6361 - protein, 134 aa, Artificial Sequence
  Synthetic polypeptide
MNGEEEFFDAVTEANQKVTGMIDLDTSKNNRIGKTGERPSQENGIQKHRTSLPAPMFSRSDFSVWTILKKCVGLELSKITMPIAFNEPLSFLQRITEYMEHVYLIHRASCQPQPLERMQPGAVLHACNASYLGG

SEQ ID NO: 6362 - protein, 2588 aa, Artificial Sequence
  Synthetic polypeptide
MAKRLCAGSALCVRGPRGPAPLLLVGLALLGAARAREEAGGGFSLHPPYFNLAEGARIAASATCGEEAPARGSPRPTEDLYCKLVGGPVAGGDPNQTIRGQYCDICTAANSNKAHPASNAIDGTERWWQSPPLSRGLEYNEVNVTLDLGQVFHVAYVLIKFANSPRPDLWVLERSMDFGRTYQPWQFFASSKRDCLERFGPQTLERITRDDAAICTTEYSRIVPLENGEIVVSLVNGRPGAMNFSYSPLLREFTKATNVRLRFLRTNTLLGHLMGKALRDPTVTRRYYYSIKDISIGGRCVCHGHADACDAKDPTDPFRLQCTCQHNTCGGTCDRCCPGFNQQPWKPATANSANECQSCNCYGHATDCYYDPEVDRRRASQSLDGTYQGGGVCIDCQHHTTGVNCERCLPGFYRSPNHPLDSPHVCRRCNCESDFTDGTCEDLTGRCYCRPNFSGERCDVCAEGFTGFPSCYPTPSSSNDTREQVLPAGQIVNCDCSAAGTQGNACRKDPRVGRCLCKPNFQGTHCELCAPGFYGPGCQPCQCSSPGVADDRCDPDTGQCRCRVGFEGATCDRCAPGYFHFPLCQLCGCSPAGTLPEGCDEAGRCLCQPEFAGPHCDRCRPGYHGFPNCQACTCDPRGALDQLCGAGGLCRCRPGYTGTACQECSPGFHGFPSCVPCHCSAEGSLHAACDPRSGQCSCRPRVTGLRCDTCVPGAYNFPYCEAGSCHPAGLAPVDPALPEAQVPCMCRAHVEGPSCDRCKPGFWGLSPSNPEGCTRCSCDLRGTLGGVAECQPGTGQCFCKPHVCGQACASCKDGFFGLDQADYFGCRSCRCDIGGALGQSCEPRTGVCRCRPNTQGPTCSEPARDHYLPDLHHLRLELEEAATPEGHAVRFGFNPLEFENFSWRGYAQMAPVQPRIVARLNLTSPDLFWLVFRYVNRGAMSVSGRVSVREEGRSATCANCTAQSQPVAFPPSTEPAFITVPQRGFGEPFVLNPGTWALRVEAEGVLLDYVVLLPSAYYEAALLQLRVTEACTYRPSAQQSGDNCLLYTHLPLDGFPSAAGLEALCRQDNSLPRPCPTEQLSPSHPPLITCTGSDVDVQLQVAVPQPGRYALVVEYANEDARQEVGVAVHTPQRAPQQGLLSLHPCLYSTLCRGTARDTQDHLAVFHLDSEASVRLTAEQARFFLHGVTLVPIEEFSPEFVEPRVSCISSHGAFGPNSAACLPSRFPKPPQPIILRDCQVIPLPPGLPLTHAQDLTPAMSPAGPRPRPPTAVDPDAEPTLLREPQATVVFTTHVPTLGRYAFLLHGYQPAHPTFPVEVLINAGRVWQGHANASFCPHGYGCRTLVVCEGQALLDVTHSELTVTVRVPKGRWLWLDYVLVVPENVYSFGYLREEPLDKSYDFISHCAAQGYHISPSSSSLFCRNAAASLSLFYNNGARPCGCHEVGATGPTCEPFGGQCPCHAHVIGRDCSRCATGYWGFPNCRPCDCGARLCDELTGQCICPPRTIPPDCLLCQPQTFGCHPLVGCEECNCSGPGIQELTDPTCDTDSGQCKCRPNVTGRRCDTCSPGFHGYPRCRPCDCHEAGTAPGVCDPLTGQCYCKENVQGPKCDQCSLGTFSLDAANPKGCTRCFCFGATERCRSSSYTRQEFVDMEGWVLLSTDRQVVPHERQPGTEMLRADLRHVPEAVPEAFPELYWQAPPSYLGDRVSSYGGTLRYELHSETQRGDVFVPMESRPDVVLQGNQMSITFLEPAYPTPGHVHRGQLQLVEGNFRHTETRNTVSREELMMVLASLEQLQIRALFSQISSAVFLRRVALEVASPAGQGALASNVELCLCPASYRGDSCQECAPGFYRDVKGLFLGRCVPCQCHGHSDRCLPGSGVCVDCQHNTEGAHCERCQAGFVSSRDDPSAPCVSCPCPLSVPSNNFAEGCVLRGGRTQCLCKPGYAGASCERCAPGFFGNPLVLGSSCQPCDCSGNGDPNLLFSDCDPLTGACRGCLRHTTGPRCEICAPGFYGNALLPGNCTRCDCTPCGTEACDPHSGHCLCKAGVTGRRCDRCQEGHFGFDGCGGCRPCACGPAAEGSECHPQSGQCHCRPGTMGPQCRECAPGYWGLPEQGCRRCQCPGGRCDPHTGRCNCPPGLSGERCDTCSQQHQVPVPGGPVGHSIHCEVCDHCVVLLLDDLERAGALLPAIHEQLRGINASSMAWARLHRLNASIADLQSQLRSPLGPRHETAQQLEVLEQQSTSLGQDARRLGGQAVGTRDQASQLLAGTEATLGHAKTLLAAIRAVDRTLSELMSQTGHLGLANASAPSGEQLLRTLAEVERLLWEMRARDLGAPQAAAEAELAAAQRLLARVQEQLSSLWEENQALATQTRDRLAQHEAGLMDLREALNRAVDATREAQELNSRNQERLEEALQRKQELSRDNATLQATLHAARDTLASVFRLLHSLDQAKEELERLAASLDGARTPLLQRMQTFSPAGSKLRLVEAAEAHAQQLGQLALNLSSIILDVNQDRLTQRAIEASNAYSRILQAVQAAEDAAGQALQQADHTWATVVRQGLVDRAQQLLANSTALEEAMLQEQQRLGLAMP

SEQ ID NO: 6363 - protein, 500 aa, Artificial Sequence
  Synthetic polypeptide
MAKRLCAGSALCVRGPRGPAPLLLVGLALLGAARAREEAGGGFSLHPPYFNLAEGARIAASATCGEEAPARGSPRPTEDLYCKLVGGPVAGGDPNQTIRGQYCDICTAANSNKAHPASNAIDGTERWWQSPPLSRGLEYNEVNVTLDLGQVFHVAYVLIKFANSPRPDLWVLERSMDFGRTYQPWQFFASSKRDCLERFGPQTLERITRDDAAICTTEYSRIVPLENGEIVVSLVNGRPGAMNFSYSPLLREFTKATNVRLRFLRTNTLLGHLMGKALRDPTVTRRYYYSIKDISIGGRCVCHGHADACDAKDPTDPFRLQCTCQHNTCGGTCDRCCPGFNQQPWKPATANSANECQSCNCYGHATDCYYDPEVDRRRASQSLDGTYQGGGVCIDCQHHTTGVNCERCLPGFYRSPNHPLDSPHVCRRCNCESDFTDGTCEDLTGRCYCRPNFSGERCDVCAEGFTGFPSCYPTPSSSNDTREQVLPAGQIVTGHGGGHL

SEQ ID NO: 6364 - protein, 683 aa, Artificial Sequence
  Synthetic polypeptide
MPLHQLGDKPLTFPSPNSAMENGLDHTPPSRRASPGTPLSPGSLRSAAHSPLDTSKQPLCQLWAEKHGARGTHEVRYVSAGQSVACGWWAFAPPCLQVLNTPKGILFFLCAAAFLQGMTVNGFINTVITSLERRYDLHSYQSGLIASSYDIAACLCLTFVSYFGGSGHKPRWLGWGVLLMGTGSLVFALPHFTAGRYEVELDAGVRTCPANPGAVCADSTSGLSRYQLVFMLGQFLHGVGATPLYTLGVTYLDENVKSSCSPVYIAIFYTAAILGPAAGYLIGGALLNIYTEMGRRTELTTESPLWVGAWWVGFLGSGAAAFFTAVPILGYPRQLPGSQRYAVMRAAEMHQLKDSSRGEASNPDFGKTIRDLPLSIWLLLKNPTFILLCLAGATEATLITGMSTFSPKFLESQFSLSASEAATLFGYLVVPAGGGGTFLGGFFVNKLRLRGSAVIKFCLFCTVVSLLGILVFSLHCPSVPMAGVTASYGGSLLPEGHLNLTAPCNAACSCQPEHYSPVCGSDGLMYFSLCHAGCPAATETNVDGQKVYRDCSCIPQNLSSGFGHATAGKCTSTCQRKPLLLVFIFVVIFFTFLSSIPALTATLRCVRDPQRSFALGIQWIVVRILGGIPGPIAFGWVIDKACLLWQDQCGQQGSCLVYQNSAMSRYILIMGLLYKDSDSPFVQ

SEQ ID NO: 6365 - protein, 112 aa, Artificial Sequence
  Synthetic polypeptide
TTALCAARTASCTSHCATQGALQPRRRMWTARRCVRDPQRSFALGIQWIVVRILGGIPGPIAFGWVIDKACLLWQDQCGQQGSCLVYQNSAMSRYILIMGLLYKDSDSPFVQ

SEQ ID NO: 6366 - protein, 724 aa, Artificial Sequence
  Synthetic polypeptide
MPLHQLGDKPLTFPSPNSAMENGLDHTPPSRRASPGTPLSPGSLRSAAHSPLDTSKQPLCQLWAEKHGARGTHEVRYVSAGQSVACGWWAFAPPCLQVLNTPKGILFFLCAAAFLQGMTVNGFINTVITSLERRYDLHSYQSGLIASSYDIAACLCLTFVSYFGGSGHKPRWLGWGVLLMGTGSLVFALPHFTAGRYEVELDAGVRTCPANPGAVCADSTSGLSRYQLVFMLGQFLHGVGATPLYTLGVTYLDENVKSSCSPVYIAIFYTAAILGPAAGYLIGGALLNIYTEMGRRTELTTESPLWVGAWWVGFLGSGAAAFFTAVPILGYPRQLPGSQRYAVMRAAEMHQLKDSSRGEASNPDFGKTIRDLPLSIWLLLKNPTFILLCLAGATEATLITGMSTFSPKFLESQFSLSASEAATLFGYLVVPAGGGGTFLGGFFVNKLRLRGSAVIKFCLFCTVVSLLGILVFSLHCPSVPMAGVTASYGGSLLPEGHLNLTAPCNAACSCQPEHYSPVCGSDGLMYFSLCHAGCPAATETNVDGQKVYRDCSCIPQNLSSGFGHATAGKCTSTCQRKPLLLVFIFVVIFFTFLSSIPALTATLRCVRDPQRSFALGIQWIVVRILGGIPGPIAFGWVIDKACLLWQDQCGQQGSCLVYQNSAMSRYILIMGLLYKKTAVCRPRKGPSLGAQPCSWASGLQNVGKARPLFEPPSYGSVMAAELTE

SEQ ID NO: 6367 - protein, 153 aa, Artificial Sequence
  Synthetic polypeptide
TTALCAARTASCTSHCATQGALQPRRRMWTARRCVRDPQRSFALGIQWIVVRILGGIPGPIAFGWVIDKACLLWQDQCGQQGSCLVYQNSAMSRYILIMGLLYKKTAVCRPRKGPSLGAQPCSWASGLQNVGKARPLFEPPSYGSVMAAELTE

SEQ ID NO: 6368 - protein, 287 aa, Artificial Sequence
  Synthetic polypeptide
MRLNSSAPGTPGTPAADPFQRAQAGLEEALLAPGFGNASGNASERVLAAPSSELDVNTDIYSKVLVTAVYLALFVVGTVGNTVTAFTLARKKSLQSLQSTVHYHLGSLALSDLLTLLLAMPVELYNFIWVHHPWAFGDAGCRGYYFLRDACTYATALNVASLSVERYLAICHPFKAKTLMSRSRTKKFISAIWLASALLAVPMLFTMGEQNRSADGQHAGGLVCTPTIHTATVKVVIQKRLAFALLSLTPSCCPVKKVPASPSTMIVGLLRLPQPCRTVSQFNLFPL

SEQ ID NO: 6369 - protein, 338 aa, Artificial Sequence
  Synthetic polypeptide
MRLNSSAPGTPGTPAADPFQRAQAGLEEALLAPGFGNASGNASERVLAAPSSELDVNTDIYSKVLVTAVYLALFVVGTVGNTVTAFTLARKKSLQSLQSTVHYHLGSLALSDLLTLLLAMPVELYNFIWVHHPWAFGDAGCRGYYFLRDACTYATALNVASLSVERYLAICHPFKAKTLMSRSRTKKFISAIWLASALLAVPMLFTMGEQNRSADGQHAGGLVCTPTIHTATVKVVIQVNTFMSFIFPMVVISVLNTIIANKLTVMVRQAAEQGQVCTVGGEHSTFSMAIEPGRVQALRHGVRVLRAVVIAFVVCWLPYHVRRLMFCYISDEQWTPPG

SEQ ID NO: 6370 - protein, 194 aa, Artificial Sequence
  Synthetic polypeptide
MAGPRACAPLLLLLLLGELLAAAGAQRVGLPGPPGPPGPPGKPGQDGIDGEAGPPGLPGPPGPKGAPGKPGKPGEAGLPGLPGVDGLTGRDGPPGPKGAPGERGSLGPPGPPGLGGKGLPGPPGEAGVSGPPGGIGLRGPPGPSGLPGLPGPPGPPGPPGHPGVLPEGATDLQLLGWLWWEDHLSPGGSGCRVL

SEQ ID NO: 6371 - protein, 157 aa, Artificial Sequence
  Synthetic polypeptide
MWWSSTQNAGTEGEAGPPGLPGPPGPKGAPGKPGKPGEAGLPGLPGVDGLTGRDGPPGPKGAPGERGSLGPPGPPGLGGKGLPGPPGEAGVSGPPGGIGLRGPPGPSGLPGLPGPPGPPGPPGHPGVLPEGATDLQLLGWLWWEDHLSPGGSGCRVL

SEQ ID NO: 6372 - protein, 603 aa, Artificial Sequence
  Synthetic polypeptide
MAGPRACAPLLLLLLLGELLAAAGAQRVGLPGPPGPPGPPGKPGQDGIDGEAGPPGLPGPPGPKGAPGKPGKPGEAGLPGLPGVDGLTGRDGPPGPKGAPGERGSLGPPGPPGLGGKGLPGPPGEAGVSGPPGGIGLRGPPGPSGLPGLPGPPGPPGPPGHPGVLPEGATDLQCPSICPPGPPGPPGMPGFKGPTGYKGEQGEVGKDGEKGDPGPPGPAGLPGSVGLQGPRGLRGLPGPLGPPGDRGPIGFRGPPGIPGAPGKAGDRGERGPEGFRGPKGDLGRPGPKGTPGVAGPSGEPGMPGKDGQNGVPGLDGQKGEAGRNGAPGEKGPNGLPGLPGRAGSKGEKGERGRAGELGEAGPSGEPGVPGDAGMPGERGEAGHRGSAGALGPQGPPGAPGVRGFQGQKGSMGDPGLPGPQGLRGDVGDRGPGGAAGPKGDQGIAGSDGLPGDKGELGPSGLVGPKGESGSRGELGPKGTQGPNGTSGVQGVPGPPGPLGLQGVPGVPGITGKPGVPGKEASEQRIRELCGGMISEQIAQLAAHLRKPLAPGSIGRPGPAGPPGPPGPPGSIGHPGARGPPGYRGPTGELGDPGPRAGHGGTRL

SEQ ID NO: 6373 - protein, 624 aa, Artificial Sequence
  Synthetic polypeptide
MAGPRACAPLLLLLLLGELLAAAGAQRVGLPGPPGPPGPPGKPGQDGIDGEAGPPGLPGPPGPKGAPGKPGKPGEAGLPGLPGVDGLTGRDGPPGPKGAPGERGSLGPPGPPGLGGKGLPGPPGEAGVSGPPGGIGLRGPPGPSGLPGLPGPPGPPGPPGHPGVLPEGATDLQCPSICPPGPPGPPGMPGFKGPTGYKGEQGEVGKDGEKGDPGPPGPAGLPGSVGLQGPRGLRGLPGPLGPPGDRGPIGFRGPPGIPGAPGKAGDRGERGPEGFRGPKGDLGRPGPKGTPGVAGPSGEPGMPGKDGQNGVPGLDGQKGEAGRNGAPGEKGPNGLPGLPGRAGSKGEKGERGRAGELGEAGPSGEPGVPGDAGMPGERGEAGHRGSAGALGPQGPPGAPGVRGFQGQKGSMGDPGLPGPQGLRGDVGDRGPGGAAGPKGDQGIAGSDGLPGDKGELGPSGLVGPKGESGSRGELGPKGTQGPNGTSGVQGVPGPPGPLGLQGVPGVPGITGKPGVPGKEASEQRIRELCGGMISEQIAQLAAHLRKPLAPGSIGRPGPAGPPGPPGPPGSIGHPGARGPPGYRGPTGELGDPGPRGRGCSELRSHHCTPAWATERDSVSIKEKK

SEQ ID NO: 6374 - protein, 199 aa, Artificial Sequence
  Synthetic polypeptide
MKAGGNAKFREFLESQEDYDPCWSLQEKYNSRAAALFRDKVVALAEGREWSLESSPAQNWTPPQPRTLPSMVHRVSGQPQSVTASSDKAFEDWLNDDLGSYQGAQGNRYVGFGNTPPPQKKEDDFLNNAMSSLYSTESCFVAQAADWRAVVRPQLTATSASQVQENCLNPGGGGCREPRQHHCTPTWATESDSISEKKK

SEQ ID NO: 6375 - protein, 115 aa, Artificial Sequence
  Synthetic polypeptide
METENAAAAAAAAFTASSQLKEAVLVKMAEEGENLEAEIVYPITCGDSRANLIWRKFVCPGINVKCVQYDEHVISPKEFVHLAGKSTLKDWKRAIRMNGIMLRRLRQEDHLTPRV

SEQ ID NO: 6376 - protein, 166 aa, Artificial Sequence
  Synthetic polypeptide
MATPDVSVHMEEVVVVTTPDTAVDGSGVEGVKTVLVTTNLAPHGGDLTEDNMETENAAAAAAAAFTASSQLKEAVLVKMAEEGENLEAEIVYPITCGDSRANLIWRKFVCPGINVKCVQYDEHVISPKEFVHLAGKSTLKDWKRAIRMNGIMLRRLRQEDHLTPRV

SEQ ID NO: 6377 - protein, 84 aa, Artificial Sequence
  Synthetic polypeptide
METENAAAAAAAAFTASSQLKEAVLVKMAEEGENLEAEIVYPITCGDSRANLIWRKFVCPGINVKCVQAEIGGLQMEALCCEEV

SEQ ID NO: 6378 - protein, 135 aa, Artificial Sequence
  Synthetic polypeptide
MATPDVSVHMEEVVVVTTPDTAVDGSGVEGVKTVLVTTNLAPHGGDLTEDNMETENAAAAAAAAFTASSQLKEAVLVKMAEEGENLEAEIVYPITCGDSRANLIWRKFVCPGINVKCVQAEIGGLQMEALCCEEV

SEQ ID NO: 6379 - protein, 247 aa, Artificial Sequence
  Synthetic polypeptide
MPKIVLNGVTVDFPFQPYKCQQEYMTKVLECLQQKVNGILESPTGTGKTLCLLCTTLAWREHLRDGISARKIAERAQGELFPDRALSSWGNAAAAAGDPIACYTDIPKIIYASRTHSQLTQVINELRNTSYRPKVCVLGSREQLCIHPEVKKQESNHLQIHLCRKKVASRSCHFYNNVEEKSLEQELASPILDIEDLVKSGSKHRVCPYYLSRNLKQQADIIFMPYNYLLDAKLPKLGSSPREPIHR

SEQ ID NO: 6380 - protein, 271 aa, Artificial Sequence
  Synthetic polypeptide
MPKIVLNGVTVDFPFQPYKCQQEYMTKVLECLQQKVNGILESPTGTGKTLCLLCTTLAWREHLRDGISARKIAERAQGELFPDRALSSWGNAAAAAGDPIACYTDIPKIIYASRTHSQLTQVINELRNTSYRSRCRATLWVLETAPPRPTVLSPTRPKVCVLGSREQLCIHPEVKKQESNHLQIHLCRKKVASRSCHFYNNVEEKSLEQELASPILDIEDLVKSGSKHRVCPYYLSRNLKQQADIIFMPYNYLLDAKLPKLGSSPREPIHR

SEQ ID NO: 6381 - protein, 297 aa, Artificial Sequence
  Synthetic polypeptide
MPKIVLNGVTVDFPFQPYKCQQEYMTKVLECLQQKVNGILESPTGTGKTLCLLCTTLAWREHLRDGISARKIAERAQGELFPDRALSSWGNAAAAAGDPIACYTDIPKIIYASRTHSQLTQVINELRNTSYRSLLRPGHVSVMLTSSDRRGSCVSPYSSRCRATLWVLETAPPRPTVLSPTRPKVCVLGSREQLCIHPEVKKQESNHLQIHLCRKKVASRSCHFYNNVEEKSLEQELASPILDIEDLVKSGSKHRVCPYYLSRNLKQQADIIFMPYNYLLDAKLPKLGSSPREPIHR

SEQ ID NO: 6382 - protein, 37 aa, Artificial Sequence
  Synthetic polypeptide
MDSAGQGVAARTPAVEGLTEAEEEELRAELTKGGTRL

SEQ ID NO: 6383 - protein, 60 aa, Artificial Sequence
  Synthetic polypeptide
MDSAGQDINLNSPNKGLLSDSMTDVPVDTGVAARTPAVEGLTEAEEEELRAELTKGGTRL

SEQ ID NO: 6384 - protein, 442 aa, Artificial Sequence
  Synthetic polypeptide
MNKKKKPFLGMPAPLGYVPGLGRGATGFTTRSDIGPARDANDPVDDRHAPPGKRTVGDQMKKNQAADDDDEDLNDTNYDEFNGYAGSLFSSGPYEKDDEEADAIYAALDKRMDERRKERREQREKEEIEKYRMERPKIQQQFSDLKRKLAEVTEEEWLSIPEVGDARNKRQRNPRYEKLTPVPDSFFAKHLQTGENHTSVDPRQTQFGGLNTPYPGGLNTPYPGGMTPGLMTPGTGELDMRKIGQARNTLMDMRLSQVSDSVSGQTVVDPKGYLTDLNSMIPTHGGDINDIKKARLLLKSVRETNPHHPPAWIASARLEEVTGKLQVARNLIMKGTEMCPKSEDVWLEAARLQPGDTAKAVVAQAVRHLPQSVRIYIRAAELETDIRAKKRVLRKVCDLGCLGGHSGPGFPHLQGENNGSSKPVSWGSGDGLCEELSRHLAR

SEQ ID NO: 6385 - protein, 418 aa, Artificial Sequence
  Synthetic polypeptide
MAFLMHLLVCVFGMGSWVTINGLWVELPLLVMELPEGWYLPSYLTVVIQLANIGPLLVTLLHHFRPSCLSEVPIIFTLLGVGTVTCIIFAFLWNMTSWVLDGHHSIAFLVLTFFLALVDCTSSVTFLPFMSRLPTYYLTTFFVGEGLSGLLPALVALAQGSGLTTCVNVTEISDSVPSPVPTRETDIAQGVPRALVSALPGMEAPLSHLESRYLPAHFSPLVFFLLLSIMMACCLVAFFVLQRQPRCWEASVEDLLNDQVTLHSIRPREENDLGPAGTVDSSQGQGYLEEKAAPCCPAHLAFIYTLVAFVNALTNGMLPSVQTYSCLSYGPVAYHLAATLSIVANPLASLVSMFLPNRSLLFLGVLSVLGTCFGGYNMAMAVMSPCPLLQGHWGGEVLIETDVMAKSGAAVLDHKEKA

SEQ ID NO: 6386 - protein, 31 aa, Artificial Sequence
  Synthetic polypeptide
MAKPYEFNWQKEVPSFLQEGAVFDRYEEGLA

SEQ ID NO: 6387 - protein, 442 aa, Artificial Sequence
  Synthetic polypeptide
MAKPYEFNWQKEVPSFLQEGAVFDRYEEESFVFEPNCLFKVDEFGFFLTWRSEGKEGQVLECSLINSIRSGAIPKDPKILAALEAVGKSENDLEGRIVCVCSGTDLVNISFTYMVAENPEVTKQWVEGLRSIIHNFRANNVSPMTCLKKHWMKLAFMTNTNGKIPVRSITRTFASGKTEKVIFQALKELGLPSGKNDEIEPTAFSYEKFYELTQKICPRTDIEDLFKKINGDKTDYLTVDQLVSFLNEHQRDPRLNEILFPFYDAKRAMQIIEMYEPDEDLKKKGLISSDGFCRYLMSDENAPVFLDRLELYQEMDHPLAHYFISSSHNTYLTGRQFGGKSSVEMYRQVLLAGCRCVELDCWDGKGEDQEPIITHGKAMCTDILFKDVIQAIKETAFVTSEYPVILSFENHCSKYQQYKMSKYCEDLFGDLLLKQALESHPR

SEQ ID NO: 6388 - protein, 833 aa, Artificial Sequence
  Synthetic polypeptide
MAKPYEFNWQKEVPSFLQEGAVFDRYEEESFVFEPNCLFKVDEFGFFLTWRSEGKEGQVLECSLINSIRSGAIPKDPKILAALEAVGKSENDLEGRIVCVCSGTDLVNISFTYMVAENPEVTKQWVEGLRSIIHNFRANNVSPMTCLKKHWMKLAFMTNTNGKIPVRSITRTFASGKTEKVIFQALKELGLPSGKNDEIEPTAFSYEKFYELTQKICPRTDIEDLFKKINGDKTDYLTVDQLVSFLNEHQRDPRLNEILFPFYDAKRAMQIIEMYEPDEDLKKKGLISSDGFCRYLMSDENAPVFLDRLELYQEMDHPLAHYFISSSHNTYLTGRQFGGKSSVEMYRQVLLAGCRCVELDCWDGKGEDQEPIITHGKAMCTDILFKDVIQAIKETAFVTSEYPVILSFENHCSKYQQYKMSKYCEDLFGDLLLKQALESHPLEPGRALPSPNDLKRKILIKNKRLKPEVEKKQLEALRSMMEAGESASPANILEDDNEEEIESADQEEEAHPEFKFGNELSADDLGHKEAVANSVKKGLVTVEDEQAWMASYKYVGATTNIHPYLSTMINYAQPVKFQGFHVAEERNIHYNMSSFNESVGLGYLKTHAIEFVNYNKRQMSRIYPKGGRVDSSNYMPQIFWNAGCQMVSLNYQTPDLAMQLNQGKFEYNGSCGYLLKPDFMRRPDRTFDPFSETPVDGVIAATCSVQVISGQFLSDKKIGTYVEVDMYGLPTDTIRKEFRTRMVMNNGLNPVYNEESFVFRKVILPDLAVLRIAVYDDNNKLIGQRILPLDGLQAGYRHISLRNEGNKPLSLPTIFCNIVLKTYVPDGFGGNAV

SEQ ID NO: 6389 - protein, 845 aa, Artificial Sequence
  Synthetic polypeptide
MAKPYEFNWQKEVPSFLQEGAVFDRYEEESFVFEPNCLFKVDEFGFFLTWRSEGKEGQVLECSLINSIRSGAIPKDPKILAALEAVGKSENDLEGRIVCVCSGTDLVNISFTYMVAENPEVTKQWVEGLRSIIHNFRANNVSPMTCLKKHWMKLAFMTNTNGKIPVRSITRTFASGKTEKVIFQALKELGLPSGKNDEIEPTAFSYEKFYELTQKICPRTDIEDLFKKINGDKTDYLTVDQLVSFLNEHQRDPRLNEILFPFYDAKRAMQIIEMYEPDEDLKKKGLISSDGFCRYLMSDENAPVFLDRLELYQEMDHPLAHYFISSSHNTYLTGRQFGGKSSVEMYRQVLLAGCRCVELDCWDGKGEDQEPIITHGKAMCTDILFKDVIQAIKETAFVTSEYPVILSFENHCSKYQQYKMSKYCEDLFGDLLLKQALESHPLEPGRALPSPNDLKRKILIKNKRLKPEVEKKQLEALRSMMEAGESASPANILEDDNEEEIESADQEEEAHPEFKFGNELSADDLGHKEAVANSVKKASDDLEHENNKKGLVTVEDEQAWMASYKYVGATTNIHPYLSTMINYAQPVKFQGFHVAEERNIHYNMSSFNESVGLGYLKTHAIEFVNYNKRQMSRIYPKGGRVDSSNYMPQIFWNAGCQMVSLNYQTPDLAMQLNQGKFEYNGSCGYLLKPDFMRRPDRTFDPFSETPVDGVIAATCSVQVISGQFLSDKKIGTYVEVDMYGLPTDTIRKEFRTRMVMNNGLNPVYNEESFVFRKVILPDLAVLRIAVYDDNNKLIGQRILPLDGLQAGYRHISLRNEGNKPLSLPTIFCNIVLKTYVPDGFGGNAV

SEQ ID NO: 6390 - protein, 1197 aa, Artificial Sequence
  Synthetic polypeptide
MAKPYEFNWQKEVPSFLQEGAVFDRYEEESFVFEPNCLFKVDEFGFFLTWRSEGKEGQVLECSLINSIRSGAIPKDPKILAALEAVGKSENDLEGRIVCVCSGTDLVNISFTYMVAENPEVTKQWVEGLRSIIHNFRANNVSPMTCLKKHWMKLAFMTNTNGKIPVRSITRTFASGKTEKVIFQALKELGLPSGKNDEIEPTAFSYEKFYELTQKICPRTDIEDLFKKINGDKTDYLTVDQLVSFLNEHQRDPRLNEILFPFYDAKRAMQIIEMYEPDEDLKKKGLISSDGFCRYLMSDENAPVFLDRLELYQEMDHPLAHYFISSSHNTYLTGRQFGGKSSVEMYRQVLLAGCRCVELDCWDGKGEDQEPIITHGKAMCTDILFKDVIQAIKETAFVTSEYPVILSFENHCSKYQQYKMSKYCEDLFGDLLLKQALESHPLEPGRALPSPNDLKRKILIKNKRLKPEVEKKQLEALRSMMEAGESASPANILEDDNEEEIESADQEEEAHPEFKFGNELSADDLGHKEAVANSVKKGLVTVEDEQAWMASYKYVGATTNIHPYLSTMINYAQPVKFQGFHVAEERNIHYNMSSFNESVGLGYLKTHAIEFVNYNKRQMSRIYPKGGRVDSSNYMPQIFWNAGCQMVSLNYQTPDLAMQLNQGKFEYNGSCGYLLKPDFMRRPDRTFDPFSETPVDGVIAATCSVQVISGQFLSDKKIGTYVEVDMYGLPTDTIRKEFRTRMVMNNGLNPVYNEESFVFRKVILPDLAVLRIAVYDDNNKLIGQRILPLDGLQAGYRHISLRNEGNKPLSLPTIFCNIVLKTYVPDGFGDIVDALSDPKKFLSITEKRADQMRAMGIETSDIADVPSDTSKNDKKGKANTAKANVTPQSSSELRPTTTAALASGVEAKKGIELIPQVRIEDLKQMKAYLKHLKKQQKELNSLKKKHAKEHSTMQKLHCTQVDKIVAQYDKEKSTHEKILEKAMKKKGGSNCLEMKKETEIKIQTLTSDHKSKVKEIVAQHTKEWSEMINTHSAEEQEIRDLHLSQQCELLKKLLINAHEQQTQQLKLSHDRESKEMRAHQAKISMENSKAISQDKSIKNKAERERRVRELNSSNTKKFLEERKRLAMKQSKEMDQLKKVQLEHLEFLEKQNEQLLKSCHAVSQTQAKQALASREAILKQFAAHHQPLTNGAPLFQQP

SEQ ID NO: 6391 - protein, 460 aa, Artificial Sequence
  Synthetic polypeptide
MLLKCLHNNLCQKYSAHAFQFSPRNVLWLLVVCLRSDNKRPCLEFSQLSVKDSFRDLFIPRIETILMMYTRNNLNCAEPLFEQNNSLNVNFNTQKKTVWLIHGYRPVGSIPLWLQNFVRILLNEEDMNVIVVDWSRGATTFIYNRAVKNTRKVAVSLSVHIKNLLKHGASLDNFHFIGVSLGAHISGFVGKIFHGQLGRITGLDPAGPRFSRKPPYSRLDYTDAKFVDVIHSDSNGLGIQEPLGHIDFYPNGGNKQPGCPKSIFSGIQFIKCNHQRAVHLFMASLETNCNFISFPCRSYKDYKTSLCVDCDCFKEKSCPRLGYQAKLFKGVLKERMEGRPLRTTVFLDTSGTYPFCTYYFVLSIIVPDKTMMDGSFSFKLLNQLGMIEEPRLYELQKTRIEVWEPPPRFQRVCGNAWSSKWKSGAGAEPSWRTSARAVWKGNVGLEPYTEFPLGHCLVEL

SEQ ID NO: 6392 - protein, 439 aa, Artificial Sequence
  Synthetic polypeptide
MRVYIFLCLMCWVRSDNKRPCLEFSQLSVKDSFRDLFIPRIETILMMYTRNNLNCAEPLFEQNNSLNVNFNTQKKTVWLIHGYRPVGSIPLWLQNFVRILLNEEDMNVIVVDWSRGATTFIYNRAVKNTRKVAVSLSVHIKNLLKHGASLDNFHFIGVSLGAHISGFVGKIFHGQLGRITGLDPAGPRFSRKPPYSRLDYTDAKFVDVIHSDSNGLGIQEPLGHIDFYPNGGNKQPGCPKSIFSGIQFIKCNHQRAVHLFMASLETNCNFISFPCRSYKDYKTSLCVDCDCFKEKSCPRLGYQAKLFKGVLKERMEGRPLRTTVFLDTSGTYPFCTYYFVLSIIVPDKTMMDGSFSFKLLNQLGMIEEPRLYELQKTRIEVWEPPPRFQRVCGNAWSSKWKSGAGAEPSWRTSARAVWKGNVGLEPYTEFPLGHCLVEL

SEQ ID NO: 6393 - protein, 286 aa, Artificial Sequence
  Synthetic polypeptide
MTVEQNVLQQSAAQKHQQTFLNQLREITGINDTQILQQALKDSNGNLELAVAFLTAKNAKTPQQEETTYYQTALPGNDRYISVGSQADTNVIDLTGDDKDDLQRAIALSLAESNRAFRETGITDEEQAISRVLEASIAENKACLKRTPTEVWRDSRNPYDRKRQDKAPVGLKNVGNTCWFSAVIQSLFNLLEFRRLVLNYKPPSNAQDLPRNQKEHRNLPFMRELRYLFALLVGTKRKYVDPSRAVEILKDAFKSNDSQQQDVSEFTHKLLDWLEDAFQMKAEEET

SEQ ID NO: 6394 - protein, 879 aa, Artificial Sequence
  Synthetic polypeptide
MTVEQNVLQQSAAQKHQQTFLNQLREITGINDTQILQQALKDSNGNLELAVAFLTAKNAKTPQQEETTYYQTALPGNDRYISVGSQADTNVIDLTGDDKDDLQRAIALSLAESNRAFRETGITDEEQAISRVLEASIAENKACLKRTPTEVWRDSRNPYDRKRQDKAPVGLKNVGNTCWFSAVIQSLFNLLEFRRLVLNYKPPSNAQDLPRNQKEHRNLPFMRELRYLFALLVGTKRKYVDPSRAVEILKDAFKSNDSQQQDVSEFTHKLLDWLEDAFQMKAEEETDEEKPKNPMVELFYGRFLAVGVLEGKKFENTEMFGQYPLQVNGFKDLHECLEAAMIEGEIESLHSENSGKSGQEHWFTELPPVLTFELSRFEFNQALGRPEKIHNKLEFPQVLYLDRYMHRNREITRIKREEIKRLKDYLTVLQQRLERYLSYGSGPKRFPLVDVLQYALEFASSKPVCTSPVDDIDASSPPSGSIPSQTLPSTTEQQGALSSELPSTSPSSVAAISSRSVIHKPFTQSRIPPDLPMHPAPRHITEEELSVLESCLHRWRTEIENDTRDLQESISRIHRTIELMYSDKSMIQVPYRLHAVLVHEGQANAGHYWAYIFDHRESRWMKYNDIAVTKSSWEELVRDSFGGYRNASAYCLMYINDKAQFLIQEEFNKETGQPLVGIETLPPDLRDFVEEDNQRFEKELEEWDAQLAQKALQEKLLASQKLRESETSVTTAQAAGDPEYLEQPSRSDFSKHLKEETIQIITKASHEHEDKSPETVLQSAIKLEYARLVKLAQEDTPPETDYRLHHVVVYFIQNQAPKKIIEKTLLEQFGDRNLSFDERCHNIMKVAQAKLEMIKPEEVNLEEYECRLYENSSKMFYGA

SEQ ID NO: 6395 - protein, 911 aa, Artificial Sequence
  Synthetic polypeptide
MTVEQNVLQQSAAQKHQQTFLNQLREITGINDTQILQQALKDSNGNLELAVAFLTAKNAKTPQQEETTYYQTALPGNDRYISVGSQADTNVIDLTGDDKDDLQRAIALSLAESNRAFRETGITDEEQAISRVLEASIAENKACLKRTPTEVWRDSRNPYDRKRQDKAPVGLKNVGNTCWFSAVIQSLFNLLEFRRLVLNYKPPSNAQDLPRNQKEHRNLPFMRELRYLFALLVGTKRKYVDPSRAVEILKDAFKSNDSQQQDVSEFTHKLLDWLEDAFQMKAEEETDEEKPKNPMVELFYGRFLAVGVLEGKKFENTEMFGQYPLQVNGFKDLHECLEAAMIEGEIESLHSENSGKSGQEHWFTELPPVLTFELSRFEFNQALGRPEKIHNKLEFPQVLYLDRYMHRNREITRIKREEIKRLKDYLTVLQQRLERYLSYGSGPKRFPLVDVLQYALEFASSKPVCTSPVDDIDASSPPSGSIPSQTLPSTTEQQGALSSELPSTSPSSVAAISSRSVIHKPFTQSRIPPDLPMHPAPRHITEEELSVLESCLHRWRTEIENDTRDLQESISRIHRTIELMYSDKSMIQVPYRLHAVLVHEGQANAGHYWAYIFDHRESRWMKYNDIAVTKSSWEELVRDSFGGYRNASAYCLMYINDKAQFLIQEEFNKETGQPLVGIETLPPDLRDFVEEDNQRFEKELEEWDAQLAQKALQEKLLASQKLRESETSVTTAQAAGDPEYLEQPSRSDFSKHLKEETIQIITKASHEHEDKSPETVLQSIMMTPNMQGIIMAIGKSRSVYDRCGPEAGFFKAIKLEYARLVKLAQEDTPPETDYRLHHVVVYFIQNQAPKKIIEKTLLEQFGDRNLSFDERCHNIMKVAQAKLEMIKPEEVNLEEYECRLYENSSKMFYGA

SEQ ID NO: 6396 - protein, 949 aa, Artificial Sequence
  Synthetic polypeptide
MTVEQNVLQQSAAQKHQQTFLNQLREITGINDTQILQQALKDSNGNLELAVAFLTAKNAKTPQQEETTYYQTALPGNDRYISVGSQADTNVIDLTGDDKDDLQRAIALSLAESNRAFRETGITDEEQAISRVLEASIAENKACLKRTPTEVWRDSRNPYDRKRQDKAPVGLKNVGNTCWFSAVIQSLFNLLEFRRLVLNYKPPSNAQDLPRNQKEHRNLPFMRELRYLFALLVGTKRKYVDPSRAVEILKDAFKSNDSQQQDVSEFTHKLLDWLEDAFQMKAEEETDEEKPKNPMVELFYGRFLAVGVLEGKKFENTEMFGQYPLQVNGFKDLHECLEAAMIEGEIESLHSENSGKSGQEHWFTELPPVLTFELSRFEFNQALGRPEKIHNKLEFPQVLYLDRYMHRNREITRIKREEIKRLKDYLTVLQQRLERYLSYGSGPKRFPLVDVLQYALEFASSKPVCTSPVDDIDASSPPSGSIPSQTLPSTTEQQGALSSELPSTSPSSVAAISSRSVIHKPFTQSRIPPDLPMHPAPRHITEEELSVLESCLHRWRTEIENDTRDLQESISRIHRTIELMYSDKSMIQVPYRLHAVLVHEGQANAGHYWAYIFDHRESRWMKYNDIAVTKSSWEELVRDSFGGYRNASAYCLMYINDKAQFLIQEEFNKETGQPLVGIETLPPDLRDFVEEDNQRFEKELEEWDAQLAQKALQEKLLASQKLRESETSVTTAQAAGDPEYLEQPSRSDFSKHLKEETIQIITKASHEHEDKSPETVLQSKPENTTSQPLSNQRVVEVAIPHVGKFMIESKEGGYDDEIMMTPNMQGIIMAIGKSRSVYDRCGPEAGFFKAIKLEYARLVKLAQEDTPPETDYRLHHVVVYFIQNQAPKKIIEKTLLEQFGDRNLSFDERCHNIMKVAQAKLEMIKPEEVNLEEYECRLYENSSKMFYGA

SEQ ID NO: 6397 - protein, 23 aa, Artificial Sequence
  Synthetic polypeptide
VLKQFCSRNLKILQANHFLISEL

SEQ ID NO: 6398 - protein, 348 aa, Artificial Sequence
  Synthetic polypeptide
MALLLCFVLLCGVVDFARSLSITTPEEMIEKAKGETAYLPCKFTLSPEDQGPLDIEWLISPADNQKVDQVIILYSGDKIYDDYYPDLKGRVHFTSNDLKSGDASINVTNLQLSDIGTYQCKVKKAPGVANKKIHLVVLVKPSGARCYVDGSEEIGSDFKIKCEPKEGSLPLQYEWQKLSDSQKMPTSWLAEMTSSVISVKNASSEYSGTYSCTVRNRVGSDQCLLRLNVVPPSNKAGLIAGAIIGTLLALALIGLIIFCCRKKRREEKYEKEVHHDIREDVPPPKSRTSTARSYIGSNHSSLGSMSPSNMEGYSKTQYNQVPSEDFERTPQSPTLPPAKAQGELSLKF

SEQ ID NO: 6399 - protein, 258 aa, Artificial Sequence
  Synthetic polypeptide
MALLLCFVLLCGVVDFARSLSITTPEEMIEKAKGETAYLPCKFTLSPEDQGPLDIEWLISPADNQKVDQVIILYSGDKIYDDYYPDLKGRVHFTSNDLKSGDASINVTNLQLSDIGTYQCKVKKAPGVANKKIHLVVLVKPSGARCYVDGSEEIGSDFKIKCEPKEGSLPLQYEWQKLSDSQKMPTSWLAGKMCHLQRAVRPLPEATSAVIIHPWGPCLLPTWKDIPRLSITKYQVKTLNALLRVRLSHLLRHRESSP

SEQ ID NO: 6400 - protein, 206 aa, Artificial Sequence
  Synthetic polypeptide
MALLLCFVLLCGVVDFARSLSITTPEEMIEKAKGETAYLPCKFTLSPEDQGPLDIEWLISPADNQKVDQVIILYSGDKIYDDYYPDLKGRVHFTSNDLKSGDASINVTNLQLSDIGTYQCKVKKAPGVANKKIHLVVLGKMCHLQRAVRPLPEATSAVIIHPWGPCLLPTWKDIPRLSITKYQVKTLNALLRVRLSHLLRHRESSP

SEQ ID NO: 6401 - protein, 307 aa, Artificial Sequence
  Synthetic polypeptide
MALLLCFVLLCGVVDFARSLSITTPEEMIEKAKGETAYLPCKFTLSPEDQGPLDIEWLISPADNQKVDQVIILYSGDKIYDDYYPDLKGRVHFTSNDLKSGDASINVTNLQLSDIGTYQCKVKKAPGVANKKIHLVVLVKPSGARCYVDGSEEIGSDFKIKCEPKEGSLPLQYEWQKLSDSQKMPTSWLAASNKAGLIAGAIIGTLLALALIGLIIFCCRKKRREEKYEKEVHHDIREDVPPPKSRTSTARSYIGSNHSSLGSMSPSNMEGYSKTQYNQVPSEDFERTPQSPTLPPAKAQGELSLKF

SEQ ID NO: 6402 - protein, 398 aa, Artificial Sequence
  Synthetic polypeptide
MSLLLSFYLLGLLVSSGQALLQVTISLSKVELSVGESKFFTCTAIGEPESIDWYNPQGEKIISTQRVVVQKEGVRSRLTIYNANIEDAGIYRCQATDAKGQTQEATVVLEIYQKLTFREVVSPQEFKQGEDAEVVCRVSSSPAPAVSWLYHNEEVTTISDNRFAMLANNNLQILNINKSDEGIYRCEGRVEARGEIDFRDIIVIVNVPPAISMPQKSFNATAERGEEMTFSCRASGSPEPAISWFRNGKLIEENEKYILKGSNTELTVRNIINSDGGPYVCRATNKAGEDEKQAFLQVFVQPHIIQLKNETTYENGQVTLVCDAEGEPIPEITWKRAVDGFTFTEGDKSLDGRIEVKGQHGSSSLHIKDVKLSDSGRYDCEAASRIGGHQKSMYLDIE

SEQ ID NO: 6403 - protein, 256 aa, Artificial Sequence
  Synthetic polypeptide
MSLLLSFYLLGLLVSSGQDRFAMLANNNLQILNINKSDEGIYRCEGRVEARGEIDFRDIIVIVNVPPAISMPQKSFNATAERGEEMTFSCRASGSPEPAISWFRNGKLIEENEKYILKGSNTELTVRNIINSDGGPYVCRATNKAGEDEKQAFLQVFVQPHIIQLKNETTYENGQVTLVCDAEGEPIPEITWKRAVDGFTFTEGDKSLDGRIEVKGQHGSSSLHIKDVKLSDSGRYDCEAASRIGGHQKSMYLDIE

SEQ ID NO: 6404 - protein, 423 aa, Artificial Sequence
  Synthetic polypeptide
MVRSDSGGQVYLDYHNRQGLFVDWKYNEALYLEEGQPETYYRTALLQVTISLSKVELSVGESKFFTCTAIGEPESIDWYNPQGEKIISTQRVVVQKEGVRSRLTIYNANIEDAGIYRCQATDAKGQTQEATVVLEIYQKLTFREVVSPQEFKQGEDAEVVCRVSSSPAPAVSWLYHNEEVTTISDNRFAMLANNNLQILNINKSDEGIYRCEGRVEARGEIDFRDIIVIVNVPPAISMPQKSFNATAERGEEMTFSCRASGSPEPAISWFRNGKLIEENEKYILKGSNTELTVRNIINSDGGPYVCRATNKAGEDEKQAFLQVFVQPHIIQLKNETTYENGQVTLVCDAEGEPIPEITWKRAVDGFTFTEGDKSLDGRIEVKGQHGSSSLHIKDVKLSDSGRYDCEAASRIGGHQKSMYLDIE

SEQ ID NO: 6405 - protein, 398 aa, Artificial Sequence; identical to SEQ ID NO: 6402
  Synthetic polypeptide

SEQ ID NO: 6406 - protein, 256 aa, Artificial Sequence; identical to SEQ ID NO: 6403
  Synthetic polypeptide

SEQ ID NO: 6407 - protein, 423 aa, Artificial Sequence; identical to SEQ ID NO: 6404
  Synthetic polypeptide

SEQ ID NO: 6408 - protein, 291 aa, Artificial Sequence
  Synthetic polypeptide
MLPGLALLLLAAWTARALEVPTDGNAGLLAEPQIAMFCGRLNMHMNVQNGKWDSDPSGTKTCIDTKEGILQYCQEVYPELQITNVVEANQPVTIQNWCKRGRKQCKTHPHFVIPYRCLVGEFVSDALLVPDKCKFLHQERMDVCETHLHWHTVAKETCSEKSTNLHDYGMLLPCGIDKFRGVEFVCCPLAEESDNVDSADAEEDDSDVWWGGADTDYADGSEDKVVEVAEEEEVAEVEEEEADDDEDDEDGDEVEEEAEEPYEEATERTTSIATTTTTTTESVEEVVRAKT

SEQ ID NO: 6409 - protein, 235 aa, Artificial Sequence
  Synthetic polypeptide
MLPGLALLLLAAWTARALEVYPELQITNVVEANQPVTIQNWCKRGRKQCKTHPHFVIPYRCLVGEFVSDALLVPDKCKFLHQERMDVCETHLHWHTVAKETCSEKSTNLHDYGMLLPCGIDKFRGVEFVCCPLAEESDNVDSADAEEDDSDVWWGGADTDYADGSEDKVVEVAEEEEVAEVEEEEADDDEDDEDGDEVEEEAEEPYEEATERTTSIATTTTTTTESVEEVVRAKT

SEQ ID NO: 6410 - protein, 256 aa, Artificial Sequence
  Synthetic polypeptide
MFCGRLNMHMNVQNGKWDSDPSGTKTCIDTKEGILQYCQEVYPELQITNVVEANQPVTIQNWCKRGRKQCKTHPHFVIPYRCLVGEFVSDALLVPDKCKFLHQERMDVCETHLHWHTVAKETCSEKSTNLHDYGMLLPCGIDKFRGVEFVCCPLAEESDNVDSADAEEDDSDVWWGGADTDYADGSEDKVVEVAEEEEVAEVEEEEADDDEDDEDGDEVEEEAEEPYEEATERTTSIATTTTTTTESVEEVVRAKT

SEQ ID NO: 6411 - protein, 286 aa, Artificial Sequence
  Synthetic polypeptide
MDQLEDLLVLFINYVPTDGNAGLLAEPQIAMFCGRLNMHMNVQNGKWDSDPSGTKTCIDTKEGILQYCQEVYPELQITNVVEANQPVTIQNWCKRGRKQCKTHPHFVIPYRCLVGEFVSDALLVPDKCKFLHQERMDVCETHLHWHTVAKETCSEKSTNLHDYGMLLPCGIDKFRGVEFVCCPLAEESDNVDSADAEEDDSDVWWGGADTDYADGSEDKVVEVAEEEEVAEVEEEEADDDEDDEDGDEVEEEAEEPYEEATERTTSIATTTTTTTESVEEVVRAKT

SEQ ID NO: 6412 - protein, 41 aa, Artificial Sequence
  Synthetic polypeptide
TADHQCGRSQPTSDHPELVQAGPQAVQDPSPLCDSLPLLSW

SEQ ID NO: 6413 - protein, 11 aa, Artificial Sequence
  Synthetic polypeptide
GRSRHRLCRWE

SEQ ID NO: 6414 - protein, 228 aa, Artificial Sequence
  Synthetic polypeptide
MLPGLALLLLAAWTARALEVPTDGNAGLLAEPQIAMFCGRLNMHMNVQNGKWDSDPSGTKTCIDTKEGILQYCQEVYPELQITNVVEANQPVTIQNWCKRGRKQCKTHPHFVIPYRCLVGEFVSDALLVPDKCKFLHQERMDVCETHLHWHTVAKETCSEKSTNLHDYGMLLPCGIDKFRGVEFVCCPLAEESDNVDSADAEEDDSDVWWGGADTDYADGRNAFHLPP

SEQ ID NO: 6415 - protein, 172 aa, Artificial Sequence
  Synthetic polypeptide
MLPGLALLLLAAWTARALEVYPELQITNVVEANQPVTIQNWCKRGRKQCKTHPHFVIPYRCLVGEFVSDALLVPDKCKFLHQERMDVCETHLHWHTVAKETCSEKSTNLHDYGMLLPCGIDKFRGVEFVCCPLAEESDNVDSADAEEDDSDVWWGGADTDYADGRNAFHLPP

SEQ ID NO: 6416 - protein, 193 aa, Artificial Sequence
  Synthetic polypeptide
MFCGRLNMHMNVQNGKWDSDPSGTKTCIDTKEGILQYCQEVYPELQITNVVEANQPVTIQNWCKRGRKQCKTHPHFVIPYRCLVGEFVSDALLVPDKCKFLHQERMDVCETHLHWHTVAKETCSEKSTNLHDYGMLLPCGIDKFRGVEFVCCPLAEESDNVDSADAEEDDSDVWWGGADTDYADGRNAFHLPP

SEQ ID NO: 6417 - protein, 223 aa, Artificial Sequence
  Synthetic polypeptide
MDQLEDLLVLFINYVPTDGNAGLLAEPQIAMFCGRLNMHMNVQNGKWDSDPSGTKTCIDTKEGILQYCQEVYPELQITNVVEANQPVTIQNWCKRGRKQCKTHPHFVIPYRCLVGEFVSDALLVPDKCKFLHQERMDVCETHLHWHTVAKETCSEKSTNLHDYGMLLPCGIDKFRGVEFVCCPLAEESDNVDSADAEEDDSDVWWGGADTDYADGRNAFHLPP

SEQ ID NO: 6418 - protein, 41 aa, Artificial Sequence; identical to SEQ ID NO: 6412
  Synthetic polypeptide

SEQ ID NO: 6419 - protein, 52 aa, Artificial Sequence
  Synthetic polypeptide
GRSRHRLCRWEKCLSPPAMILRPPQPCGTVSPIKPLFLPNLGYVFISSMKTD

SEQ ID NO: 6420 - protein, 40 aa, Artificial Sequence
  Synthetic polypeptide
MGKKRTKGKTVPIDDSSETLECELLKENSCDLVNFGLLSV

SEQ ID NO: 6421 - protein, 406 aa, Artificial Sequence
  Synthetic polypeptide
MGVPKRKASGGQDGAASSAGAAKRARKEELTGVRFKAQLKDPQGPGPGLEAFVSAAKKLPREDVYDVVEGYIKISVECVEIFQLLSGEKRPESETMLIFQVFEAILLRTASDLSHFHVVGTNIVKKLMNNHMKLICESLYASGYRLARACLSLMTAMVTQGPEAARDVCSHFDLNKKTLYTLVTKRDSKGVYDVRQAYVQFALSFLIAGDDSTIVQVLEVKEFIPCIFSSGIKEDRISTINILLSTLKTKVVHNKNITKTQKVRFFTGQLLNHIASLYNWNGITDVNPENVKVSAEEAGKTMVRELVHNFLMDLCCSLKHGINFYDASLGTFGRGGNLTLLHFLLGLKTAADDDLVADLVVNILKVCPDLLNKYFKEVTFSFIPRAKSTWLNNIKLLNKCAYPKAL

SEQ ID NO: 6422 - protein, 17 aa, Artificial Sequence
  Synthetic polypeptide
VTSQMSGEAHTRPMSPS

SEQ ID NO: 6423 - protein, 127 aa, Artificial Sequence
  Synthetic polypeptide
MAWSLGSWLGGCLLVSALGMVPPPENVRMNSVNFKNILQWESPAFAKGNLTFTAQYLSYRIFQDKCMNTTLTECDFSSLSKYGDHTLRVRAEFADEHSDWVNITFCPVDDNEHFRMMEAGPLTALKK

SEQ ID NO: 6424 - protein, 64 aa, Artificial Sequence
  Synthetic polypeptide
DKCMNTTLTECDFSSLSKYGDHTLRVRAEFADEHSDWVNITFCPVDDNEHFRMMEAGPLTALKK

SEQ ID NO: 6425 - protein, 197 aa, Artificial Sequence
  Synthetic polypeptide
MDNWIKLSGCQNITSTKCNFSSLKLNVYEEIKLRIRAEKENTSSWYEVDSFTPFRKAQIGPPEVHLEAEDKAIVIHISPGTKDSVMWALDGLSFTYSLVIWKNSSGVEERIENIYSRHKIYKLSPETTYCLKVKAALLTSWKIGVYSPVHCIKTTVENELPPPENIEVSVQNQNYVLKWDYTYANMTFQVQWLQRPR

SEQ ID NO: 6426 - protein, 266 aa, Artificial Sequence
  Synthetic polypeptide
MMVVLLGATTLVLVAVAPWVLSAAAGGKNLKSPQKVEVDIIDDNFILRWNRSDESVGNVTFSFDYQKTGMDNWIKLSGCQNITSTKCNFSSLKLNVYEEIKLRIRAEKENTSSWYEVDSFTPFRKAQIGPPEVHLEAEDKAIVIHISPGTKDSVMWALDGLSFTYSLVIWKNSSGVEERIENIYSRHKIYKLSPETTYCLKVKAALLTSWKIGVYSPVHCIKTTVENELPPPENIEVSVQNQNYVLKWDYTYANMTFQVQWLQRPR

SEQ ID NO: 6427 - protein, 2360 aa, Artificial Sequence
  Synthetic polypeptide
MATNIEQIFRSFVVSKFREIQQELSSGRNEGQLNGETNTPIEGNQAGDAAASARSLPNEEIVQKIEEVLSGVLDTELRYKPDLKEGSRKSRCVSVQTDPTDEIPTKKSKKHKKHKNKKKKKKKEKEKKYKRQPEESESKTKSHDDGNIDLESDSFLKFDSEPSAVALELPTRAFGPSETNESPAVVLEPPVVSMEVSEPHILETLKPATKTAELSVVSTSVISEQSEQSVAVMPEPSMTKILDSFAAAPVPTTTLVLKSSEPVVTMSVEYQMKSVLKSVESTSPEPSKIMLVEPPVAKVLEPSETLVVSSETPTEVYPEPSTSTTMDFPESSAIEALRLPEQPVDVPSEIADSSMTRPQELPELPKTTALELQESSVASAMELPGPPATSMPELQGPPVTPVLELPGPSATPVPELPGPLSTPVPELPGPPATAVPELPGPSVTPVPQLSQELPGLPAPSMGLEPPQEVPEPPVMAQELPGLPLVTAAVELPEQPAVTVAMELTEQPVTTTELEQPVGMTTVEHPGHPEVTTATGLLGQPEATMVLELPGQPVATTALELPGQPSVTGVPELPGLPSATRALELSGQPVATGALELPGPLMAAGALEFSGQSGAAGALELLGQPLATGVLELPGQPGAPELPGQPVATVALEISVQSVVTTSELSTMTVSQSLEVPSTTALESYNTVAQELPTTLVGETSVTVGVDPLMAPESHILASNTMETHILASNTMDSQMLASNTMDSQMLASNTMDSQMLASSTMDSQMLATSSMDSQMLATSSMDSQMLATSTMDSQMLATSSMDSQMLATSSMDSQMLATSSMDSQMLATSSMDSQMLATSTMDSQMLATSTMDSQMLATSSMDSQMLASGTMDSQMLASGTMDAQMLASGTMDAQMLASSTQDSAMLGSKSPDPYRLAQDPYRLAQDPYRLGHDPYRLGHDAYRLGQDPYRLGHDPYRLTPDPYRMSPRPYRIAPRSYRIAPRPYRLAPRPLMLASRRSMMMSYAAERSMMSSYERSMMSYERSMMSPMAERSMMSAYERSMMSAYERSMMSPMAERSMMSAYERSMMSAYERSMMSPMADRSMMSMGADRSMMSSYSAADRSMMSSYSAADRSMMSSYTADRSMMSMAADSYTDSYTDTYTEAYMVPPLPPEEPPTMPPLPPEEPPMTPPLPPEEPPEGPALPTEQSALTAENTWPTEVPSSPSEESVSQPEPPVSQSEISEPSAVPTDYSVSASDPSVLVSEAAVTVPEPPPEPESSITLTPVESAVVAEEHEVVPERPVTCMVSETPAMSAEPTVLASEPPVMSETAETFDSMRASGHVASEVSTSLLVPAVTTPVLAESILEPPAMAAPESSAMAVLESSAVTVLESSTVTVLESSTVTVLEPSVVTVPEPPVVAEPDYVTIPVPVVSALEPSVPVLEPAVSVLQPSMIVSEPSVSVQESTVTVSEPAVTVSEQTQVIPTEVAIESTPMILESSIMSSHVMKGINLSSGDQNLAPEIGMQEIALHSGEEPHAEEHLKGDFYESEHGINIDLNINNHLIAKEMEHNTVCAAGTSPVGEIGEEKILPTSETKQRTVLDTYPGVSEADAGETLSSTGPFALEPDATGTSKGIEFTTASTLSLVNKYDVDLSLTTQDTEHDMVISTSPSGGSEADIEGPLPAKDIHLDLPSNNNLVSKDTEEPLPVKESDQTLAALLSPKESSGGEKEVPPPPKETLPDSGFSANIEDINEADLVRPLLPKDMERLTSLRAGIEGPLLASDVGRDRSAASPVVSSMPERASESSSEEKDDYEIFVKVKDTHEKSKKNKNRDKGEKEKKRDSSLRSRSKRSKSSEHKSRKRTSESRSRARKRSSKSKSHRSQTRSRSRSRRRRRSSRSRSKSRGRRSVSKEKRKRSPKHRSKSRERKRKRSSSRDNRKTVRARSRTPSRRSRSHTPSRRRRSRSVGRRRSFSISPSRRSRTPSRRSRTPSRRSRTPSRRSRTPSRRSRTPSRRSRTPSRRRRSRSVVRRRSFSISPVRLRRSRTPLRRRFSRSPIRRKRSRSSERGRSPKRLTDLDKAQLLEIAKANAAAMCAKAGVPLPPNLKPAPPPTIEEKVAKKSGGATIEELTEKCKQIAQSKEDDDVIVNKPHVSDEEEEEPPFYHHPFKLSEPKPIFFNLNIAAAKPTPPKSQVTLTKEFPVSSGSQHRKKEADSVYGEWVPVEKNGEENKDDDNVFSSNLPSEPVDISTAMSERALAQKRLSENAFDLEAMSMLNRAQERIDAWAQLNSIPGQFTGSTGVQVLTQEQLANTGAQAWIKKDQFLRAAPVTGGMGAVLMRKMGWREGEGLGKNKEGNKEPILVDFKTDRKASSDLGCLTAKYNANI

SEQ ID NO: 6428 - protein, 388 aa, Artificial Sequence
  Synthetic polypeptide
MATNIEQIFRSFVVSKFREIQQELSSGRNEGQLNGETNTPIEGNQAGDAAASARSLPNEEIVQKIEEVLSGVLDTELRYKPDKAQLLEIAKANAAAMCAKAGVPLPPNLKPAPPPTIEEKVAKKSGGATIEELTEKCKQIAQSKEDDDVIVNKPHVSDEEEEEPPFYHHPFKLSEPKPIFFNLNIAAAKPTPPKSQVTLTKEFPVSSGSQHRKKEADSVYGEWVPVEKNGEENKDDDNVFSSNLPSEPVDISTAMSERALAQKRLSENAFDLEAMSMLNRAQERIDAWAQLNSIPGQFTGSTGVQVLTQEQLANTGAQAWIKKDQFLRAAPVTGGMGAVLMRKMGWREGEGLGKNKEGNKEPILVDFKTDRKASSDLGCLTAKYNANI

SEQ ID NO: 6429 - protein, 3 aa, Artificial Sequence
  Synthetic polypeptide
NVP

SEQ ID NO: 6430 - protein, 82 aa, Artificial Sequence
  Synthetic polypeptide
MPRYELALILKAMQRPETAATLKRTIEALMDRGAIVRDLENLGERALPYRISAHSQQHNRGGTPGLWRDGGNAIHMFWALCR

SEQ ID NO: 6431 - protein, 30 aa, Artificial Sequence
  Synthetic polypeptide
MASDSIFESFPSYPQCFMREPQVKISARPT

SEQ ID NO: 6432 - protein, 234 aa, Artificial Sequence
  Synthetic polypeptide
MDPEEQELLNDYRYRSYSSVIEKALRNFESSSEWADLISSLGKLNKALQSNLRYSLLPRRLLISKRLAQCLHPALPSGVHLKALETYEIIFKIVGTKWLAKDLFLYSCGLFPLLAHAAVSVRPVLLTLYEKYFLPLQKLLLPSLQAFIVGLLPGLEEGSEISDRTDALLLRLSLVVGKEVFYTALWGSVLASPSIRLPASVFVVGHINRDAPGREQKYMLGTNHQLTTCFTGSL

SEQ ID NO: 6433 - protein, 2073 aa, Artificial Sequence
  Synthetic polypeptide
MDPEEQELLNDYRYRSYSSVIEKALRNFESSSEWADLISSLGKLNKALQSNLRYSLLPRRLLISKRLAQCLHPALPSGVHLKALETYEIIFKIVGTKWLAKDLFLYSCGLFPLLAHAAVSVRPVLLTLYEKYFLPLQKLLLPSLQAFIVGLLPGLEEGSEISDRTDALLLRLSLVVGKEVFYTALWGSVLASPSIRLPASVFVVGHINRDAPGREQKYMLGTNHQLTVKSLRASLLDSNVLVQRNNLEIVLFFFPFYTCLDSNERAIPLLRSDIVRILSAATQTLLRRDMSLNRRLYAWLLGSDIKGNTVVPESEISNSYEDQSSYFFEKYSKDLLVEGLAEILHQKFIDADVEERHHAYLKPFRVLISLLDKPEIGPQVVGNLFLEVIRAFYSYCRDALGSDLKLSYTQSGNSLISAIKENRNASEIVKTVNLLITSLSTDFLWDYMTRCFEECFRPVKQRYSVRNSVSPPPTVSELCALLVFLLDVIPLELYSEVQTQYLPQVLGCLVQPLAEDMEALSLPELTHALKTCFKVLSKVQMPPSYLDTESTSGTSSPVKGENGKIILETKAVIPGDEDASFPPLKSEDSGIGLSASSPELSEHLRVPRVSLERDDVWKKGGSMQRTFLCIQELIANFASKNIFGVQLTASGEESKSEEPAGKRDRDGTQSLAANDSSRKNSWEPKPITVPQFKQMLSDLFTARGSPFKTKSSESPSSSPSSPARKNGGEWDVEKVVIDLGGSREERREAFAAACHLLLDCATFPVYLSEEETEQLCATLFQLPGAGDSSFPSWLKSLMTICCCVTDCYLQNVAISTLLEVINHSQSLALVIEDKMKRYKSSGHNPFFGKLQMVTVPPIAPGILKVIAEKTDFYQRVARVLWNQLNKETREHHVTCVELFYRLHCLAPTANICEDIICHALLDPDKGTRLEALFRFSVIWHLTREIQGSRVTSHNRSFDRSLFVVLDSLACTDGAIGAAAQGWLVRALSLGDVARILEPVLLLLLQPKTQRTSIHCLKQENSADDLHRWFNRKKTSFREACAVPEPQESGSEEHLPLSQFTTVDREAIWAEVEKEPEKYPLRGELSEEELPYYVELPDRTAHGAPDSSEHTESADTSSCHTDSENTSSFSSPSHDLQELSNEENCCAPIPMGGRAYPKRSALLAAFQSESFKAGAKLSLVRVDSDKTQASESFSSDEEADLELQALTTSRLLKQQRERQEAVEALFKHILLYLQPYDSRRVLYAFSVLEAVLKTNPKEFIEAVSRTSMDTSSTAHLNLISNLLARHQEALIGQSFYGKLQTQVPNVCPHSLLLELLTYLCLSFLRSYYPCYLKVSHRDILGNRDVQVKSVEVLIRIMMQLVSVAKSSEGKNVEFIHSLLQRCKVQEFVLLSLSASMYTSQKRYGLATAHHGRALPEDSLFEESLINLGQDQIWSEHPLQIELLKLLQVLIVLEHHLGRAHEEAENQPDLSREWQRALNFQQAISALQYVQPHPLTSQGLLVSAVVRGLQPAYGYGMHPAWVSLVTHSLPYFGKSLGWTVTPFVVQICKNLDDLVKQYESESVKLSVSTTSKRENISPDYPLTLLEGLTTISHFCLLEQANQNKKTMAAGDPANLRNARNAILEELPRTVNTMALLWNVLRKEETQKRPVDLLGATKGSSSVYFKTTKTIRQKILDFLNPLTAHLGVQLTAAVAAVWSRKKAQRHSKMKIIPTASASQLTLVDLVCALSTLQTDTLLHLVKEVVKRPPQVKGGDEKSPLVDIPVLQFCYAFLQRLPVPALQENFSSLLGVLKESVQLNLAPPGYFLLLSMLNDFVTRTPNLENKKDQKDLQEITQKILEAVGNIAGSSLEQTSWLSRNLEVKAQPQASLEESDAEEDLYDAAAASAMVSSSAPSVYSVQALSLLAEVLASLLDMVYRSDEKEKAVPLISRLLYYVFPYLRNHSAYNAPSFRAGAQLLSSLSGYAYTKRAWRKEVLELFLDPAFFQMDTSCVHWKSIIDHLLTHEKTMFKDLMNMQSSSLKLFSSFEQKAMLLKRQAFAVFSGELDQYHLYLPLIQGQVQWLMPVIPALWEAQVGG

SEQ ID NO: 6434 - protein, 2183 aa, Artificial Sequence
  Synthetic polypeptide
MDPEEQELLNDYRYRSYSSVIEKALRNFESSSEWADLISSLGKLNKALQSNLRYSLLPRRLLISKRLAQCLHPALPSGVHLKALETYEIIFKIVGTKWLAKDLFLYSCGLFPLLAHAAVSVRPVLLTLYEKYFLPLQKLLLPSLQAFIVGLLPGLEEGSEISDRTDALLLRLSLVVGKEVFYTALWGSVLASPSIRLPASVFVVGHINRDAPGREQKYMLGTNHQLTVKSLRASLLDSNVLVQRNNLEIVLFFFPFYTCLDSNERAIPLLRSDIVRILSAATQTLLRRDMSLNRRLYAWLLGSDIKGNTVVPESEISNSYEDQSSYFFEKYSKDLLVEGLAEILHQKFIDADVEERHHAYLKPFRVLISLLDKPEIGPQVVGNLFLEVIRAFYSYCRDALGSDLKLSYTQSGNSLISAIKENRNASEIVKTVNLLITSLSTDFLWDYMTRCFEECFRPVKQRYSVRNSVSPPPTVSELCALLVFLLDVIPLELYSEVQTQYLPQVLGCLVQPLAEDMEALSLPELTHALKTCFKVLSKVQMPPSYLDTESTSGTSSPVKGENGKIILETKAVIPGDEDASFPPLKSEDSGIGLSASSPELSEHLRVPRVSLERDDVWKKGGSMQRTFLCIQELIANFASKNIFGVQLTASGEESKSEEPAGKRDRDGTQSLAANDSSRKNSWEPKPITVPQFKQMLSDLFTARGSPFKTKSSESPSSSPSSPARKNGGEWDVEKVVIDLGGSREERREAFAAACHLLLDCATFPVYLSEEETEQLCATLFQLPGAGDSSFPSWLKSLMTICCCVTDCYLQNVAISTLLEVINHSQSLALVIEDKMKRYKSSGHNPFFGKLQMVTVPPIAPGILKVIAEKTDFYQRVARVLWNQLNKETREHHVTCVELFYRLHCLAPTANICEDIICHALLDPDKGTRLEALFRFSVIWHLTREIQGSRVTSHNRSFDRSLFVVLDSLACTDGAIGAAAQGWLVRALSLGDVARILEPVLLLLLQPKTQRTSIHCLKQENSADDLHRWFNRKKTSFREACAVPEPQESGSEEHLPLSQFTTVDREAIWAEVEKEPEKYPLRGELSEEELPYYVELPDRTAHGAPDSSEHTESADTSSCHTDSENTSSFSSPSHDLQELSNEENCCAPIPMGGRAYPKRSALLAAFQSESFKAGAKLSLVRVDSDKTQASESFSSDEEADLELQALTTSRLLKQQRERQEAVEALFKHILLYLQPYDSRRVLYAFSVLEAVLKTNPKEFIEAVSRTSMDTSSTAHLNLISNLLARHQEALIGQSFYGKLQTQVPNVCPHSLLLELLTYLCLSFLRSYYPCYLKVSHRDILGNRDVQVKSVEVLIRIMMQLVSVAKSSEGKNVEFIHSLLQRCKVQEFVLLSLSASMYTSQKRYGLATAHHGRALPEDSLFEESLINLGQDQIWSEHPLQIELLKLLQVLIVLEHHLGRAHEEAENQPDLSREWQRALNFQQAISALQYVQPHPLTSQGLLVSAVVRGLQPAYGYGMHPAWVSLVTHSLPYFGKSLGWTVTPFVVQICKNLDDLVKQYESESVKLSVSTTSKRENISPDYPLTLLEGLTTISHFCLLEQANQNKKTMAAGDPANLRNARNAILEELPRTVNTMALLWNVLRKEETQKRPVDLLGATKGSSSVYFKTTKTIRQKILDFLNPLTAHLGVQLTAAVAAVWSRKKAQRHSKMKIIPTASASQLTLVDLVCALSTLQTDTLLHLVKEVVKRPPQVKGGDEKSPLVDIPVLQFCYAFLQRLPVPALQENFSSLLGVLKESVQLNLAPPGYFLLLSMLNDFVTRTPNLENKKDQKDLQEITQKILEAVGNIAGSSLEQTSWLSRNLEVKAQPQASLEESDAEEDLYDAAAASAMVSSSAPSVYSVQALSLLAEVLASLLDMVYRSDEKEKAVPLISRLLYYVFPYLRNHSAYNAPSFRAGAQLLSSLSGYAYTKRAWRKEVLELFLDPAFFQMDTSCVHWKSIIDHLLTHEKTMFKDLMNMQSSSLKLFSSFEQKAMLLKRQAFAVFSGELDQYHLYLPLIQERLTDNLRVGQTSIVAAQMFLFFRVLLLRISPQHLTSLWPIMVSELIQTFTQLEEDLKDEDESLRSTNKVNRTKVSVPDANGPSVGEIPQSELILYLSACKFLDTALSFPPDKMPLFQMQEVETTQMAIS

SEQ ID NO: 6435 - protein, 403 aa, Artificial Sequence
  Synthetic polypeptide
MEDRLHMDNGLVPQKIVSVHLQDSTLKEVKDQVSNKQAQILEPKPEPSLEIKPEQDGMEHVGRDDPKALGEEPKQRRGSASGSEPAGDSDRGGGPVEHYHLHLSSCHECLELENSTIESVKFASAENIPDLPYDYSSSLESVADETSPEREGRRVNLTGKAPNILLYVGSDSQEALGRFHEVRSVLADCVDIDSYILYHLLEDSALRDPWTDNCLLLVIATRESIPEDLYQKFMAYLSQGGKVLGLSSSFTFGGFQVTSKGALHKTVQNLVFSKADQSEVKLSVLSSGCRYQEGPVRLSPGRLQGHLENEDKDRMIVHVPFGTRGGEAVLCQVHLELPPSSNIVQTPEDFNLLKSSNFRRYEVLREILTTLGLSCDMKQVPALTPLYLLSAAEALLNTGVRVG

SEQ ID NO: 6436 - protein, 286 aa, Artificial Sequence
  Synthetic polypeptide
MDNFAEGDFTVADYALLEDCPHVDDCVFAAEFMSNDYVRVTQLYCDGVGVQYKDYIQSERNLEFDICSIWCSKPISVLQDYCDAIKINIFWPLLFQHQNSSVISRLHPCVDANNSRASEINLKKLQHLELMEDIVDLAKKVANDSFLIGGLLRIGCKIENKILAMEEALNWIKYAGDVTILTKLGSIDNCWPMLSIFFTEYKYHITKIVMEDCNLLEELKTQSCMDCIEEGELMKMKGNEEFSKERFDIAIIYYTRAIEYRPENYLLYGNRALCFLRTGQFRWTKA

SEQ ID NO: 6437 - protein, 268 aa, Artificial Sequence
  Synthetic polypeptide
MDNFAEGDFTVADYALLEDCPHVDDCVFAAEFMSNDYVRVTQLYCDGVGVQYKDYIQSERNLEFDICSIWCSKPISVLQDYCDAIKINIFWPLLFQHQNSSVISRLHPCVDANNSRASEINLKKLQHLELMEDIVDLAKKVAKILAMEEALNWIKYAGDVTILTKLGSIDNCWPMLSIFFTEYKYHITKIVMEDCNLLEELKTQSCMDCIEEGELMKMKGNEEFSKERFDIAIIYYTRAIEYRPENYLLYGNRALCFLRTGQFRWTKA

SEQ ID NO: 6438 - protein, 306 aa, Artificial Sequence
  Synthetic polypeptide
MDNFAEGDFTVADYALLEDCPHVDDCVFAAEFMSNDYVRVTQLYCDGVGVQYKDYIQSERNLEFDICSIWCSKPISVLQDYCDAIKINIFWPLLFQHQNSSVISRLHPCVDANNSRASEINLKKLQHLELMEDIVDLAKKVANDSFLIGGLLRIGCKIENKILAMEEALNWIKYAGDVTILTKLGSIDNCWPMLSIFFTEYKYHITKIVMEDCNLLEELKTQSCMDCIEEGELMKMKGNEEFSKERFDIAIIYYTRAIEYRPENYLLYGNRALCFLRTGQFRNALGDGKRATILKNTWPKGWSQDG

SEQ ID NO: 6439 - protein, 288 aa, Artificial Sequence
  Synthetic polypeptide
MDNFAEGDFTVADYALLEDCPHVDDCVFAAEFMSNDYVRVTQLYCDGVGVQYKDYIQSERNLEFDICSIWCSKPISVLQDYCDAIKINIFWPLLFQHQNSSVISRLHPCVDANNSRASEINLKKLQHLELMEDIVDLAKKVAKILAMEEALNWIKYAGDVTILTKLGSIDNCWPMLSIFFTEYKYHITKIVMEDCNLLEELKTQSCMDCIEEGELMKMKGNEEFSKERFDIAIIYYTRAIEYRPENYLLYGNRALCFLRTGQFRNALGDGKRATILKNTWPKGWSQDG

SEQ ID NO: 6440 - protein, 289 aa, Artificial Sequence
  Synthetic polypeptide
MAEPSSARRPVPLIESELYFLIARYLSAGPCRRAAQVLVQELEQYQLLPKRLDWEGNEHNRSYEELVLSNKHVAPDHLLQICQRIGPMLDKEIPPSISRVTSLLGAGRQSLLRTAKDCRHTVWKGSAFAALHRGRPPEMPVNYGSPPNLVEIHRGKQLTGCSTFSTAFPGTMYQHIKMHRRILGHLSAVYCVAFDRTGHRIFTGSDDCLVKIWSTHNGRLLSTLRGHSAEISDMAVNYENTMIAAGSCDKIIRVWCLRTCAPVAVLQGHTGSITSLQPIQHEDNEDEDL

SEQ ID NO: 6441 - protein, 280 aa, Artificial Sequence
  Synthetic polypeptide
MAEPSSARRPVPLIESELYFLIARYLSAGPCRRAAQVLVQELEQYQLLPKRLDWEGNEHNRSYEELVLSNKHVAPDHLLQICQRIGPMLDKEIPPSISRVTSLLGAGRQSLLRTAKDCRHTVWKGSAFAALHRGRPPEMPVNYGSPPNLVEIHRGKQLTGCSTFSTAFPGTMYQHIKMHRRILGHLSAVYCVAFDRTGHRIFTGSDDCLVKIWSTHNGRLLSTLRGHSAEISDMAVNYENTMIAAGSCDKIIRVWCLRTCAPVAVLQGHTGSITSLQVGM

SEQ ID NO: 6442 - protein, 61 aa, Artificial Sequence
  Synthetic polypeptide
MRRLRHREVRGPVLGHTATGGPQNGTSGCTTAPQQRPPPGTQGMLEQYLNSAFRGQGGKIP

SEQ ID NO: 6443 - protein, 385 aa, Artificial Sequence
  Synthetic polypeptide
MGALARALLLPLLAQWLLRAAPELAPAPFTLPLRVAAATNRVVAPTPGPGTPAERHADGLALALEPALASPAGAANFLAMVDNLQGDSGRGYYLEMLIGTPPQKLQILVDTGSSNFAVAGTPHSYIDTYFDTERSSTYRSKGFDVTVKYTQGSWTGFVGEDLVTIPKGFNTSFLVNIATIFESENFFLPGIKWNGILGLAYATLAKPSSSLETFFDSLVTQANIPNVFSMQMCGAGLPVAGSGTNGGSLVLGGIEPSLYKGDIWYTPIKEEWYYQIEILKLEIGGQSLNLDCREYNADKAIVDSGTTLLRLPQKVFDAVVEAVARASLIPEFSDGFWTGSQLACWTNSETPWSYFPKISIYLRDENSSRSFRITILPQSLTLFIS

SEQ ID NO: 6444 - protein, 109 aa, Artificial Sequence
  Synthetic polypeptide
MEEECRVLSIQSHVIRGYVGNRAATFPLQVLGFEIDAVNSVQFSNHTGYAHWKGQVLNSDELQELYEGLRLNNMNKYDYVLTVCDPVLGDKWDGEGSMSKTPSQKTKEK

SEQ ID NO: 6445 - protein, 137 aa, Artificial Sequence
  Synthetic polypeptide
MEEECRVLSIQSHVIRGYVGNRAATFPLQVLGFEIDAVNSVQFSNHTGYAHWKGQVLNSDELQELYEGLRLNNMNKYDYVLTGYTRDKSFLAMVVDIVQELKQQNPRLVYVCDPVLGDKWDGEGSMSKTPSQKTKEK

SEQ ID NO: 6446 - protein, 97 aa, Artificial Sequence
  Synthetic polypeptide
MGRSRPPGYAHWKGQVLNSDELQELYEGLRLNNMNKYDYVLTGYTRDKSFLAMVVDIVQELKQQNPRLVYVCDPVLGDKWDGEGSMSKTPSQKTKEK

SEQ ID NO: 6447 - protein, 94 aa, Artificial Sequence
  Synthetic polypeptide
MVSRVQLPPEIQLAQRLAGNEQVTRDRAVRKLRKYIVARTQRAAGGFTHDELLKVWKGLFYCMWMQDKPLLQEELGRTISQLVHAFQTTEARLT

SEQ ID NO: 6448 - protein, 22 aa, Artificial Sequence
  Synthetic polypeptide
MGLLAFLKTQFVLHLLVGFVFV

SEQ ID NO: 6449 - protein, 732 aa, Artificial Sequence
  Synthetic polypeptide
MKFAYRFSNLLGTVYRRGNLNFTCDGNSVISPVGNRVTVFDLKNNKSDTLPLATRYNVKCVGLSPDGRLAIIVDEGGDALLVSLVCRSVLHHFHFKGSVHSVSFSPDGRKFVVTKGNIAQMYHAPGKKREFNAFVLDKTYFGPYDETTCIDWTDDSRCFVVGSKDMSTWVFGAERWDNLIYYALGGHKDAIVACFFESNSLDLYSLSQDGVLCMWQCDTPPEGLRLKPPAGWKADLLQREEEEEEEEDQEGDRETTIRGKATPAEEEKTGKVKYSRLAKYFFNKEGDFNNLTAAAFHKKSHLLVTGFASGIFHLHELPEFNLIHSLSISDQSIASVAINSSGDWIAFGCSGLGQLLVWEWQSESYVLKQQGHFNSMVALAYSPDGQYIVTGGDDGKVKVWNTLSGFCFVTFTEHSSGVTGVTFTATGYVVVTSSMDGTVRAFDLHRYRNFRTFTSPRPTQFSCVAVDASGEIVSAGAQDSFEIFVWSMQTGRLLDVLSGHEGPISGLCFNPMKSVLASASWDKTVRLWDMFDSWRTKETLALTSDALAVTFRPDGAELAVATLNSQITFWDPENAVQTGSIEGRHDLKTGRKELDKITAKHAAKGKAFTALCYSADGHSILAGGMSKFVCIYHVREQILMKRFEISCNLSLDAMEEFLNRRKMTEFGNLALIDQDAGQEDGVAIPLPGVRKGDMSSRHFKPEIRVTSLRFSPTVIRAALSRCSRDHRACGAE

SEQ ID NO: 6450 - protein, 115 aa, Artificial Sequence
  Synthetic polypeptide
MAAVRVLVASRLAAASAFTSLSPGGRTPSQRAALHLSVPRPAARVALVLSGCGVYDGTEIHEASAILVHLSRGGAEVQIFAPDVPQMHVIDHTKGQPSEGESRHSERLPFPMGLD

SEQ ID NO: 6451 - protein, 88 aa, Artificial Sequence
  Synthetic polypeptide
PSQRAALHLSVPRPAARVALVLSGCGVYDGTEIHEASAILVHLSRGGAEVQIFAPDVPQMHVIDHTKGQPSEGESRHSERLPFPMGLD

SEQ ID NO: 6452 - protein, 36 aa, Artificial Sequence
  Synthetic polypeptide
APRGQGRAGAVWMRSLRWDRDPRGLGDPGAPEPWRG

SEQ ID NO: 6453 - protein, 4 aa, Artificial Sequence
  Synthetic polypeptide
LRCT

SEQ ID NO: 6454 - protein, 361 aa, Artificial Sequence
  Synthetic polypeptide
MRLGSPGLLFLLFSSLRADTQEKEVRAMVGSDVELSCACPEGSRFDLNDVYVYWQTSESKTVVTYHIPQNSSLENVDSRYRNRALMSPAGMLRGDFSLRLFNVTPQDEQKFHCLVLSQSLGFQEVLSVEVTLHVAANFSVPVVSAPHSPSQDELTFTCTSINGYPRPNVYWINKTDNSLLDQALQNDTVFLNMRGLYDVVSVLRIARTPSVNIGCCIENVLLQQNLTVGSQTGNDIGERDKITENPVSTGEKNAATWSILAVLCLLVVVAVAIGWVCRDRCLQHSYAGAWAVSPETELTVSRHGFEQTTDVLPFILKSSLGASCEPTAFPLPPAAPGPCAHLFIWMLAECTPCSPVWSSIS

SEQ ID NO: 6455 - protein, 244 aa, Artificial Sequence
  Synthetic polypeptide
MRLGSPGLLFLLFSSLRAANFSVPVVSAPHSPSQDELTFTCTSINGYPRPNVYWINKTDNSLLDQALQNDTVFLNMRGLYDVVSVLRIARTPSVNIGCCIENVLLQQNLTVGSQTGNDIGERDKITENPVSTGEKNAATWSILAVLCLLVVVAVAIGWVCRDRCLQHSYAGAWAVSPETELTVSRHGFEQTTDVLPFILKSSLGASCEPTAFPLPPAAPGPCAHLFIWMLAECTPCSPVWSSIS

SEQ ID NO: 6456 - protein, 49 aa, Artificial Sequence
  Synthetic polypeptide
MAGTALKRLMAEYKHGRRSHDLRKAGSLKKLRMIPDQQTRGSEFCQQPQ

SEQ ID NO: 6457 - protein, 58 aa, Artificial Sequence
  Synthetic polypeptide
MAGTALKRLMAEYKQTTTATPAFSNYHPDQSAVINIRARLHRQKDYDLLKAHMIVSIF

SEQ ID NO: 6458 - protein, 27 aa, Artificial Sequence
  Synthetic polypeptide
MAGTALKRLMAEYKQKHKVKQQGLQKI

SEQ ID NO: 6459 - protein, 260 aa, Artificial Sequence
  Synthetic polypeptide
MATLSFVFLLLGAVSWPPASASGQEFWPGQSAADILSGAASRRRYLLYDVNPPEGFNLRRDVYIRIASLLKTLLKTEEWVLVLPPWGRLYHWQSPDIHQVRIPWSEFFDLPSLNKNIPVIEYEQFIAESGGPFIDQVYVLQSYAEGWKEGTWEEKVDERPCIDQLLYSQDKHEYYRGWFWGYEETRGLNVSCLSVQGSASIVAPLLLRNTSARRCFSRVPVFLGLGLPPDKGCSNSDETLWKECLPRNGVSTTEQMQLRL

SEQ ID NO: 6460 - protein, 11 aa, Artificial Sequence
  Synthetic polypeptide
AVHRRIWWALY

SEQ ID NO: 6461 - protein, 9 aa, Artificial Sequence
  Synthetic polypeptide
MGEGLQIVT

SEQ ID NO: 6462 - protein, 196 aa, Artificial Sequence
  Synthetic polypeptide
MVRPKKVCFSESSLPTGDRTRRSYYLNEIQSFAGAEKDARVVGEIAFQLDRRILAYVFPGVTRLYGFTVANIPEKIEQTSTKSLDGSVDERKLRELTQRYLALSARLEKLGYSRDVHPAFSEFLINTYGILKQRPDLRANPLHSSPAALRKLVIDVVPPKFLGDSLLLLNCLCELSKEDGKPLFACTLGGRGRRIA

SEQ ID NO: 6463 - protein, 350 aa, Artificial Sequence
  Synthetic polypeptide
MAEGGELMSRLLSENADLKKQVRLLKENQMLRRLLSQSCQEGGGHDLLPPRAHAYPEAGSPGSGVPDFGRFTSVADTPSQLQTSSLEDLLCSHAPLSSEDDTSPGCAAPSQAPFKAFLSPPEPHSHRGTDRKLSPLLSPLQDSLVDKTLLEPREMVRPKKVCFSESSLPTGDRTRRSYYLNEIQSFAGAEKDARVVGEIAFQLDRRILAYVFPGVTRLYGFTVANIPEKIEQTSTKSLDGSVDERKLRELTQRYLALSARLEKLGYSRDVHPAFSEFLINTYGILKQRPDLRANPLHSSPAALRKLVIDVVPPKFLGDSLLLLNCLCELSKEDGKPLFACTLGGRGRRIA

SEQ ID NO: 6464 - protein, 246 aa, Artificial Sequence
  Synthetic polypeptide
GKARPAGNTGAWAPAEQFFPASNRTREGGGLWPPLPLQSSPAAPTMLDSSAAEQVTRLTLKLLGQKLEQERQNVEGGPEGLHLEPGNEDRPDDALQTALKRRRDLLQRLREQHLLDELSRAQAWSGPSRGALGSALPPELPPTGILPTASPSPLAPDPPRIILPTVPQPPATIIQQLPQQPLIAQIPPPQAFPTQRSGSIKEDMVELLLLQNAQVHQLVLQNWMLKALPPALQTFEFWQPTDSTWT

SEQ ID NO: 6465 - protein, 178 aa, Artificial Sequence
  Synthetic polypeptide
MAILPGEAPVPGPGWPEPDAGGASVALGLPVPVCSSSASALQEQHLLDELSRAQAWSGPSRGALGSALPPELPPTGILPTASPSPLAPDPPRIILPTVPQPPATIIQQLPQQPLIAQIPPPQAFPTQRSGSIKEDMVELLLLQNAQVHQLVLQNWMLKALPPALQTFEFWQPTDSTWT

SEQ ID NO: 6466 - protein, 284 aa, Artificial Sequence
  Synthetic polypeptide
MARSRLPATSLRKPWKLDRQKLPSPDSGHSLLCGWSPGGKARPAGNTGAWAPAEQFFPASNRTREGGGLWPPLPLQSSPAAPTMLDSSAAEQVTRLTLKLLGQKLEQERQNVEGGPEGLHLEPGNEDRPDDALQTALKRRRDLLQRLREQHLLDELSRAQAWSGPSRGALGSALPPELPPTGILPTASPSPLAPDPPRIILPTVPQPPATIIQQLPQQPLIAQIPPPQAFPTQRSGSIKEDMVELLLLQNAQVHQLVLQNWMLKALPPALQTFEFWQPTDSTWT

SEQ ID NO: 6467 - protein, 800 aa, Artificial Sequence
  Synthetic polypeptide
MADRGCPLEAAPLPAEVRESLAELELELSEGDITQKGYEKKRAKLLARYIPLIQGIDPSLQAENRIPGPSQTTAAAPKQQKSRPTASRDERFRSDVHTEAVQAALAKYKERKMPMPSKRRSVLVHSSVETYTPPDTSSASEDEGSLRRPGRLTSTPLQSHSSVEPWLDRVIQGSSTSSSASSTSSHPGGRPTTAPSAAATPGAAATTALAGLEAHTHIDLHSAPPDVTTGLVEHSYFERPQVASVRSVPRGCSGSMLETADGVPVNSRVSSKIQQLLNTLKRPKRPPLKEFFVDDFEELLEDPNQPKPEGSETSVLRGEPLTAGVPRPPSLLATLQRWGTTQPKSPCLTALDTTGKAVYTLTYGKLWSRSLKLAYTLLNKLTSKNEPLLKPGDRVALVFPNSDPVMFMVAFYGCLLAELVPVPIEVPLTRKDAGSQQVGFLLGSCGVFLALTTDACQKGLPKAQTGEVAAFKGWPPLSWLVIDGKHLAKPPKDWHPLAQDTGTGTAYIEYKTSKEGSTVGVTVSHASLLAQCRALTQACGYSEAETLTNVLDFKRDAGLWHGVLTSVMNRMHVVSVPYALMKANPLSWIQKVCFYKARAALVKSRDMHWSLLAQRGQRDVSLSSLRMLIVADGANPWSISSCDAFLNVFQSRGLRPEVICPCASSPEALTVAIRRPPDLGGPPPRKAVLSMNGLSYGVIRVDTEEKLSVLTVQDVGQVMPGANVCVVKLEGTPYLCKTDEVGEICVSSSATGTAYYGLLGITKNVFEAVPVTTGGAPIFDRPFTRTGLLGFIGPGTSGNF

SEQ ID NO: 6468 - protein, 740 aa, Artificial Sequence
  Synthetic polypeptide
MADRGCPLEAAPLPAEVRESLAELELELSEDVHTEAVQAALAKYKERKMPMPSKRRSVLVHSSVETYTPPDTSSASEDEGSLRRPGRLTSTPLQSHSSVEPWLDRVIQGSSTSSSASSTSSHPGGRPTTAPSAAATPGAAATTALAGLEAHTHIDLHSAPPDVTTGLVEHSYFERPQVASVRSVPRGCSGSMLETADGVPVNSRVSSKIQQLLNTLKRPKRPPLKEFFVDDFEELLEVQQPDPNQPKPEGSETSVLRGEPLTAGVPRPPSLLATLQRWGTTQPKSPCLTALDTTGKAVYTLTYGKLWSRSLKLAYTLLNKLTSKNEPLLKPGDRVALVFPNSDPVMFMVAFYGCLLAELVPVPIEVPLTRKDAGSQQVGFLLGSCGVFLALTTDACQKGLPKAQTGEVAAFKGWPPLSWLVIDGKHLAKPPKDWHPLAQDTGTGTAYIEYKTSKEGSTVGVTVSHASLLAQCRALTQACGYSEAETLTNVLDFKRDAGLWHGVLTSVMNRMHVVSVPYALMKANPLSWIQKVCFYKARAALVKSRDMHWSLLAQRGQRDVSLSSLRMLIVADGANPWSISSCDAFLNVFQSRGLRPEVICPCASSPEALTVAIRRPPDLGGPPPRKAVLSMNGLSYGVIRVDTEEKLSVLTVQDVGQVMPGANVCVVKLEGTPYLCKTDEVGEICVSSSATGTAYYGLLGITKNVFEAVPVTTGGAPIFDRPFTRTGLLGFIGPGTSGNF

SEQ ID NO: 6469 - protein, 805 aa, Artificial Sequence
  Synthetic polypeptide
MADRGCPLEAAPLPAEVRESLAELELELSEGDITQKGYEKKRAKLLARYIPLIQGIDPSLQAENRIPGPSQTTAAAPKQQKSRPTASRDERFRSDVHTEAVQAALAKYKERKMPMPSKRRSVLVHSSVETYTPPDTSSASEDEGSLRRPGRLTSTPLQSHSSVEPWLDRVIQGSSTSSSASSTSSHPGGRPTTAPSAAATPGAAATTALAGLEAHTHIADLHSAPPDVTTGLVEHSYFERPQVASVRSVPRGCSGSMLETADGVPVNSRVSSKIQQLLNTLKRPKRPPLKEFFVDDFEELLEVQQPDPNQPKPEGSETSVLRGEPLTAGVPRPPSLLATLQRWGTTQPKSPCLTALDTTGKAVYTLTYGKLWSRSLKLAYTLLNKLTSKNEPLLKPGDRVALVFPNSDPVMFMVAFYGCLLAELVPVPIEVPLTRKDAGSQQVGFLLGSCGVFLALTTDACQKGLPKAQTGEVAAFKGWPPLSWLVIDGKHLAKPPKDWHPLAQDTGTGTAYIEYKTSKEGSTVGVTVSHASLLAQCRALTQACGYSEAETLTNVLDFKRDAGLWHGVLTSVMNRMHVVSVPYALMKANPLSWIQKVCFYKARAALVKSRDMHWSLLAQRGQRDVSLSSLRMLIVADGANPWSISSCDAFLNVFQSRGLRPEVICPCASSPEALTVAIRRPPDLGGPPPRKAVLSMNGLSYGVIRVDTEEKLSVLTVQDVGQVMPGANVCVVKLEGTPYLCKTDEVGEICVSSSATGTAYYGLLGITKNVFEAVPVTTGGAPIFDRPFTRTGLLGFIGPGTSGNF

SEQ ID NO: 6470 - protein, 804 aa, Artificial Sequence
  Synthetic polypeptide
MADRGCPLEAAPLPAEVRESLAELELELSEGDITQKGYEKKRAKLLARYIPLIQGIDPSLQAENRIPGPSQTTAAAPKQQKSRPTASRDERFRSDVHTEAVQAALAKYKERKMPMPSKRRSVLVHSSVETYTPPDTSSASEDEGSLRRPGRLTSTPLQSHSSVEPWLDRVIQGSSTSSSASSTSSHPGGRPTTAPSAAATPGAAATTALAGLEAHTHIDLHSAPPDVTTGLVEHSYFERPQVASVRSVPRGCSGSMLETADGVPVNSRVSSKIQQLLNTLKRPKRPPLKEFFVDDFEELLEVQQPDPNQPKPEGSETSVLRGEPLTAGVPRPPSLLATLQRWGTTQPKSPCLTALDTTGKAVYTLTYGKLWSRSLKLAYTLLNKLTSKNEPLLKPGDRVALVFPNSDPVMFMVAFYGCLLAELVPVPIEVPLTRKDAGSQQVGFLLGSCGVFLALTTDACQKGLPKAQTGEVAAFKGWPPLSWLVIDGKHLAKPPKDWHPLAQDTGTGTAYIEYKTSKEGSTVGVTVSHASLLAQCRALTQACGYSEAETLTNVLDFKRDAGLWHGVLTSVMNRMHVVSVPYALMKANPLSWIQKVCFYKARAALVKSRDMHWSLLAQRGQRDVSLSSLRMLIVADGANPWSISSCDAFLNVFQSRGLRPEVICPCASSPEALTVAIRRPPDLGGPPPRKAVLSMNGLSYGVIRVDTEEKLSVLTVQDVGQVMPGANVCVVKLEGTPYLCKTDEVGEICVSSSATGTAYYGLLGITKNVFEAVPVTTGGAPIFDRPFTRTGLLGFIGPGTSGNF

SEQ ID NO: 6471 - protein, 761 aa, Artificial Sequence
  Synthetic polypeptide
MADRGCPLEAAPLPAEVRESLAELELELSEGDITQKGYEKKRAKLLARYIPLIQGIDPSLQAENRIPGPSQTTAAAPKQQKSRPTASRDERFRSDVHTEAVQAALAKYKERKMPMPSKRRSVLVHSSVETYTPPDTSSASEDEGSLRRPGRLTSTPLQSHSSVEPWLDRVIQGSSTSSSASSTSSHPGGRPTTAPSAAATPGAAATTALAGLEAHTHIGVPVNSRVSSKIQQLLNTLKRPKRPPLKEFFVDDFEELLEVQQPDPNQPKPEGSETSVLRGEPLTAGVPRPPSLLATLQRWGTTQPKSPCLTALDTTGKAVYTLTYGKLWSRSLKLAYTLLNKLTSKNEPLLKPGDRVALVFPNSDPVMFMVAFYGCLLAELVPVPIEVPLTRKDAGSQQVGFLLGSCGVFLALTTDACQKGLPKAQTGEVAAFKGWPPLSWLVIDGKHLAKPPKDWHPLAQDTGTGTAYIEYKTSKEGSTVGVTVSHASLLAQCRALTQACGYSEAETLTNVLDFKRDAGLWHGVLTSVMNRMHVVSVPYALMKANPLSWIQKVCFYKARAALVKSRDMHWSLLAQRGQRDVSLSSLRMLIVADGANPWSISSCDAFLNVFQSRGLRPEVICPCASSPEALTVAIRRPPDLGGPPPRKAVLSMNGLSYGVIRVDTEEKLSVLTVQDVGQVMPGANVCVVKLEGTPYLCKTDEVGEICVSSSATGTAYYGLLGITKNVFEAVPVTTGGAPIFDRPFTRTGLLGFIGPGTSGNF

SEQ ID NO: 6472 - protein, 122 aa, Artificial Sequence
  Synthetic polypeptide
MYAWFFLPSFSQSPPTFGFLLDIDGVLVRGHRVIPAALKAFRRLVNSQGQLRVPVVFVTNAGNILQHSKAQELSALLGCEVDADQVILSHSPMKLFSEYHEKRMLVSGQGPVMENAQGLCPA

SEQ ID NO: 6473 - protein, 152 aa, Artificial Sequence
  Synthetic polypeptide
MAAWGCVAALGAARGLCWRAARAAAGLQGRPARRCYAVGPAQSPPTFGFLLDIDGVLVRGHRVIPAALKAFRRLVNSQGQLRVPVVFVTNAGNILQHSKAQELSALLGCEVDADQVILSHSPMKLFSEYHEKRMLVSGQGPVMENAQGLCPA

SEQ ID NO: 6474 - protein, 79 aa, Artificial Sequence
  Synthetic polypeptide
MKSDSSTSAAPLRGLGGPLRSSEPVRAVPARAPAVDLLEEAADLLVVHLDFRAALETCERAWQSLANHAVAEEPAGTRK

SEQ ID NO: 6475 - protein, 78 aa, Artificial Sequence
  Synthetic polypeptide
MKSDSSTSAAPLRGLGGPLRSSEPVRAVPARAPAVDLLEEAADLLVVHLDFRAALETCERAWQSLANHAVAEEPAGTK

SEQ ID NO: 6476 - protein, 357 aa, Artificial Sequence [sequence omitted]

SEQ ID NO: 6477 - protein, 37 aa, Artificial Sequence
  Synthetic polypeptide
MVPKADSGAFLLLFLLVLTVTEPLRPALSPGELPGTE

SEQ ID NO: 6478 - protein, 1481 aa, Artificial Sequence
  Synthetic polypeptide
MAQILPVRFQEHFQLQNLGINPANIGFSTLTMESDKFICIREKVGEQAQVTIIDMSDPMAPIRRPISAESAIMNPASKVIALKAGKTLQIFNIEMKSKMKAHTMAEEVIFWKWVSVNTVALVTETAVYHWSMEGDSQPMKMFDRHTSLVGCQVIHYRTDEYQKWLLLVGISAQQNRVVGAMQLYSVDRKVSQPIEGHAAAFAEFKMEGNAKPATLFCFAVRNPTGGKLHIIEVGQPAAGNQPFVKKAVDVFFPPEAQNDFPVAMQIGAKHGVIYLITKYGYLHLYDLESGVCICMNRISADTIFVTAPHKPTSGIIGVNKKGQVLSVCVEEDNIVNYATNVLQNPDLGLRLAVRSNLAGAEKLFVRKFNTLFAQGSYAEAAKVAASAPKGILRTRETVQKFQSIPAQSGQASPLLQYFGILLDQGQLNKLESLELCHLVLQQGRKQLLEKWLKEDKLECSEELGDLVKTTDPMLALSVYLRANVPSKVIQCFAETGQFQKIVLYAKKVGYTPDWIFLLRGVMKISPEQGLQFSRMLVQDEEPLANISQIVDIFMENSLIQQCTSFLLDALKNNRPAEGLLQTWLLEMNLVHAPQVADAILGNKMFTHYDRAHIAQLCEKAGLLQQALEHYTDLYDIKRAVVHTHLLNPEWLVNFFGSLSVEDSVECLHAMLSANIRQNLQLCVQVASKYHEQLGTQALVELFESFKSYKGLFYFLGSIVNFSQDPDVHLKYIQAACKTGQIKEVERICRESSCYNPERVKNFLKEAKLTDQLPLIIVCDRFGFVHDLVLYLYRNNLQRYIEIYVQKVNPSRTPAVIGGLLDVDCSEEVIKHLIMAVRGQFSTDELVAEVEKRNRLKLLLPWLESQIQEGCEEPATHNALAKIYIDSNNSPECFLRENAYYDSSVVGRYCEKRDPHLACVAYERGQCDLELIKVCNENSLFKSEARYLVCRKDPELWAHVLEETNPSRRQLIDQVVQTALSETRDPEEISVTVKAFMTADLPNELIELLEKIVLDNSVFSEHRNLQNLLILTAIKADRTRVMEYISRLDNYDALDIASIAVSSALYEEAFTVFHKFDMNASAIQVLIEHIGNLDRAYEFAERCNEPAVWSQLAQAQLQKDLVKEAINSYIRGDDPSSYLEVVQSASRSNNWEDLVKFLQMARKKGRESYIETELIFALAKTSRVSELEDFINGPNNAHIQQVGDRCYEEGMYEAAKLLYSNVSNFARLASTLVHLGEYQAAVDNSRKASSTRTWKEVCFACMDGQEFRFAQLCGLHIVIHADELEELMCYYQDRGYFEELILLLEAALGLERAHMGMFTELAILYSKFKPQKMLEHLELFWSRVNIPKVLRAAEQAHLWAELVFLYDKYEEYDNAVLTMMSHPTEAWKEGQFKDIITKVANVELCYRALQFYLDYKPLLINDLLLVLSPRLDHTWTVSFFSKEFGRSGFQPSWITLGVQDFSGESHCRCGGNSRRTRIRSGA

SEQ ID NO: 6479 - protein, 1014 aa, Artificial Sequence
  Synthetic polypeptide
MAQILPVRFQEHFQLQNLGINPANIGFSTLTMESDKFICIREKVGEQAQVTIIDMSDPMAPIRRPISAESAIMNPASKVIALKAGKTLQIFNIEMKSKMKAHTMAEEVIFWKWVSVNTVALVTETAVYHWSMEGDSQPMKMFDRHTSLVGCQVIHYRTDEYQKWLLLVGISAQQNRVVGAMQLYSVDRKVSQPIEGHAAAFAEFKMEGNAKPATLFCFAVRNPTGGKLHIIEVGQPAAGNQPFVKKAVDVFFPPEAQNDFPVAMQIGAKHGVIYLITKYGYLHLYDLESGVCICMNRISADTIFVTAPHKPTSGIIGVNKKGQVLSVCVEEDNIVNYATNVLQNPDLGLRLAVRSNLAGAEKLFVRKFNTLFAQGSYAEAAKVAASAPKGILRTRETVQKFQSIPAQSGQASPLLQYFGILLDQGQLNKLESLELCHLVLQQGRKQLLEKWLKEDKLECSEELGDLVKTTDPMLALSVYLRANVPSKVIQCFAETGQFQKIVLYAKKVGYTPDWIFLLRGVMKISPEQGLQFSRMLVQDEEPLANISQIVDIFMENSLIQQCTSFLLDALKNNRPAEGLLQTWLLEMNLVHAPQVADAILGNKMFTHYDRAHIAQLCEKAGLLQQALEHYTDLYDIKRAVVHTHLLNPEWLVNFFGSLSVEDSVECLHAMLSANIRQNLQLCVQVASKYHEQLGTQALVELFESFKSYKGLFYFLGSIVNFSQDPDVHLKYIQAACKTGQIKEVERICRESSCYNPERVKNFLKEAKLTDQLPLIIVCDRFGFVHDLVLYLYRNNLQRYIEIYVQKVNPSRTPAVIGGLLDVDCSEEVIKHLIMAVRGQFSTDELVAEVEKRNRLKLLLPWLESQIQEGCEEPATHNALAKIYIDSNNSPECFLRENAYYDSSVVGRYCEKRDPHLACVAYERGQCDLELIKVCNENSLFKSEARYLVCRKDPELWAHVLEETNPSRRQLIDQLLRRLKQENRLNPGGGGCRKPRLHATALQPGQLGETLSQKN

SEQ ID NO: 6480 - protein, 64 aa, Artificial Sequence
  Synthetic polypeptide
MADGSGWQPPRPCEAYRAEWKLCRSARHFLHHYYVHGERPACEQWQRDLASCRDWEERRNAEAQ

SEQ ID NO: 6481 - protein, 37 aa, Artificial Sequence
  Synthetic polypeptide
GLRTVAARPGQLPRLGGAPERRGPVVPATWKAEVRGS

SEQ ID NO: 6482 - protein, 101 aa, Artificial Sequence
  Synthetic polypeptide
MCRCSLVLLSVDHEVPFSSFFIGWRTEGRAWRAGRPDMADGSGWQPPRPCEAYRAEWKLCRSARHFLHHYYVHGERPACEQWQRDLASCRDWEERRNAEAQ

SEQ ID NO: 6483 - protein, 68 aa, Artificial Sequence
  Synthetic polypeptide
MADGSGWQPPRPCEAYRAEWKLCRSARHFLHHYYVHGERPACEQWQRDLASCRDWEERRNAEAQGRGI

SEQ ID NO: 6484 - protein, 33 aa, Artificial Sequence
  Synthetic polypeptide
GLRTVAARPGQLPRLGGAPERRGPGTGHLNLQS

SEQ ID NO: 6485 - protein, 105 aa, Artificial Sequence
  Synthetic polypeptide
MCRCSLVLLSVDHEVPFSSFFIGWRTEGRAWRAGRPDMADGSGWQPPRPCEAYRAEWKLCRSARHFLHHYYVHGERPACEQWQRDLASCRDWEERRNAEAQGRGI

SEQ ID NO: 6486 - protein, 268 aa, Artificial Sequence
  Synthetic polypeptide
MFSFNMFDHPIPRVFQNRFSTQYRCFSVSMLAGPNDRSDVEKGGKIIMPPSALDQLSRLNITYPMLFKLTNKNSDRMTHCGVLEFVADEGICYLPHWMMQNLLLEEGGLVQVESVNLQVATYSKFQPQSPDFLDITNPKAVLENALRNFACLTTGDVIAINYNEKIYELRVMETKPDKAVSIIECDMNVDFDAPLGYKEPERQVQHEESTEGEADHSGYAGELGFRAFSGSGNRLDGKKKGVEPSPSPIKPGDIKRGIPNYEFKLGSS

SEQ ID NO: 6487 - protein, 257 aa, Artificial Sequence
  Synthetic polypeptide
MFSFNMFDHPIPRVFQNRFSTQYRCFSVSMLAGPNDRSDVEKGGKSRLNITYPMLFKLTNKNSDRMTHCGVLEFVADEGICYLPHWMMQNLLLEEGGLVQVESVNLQVATYSKFQPQSPDFLDITNPKAVLENALRNFACLTTGDVIAINYNEKIYELRVMETKPDKAVSIIECDMNVDFDAPLGYKEPERQVQHEESTEGEADHSGYAGELGFRAFSGSGNRLDGKKKGVEPSPSPIKPGDIKRGIPNYEFKLGSS

SEQ ID NO: 6488 - protein, 154 aa, Artificial Sequence
  Synthetic polypeptide
MCIIFFKFDPRPVSKNAYRLILAANRDEFYSRPSKLADFWGNNNEILSGLDMEEGKEGGTWLGISTRGKLAALTNYLQPQLDWQARGRGELVTHFLTTDVDSLSYLKKVSMEGHLYNGFNLIAADLSTAKGDVICYYGNRGEPDPIVLTPGKRK

SEQ ID NO: 6489 - protein, 195 aa, Artificial Sequence
  Synthetic polypeptide
MPPKLLCAGRCVGQDGAAQAWHCPPGQGHSVWDAVRMPLGAGTPVNVQRREDSATEGSHRLILAANRDEFYSRPSKLADFWGNNNEILSGLDMEEGKEGGTWLGISTRGKLAALTNYLQPQLDWQARGRGELVTHFLTTDVDSLSYLKKVSMEGHLYNGFNLIAADLSTAKGDVICYYGNRGEPDPIVLTPGKRK

SEQ ID NO: 6490 - protein, 56 aa, Artificial Sequence
  Synthetic polypeptide
MAGHQHTWQAGSTHQLPAAAAGLAGPRASTAKGDVICYYGNRGEPDPIVLTPGKRK

SEQ ID NO: 6491 - protein, 159 aa, Artificial Sequence
  Synthetic polypeptide
MPLGAGTPVNVQRREDSATEGSHRLILAANRDEFYSRPSKLADFWGNNNEILSGLDMEEGKEGGTWLGISTRGKLAALTNYLQPQLDWQARGRGELVTHFLTTDVDSLSYLKKVSMEGHLYNGFNLIAADLSTAKGDVICYYGNRGEPDPIVLTPGKRK

SEQ ID NO: 6492 - protein, 635 aa, Artificial Sequence
  Synthetic polypeptide
METDESPSPLPCGPAGEAVMESRARPFQALPREQSPPPPLQTSSGAEVMDVGSGGDGQSELPAEDPFNFYGASLLSKGSFSKGRLLIDPNCSGHSPRTARHAPAVRKFSPDLKLLKDVKISVSFTESCRSKDRKVLYTGAERDVRAECGLLLSPVSGDVHACPFGGSVGDGVGIGGESADKKDEENELDQEKRVEYAVLDELEDFTDNLELDEEGAGGFTAKAIVQRDRVDEEALNFPYEDDFDNDVDALLEEGLCAPKKRRTEEKYGGDSDHPSDGETSVQPMMTKIKTVLKSRGRPPTEPLPDGWIMTFHNSGVPVYLHRESRVVTWSRPYFLGTGSIRKHDPPLSSIPCLHYKKMKDNEEREQSSDLTPSGDVSPVKPLSRSAELEFPLDEPDSMGADPGPPDEKDPLGAEAAPGALGQVKAKVEVCKDESVDLEEFRSYLEKRFDFEQVTVKKFRTWAERRQFNREMKRKQAESERPILPANQKLITLSVQDAPTKKEFVINPNGKSEVCILHEYMQRVLKVRPVYNFFECENPSEPFGASVTIDGVTYGSGTASSKKLAKNKAARATLEILIPDFVKQTSEEKPKDSEELEGQAWWLTPVIPALWEAKAGRSQGQEIETILANMVKPRLY

SEQ ID NO: 6493 - protein, 602 aa, Artificial Sequence
  Synthetic polypeptide
METDESPSPLPCGPAGEAVMESRARPFQALPREQSPPPPLQTSSGAEVMDVGSGGDGQSELPAEDPFNFYGASLLSKGSFSKGRLLIDPNCSGHSPRTARHAPAVRKFSPDLKLLKDVKISVSFTESCRSKDRKVLYTGAERDVRAECGLLLSPVSGDVHACPFGGSVGDGVGIGGESADKKDEENELDQEKRVEYAVLDELEDFTDNLELDEEGAGGFTAKAIVQRDRVDEEALNFPYEDDFDNDVDALLEEGLCAPKKRRTEEKYGGDSDHPSDGETSVQPMMTKIKTVLKSRGRPPTEPLPDGWIMTFHNSGVPVYLHRESRVVTWSRPYFLGTGSIRKHDPPLSSIPCLHYKKMKDNEEREQSSDLTPSGDVSPVKPLSRSAELEFPLDEPDSMGADPGPPDEKDPLGAEAAPGALGQVKAKVEVCKDESVDLEEFRSYLEKRFDFEQVTVKKFRTWAERRQFNREMKRKQAESERPILPANQKLITLSVQDAPTKKEFVINPNGKSEVCILHEYMQRVLKVRPVYNFFECARATLEILIPDFVKQTSEEKPKDSEELEGQAWWLTPVIPALWEAKAGRSQGQEIETILANMVKPRLY

SEQ ID NO: 6494 - protein, 16 aa, Artificial Sequence
  Synthetic polypeptide
AWLVYTTLDRPAALTP

SEQ ID NO: 6495 - protein, 1258 aa, Artificial Sequence
  Synthetic polypeptide
MAAAPARGGGGGGGGGGGCSGSGSSASRGFYFNTVLSLARSLAVQRPASLEKVQKLLCMCPVDFHGIFQLDERRRDAVIALGIFLIESDLQHKDCVVPYLLRLLKGLPKVYWVEESTARKGRGALPVAESFSFCLVTLLSDVAYRDPSLRDEILEVLLQVLHVLLGMCQALEIQDKEYLCKYAIPCLIGISRAFGRYSNMEESLLSKLFPKIPPHSLRVLEELEGVRRRSFNDFRSILPSNLLTVCQEGTLKRKTSSVSSISQVSPERGMPPPSSPGGSAFHYFEASCLPDGTALEPEYYFSTISSSFSVSPLFNGVTYKEFNIPLEMLRELLNLVKKIVEEAVLKSLDAIVASVMEANPSADLYYTSFSDPLYLTMFKMLRDTLYYMKDLPTSFVKEIHDFVLEQFNTSQGELQKILHDADRIHNELSPLKLRCQANAACVDLMVWAVKDEQGAENLCIKLSEKLQSKTSSKVIIAHLPLLICCLQGLGRLCERFPVVVHSVTPSLRDFLVIPSPVLVKLYKYHSQYHTVAGNDIKISVTNEHSESTLNVMSGKKSQPSMYEQLRDIAIDNICRCLKAGLTVDPVIVEAFLASLSNRLYISQESDKDAHLIPDHTIRALGHIAVALRDTPKVMEPILQILQQKFCQPPSPLDVLIIDQLGCLVITGNQYIYQEVWNLFQQISVKASSVVYSATKDYKDHGYRHCSLAVINALANIAANIQDEHLVDELLMNLLELFVQLGLEGKRASERASEKGPALKASSSAGNLGVLIPVIAVLTRRLPPIKEAKPRLQKLFRDFWLYSVLMGFAVEGSGLWPEEWYEGVCEIATKSPLLTFPSKEPLRSVLQYNSAMKNDTVTPAELSELRSTIINLLDPPPEVSALINKLDFAMSTYLLSVYRLEYMRVLRSTDPDRFQVMFCYFEDKAIQKDKSGMMQCVIAVADKVFDAFLNMMADKAKTKENEEELERHAQFLLVNFNHIHKRIRRVADKYLSGLVDKFPHLLWSGTVLKTMLDILQTLSLSLSADIHKDQPYYDIPDAPYRITVPDTYEARESIVKDFAARCGMILQEAMKWAPTVTKSHLQEYLNKHQNWVSGLSQHTGLAMATESILHFAGYNKQNTTLGATQLSERPACVKKDYSNFMASLNLRNRYAGEVYGMIRFSGTTGQMSDLNKMMVQDLHSALDRSHPQHYTQAMFKLTAMLISSKDCDPQLLHHLCWGPLRMFNEHGMETALACWEWLLAGKDGVEVPMTLSTSHHLHL

SEQ ID NO: 6496 - protein, 1200 aa, Artificial Sequence
  Synthetic polypeptide
MCPVDFHGIFQLDERRRDAVIALGIFLIESDLQHKDCVVPYLLRLLKGLPKVYWVEESTARKGRGALPVAESFSFCLVTLLSDVAYRDPSLRDEILEVLLQVLHVLLGMCQALEIQDKEYLCKYAIPCLIGISRAFGRYSNMEESLLSKLFPKIPPHSLRVLEELEGVRRRSFNDFRSILPSNLLTVCQEGTLKRKTSSVSSISQVSPERGMPPPSSPGGSAFHYFEASCLPDGTALEPEYYFSTISSSFSVSPLFNGVTYKEFNIPLEMLRELLNLVKKIVEEAVLKSLDAIVASVMEANPSADLYYTSFSDPLYLTMFKMLRDTLYYMKDLPTSFVKEIHDFVLEQFNTSQGELQKILHDADRIHNELSPLKLRCQANAACVDLMVWAVKDEQGAENLCIKLSEKLQSKTSSKVIIAHLPLLICCLQGLGRLCERFPVVVHSVTPSLRDFLVIPSPVLVKLYKYHSQYHTVAGNDIKISVTNEHSESTLNVMSGKKSQPSMYEQLRDIAIDNICRCLKAGLTVDPVIVEAFLASLSNRLYISQESDKDAHLIPDHTIRALGHIAVALRDTPKVMEPILQILQQKFCQPPSPLDVLIIDQLGCLVITGNQYIYQEVWNLFQQISVKASSVVYSATKDYKDHGYRHCSLAVINALANIAANIQDEHLVDELLMNLLELFVQLGLEGKRASERASEKGPALKASSSAGNLGVLIPVIAVLTRRLPPIKEAKPRLQKLFRDFWLYSVLMGFAVEGSGLWPEEWYEGVCEIATKSPLLTFPSKEPLRSVLQYNSAMKNDTVTPAELSELRSTIINLLDPPPEVSALINKLDFAMSTYLLSVYRLEYMRVLRSTDPDRFQVMFCYFEDKAIQKDKSGMMQCVIAVADKVFDAFLNMMADKAKTKENEEELERHAQFLLVNFNHIHKRIRRVADKYLSGLVDKFPHLLWSGTVLKTMLDILQTLSLSLSADIHKDQPYYDIPDAPYRITVPDTYEARESIVKDFAARCGMILQEAMKWAPTVTKSHLQEYLNKHQNWVSGLSQHTGLAMATESILHFAGYNKQNTTLGATQLSERPACVKKDYSNFMASLNLRNRYAGEVYGMIRFSGTTGQMSDLNKMMVQDLHSALDRSHPQHYTQAMFKLTAMLISSKDCDPQLLHHLCWGPLRMFNEHGMETALACWEWLLAGKDGVEVPMTLSTSHHLHL

SEQ ID NO: 6497 - protein, 153 aa, Artificial Sequence
  Synthetic polypeptide
MSAYPKSYNPFDDDGEDEGARPAPWRDARDLPDGPDAPADRQQYLRQEVLRRAEATAASTSRSLALMYESEKVGVASSEELARQRGVLERTEKMVDKMDQDLKISQKHINSIKSVFGGLVNYFKSKPVETPPEQNGTLTSQPNNRAGCSGSHL

SEQ ID NO: 6498 - protein, 60 aa, Artificial Sequence
  Synthetic polypeptide
MVDKMDQDLKISQKHINSIKSVFGGLVNYFKSKPVETPPEQNGTLTSQPNNRAGCSGSHL

SEQ ID NO: 6499 - protein, 111 aa, Artificial Sequence
  Synthetic polypeptide
MAGPGSTGGQIGAAALAGGARSKVAPSVDFDHSCSDSVEYLTLNFGPFETVHRWRRLPPCDEFVGARRSKHTVVAYKDAIYVFGGDNGKTMLNDLLRFDVKDCSWCSYSGG

SEQ ID NO: 6500 - protein, 121 aa, Artificial Sequence
  Synthetic polypeptide
MAGPGSTGGQIGAAALAGGARSKVAPSVDFDHSCSDSVEYLTLNFGPFETVHRWRRLPPCDEFVGARRSKHTVVAYKDAIYVFGGDNGKTMLNDLLRFDVKDCSWCRRLRQDNRLNPGGGG

SEQ ID NO: 6501 - protein, 138 aa, Artificial Sequence
  Synthetic polypeptide
MAGPGSTGGQIGAAALAGGARSKVAPSVDFDHSCSDSVEYLTLNFGPFETVHRWRRLPPCDEFVGARRSKHTVVAYKDAIYVFGGDNGKTMLNDLLRFDVKDCSWCRRWRLSRDRATALQPGRQRETPSQKKKKRKKK

SEQ ID NO: 6502 - protein, 355 aa, Artificial Sequence
  Synthetic polypeptide
MSSGAPQKSSPMASGAEETPGFLDTLLQDFPALLNPEDPLPWKAPGTVLSQEEVEGELAELAMGFLGSRKAPPPLAAALAHEAVSQLLQTDLSEFRKLPREEEEEEEDDDEEEKAPVTLLDAQSLAQSFFNRLWEVAGQWQKQVPLAARASQRQWLVSIHAIRNTRRKMEDRHVSLPSFNQLFGLSDPVNRAYFAVFDGHGGVDAARYAAVHVHTNAARQPELPTDPEGALREAFRRTDQMFLRKAKRERLQSGTTGVCALIAGATLHVAWLGDSQVILVQQGQVVKLMEPHRPERQDEKARIEALGGFVSHMDCWRVNGTLAVSRAIGSLSEPCHHAVQIPSLKERPHDGGSSK

SEQ ID NO: 6503 - protein, 187 aa, Artificial Sequence
  Synthetic polypeptide
MEDRHVSLPSFNQLFGLSDPVNRAYFAVFDGHGGVDAARYAAVHVHTNAARQPELPTDPEGALREAFRRTDQMFLRKAKRERLQSGTTGVCALIAGATLHVAWLGDSQVILVQQGQVVKLMEPHRPERQDEKARIEALGGFVSHMDCWRVNGTLAVSRAIGSLSEPCHHAVQIPSLKERPHDGGSSK

SEQ ID NO: 6504 - protein, 251 aa, Artificial Sequence
  Synthetic polypeptide
MGLCPSTRETAPPAVLDAQSLAQSFFNRLWEVAGQWQKQVPLAARASQRQWLVSIHAIRNTRRKMEDRHVSLPSFNQLFGLSDPVNRAYFAVFDGHGGVDAARYAAVHVHTNAARQPELPTDPEGALREAFRRTDQMFLRKAKRERLQSGTTGVCALIAGATLHVAWLGDSQVILVQQGQVVKLMEPHRPERQDEKARIEALGGFVSHMDCWRVNGTLAVSRAIGSLSEPCHHAVQIPSLKERPHDGGSSK

SEQ ID NO: 6505 - protein, 1038 aa, Artificial Sequence
  Synthetic polypeptide
MVDPVGFAEAWKAQFPDSEPPRMELRSVGDIEQELERCKASIRRLEQEVNQERFRMIYLQTLLAKEKKSYDRQRWGFRRAAQAPDGASEPRASASRPQPAPADGADPPPAEEPEARPDGEGSPGKARPGTARRPGAAASGERDDRGPPASVAALRSNFERIRKGHGQPGADAEKPFYVNVEFHHERGLVKVNDKEVSDRISSLGSQAMQMERKKSQHGAGSSVGDASRPPYRGRSSESSCGVDGDYEDAELNPRFLKDNLIDANGGSRPPWPPLEYQPYQSIYVGGMMEGEGKGPLLRSQSTSEQEKRLTWPRRSYSPRSFEDCGGGYTPDCSSNENLTSSEEDFSSGQSSRVSPSPTTYRMFRDKSRSPSQNSQQSFDSSSPPTPQCHKRHRHCPVVVSEATIVGVRKTGQIWPNDGEGAFHGDADGSFGTPPGYGCAADRAEEQRRHQDGLPYIDDSPSSSPHLSSKGRGSRDALVSGALESTKASELDLEKGLEMRKWVLSGILASEETYLSHLEALLLPMKPLKAAATTSQPVLTSQQIETIFFKVPELYEIHKEFYDGLFPRVQQWSHQQRVGDLFQKLASQLGVYRAFVDNYGVAMEMAEKCCQANAQFAEISENLRARSNKDAKDPTTKNSLETLLYKPVDRVTRSTLVLHDLLKHTPASHPDHPLLQDALRISQNFLSSINEEITPRRQSMTVKKGEHRQLLKDSFMVELVEGARKLRHVFLFTDLLLCTKLKKQSGGKTQQYDCKWYIPLTDLSFQMVDELEAVPNIPLVPDEELDALKIKISQIKNDIQREKRANKGSKATERLKKKLSEQESLLLLMSPSMAFRVHSRNGKSYTFLISSDYERAEWRENIREQQKKCFRSFSLTSVELQMLTNSCVKLQTVHSIPLTINKEDDESPGLYGFLNVIVHSATGFKQSSNLYCTLEVDSFGYFVNKAKTRVYRDTAEPNWNEEFEIELEGSQTLRILCYEKCYNKTKIPKEDGESTDRLMGKGQVQHFVRLRRADHLTSGVQDRPDQHGETPSLLKTQKN

SEQ ID NO: 6506 - protein, 6 aa, Artificial Sequence
  Synthetic polypeptide
MFKNIH

SEQ ID NO: 6507 - protein, 75 aa, Artificial Sequence
  Synthetic polypeptide
MGLELFLDLVSQPSRAVYIFAKKNGIPLELRTVDLVKGQHKSKEFLQINSLGKLPTLKDGDFILTERAAAGISQR

SEQ ID NO: 6508 - protein, 126 aa, Artificial Sequence
  Synthetic polypeptide
MPFLELDTNLPANRVPAGLEKRLCAAAASILGKPADRVNVTVRPGLAMALSGSTEPCAQLSISSIGVVGTAEDNRSHSAHFFEFLTKELALGQDRVPDSKQEKHSMSITGFEDEGDQRPHGTTTRN

SEQ ID NO: 6509 - protein, 140 aa, Artificial Sequence
  Synthetic polypeptide
MQLFLLAVSVPLPAMPFLELDTNLPANRVPAGLEKRLCAAAASILGKPADRVNVTVRPGLAMALSGSTEPCAQLSISSIGVVGTAEDNRSHSAHFFEFLTKELALGQDRVPDSKQEKHSMSITGFEDEGDQRPHGTTTRN

SEQ ID NO: 6510 - protein, 95 aa, Artificial Sequence
  Synthetic polypeptide
MPFLELDTNLPANRVPAGLEKRLCAAAASILGKPADRVNVTVRPGLAMALSGSTEPCAQLSISSIGVVGTAEDNRSHSAHFFEFLTKELALGQDR

SEQ ID NO: 6511 - protein, 109 aa, Artificial Sequence
  Synthetic polypeptide
MQLFLLAVSVPLPAMPFLELDTNLPANRVPAGLEKRLCAAAASILGKPADRVNVTVRPGLAMALSGSTEPCAQLSISSIGVVGTAEDNRSHSAHFFEFLTKELALGQDR

SEQ ID NO: 6512 - protein, 944 aa, Artificial Sequence
  Synthetic polypeptide
MIRIAALNASSTIEDDHEGSFKSHKTQTKEAQEAEAFALYHKALDLQKHDRFEESAKAYHELLEASLLREAVSSGDEKEGLKHPGLILKYSTYKNLAQLAAQREDLETAMEFYLEAVMLDSTDVNLWYKIGHVALRLIRIPLARHAFEEGLRCNPDHWPCLDNLITVLYTLSDYTTCLYFICKALEKDCRYSKGLVLKEKIFEEQPCLRKDSLRMFLKCDMSIHDVSVSAAETQAIVDEALGLRKKRQALIVREKEPDLKLVQPIPFFTWKCLGESLLAMYNHLTTCEPPRPSLGKRIDLSDYQDPSQPLESSMVVTPVNVIQPSTVSTNPAVAVAEPVVSYTSVATTSFPLHSPGLLETGAPVGDISGGDKSKKGVKRKKISEESGETAKRRSARVRNTKCKKEEKVDFQELLMKFLPSRLRKLDPEEEDDSFNNYEVQSEAKLESFPSIGPQRLSFDSATFMESEKQDVHEFLLENLTNGGILELMMRYLKAMGHKFLVRWPPGLAEVVLSVYHSWRRHSTSLPNPLLRDCSNKHIKDMMLMSLSCMELQLDQWLLTKGRSSAVSPRNCPAGMVNGRFGPDFPGTHCLGDLLQLSFASSQRDLFEDGWLEFVVRVYWLKARFLALQGDMEQALENYDICTEMLQSSTAIQVEAGAERRDIVIRLPNLHNDSVVSLEEIDKNLKSLERCQSLEEIQRLYEAGDYKAVVHLLRPTLCTSGFDRAKHLEFMTSIPERPAQLLLLQDSLLRLKDYRQCFECSDVALNEAVQQMVNSGEAAAKEEWVATVTQLLMGIEQALSADSSGSILKVSSSTTGLVRLTNNLIQVIDCSMAVQEEAKEPHVSSVLPWIILHRIIWQEEDTFHSLCHQQQLQNPAEEGMSETPMLPSSLMLLNTAHEYLGRRSWCCNSDGALLRFYVQWLTPVIPALWEAEAGGSPEIRSSRPA

SEQ ID NO: 6513 - protein, 894 aa, Artificial Sequence
  Synthetic polypeptide
MIRIAALNASSTIEDDHEGSFKSHKTQTKEAQEAEAFALYHKALDLQKHDRFEESAKAYHELLEASLLREAVSSGDEKEGLKHPGLILKYSTYKNLAQLAAQREDLETAMEFYLEAVMLDSTDVNLWYKIGHVALRLIRIPLARHAFEEGLRCNPDHWPCLDNLITVLYTLSDYTTCLYFICKALEKDCRYSKGLVLKEKIFEEQPCLRKDSLRMFLKCWKCLGESLLAMYNHLTTCEPPRPSLGKRIDLSDYQDPSQPLESSMVVTPVNVIQPSTVSTNPAVAVAEPVVSYTSVATTSFPLHSPGLLETGAPVGDISGGDKSKKGVKRKKISEESGETAKRRSARVRNTKCKKEEKVDFQELLMKFLPSRLRKLDPEEEDDSFNNYEVQSEAKLESFPSIGPQRLSFDSATFMESEKQDVHEFLLENLTNGGILELMMRYLKAMGHKFLVRWPPGLAEVVLSVYHSWRRHSTSLPNPLLRDCSNKHIKDMMLMSLSCMELQLDQWLLTKGRSSAVSPRNCPAGMVNGRFGPDFPGTHCLGDLLQLSFASSQRDLFEDGWLEFVVRVYWLKARFLALQGDMEQALENYDICTEMLQSSTAIQVEAGAERRDIVIRLPNLHNDSVVSLEEIDKNLKSLERCQSLEEIQRLYEAGDYKAVVHLLRPTLCTSGFDRAKHLEFMTSIPERPAQLLLLQDSLLRLKDYRQCFECSDVALNEAVQQMVNSGEAAAKEEWVATVTQLLMGIEQALSADSSGSILKVSSSTTGLVRLTNNLIQVIDCSMAVQEEAKEPHVSSVLPWIILHRIIWQEEDTFHSLCHQQQLQNPAEEGMSETPMLPSSLMLLNTAHEYLGRRSWCCNSDGALLRFYVQWLTPVIPALWEAEAGGSPEIRSSRPA

SEQ ID NO: 6514 - protein, 1396 aa, Artificial Sequence
  Synthetic polypeptide
MIRIAALNASSTIEDDHEGSFKSHKTQTKEAQEAEAFALYHKALDLQKHDRFEESAKAYHELLEASLLREAVSSGDEKEGLKHPGLILKYSTYKNLAQLAAQREDLETAMEFYLEAVMLDSTDVNLWYKIGHVALRLIRIPLARHAFEEGLRCNPDHWPCLDNLITVLYTLSDYTTCLYFICKALEKDCRYSKGLVLKEKIFEEQPCLRKDSLRMFLKCDMSIHDVSVSAAETQAIVDEALGLRKKRQALIVREKEPDLKLVQPIPFFTWKCLGESLLAMYNHLTTCEPPRPSLGKRIDLSDYQDPSQPLESSMVVTPVNVIQPSTVSTNPAVAVAEPVVSYTSVATTSFPLHSPGLLETGAPVGDISGGDKSKKGVKRKKISEESGETAKRRSARVRNTKCKKEEKVDFQELLMKFLPSRLRKLDPEEEDDSFNNYEVQSEAKLESFPSIGPQRLSFDSATFMESEKQDVHEFLLENLTNGGILELMMRYLKAMGHKFLVRWPPGLAEVVLSVYHSWRRHSTSLPNPLLRDCSNKHIKDMMLMSLSCMELQLDQWLLTKGRSSAVSPRNCPAGMVNGRFGPDFPGTHCLGDLLQLSFASSQRDLFEDGWLEFVVRVYWLKARFLALQGDMEQALENYDICTEMLQSSTAIQVEAGAERRDIVIRLPNLHNDSVVSLEEIDKNLKSLERCQSLEEIQRLYEAGDYKAVVHLLRPTLCTSGFDRAKHLEFMTSIPERPAQLLLLQDSLLRLKDYRQCFECSDVALNEAVQQMVNSGEAAAKEEWVATVTQLLMGIEQALSADSSGSILKVSSSTTGLVRLTNNLIQVIDCSMAVQEEAKEPHVSSVLPWIILHRIIWQEEDTFHSLCHQQQLQNPAEEGMSETPMLPSSLMLLNTAHEYLGRRSWCCNSDGALLRFYVRVLQKELAASTSEDTHPYKEELETALEQCFYCLYSFPSKKSKARYLEEHSAQQVDLIWEDALFMFEYFKPKTLPEFDSYKTSTVSADLANLLKRIATIVPRTERPALSLDKVSAYIEGTSTEVPCLPEGADPSPPVVNELYYLLADYHFKNKEQSKAIKFYMHDICICPNRFDSWAGMALARASRIQDKLNSNELKSDGPIWKHATPVLNCFRRALEIDSSNLSLWIEYGTMSYALHSFASRQLKQWRGELPPELVQQMEGRRDSMLETAKHCFTSAARCEGDGDEEEWLIHYMLGKVAEKQQQPPTVYLLHYRQAGHYLHEEAARYPKKIHYHNPPELAMEALEVYFRLHASILKLLGKPDSGVGAEVLVNFMKEAAEGPFARGEEKNTPKASEKEKACLVDEDSHSSAGTLPGPGASLPSSSGPGLTSPPYTATPIDHDYVKCKKPHQQATPDEKLHSGGYCASLPNSTFDNSTLVT

SEQ ID NO: 6515 - protein, 1381 aa, Artificial Sequence
  Synthetic polypeptide
MIRIAALNASSTIEDDHEGSFKSHKTQTKEAQEAEAFALYHKALDLQKHDRFEESAKAYHELLEASLLREAVSSGDEKEGLKHPGLILKYSTYKNLAQLAAQREDLETAMEFYLEAVMLDSTDVNLWYKIGHVALRLIRIPLARHAFEEGLRCNPDHWPCLDNLITVLYTLSDYTTCLYFICKALEKDCRYSKGLVLKEKIFEEQPCLRKDSLRMFLKCDMSIHDVSVSAAETQAIVDEALGLRKKRQALIVREKEPDLKLVQPIPFFTWKCLGESLLAMYNHLTTCEPPRPSLGKRIDLSDYQDPSQPLESSMVVTPVNVIQPSTVSTNPAVAVAEPVVSYTSVATTSFPLHSPGLLETGAPVGDISGGDKSKKGVKRKKISEESGETAKRRSARVRNTKCKKEEKVDFQELLMKFLPSRLRKLDPEEEDDSFNNYEVQSEAKLESFPSIGPQRLSFDSATFMESEKQDVHEFLLENLTNGGILELMMRYLKAMGHKFLVRWPPGLAEVVLSVYHSWRRHSTSLPNPLLRDCSNKHIKDMMLMSLSCMELQLDQWLLTKGRSSAVSPRNCPAGMVNGRFGPDFPGTHCLGDLLQLSFASSQRDLFEDGWLEFVVRVYWLKARFLALQGDMEQALENYDICTEMLQSSTAIQVEAGAERRDIVIRLPNLHNDSVVSLEEIDKNLKSLERCQSLEEIQRLYEAGDYKAVVHLLRPTLCTSGFDRAKHLEFMTSIPERPAQLLLLQDSLLRLKDYRQCFECSDVALNEAVQQMVNSGEAAAKEEWVATVTQLLMGIEQALSADSSGSILKVSSSTTGLVRLTNNLIQVIDCSMAVQEEAKEPHVSSVLPWIILHRIIWQEEDTFHSLCHQQQLQNPAEEGMSETPMLPSSLMLLNTAHEYLGRRSWCCNSDGALLRFYVRVLQKELAASTSEDTHPYKEELETALEQCFYCLYSFPSKKSKARYLEEHSAQQVDLIWEDALFMFEYFKPKTLPEFDSYKTSTVSADLANLLKRIATIVPRTERPALSLDKVSAYIEGTSTEVPCLPEGADPSPPVVNELYYLLADYHFKNKEQSKAIKFYMHDICICPNRFDSWAGMALARASRIQDKLNSNELKSDGPIWKHATPVLNCFRRALEIDSSNLSLWIEYGTMSYALHSFASRQLKQWRGELPPELVQQMEGRRDSMLETAKHCFTSAARCEGDGDEEEWLIHYMLGKVAEKQQQPPTVYLLHYRQAGHYLHEEAARYPKKIHYHNPPELAMEALEVYFRLHASILKLLGKPDSGVGAEVLVNFMKEAAEGPFARGEEKNTPKASEKEKACLVDEDSHSSAGTLPGPGASLPSSSGPGLTSPPYTATPIDHDYVKCKKPHQQATPDVVKHLPEYH

SEQ ID NO: 6516 - protein, 2021 aa, Artificial Sequence
  Synthetic polypeptide
MIRIAALNASSTIEDDHEGSFKSHKTQTKEAQEAEAFALYHKALDLQKHDRFEESAKAYHELLEASLLREAVSSGDEKEGLKHPGLILKYSTYKNLAQLAAQREDLETAMEFYLEAVMLDSTDVNLWYKIGHVALRLIRIPLARHAFEEGLRCNPDHWPCLDNLITVLYTLSDYTTCLYFICKALEKDCRYSKGLVLKEKIFEEQPCLRKDSLRMFLKCDMSIHDVSVSAAETQAIVDEALGLRKKRQALIVREKEPDLKLVQPIPFFTWKCLGESLLAMYNHLTTCEPPRPSLGKRIDLSDYQDPSQPLESSMVVTPVNVIQPSTVSTNPAVAVAEPVVSYTSVATTSFPLHSPGLLETGAPVGDISGGDKSKKGVKRKKISEESGETAKRRSARVRNTKCKKEEKVDFQELLMKFLPSRLRKLDPEEEDDSFNNYEVQSEAKLESFPSIGPQRLSFDSATFMESEKQDVHEFLLENLTNGGILELMMRYLKAMGHKFLVRWPPGLAEVVLSVYHSWRRHSTSLPNPLLRDCSNKHIKDMMLMSLSCMELQLDQWLLTKGRSSAVSPRNCPAGMVNGRFGPDFPGTHCLGDLLQLSFASSQRDLFEDGWLEFVVRVYWLKARFLALQGDMEQALENYDICTEMLQSSTAIQVEAGAERRDIVIRLPNLHNDSVVSLEEIDKNLKSLERCQSLEEIQRLYEAGDYKAVVHLLRPTLCTSGFDRAKHLEFMTSIPERPAQLLLLQDSLLRLKDYRQCFECSDVALNEAVQQMVNSGEAAAKEEWVATVTQLLMGIEQALSADSSGSILKVSSSTTGLVRLTNNLIQVIDCSMAVQEEAKEPHVSSVLPWIILHRIIWQEEDTFHSLCHQQQLQNPAEEGMSETPMLPSSLMLLNTAHEYLGRRSWCCNSDGALLRFYVRVLQKELAASTSEDTHPYKEELETALEQCFYCLYSFPSKKSKARYLEEHSAQQVDLIWEDALFMFEYFKPKTLPEFDSYKTSTVSADLANLLKRIATIVPRTERPALSLDKVSAYIEGTSTEVPCLPEGADPSPPVVNELYYLLADYHFKNKEQSKAIKFYMHDICICPNRFDSWAGMALARASRIQDKLNSNELKSDGPIWKHATPVLNCFRRALEIDSSNLSLWIEYGTMSYALHSFASRQLKQWRGELPPELVQQMEGRRDSMLETAKHCFTSAARCEGDGDEEEWLIHYMLGKVAEKQQQPPTVYLLHYRQAGHYLHEEAARYPKKIHYHNPPELAMEALEVYFRLHASILKLLGKPDSGVGAEVLVNFMKEAAEGPFARGEEKNTPKASEKEKACLVDEDSHSSAGTLPGPGASLPSSSGPGLTSPPYTATPIDHDYVKCKKPHQQATPDDRSQDSTAVALSDSSSTQDFFNEPTSLLEGSRKSYTEKRLPILSSQAGATGKDLQGATEERGKNEESLESTEGFRAAEQGVQKPAAETPASACIPGKPSASTPTLWDGKKRGDLPGEPVAFPQGLPAGAEEQRQFLTEQCIASFRLCLSRFPQHYKSLYRLAFLYTYSKTHRNLQWARDVLLGSSIPWQQLQHMPAQGLFCERNKTNFFNGIWRIPVDEIDRPGSFAWHMNRSIVLLLKVLAQLRDHSTLLKVSSMLQRTPDQGKKYLRDADRQVLAQRAFILTVKVLEDTLSELAEGSERPGPKVCGLPGARMTTDVSHKASPEDGQEGLPQPKKPPLADGSGPGPEPGGKVGLLNHRPVAMDAGDSADQSGERKDKESPRAGPTEPMDTSEATVCHSDLERTPPLLPGRPARDRGPESRPTELSLEELSISARQQPTPLTPAQPAPAPAPATTTGTRAGGHPEEPLSRLSRKRKLLEDTESGKTLLLDAYRVWQQGQKGVAYDLGRVERIMSETYMLIKQVDEEAALEQAVKFCQVHLGAAAQRQASGDTPTTPKHPKDSRENFFPVTVVPTAPDPVPADSVQRPSDAHTKPRPALAAATTIITCPPSASASTLDQSKDPGPPRPHRPEATPSMASLGPVSCIKWIR

SEQ ID NO: 6517 - protein, 1942 aa, Artificial Sequence
  Synthetic polypeptide
MIRIAALNASSTIEDDHEGSFKSHKTQTKEAQEAEAFALYHKALDLQKHDRFEESAKAYHELLEASLLREAVSSGDEKEGLKHPGLILKYSTYKNLAQLAAQREDLETAMEFYLEAVMLDSTDVNLWYKIGHVALRLIRIPLARHAFEEGLRCNPDHWPCLDNLITVLYTLSDYTTCLYFICKALEKDCRYSKGLVLKEKIFEEQPCLRKDSLRMFLKCWKCLGESLLAMYNHLTTCEPPRPSLGKRIDLSDYQDPSQPLESSMVVTPVNVIQPSTVSTNPAVAVAEPVVSYTSVATTSFPLHSPGLLETGAPVGDISGGDKSKKGVKRKKISEESGETAKRRSARVRNTKCKKEEKVDFQELLMKFLPSRLRKLDPEEEDDSFNNYEVQSEAKLESFPSIGPQRLSFDSATFMESEKQDVHEFLLENLTNGGILELMMRYLKAMGHKFLVRWPPGLAEVVLSVYHSWRRHSTSLPNPLLRDCSNKHIKDMMLMSLSCMELQLDQWLLTKGRSSAVSPRNCPAGMVNGRFGPDFPGTHCLGDLLQLSFASSQRDLFEDGWLEFVVRVYWLKARFLALQGDMEQALENYDICTEMLQSSTAIQVEAGAERRDIVIRLPNLHNDSVVSLEEIDKNLKSLERCQSLEEIQRLYEAGDYKAVVHLLRPTLCTSGFDRAKHLEFMTSIPERPAQLLLLQDSLLRLKDYRQCFECSDVALNEAVQQMVNSGEAAAKEEWVATVTQLLMGIEQALSADSSGSILKVSSSTTGLVRLTNNLIQVIDCSMAVQEEAKEPHVSSVLPWIILHRIIWQEEDTFHSLCHQQQLQNPAEEGMSETPMLPSSLMLLNTAHEYLGRRSWCCNSDGALLRFYVRVLQKELAASTSEDTHPYKEELETALEQCFYCLYSFPSKKSKARYLEEHSAQQVDLIWEDALFMFEYFKPKTLPEFDSYKTSTVSADLANLLKRIATIVPRTERPALSLDKVSAYIEGTSTEVPCLPEGADPSPPVVNELYYLLADYHFKNKEQSKAIKFYMHDICICPNRFDSWAGMALARASRIQDKLNSNELKSDGPIWKHATPVLNCFRRALEIDSSNLSLWIEYGTMSYALHSFASRQLKQWRGELPPELVQQMEGRRDSMLETAKHCFTSAARCEGDGDEEEWLIHYMLGKVAEKQQQPPTVYLLHYRQAGHYLHEEAARYPKKIHYHNPPELAMEALEVYFRLHASILKLLGKPDSGVGAEVLVNFMKEAAEGPFARGEEKNTPKASEKEKACLVDEDSHSSAGTLPGPGASLPSSSGPDRSQDSTAVALSDSSSTQDFFNEPTSLLEGSRKSYTEKRLPILSSQAGATGKDLQGATEERGKNEESLESTEGFRAAEQGVQKPAAETPASACIPGKPSASTPTLWDGKKRGDLPGEPVAFPQGLPAGAEEQRQFLTEQCIASFRLCLSRFPQHYKSLYRLAFLYTYSKTHRNLQWARDVLLGSSIPWQQLQHMPAQGLFCERNKTNFFNGIWRIPVDEIDRPGSFAWHMNRSIVLLLKVLAQLRDHSTLLKVSSMLQRTPDQGKKYLRDADRQVLAQRAFILTVKVLEDTLSELAEGSERPGPKVCGLPGARMTTDVSHKASPEDGQEGLPQPKKPPLADGSGPGPEPGGKVGLLNHRPVAMDAGDSADQSGERKDKESPRAGPTEPMDTSEATVCHSDLERTPPLLPGRPARDRGPESRPTELSLEELSISARQQPTPLTPAQPAPAPAPATTTGTRAGGHPEEPLSRLSRKRKLLEDTESGKTLLLDAYRVWQQGQKGVAYDLGRVERIMSETYMLIKQVDEEAALEQAVKFCQVHLGAAAQRQASGDTPTTPKHPKDSRENFFPVTVVPTAPDPVPADSVQRPSDAHTKPRPALAAATTIITCPPSASASTLDQSKDPGPPRPHRPEATPSMASLGPVSCIKWIR

SEQ ID NO: 6518 - protein, 446 aa, Artificial Sequence
  Synthetic polypeptide
MPRRSRRGIWRIPVDEIDRPGSFAWHMNRSIVLLLKVLAQLRDHSTLLKVSSMLQRTPDQGKKYLRDADRQVLAQRAFILTVKVLEDTLSELAEGSERPGPKVCGLPGARMTTDVSHKASPEDGQEGLPQPKKPPLADGSGPGPEPGGKVGLLNHRPVAMDAGDSADQSGERKDKESPRAGPTEPMDTSEATVCHSDLERTPPLLPGRPARDRGPESRPTELSLEELSISARQQPTPLTPAQPAPAPAPATTTGTRAGGHPEEPLSRLSRKRKLLEDTESGKTLLLDAYRVWQQGQKGVAYDLGRVERIMSETYMLIKQVDEEAALEQAVKFCQVHLGAAAQRQASGDTPTTPKHPKDSRENFFPVTVVPTAPDPVPADSVQRPSDAHTKPRPALAAATTIITCPPSASASTLDQSKDPGPPRPHRPEATPSMASLGPVSCIKWIR

SEQ ID NO: 6519 - protein, 356 aa, Artificial Sequence
  Synthetic polypeptide
MKKKLVVLGLLAVVLVLVIVGLCLWLPSASKEPDNHVYTRAAVAADAKQCSKIGRDALRDGGSAVDAAIAALLCVGLMNAHSMGIGGGLFLTIYNSTTRKAEVINAREVAPRLAFATMFNSSEQSQKGGLSVAVPGEIRGYELAHQRHGRLPWARLFQPSIQLARQGFPVGKGLAAALENKRTVIEQQPVLCEVFCRDRKVLREGERLTLPQLADTYETLAIEGAQAFYNGSLTAQIVKDIQAAGGIVTAEDLNNYRAELIEHPLNISLGDVVLYMPSAPLSGPVLALILNILKGYNFSRESVESPEQKGLTYHRIVEAFRFAYAKRTLLGDPKFVDVTECQACSANSRNIFCMKE

SEQ ID NO: 6520 - protein, 1441 aa, Artificial Sequence
  Synthetic polypeptide
MAISSRLALWEQKIREEDKSPPPSSPPPLFSVIPGGFIKQLVRGTEKEAKEARQRKQLAVASPEREIPEISISQPNSKSSSGTRSGSQQISQDDQSSSPGSSDILGKESEGSRSPDPEQMTSINGEKAQELGSSATPTKKTVPFKRGVRRGDVLLMVAKLDPDSAKPEKTHPHDAPPCKTSPPATDTGKEKKGETSRTPCGSQASTEILAPKAEKTRTGGLGDPGQGTVALKKGEEGQSIVGKGLGTPKTTELKEAEPQGKDRQGTRPQAQGPGEGVRPGKAEKEGAEPTNTVEKGNVSKDVGSEGKHVRPQIPGRKWGGFLGRRSKWDGPQNKKDKEGVLLSKAEKTGEPQTQMEKTSQVQGELGDDLRMGEKAGELRSTTGKAGESWDKKEKMGQPQGKSGNAGEARSQTEKGCEAPKEVSTMVESPAAPGKGGWPGSRGQEAEEPCSRAGDGAGALETELEGPSQPALEKDAERPRIRKENQDGPAPQEEGKGGQSRDSDQAPEDRWYEAEKVWLAQKDGFTLATVLKPDEGTADLPAGRVRLWIDADKTITEVDEEHVHRANPPELDQVEDLASLISVNESSVLNTLLQRYKAQLLHTCTGPDLIVLQPRGPSVPSAGKVPKGRRDGLPAHIGSMAQRAYWALLNQRRDQSIVALGWSGAGKTTCCEQVLEHLVGMAGSVDGRVSVEKIRATFTVLRAFGSVSMAHSRSATRFSMVMSLDFNATGRITAAQLQTMLLEKSRVARQPEGESNFLVFSQMLAGLDLDLRTELNLHQMADSSSFGMGVWSKPEDKQKAAAAFAQLQGAMEMLGISESEQRAVWRVLAAIYHLGAAGACKVGRKQFMRFEWANYAAEALGCEYEELNTATFKHHLRQIIQQMTFGPSRWGLEDEETSSGLKMTGVDCVEGMASGLYQELFAAVVSLINRSFSSHHLSMASIMVVDSPGFQNPRHQGKDRAATFEELCHNYAHERLQLLFYQRTFVSTLQRYQEEGVPVQFDLPDPSPGTTVAVVDQNPSQVRLPAGGGAQDARGLFWVLDEEVHVEGSSDSVVLERLCAAFEKKGAGTEGSSALRTCEQPLQCEIFHQLGWDPVRYDLTGWLHRAKPNLSALDAPQVLHQSKREELRSLFQARAKLPPVCRAVAGLEGTSQQALQRSRMVRRTFASSLAAVRRKAPCSQIKLQMDALTSMIKRSRLHFIHCLVPNPVVESRSGQESPPPPQPGRDKPGAGGPLALDIPALRVQLAGFHILEALRLHRTGYADHMGLTRFRRQFQVLDAPLLKKLMSTSEGIDERKAVEELLETLDLEKKAVAVGHSQVFLKAGVISRLEKQREKLVSQSIVLFQAACKGFLSRQEFKKLKIRRLAAQCIQKNVAVFLAVKDWPWWQLLGSLQPLLSATIGTEQLRAKEEELTTLRRKLEKSEKLRNELRQNTDLLESKGIK

SEQ ID NO: 6521 - protein, 1442 aa, Artificial Sequence
  Synthetic polypeptide
MAISSRLALWEQKIREEDKSPPPSSPPPLFSVIPGGFIKQLVRGTEKEAKEARQRKQLAVASPEREIPEISISQPNSKSSSGTRSGSQQISQDDQSSSPGSSDILGKESEGSRSPDPEQMTSINGEKAQELGSSATPTKKTVPFKRGVRRGDVLLMVAKLDPDSAKPEKTHPHDAPPCKTSPPATDTGKEKKGETSRTPCGSQASTEILAPKAEKTRTGGLGDPGQGTVALKKGEEGQSIVGKGLGTPKTTELKEAEPQGKDRQGTRPQAQGPGEGVRPGKAEKEGAEPTNTVEKGNVSKDVGSEGKHVRPQIPGRKWGGFLGRRSKWDGPQNKKDKEGVLLSKAEKTGEPQTQMEKTSQVQGELGDDLRMGEKAGELRSTTGKAGESWDKKEKMGQPQGKSGNAGEARSQTEKGCEAPKEVSTMVESPAAPGKGGWPGSRGQEAEEPCSRAGDGAGALETELEGPSQPALEKDAERPRIRKENQDGPAPQEEGKGGQSRDSDQAPEDRWYEAEKVWLAQKDGFTLATVLKPDEGTADLPAGRVRLWIDADKTITEVDEEHVHRANPPELDQVEDLASLISVNESSVLNTLLQRYKAQLLHTCTGPDLIVLQPRGPSVPSAGKVPKGRRDGLPAHIGSMAQRAYWALLNQRRDQSIVALGWSGAGKTTCCEQVLEHLVGMAGSVDGRVSVEKIRATFTVLRAFGSVSMAHSRSATRFSMVMSLDFNATGRITAAQLQTMLLEKSRVARQPEGESNFLVFSQMLAGLDLDLRTELNLHQMADSSSFGMGVWSKPEDKQKAAAAFAQLQGAMEMLGISESEQRAVWRVLAAIYHLGAAGACKVGRKQFMRFEWANYAAEALGCEYEELNTATFKHHLRQIIQQMTFGPSRWGLEDEETSSGLKMTGVDCVEGMASGLYQELFAAVVSLINRSFSSHHLSMASIMVVDSPGFQNPRHQGKDRAATFEELCHNYAHERLQLLFYQRTFVSTLQRYQEEGVPVQFDLPDPSPGTTVAVVDQNPSQQVRLPAGGGAQDARGLFWVLDEEVHVEGSSDSVVLERLCAAFEKKGAGTEGSSALRTCEQPLQCEIFHQLGWDPVRYDLTGWLHRAKPNLSALDAPQVLHQSKREELRSLFQARAKLPPVCRAVAGLEGTSQQALQRSRMVRRTFASSLAAVRRKAPCSQIKLQMDALTSMIKRSRLHFIHCLVPNPVVESRSGQESPPPPQPGRDKPGAGGPLALDIPALRVQLAGFHILEALRLHRTGYADHMGLTRFRRQFQVLDAPLLKKLMSTSEGIDERKAVEELLETLDLEKKAVAVGHSQVFLKAGVISRLEKQREKLVSQSIVLFQAACKGFLSRQEFKKLKIRRLAAQCIQKNVAVFLAVKDWPWWQLLGSLQPLLSATIGTEQLRAKEEELTTLRRKLEKSEKLRNELRQNTDLLESKGIK

SEQ ID NO: 6522 - protein, 222 aa, Artificial Sequence
  Synthetic polypeptide
MAPLCSLARWNYFFLYDGSKVKEEGDPTRAGICYFYPSQTLLDQQELLCGQIAGVVRCVSDISDSPPTLVRLRKLKFAIKVDGDYLWVLGCAVELPDVSCKRFLDQLVGFFNFYNGPVSLAYENCSQEELSTEWDTFIEQILKNTSDLHKIFNSLWNLDQTKVEPLLLLKAARILQTCQRSPHILAGCILYKGLIVSTQLPPSLTAKVLLHRTAPQEQFTNY

SEQ ID NO: 6523 - protein, 227 aa, Artificial Sequence
  Synthetic polypeptide
MATSTSTEAKSASWWNYFFLYDGSKVKEEGDPTRAGICYFYPSQTLLDQQELLCGQIAGVVRCVSDISDSPPTLVRLRKLKFAIKVDGDYLWVLGCAVELPDVSCKRFLDQLVGFFNFYNGPVSLAYENCSQEELSTEWDTFIEQILKNTSDLHKIFNSLWNLDQTKVEPLLLLKAARILQTCQRSPHILAGCILYKGLIVSTQLPPSLTAKVLLHRTAPQEQFTNY

SEQ ID NO: 6524 - protein, 72 aa, Artificial Sequence
  Synthetic polypeptide
MVLIKEFRVVLPCSVQEYQVGQLYSVAEASKNETGGGEGIEVLKNEPYEKDGEKGQYTHKIYHLKRCGGSHL

SEQ ID NO: 6525 - protein, 74 aa, Artificial Sequence
  Synthetic polypeptide
MGDLLMEKCRVVLPCSVQEYQVGQLYSVAEASKNETGGGEGIEVLKNEPYEKDGEKGQYTHKIYHLKRCGGSHL

SEQ ID NO: 6526 - protein, 203 aa, Artificial Sequence
  Synthetic polypeptide
MWRGRAGALLRVWGFWPTGVPRRRPLSCDAASQAGSNYPRCWNCGGPWGPGREDRFFCPQCRALQAPDPTRDYFSLMDCNRSFRVDTAKLQHRYQQLQRLVHPDFFSQRSQTEKDFSEKHSTLVNDAYKTLLAPLSRGLYLLKLHGIEIPERTDYEMDRQFLIEIMEINEKLAEAESEAAMKEIESIVKGVMAYACNPSTLGG

SEQ ID NO: 6527 - protein, 175 aa, Artificial Sequence
  Synthetic polypeptide
MTDSKYFTTTKKGEIFELKAELNSDKKEKKKEAVKKVIASMTVGKDVSALFPDVVNCMQTDNLELKKLVYLYLMNYAKSQPDMAIMAVNTFVKDCEDPNPLIRALAVRTMGCIRVDKITEYLCEPLRKCLKDEDPYVRKTAAVCVAKLHDINAQLVEDQGFLDTLKDLISDSNPM

SEQ ID NO: 6528 - protein, 397 aa, Artificial Sequence
  Synthetic polypeptide
MSGQVGDLSPSQEKSLAQFRENIQDVLSALPNPDDYFLLRWLQARSFDLQKSEDMLRKHMEFRKQQDLANILAWQPPEVVRLYNANGICGHDGEGSPVWYHIVGSLDPKGLLLSASKQELLRDSFRSCELLLRECELQSQKLGKRVEKIIAIFGLEGLGLRDLWKPGIELLQEFFSALEANYPEILKSLIVVRAPKLFAVAFNLVKSYMSEETRRKVVILGDNWKQELTKFISPDQLPVEFGGTMTDPDGNPKCLTKINYGGEVPKSYYLCKQVRLQYEHTRSVGRGSSLQVENEILFPGCVLRWQFASDGGDIGFGVFLKTKMGERQRAREMTEVLPSQRYNAHMVPEDGILTCLQAGSYVLRFYNTYSLVHSKRISYTVEVLLPDQTFMEKMEKF

SEQ ID NO: 6529 - protein, 397 aa, Artificial Sequence; identical to SEQ ID NO: 6528
  Synthetic polypeptide

SEQ ID NO: 6530 - protein, 707 aa, Artificial Sequence
  Synthetic polypeptide
MHRQRTRTMSSLAAKRLGMNRRPAGSGGGGGEAATWGHRFWRPQERPTDRNQGEMAHTCRGTINLSTAHIDTEDSCGILLTSGARSYHLKASSEVDRQQWITALELAKAKAVRVMNTHSDDSGDDDEATTPADKSELHHTLKNLSLKLDDLSTCNDLIAKHGAALQRSLTELDGLKIPSESGEKLKVVNERATLFRITSNAMINACRDFLELAEIHSRKWQRALQYEQEQRVHLEETIEQLAKQHNSLERAFHSAPGRPANPSKSFIEGSLLTPKGEDSEEDEDTEYFDAMEDSTSFITVITEAKEDRKAEGSTGTSSVDWSSADNVLDGASLVPKGSSKVKRRVRIPNKPNYSLNLWSIMKNCIGRELSRIPMPVNFNEPLSMLQRLTEDLEYHHLLDKAVHCTSSVEQMCLVAAFSVSSYSTTVHRIAKPFNPMLGETFELDRLDDMGLRSLCEQVSHHPPSAAHYVFSKHGWSLWQEITISSKFRGKYISIMPLGAIHLEFQASGNHYVWRKSTSTVHNIIVGKLWIDQSGDIEIVNHKTNDRCQLKFLPYSYFSKEAARKVTGVVSDSQGKAHYVLSGSWDEQMECSKVMHSSPSSPSSDGKQKTVYQTLSAKLLWKKYPLPENAENMYYFSELALTLNEHEEGVAPTDSRLRPDQRLMEKGRWDEANTEKQRLEEKQRLSRRRRLEACGPGSSCSSEEDETI

SEQ ID NO: 6531 - protein, 700 aa, Artificial Sequence
  Synthetic polypeptide
MSSLAAKRLGMNRRPAGSGGGGGEAATWGHRFWRPQERPTDRNQGEMAHTCRGTINLSTAHIDTEDSCGILLTSGARSYHLKASSEVDRQQWITALELAKAKAVRVMNTHSDDSGDDDEATTPADKSELHHTLKNLSLKLDDLSTCNDLIAKHGAALQRSLTELDGLKIPSESGEKLKVVNERATLFRITSNAMINACRDFLELAEIHSRKWQRALQYEQEQRVHLEETIEQLAKQHNSLERAFHSAPGRPANPSKSFIEGSLLTPKGEDSEEDEDTEYFDAMEDSTSFITVITEAKEDSRKAEGSTGTSSVDWSSADNVLDGASLVPKGSSKVKRRVRIPNKPNYSLNLWSIMKNCIGRELSRIPMPVNFNEPLSMLQRLTEDLEYHHLLDKAVHCTSSVEQMCLVAAFSVSSYSTTVHRIAKPFNPMLGETFELDRLDDMGLRSLCEQVSHHPPSAAHYVFSKHGWSLWQEITISSKFRGKYISIMPLGAIHLEFQASGNHYVWRKSTSTVHNIIVGKLWIDQSGDIEIVNHKTNDRCQLKFLPYSYFSKEAARKVTGVVSDSQGKAHYVLSGSWDEQMECSKVMHSSPSSPSSDGKQKTVYQTLSAKLLWKKYPLPENAENMYYFSELALTLNEHEEGVAPTDSRLRPDQRLMEKGRWDEANTEKQRLEEKQRLSRRRRLEACGPGSSCSSEEDETI

SEQ ID NO: 6532 - protein, 873 aa, Artificial Sequence
  Synthetic polypeptide
MGKAAAPSRGGGCGGRSRGLSSLFTVVPCLSCHTAAPGMSASTSGSGPEPKPQPQPVPEPERGPLSEQVSEAVSEAVPRSEPVSETTSEPEPGAGQPSELLQGSRPGSESSSGVGAGPFTKAASEPLSRAVGSATFLRPESGSLPALKPLPLLRPGQAKTPLGVPMSGTGTTSSAPLALLPLDSFEGWLLKWTNYLKGYQRRWFVLGNGLLSYYRNQGEMAHTCRGTINLSTAHIDTEDSCGILLTSGARSYHLKASSEVDRQQWITALELAKAKAVRVMNTHSDDSGDDDEATTPADKSELHHTLKNLSLKLDDLSTCNDLIAKHGAALQRSLTELDGLKIPSESGEKLKVVNERATLFRITSNAMINACRDFLELAEIHSRKWQRALQYEQEQRVHLEETIEQLAKQHNSLERAFHSAPGRPANPSKSFIEGSLLTPKGEDSEEDEDTEYFDAMEDSTSFITVITEAKEDSRKAEGSTGTSSVDWSSADNVLDGASLVPKGSSKVKRRVRIPNKPNYSLNLWSIMKNCIGRELSRIPMPVNFNEPLSMLQRLTEDLEYHHLLDKAVHCTSSVEQMCLVAAFSVSSYSTTVHRIAKPFNPMLGETFELDRLDDMGLRSLCEQVSHHPPSAAHYVFSKHGWSLWQEITISSKFRGKYISIMPLGAIHLEFQASGNHYVWRKSTSTVHNIIVGKLWIDQSGDIEIVNHKTNDRCQLKFLPYSYFSKEAARKVTGVVSDSQGKAHYVLSGSWDEQMECSKVMHSSPSSPSSDGKQKTVYQTLSAKLLWKKYPLPENAENMYYFSELALTLNEHEEGVAPTDSRLRPDQRLMEKGRWDEANTEKQRLEEKQRLSRRRRLEACGPGSSCSSEEDETI

SEQ ID NO: 6533 - protein, 824 aa, Artificial Sequence
  Synthetic polypeptide
MGKAAAPSRGGGCGGRSRGLSSLFTVVPCLSCHTAAPGMSASTSGSGPEPKPQPQPVPEPERGPLSEQVSEAVSEAVPRSEPVSETTSEPEPGAGQPSELLQGSRPGSESSSGVGAGPFTKAASEPLSRAVGSATFLRPESGSLPALKPLPLLRPGQAKTPLGVPMSGTGTTSSAPLALLPLDSFEGWLLKWTNYLKGYQRRWFVLGNGLLSYYRNQGEMAHTCRGTINLSTAHIDTEDSCGILLTSGARSYHLKASSEVDRQQWITALELAKAKAVRVMNTHSDDSGDDDEATTPADKSELHHTLKNLSLKLDDLSTCNDLIAKHGAALQRSLTELDGLKIPSESGEKLKVVNERATLFRITSNAMINACRDFLELAEIHSRKWQRALQYEQEQRVHLEETIEQLAKQHNSLERAFHSAPGRPANPSKSFIEGSLLTPKGEDSEEDEDTEYFDAMEDSTSFITVITEAKEDSRKAEGSTGTSSVDWSSADNVNFNEPLSMLQRLTEDLEYHHLLDKAVHCTSSVEQMCLVAAFSVSSYSTTVHRIAKPFNPMLGETFELDRLDDMGLRSLCEQVSHHPPSAAHYVFSKHGWSLWQEITISSKFRGKYISIMPLGAIHLEFQASGNHYVWRKSTSTVHNIIVGKLWIDQSGDIEIVNHKTNDRCQLKFLPYSYFSKEAARKVTGVVSDSQGKAHYVLSGSWDEQMECSKVMHSSPSSPSSDGKQKTVYQTLSAKLLWKKYPLPENAENMYYFSELALTLNEHEEGVAPTDSRLRPDQRLMEKGRWDEANTEKQRLEEKQRLSRRRRLEACGPGSSCSSEEDETI

SEQ ID NO: 6534 - protein, 872 aa, Artificial Sequence
  Synthetic polypeptide
MGKAAAPSRGGGCGGRSRGLSSLFTVVPCLSCHTAAPGMSASTSGSGPEPKPQPQPVPEPERGPLSEQVSEAVSEAVPRSEPVSETTSEPEPGAGQPSELLQGSRPGSESSSGVGAGPFTKAASEPLSRAVGSATFLRPESGSLPALKPLPLLRPGQAKTPLGVPMSGTGTTSSAPLALLPLDSFEGWLLKWTNYLKGYQRRWFVLGNGLLSYYRNQGEMAHTCRGTINLSTAHIDTEDSCGILLTSGARSYHLKASSEVDRQQWITALELAKAKAVRVMNTHSDDSGDDDEATTPADKSELHHTLKNLSLKLDDLSTCNDLIAKHGAALQRSLTELDGLKIPSESGEKLKVVNERATLFRITSNAMINACRDFLELAEIHSRKWQRALQYEQEQRVHLEETIEQLAKQHNSLERAFHSAPGRPANPSKSFIEGSLLTPKGEDSEEDEDTEYFDAMEDSTSFITVITEAKEDRKAEGSTGTSSVDWSSADNVLDGASLVPKGSSKVKRRVRIPNKPNYSLNLWSIMKNCIGRELSRIPMPVNFNEPLSMLQRLTEDLEYHHLLDKAVHCTSSVEQMCLVAAFSVSSYSTTVHRIAKPFNPMLGETFELDRLDDMGLRSLCEQVSHHPPSAAHYVFSKHGWSLWQEITISSKFRGKYISIMPLGAIHLEFQASGNHYVWRKSTSTVHNIIVGKLWIDQSGDIEIVNHKTNDRCQLKFLPYSYFSKEAARKVTGVVSDSQGKAHYVLSGSWDEQMECSKVMHSSPSSPSSDGKQKTVYQTLSAKLLWKKYPLPENAENMYYFSELALTLNEHEEGVAPTDSRLRPDQRLMEKGRWDEANTEKQRLEEKQRLSRRRRLEACGPGSSCSSEEDETI

SEQ ID NO: 6535 - protein, 506 aa, Artificial Sequence
  Synthetic polypeptide
MINACRDFLELAEIHSRKWQRALQYEQEQRVHLEETIEQLAKQHNSLERAFHSAPGRPANPSKSFIEGSLLTPKGEDSEEDEDTEYFDAMEDSTSFITVITEAKEDRKAEGSTGTSSVDWSSADNVLDGASLVPKGSSKVKRRVRIPNKPNYSLNLWSIMKNCIGRELSRIPMPVNFNEPLSMLQRLTEDLEYHHLLDKAVHCTSSVEQMCLVAAFSVSSYSTTVHRIAKPFNPMLGETFELDRLDDMGLRSLCEQVSHHPPSAAHYVFSKHGWSLWQEITISSKFRGKYISIMPLGAIHLEFQASGNHYVWRKSTSTVHNIIVGKLWIDQSGDIEIVNHKTNDRCQLKFLPYSYFSKEAARKVTGVVSDSQGKAHYVLSGSWDEQMECSKVMHSSPSSPSSDGKQKTVYQTLSAKLLWKKYPLPENAENMYYFSELALTLNEHEEGVAPTDSRLRPDQRLMEKGRWDEANTEKQRLEEKQRLSRRRRLEACGPGSSCSSEEDETI

SEQ ID NO: 6536 - protein, 615 aa, Artificial Sequence
  Synthetic polypeptide
MKGRGCWDTASVRSFCSSGCLNKFKKDDSGDDDEATTPADKSELHHTLKNLSLKLDDLSTCNDLIAKHGAALQRSLTELDGLKIPSESGEKLKVVNERATLFRITSNAMINACRDFLELAEIHSRKWQRALQYEQEQRVHLEETIEQLAKQHNSLERAFHSAPGRPANPSKSFIEGSLLTPKGEDSEEDEDTEYFDAMEDSTSFITVITEAKEDSRKAEGSTGTSSVDWSSADNVLDGASLVPKGSSKVKRRVRIPNKPNYSLNLWSIMKNCIGRELSRIPMPVNFNEPLSMLQRLTEDLEYHHLLDKAVHCTSSVEQMCLVAAFSVSSYSTTVHRIAKPFNPMLGETFELDRLDDMGLRSLCEQVSHHPPSAAHYVFSKHGWSLWQEITISSKFRGKYISIMPLGAIHLEFQASGNHYVWRKSTSTVHNIIVGKLWIDQSGDIEIVNHKTNDRCQLKFLPYSYFSKEAARKVTGVVSDSQGKAHYVLSGSWDEQMECSKVMHSSPSSPSSDGKQKTVYQTLSAKLLWKKYPLPENAENMYYFSELALTLNEHEEGVAPTDSRLRPDQRLMEKGRWDEANTEKQRLEEKQRLSRRRRLEACGPGSSCSSEEDETI

SEQ ID NO: 6537 - protein, 417 aa, Artificial Sequence
  Synthetic polypeptide
MEDSTSFITVITEAKEDRKAEGSTGTSSVDWSSADNVLDGASLVPKGSSKVKRRVRIPNKPNYSLNLWSIMKNCIGRELSRIPMPVNFNEPLSMLQRLTEDLEYHHLLDKAVHCTSSVEQMCLVAAFSVSSYSTTVHRIAKPFNPMLGETFELDRLDDMGLRSLCEQVSHHPPSAAHYVFSKHGWSLWQEITISSKFRGKYISIMPLGAIHLEFQASGNHYVWRKSTSTVHNIIVGKLWIDQSGDIEIVNHKTNDRCQLKFLPYSYFSKEAARKVTGVVSDSQGKAHYVLSGSWDEQMECSKVMHSSPSSPSSDGKQKTVYQTLSAKLLWKKYPLPENAENMYYFSELALTLNEHEEGVAPTDSRLRPDQRLMEKGRWDEANTEKQRLEEKQRLSRRRRLEACGPGSSCSSEEDETI

SEQ ID NO: 6538 - protein, 48 aa, Artificial Sequence
  Synthetic polypeptide
SILRTAGPRQAPASPHSTARMGPGEGRQQQRRPWESGMDTRPAGTSWN

SEQ ID NO: 6539 - protein, 439 aa, Artificial Sequence
  Synthetic polypeptide
ACRDFLELAEIHSRKWQRALQYEQEQRVHLEETIEQLAKQHNSLERAFHSAPGRPANPSKSFIEGSLLTPKGEDSEEDEDTEYFDAMEDSTSFITVITEAKEDSRKAEGSTGTSSVDWSSADNVLDGASLVPKGSSKVKRRVRIPNKPNYSLNLWSIMKNCIGRELSRIPMPVNFNEPLSMLQRLTEDLEYHHLLDKAVHCTSSVEQMCLVAAFSVSSYSTTVHRIAKPFNPMLGETFELDRLDDMGLRSLCEQVSHHPPSAAHYVFSKHGWSLWQEITISSKFRGKYISIMPLGAIHLEFQASGNHYVWRKSTSTVHNIIVGKLWIDQSGDIEIVNHKTNDRCQLKFLPYSYFSKEAARKGERGEHVLLLRAGPDPQRARGGRSANRQPPAARPAADGEGPLGRGQYREAAAGGEAAPVAAPAAGGLRAGQQLQLGGR

SEQ ID NO: 6540 - protein, 47 aa, Artificial Sequence
  Synthetic polypeptide
MSALAGEDVWRCPGCGDHIAPSQIWYRTVNETWHGSCFRAGRGGLCL

SEQ ID NO: 6541 - protein, 535 aa, Artificial Sequence
  Synthetic polypeptide
MDRRSMGETESGDAFLDLKKPPASKCPHRYTKEELLDIKELPHSKQRPSCLSEKYDSDGVWDPEKWHASLYPASGRSSPVESLKKELDTDRPSLVRRIVGIVECNGGVAEEDEVEVILAQEPAADQEVPRDAVLPEQSPGDFDFNEFFNLDKVPCLASMIEDVLGEGSVSASRFSRWFSNPSRSGSRSSSLGSTPHEELERLAGLEQAILSPGQNSGNYFAPIPLEDHAENKVDILEMLQKAKVDLKPLLSSLSANKEKLKESSHSGVVLSVEEVEAGLKGLKVDQQVKNSTPFMAEHLEETLSAVTNNRQLKKDGDMTAFNKLVSTMKRNLESHLMSPAEIPGQPVPKNILQELLGQPVQRPASSNLLSGLMGSLEPTTSLLGQRAPSPPLSQVFQTRAASADYLRPRIPSPIGFTPGPQQLLGDPFQGMRKPMSPITAQQMSQLELQQAALEGLALPHDLAVQAANFYQPGFGKPQVDRTRDGFRNRQQRVTKSPAPVHRGNSSSPAPAASITSMLGVVAHACNPRTFRGRGR

SEQ ID NO: 6542 - protein, 709 aa, Artificial Sequence
  Synthetic polypeptide
MDRRSMGETESGDAFLDLKKPPASKCPHRYTKEELLDIKELPHSKQRPSCLSEKYDSDGVWDPEKWHASLYPASGRSSPVESLKKELDTDRPSLVRRIVDPRERVKEDDLDVVLSPQRRSFGGGCHVTAAVSSRRSGSPLEKDSDGLRLLGGRRIGSGRIISARTFEKDHRLSDKDLRDLRDRDRERDFKDKRFRREFGDSKRVFGERRRNDSYTEEEPEWFSAGPTSQSETIELTGFDDKILEEDHKGRKRTRRRTASVKEGIVECNGGVAEEDEVEVILAQEPAADQEVPRDAVLPEQSPGDFDFNEFFNLDKVPCLASMIEDVLGEGSVSASRFSRWFSNPSRSGSRSSSLGSTPHEELERLAGLEQAILSPGQNSGNYFAPIPLEDHAENKVDILEMLQKAKVDLKPLLSSLSANKEKLKESSHSGVVLSVEEVEAGLKGLKVDQQVKNSTPFMAEHLEETLSAVTNNRQLKKDGDMTAFNKLVSTMKASGTLPSQPKVSRNLESHLMSPAEIPGQPVPKNILQELLGQPVQRPASSNLLSGLMGSLEPTTSLLGQRAPSPPLSQVFQTRAASADYLRPRIPSPIGFTPGPQQLLGDPFQGMRKPMSPITAQMSQLELQQAALEGLALPHDLAVQAANFYQPGFGKPQVDRTRDGFRNRQQRVTKSPAPVHRGNSSSPAPAASITSMLGVVAHACNPRTFRGRGR

SEQ ID NO: 6543 - protein, 685 aa, Artificial Sequence
  Synthetic polypeptide
MDRRSMGETESGDAFLDLKKPPASKCPHRYTKEELLDIKELPHSKQRPSCLSEKYDSDGVWDPEKWHASLYPASGRSSPVESLKKELDTDRPSLVRRIVDPRERVKEDDLDVVLSPQRRSFGGGCHVTAAVSSRRSGSPLEKDSDGLRLLGGRRIGSGRIISARTFEKDHRLSDKDLRDLRDRDRERDFKDKRFRREFGDSKRVFGERRRNDSYTEEEPEWFSAGPTSQSETIELTGFDDKILEEDHKGRKRTRRRTASVKEGIVECNGGVAEEDEVEVILAQEPAADQEVPRDAVLPEQSPGDFDFNEFFNLDKVPCLASMIEDVLGEGSVSASRFSRWFSNPSRSGSRSSSLGSTPHEELERLAGLEQAILSPGQNSGNYFAPIPLEDHAENKVDILEMLQKAKVDLKPLLSSLSANKEKLKESSHSGVVLSVEEVEAGLKGLKVDQQVKNSTPFMAEHLEETLSAVTNNRQLKKDGDMTAFNKLVSTMKASGTLPSQPKVSELLGQPVQRPASSNLLSGLMGSLEPTTSLLGQRAPSPPLSQVFQTRAASADYLRPRIPSPIGFTPGPQQLLGDPFQGMRKPMSPITAQMSQLELQQAALEGLALPHDLAVQAANFYQPGFGKPQVDRTRDGFRNRQQRVTKSPAPVHRGNSSSPAPAASITSMLGVVAHACNPRTFRGRGR

SEQ ID NO: 6544 - protein, 364 aa, Artificial Sequence
  Synthetic polypeptide
MIEDVLGEGSVSASRFSRWFSNPSRSGSRSSSLGSTPHEELERLAGLEQAILSPGQNSGNYFAPIPLEDHAENKVDILEMLQKAKVDLKPLLSSLSANKEKLKESSHSGVVLSVEEVEAGLKGLKVDQQVKNSTPFMAEHLEETLSAVTNNRQLKKDGDMTAFNKLVSTMKASGTLPSQPKVSELLGQPVQRPASSNLLSGLMGSLEPTTSLLGQRAPSPPLSQVFQTRAASADYLRPRIPSPIGFTPGPQQLLGDPFQGMRKPMSPITAQMSQLELQQAALEGLALPHDLAVQAANFYQPGFGKPQVDRTRDGFRNRQQRVTKSPAPVHRGNSSSPAPAASITSMLGVVAHACNPRTFRGRGR

SEQ ID NO: 6545 - protein, 162 aa, Artificial Sequence
  Synthetic polypeptide
MLSSGVETQPVPLDSSMSAVVQELYSELPVSVSRELHADPEPSVIPDVKPGASSSLLSQNRALPLELQRTHVESCCEETYETLDHGSEPGRCGLVDSTAGGSVASGILDRAKRSESMEPKVFRDPGGQAGIIREPSEGAKEDPHQHSTAAEEKTSPSQGVAF

SEQ ID NO: 6546 - protein, 143 aa, Artificial Sequence
  Synthetic polypeptide
MSRSYNDELQFLEKINKNCWRIKKGFVPNMQVEGVFYVNDALEKLMFEELRNACRGGGVGGFLPAMKQIGNVAALPGIVHRSIGLPDVHSGYGFAIGNMAAFDMNDPEAVVSPGWMRWLIPIIPASWEAEAGGSLEPRSLRLA

SEQ ID NO: 6547 - protein, 69 aa, Artificial Sequence
  Synthetic polypeptide
LMGMLSTSLADQDIFNAVIKQNPFLVYQLPCFWNVQLSDHTRSEQCYRDVSDLKVRIIKLHQLLQRNFS

SEQ ID NO: 6548 - protein, 392 aa, Artificial Sequence
  Synthetic polypeptide
MLGICRGRRKFLAASLSLLCIPAITWIYLFSGSFEDGKPVSLSPLESQAHSPRYTASSQRERESLEVRMREVEEENRALRRQLSLAQGRAPSHRRGNHSKTYSMEEGTGDSENLRAGIVAGNSSECGQQPVVEKCETIHVAIVCAGYNASRDVVTLVKSVLFHRRNPLHFHLIADSIAEQILATLFQTWMVPAVRVDFYNADELKSEVSWIPNKHYSGIYGLMKLVLTKTLPANLERVIVLDTDITFATDIAELWAVFHKFKGQQVLGLVENQSDWYLGNLWKNHRPWPALGRGYNTGVILLLLDKLRKMKWEQMWRLTAERELMGMLSTSLADQDIFNAVIKQNPFLVYQLPCFWNVQLSDHTRSEQCYRDVSDLKVRIIKLHQLLQRNFS

SEQ ID NO: 6549 - protein, 191 aa, Artificial Sequence
  Synthetic polypeptide
MLIWSEVSWIPNKHYSGIYGLMKLVLTKTLPANLERVIVLDTDITFATDIAELWAVFHKFKGQQVLGLVENQSDWYLGNLWKNHRPWPALGRGYNTGVILLLLDKLRKMKWEQMWRLTAERELMGMLSTSLADQDIFNAVIKQNPFLVYQLPCFWNVQLSDHTRSEQCYRDVSDLKVRIIKLHQLLQRNFS

SEQ ID NO: 6550 - protein, 201 aa, Artificial Sequence
  Synthetic polypeptide
MSGFDDPGIFYSDSFGGDAQADEGQARKSQLQRRFKEFLRQYRVGTDRTGFTFKYRDELKRHYNLGEYWIEVEMEDLASFDEDLADYLYKQPAEHLQLLEEAAKEVADEVTRPRPSGEEVLQDIQVMLKSDASPSSIRSLKSDMMSHLVKIPGIIIAASAVRAKATRISIQCRSCRNTLTNIAMRPGLEGYALPRKCNTLP

SEQ ID NO: 6551 - protein, 158 aa, Artificial Sequence
  Synthetic polypeptide
MSGFDDPGIFYSDSFGGDAQADEGQARKSQLQRRFKEFLRQYRVGTDRTGFTFKYRDELKRHYNLGEYWIEVEMEDLASFDEDLADYLYKQPAEHLQLSDMMSHLVKIPGIIIAASAVRAKATRISIQCRSCRNTLTNIAMRPGLEGYALPRKCNTLP

SEQ ID NO: 6552 - protein, 233 aa, Artificial Sequence
  Synthetic polypeptide
MSGFDDPGIFYSDSFGGDAQADEGQARKSQLQRRFKEFLRQYRVGTDRTGFTFKYSLAPSLIEHLLPARYCSGCWAAALKLDLAPASRDELKRHYNLGEYWIEVEMEDLASFDEDLADYLYKQPAEHLQLLEEAAKEVADEVTRPRPSGEEVLQDIQVMLKSDASPSSIRSLKSDMMSHLVKIPGIIIAASAVRAKATRISIQCRSCRNTLTNIAMRPGLEGYALPRKCNTLP

SEQ ID NO: 6553 - protein, 58 aa, Artificial Sequence
  Synthetic polypeptide
MMSHLVKIPGIIIAASAVRAKATRISIQCRSCRNTLTNIAMRPGLEGYALPRKCNTLP

SEQ ID NO: 6554 - protein, 418 aa, Artificial Sequence
  Synthetic polypeptide
MSGFDDPGIFYSDSFGGDAQADEGQARKSQLQRRFKEFLRQYRVGTDRTGFTFKYRDELKRHYNLGEYWIEVEMEDLASFDEDLADYLYKQPAEHLQLLEEAAKEVADEVTRPRPSGEEVLQDIQVMLKSDASPSSIRSLKSDMMSHLVKIPGIIIAASAVRAKATRISIQCRSCRNTLTNIAMRPGLEGYALPRKCNTDQAGRPKCPLDPYFIMPDKCKCVDFQTLKLQELPDAVPHGEMPRHMQLYCDRYLCDKVVPGNRVTIMGIYSIKKFGLTTSRGRDRVGVGIRSSYIRVLGIQVDTDGSGRSFAGAVSPQEEEEFRRLAALPNVYEVISKSIAPSIFGGTDMKKAIACLLFGGSRKRLPDGLTRRGDINLLMLGDPGTAKSQLLKFVEKCSPIGSQLLGRLRWEDHLSPGV

SEQ ID NO: 6555 - protein, 375 aa, Artificial Sequence
  Synthetic polypeptide
MSGFDDPGIFYSDSFGGDAQADEGQARKSQLQRRFKEFLRQYRVGTDRTGFTFKYRDELKRHYNLGEYWIEVEMEDLASFDEDLADYLYKQPAEHLQLSDMMSHLVKIPGIIIAASAVRAKATRISIQCRSCRNTLTNIAMRPGLEGYALPRKCNTDQAGRPKCPLDPYFIMPDKCKCVDFQTLKLQELPDAVPHGEMPRHMQLYCDRYLCDKVVPGNRVTIMGIYSIKKFGLTTSRGRDRVGVGIRSSYIRVLGIQVDTDGSGRSFAGAVSPQEEEEFRRLAALPNVYEVISKSIAPSIFGGTDMKKAIACLLFGGSRKRLPDGLTRRGDINLLMLGDPGTAKSQLLKFVEKCSPIGSQLLGRLRWEDHLSPGV

SEQ ID NO: 6556 - protein, 403 aa, Artificial Sequence
  Synthetic polypeptide
MSGFDDPGIFYSDSFGGDAQADEGQARKSQLQRRFKEFLRQYRVGTDRTGFTFKYRDELKRHYNLGEYWIEVEMEDLASFDEDLADYLYKQPAEHLQLLEEAAKEVADEVTRPRPSGEEVLQDIQVMLKSDASPSSIRSLKSDMMSHLVKIPGIIIAASAVRAKATRISIQCRSCRNTLTNIAMRPGLEGYALPRKCNTDQAGRPKCPLDPYFIMPDKCKCVDFQTLKLQELPDAVPHGEMPRHMQLYCDRYLCDKVVPGNRVTIMGIYSIKKFGLTTSRGRDRVGVGIRSSYIRVLGIQVDTDGSGRSFAGAVSPQEEEEFRRLAALPNVYEVISKSIAPSIFGGTDMKKAIACLLFGGSRKRLPDGLTRRGDINLLMLGDPGTAKSQLLKFVEKCSPIGEE

SEQ ID NO: 6557 - protein, 360 aa, Artificial Sequence
  Synthetic polypeptide
MSGFDDPGIFYSDSFGGDAQADEGQARKSQLQRRFKEFLRQYRVGTDRTGFTFKYRDELKRHYNLGEYWIEVEMEDLASFDEDLADYLYKQPAEHLQLSDMMSHLVKIPGIIIAASAVRAKATRISIQCRSCRNTLTNIAMRPGLEGYALPRKCNTDQAGRPKCPLDPYFIMPDKCKCVDFQTLKLQELPDAVPHGEMPRHMQLYCDRYLCDKVVPGNRVTIMGIYSIKKFGLTTSRGRDRVGVGIRSSYIRVLGIQVDTDGSGRSFAGAVSPQEEEEFRRLAALPNVYEVISKSIAPSIFGGTDMKKAIACLLFGGSRKRLPDGLTRRGDINLLMLGDPGTAKSQLLKFVEKCSPIGEE

SEQ ID NO: 6558 - protein, 751 aa, Artificial Sequence
  Synthetic polypeptide
MSGFDDPGIFYSDSFGGDAQADEGQARKSQLQRRFKEFLRQYRVGTDRTGFTFKYRDELKRHYNLGEYWIEVEMEDLASFDEDLADYLYKQPAEHLQLLEEAAKEVADEVTRPRPSGEEVLQDIQVMLKSDASPSSIRSLKSDMMSHLVKIPGIIIAASAVRAKATRISIQCRSCRNTLTNIAMRPGLEGYALPRKCNTDQAGRPKCPLDPYFIMPDKCKCVDFQTLKLQELPDAVPHGEMPRHMQLYCDRYLCDKVVPGNRVTIMGIYSIKKFGLTTSRGRDRVGVGIRSSYIRVLGIQVDTDGSGRSFAGAVSPQEEEEFRRLAALPNVYEVISKSIAPSIFGGTDMKKAIACLLFGGSRKRLPDGLTRRGDINLLMLGDPGTAKSQLLKFVEKCSPIGVYTSGKGSSAAGLTASVMRDPSSRNFIMEGGAMVLADGGVVCIDEFDKMREDDRVAIHEAMEQQTISIAKAGITTTLNSRCSVLAAANSVFGRWDETKGEDNIDFMPTILSRFDMIFIVKDEHNEERDVMLAKHVITLHVSALTQTQAVEGEIDLAKLKKFIAYCRVKCGPRLSAEAAEKLKNRYIIMRSGARQHERDSDRRSSIPITVRQLEAIVRIAEALSKMKLQPFATEADVEEALRLFQVSTLDAALSGTLSGVEGFTSQEDQEMLSRIEKQLKRRFAIGSQVSEHSIIKDFTKQMSHPGTVWCFCCLPTVGRRLHATGTLASWSATLCLEHGAGQVPGRCVLNK

SEQ ID NO: 6559 - protein, 708 aa, Artificial Sequence
  Synthetic polypeptide
MSGFDDPGIFYSDSFGGDAQADEGQARKSQLQRRFKEFLRQYRVGTDRTGFTFKYRDELKRHYNLGEYWIEVEMEDLASFDEDLADYLYKQPAEHLQLSDMMSHLVKIPGIIIAASAVRAKATRISIQCRSCRNTLTNIAMRPGLEGYALPRKCNTDQAGRPKCPLDPYFIMPDKCKCVDFQTLKLQELPDAVPHGEMPRHMQLYCDRYLCDKVVPGNRVTIMGIYSIKKFGLTTSRGRDRVGVGIRSSYIRVLGIQVDTDGSGRSFAGAVSPQEEEEFRRLAALPNVYEVISKSIAPSIFGGTDMKKAIACLLFGGSRKRLPDGLTRRGDINLLMLGDPGTAKSQLLKFVEKCSPIGVYTSGKGSSAAGLTASVMRDPSSRNFIMEGGAMVLADGGVVCIDEFDKMREDDRVAIHEAMEQQTISIAKAGITTTLNSRCSVLAAANSVFGRWDETKGEDNIDFMPTILSRFDMIFIVKDEHNEERDVMLAKHVITLHVSALTQTQAVEGEIDLAKLKKFIAYCRVKCGPRLSAEAAEKLKNRYIIMRSGARQHERDSDRRSSIPITVRQLEAIVRIAEALSKMKLQPFATEADVEEALRLFQVSTLDAALSGTLSGVEGFTSQEDQEMLSRIEKQLKRRFAIGSQVSEHSIIKDFTKQMSHPGTVWCFCCLPTVGRRLHATGTLASWSATLCLEHGAGQVPGRCVLNK

SEQ ID NO: 6560 - protein, 20 aa, Artificial Sequence
  Synthetic polypeptide
MDNQAERESEAGVGLQRNQT

SEQ ID NO: 6561 - protein, 326 aa, Artificial Sequence
  Synthetic polypeptide
MDNQAERESEAGVGLQRDEDDAPLCEDVELQDGDLSPEEKIFLREFPRLKEDLKGNIDKLRALADDIDKTHKKFTKANMVATSTAVISGVMSLLGLALAPATGGGSLLLSTAGQGLATAAGVTSIVSGTLERSKNKEAQARAEDILPTYDQEDREDEEEKADYVTAAGKIIYNLRNTLKYAKKNVRAFWKLRANPRLANATKRLLTTGQVSSRSRVQVQKAFAGTTLAMTKNARVLGGVMSAFSLGYDLATLSKEWKHLKEGARTKFAEELRAKALELERKLTELTQLYKSLQQKVCPNHLGHMSSGLPESVSQCVLNLGKINFLN

SEQ ID NO: 6562 - protein, 106 aa, Artificial Sequence
  Synthetic polypeptide
MEGAALLRVSVLCIWMSALFLGVGVRAEEAGARVQQNVPSGTDTGDPQSKPLGDWAAGTMDPESSIFIEDAIKYFKEKVSTQNLLLLLTDNEAWNGFVAAAELPRL

SEQ ID NO: 6563 - protein, 88 aa, Artificial Sequence
  Synthetic polypeptide
MEGAALLRVSVLCIWVQQNVPSGTDTGDPQSKPLGDWAAGTMDPESSIFIEDAIKYFKEKVSTQNLLLLLTDNEAWNGFVAAAELPRL

SEQ ID NO: 6564 - protein, 122 aa, Artificial Sequence
  Synthetic polypeptide
MRFKSHTVELRRPCSDMEGAALLRVSVLCIWMSALFLGVGVRAEEAGARVQQNVPSGTDTGDPQSKPLGDWAAGTMDPESSIFIEDAIKYFKEKVSTQNLLLLLTDNEAWNGFVAAAELPRL

SEQ ID NO: 6565 - protein, 61 aa, Artificial Sequence
  Synthetic polypeptide
MVKLAAKCILADPAVGKTALAQIFRSDGAHFQKSYTLTTGMDLVVKTVPVPDTGDSVREGL

SEQ ID NO: 6566 - protein, 21 aa, Artificial Sequence
  Synthetic polypeptide
MDLVVKTVPVPDTGDSVREGL

SEQ ID NO: 6567 - protein, 62 aa, Artificial Sequence
  Synthetic polypeptide
MVKLAAKCILAGDPAVGKTALAQIFRSDGAHFQKSYTLTTGMDLVVKTVPVPDTGDSVREGL

SEQ ID NO: 6568 - protein, 1 aa, Artificial Sequence
  Synthetic polypeptide
Q

SEQ ID NO: 6569 - protein, 101 aa, Artificial Sequence
  Synthetic polypeptide
MVKLAAKCILAVPVDKRLSRAEVCSGCCEVCRSVSWTCALPAASEQVPVRGDPAVGKTALAQIFRSDGAHFQKSYTLTTGMDLVVKTVPVPDTGDSVREGL

SEQ ID NO: 6570 - protein, 22 aa, Artificial Sequence
  Synthetic polypeptide
MAVAQQLRAERNNIICSFIIFS

SEQ ID NO: 6571 - protein, 43 aa, Artificial Sequence
  Synthetic polypeptide
MAVAQQLRAESKLHEAVSVLIAAVSLGGSSSLLSTRTKGSINV

SEQ ID NO: 6572 - protein, 228 aa, Artificial Sequence
  Synthetic polypeptide
MASPQLCRALVSAQWVAEALRAPRAGQPLQLLDASWYLPKLGRDARREFEERHIPGAAFFDIDQCSDRTSPYDHMLPGAEHFAEYAGRLGVGAATHVVIYDASDQGLYSAPRVWWMFRAFGHHAVSLLDGGLRHWLRQNLPLSSGKSQPAPAEFRAQLDPAFIKTYEDIKENLESRRFQVVDSRATGRFRGTEPEPRDGSGSTAQAGAAVSLDHATALQPGQQNETLS

SEQ ID NO: 6573 - protein, 287 aa, Artificial Sequence
  Synthetic polypeptide
MQCRLPRGLAGALLTLLCMGLLCLRYHLNLSPQRVQGTPELSQPNPGPPKLQLHDVFIAVKTTRAFHRLRLELLLDTWVSRTREQVTRSHLVVTNCSAEHSHPALSCKMAAEFDTFLASGLRWFCHVDDDNYVNPRALLQLLRAFPLARDVYVGRPSLNRPIHASEPQPHNRTRLVQFWFATGGAGFCINRKLALKMAPWASGSRFMDTSALIRLPDDCTMGYIIECKLGGRLQPSPLFHSHLETLQLLRTAQLPEQVTLSYGVFEGKLNVIKLQGPFSPEEDPSSS

SEQ ID NO: 6574 - protein, 301 aa, Artificial Sequence
  Synthetic polypeptide
MQCRLPRGLAGALLTLLCMGLLCLRYHLNLSPQRVQGTPELSQPNPGPPKLQLHDVFIAVKTTRAFHRLRLELLLDTWVSRTREQTFVFTDSPDKGLQERLGSHLVVTNCSAEHSHPALSCKMAAEFDTFLASGLRWFCHVDDDNYVNPRALLQLLRAFPLARDVYVGRPSLNRPIHASEPQPHNRTRLVQFWFATGGAGFCINRKLALKMAPWASGSRFMDTSALIRLPDDCTMGYIIECKLGGRLQPSPLFHSHLETLQLLRTAQLPEQVTLSYGVFEGKLNVIKLQGPFSPEEDPSSS

SEQ ID NO: 6575 - protein, 333 aa, Artificial Sequence
  Synthetic polypeptide
MQCRLPRGLAGALLTLLCMGLLCLRYHLNLSPQRVQGTPELSQPNPGPPKLQLHDVFIAVKTTRAFHRLRLELLLDTWVSRTREQVTRSHLVVTNCSAEHSHPALSCKMAAEFDTFLASGLRWFCHVDDDNYVNPRALLQLLRAFPLARDVYVGRPSLNRPIHASEPQPHNRTRLVQFWFATGGAGFCINRKLALKMAPWASGSRFMDTSALIRLPDDCTMGYIIECKLGGRLQPSPLFHSHLETLQLLRTAQLPEQVTLSYGVFEGKLNVIKLQGPFSPEEDPSRGRLAMSETFLILMIQEDATGILWVEPRNAVKYLARHRTAPQQRILWP

SEQ ID NO: 6576 - protein, 347 aa, Artificial Sequence
  Synthetic polypeptide
MQCRLPRGLAGALLTLLCMGLLCLRYHLNLSPQRVQGTPELSQPNPGPPKLQLHDVFIAVKTTRAFHRLRLELLLDTWVSRTREQTFVFTDSPDKGLQERLGSHLVVTNCSAEHSHPALSCKMAAEFDTFLASGLRWFCHVDDDNYVNPRALLQLLRAFPLARDVYVGRPSLNRPIHASEPQPHNRTRLVQFWFATGGAGFCINRKLALKMAPWASGSRFMDTSALIRLPDDCTMGYIIECKLGGRLQPSPLFHSHLETLQLLRTAQLPEQVTLSYGVFEGKLNVIKLQGPFSPEEDPSRGRLAMSETFLILMIQEDATGILWVEPRNAVKYLARHRTAPQQRILWP

SEQ ID NO: 6577 - protein, 9 aa, Artificial Sequence
  Synthetic polypeptide
TPTWRPCSC

SEQ ID NO: 6578 - protein, 269 aa, Artificial Sequence
  Synthetic polypeptide
MQCRLPRGLAGALLTLLCMGLLCLRYHLNLSPQRVQGTPELSQPNPGPPKLQLHDVFIAVKTTRAFHRLRLELLLDTWVSRTREQVTRSHLVVTNCSAEHSHPALSCKMAAEFDTFLASGLRWFCHVDDDNYVNPRALLQLLRAFPLARDVYVGRPSLNRPIHASEPQPHNRTRLVQFWFATGGAGFCINRKLALKMAPWASGSRFMDTSALIRLPDDCTMGYIIECKLGGRLQPSPLFHSHLETLQLLRTAQLPEQLMTWHSRSSTNI

SEQ ID NO: 6579 - protein, 283 aa, Artificial Sequence
  Synthetic polypeptide
MQCRLPRGLAGALLTLLCMGLLCLRYHLNLSPQRVQGTPELSQPNPGPPKLQLHDVFIAVKTTRAFHRLRLELLLDTWVSRTREQTFVFTDSPDKGLQERLGSHLVVTNCSAEHSHPALSCKMAAEFDTFLASGLRWFCHVDDDNYVNPRALLQLLRAFPLARDVYVGRPSLNRPIHASEPQPHNRTRLVQFWFATGGAGFCINRKLALKMAPWASGSRFMDTSALIRLPDDCTMGYIIECKLGGRLQPSPLFHSHLETLQLLRTAQLPEQLMTWHSRSSTNI

SEQ ID NO: 6580 - protein, 164 aa, Artificial Sequence
  Synthetic polypeptide
MSDNEDNFDGDDFDDVEEDEGLDDLENAEEEGQENVEILPSGERPQANQKRITTPYMTKYERARVLGTRALQIAMCAPVMVELEGETDPLLIAMKELNARSASEPPGEEPPWMDRGTRDEHLPSCPGCPAVASNTRCCPPAACLPGISLSRALDNLLHLFQTHL

SEQ ID NO: 6581 - protein, 58 aa, Artificial Sequence
  Synthetic polypeptide
MDGQRDEGRASAVVSRLPCSRLQHPLLPARCLPAWHLSLPGPGQSASSFSNSSVKCGQ

SEQ ID NO: 6582 - protein, 56 aa, Artificial Sequence
  Synthetic polypeptide
GQRDEGRASAVVSRLPCSRLQHPLLPARCLPAWHLSLPGPGQSASSFSNSSVKCGQ

SEQ ID NO: 6583 - protein, 196 aa, Artificial Sequence
  Synthetic polypeptide
MFADLDYDIEEDKLGIPTVPGKVTLQKDAQNLIGISIGGGAQYCPCLYIVQVFDNTPAALDGTVAAGDEITGVNGRSIKGKTKVEVAKMIQEVKGEVTIHYNKLQADPKQGMSLDIVLKKVKHRLVENMSSGTADALGLSRAILCNALTITLLSIARPLGWLLCWAFSLESKTWLKVSLTWWLAHSGCSRNTKPMT

SEQ ID NO: 6584 - protein, 268 aa, Artificial Sequence
  Synthetic polypeptide
MFADLDYDIEEDKLGIPTVPGKVTLQKDAQNLIGISIGGGAQYCPCLYIVQVFDNTPAALDGTVAAGDEITGVNGRSIKGKTKVEVAKMIQEVKGEVTIHYNKLQADPKQGMSLDIVLKKVKHRLVENMSSGTADALGLSRAILCNDGLVKRLEELERTAELYKGMTEHTKNLLRAFYELSQTHRAFGDVFSVIGVREPQPAASEAFVKFADAHRSIEKFGIRLLKTIKPMLTDLNTYLNKAIPDTRLTIKKYLDVKFEYLSISWALS

SEQ ID NO: 6585 - protein, 66 aa, Artificial Sequence
  Synthetic polypeptide
MNVFRILGDLSHLLAMILLLGKIWRSKCCKGISGKSQILFALVFTTRYLDLFTNFISIYNTVMKGY

SEQ ID NO: 6586 - protein, 417 aa, Artificial Sequence
  Synthetic polypeptide
MPTGFVAPILCVLLPSPTREAATVASATGDSASERESAAPAAAPTAEAPPPSVVTRPEPQALPSPAIRAPLPDLYPFGTMRGGGFGDRDRDRDRGGFGARGGGGLPPKKFGNPGERLRKKKWDLSELPKFEKNFYVEHPEVARLTPYEVDELRRKKEITVRGGDVCPKPVFAFHHANFPQYVMDVLMDQHFTEPTPIQCQGFPLALSGRDMVGIAQTGSGKTLAYLLPAIVHINHQPYLERGDGPICLVLAPTRELAQQVQQVADDYGKCSRLKSTCIYGGAPKGPQIRDLERGVEICIATPGRLIDFLESGKTNLRRCTYLVLDEADRMLDMGFEPQIRKIVDQIRPDRQTLMWSATWPKEVRQLAEDFLRDYTQINVGNLELSANHNILQIVDVCMESEKDHNFFICEMGVIPLT

SEQ ID NO: 6587 - protein, 338 aa, Artificial Sequence
  Synthetic polypeptide
MRGGGFGDRDRDRDRGGFGARGGGGLPPKKFGNPGERLRKKKWDLSELPKFEKNFYVEHPEVARLTPYEVDELRRKKEITVRGGDVCPKPVFAFHHANFPQYVMDVLMDQHFTEPTPIQCQGFPLALSGRDMVGIAQTGSGKTLAYLLPAIVHINHQPYLERGDGPICLVLAPTRELAQQVQQVADDYGKCSRLKSTCIYGGAPKGPQIRDLERGVEICIATPGRLIDFLESGKTNLRRCTYLVLDEADRMLDMGFEPQIRKIVDQIRPDRQTLMWSATWPKEVRQLAEDFLRDYTQINVGNLELSANHNILQIVDVCMESEKDHNFFICEMGVIPLT

SEQ ID NO: 6588 - protein, 157 aa, Artificial Sequence
  Synthetic polypeptide
MPTGFVAPILCVLLPSPTREAATVASATGDSASERESAAPAAAPTAEAPPPSVVTRPEPQALPSPAIRAPLPDLYPFGTMRGGGFGDRDRDRDRGGFGARGGGGLPPKKFGNPGERLRKKKWDLSELPKFEKNFYVEHPEVARLTPKMELLITYIIN

SEQ ID NO: 6589 - protein, 78 aa, Artificial Sequence
  Synthetic polypeptide
MRGGGFGDRDRDRDRGGFGARGGGGLPPKKFGNPGERLRKKKWDLSELPKFEKNFYVEHPEVARLTPKMELLITYIIN

SEQ ID NO: 6590 - protein, 120 aa, Artificial Sequence
  Synthetic polypeptide
MPTGFVAPILCVLLPSPTREAATVASATGDSASERESAAPAAAPTAEAPPPSVVTRPEPQALPSPAIRAPLPDLYPFGTMRGGGFGDRDRDRDRGGFGARGGGGLPPKKFENGTLNHLHH

SEQ ID NO: 6591 - protein, 41 aa, Artificial Sequence
  Synthetic polypeptide
MRGGGFGDRDRDRDRGGFGARGGGGLPPKKFENGTLNHLHH

SEQ ID NO: 6592 - protein, 334 aa, Artificial Sequence
  Synthetic polypeptide
MKEDQVVAEEPGFQDEEESLFQDIDLLQKHGINVADIKKLKSVGICTIKGIQMTTRRALCNVKGLSEAKVDKIKEAANKLIEPGFLTAFEYSEKRKMVFHITTGSQEFDKLLGGGIESMAITEAFGEFRTGKTQLSHTLCVTAQLPGAGGYPGGKIIFIDTENTFRPDRLRDIADRFNVDHDAVLDNVLYARAYTSEHQMELLDYVAAKFHEEAGIFKLLIIDSIMALFRVDFSGRGELAERQQKLAQMLSRLQKISEEYNVAVFVTNQMTADPGATMTFQADPKKPIGGHILAHASTTRISLRKGRGELRIAKIYDRLSEREQKASVKTIKDP

SEQ ID NO: 6593 - protein, 279 aa, Artificial Sequence
  Synthetic polypeptide
MKEDQVVAEEPGFQDEEESLFQDIDLLQKHGINVADIKKLKSVGICTIKGIQMTTRRALCNVKGLSEAKVDKIKEAANKLIEPGFLTAFEYSEKRKMVFHITTGSQEFDKLLGGGIESMAITEAFGEFRTGKTQLSHTLCGEHQMELLDYVAAKFHEEAGIFKLLIIDSIMALFRVDFSGRGELAERQQKLAQMLSRLQKISEEYNVAVFVTNQMTADPGATMTFQADPKKPIGGHILAHASTTRISLRKGRGELRIAKIYDRLSEREQKASVKTIKDP

SEQ ID NO: 6594 - protein, 474 aa, Artificial Sequence
  Synthetic polypeptide
MKFLAVLLAAGMLAFLGAVICIIASVPLAASPARALPGGADNASVASGAAASPGPQRSLSALHGAGGSAGPPALPGAPAASAHPLPPGPLFSRFLCTPLAAACPSGAQQGDAAGAAPGEREELLLLQSTAEQLRQTALQQEARIRADQDTIRELTGKLGRCESGLPRGLQGAGPRRDTMADGPWDSPALILELEDAVRALRDRIDRLEQELPARVNLSAAPAPVSAVPTGLHSKMDQLEGQLLAQVLALEKERVALSHSSRRQRQEVEKELDVLQGRVAELEHGSSAYSPPDAFKISIPIRNNYMYARVRKALPELYAFTACMWLRSRSSGTGQGTPFSYSVPGQANEIVLLEAGHEPMELLINDKVAQLPLSLKDNGWHHICIAWTTRDGLWSAYQDGELQGSGENLAAWHPIKPHGILILGQEQNFTKGSALGSRKMIPEGSVVIPVKNNRKGTYVDKSYLMLIENKSKYVL

SEQ ID NO: 6595 - protein, 457 aa, Artificial Sequence
  Synthetic polypeptide
MKFLAVLLAAGMLAFLGAVICIIASVPLAASPARALPGGADNASVASGAAASPGPQRSLSALHGAGGSAGPPALPGAPAASAHPLPPGPLFSRFLCTPLAAACPSGAQQGDAAGAAPGEREELLLLQSTAEQLRQTALQQEARIRADQDTIRELTGKLGRCESGLPRGLQGAGPRRDTMADGPWDSPALILELEDAVRALRDRIDRLEQELPARVNLSAAPAPVSAVPTGLHSKMDQLEGQLLAQVLALEKERVALSHSSRRQRQEVEKELDVLQGRVAELEHGSSAYSPPDAFKISIPIRNNYMYARVRKALPELYAFTACMWLRSRSSGTGQGTPFSYSVPGQANEIVLLEAGHEPMELLINDKVAQLPLSLKDNGWHHICIAWTTRDGLWSAYQDGELQGSGENLAAWHPIKPHGILILGQEQLARSNPGEILLSTCFVPAPAQLNADVKKHGF

SEQ ID NO: 6596 - protein, 414 aa, Artificial Sequence
  Synthetic polypeptide
MKFLAVLLAAGMLAFLGAVICIIASVPLAASPARALPGGADNASVASGAAASPGPQRSLSALHGAGGSAGPPALPGAPAASAHPLPPGPLFSRFLCTPLAAACPSGAQQGDAAGAAPGEREELLLLQSTAEQLRQTALQQEARIRADQDTIRELTGKLGRCESGLPRGLQGAGPRRDTMADGPWDSPALILELEDAVRALRDRIDRLEQELPARVNLSAAPAPVSAVPTGLHSKMDQLEGQLLAQVLALEKERVALSHSSRRQRQEVEKELDVLQGRVAELEHGSSAYSPPDAFKISIPIRNNYMYARVRKALPELYAFTACMWLRSRSSGTGQGTPFSYSVPGQANEIVLLEAGHEPMELLINDKNFTKGSALGSRKMIPEGSVVIPVKNNRKGTYVDKSYLMLIENKSKYVL

SEQ ID NO: 6597 - protein, 298 aa, Artificial Sequence
  Synthetic polypeptide
MKFLAVLLAAGMLAFLGAVICIIASVPLAASPARALPGGADNASVASGAAASPGPQRSLSALHGAGGSAGPPALPGAPAASAHPLPPGPLFSRFLCTPLAAACPSGAQQGDAAGAAPGEREELLLLQSTAEQLRQTALQQEARIRADQDTIRELTGKLGRCESGLPRGLQGAGPRRDTMADGPWDSPALILELEDAVRALRDRIDRLEQELPARVNLSAAPAPVSAVPTGLHSKMDQLEGQLLAQVLALEKERVALSHSSRRQRQEVEKELDVLQGRVAELEHELHKRKCFREQENDP

SEQ ID NO: 6598 - protein, 49 aa, Artificial Sequence
  Synthetic polypeptide
MKPHFRLRQENRLNPGGGGCSEPRSPHRTPAWATRAKFRLKRKKNKNKK

SEQ ID NO: 6599 - protein, 28 aa, Artificial Sequence
  Synthetic polypeptide
MAAQRRSLLQSGLFTFRSLCLEASFSAF

SEQ ID NO: 6600 - protein, 65 aa, Artificial Sequence
  Synthetic polypeptide
MSAALLRRGLELLAASEAPRDPPGQAKPRGAPVKRPRKTKAIQAQKLRNSAKGKVPKSALAKAPE

SEQ ID NO: 6601 - protein, 315 aa, Artificial Sequence
  Synthetic polypeptide
MAFRRQVKNFVKNYSDAEIKVREATSNDPWGPSSSLMLDISDLTFNTISLSEIMNMLWHRLNDHGKNWRHVYKSLTLMDYLIKNGSKKVIQHCREGFCNLQTLKDFQHIDEAGKDQGYYIREKSKQVITLLMDEPLLCKEREVACRTRQRTSHSILFSKRQLGSSNSLTACTSAPTPDISASEKKYKLPKFGRLHNKRNVCKAGLKQEHCQDVHLPTETMLSQETLPLKIHGWKSTEDLMTFLDDDPELPLLATPPSIVSPITCLSEAEEVCNLSGAALPSKHVQNQITSTAVAGSRYPVHHCCLHELLQQPPNL

SEQ ID NO: 6602 - protein, 198 aa, Artificial Sequence
  Synthetic polypeptide
MAFRRQVKNFVKNYSDAEIKVREATSNDPWGPSSSLMLDISDLTFNTISLSEIMNMLWHRLNDHGKNWRHVYKSLTLMDYLIKNGSKKVIQHCREGFCNLQTLKDFQHIDEAGKDQGYYIREKSKQVITLLMDEPLLCKEREVACRTRQRTSHSILFSKRQLGSSNSLTACTSAPTPDISASEKKYKLPKFGRLHNKN

SEQ ID NO: 6603 - protein, 16 aa, Artificial Sequence
  Synthetic polypeptide
MQTNEGEVSEESSSKT

SEQ ID NO: 6604 - protein, 79 aa, Artificial Sequence
  Synthetic polypeptide
MQTNEGEVSEESSSKVEQEDFVMEGHGKTPPPGEESKQEKEQEREEQLMEDKKRKKEDKKKKEATQKVTEQKTKESLLI

SEQ ID NO: 6605 - protein, 43 aa, Artificial Sequence
  Synthetic polypeptide
MREKEQEREEQLMEDKKRKKEDKKKKEATQKVTEQKTKESLLI

SEQ ID NO: 6606 - protein, 509 aa, Artificial Sequence
  Synthetic polypeptide
MAAGGDHGSPDSYRSPLASRYASPEMCFVFSDRYKFRTWRQLWLWLAEAEQTLGLPITDEQIQEMKSNLENIDFKMAAEEEKRLRHDVMAHVHTFGHCCPKAAGIIHLGATSCYVGDNTDLIILRNALDLLLPKLARVISRLADFAKERASLPTLGFTHFQPAQLTTVGKRCCLWIQDLCMDLQNLKRVRDDLRFRGVKGTTGTQASFLQLFEGDDHKVEQLDKMVTEKAGFKRAFIITGQTYTRKVDIEVLSVLASLGASVHKICTDIRLLANLKEMEEPFEKQQIGSSAMPYKRNPMRSERCCSLARHLMTLVMDPLQTASVQWFERTLDDSANRRICLAEAFLTADTILNTLQNISEGLVVYPKVIERRIRQELPFMATENIIMAMVKAGGSRQDCHEKIRVLSQQAASVVKQEGGDNDLIERIQVDAYFSPIHSQLDHLLDPSSFTGRASQQVQRFLEEEVYPLLKPYESVMKCKQVPLDKNVVCVIPCCISNSKSTSDTWQLGS

SEQ ID NO: 6607 - protein, 523 aa, Artificial Sequence
  Synthetic polypeptide
MAAGGDHGSPDSYRSPLASRYASPEMCFVFSDRYKFRTWRQLWLWLAEAEQTLGLPITDEQIQEMKSNLENIDFKMAAEEEKRLRHDVMAHVHTFGHCCPKAAGIIHLGATSCYVGDNTSLILSRGVIKAYCNLRLPGSDSSPVSVSQLARVISRLADFAKERASLPTLGFTHFQPAQLTTVGKRCCLWIQDLCMDLQNLKRVRDDLRFRGVKGTTGTQASFLQLFEGDDHKVEQLDKMVTEKAGFKRAFIITGQTYTRKVDIEVLSVLASLGASVHKICTDIRLLANLKEMEEPFEKQQIGSSAMPYKRNPMRSERCCSLARHLMTLVMDPLQTASVQWFERTLDDSANRRICLAEAFLTADTILNTLQNISEGLVVYPKVIERRIRQELPFMATENIIMAMVKAGGSRQDCHEKIRVLSQQAASVVKQEGGDNDLIERIQVDAYFSPIHSQLDHLLDPSSFTGRASQQVQRFLEEEVYPLLKPYESVMKCKQVPLDKNVVCVIPCCISNSKSTSDTWQLGS

SEQ ID NO: 6608 - protein, 450 aa, Artificial Sequence
  Synthetic polypeptide
MAAGGDHGSPDSYRSPLASRYASPEMCFVFSDRYKFRTWRQLWLWLAEAEQTLGLPITDEQIQEMKSNLENIDFKMAAEEEKRLRHDVMAHVHTFGHCCPKAAGIIHLGATSCYVGDNTDLIILRNALDLLLPKLARVISRLADFAKERASLPTLGFTHFQPAQLTTVGKRCCLWIQDLCMDLQNLKRVRDDLRFRGVKGTTGTQASFLQLFEGDDHKVEQLDKMVTEKAGFKRAFIITGQTYTRKVDIEVLSVLASLGASVHKICTDIRLLANLKEMEEPFEKQQIGSSAMPYKRNPMRSERCCSLARHLMTLVMDPLQTASVQWFERTLDDSANRRICLAEAFLTADTILNTLQNISEGLVVYPKVIERRIRQELPFMATENIIMAMVKAGGSRQVQRFLEEEVYPLLKPYESVMKCKQVPLDKNVVCVIPCCISNSKSTSDTWQLGS

SEQ ID NO: 6609 - protein, 66 aa, Artificial Sequence
  Synthetic polypeptide
MSGSHTPACGPFSALTPSIWPQEILAKYTQKEESAEQPEFYYDEFGFRVYKEGVMVCDCNPSYSEG

SEQ ID NO: 6610 - protein, 25 aa, Artificial Sequence
  Synthetic polypeptide
SGRGSSQGHRQGLREEVGVEALPLE

SEQ ID NO: 6611 - protein, 358 aa, Artificial Sequence
  Synthetic polypeptide
MASEDIAKLAETLAKTQVAGGQLSFKGKSLKLNTAEDAKDVIKEIEDFDSLEALRLEGNTVGVEAARVIAKALEKKSELKRCHWSDMFTGRLRTEIPPALISLGEGLITAGAQLVELDLSDNAFGPDGVQGFEALLKSSACFTLQELKLNNCGMGIGGGKILAAALTECHRKSSAQGKPLALKVFVAGRNRLENDGATALAEAFRVIGTLEEVHMPQNGINHPGITALAQAFAVNPLLRVINLNDNTFTEKGAVAMAETLKTLRQVEVINFGDCLVRSKGAVAIADAIRGGLPKLKELNLSFCEIKRDAALAVAEAMADKAELEKLDLNGNTLGEEGCEQLQEVLEGFNMAKVLASLS

SEQ ID NO: 6612 - protein, 303 aa, Artificial Sequence
  Synthetic polypeptide
MFVLGIPLCPALSFSGGDDSQTQLFVSSKDVIKEIEDFDSLEALRLEGNTVGVEAARVIAKALEKKSELKRCHWSDMFTGRLRTEIPPALISLGEGLITAGAQLVELDLSDNAFGPDGVQGFEALLKSSACFTLQELKLNNCGMGIGGGKVIGTLEEVHMPQNGINHPGITALAQAFAVNPLLRVINLNDNTFTEKGAVAMAETLKTLRQVEVINFGDCLVRSKGAVAIADAIRGGLPKLKELNLSFCEIKRDAALAVAEAMADKAELEKLDLNGNTLGEEGCEQLQEVLEGFNMAKVLASLS

SEQ ID NO: 6613 - protein, 107 aa, Artificial Sequence
  Synthetic polypeptide
MASEDIAKLAETLAKTQVAGGQLSFKGKSLKLNTAEDAKDVIKEIEDFDSLEALRLEGNTVGVEAARVIAKALEKKSELKRCHWSDMFTGRLRTEIPPALLPGVFSC

SEQ ID NO: 6614 - protein, 97 aa, Artificial Sequence
  Synthetic polypeptide
MFVLGIPLCPALSFSGGDDSQTQLFVSSKDVIKEIEDFDSLEALRLEGNTVGVEAARVIAKALEKKSELKRCHWSDMFTGRLRTEIPPALLPGVFSC

SEQ ID NO: 6615 - protein, 25 aa, Artificial Sequence
  Synthetic polypeptide
SGRGSSQGHRQGLREEVGVEALPLE

SEQ ID NO: 6616 - protein, 501 aa, Artificial Sequence
  Synthetic polypeptide
MAPYSLLVTRLQKALGVRQYHVASVLCQRAKVAMSHFEPNEYIHYDLLEKNINIVRKRLNRPLTLSEKIVYGHLDDPASQEIERGKSYLRLRPDRVAMQDATAQMAMLQFISSGLSKVAVPSTIHCDHLIEAQVGGEKDLRRAKDINQEVYNFLATAGAKYGVGFWKPGSGIIHQIILENYAYPGVLLIGTDSHTPNGGGLGGICIGVGGADAVDVMAGIPWELKCPKVIGVKLTGSLSGWSSPKDVILKVAGILTVKGGTGAIVEYHGPGVDSISCTGMATICNMGAEIGATTSVFPYNHRMKKYLSKTGREDIANLADEFKDHLVPDPGCHYDQLIEINLSELKPHINGPFTPDLAHPVAEVGKVAEKEGWPLDIRVGLIGSCTNSSYEDMGRSAAVAKQALAHGLKCKSQFTITPGSEQIRATIERDGYAQILRDLGGIVLANACGPCIGQWDRKDIKKGEKNTIVTSYNRNFTGRNDANPETHAFVTSPEDTSQPCL

SEQ ID NO: 6617 - protein, 526 aa, Artificial Sequence
  Synthetic polypeptide
MAPYSLLVTRLQKALGVRQYHVASVLCQRAKVAMSHFEPNEYIHYDLLEKNINIVRKRLNRPLTLSEKIVYGHLDDPASQEIERGKSYLRLRPDRVAMQDATAQMAMLQFISSGLSKVAVPSTIHCDHLIEAQVGGEKDLRRAKDINQEVYNFLATAGAKYGVGFWKPGSGIIHQIILENYAYPGVLLIGTDSHTPNGGGLGGICIGVGGADAVDVMAGIPWELKCPKVIGVKLTGSLSGWSSPKDVILKVAGILTVKGGTGAIVEYHGPGVDSISCTGEEGGQATWPLPCAGPDGSPVGSRSGMATICNMGAEIGATTSVFPYNHRMKKYLSKTGREDIANLADEFKDHLVPDPGCHYDQLIEINLSELKPHINGPFTPDLAHPVAEVGKVAEKEGWPLDIRVGLIGSCTNSSYEDMGRSAAVAKQALAHGLKCKSQFTITPGSEQIRATIERDGYAQILRDLGGIVLANACGPCIGQWDRKDIKKGEKNTIVTSYNRNFTGRNDANPETHAFVTSPEDTSQPCL

SEQ ID NO: 6618 - protein, 66 aa, Artificial Sequence
  Synthetic polypeptide
MEPPNLYPVKLYVYDLSKGLARRLSPIMLGKQLEGIWHTSIVVHKDEFFFGSGGISSCPPTLKPAL

SEQ ID NO: 6619 - protein, 39 aa, Artificial Sequence
  Synthetic polypeptide
MEPPNLYPVKLYVYDLSKGLARRLSPIMLGRRMLLASCG

SEQ ID NO: 6620 - protein, 37 aa, Artificial Sequence
  Synthetic polypeptide
MDDSGELGGLETMETLTELGDELTLGDIDAGHGAVHL

SEQ ID NO: 6621 - protein, 145 aa, Artificial Sequence
  Synthetic polypeptide
MSVLRPLDKLPGLNTATILLVGTEDALLQQLADSMLKEDCASELKVHLAKSLPLPSSVNRPRIDLIVFVVNLHSKYSLQNTEESLRHVDASFFLGKVCFLATGAGRESHCSIHRHTVVKLAHTYQSPLLYCDLEEVRLWMSPEVV

SEQ ID NO: 6622 - protein, 111 aa, Artificial Sequence
  Synthetic polypeptide
MLKEDCASELKVHLAKSLPLPSSVNRPRIDLIVFVVNLHSKYSLQNTEESLRHVDASFFLGKVCFLATGAGRESHCSIHRHTVVKLAHTYQSPLLYCDLEEVRLWMSPEVV

SEQ ID NO: 6623 - protein, 383 aa, Artificial Sequence
  Synthetic polypeptide
MLLKTVLLLGHVAQVLMLDNGLLQTPPMGWLAWERFRCNINCDEDPKNCISEQLFMEMADRMAQDGWRDMGYTYLNIDDCWIGGRDASGRLMPDPKRFPHGIPFLADYVHSLGLKLGIYADMGNFTCMGYPGTTLDKVVQDAQTFAEWKVDMLKLDGCFSTPEERAQGYPKMAAALNATGRPIAFSCSWPAYEGGLPPRVNYSLLADICNLWRNYDDIQDSWWSVLSILNWFVEHQDILQPVAGPGHWNDPDMLLIGNFGLSLEQSRAQMALWTVLAAPLLMSTDLRTISAQNMDILQNPLMIKINQDPLGIQGRRIHKEKSLIEVYMRPLSNKASALVFFSCRTDMPYRYHSSLGQLNFTGSVIYEVMKMFWNYSTYGCLSF

SEQ ID NO: 6624 - protein, 335 aa, Artificial Sequence
  Synthetic polypeptide
MLLKTVLLLGHVAQVLMLDNGLLQTPPMGWLAWERFRCNINCDEDPKNCISEQLFMEMADRMAQDGWRDMGYTYLNIDDCWIGGRDASGRLMPDPKRFPHGIPFLADYVHSLGLKLGIYADMGNFTCMGYPGTTLDKVVQDAQTFAEWKVDMLKLDGCFSTPEERAQGYPKMAAALNATGRPIAFSCSWPAYEGGLPPRVNYSLLADICNLWRNYDDIQDSWWSVLSILNWFVEHQDILQPVAGPGHWNDPDMLLIGNFGLSLEQSRAQMALWTVLAAPLLMSTDLRTISAQNMDILQNPLMIKINQDPLGIQGRRIHKVMKMFWNYSTYGCLSF

SEQ ID NO: 6625 - protein, 37 aa, Artificial Sequence
  Synthetic polypeptide
MAGKVKWVTDIEKSVLINNFEKRGWVQVTENEDWNFY

SEQ ID NO: 6626 - protein, 400 aa, Artificial Sequence
  Synthetic polypeptide
MYDAERGWSLSFAGCGFLGFYHVGATRCLSEHAPHLLRDARMLFGASAGALHCVGVLSGIPLEQTLQVLSDLVRKARSRNIGIFHPSFNLSKFLRQGLCKCLPANVHQLISGKIGISLTRVSDGENVLVSDFRSKDEVVDALVCSCFIPFYSGLIPPSFRGVRYVDGGVSDNVPFIDAKTTITVSPFYGEYDICPKVKSTNFLHVDITKLSLRLCTGNLYLLSRAFVPPDLKVLGEICLRGYLDAFRFLEEKGICNRPQPGLKSSSEGMDPEVAMPSWANMSLDSSPESAALAVRLEGDELLDHLRLSILPWDESILDTLSPRLATALSEEMKDKGGYMSKICNLLPIRIMSYVMLPCTLPVESAIAIVQSFPSREITWSRGWSGDSIWLLTHSAGVLIP

SEQ ID NO: 6627 - protein, 396 aa, Artificial Sequence
  Synthetic polypeptide
MYDAERGWSLSFAGCGFLGFYHVGATRCLSEHAPHLLRDARMLFGASAGALHCVGVLSEQTLQVLSDLVRKARSRNIGIFHPSFNLSKFLRQGLCKCLPANVHQLISGKIGISLTRVSDGENVLVSDFRSKDEVVDALVCSCFIPFYSGLIPPSFRGVRYVDGGVSDNVPFIDAKTTITVSPFYGEYDICPKVKSTNFLHVDITKLSLRLCTGNLYLLSRAFVPPDLKVLGEICLRGYLDAFRFLEEKGICNRPQPGLKSSSEGMDPEVAMPSWANMSLDSSPESAALAVRLEGDELLDHLRLSILPWDESILDTLSPRLATALSEEMKDKGGYMSKICNLLPIRIMSYVMLPCTLPVESAIAIVQSFPSREITWSRGWSGDSIWLLTHSAGVLIP

SEQ ID NO: 6628 - protein, 488 aa, Artificial Sequence
  Synthetic polypeptide
MGTVHARSLEPLPSSGPDFGGLGEEAEFVEVEPEAKQEILENKDVVVQHVHFDGLGRTKDDIIICEIGDVFKAKNLIEVMRKSHEAREKLLRLGIFRQVDVLIDTCQGDDALPNGLDVTFEVTELRRLTGSYNTMVGNNEGSMVLGLKLPNLLGRAEKVTFQFSYGTKETSYGLSFFKPRPGNFERNFSVNLYKVTGQFPWSSLRETDRGMSAEYSFPIWKTSHTVKWEGVWRELGCLSRTASFAVRKESGHSLKSSLSHAMVIDSRNSSILPRRGALLKVNQELAGYTGGDVSFIKEDFELQLNKQLIFDSVFSASFWGGMLVPIGDKPSSIADRFYLGGPTSIRGFSMHSIGPQSEGDYLGGEAYWAGGLHLYTPLPFRPGQGGFGELFRTHFFLNAGNLCNLNYGEGPKAHIRKLAECIRWSYGAGIVLRLGNIARLELNYCVPMGVQTGDSRRLELRRGCSCSWGLCSQALMASLAGSLLPGSD

SEQ ID NO: 6629 - protein, 278 aa, Artificial Sequence
  Synthetic polypeptide
MSAEYSFPIWKTSHTVKWEGVWRELGCLSRTASFAVRKESGHSLKSSLSHAMVIDSRNSSILPRRGALLKVNQELAGYTGGDVSFIKEDFELQLNKQLIFDSVFSASFWGGMLVPIGDKPSSIADRFYLGGPTSIRGFSMHSIGPQSEGDYLGGEAYWAGGLHLYTPLPFRPGQGGFGELFRTHFFLNAGNLCNLNYGEGPKAHIRKLAECIRWSYGAGIVLRLGNIARLELNYCVPMGVQTGDSRRLELRRGCSCSWGLCSQALMASLAGSLLPGSD

SEQ ID NO: 6630 - protein, 42 aa, Artificial Sequence
  Synthetic polypeptide
MSSPSLSDLGKREPAAAADERGTQQRRACANATWNRHGGSHL

SEQ ID NO: 6631 - protein, 74 aa, Artificial Sequence
  Synthetic polypeptide
MVCLELSQREAWGSGSPEKMPAQPEGLYRLKFMSSPSLSDLGKREPAAAADERGTQQRRACANATWNRHGGSHL

SEQ ID NO: 6632 - protein, 51 aa, Artificial Sequence
  Synthetic polypeptide
MRTLRRLKFMSSPSLSDLGKREPAAAADERGTQQRRACANATWNRHGGSHL

SEQ ID NO: 6633 - protein, 14 aa, Artificial Sequence
  Synthetic polypeptide
SWGPSSRSTCRTSC

SEQ ID NO: 6634 - protein, 189 aa, Artificial Sequence
  Synthetic polypeptide
MRTLRRLKFMSSPSLSDLGKREPAAAADERGTQQRRACANATWNSIHNGVIAVFQRKGLPDQELFSLNEGVRQLLKTELGSFFTEYLQNQLLTKGMVILRDKIRFYEELQRDKAAAAAVLGAVRKRPSVVPMAGQDPALSTSHPFYDVARHGILQVAGDDRFGRRVVTFSCCRMPPSHELDHQRLLEIF

SEQ ID NO: 6635 - protein, 312 aa, Artificial Sequence
  Synthetic polypeptide
MRTLRRLKFMSSPSLSDLGKREPAAAADERGTQQRRACANATWNSIHNGVIAVFQRKGLPDQELFSLNEGVRQLLKTELGSFFTEYLQNQLLTKGMVILRDKIRFYEGQKLLDSLAETWDFFFSDVLPMLQAIFYPVQGKEPSVRQLALLHFRNAITLSVKLEDALARAHARVPPAIVQMLLVLQGVHESRGVTEDYLRLETLVQKVVSPYLGTYGLHSSEGPFTHSCILELQRDKAAAAAVLGAVRKRPSVVPMAGQDPALSTSHPFYDVARHGILQVAGDDRFGRRVVTFSCCRMPPSHELDHQRLLEIF

SEQ ID NO: 6636 - protein, 180 aa, Artificial Sequence
  Synthetic polypeptide
MSSPSLSDLGKREPAAAADERGTQQRRACANATWNSIHNGVIAVFQRKGLPDQELFSLNEGVRQLLKTELGSFFTEYLQNQLLTKGMVILRDKIRFYEELQRDKAAAAAVLGAVRKRPSVVPMAGQDPALSTSHPFYDVARHGILQVAGDDRFGRRVVTFSCCRMPPSHELDHQRLLEIF

SEQ ID NO: 6637 - protein, 58 aa, Artificial Sequence
  Synthetic polypeptide
MAGQDPALSTSHPFYDVARHGILQVAGDDRFGRRVVTFSCCRMPPSHELDHQRLLEIF

SEQ ID NO: 6638 - protein, 264 aa, Artificial Sequence
  Synthetic polypeptide
MAPSTAVSVVSDSIKVQPLLISADNKVIIIQPQVQTQPESTAESRPPTEEPSQGAQATKKKKEDRPPTQENPEKIAFMVALGLVTTEHLEEIQSKRQERKRRSTANPAYSGLLETERKRLASNYLNNPLFLTARANEDPCWKNEITHDEHCAACKRGANLQPCGTCPGAYHLSCLEPPLKTAPKGVWVCPRCQQKALKKDEGVPWTGMLAIVHSYVTHKTVKEEEKQKLLQRGSELQNEHQQLEERDRRLASAVQPEPGNAASE

SEQ ID NO: 6639 - protein, 468 aa, Artificial Sequence
  Synthetic polypeptide
MELQSRPEALAVELARHQNGDLKKQLHERQPRIAALSDKQALGTITAVPVTGPQVSSLQRLAGQGAAVLPQVRPKTLIPDSLPVAPGRDRPPKQPPTFQKATVVSVKNPSPALPTANNTVSHVPAPGSQPQALAEPAALASPLSSAGVAYAIISTSPSNAAAMAPSTAVSVVSDSIKVQPLLISADNKPPPRLLSSPHPATHHCPLHPSSLPLTPPSPSLSPSPLHGIFQVIIIQPQVQTQPESTAESRPPTEEPSQGAQATKKKKEDRPPTQENPEKIAFMVALGLVTTEHLEEIQSKRQERKRRSTANPAYSGLLETERKRLASNYLNNPLFLTARANEDPCWKNEITHDEHCAACKRGANLQPCGTCPGAYHLSCLEPPLKTAPKGVWVCPRCQQKALKKDEGVPWTGMLAIVHSYVTHKTVKEEEKQKLLQRGSELQNEHQQLEERDRRLASAVQPEPGNAASE

SEQ ID NO: 6640 - protein, 426 aa, Artificial Sequence
  Synthetic polypeptide
MELQSRPEALAVELARHQNGDLKKQLHERQPRIAALSDKQALGTITAVPVTGPQVSSLQRLAGQGAAVLPQVRPKTLIPDSLPVAPGRDRPPKQPPTFQKATVVSVKNPSPALPTANNTVSHVPAPGSQPQALAEPAALASPLSSAGVAYAIISTSPSNAAAMAPSTAVSVVSDSIKVQPLLISADNKVIIIQPQVQTQPESTAESRPPTEEPSQGAQATKKKKEDRPPTQENPEKIAFMVALGLVTTEHLEEIQSKRQERKRRSTANPAYSGLLETERKRLASNYLNNPLFLTARANEDPCWKNEITHDEHCAACKRGANLQPCGTCPGAYHLSCLEPPLKTAPKGVWVCPRCQQKALKKDEGVPWTGMLAIVHSYVTHKTVKEEEKQKLLQRGSELQNEHQQLEERDRRLASAVQPEPGNAASE

SEQ ID NO: 6641 - protein, 414 aa, Artificial Sequence
  Synthetic polypeptide
MRRQPQNGDLKKQLHERQPRIAALSDKQALGTITAVPVTGPQVSSLQRLAGQGAAVLPQVRPKTLIPDSLPVAPGRDRPPKQPPTFQKATVVSVKNPSPALPTANNTVSHVPAPGSQPQALAEPAALASPLSSAGVAYAIISTSPSNAAAMAPSTAVSVVSDSIKVQPLLISADNKVIIIQPQVQTQPESTAESRPPTEEPSQGAQATKKKKEDRPPTQENPEKIAFMVALGLVTTEHLEEIQSKRQERKRRSTANPAYSGLLETERKRLASNYLNNPLFLTARANEDPCWKNEITHDEHCAACKRGANLQPCGTCPGAYHLSCLEPPLKTAPKGVWVCPRCQQKALKKDEGVPWTGMLAIVHSYVTHKTVKEEEKQKLLQRGSELQNEHQQLEERDRRLASAVQPEPGNAASE

SEQ ID NO: 6642 - protein, 295 aa, Artificial Sequence
  Synthetic polypeptide
MAPSTAVSVVSDSIKVQPLLISADNKVIIIQPQVQTQPESTAESRPPTEEPSQGAQATKKKKEDRPPTQENPEKIAFMVALGLVTTEHLEEIQSKRQERKRRSTANPAYSGLLETERKRLASNYLNNPLFLTARANEDPCWKNEITHDEHCAACKRGANLQPCGTCPGAYHLSCLEPPLKTAPKGVWVCPRCQQKALKKDEGVPWTGMLAIVHSYVTHKTVKEEEKQKLLQRGSELQNEHQQLEERDRRLASAVQPGEEDAMLFPSGGAVGSREQPSPHSQPMVPSSWTSQPPEL

SEQ ID NO: 6643 - protein, 499 aa, Artificial Sequence
  Synthetic polypeptide
MELQSRPEALAVELARHQNGDLKKQLHERQPRIAALSDKQALGTITAVPVTGPQVSSLQRLAGQGAAVLPQVRPKTLIPDSLPVAPGRDRPPKQPPTFQKATVVSVKNPSPALPTANNTVSHVPAPGSQPQALAEPAALASPLSSAGVAYAIISTSPSNAAAMAPSTAVSVVSDSIKVQPLLISADNKPPPRLLSSPHPATHHCPLHPSSLPLTPPSPSLSPSPLHGIFQVIIIQPQVQTQPESTAESRPPTEEPSQGAQATKKKKEDRPPTQENPEKIAFMVALGLVTTEHLEEIQSKRQERKRRSTANPAYSGLLETERKRLASNYLNNPLFLTARANEDPCWKNEITHDEHCAACKRGANLQPCGTCPGAYHLSCLEPPLKTAPKGVWVCPRCQQKALKKDEGVPWTGMLAIVHSYVTHKTVKEEEKQKLLQRGSELQNEHQQLEERDRRLASAVQPGEEDAMLFPSGGAVGSREQPSPHSQPMVPSSWTSQPPEL

SEQ ID NO: 6644 - protein, 457 aa, Artificial Sequence
  Synthetic polypeptide
MELQSRPEALAVELARHQNGDLKKQLHERQPRIAALSDKQALGTITAVPVTGPQVSSLQRLAGQGAAVLPQVRPKTLIPDSLPVAPGRDRPPKQPPTFQKATVVSVKNPSPALPTANNTVSHVPAPGSQPQALAEPAALASPLSSAGVAYAIISTSPSNAAAMAPSTAVSVVSDSIKVQPLLISADNKVIIIQPQVQTQPESTAESRPPTEEPSQGAQATKKKKEDRPPTQENPEKIAFMVALGLVTTEHLEEIQSKRQERKRRSTANPAYSGLLETERKRLASNYLNNPLFLTARANEDPCWKNEITHDEHCAACKRGANLQPCGTCPGAYHLSCLEPPLKTAPKGVWVCPRCQQKALKKDEGVPWTGMLAIVHSYVTHKTVKEEEKQKLLQRGSELQNEHQQLEERDRRLASAVQPGEEDAMLFPSGGAVGSREQPSPHSQPMVPSSWTSQPPEL

SEQ ID NO: 6645 - protein, 445 aa, Artificial Sequence
  Synthetic polypeptide
MRRQPQNGDLKKQLHERQPRIAALSDKQALGTITAVPVTGPQVSSLQRLAGQGAAVLPQVRPKTLIPDSLPVAPGRDRPPKQPPTFQKATVVSVKNPSPALPTANNTVSHVPAPGSQPQALAEPAALASPLSSAGVAYAIISTSPSNAAAMAPSTAVSVVSDSIKVQPLLISADNKVIIIQPQVQTQPESTAESRPPTEEPSQGAQATKKKKEDRPPTQENPEKIAFMVALGLVTTEHLEEIQSKRQERKRRSTANPAYSGLLETERKRLASNYLNNPLFLTARANEDPCWKNEITHDEHCAACKRGANLQPCGTCPGAYHLSCLEPPLKTAPKGVWVCPRCQQKALKKDEGVPWTGMLAIVHSYVTHKTVKEEEKQKLLQRGSELQNEHQQLEERDRRLASAVQPGEEDAMLFPSGGAVGSREQPSPHSQPMVPSSWTSQPPEL

SEQ ID NO: 6646 - protein, 30 aa, Artificial Sequence
  Synthetic polypeptide
MAKRNAEKELTDRNWDQEDEAEEENTRKAQ

SEQ ID NO: 6647 - protein, 226 aa, Artificial Sequence
  Synthetic polypeptide
MAHLELLLVENFKSWRGRQVIGPFRRFTCIIGPNGSGKSNVMDALSFVMGEKIANLRVKNIQELIHGAHIGKPISSSASVKIIYVEESGEEKTFARIIRGGCSEFRFNDNLVSRSVYIAELEKIGIIVKAQNCLVFQGTVESISVKKPKERTQFFEEISTSGELIGEYEEKKRKLQKAEEDAQFNFNKKKNIAAERRQAKLEKEEPLRRLTQKDLLGPGGRGYSEL

SEQ ID NO: 6648 - protein, 70 aa, Artificial Sequence
  Synthetic polypeptide
MAAPRPPPARLSGVMVPAPIQDLEALRALTALFKEQRNRNLDTIGVAVDLILLFRELRVEQESLLTGRGN

SEQ ID NO: 6649 - protein, 134 aa, Artificial Sequence
  Synthetic polypeptide
MAAPRPPPARLSGVMVPAPIQDLEALRALTALFKEQRNRETAPRTIFQRVLDILKKSSHAVELACRDPSQVENLASSLQLITECFRCLRNACIECSVNQNSIRNLDTIGVAVDLILLFRELRVEQESLLTGRGN

SEQ ID NO: 6650 - protein, 3 aa, Artificial Sequence
  Synthetic polypeptide
GYN

SEQ ID NO: 6651 - protein, 346 aa, Artificial Sequence
  Synthetic polypeptide
MAAPRPPPARLSGVMVPAPIQDLEALRALTALFKEQRNRNLDTIGVAVDLILLFRELRVEQESLLTAFRCGLQFLGNIASRNEDSQSIVWVHAFPELFLSCLNHPDKKIVAYSSMILFTSLNHERMKELEENLNIAIDVIDAYQKHPESEWPFLIITDLFLKSPELVQAMFPKLNNQERVTLLDLMIAKITSDEPLTKDDIPVFLRHAELIASTFVDQCKTVLKLASEEPPDDEEALATIRLLDVLCEMTVNTELLGYLQVFPGLLERVIDLLRVIHVAGKETTNIFSNCGCVRAEGDISNVANGFKSHLIRLIGNLCYKNKDNQDKNKLKEKQEEYGKLEYHQPP

SEQ ID NO: 6652 - protein, 410 aa, Artificial Sequence
  Synthetic polypeptide
MAAPRPPPARLSGVMVPAPIQDLEALRALTALFKEQRNRETAPRTIFQRVLDILKKSSHAVELACRDPSQVENLASSLQLITECFRCLRNACIECSVNQNSIRNLDTIGVAVDLILLFRELRVEQESLLTAFRCGLQFLGNIASRNEDSQSIVWVHAFPELFLSCLNHPDKKIVAYSSMILFTSLNHERMKELEENLNIAIDVIDAYQKHPESEWPFLIITDLFLKSPELVQAMFPKLNNQERVTLLDLMIAKITSDEPLTKDDIPVFLRHAELIASTFVDQCKTVLKLASEEPPDDEEALATIRLLDVLCEMTVNTELLGYLQVFPGLLERVIDLLRVIHVAGKETTNIFSNCGCVRAEGDISNVANGFKSHLIRLIGNLCYKNKDNQDKNKLKEKQEEYGKLEYHQPP

SEQ ID NO: 6653 - protein, 162 aa, Artificial Sequence
  Synthetic polypeptide
LMIAKITSDEPLTKDDIPVFLRHAELIASTFVDQCKTVLKLASEEPPDDEEALATIRLLDVLCEMTVNTELLGYLQVFPGLLERVIDLLRVIHVAGKETTNIFSNCGCVRAEGDISNVANGFKSHLIRLIGNLCYKNKDNQDKNKLKEKQEEYGKLEYHQPP

SEQ ID NO: 6654 - protein, 3 aa, Artificial Sequence
  Synthetic polypeptide
GYN

SEQ ID NO: 6655 - protein, 330 aa, Artificial Sequence
  Synthetic polypeptide
MAAPRPPPARLSGVMVPAPIQDLEALRALTALFKEQRNRNLDTIGVAVDLILLFRELRVEQESLLTAFRCGLQFLGNIASRNEDSQSIVWVHAFPELFLSCLNHPDKKIVAYSSMILFTSLNHERMKELEENLNIAIDVIDAYQKHPESEWPFLIITDLFLKSPELVQAMFPKLNNQERVTLLDLMIAKITSDEPLTKDDIPVFLRHAELIASTFVDQCKTVLKLASEEPPDDEEALATIRLLDVLCEMTVNTELLGYLQVFPGLLERVIDLLRVIHVAGKETTNIFSNCGCVRAEGDISNVANGFKSHLIRLIGNLCYKNKDNQDKQLK

SEQ ID NO: 6656 - protein, 394 aa, Artificial Sequence
  Synthetic polypeptide
MAAPRPPPARLSGVMVPAPIQDLEALRALTALFKEQRNRETAPRTIFQRVLDILKKSSHAVELACRDPSQVENLASSLQLITECFRCLRNACIECSVNQNSIRNLDTIGVAVDLILLFRELRVEQESLLTAFRCGLQFLGNIASRNEDSQSIVWVHAFPELFLSCLNHPDKKIVAYSSMILFTSLNHERMKELEENLNIAIDVIDAYQKHPESEWPFLIITDLFLKSPELVQAMFPKLNNQERVTLLDLMIAKITSDEPLTKDDIPVFLRHAELIASTFVDQCKTVLKLASEEPPDDEEALATIRLLDVLCEMTVNTELLGYLQVFPGLLERVIDLLRVIHVAGKETTNIFSNCGCVRAEGDISNVANGFKSHLIRLIGNLCYKNKDNQDKQLK

SEQ ID NO: 6657 - protein, 146 aa, Artificial Sequence
  Synthetic polypeptide
LMIAKITSDEPLTKDDIPVFLRHAELIASTFVDQCKTVLKLASEEPPDDEEALATIRLLDVLCEMTVNTELLGYLQVFPGLLERVIDLLRVIHVAGKETTNIFSNCGCVRAEGDISNVANGFKSHLIRLIGNLCYKNKDNQDKQLK

SEQ ID NO: 6658 - protein, 3 aa, Artificial Sequence
  Synthetic polypeptide
GYN

SEQ ID NO: 6659 - protein, 343 aa, Artificial Sequence
  Synthetic polypeptide
MASDGARKQFWKRSNSKLPGSIQHVYGAQHPPFDPLLHGTLLRSTAKMPTTPVKAKRVSTFQEFESNTSDAWDAGEDDDELLAMAAESLNSEVVMETANRVLRNHSQRQGRPTLQEGPGLQQKPRPEAEPPSPPSGDLRLVKSVSESHTSCPAESASDAAPLQRSQSLPHSATVTLGGTSDPSTLSSSALSEREASRLDKFKQLLAGPNTDLEELRRLSWSGIPKPVRPMTWKLLSGYLPANVDRRPATLQRKQKEYFAFIEHYYDSRNDEVHQDTYRQIHIDIPRMSPEALILQPKVTEIFERILFIWAIRHPASGYVQGINDLVTPFFVVFICEYIDSFKK

SEQ ID NO: 6660 - protein, 296 aa, Artificial Sequence
  Synthetic polypeptide
MPTTPVKAKRVSTFQEFESNTSDAWDAGEDDDELLAMAAESLNSEVVMETANRVLRNHSQRQGRPTLQEGPGLQQKPRPEAEPPSPPSGDLRLVKSVSESHTSCPAESASDAAPLQRSQSLPHSATVTLGGTSDPSTLSSSALSEREASRLDKFKQLLAGPNTDLEELRRLSWSGIPKPVRPMTWKLLSGYLPANVDRRPATLQRKQKEYFAFIEHYYDSRNDEVHQDTYRQIHIDIPRMSPEALILQPKVTEIFERILFIWAIRHPASGYVQGINDLVTPFFVVFICEYIDSFKK

SEQ ID NO: 6661 - protein, 284 aa, Artificial Sequence
  Synthetic polypeptide
MASDGARKQFWKRSNSKLPGSIQHVYGAQHPPFDPLLHGTLLRSTAKMPTTPVKAKRVSTFQEFESNTSDAWDAGEDDDELLAMAAESLNSEVVMETANRVLRNHSQRQGRPTLQEGPGLQQKPRPEAEPPSPPSGDLRLVKSVSESHTSCPAEELRRLSWSGIPKPVRPMTWKLLSGYLPANVDRRPATLQRKQKEYFAFIEHYYDSRNDEVHQDTYRQIHIDIPRMSPEALILQPKVTEIFERILFIWAIRHPASGYVQGINDLVTPFFVVFICEYIDSFKK

SEQ ID NO: 6662 - protein, 265 aa, Artificial Sequence
  Synthetic polypeptide
MASDGARKQFWKRSNSKLPGSLLRSTAKMPTTPVKAKRVSTFQEFESNTSDAWDAGEDDDELLAMAAESLNSEVVMETANRVLRNHSQRQGRPTLQEGPGLQQKPRPEAEPPSPPSGDLRLVKSVSESHTSCPAEELRRLSWSGIPKPVRPMTWKLLSGYLPANVDRRPATLQRKQKEYFAFIEHYYDSRNDEVHQDTYRQIHIDIPRMSPEALILQPKVTEIFERILFIWAIRHPASGYVQGINDLVTPFFVVFICEYIDSFKK

SEQ ID NO: 6663 - protein, 407 aa, Artificial Sequence
  Synthetic polypeptide
MASDGARKQFWKRSNSKLPGSIQHVYGAQHPPFDPLLHGTLLRSTAKMPTTPVKAKRVSTFQEFESNTSDAWDAGEDDDELLAMAAESLNSEVVMETANRVLRNHSQRQGRPTLQEGPGLQQKPRPEAEPPSPPSGDLRLVKSVSESHTSCPAESASDAAPLQRSQSLPHSATVTLGGTSDPSTLSSSALSEREASRLDKFKQLLAGPNTDLEELRRLSWSGIPKPVRPMTWKLLSGYLPANVDRRPATLQRKQKEYFAFIEHYYDSRNDEVHQDTYRQIHIDIPRMSPEALILQPKVTEIFERILFIWAIRHPASGYVQGINDLVTPFFVVFICEYIEAEEVDTVDVSGVPAEVLCNIEADTYWCMSKLLDGIQDNYTFAQPGIQMKVKMLEELVSRIDASSSPSS

SEQ ID NO: 6664 - protein, 348 aa, Artificial Sequence
  Synthetic polypeptide
MASDGARKQFWKRSNSKLPGSIQHVYGAQHPPFDPLLHGTLLRSTAKMPTTPVKAKRVSTFQEFESNTSDAWDAGEDDDELLAMAAESLNSEVVMETANRVLRNHSQRQGRPTLQEGPGLQQKPRPEAEPPSPPSGDLRLVKSVSESHTSCPAEELRRLSWSGIPKPVRPMTWKLLSGYLPANVDRRPATLQRKQKEYFAFIEHYYDSRNDEVHQDTYRQIHIDIPRMSPEALILQPKVTEIFERILFIWAIRHPASGYVQGINDLVTPFFVVFICEYIEAEEVDTVDVSGVPAEVLCNIEADTYWCMSKLLDGIQDNYTFAQPGIQMKVKMLEELVSRIDASSSPSS

SEQ ID NO: 6665 - protein, 329 aa, Artificial Sequence
  Synthetic polypeptide
MASDGARKQFWKRSNSKLPGSLLRSTAKMPTTPVKAKRVSTFQEFESNTSDAWDAGEDDDELLAMAAESLNSEVVMETANRVLRNHSQRQGRPTLQEGPGLQQKPRPEAEPPSPPSGDLRLVKSVSESHTSCPAEELRRLSWSGIPKPVRPMTWKLLSGYLPANVDRRPATLQRKQKEYFAFIEHYYDSRNDEVHQDTYRQIHIDIPRMSPEALILQPKVTEIFERILFIWAIRHPASGYVQGINDLVTPFFVVFICEYIEAEEVDTVDVSGVPAEVLCNIEADTYWCMSKLLDGIQDNYTFAQPGIQMKVKMLEELVSRIDASSSPSS

SEQ ID NO: 6666 - protein, 360 aa, Artificial Sequence
  Synthetic polypeptide
MPTTPVKAKRVSTFQEFESNTSDAWDAGEDDDELLAMAAESLNSEVVMETANRVLRNHSQRQGRPTLQEGPGLQQKPRPEAEPPSPPSGDLRLVKSVSESHTSCPAESASDAAPLQRSQSLPHSATVTLGGTSDPSTLSSSALSEREASRLDKFKQLLAGPNTDLEELRRLSWSGIPKPVRPMTWKLLSGYLPANVDRRPATLQRKQKEYFAFIEHYYDSRNDEVHQDTYRQIHIDIPRMSPEALILQPKVTEIFERILFIWAIRHPASGYVQGINDLVTPFFVVFICEYIEAEEVDTVDVSGVPAEVLCNIEADTYWCMSKLLDGIQDNYTFAQPGIQMKVKMLEELVSRIDASSSPSS

SEQ ID NO: 6667 - protein, 532 aa, Artificial Sequence
  Synthetic polypeptide
MASDGARKQFWKRSNSKLPGSIQHVYGAQHPPFDPLLHGTLLRSTAKMPTTPVKAKRVSTFQEFESNTSDAWDAGEDDDELLAMAAESLNSEVVMETANRVLRNHSQRQGRPTLQEGPGLQQKPRPEAEPPSPPSGDLRLVKSVSESHTSCPAESASDAAPLQRSQSLPHSATVTLGGTSDPSTLSSSALSEREASRLDKFKQLLAGPNTDLEELRRLSWSGIPKPVRPMTWKLLSGYLPANVDRRPATLQRKQKEYFAFIEHYYDSRNDEVHQDTYRQIHIDIPRMSPEALILQPKVTEIFERILFIWAIRHPASGYVQGINDLVTPFFVVFICEYIEAEEVDTVDVSGVPAEVLCNIEADTYWCMSKLLDGIQDNYTFAQPGIQMKVKMLEELVSRIDEQVHRHLDQHEVRYLQFAFRWMNNLLMREVPLRCTIRLWDTYQSEPDGFSHFHLYVCAAFLVRWRKEILEEKDFQGSCCCGVGPSSSLWKSSCEELWPPPSSAYWRQRLQPQSNPQMMAAPANVMTQPLERP

SEQ ID NO: 6668 - protein, 473 aa, Artificial Sequence
  Synthetic polypeptide
MASDGARKQFWKRSNSKLPGSIQHVYGAQHPPFDPLLHGTLLRSTAKMPTTPVKAKRVSTFQEFESNTSDAWDAGEDDDELLAMAAESLNSEVVMETANRVLRNHSQRQGRPTLQEGPGLQQKPRPEAEPPSPPSGDLRLVKSVSESHTSCPAEELRRLSWSGIPKPVRPMTWKLLSGYLPANVDRRPATLQRKQKEYFAFIEHYYDSRNDEVHQDTYRQIHIDIPRMSPEALILQPKVTEIFERILFIWAIRHPASGYVQGINDLVTPFFVVFICEYIEAEEVDTVDVSGVPAEVLCNIEADTYWCMSKLLDGIQDNYTFAQPGIQMKVKMLEELVSRIDEQVHRHLDQHEVRYLQFAFRWMNNLLMREVPLRCTIRLWDTYQSEPDGFSHFHLYVCAAFLVRWRKEILEEKDFQGSCCCGVGPSSSLWKSSCEELWPPPSSAYWRQRLQPQSNPQMMAAPANVMTQPLERP

SEQ ID NO: 6669 - protein, 454 aa, Artificial Sequence
  Synthetic polypeptide
MASDGARKQFWKRSNSKLPGSLLRSTAKMPTTPVKAKRVSTFQEFESNTSDAWDAGEDDDELLAMAAESLNSEVVMETANRVLRNHSQRQGRPTLQEGPGLQQKPRPEAEPPSPPSGDLRLVKSVSESHTSCPAEELRRLSWSGIPKPVRPMTWKLLSGYLPANVDRRPATLQRKQKEYFAFIEHYYDSRNDEVHQDTYRQIHIDIPRMSPEALILQPKVTEIFERILFIWAIRHPASGYVQGINDLVTPFFVVFICEYIEAEEVDTVDVSGVPAEVLCNIEADTYWCMSKLLDGIQDNYTFAQPGIQMKVKMLEELVSRIDEQVHRHLDQHEVRYLQFAFRWMNNLLMREVPLRCTIRLWDTYQSEPDGFSHFHLYVCAAFLVRWRKEILEEKDFQGSCCCGVGPSSSLWKSSCEELWPPPSSAYWRQRLQPQSNPQMMAAPANVMTQPLERP

SEQ ID NO: 6670 - protein, 485 aa, Artificial Sequence
  Synthetic polypeptide
MPTTPVKAKRVSTFQEFESNTSDAWDAGEDDDELLAMAAESLNSEVVMETANRVLRNHSQRQGRPTLQEGPGLQQKPRPEAEPPSPPSGDLRLVKSVSESHTSCPAESASDAAPLQRSQSLPHSATVTLGGTSDPSTLSSSALSEREASRLDKFKQLLAGPNTDLEELRRLSWSGIPKPVRPMTWKLLSGYLPANVDRRPATLQRKQKEYFAFIEHYYDSRNDEVHQDTYRQIHIDIPRMSPEALILQPKVTEIFERILFIWAIRHPASGYVQGINDLVTPFFVVFICEYIEAEEVDTVDVSGVPAEVLCNIEADTYWCMSKLLDGIQDNYTFAQPGIQMKVKMLEELVSRIDEQVHRHLDQHEVRYLQFAFRWMNNLLMREVPLRCTIRLWDTYQSEPDGFSHFHLYVCAAFLVRWRKEILEEKDFQGSCCCGVGPSSSLWKSSCEELWPPPSSAYWRQRLQPQSNPQMMAAPANVMTQPLERP

SEQ ID NO: 6671 - protein, 132 aa, Artificial Sequence
  Synthetic polypeptide
MAPSPRTGSRQDATALPSMSSTFWAFMILASLLIAYCSQLAAGTCEIVTLDRDSSQPRRTIARQTARCACRKGQIAGTTRARPACVDARIIKTKQWCDMLPCLEGEGCDLLINRSGWTCTQPGGRIKTTTLH

SEQ ID NO: 6672 - protein, 125 aa, Artificial Sequence
  Synthetic polypeptide
MQLLKALWALAGAALCCFLVLVIHAQFLKEGQLAAGTCEIVTLDRDSSQPRRTIARQTARCACRKGQIAGTTRARPACVDARIIKTKQWCDMLPCLEGEGCDLLINRSGWTCTQPGGRIKTTTLH

SEQ ID NO: 6673 - protein, 53 aa, Artificial Sequence
  Synthetic polypeptide
MYHHREWPARIIKTKQWCDMLPCLEGEGCDLLINRSGWTCTQPGGRIKTTTLH

SEQ ID NO: 6674 - protein, 219 aa, Artificial Sequence
  Synthetic polypeptide
MLLSKFGSLAHLCGPGGVDHLPVKILQPAKADKESFEKAYQVGAVLGSGGFGTVYAGSRIADGLPVAVKHVVKERVTEWGSLGGATVPLEVVLLRKVGAAGGARGVIRLLDWFERPDGFLLVLERPEPAQDLFDFITERGALDEPLARRFFAQVLAAVRHCHSCGVVHRDIKDENLLVDLRSGELKLIDFGSGALLKDTVYTDFDGVVVHAYSPSYLGS

SEQ ID NO: 6675 - protein, 1037 aa, Artificial Sequence
  Synthetic polypeptide
MLSLAAKLVAFFWRTADTPREEAGQLEPELAEGDTKLKTVRGVVTRYCSDYGMIDDMIYFSSDAVTSRVLLNVGQEVIAVVEENKVSNGLKAIRVEAVSDKWEDDSRNHGSPSDCGPRVLIGCVTSLVEGAGCISQTTYFSLESVCEGFEPCKGDWVEAEYRIRPGTWSSEATSVKPLRYKRVDKVCISSLCGRNGVLEESIFFTLDSLKLPDGYTPRRGDVVNAVVVESSQSCYVWRALCMTLVKRRDAAPVHEATHFYGTILLKNKGDIEVTQVTHFGTLKEGRSKTMVIWIENKGDIPQNLVSCKLAGWDKSKQFRFQMLDKDQMCPVVSFVSVPEKENSSDENINSLNSHTKNKTSQMSESSLVNNRGISPGDCTCKGENGEKDNILSRKQMTEPEPGGLVPPGGKTFIVVICDGKNPGRCKELLLLCFSDFLIGRYLEVNVISGEESLIAAREPFSWKKLKSSQALTSAKTTVVVTAQKRNSRRQLPSFLPQYPIPDRLRKCVEQKIDILTFQPLLAELLNMSNYKEKFSTLLWLEEIYAEMELKEYNMSGIILRRNGDLLVLEVPGLAEGRPSLYAGDKLILKTQEYNGHAIEYISYVTEIHEEDVTLKINPEFEQAYNFEPMDVEFTYNRTTSRRCHFALEHVIHLGVKVLFPEEIILQSPQVTGNWNHAQDTKSSGQSTSKKNRKTMTDQAEHGTEERRVGDKDLPVLAPFTAEMSDWVDEIQTPKARKMEFFNPVLNENQKLAVKRILSGDCRPLPYILFGPPGTGKTVTIIEAVLQVHFALPDSRILVCAPSNSAADLVCLRLHESKVLQPATMVRVNATCRFEEIVIDAVKPYCRDGEDIWKASRFRIIITTCSSSGLFYQIGVRVGHFTHVFVDEAGQASEPECLIPLGLMSDISGQIVLAGDPMQLGPVIKSRLAMAYGLNVSFLERLMSRPAYQRDENAFGACGAHNPLLVTKLVKNYRSHEALLMLPSRLFYHRELEVCADPTVVTSLLGWEKLPKKGFPLIFHGVRLSMVACAFGPGYLGG

SEQ ID NO: 6676 - protein, 80 aa, Artificial Sequence
  Synthetic polypeptide
MSDISGQVTKLVKNYRSHEALLMLPSRLFYHRELEVCADPTVVTSLLGWEKLPKKGFPLIFHGVRLSMVACAFGPGYLGG

SEQ ID NO: 6677 - protein, 1017 aa, Artificial Sequence
  Synthetic polypeptide
MSFLPVRSVIGGGDTKLKTVRGVVTRYCSDYGMIDDMIYFSSDAVTSRVLLNVGQEVIAVVEENKVSNGLKAIRVEAVSDKWEDDSRNHGSPSDCGPRVLIGCVTSLVEGAGCISQTTYFSLESVCEGFEPCKGDWVEAEYRIRPGTWSSEATSVKPLRYKRVDKVCISSLCGRNGVLEESIFFTLDSLKLPDGYTPRRGDVVNAVVVESSQSCYVWRALCMTLVKRRDAAPVHEATHFYGTILLKNKGDIEVTQVTHFGTLKEGRSKTMVIWIENKGDIPQNLVSCKLAGWDKSKQFRFQMLDKDQMCPVVSFVSVPEKENSSDENINSLNSHTKNKTSQMSESSLVNNRGISPGDCTCKGENGEKDNILSRKQMTEPEPGGLVPPGGKTFIVVICDGKNPGRCKELLLLCFSDFLIGRYLEVNVISGEESLIAAREPFSWKKLKSSQALTSAKTTVVVTAQKRNSRRQLPSFLPQYPIPDRLRKCVEQKIDILTFQPLLAELLNMSNYKEKFSTLLWLEEIYAEMELKEYNMSGIILRRNGDLLVLEVPGLAEGRPSLYAGDKLILKTQEYNGHAIEYISYVTEIHEEDVTLKINPEFEQAYNFEPMDVEFTYNRTTSRRCHFALEHVIHLGVKVLFPEEIILQSPQVTGNWNHAQDTKSSGQSTSKKNRKTMTDQAEHGTEERRVGDKDLPVLAPFTAEMSDWVDEIQTPKARKMEFFNPVLNENQKLAVKRILSGDCRPLPYILFGPPGTGKTVTIIEAVLQVHFALPDSRILVCAPSNSAADLVCLRLHESKVLQPATMVRVNATCRFEEIVIDAVKPYCRDGEDIWKASRFRIIITTCSSSGLFYQIGVRVGHFTHVFVDEAGQASEPECLIPLGLMSDISGQIVLAGDPMQLGPVIKSRLAMAYGLNVSFLERLMSRPAYQRDENAFGACGAHNPLLVTKLVKNYRSHEALLMLPSRLFYHRELEVCADPTVVTSLLGWEKLPKKGFPLIFHGVRLSMVACAFGPGYLGG

SEQ ID NO: 6678 - protein, 164 aa, Artificial Sequence
  Synthetic polypeptide
MFRVGHFTHVFVDEAGQASEPECLIPLGLMSDISGQIVLAGDPMQLGPVIKSRLAMAYGLNVSFLERLMSRPAYQRDENAFGACGAHNPLLVTKLVKNYRSHEALLMLPSRLFYHRELEVCADPTVVTSLLGWEKLPKKGFPLIFHGVRLSMVACAFGPGYLGG

SEQ ID NO: 6679 - protein, 59 aa, Artificial Sequence
  Synthetic polypeptide
MDALLGTGPRRARGCLGAAGPTSSGRAARTPAAPWARFSAWLECVCVVTFDLELGQALE

SEQ ID NO: 6680 - protein, 840 aa, Artificial Sequence
  Synthetic polypeptide
MFWKFDLNTTSHVDKLLDKEHVTLQELMDEDDILQECKAQNQKLLDFLCRQQCMEELVSLITQDPPLDMEEKVRFKYPNTACELLTCDVPQISDRLGGDESLLSLLYDFLDHEPPLNPLLASFFSKTIGNLIARKTEQVITFLKKKDKFISLVLKHIGTSALMDLLLRLVSCVEPAGLRQDVLHWLNEEKVIQRLVELIHPSQDEDRQSNASQTLCDIVRLGRDQGSQLQEALEPDPLLTALESQDCVEQLLKNMFDGDRTESCLVSGTQVLLTLLETRRVGTEGLVDSFSQGLERSYAVSSSVLHGIEPRLKDFHQLLLNPPKKKAILTTIGVLEEPLGNARLHGARLMAALLHTNTPSINQELCRLNTMDLLLDLFFKYTWNNFLHFQVELCIAAILSHAAREERTEASGSESRVEPPHENGNRSLETPQPAASLPDNTMVTHLFQKCCLVQRILEAWEANDHTQAAGGMRRGNMGHLTRIANAVVQNLERGPVQTHISEVIRGLPADCRGRWESFVEETLTETNRRNTVDLAFSDYQIQQMTANFVDQFGFNDEEFADQDDNINAPFDRIAEINFNIDADEDSPSAALFEACCSDRIQPFDDDEDEDIWEDSDTRCAARVMARPRFGAPHASESCSKNGPERGGQDGKASLEAHRDAPGAGAPPAPGKKEAPPVEGDSEAGAMWTAVFDEPANSTPTAPGVVRDVGSSVWAAGTSAPEEKGWAKFTDFQPFCCSESGPRCSSPVDTECSHAEGSRSQGPEKAFSPASPCAWNVCVTRKAPLLASDSSSSGGSHSEDGDQKAASAMDAVSRGPGREAPPLPTVARTEEAVGRHSGSRL

SEQ ID NO: 6681 - protein, 840 aa, Artificial Sequence
  Synthetic polypeptide
MFWKFDLNTTSHVDKLLDKEHVTLQELMDEDDILQECKAQNQKLLDFLCRQQCMEELVSLITQDPPLDMEEKVRFKYPNTACELLTCDVPQISDRLGGDESLLSLLYDFLDHEPPLNPLLASFFSKTIGNLIARKTEQVITFLKKKDKFISLVLKHIGTSALMDLLLRLVSCVEPAGLRQDVLHWLNEEKVIQRLVELIHPSQDEDRQSNASQTLCDIVRLGRDQGSQLQEALEPDPLLTALESRQDCVEQLLKNMFDGDRTESCLVSGTQVLLTLLETRRVGTEGLVDSFSQGLERSYAVSSSVLHGIEPRLKDFHQLLLNPPKKKAILTTIGVLEEPLGNARLHGARLMAALLHTNTPSINQELCRLNTMDLLLDLFFKYTWNNFLHFQVELCIAAILSHAAREERTEASGSESRVEPPHENGNRSLETPQPAASLPDNTMVTHLFQKCCLVQRILEAWEANDHTQAAGGMRRGNMGHLTRIANAVVQNLERGPVQTHISEVIRGLPADCRGRWESFVEETLTETNRRNTVDLAFSDYQIQQMTANFVDQFGFNDEEFADQDDNINAPFDRIAEINFNIDADEDSPSAALFEACCSDRIQPFDDDEDEDIWEDSDTRCAARVMARPRFGAPHASESCSKNGPERGGQDGKASLEAHRDAPGAGAPPAPGKKEAPPVEGDSEGAMWTAVFDEPANSTPTAPGVVRDVGSSVWAAGTSAPEEKGWAKFTDFQPFCCSESGPRCSSPVDTECSHAEGSRSQGPEKAFSPASPCAWNVCVTRKAPLLASDSSSSGGSHSEDGDQKAASAMDAVSRGPGREAPPLPTVARTEEAVGRHSGSRL

SEQ ID NO: 6682 - protein, 839 aa, Artificial Sequence
  Synthetic polypeptide
MFWKFDLNTTSHVDKLLDKEHVTLQELMDEDDILQECKAQNQKLLDFLCRQQCMEELVSLITQDPPLDMEEKVRFKYPNTACELLTCDVPQISDRLGGDESLLSLLYDFLDHEPPLNPLLASFFSKTIGNLIARKTEQVITFLKKKDKFISLVLKHIGTSALMDLLLRLVSCVEPAGLRQDVLHWLNEEKVIQRLVELIHPSQDEDRQSNASQTLCDIVRLGRDQGSQLQEALEPDPLLTALESQDCVEQLLKNMFDGDRTESCLVSGTQVLLTLLETRRVGTEGLVDSFSQGLERSYAVSSSVLHGIEPRLKDFHQLLLNPPKKKAILTTIGVLEEPLGNARLHGARLMAALLHTNTPSINQELCRLNTMDLLLDLFFKYTWNNFLHFQVELCIAAILSHAAREERTEASGSESRVEPPHENGNRSLETPQPAASLPDNTMVTHLFQKCCLVQRILEAWEANDHTQAAGGMRRGNMGHLTRIANAVVQNLERGPVQTHISEVIRGLPADCRGRWESFVEETLTETNRRNTVDLAFSDYQIQQMTANFVDQFGFNDEEFADQDDNINAPFDRIAEINFNIDADEDSPSAALFEACCSDRIQPFDDDEDEDIWEDSDTRCAARVMARPRFGAPHASESCSKNGPERGGQDGKASLEAHRDAPGAGAPPAPGKKEAPPVEGDSEGAMWTAVFDEPANSTPTAPGVVRDVGSSVWAAGTSAPEEKGWAKFTDFQPFCCSESGPRCSSPVDTECSHAEGSRSQGPEKAFSPASPCAWNVCVTRKAPLLASDSSSSGGSHSEDGDQKAASAMDAVSRGPGREAPPLPTVARTEEAVGRHSGSRL

SEQ ID NO: 6683 - protein, 873 aa, Artificial Sequence
  Synthetic polypeptide
MFWKFDLNTTSHVDKLLDKEHVTLQELMDEDDILQECKAQNQKLLDFLCRQQCMEELVSLITQDPPLDMEEKVRFKYPNTACELLTCDVPQISDRLGGDESLLSLLYDFLDHEPPLNPLLASFFSKTIGNLIARKTEQVITFLKKKDKFISLVLKHIGTSALMDLLLRLVSCVEPAGLRQDVLHWLNEEKVIQRLVELIHPSQDEDRQSNASQTLCDIVRLGRDQGSQLQEALEPDPLLTALESQDCVEQLLKNMFDGDRTESCLVSGTQVLLTLLETRRVGTEGLVDSFSQGLERSYAVSSSVLHGIEPRLKDFHQLLLNPPKKKAILTTIGVLEEPLGNARLHGARLMAALLHTNTPSINQELCRLNTMDLLLDLFFKYTWNNFLHFQVELCIAAILSHAAREERTEASGSESRVEPPHENGNRSLETPQPAASLPDNTMVTHLFQKCCLVQRILEAWEANDHTQAAGGMRRGNMGHLTRIANAVVQNLERGPVQTHISEVIRGLPADCRGRWESFVEETLTETNRRNTVDLVSTHHLHSSSEDEDIEGAFPNELSLQQAFSDYQIQQMTANFVDQFGFNDEEFADQDDNINAPFDRIAEINFNIDADEDSPSAALFEACCSDRIQPFDDDEDEDIWEDSDTRCAARVMARPRFGAPHASESCSKNGPERGGQDGKASLEAHRDAPGAGAPPAPGKKEAPPVEGDSEGAMWTAVFDEPANSTPTAPGVVRDVGSSVWAAGTSAPEEKGWAKFTDFQPFCCSESGPRCSSPVDTECSHAEGSRSQGPEKASQASYFAVSPASPCAWNVCVTRKAPLLASDSSSSGGSHSEDGDQKAASAMDAVSRGPGREAPPLPTVARTEEAVGRHSGSRL

SEQ ID NO: 6684 - protein, 104 aa, Artificial Sequence
  Synthetic polypeptide
AGNQAGWDRGLGGLLFSGTGKVIRCQQQRTTRHRASAEGLPPAPAQPAQEESDPDHHWCAGGAPGECPSAWRPPHGSTAAHKHTQHQPGALPAQHDGLTAGLVL

SEQ ID NO: 6685 - protein, 7 aa, Artificial Sequence
  Synthetic polypeptide
LTAGLVL

SEQ ID NO: 6686 - protein, 124 aa, Artificial Sequence
  Synthetic polypeptide
MVAANTRAPEDTRAPAGPKPSSCEWAVCWAPARCRISATACGNSWDRPAGRTQLLWTPAAPTAMAEVGPGHTPAHPSQGAVPPSRAAAEPHLKPSPSELQTAGPAATIPARLCTRKPRLVYTQC

SEQ ID NO: 6687 - protein, 212 aa, Artificial Sequence
  Synthetic polypeptide
MAAEATAVAGSGAVGGCLAKDGLQQSKCPDTTPKRRRASSLSRDAERRAYQWCREYLGGAWRRVQPEELRVYPVSGGLSNLLFRCSLPDHLPSVGEEPREVLLRLYGAILQGVDSLVLESVMFAILAERSLGPQLYGVFPEGRLEQYIPSRPLKTQELREPVLSAAIATKMAQFHGMEMPFTKEPHWLFGTMERLGESKTLSQNTKQKKKKE

SEQ ID NO: 6688 - protein, 696 aa, Artificial Sequence
  Synthetic polypeptide
MDGPGASAVVVRVGIPDLQQTKCLRLDPAAPVWAAKQRVLCALNHSLQDALNYGLFQPPSRGRAGKFLDEERLLQEYPPNLDTPLPYLEFRYKRRVYAQNLIDDKQFAKLHTKANLKKFMDYVQLHSTDKVARLLDKGLDPNFHDPDSGECPLSLAAQLDNATDLLKVLKNGGAHLDFRTRDGLTAVHCATRQRNAAALTTLLDLGASPDYKDSRGLTPLYHSALGGGDALCCELLLHDHAQLGITDENGWQEIHQACRFGHVQHLEHLLFYGADMGAQNASGNTALHICALYNQESCARVLLFRGANRDVRNYNSQTAFQVAIIAGNFELAEVIKTHKDSDVVPFRETPSYAKRRRLAGPSGLASPRPLQRSASDINLKGEAQPAASPGPSLRSLPHQLLLQRLQEEKDRDRDADQESNISGPLAGRAGQSKISPAPPAPPAPPPRGPKRKLYSAVPGRKFIAVKAHSPQGEGEIPLHRGEAVKVLSIGEGGFWEGTVKGRTGWFPADCVEEVQMRQHDTRPETREDRTKRLFRHYTVGSYDSLTSHSDYVIDDKVAVLQKRDHEGFGFVLRGAKAETPIEEFTPTPAFPALQYLESVDVEGVAWRAGLRTGDFLIEVNGVNVVKVGHKQVVALIRQGGNRLVMKVVSVTRKPEEDGARRRAPPPPKRAPSTTLTLRSKSMTAELEELAVADDSR

SEQ ID NO: 6689 - protein, 726 aa, Artificial Sequence
  Synthetic polypeptide
MDGPGASAVVVRVGIPDLQQTKCLRLDPAAPVWAAKQRVLCALNHSLQDALNYGLFQPPSRGRAGKFLDEERLLQEYPPNLDTPLPYLEFRYKRRVYAQNLIDDKQFAKLHTKANLKKFMDYVQLHSTDKVARLLDKGLDPNFHDPDSGECPLSLAAQLDNATDLLKVLKNGGAHLDFRTRDGLTAVHCATRQRNAAALTTLLDLGASPDYKDSRGLTPLYHSALGGGDALCCELLLHDHAQLGITDENGWQEIHQACRFGHVQHLEHLLFYGADMGAQNASGNTALHICALYNQESCARVLLFRGANRDVRNYNSQTAFQVAIIAGNFELAEVIKTHKDSDVVPFRETPSYAKRRRLAGPSGLASPRPLQRSASDINLKGEAQPAASPGPSLRSLPHQLLLQRLQEEKDRDRDADQESNISGPLAGRAGQSKISDPGPGPGGVGGAPLPPPGAPRSCIRIRARFPAPPAPPAPPPRGPKRKLYSAVPGRKFIAVKAHSPQGEGEIPLHRGEAVKVLSIGEGGFWEGTVKGRTGWFPADCVEEVQMRQHDTRPETREDRTKRLFRHYTVGSYDSLTSHSDYVIDDKVAVLQKRDHEGFGFVLRGAKAETPIEEFTPTPAFPALQYLESVDVEGVAWRAGLRTGDFLIEVNGVNVVKVGHKQVVALIRQGGNRLVMKVVSVTRKPEEDGARRRAPPPPKRAPSTTLTLRSKSMTAELEELAVADDSR

SEQ ID NO: 6690 - protein, 711 aa, Artificial Sequence
  Synthetic polypeptide
MDGPGASAVVVRVGIPDLQQTKCLRLDPAAPVWAAKQRVLCALNHSLQDALNYGLFQPPSRGRAGKFLDEERLLQEYPPNLDTPLPYLEFRYKRRVYAQNLIDDKQFAKLHTKANLKKFMDYVQLHSTDKVARLLDKGLDPNFHDPDSGECPLSLAAQLDNATDLLKVLKNGGAHLDFRTRDGLTAVHCATRQRNAAALTTLLDLGASPDYKDSRGLTPLYHSALGGGDALCCELLLHDHAQLGITDENGWQEIHQACRFGHVQHLEHLLFYGADMGAQNASGNTALHICALYNQESCARVLLFRGANRDVRNYNSQTAFQVAIIAGNFELAEVIKTHKDSDVVPFRETPSYAKRRRLAGPSGLASPRPLQRSASDINLKGEAQPAASPGPSLRSLPHQLLLQRLQEEKDRDRDADQESNISGPLAGRAGQSKISEPGAPRSCIRIRARFPAPPAPPAPPPRGPKRKLYSAVPGRKFIAVKAHSPQGEGEIPLHRGEAVKVLSIGEGGFWEGTVKGRTGWFPADCVEEVQMRQHDTRPETREDRTKRLFRHYTVGSYDSLTSHSDYVIDDKVAVLQKRDHEGFGFVLRGAKAETPIEEFTPTPAFPALQYLESVDVEGVAWRAGLRTGDFLIEVNGVNVVKVGHKQVVALIRQGGNRLVMKVVSVTRKPEEDGARRRAPPPPKRAPSTTLTLRSKSMTAELEELAVADDSR

SEQ ID NO: 6691 - protein, 199 aa, Artificial Sequence
  Synthetic polypeptide
MTSFRLALIQLQISSIKSDNVTRACSFIREAATQGAKIVSLPECFNSPYGAKYFPEYAEKIPGESTQKLSEVAKECSIYLIGGSIPEEDAGKLYNTCAVFGPDGTLLAKYRKIHLFDIDVPGKITFQESKTLSPGDSFSTFDTPYCRVGLGICYDMRFAELAQIYAQRGCQLLVYPGAFNLTTGPAHWELLQRSRIGKN

SEQ ID NO: 6692 - protein, 264 aa, Artificial Sequence
  Synthetic polypeptide
MNGQLDLSGKLIIKAQLGEDIRRIPIHNEDITYDELVLMMQRVFRGKLLSNDEVTIKYKDEDGDLITIFDSSDLSFAIQCSRILKLTLFVNGQPRPLESSQVKYLRRELIELRNKVNRLLDSLEPPGEPGPSTNIPENDTVDGREEKSASDSSGKQSTQVMAASMSAFDPLKNQDEINKNVMSAFGLTDDQVSGPPSAPAEDRSGTPDSIASSSSAAHPPGVQPQQPPYTGAQTQAGQIEVKRINKILSIIKKKPKGIMLLFFI

SEQ ID NO: 6693 - protein, 249 aa, Artificial Sequence
  Synthetic polypeptide
MNGQLDLSGKLIIKAQLGEDIRRIPIHNEDITYDELVLMMQRVFRGKLLSNDEVTIKYKDEDGDLITIFDSSDLSFAIQCSRILKLTLFVNGQPRPLESSQVKYLRRELIELRNKVNRLLDSLEPPGEPGPSTNIPENDTVDGREEKSASDSSGKQSTQVMAASMSAFDPLKNQDEINKNVMSAFGLTDDQVSGPPSAPAEDRSGTPDSIASSSSAAHPPGVQPQQPPYTGAQTQAGQIEASACYRKTM

SEQ ID NO: 6694 - protein, 555 aa, Artificial Sequence
  Synthetic polypeptide
MVSKRRLSKSEDKESLTEDASKTRKQPLSKKTKKSHIANEVEENDSIFVKLLKISGIILKTGESQNQLAVDQIAFQKKLFQTLRRHPSYPKIIEEFVSGLESYIEDEDSFRNCLLSCERLQDEEASMGASYSKSLIKLLLGIDILQPAIIKTLFEKLPEYFFENKNSDEINIPRLIVSQLKWLDRVVDGKDLTTKIMQLISIAPENLQHDIITSLPEILGDSQHADVGKELSDLLIENTSLTVPILDVLSSLRLDPNFLLKVRQLVMDKLSSIRLEDLPVIIKFILHSVTAMDTLEVISELREKLDLQHCVLPSRLQASQVKLKSKGRASSSGNQESSGQSCIILLFDVIKSAIRYEKTISEAWIKAIENTASVSEHKVFDLVMLFIIYSTNTQTKKYIDRVLRNKIRSGCIQEQLLQSTFSVHYLVLKDMCSSILSLAQSLLHSLDQSIISFGSLLYKYAFKFFDTYCQQEVVGALVTHICSGNEAEVDTALDVLLELVVLNPSAMMMNAVFVKGILDYLDNISPQQIRKLFYVLSTLAFSKQNEASSHIQGHG

SEQ ID NO: 6695 - protein, 1 aa, Artificial Sequence
  Synthetic polypeptide
C

SEQ ID NO: 6696 - protein, 833 aa, Artificial Sequence
  Synthetic polypeptide
MDKRKLGRRPSSSEIITEGKRKKSSSDLSEIRKMLNAKPEDVHVQSPLSKFRSSERWTLPLQWERSLRNKVISLDHKNKKHIRGCPVTSKSSPERQLKVMLTNVLWTDLGRKFRKTLPRNDANLCDANKVQSDSLPSTSVDSLETCQKLEPLRQSLNLSERIPRVILTNVLGTELGRKYIRTPPVTEGSLSDTDNLQSEQLSSSSDGSLESYQNLNPHKSCYLSERGSQRSKTVDDNSAKQTAHNKEKRRKDDGISLLISDTQPEDLNSGSRGCDHLEQESRNKDVKYSDSKVELTLISRKTKRRLRNNLPDSQYCTSLDKSTEQTKKQEDDSTISTEFEKPSENYHQDPKLPEEITTKPTKSDFTKLSSLNSQELTLSNATKSASAGSTTETVENSNSIDIVGISSLVEKDENELNTIEKPILRGHNEGNQSLISAEPIVVSSDEEGPVEHKSSEILKLQSKQDRETTNENESTSESALLELPLITCESVQMSSELCPYNPVMENISSIMPSNEMDLQLDFIFTSVYIGKIKGASKGCVTITKKYIKIPFQVSLNEISLLVDTTHLKRFGLWKSKDDNHSKRSHAILFFWVSSDYLQEIQTQLEHSVLSQQSKSSEFIFLELHNPVSQREELKLKDIMTEISIISGELELSYPLSWVQAFPLFQNLSSKESSFIHYYCVSTCSFPAGVAVAEEMKLKSVSQPSNTDAAKPTYTFLQKQSSGCYSLSITSNPDEEWREVRHTGLVQKLIVYPPPPTKGGLGVTNEDLECLEEGEFLNDVIIDFYLKYLILEKASDELVERSHIFSSFFYKCLTRKENNLTEDNPNLSNLINIC

SEQ ID NO: 6697 - protein, 669 aa, Artificial Sequence
  Synthetic polypeptide
MLNAKPEDVHVQSPLSKFRSSERWTLPLQWERSLRNKVISLDHKNKKHIRGCPVTSKSSPERGSQRSKTVDDNSAKQTAHNKEKRRKDDGISLLISDTQPEDLNSGSRGCDHLEQESRNKDVKYSDSKVELTLISRKTKRRLRNNLPDSQYCTSLDKSTEQTKKQEDDSTISTEFEKPSENYHQDPKLPEEITTKPTKSDFTKLSSLNSQELTLSNATKSASAGSTTETVENSNSIDIVGISSLVEKDENELNTIEKPILRGHNEGNQSLISAEPIVVSSDEEGPVEHKSSEILKLQSKQDRETTNENESTSESALLELPLITCESVQMSSELCPYNPVMENISSIMPSNEMDLQLDFIFTSVYIGKIKGASKGCVTITKKYIKIPFQVSLNEISLLVDTTHLKRFGLWKSKDDNHSKRSHAILFFWVSSDYLQEIQTQLEHSVLSQQSKSSEFIFLELHNPVSQREELKLKDIMTEISIISGELELSYPLSWVQAFPLFQNLSSKESSFIHYYCVSTCSFPAGVAVAEEMKLKSVSQPSNTDAAKPTYTFLQKQSSGCYSLSITSNPDEEWREVRHTGLVQKLIVYPPPPTKGGLGVTNEDLECLEEGEFLNDVIIDFYLKYLILEKASDELVERSHIFSSFFYKCLTRKENNLTEDNPNLSNLINIC

SEQ ID NO: 6698 - protein, 768 aa, Artificial Sequence
  Synthetic polypeptide
MDKRKLGRRPSSSEIITEGKRKKSSSDLSEIRKMLNAKPEDVHVQSPLSKFRSSERWTLPLQWERSLRNKVISLDHKNKKHIRGCPVTSKSSPERQLKVMLTNVLWTDLGRKFRKTLPRNDANLCDANKVQSDSLPSTSVDSLETCQKLEPLRQSLNLSERGSQRSKTVDDNSAKQTAHNKEKRRKDDGISLLISDTQPEDLNSGSRGCDHLEQESRNKDVKYSDSKVELTLISRKTKRRLRNNLPDSQYCTSLDKSTEQTKKQEDDSTISTEFEKPSENYHQDPKLPEEITTKPTKSDFTKLSSLNSQELTLSNATKSASAGSTTETVENSNSIDIVGISSLVEKDENELNTIEKPILRGHNEGNQSLISAEPIVVSSDEEGPVEHKSSEILKLQSKQDRETTNENESTSESALLELPLITCESVQMSSELCPYNPVMENISSIMPSNEMDLQLDFIFTSVYIGKIKGASKGCVTITKKYIKIPFQVSLNEISLLVDTTHLKRFGLWKSKDDNHSKRSHAILFFWVSSDYLQEIQTQLEHSVLSQQSKSSEFIFLELHNPVSQREELKLKDIMTEISIISGELELSYPLSWVQAFPLFQNLSSKESSFIHYYCVSTCSFPAGVAVAEEMKLKSVSQPSNTDAAKPTYTFLQKQSSGCYSLSITSNPDEEWREVRHTGLVQKLIVYPPPPTKGGLGVTNEDLECLEEGEFLNDVIIDFYLKYLILEKASDELVERSHIFSSFFYKCLTRKENNLTEDNPNLSNLINIC

SEQ ID NO: 6699 - protein, 767 aa, Artificial Sequence
  Synthetic polypeptide
MDKRKLGRRPSSSEIITEGKRKKSSSDLSEIRKMLNAKPEDVHVQSPLSKFRSSERWTLPLQWERSLRNKVISLDHKNKKHIRGCPVTSKSSPERIPRVILTNVLGTELGRKYIRTPPVTEGSLSDTDNLQSEQLSSSSDGSLESYQNLNPHKSCYLSERGSQRSKTVDDNSAKQTAHNKEKRRKDDGISLLISDTQPEDLNSGSRGCDHLEQESRNKDVKYSDSKVELTLISRKTKRRLRNNLPDSQYCTSLDKSTEQTKKQEDDSTISTEFEKPSENYHQDPKLPEEITTKPTKSDFTKLSSLNSQELTLSNATKSASAGSTTETVENSNSIDIVGISSLVEKDENELNTIEKPILRGHNEGNQSLISAEPIVVSSDEEGPVEHKSSEILKLQSKQDRETTNENESTSESALLELPLITCESVQMSSELCPYNPVMENISSIMPSNEMDLQLDFIFTSVYIGKIKGASKGCVTITKKYIKIPFQVSLNEISLLVDTTHLKRFGLWKSKDDNHSKRSHAILFFWVSSDYLQEIQTQLEHSVLSQQSKSSEFIFLELHNPVSQREELKLKDIMTEISIISGELELSYPLSWVQAFPLFQNLSSKESSFIHYYCVSTCSFPAGVAVAEEMKLKSVSQPSNTDAAKPTYTFLQKQSSGCYSLSITSNPDEEWREVRHTGLVQKLIVYPPPPTKGGLGVTNEDLECLEEGEFLNDVIIDFYLKYLILEKASDELVERSHIFSSFFYKCLTRKENNLTEDNPNLSNLINIC

SEQ ID NO: 6700 - protein, 800 aa, Artificial Sequence [sequence omitted]

SEQ ID NO: 6701 - protein, 858 aa, Artificial Sequence
  Synthetic polypeptide
MVSKRRLSKSEDKESLTEDASKTRKQPLSKKTKKSHIANEVEENDSIFVKLLKISGIILKTGESQNQLAVDQIAFQKKLFQTLRRHPSYPKIIEEFVSGLESYIEDEDSFRNCLLSCERLQDEEASMGASYSKSLIKLLLGIDILQPAIIKTLFEKLPEYFFENKNSDEINIPRLIVSQLKWLDRVVDGKDLTTKIMQLISIAPENLQHDIITSLPEILGDSQHADVGKELSDLLIENTSLTVPILDVLSSLRLDPNFLLKVRQLVMDKLSSIRLEDLPVIIKFILHSVTAMDTLEVISELREKLDLQHCVLPSRLQASQVKLKSKGRASSSGNQESSGQSCIILLFDVIKSAIRYEKTISEAWIKAIENTASVSEHKVFDLVMLFIIYSTNTQTKKYIDRVLRNKIRSGCIQEQLLQSTFSVHYLVLKDMCSSILSLAQSLLHSLDQSIISFGSLLYKYAFKFFDTYCQQEVVGALVTHICSGNEAEVDTALDVLLELVVLNPSAMMMNAVFVKGILDYLDNISPQQIRKLFYVLSTLAFSKQNEASSHIQDDMHLVIRKQLSSTVFKYKLIGIIGAVTMAGIMAADRSESPSLTQERANLSDEQCTQVTSLLQLVHSCSEQSPQASALYYDEFANLIQHEKLDPKALEWVGHTICNDFQDAFVVDSCVVPEGDFPFPVKALYGLEEYDTQDGIAINLLPLLFSQDFAKDGGPVTSQESGQKLVSPLCLAPYFRLLRLCVERQHNGNLEEIDGLLDCPIFLTDLEPGEKLESMSAKERSFMCSLIFLTLNWFREIVNAFCQETSPEMKGKVLTRLKHIVELQIILEKYLAGSEERLCPATHRLRCGERLCPTAPSGM

SEQ ID NO: 6702 - protein, 1 aa, Artificial Sequence
  Synthetic polypeptide
C

SEQ ID NO: 6703 - protein, 39 aa, Artificial Sequence
  Synthetic polypeptide
MWTNFFKLRLFCCLLAVLMVVVLVINVTQVEAGCGGLGL

SEQ ID NO: 6704 - protein, 66 aa, Artificial Sequence
  Synthetic polypeptide
MAGQEDPVQREIHQDWANREYIEIITSSIKKIADFLNSLLSRKTMRMKTFMMIHCHLMNSKYISFS

SEQ ID NO: 6705 - protein, 43 aa, Artificial Sequence
  Synthetic polypeptide
MAGQEDPVQREIHQDWANREYIEIITSSIKKIADFLNSFAGRQ

SEQ ID NO: 6706 - protein, 43 aa, Artificial Sequence
  Synthetic polypeptide
MAGQEDPVQREIHQDWANREYIEIITSSIKKIADFLNSFGALR

SEQ ID NO: 6707 - protein, 2 aa, Artificial Sequence
  Synthetic polypeptide
VG

SEQ ID NO: 6708 - protein, 556 aa, Artificial Sequence
  Synthetic polypeptide
MESKGASSCRLLFCLLISATVFRPGLGWYTVNSAYGDTIIIPCRLDVPQNLMFGKWKYEKPDGSPVFIAFRSSTKKSVQYDDVPEYKDRLNLSENYTLSISNARISDEKRFVCMLVTEDNVFEAPTIVKVFKQPSKPEIVSKALFLETEQLKKLGDCISEDSYPDGNITWYRNGKVLHPLEGAVVIIFKKEMDPVTQLYTMTSTLEYKTTKADIQMPFTCSVTYYGPSGQKTIHSEQAVFDIYYPTEQVTIQVLPPKNAIKEGDNITLKCLGNGNPPPEEFLFYLPGQPEGIRSSNTYTLTDVRRNATGDYKCSLIDKKSMIASTAITVHYLDLSLNPSGEVTRQIGDALPVSCTISASRNATVVWMKDNIRLRSSPSFSSLHYQDAGNYVCETALQEVEGLKKRESLTLIVEGKPQIKMTKKTDPSGLSKTIICHVEGFPKPAIQWTITGSGSVINQTEESPYINGRYYSKIIISPEENVTLTCTAENQLERTVNSLNVSAISIPEHDEADEISDENREKVNDQAKLIVGIVVGLLLAALVAGVVYWLYMKKSNG

SEQ ID NO: 6709 - protein, 543 aa, Artificial Sequence
  Synthetic polypeptide
MESKGASSCRLLFCLLISATVFRPGLGWYTVNSAYGDTIIIPCRLDVPQNLMFGKWKYEKPDGSPVFIAFRSSTKKSVQYDDVPEYKDRLNLSENYTLSISNARISDEKRFVCMLVTEDNVFEAPTIVKVFKQPSKPEIVSKALFLETEQLKKLGDCISEDSYPDGNITWYRNGKVLHPLEGAVVIIFKKEMDPVTQLYTMTSTLEYKTTKADIQMPFTCSVTYYGPSGQKTIHSEQAVFDIYYPTEQVTIQVLPPKNAIKEGDNITLKCLGNGNPPPEEFLFYLPGQPEGIRSSNTYTLTDVRRNATGDYKCSLIDKKSMIASTAITVHYLDLSLNPSGEVTRQIGDALPVSCTISASRNATVVWMKDNIRLRSSPSFSSLHYQDAGNYVCETALQEVEGLKKRESLTLIVEGKPQIKMTKKTDPSGLSKTIICHVEGFPKPAIQWTITGSGSVINQTEESPYINGRYYSKIIISPEENVTLTCTAENQLERTVNSLNVSANENREKVNDQAKLIVGIVVGLLLAALVAGVVYWLYMKKSNG

SEQ ID NO: 6710 - protein, 505 aa, Artificial Sequence
  Synthetic polypeptide
MFGKWKYEKPDGSPVFIAFRSSTKKSVQYDDVPEYKDRLNLSENYTLSISNARISDEKRFVCMLVTEDNVFEAPTIVKVFKQPSKPEIVSKALFLETEQLKKLGDCISEDSYPDGNITWYRNGKVLHPLEGAVVIIFKKEMDPVTQLYTMTSTLEYKTTKADIQMPFTCSVTYYGPSGQKTIHSEQAVFDIYYPTEQVTIQVLPPKNAIKEGDNITLKCLGNGNPPPEEFLFYLPGQPEGIRSSNTYTLTDVRRNATGDYKCSLIDKKSMIASTAITVHYLDLSLNPSGEVTRQIGDALPVSCTISASRNATVVWMKDNIRLRSSPSFSSLHYQDAGNYVCETALQEVEGLKKRESLTLIVEGKPQIKMTKKTDPSGLSKTIICHVEGFPKPAIQWTITGSGSVINQTEESPYINGRYYSKIIISPEENVTLTCTAENQLERTVNSLNVSAISIPEHDEADEISDENREKVNDQAKLIVGIVVGLLLAALVAGVVYWLYMKKSNG

SEQ ID NO: 6711 - protein, 278 aa, Artificial Sequence
  Synthetic polypeptide
MDPVTQLYTMTSTLEYKTTKADIQMPFTCSVTYYGPSGQKTIHSEQAVFDIYYLDLSLNPSGEVTRQIGDALPVSCTISASRNATVVWMKDNIRLRSSPSFSSLHYQDAGNYVCETALQEVEGLKKRESLTLIVEGKPQIKMTKKTDPSGLSKTIICHVEGFPKPAIQWTITGSGSVINQTEESPYINGRYYSKIIISPEENVTLTCTAENQLERTVNSLNVSAISIPEHDEADEISDENREKVNDQAKLIVGIVVGLLLAALVAGVVYWLYMKKSNG

SEQ ID NO: 6712 - protein, 509 aa, Artificial Sequence
  Synthetic polypeptide
MDSTACLKSLLLTVSQYKAVKSEANATQLLRHLEVISGQKLTRLFTSNQILTSECLSCLVELLEDPNISASLILSIIGLLSQLAVDIETRDCLQNTYNLNSVLAGVVCRSSHTDSVFLQCIQLLQKLTYNVKIFYSGANIDELITFLIDHIQSSEDELKMPCLGLLANLCRHNLSVQTHIKTLSNVKSFYRTLITLLAHSSLTVVVFALSILSSLTLNEEVGEKLFHARNIHQTFQLIFNILINGDGTLTRKYSVDLLMDLLKNPKIADYLTRYEHFSSCLHQVLGLLNGKDPDSSSKVLELLLAFCSVTQLRHMLTQMMFEQSPPGSATLGSHTKCLEPTVALLRWLSQPLDGSENCSVLALELFKEIFEDVIDAANCSSADRFVTLLLPTILDQLQFTEQNLDEALTRKKCERIAKAIEVLLTLCGDDTLKMHIAKILTTVKCTTLIEQQFTYGKIDLGFGTKVADSELCKLAADVILKTLDLINKLKPLVPGMEVSFYKILQVEHP

SEQ ID NO: 6713 - protein, 350 aa, Artificial Sequence
  Synthetic polypeptide
MPCLGLLANLCRHNLSVQTHIKTLSNVKSFYRTLITLLAHSSLTVVVFALSILSSLTLNEEVGEKLFHARNIHQTFQLIFNILINGDGTLTRKYSVDLLMDLLKNPKIADYLTRYEHFSSCLHQVLGLLNGKDPDSSSKVLELLLAFCSVTQLRHMLTQMMFEQSPPGSATLGSHTKCLEPTVALLRWLSQPLDGSENCSVLALELFKEIFEDVIDAANCSSADRFVTLLLPTILDQLQFTEQNLDEALTRKKCERIAKAIEVLLTLCGDDTLKMHIAKILTTVKCTTLIEQQFTYGKIDLGFGTKVADSELCKLAADVILKTLDLINKLKPLVPGMEVSFYKILQVEHP

SEQ ID NO: 6714 - protein, 506 aa, Artificial Sequence
  Synthetic polypeptide
MDSTACLKSLLLTVSQYKAVKSEANATQLLRHLEVISGQKLTRLFTSNQILTSECLSCLVELLEDPNISASLILSIIGLLSQLAVDIETRDCLQNTYNLNSVLAGVVCRSSHTDSVFLQCIQLLQKLTYNVKIFYSGANIDELITFLIDHIQSSEDELKMPCLGLLANLCRHNLSVQTHIKTLSNVKSFYRTLITLLAHSSLTVVVFALSILSSLTLNEEVGEKLFHARNIHQTFQLIFNILINGDGTLTRKYSVDLLMDLLKNPKIADYLTRYEHFSSCLHQVLGLLNGKDPDSSSKVLELLLAFCSVTQLRHMLTQMMFEQSPPGSATLGSHTKCLEPTVALLRWLSQPLDGSENCSVLALELFKEIFEDVIDAANCSSADRFVTLLLPTILDQLQFTEQNLDEALTRKKCERIAKAIEVLLTLCGDDTLKMHIAKILTTVKCTTLIEQQFTYGKIDLGFGTKVADSELCKLAADVILKTLDLINKLKPLVPGMEVSFYKILQA

SEQ ID NO: 6715 - protein, 347 aa, Artificial Sequence
  Synthetic polypeptide
MPCLGLLANLCRHNLSVQTHIKTLSNVKSFYRTLITLLAHSSLTVVVFALSILSSLTLNEEVGEKLFHARNIHQTFQLIFNILINGDGTLTRKYSVDLLMDLLKNPKIADYLTRYEHFSSCLHQVLGLLNGKDPDSSSKVLELLLAFCSVTQLRHMLTQMMFEQSPPGSATLGSHTKCLEPTVALLRWLSQPLDGSENCSVLALELFKEIFEDVIDAANCSSADRFVTLLLPTILDQLQFTEQNLDEALTRKKCERIAKAIEVLLTLCGDDTLKMHIAKILTTVKCTTLIEQQFTYGKIDLGFGTKVADSELCKLAADVILKTLDLINKLKPLVPGMEVSFYKILQA

SEQ ID NO: 6716 - protein, 260 aa, Artificial Sequence
  Synthetic polypeptide
MDDRYPALQRAQLRLDFIHANSTTHSFLFGALAELLDNARDAGAERLDVFSVDNEKLQGGFMLCFLDDGCGMSPEEASDIIYFGRSKKRLSTLKFIGQYGNGLKSGSMRIGKDFILFTKKEETMTCVFFSQTFCEEESLSEVVVPMPSWLIRTRESVTDDPQKFAMELSIIYKYSPFKTEAELMQQFDVIYGKCGTLLVIYNLKLLLNGEPELDVKTDKEDILMAGALEERISFEESQKKELQEQFNIRRSRKDLNNGKH

SEQ ID NO: 6717 - protein, 386 aa, Artificial Sequence
  Synthetic polypeptide
MTAEKALPLGNGKAAEEARESEAPGGGCSSGGAAPARHPRVKRDKAVHERGHWNNKVEFVLSVAGEIIGLGNVWRFPYLCYKNGGGAFLIPYVVFFICCGIPVFFLETALGQFTSEGGITCWRKVCPLFEGIGYATQVIEAHLNVYYIIILAWAIFYLSNCFTTELPWATCGHEWNTENCVEFQKLNVSNYSHVSLQNATSPVMEFWEHRVLAISDGIEHIGNLRWELALCLLAAWTICYFCIWKGTKSTGKVVYVTATFPYIMLLILLIRGVTLPGASEGIKFYLYPDLSRLSDPQVWVDAGTQIFFSYAICLGCLTALGSYNNYNNNCYRDCIMLCCLNSGTSFVAGFAIFSVLGFMAYEQGVPIAEVAESGALTITKRKRVML

SEQ ID NO: 6718 - protein, 440 aa, Artificial Sequence
  Synthetic polypeptide
MEKKWKYCAVYYIIQIHFVKGVWEKTVNTEENVYATLGSDVNLTCQTQTVGFFVQMQWSKVTNKIDLIAVYHPQYGFYCAYGRPCESLVTFTETPENGSKWTLHLRNMSCSVSGRYECMLVLYPEGIQTKIYNLLIQTHVTADEWNSNHTIEIEINQTLEIPCFQNSSSKISSEFTYAWSVEDNGTQETLISQNHLISNSTLLKDRVKLGTDYRLHLSPVQIFDDGRKFSCHIRVGPNKILRSSTTVKVFAKPEIPVIVENNSTDVLVERRFTCLLKNVFPKANITWFIDGSFLHDEKEGIYITNEERKGKDGFLELKSVLTRVHSNKPAQSDNLTIWCMALSPVPGNKVWNISSEKITFLLGSEISSTDPPLSVTESTLDTQPSPASSVSPARYPATSSVTLVDVSALRPNTTPQPSNSSMTTRGFNYPWTSSGTDTKK

SEQ ID NO: 6719 - protein, 456 aa, Artificial Sequence
  Synthetic polypeptide
MEKKWKYCAVYYIIQIHFVKGVWEKTVNTEENVYATLGSDVNLTCQTQTVGFFVQMQWSKVTNKIDLIAVYHPQYGFYCAYGRPCESLVTFTETPENGSKWTLHLRNMSCSVSGRYECMLVLYPEGIQTKIYNLLIQTHVTADEWNSNHTIEIEINQTLEIPCFQNSSSKISSEFTYAWSVENSSTDSWVLLSKGIKEDNGTQETLISQNHLISNSTLLKDRVKLGTDYRLHLSPVQIFDDGRKFSCHIRVGPNKILRSSTTVKVFAKPEIPVIVENNSTDVLVERRFTCLLKNVFPKANITWFIDGSFLHDEKEGIYITNEERKGKDGFLELKSVLTRVHSNKPAQSDNLTIWCMALSPVPGNKVWNISSEKITFLLGSEISSTDPPLSVTESTLDTQPSPASSVSPARYPATSSVTLVDVSALRPNTTPQPSNSSMTTRGFNYPWTSSGTDTKK

SEQ ID NO: 6720 - protein, 301 aa, Artificial Sequence
  Synthetic polypeptide
MLAVRKARRKLRMGTICSPNPSGTKTSSEVCNADWMASLPPHLHNLPLSNLAIPGSHDSFSYWVDEKSPVGPDQTQAIKRLARISLVKKLMKKWSVTQNLTFREQLEAGIRYFDLRVSSKPGDADQEIYFIHGLFGIKVWDGLMEIDSFLTQHPQEIIFLDFNHFYAMDETHHKCLVLRIQEAFGNKLCPACSVESLTLRTLWEKNCQVLIFYHCPFYKQYPFLWPGKKIPAPWANTTSVRKLILFLETTLSERASRGSFHVSQAILTPRVKTIARGLVGGLKNTLVHREMWTQAHEENTM

SEQ ID NO: 6721 - protein, 1 aa, Artificial Sequence
  Synthetic polypeptide
C

SEQ ID NO: 6722 - protein, 1150 aa, Artificial Sequence
  Synthetic polypeptide
MKEPDDQDTDGEKSVTSKSDGKKSLRSSKSESRSPVQEDNTFLEDDTDETFTKGEGSYLEEDSDEERLEGSLSSFQYGDLQSTTVPQQTPAPAVEEAEEEVKKKISESFFYDYMELASMPFVTLDSNIPLDLLTLVHSFGYDCRKRANLQLLDDSIAIYIAGNQLIFLNLKTKEQIYLRSSSGEGIGVIGVHPHKTYFTVAEKGSFPDIIIYEYPSLRPYRVLRDGTEKGYAYVDFNYSGNLLASVGSNPDYTLTIWNWKEEQPILRTKAFSQEVFKVTFNPDKEEQLTTSGSGHIKFWEMAFTFTGLKLQGSLGRFGKTITTDIEGYMELPDGKVLSGSEWGNMLLWEGGLIKVELCRGTSKSCHNGPINQIMLYEGEVITVGSDGYVRIWDFETIDTADVIDETGLLEIEPINELQVDKNVNLFSMIKMNETGNNFWLAQDANGAIWKLDLSFSNITQDPECLFSFHSGAIEAVAVSPLTYLMATTALDCSVRIYDFASKTPLAQMKFKQGGTALVWVPRMVNFTGAQIIVGFEDGVVRILELYDPKGLTIFAGRKKILDADIQLKQVFKPHTACVTALAYERDGEILATGSKDQTVFFFEVERDYKPIGYINTPGPVCQLMWSPMSHPESTLLIICENGYILEAPLPTIKQEEDDHDVVSYEIKDMCIKCFHFSSVKSKILRLIEIEKRERQRELKEKIREERRNKLAAEMGEDGEKEFQEEEEEKEEEEEEEEPLPEIFIPSTPSPILCGFYSEPGKFWVSLGGYDSGFLYHCEFPPCDESSDFKEQKDEPIDVRYLADTEDNPIQTITFNINKVMMFCGMKNGAIRVYVLNQNDPSLTSLVDYWHFNMHDNNYGCIKSIANSFDDRFLVTAGADGNIFVFNIFSEFMLRKDMKAKVPSPRFGIETEPIPEDIEDPKAYSIENARRKREHDKLMKEVGEIKARKREQIKALRSEFCNLLEMNEKLPKHMQFKRTDFDVDSQIRAEMHRKTAFKIQQVEKELAWEKEKHELGLMKLKNRFRDPLESDTIVVHAILSDHKISSYRLVQPSKYSKFKRASQSERKPSKLDRFEKEGPGRKDSQRDAGGSVTIQEESIIEKGKKFRPKTLSEIIVENQIEKTRKLILKAERAQLKIQQRKKEWEELTYSK

SEQ ID NO: 6723 - protein, 1 aa, Artificial Sequence
  Synthetic polypeptide
C

SEQ ID NO: 6724 - protein, 1165 aa, Artificial Sequence
  Synthetic polypeptide
MKEPDDQDTDGEKSVTSKSDGKKSLRSSKSESRSPVQEDNTFLEDDTDETFTKGEGSYLEEDSDEERLEGSLSSFQYGDLQSTTVPQQTPAPAVEEAEEEVKKKISESFFYDYMELASMPFVTLDSNIPLDLLTLVHSFGYDCRKRANLQLLDDSIAIYIAGNQLIFLNLKTKEQIYLRSSSGEGIGVIGVHPHKTYFTVAEKGSFPDIIIYEYPSLRPYRVLRDGTEKGYAYVDFNYSGNLLASVGSNPDYTLTIWNWKEEQPILRTKAFSQEVFKVTFNPDKEEQLTTSGSGHIKFWEMAFTFTGLKLQGSLGRFGKTITTDIEGYMELPDGKVLSGSEWGNMLLWEGGLIKVELCRGTSKSCHNGPINQIMLYEGEVITVGSDGYVRIWDFETIDTADVIDETGLLEIEPINELQVDKNVNLFSMIKMNETGNNFWLAQDANGAIWKLDLSFSNITQDPECLFSFHSGAIEAVAVSPLTYLMATTALDCSVRIYDFASKTPLAQMKFKQGGTALVWVPRMVNFTGAQIIVGFEDGVVRILELYDPKGLTIFAGRKKILDADIQLKQVFKPHTACVTALAYERDGEILATGSKDQTVFFFEVERDYKPIGYINTPGPVCQLMWSPMSHPESTLLIICENGYILEAPLPTIKQEEDDHDVVSYEIKDMCIKCFHFSSVKSKILRLIEIEKRERQRELKEKIREERRNKLAAEMGEDGEKEFQEEEEEKEEEEEEEEPLPEIFIPSTPSPILCGFYSEPGKFWVSLGGYDSGFLYHCEFPPCDESSDFKEQKDEPIDVRYLADTEDNPIQTITFNINKVMMFCGMKNGAIRVYVLNQNDPSLTSLVDYWHFNMHDNNYGCIKSIANSFDDRFLVTAGADGNIFVFNIFSEFMLRKDMKAKVPSPRFGIETEPIPEDIEDPKAYSIENARRKREHDKLMKEVGEIKARKREQIKALRSEFCNLLEMNEKLPKHMQFKRTDFDVDSQIRAEMHRKTAFKIQQVEKELAWEKEKHELGLMKLKNRFRDPLESDTIVVHAILSDHKISSYRLVQPSKYSKFKRASQSERKPSKLDRFEKEGPGRKDSQRDAGGSVTIQEESIIEKGKKFRPKTLSEIIVENQIEKTRKLILKAERAQLKIQQRKKEWEELHCHGVGAPQPARLYAPLEV

SEQ ID NO: 6725 - protein, 641 aa, Artificial Sequence
  Synthetic polypeptide
MKEPDDQDTDGEKSVTSKSDGKKSLRSSKSESRSPVQEDNTFLEDDTDETFTKGEGSYLEEDSDEERLEGSLSSFQYGDLQSTTVPQQTPAPAVEEAEEEVKKKISESFFYDYMELASMPFVTLDSNIPLDLLTLVHSFGYDCRKRANLQLLDDSIAIYIAGNQLIFLNLKTKEQIYLRSSSGEGIGVIGVHPHKTYFTVAEKGSFPDIIIYEYPSLRPYRVLRDGTEKGYAYVDFNYSGNLLASVGSNPDYTLTIWNWKEEQPILRTKAFSQEVFKVTFNPDKEEQLTTSGSGHIKFWEMAFTFTGLKLQGSLGRFGKTITTDIEGYMELPDGKVLSGSEWGNMLLWEGGLIKVELCRGTSKSCHNGPINQIMLYEGEVITVGSDGYVRIWDFETIDTADVIDETGLLEIEPINELQVDKNVNLFSMIKMNETGNNFWLAQDANGAIWKLDLSFSNITQDPECLFSFHSGAIEAVAVSPLTYLMATTALDCSVRIYDFASKTPLAQMKFKQGGTALVWVPRMVNFTGAQIIVGFEDGVVRILELYDPKGLTIFAGRKKILDADIQLKQVFKPHTACVTALAYERDGEILATGSKDQTVFFFEVERDYKPIGYINTPGPVCQLMWSPMSHDFCNYNLHLFT

SEQ ID NO: 6726 - protein, 182 aa, Artificial Sequence
  Synthetic polypeptide
MEGAPTVRQVMNEGDSSLATDLQEDVEENPSPTVEENNVVVKKQGPNLHNWSGDWSFWISSSTYKDRNEEYRRQFTHLPDTERLIADYACALQRDILLQGRLYLSENWLCFYSNIFRWETTISIALKNITFMTKEKTARLIPNAIQIVTESEKFFFTSFGARDRSYLSIFRLWQNVLLDKKL

SEQ ID NO: 6727 - protein, 150 aa, Artificial Sequence
  Synthetic polypeptide
MEGAPTVRQVMNEGDSSLATDLQEDVEENPSPTVEENNVVVKKQGPNLHNWSGDWSFWISSSTYKDRNEEYRRQFTHLPDTERLIADYACALQRDILLQGRLYLSENWLCFYSNIFRWETTFFFTSFGARDRSYLSIFRLWQNVLLDKKL

SEQ ID NO: 6728 - protein, 397 aa, Artificial Sequence
  Synthetic polypeptide
MAAATGDPGLSKLQFAPFSSALDVGFWHELTQKKLNEYRLDEAPKDIKGYYYNGDSAGLPARLTLEFSAFDMSAPTPARCCPAIGTLYNTNTLESFKTADKKLLLEQAANEIWESIKSGTALENPVLLNKFLLLTFAIEALECAYDNLCQTEGVTALPYFLIKYDENMVLVSLLKHYSDFFQGQRTKITIGVYDPCNLAQYPGWPLRNFLVLAAHRWSSSFQSVEVVCFRDRTMQGARDVAHSIIFEVKLPEMAFSPDCPKAVGWEKNQKGGMGPRMVNLSECMDPKRLAESSVDLNLKLMCWRLVPTLDLDKVVSVKCLLLGAGTLGCNVARTLMGWGVRHITFVDNAKISYSNPVRQPLYEFEDCLGGGKPKALAAADRLQKIFPGVMPFKEGKN

SEQ ID NO: 6729 - protein, 436 aa, Artificial Sequence
  Synthetic polypeptide
MAAATGDPGLSKLQFAPFSSALDVGFWHELTQKKLNEYRLDEAPKDIKGYYYNGDSAGLPARLTLEFSAFDMSAPTPARCCPAIGTLYNTNTLESFKTADKKLLLEQAANEIWESIKSGTALENPVLLNKFLLLTFADLKKYHFYYWFCYPALCLPESLPLIQGPVGLDQRFSLKQIEALECAYDNLCQTEGVTALPYFLIKYDENMVLVSLLKHYSDFFQGQRTKITIGVYDPCNLAQYPGWPLRNFLVLAAHRWSSSFQSVEVVCFRDRTMQGARDVAHSIIFEVKLPEMAFSPDCPKAVGWEKNQKGGMGPRMVNLSECMDPKRLAESSVDLNLKLMCWRLVPTLDLDKVVSVKCLLLGAGTLGCNVARTLMGWGVRHITFVDNAKISYSNPVRQPLYEFEDCLGGGKPKALAAADRLQKIFPGVMPFKEGKN

SEQ ID NO: 6730 - protein, 265 aa, Artificial Sequence
  Synthetic polypeptide
MEWWASSPLRLWLLLFLLPSAQGRQKESGSKWKVFIDQINRSLENYEPCSSQNCSCYHGVIEEDLTPFRGGISRKMMAEVVRRKLGTHYQITKNRLYRENDCMFPSRCSGVEHFILEVIGRLPDMEMVINVRDYPQVPKWMEPAIPVFSFSKTSEYHDIMYPAWTFWEGGPAVWPIYPTGLGRWDLFREDLVRSAAQWPWKKKNSTAYFRGSRTSPERDPLILLSRKNPKLVDAEYTKNQAWKSMKSHTDLEQISTSKALASAFI

SEQ ID NO: 6731 - protein, 125 aa, Artificial Sequence
  Synthetic polypeptide
MEPEINCSELCDSFPGQELDRRPLHDLCKTTITSSHHSSKTISSLSPVLLGIVWTFLSCGLLLILFFLAFTIHCRKNRIRKKTRYPLSRLLFNTGGFSQCNKVRKINKSHLLFKKSKNENIFTLR

SEQ ID NO: 6732 - protein, 24 aa, Artificial Sequence
  Synthetic polypeptide
MWKRWLALALALVAVAWVRAELLT

SEQ ID NO: 6733 - protein, 28 aa, Artificial Sequence
  Synthetic polypeptide
MWKRWLALALALVAVAWVRAEFLKGTFQ

SEQ ID NO: 6734 - protein, 231 aa, Artificial Sequence
  Synthetic polypeptide
MASLDRVKVLVLGDSGVGKSSLVHLLCQNQVLGNPSWTVGCSVDVRVHDYKEGTPEEKTYYIELWDVGGSVGSASSVKSTRAVFYNSVNGIIFVHDLTNKKSSQNLRRWSLEALNRDLVPTGVLVTNGDYDQEQFADNQIPLLVIGTKLDQIHETKRHEVLTRTAFLAEDFNPEEINLDCTNPRYLAAGSSNAVKLSRFFDKVIEKRYFLREGASFVNLVMGEERKLFSAT

SEQ ID NO: 6735 - protein, 207 aa, Artificial Sequence
  Synthetic polypeptide
MASLDRVKVLVLGDSGVGKSSLVHLLCQNQVLGNPSWTVGCSVDVRVHDYKEGTPEEKTYYIELWDVGGSVGSASSVKSTRAVFYNSVNGIIFVHDLTNKKSSQNLRRWSLEALNRDLVPTGVLVTNGDYDQEQFADNQIPLLVIGTKLDQIHETKRHEVLTRTAFLAEDFNPEEINLVIEKRYFLREGASFVNLVMGEERKLFSAT

SEQ ID NO: 6736 - protein, 16 aa, Artificial Sequence
  Synthetic polypeptide
MASLDRVKVLVLGDSG

SEQ ID NO: 6737 - protein, 61 aa, Artificial Sequence
  Synthetic polypeptide
GVPGSGEGTGVGRLRLTRMKSQLHDTVEVQQDLQAQVYGWWQYNPMKVISQCISRTLNVSF

SEQ ID NO: 6738 - protein, 253 aa, Artificial Sequence
  Synthetic polypeptide
MKKFNFRKVLDGLTASSPGSGSSSGSNSGGGAGSGSVHPAGTAGVLREEIQETLTSEYFQICKTVRHGFPHQPTALAFDPVQKILAIGTRTGAIRILGRPGVDCYCQHESGAAVLQLQFLINEGALVSASSDDTLHLWNLRQKRPAILHSLKFNRERITYCHLPFQSKWLYVGTERGNTHIVNIESFILSGYVIMWNKAIELSTKTHPGPVVHLSDSPRDEGKVFRLRLAHHQLSWISCLPAHPADLGTCQPS

SEQ ID NO: 6739 - protein, 2604 aa, Artificial Sequence
  Synthetic polypeptide
MNLLRRSGKRRRSESGSDSFSGSGGDSSASPQFLSGSVLSPPPGLGRCLKAAAAGECKPTVPDYERDKLLLANWGLPKAVLEKYHSFGVKKMFEWQAECLLLGQVLEGKNLVYSAPTSAGKTLVAELLILKRVLEMRKKALFILPFVSVAKEKKYYLQSLFQEVGIKVDGYMGSTSPSRHFSSLDIAVCTIERANGLINRLIEENKMDLLGMVVVDELHMLGDSHRGYLLELLLTKICYITRKSASCQADLASSLSNAVQIVGMSATLPNLELVASWLNAELYHTDFRPVPLLESVKVGNSIYDSSMKLVREFEPMLQVKGDEDHVVSLCYETICDNHSVLLFCPSKKWCEKLADIIAREFYNLHHQAEGLVKPSECPPVILEQKELLEVMDQLRRLPSGLDSVLQKTVPWGVAFHHAGLTFEERDIIEGAFRQGLIRVLAATSTLSSGVNLPARRVIIRTPIFGGRPLDILTYKQMVGRAGRKGVDTVGESILICKNSEKSKGIALLQGSLKPVRSCLQRREGEEVTGSMIRAILEIIVGGVASTSQDMHTYAACTFLAASMKEGKQGIQRNQESVQLGAIEACVMWLLENEFIQSTEASDGTEGKVYHPTHLGSATLSSSLSPADTLDIFADLQRAMKGFVLENDLHILYLVTPMFEDWTTIDWYRFFCLWEKLPTSMKRVAELVGVEEGFLARCVKGKVVARTERQHRQMAIHKRFFTSLVLLDLISEVPLREINQKYGCNRGQIQSLQQSAAVYAGMITVFSNRLGWHNMELLLSQFQKRLTFGIQRELCDLVRVSLLNAQRARVLYASGFHTVADLARANIVEVEVILKNAVPFKSARKAVDEEEEAVEERRNMRTIWVTGRKGLTEREAAALIVEEARMILQQDLVEMGVQWNPCALLHSSTCSLTHSESEVKEHTFISQTKSSYKKLTSKNKSNTIFSDSYIKHSPNIVQDLNKSREHTSSFNCNFQNGNQEHQTCSIFRARKRASLDINKEKPGASQNEGKTSDKKVVQTFSQKTKKAPLNFNSEKMSRSFRSWKRRKHLKRSRDSSPLKDSGACRIHLQGQTLSNPSLCEDPFTLDEKKTEFRNSGPFAKNVSLSGKEKDNKTSFPLQIKQNCSWNITLTNDNFVEHIVTGSQSKNVTCQATSVVSEKGRGVAVEAEKINEVLIQNGSKNQNVYMKHHDIHPINQYLRKQSHEQTSTITKQKNIIERQMPCEAVSSYINRDSNVTINCERIKLNTEENKPSHFQALGDDISRTVIPSEVLPSAGAFSKSEGQHENFLNISRLQEKTGTYTTNKTKNNHVSDLGLVLCDFEDSFYLDTQSEKIIQQMATENAKLGAKDTNLAAGIMQKSLVQQNSMNSFQKECHIPFPAEQHPLGATKIDHLDLKTVGTMKQSSDSHGVDILTPESPIFHSPILLEENGLFLKKNEVSVTDSQLNSFLQGYQTQETVKPVILLIPQKRTPTGVEGECLPVPETSLNMSDSLLFDSFSDDYLVKEQLPDMQMKEPLPSEVTSNHFSDSLCLQEDLIKKSNVNENQDTHQQLTCSNDESIIFSEMDSVQMVEALDNVDIFPVQEKNHTVVSPRALELSDPVLDEHHQGDQDGGDQDERAEKSKLTGTRQNHSFIWSGASFDLSPGLQRILDKVSSPLENEKLKSMTINFSSLNRKNTELNEEQEVISNLETKQVQGISFSSNNEVKSKIEMLENNANHDETSSLLPRKESNIVDDNGLIPPTPIPTSASKLTFPGILETPVNPWKTNNVLQPGESYLFGSPSDIKNHDLSPGSRNGFKDNSPISDTSFSLQLSQDGLQLTPASSSSESLSIIDVASDQNLFQTFIKEWRCKKRFSISLACEKIRSLTSSKTATIGSRFKQASSPQEIPIRDDGFPIKGCDDTLVVGLAVCWGGRDAYYFSLQKEQKHSEISASLVPPSLDPSLTLKDRMWYLQSCLRKESDKECSVVIYDFIQSYKILLLSCGISLEQSYEDPKVACWLLDPDSQEPTLHSIVTSFLPHELPLLEGMETSQGIQSLGLNAGSEHSGRYRASVESILIFNSMNQLNSLLQKENLQDVFRKVEMPSQYCLALLELNGIGFSTAECESQKHIMQAKLDAIETQAYQLAGHSFSFTSSDDIAEVLFLELKLPPNREMKNQGSKKTLGSTRRGIDNGRKLRLGRQFSTSKDVLNKLKALHPLPGLILEWRRITNAITKVVFPLQREKCLNPFLGMERIYPVSQSHTATGRITFTEPNIQNVPRDFEIKMPTLVGESPPSQAVGKGLLPMGRGKYKKGFSVNPRCQAQMEERAADRGMPFSISMRHAFVPFPGGSILAADYSQLELRILAHLSHDRRLIQVLNTGADVFRSIAAEWKMIEPESVGDDLRQQAKQICYGIIYGMGAKSLGEQMGIKENDAACYIDSFKSRYTGINQFMTETVKNCKRDGFVQTILGRRRYLPGIKDNNPYRKAHAERQAINTIVQGSAADIVKIATVNIQKQLETFHSTFKSHGHREGMLQSDQTGLSRKRKLQGMFCPIRGGFFILQLHDELLYEVAEEDVVQGLYKREADGQSQGRCDNRNRERFEDATLLALKLEEGAMSQGMQEPSKNWKR

SEQ ID NO: 6740 - protein, 250 aa, Artificial Sequence
  Synthetic polypeptide
MNLLRRSGKRRRSESGSDSFSGSGGDSSASPQFLSGSVLSPPPGLGRCLKAAAAGECKPTVPDYERDKLLLANWGLPKAVLEKYHSFGVKKMFEWQAECLLLGQVLEGKNLVYSAPTSAGKTLVAELLILKRVLEMRKKALFILPFVSVAKEKKYYLQSLFQEVGIKVDGYMGSTSPSRHFSSLDIAVCTIERANGLINRLIEENKMDLLAKPHGCSWSHYPKPINAGTENQVPHVLTRKWELTFEYSWT

SEQ ID NO: 6741 - protein, 81 aa, Artificial Sequence
  Synthetic polypeptide
MDPQWKGNTQRKSGVKTQGEDGHPHTSQRERLATDSFLTTFRKNQPCGNPKFGLLASRKKINFFCLSHPSLWYFVTTAPAN

SEQ ID NO: 6742 - protein, 72 aa, Artificial Sequence
  Synthetic polypeptide
MTTPGKENFRLKSYKNKSLNPDEMRRRREEEGLQLRKQKREEQLTQLEDEKMKALMMIHFHFMNCNYIFSSL

SEQ ID NO: 6743 - protein, 19 aa, Artificial Sequence
  Synthetic polypeptide
MDFSMVAGAAAYNEKSEAL

SEQ ID NO: 6744 - protein, 33 aa, Artificial Sequence
  Synthetic polypeptide
MAAGSEATTPVIVAAGAGGEEATWMQMEAIILN

SEQ ID NO: 6745 - protein, 765 aa, Artificial Sequence
  Synthetic polypeptide
MSGSKSVSPPGYAAQKTAAPAPRGGPEHRSAWGEADSRANGYPHAPGGSARGSTKKPGGAVTPQQQQRLASRWRSDDDDDPPLSGDDPLAGGFGFSFRSKSAWQERGGDDCGRGSRRQRRGAASGGSTRAPPAGGGGGSAAAAASAGGTEVRPRSVEVGLEERRGKGRAADELEAGAVEGGEGSGDGGSSADSGSGAGPGAVLSLGACCLALLQIFRSKKFPSDKLERLYQRYFFRLNQSSLTMLMAVLVLVCLVMLAFHAARPPLQLPYLAVLAAAVGVILIMAVLCNRAAFHQDHMGLACYALIAVVLAVQVVGLLLPQPRSASEGIWWTVFFIYTIYTLLPVRMRAAVLSGVLLSALHLAIALRTNAQDQFLLKQLVSNVLIFSCTNIVGVCTHYPAEVSQRQAFQETRECIQARLHSQRENQQQERLLLSVLPRHVAMEMKADINAKQEDMMFHKIYIQKHDNVSILFADIEGFTSLASQCTAQELVMTLNELFARFDKLAAENHCLRIKILGDCYYCVSGLPEARADHAHCCVEMGMDMIEAISLVREVTGVNVNMRVGIHSGRVHCGVLGLRKWQFDVWSNDVTLANHMEAGGKAGRIHITKATLNYLNGDYEVEPGCGGERNAYLKEHSIETFLILRCTQKRKEEKAMIAKMNRQRTNSIGHNPPHWGAERPFYNHLGGNQVSKEMKRMGFEDPKDKNAQESANPEDEVDEFLGRAIDARSIDRLRSEHVRKFLLTFREPDLEKKRVDGMQSCTAMII

SEQ ID NO: 6746 - protein, 398 aa, Artificial Sequence
  Synthetic polypeptide
MAPSRFRTQLELVSNVLIFSCTNIVGVCTHYPAEVSQRQAFQETRECIQARLHSQRENQQQERLLLSVLPRHVAMEMKADINAKQEDMMFHKIYIQKHDNVSILFADIEGFTSLASQCTAQELVMTLNELFARFDKLAAENHCLRIKILGDCYYCVSGLPEARADHAHCCVEMGMDMIEAISLVREVTGVNVNMRVGIHSGRVHCGVLGLRKWQFDVWSNDVTLANHMEAGGKAGRIHITKATLNYLNGDYEVEPGCGGERNAYLKEHSIETFLILRCTQKRKEEKAMIAKMNRQRTNSIGHNPPHWGAERPFYNHLGGNQVSKEMKRMGFEDPKDKNAQESANPEDEVDEFLGRAIDARSIDRLRSEHVRKFLLTFREPDLEKKRVDGMQSCTAMII

SEQ ID NO: 6747 - protein, 415 aa, Artificial Sequence
  Synthetic polypeptide
MKSQKEGCCSRGDLSIQTGPGGEWAPRRLVSNVLIFSCTNIVGVCTHYPAEVSQRQAFQETRECIQARLHSQRENQQQERLLLSVLPRHVAMEMKADINAKQEDMMFHKIYIQKHDNVSILFADIEGFTSLASQCTAQELVMTLNELFARFDKLAAENHCLRIKILGDCYYCVSGLPEARADHAHCCVEMGMDMIEAISLVREVTGVNVNMRVGIHSGRVHCGVLGLRKWQFDVWSNDVTLANHMEAGGKAGRIHITKATLNYLNGDYEVEPGCGGERNAYLKEHSIETFLILRCTQKRKEEKAMIAKMNRQRTNSIGHNPPHWGAERPFYNHLGGNQVSKEMKRMGFEDPKDKNAQESANPEDEVDEFLGRAIDARSIDRLRSEHVRKFLLTFREPDLEKKRVDGMQSCTAMII

SEQ ID NO: 6748 - protein, 324 aa, Artificial Sequence
  Synthetic polypeptide
MEMKADINAKQEDMMFHKIYIQKHDNVSILFADIEGFTSLASQCTAQELVMTLNELFARFDKLAAENHCLRIKILGDCYYCVSGLPEARADHAHCCVEMGMDMIEAISLVREVTGVNVNMRVGIHSGRVHCGVLGLRKWQFDVWSNDVTLANHMEAGGKAGRIHITKATLNYLNGDYEVEPGCGGERNAYLKEHSIETFLILRCTQKRKEEKAMIAKMNRQRTNSIGHNPPHWGAERPFYNHLGGNQVSKEMKRMGFEDPKDKNAQESANPEDEVDEFLGRAIDARSIDRLRSEHVRKFLLTFREPDLEKKRVDGMQSCTAMII

SEQ ID NO: 6749 - protein, 110 aa, Artificial Sequence
  Synthetic polypeptide
MAAVAATAAAKGNGGGGGRAGAGDASGTRKKKGPGPLATAYLVIYNVVMTAGWLVIAVGLVRAYLAKGSYHSLYYSIEKPLKFFQTGALLEILHCAIEYEHPQFLTLLKT

SEQ ID NO: 6750 - protein, 618 aa, Artificial Sequence
  Synthetic polypeptide
MPRAPAPLYACLLGLCALLPRLAGLNICTSGSATSCEECLLIHPKCAWCSKEDFGSPRSITSRCDLRANLVKNGCGGEIESPASSFHVLRSLPLSSKGSGSAGWDVIQMTPQEIAVNLRPGDKTTFQLQVRQVEDYPVDLYYLMDLSLSMKDDLDNIRSLGTKLAEEMRKLTSNFRLGFGSFVDKDISPFSYTAPRYQTNPCIGYKLFPNCVPSFGFRHLLPLTDRVDSFNEEVRKQRVSRNRDAPEGGFDAVLQAAVCKEKIGWRKDALHLLVFTTDDVPHIALDGKLGGLVQPHDGQCHLNEANEYTASNQMDYPSLALLGEKLAENNINLIFAVTKNHYMLYKNFTALIPGTTVEILDGDSKNIIQLIINAYNSIRSKVELSVWDQPEDLNLFFTATCQDGVSYPGQRKCEGLKIGDTASFEVSLEARSCPSRHTEHVFALRPVGFRDSLEVGVTYNCTCGCSVGLEPNSARCNGSGTYVCGLCECSPGYLGTRCECQDGENQSVYQNLCREAEGKPLCSGRGDCSCNQCSCFESEFGKIYGPFCECDNFSCARNKGVLCSVHQAVTLVVLDFGFSCLLRWANTICFCIILRIEGEDRDEGPGLVLGREQDPVDV

SEQ ID NO: 6751 - protein, 36 aa, Artificial Sequence
  Synthetic polypeptide
ERMHCICWCSQQMMCPTSHWMENWEAWCSHTMASAT

SEQ ID NO: 6752 - protein, 346 aa, Artificial Sequence
  Synthetic polypeptide
IRSLGTKLAEEMRKLTSNFRLGFGSFVDKDISPFSYTAPRYQTNPCIGYKLFPNCVPSFGFRHLLPLTDRVDSFNEEVRKQRVSRNRDAPEGGFDAVLQAAVCKSIRSKVELSVWDQPEDLNLFFTATCQDGVSYPGQRKCEGLKIGDTASFEVSLEARSCPSRHTEHVFALRPVGFRDSLEVGVTYNCTCGCSVGLEPNSARCNGSGTYVCGLCECSPGYLGTRCECQDGENQSVYQNLCREAEGKPLCSGRGDCSCNQCSCFESEFGKIYGPFCECDNFSCARNKGVLCSVHQAVTLVVLDFGFSCLLRWANTICFCIILRIEGEDRDEGPGLVLGREQDPVDV

SEQ ID NO: 6753 - protein, 315 aa, Artificial Sequence
  Synthetic polypeptide
MPRAPAPLYACLLGLCALLPRLAGLNICTSGSATSCEECLLIHPKCAWCSKEDFGSPRSITSRCDLRANLVKNGCGGEIESPASSFHVLRSLPLSSKGSGSAGWDVIQMTPQEIAVNLRPGDKTTFQLQVRQVEDYPVDLYYLMDLSLSMKDDLDNIRSLGTKLAEEMRKLTSNFRLGFGSFVDKDISPFSYTAPRYQTNPCIGYKLFPNCVPSFGFRHLLPLTDRVDSFNEEVRKQRVSRNRDAPEGGFDAVLQAAVCKISASLSVCQRSPPWWTSLSRSGCPGSRQALNHFCPSYHLIFIYLKHSWNACLPLR

SEQ ID NO: 6754 - protein, 159 aa, Artificial Sequence
  Synthetic polypeptide
IRSLGTKLAEEMRKLTSNFRLGFGSFVDKDISPFSYTAPRYQTNPCIGYKLFPNCVPSFGFRHLLPLTDRVDSFNEEVRKQRVSRNRDAPEGGFDAVLQAAVCKISASLSVCQRSPPWWTSLSRSGCPGSRQALNHFCPSYHLIFIYLKHSWNACLPLR

SEQ ID NO: 6755 - protein, 27 aa, Artificial Sequence
  Synthetic polypeptide
LQVVSKLRPLLWVPPSAASHRQSGQLQ

SEQ ID NO: 6756 - protein, 435 aa, Artificial Sequence
  Synthetic polypeptide
MTMVDTEMPFWPTNFGISSVDLSVMEDHSHSFDIKPFTTVDFSSISTPHYEDIPFTRTDPVVADYKYDLKLQEYQSAIKVEPASPPYYSEKTQLYNKPHEEPSNSLMAIECRVCGDKASGFHYGVHACEGCKGFFRRTIRLKLIYDRCDLNCRIHKKSRNKCQYCRFQKCLAVGMSHNAIRFGRMPQAEKEKLLAEISSDIDQLNPESADLRALAKHLYDSYIKSFPLTKAKARAILTGKTTDKSPFVIYDMNSLMMGEDKIKFKHITPLQEQSKEVAIRIFQGCQFRSVEAVQEITEYAKSIPGFVNLDLNDQVTLLKYGVHEIIYTMLASLMNKDGVLISEGQGFMTREFLKSLRKPFGDFMEPKFEFAVKFNALELDDSDLAIFIAVIILSGGRGTRSMHTQGRRTCEDTARRQLSASPGESPPQRPALLPP

SEQ ID NO: 6757 - protein, 441 aa, Artificial Sequence
  Synthetic polypeptide
MKGFSEMTMVDTEMPFWPTNFGISSVDLSVMEDHSHSFDIKPFTTVDFSSISTPHYEDIPFTRTDPVVADYKYDLKLQEYQSAIKVEPASPPYYSEKTQLYNKPHEEPSNSLMAIECRVCGDKASGFHYGVHACEGCKGFFRRTIRLKLIYDRCDLNCRIHKKSRNKCQYCRFQKCLAVGMSHNAIRFGRMPQAEKEKLLAEISSDIDQLNPESADLRALAKHLYDSYIKSFPLTKAKARAILTGKTTDKSPFVIYDMNSLMMGEDKIKFKHITPLQEQSKEVAIRIFQGCQFRSVEAVQEITEYAKSIPGFVNLDLNDQVTLLKYGVHEIIYTMLASLMNKDGVLISEGQGFMTREFLKSLRKPFGDFMEPKFEFAVKFNALELDDSDLAIFIAVIILSGGRGTRSMHTQGRRTCEDTARRQLSASPGESPPQRPALLPP

SEQ ID NO: 6758 - protein, 463 aa, Artificial Sequence
  Synthetic polypeptide
MGETLGDSPIDPESDSFTDTLSANISQEMTMVDTEMPFWPTNFGISSVDLSVMEDHSHSFDIKPFTTVDFSSISTPHYEDIPFTRTDPVVADYKYDLKLQEYQSAIKVEPASPPYYSEKTQLYNKPHEEPSNSLMAIECRVCGDKASGFHYGVHACEGCKGFFRRTIRLKLIYDRCDLNCRIHKKSRNKCQYCRFQKCLAVGMSHNAIRFGRMPQAEKEKLLAEISSDIDQLNPESADLRALAKHLYDSYIKSFPLTKAKARAILTGKTTDKSPFVIYDMNSLMMGEDKIKFKHITPLQEQSKEVAIRIFQGCQFRSVEAVQEITEYAKSIPGFVNLDLNDQVTLLKYGVHEIIYTMLASLMNKDGVLISEGQGFMTREFLKSLRKPFGDFMEPKFEFAVKFNALELDDSDLAIFIAVIILSGGRGTRSMHTQGRRTCEDTARRQLSASPGESPPQRPALLPP

SEQ ID NO: 6759 - protein, 435 aa, Artificial Sequence
  Synthetic polypeptide
MEQAPPDPERQLQPAPLEPLGSPDAGLGAAVGKEAEGAGEESSGVDTMTHNNFWLKKIEISVSEAEKRTGRNAMNMQETYTAYLIETRSVEHTDGQSVLTDSLWRRYSEFELLRSYLLVYYPHIVVPPLPEKRAEFVWHKLSADNMDPDFVERRRIGLENFLLRIASHPILCRDKIFYLFLTQEGNWKETVNETGFQLKADSRLKALNATFRVKNPDKRFTDLKHYSDELQSVISHLLRVRARVADRLYGVYKVHGNYGRVFSEWSAIEKEMGDGLQSAGHHMDVYASSIDDILEDEEHYADQLKEYLFYAEALRAVCRKHELMQYDLEMAAQDLASKKQQCEELVTGTVRTFSLKGMTTKLFGQETPEQREARIKVLEEQINEGEQQLKSKNLEGREFVKNAWADIERFKEQKNRDLKEALISYAVMQISMCKK

SEQ ID NO: 6760 - protein, 290 aa, Artificial Sequence
  Synthetic polypeptide
MDPDFVERRRIGLENFLLRIASHPILCRDKIFYLFLTQEGNWKETVNETGFQLKADSRLKALNATFRVKNPDKRFTDLKHYSDELQSVISHLLRVRARVADRLYGVYKVHGNYGRVFSEWSAIEKEMGDGLQSAGHHMDVYASSIDDILEDEEHYADQLKEYLFYAEALRAVCRKHELMQYDLEMAAQDLASKKQQCEELVTGTVRTFSLKGMTTKLFGQETPEQREARIKVLEEQINEGEQQLKSKNLEGREFVKNAWADIERFKEQKNRDLKEALISYAVMQISMCKK

SEQ ID NO: 6761 - protein, 299 aa, Artificial Sequence
  Synthetic polypeptide
MEQAPPDPERQLQPAPLEPLGSPDAGLGAAVGKEAEGAGEESSGVDTMTHNNFWLKKIEISVSEAEKRTGRNAMNMQETYTAYLIETRSVEHTDGQSVLTDSLWRRYSEFELLRSYLLVYYPHIVVPPLPEKRAEFVWHKLSADNMDPDFVERRRIGLENFLLRIASHPILCRDKIFYLFLTQEGNWKETVNETGFQLKADSRLKALNATFRVKNPDKRFTDLKHYSDELQSVISHLLRVRARVADRLYGVYKVHGNYGRVFSEWSAIEKEMGDGLQSAGHHMDVMKMKTLKVCSFPYM

SEQ ID NO: 6762 - protein, 154 aa, Artificial Sequence
  Synthetic polypeptide
MDPDFVERRRIGLENFLLRIASHPILCRDKIFYLFLTQEGNWKETVNETGFQLKADSRLKALNATFRVKNPDKRFTDLKHYSDELQSVISHLLRVRARVADRLYGVYKVHGNYGRVFSEWSAIEKEMGDGLQSAGHHMDVMKMKTLKVCSFPYM

SEQ ID NO: 6763 - protein, 101 aa, Artificial Sequence
  Synthetic polypeptide
MAEAVFHAPKRKRRVYETYESPLPIPFGQDHGPLKEFKIFRAEMINNNVIVRNAEDIEQLYGKGYFGKGILSRSRPSFTISDPKLVAKWKGIYLNNTLTKI

SEQ ID NO: 6764 - protein, 28 aa, Artificial Sequence
  Synthetic polypeptide
MSTKQITCRWDHLVAEKQAQCSTDSTLW

SEQ ID NO: 6765 - protein, 765 aa, Artificial Sequence
  Synthetic polypeptide
MDLPALLPAPTARGGQHGGGPGPLRRAPAPLGASPARRRLLLVRGPEDGGPGARPGEASGPSPPPAEDDSDGDSFLVLLEVPHGGAAAEAAGSQEAEPGSRVNLASRPEQGPSGPAAPPGPGVAPAGAVTISSQDLLVRLDRGVLALSAPPGPATAGAAAPRRAPQASGPSTPGYRCPEPQCALAFAKKHQLKVHLLTHGGGQGRRPFKCPLEGCGWAFTTSYKLKRHLQSHDKLRPFGCPVGGCGKKFTTVYNLKAHMKGHEQESLFKCEVCAERFPTHAKLSSHQRSHFEPERPYKCDFPGCEKTFITVSALFSHNRAHFREQELFSCSFPGCSKQYDKACRLKIHLRSHTGERPFICDSDSCGWTFTSMSKLLRHRRKHDDDRRFTCPVEGCGKSFTRAEHLKGHSITHLGTKPFECPVEGCCARFSARSSLYIHSKKHVQDVGAPKSRCPVSTCNRLFTSKHSMKAHMVRQHSRRQDLLPQLEAPSSLTPSSELSSPGQSELTNMDLAALFSDTPANASGSAGGSDEALNSGILTIDVTSVSSSLGGNLPANNSSLGPMEPLVLVAHSDIPPSLDSPLVLGTAATVLQQGSFSVDDVQTVSAGALGCLVALPMKNLSDDPLALTSNSNLAAHITTPTSSSTPRENASVPELLAPIKVEPDSPSRPGAVGQQEGSHGLPQSTLPSPAEQHGAQDTELSAGTGNFYLESGGSARTDYRAIQLAKEKKQRGAGSNAGNPRDLCEAAHAAAAQCGTVYNICNSNV

SEQ ID NO: 6766 - protein, 6 aa, Artificial Sequence
  Synthetic polypeptide
RAPLQV

SEQ ID NO: 6767 - protein, 720 aa, Artificial Sequence
  Synthetic polypeptide
MDLPALLPAPTARGGQHGGGPGPLRRAPAPLGASPARRRLLLVRGPEDGGPGARPGEASGPSPPPAEDDSDGDSFLVLLEVPHGGAAAEAAGSQEAEPGSRVNLASRPEQGPSGPAAPPGPGVAPAGAVTISSQDLLVRLDRGVLALSAPPGPATAGAAAPRRAPQASGPSTPGYRCPEPQCALAFAKKHQLKVHLLTHGGGQGRRPFKCPLEGCGWAFTTSYKLKRHLQSHDKLRPFGCPVGGCGKKFTTVYNLKAHMKGHEQESLFKCEVCAERFPTHAKLSSHQRSHFEPERPYKCDFPGCEKTFITVSALFSHNRAHFREQELFSCSFPGCSKQYDKACRLKIHLRSHTGERPFICDSDSCGWTFTSMSKLLRHRRKHDDDRRFTCPVEGCGKSFTRAEHLKGHSITHLGTKPFECPVEGCCARFSARSSLYIHSKKHVQDVGAPKSRCPVSTCNRLFTSKHSMKAHMVRQHSRRQDLLPQLEAPSSLTPSSELSSPGQSELTNMDLAALFSDTPANASGSAGGSDEALNSGILTIDVTSVSSSLGGNLPANNSSLGPMEPLVLVAHSDIPPSLDSPLVLGTAATVLQQGSFSVDDVQTVSAGALGCLVALPMKNLSDDPLALTSNSNLAAHITTPTSSSTPRENASVPELLAPIKVEPDSPSRPGAVGQQEGSHGLPQSTLPSPAEQHGAQDTELSAGTGNFYLLCDVGLPRFSE

SEQ ID NO: 6768 - protein, 486 aa, Artificial Sequence
  Synthetic polypeptide
MDLPALLPAPTARGGQHGGGPGPLRRAPAPLGASPARRRLLLVRGPEDGGPGARPGEASGPSPPPAEDDSDGDSFLVLLEVPHGGAAAEAAGSQEAEPGSRVNLASRPEQGPSGPAAPPGPGVAPAGAVTISSQDLLVRLDRGVLALSAPPGPATAGAAAPRRAPQASGPSTPGYRCPEPQCALAFAKKHQLKVHLLTHGGGQGRRPFKCPLEGCGWAFTTSYKLKRHLQSHDKLRPFGCPVGGCGKKFTTVYNLKAHMKGHEQESLFKCEVCAERFPTHAKLSSHQRSHFEPERPYKCDFPGCEKTFITVSALFSHNRAHFREQELFSCSFPGCSKQYDKACRLKIHLRSHTGERPFICDSDSCGWTFTSMSKLLRHRRKHDDDRRFTCPVEGCGKSFTRAEHLKGHSITHLGTKPFECPVEGCCARFSARSSLYIHSKKHVQDVGAPKSRCPVSTCNRLFTSKHSMKAHMVRQHSRRQVVSPGE

SEQ ID NO: 6769 - protein, 6 aa, Artificial Sequence
  Synthetic polypeptide
RAPLQV

SEQ ID NO: 6770 - protein, 16 aa, Artificial Sequence
  Synthetic polypeptide
PHCPGRGAVVASSPQG

SEQ ID NO: 6771 - protein, 184 aa, Artificial Sequence
  Synthetic polypeptide
MGSTESSEGRRVSFGVDEEERVRVLQGVRLSENVVNRMKEPSSPPPAPTSSTFGLQDGNLRAPHKESTLPRSGSSGGQQPSGMKEGVKRYEQEHAAIQDKLFQVAKREREAATKHSKASLPTGEGSISHEEQKSVRLVNRRSFRIGLNVPSFKKLSMPSGAGEVFPCMDPHGSWTFALPGLALC

SEQ ID NO: 6772 - protein, 16 aa, Artificial Sequence
  Synthetic polypeptide
PHCPGRGAVVASSPQG

SEQ ID NO: 6773 - protein, 145 aa, Artificial Sequence
  Synthetic polypeptide
MGSTESSEGRRVSFGVDEEERVRVLQGVRLSENVVNRMKEPSSPPPAPTSSTFGLQDGNLRAPHKESTLPRSGSSGGQQPSGMKEGVKRYEQEHAAIQDKLFQVAKREREAATKHSKASLPTGEGSISHEEQKSVRLSKKVAVCK

SEQ ID NO: 6774 - protein, 16 aa, Artificial Sequence
  Synthetic polypeptide
PHCPGRGAVVASSPQG

SEQ ID NO: 6775 - protein, 186 aa, Artificial Sequence
  Synthetic polypeptide
MGSTESSEGRRVSFGVDEEERVRVLQGVRLSENVVNRMKEPSSPPPAPTSSTFGLQDGNLRAPHKESTLPRSGSSGGQQPSGMKEGVKRYEQEHAAIQDKLFQVAKREREAATKHSKASLPTGEGSISHEEQKSVRLARELESREAELRRRDTFYKEQLERIERKASSICELVHLCVSPSSVSCAN

SEQ ID NO: 6776 - protein, 187 aa, Artificial Sequence
  Synthetic polypeptide
MGSTESSEGRRVSFGVDEEERVRVLQGVRLSENVVNRMKEPSSPPPAPTSSTFGLQDGNLRAPHKESTLPRSGSSGGQQPSGMKEGVKRYEQEHAAIQDKLFQVAKREREAATKHSKASLPTGEGSISHEEQKSVRLQARELESREAELRRRDTFYKEQLERIERKASSICELVHLCVSPSSVSCAN

SEQ ID NO: 6777 - protein, 110 aa, Artificial Sequence
  Synthetic polypeptide
MAGRRVNVNVGVLGHIDSGKTALARALSTTASTAAFDKQPQSRERGITLDLGFSCFSVPLPARLRSSLPEFQAAPEAEPEPGEPLLQVTLVDCPGHASLIRTIIGGLPIP

SEQ ID NO: 6778 - protein, 110 aa, Artificial Sequence
  Synthetic polypeptide
MAGRRVNVNVGVLGHIDSGKTALARALSTTASTAAFDKQPQSRERGITLDLGFSCFSVPLPARLRSSLPEFQAAPEAEPEPGEPLLQVTLVDCPGHASLIRTIIGGNNLK

SEQ ID NO: 6779 - protein, 279 aa, Artificial Sequence
  Synthetic polypeptide
MAGRRVNVNVGVLGHIDSGKTALARALSTTASTAAFDKQPQSRERGITLDLGFSCFSVPLPARLRSSLPEFQAAPEAEPEPGEPLLQVTLVDCPGHASLIRTIIGGAQIIDLMMLVIDVTKGMQTQSAECLVIGQIACQKLVVVLNKIDLLPEGKRQAAIDKMTKKMQKTLENTKFRGAPIIPVAAKPGGPEAPETEAPQGIPELIELLTSQISIPTRDPSGPFLMSVDHCFSIKGQGTVMTGTILSGSISLGDSVEIPALKSLGLVLREGCYPRVERM

SEQ ID NO: 6780 - protein, 109 aa, Artificial Sequence
  Synthetic polypeptide
MEAPAAGLFLLLLLGTWAPAPGSASSEAPPLINEDVKRTVDLSSHLAKVTAEVVLAHLGGGSTSRATSFLLALEPELEARLAHLGVQVKGEDEEENNLEVRETKIKGKR

SEQ ID NO: 6781 - protein, 58 aa, Artificial Sequence
  Synthetic polypeptide
MSGCGLFLRTTAAARACRGLVVSTANRRLLRTSPPVRAFAKELFLGKIKKMCCRAPVR

SEQ ID NO: 6782 - protein, 71 aa, Artificial Sequence
  Synthetic polypeptide
MDSLLPPSRFSYFKKYPLHAIRRYLSTLRNQRAEEQEIATATSTFSNHRPDQSIAINVKARSPTSQNIMTH

SEQ ID NO: 6783 - protein, 8 aa, Artificial Sequence
  Synthetic polypeptide
MKNWKKLL

SEQ ID NO: 6784 - protein, 294 aa, Artificial Sequence
  Synthetic polypeptide
MIPVLTSKKASELPVSEVASILQADLQNGLNKCEVSHRRAFHGWNEFDISEDEPLWKKYISQFKNPLIMLLLASAVISVLMHQFDDAVSITVAILIVVTVAFVQEYRSEKSLEELSKLVPPECHCVREGKLEHTLARDLVPGDTVCLSVGDRVPADLRLFEAVDLSIDESSLTGETTPCSKVTAPQPAATNGDLASRSNIAFMGTLVRCGKAKGVVIGTGENSEFGEVFKMMQAEEAPKTPLQKSMDLLGKQLSFYSFGIIGIIMLVGWLLGKDILEMFTISVRNYFNNYLQEC

SEQ ID NO: 6785 - protein, 255 aa, Artificial Sequence
  Synthetic polypeptide
MIPVLTSKKASELPVSEVASILQFKNPLIMLLLASAVISVLMHQFDDAVSITVAILIVVTVAFVQEYRSEKSLEELSKLVPPECHCVREGKLEHTLARDLVPGDTVCLSVGDRVPADLRLFEAVDLSIDESSLTGETTPCSKVTAPQPAATNGDLASRSNIAFMGTLVRCGKAKGVVIGTGENSEFGEVFKMMQAEEAPKTPLQKSMDLLGKQLSFYSFGIIGIIMLVGWLLGKDILEMFTISVRNYFNNYLQEC

SEQ ID NO: 6786 - protein, 344 aa, Artificial Sequence
  Synthetic polypeptide
MDSLLPPSRFSYFKKYPLHAIRRYLSTLRNQRAEEQVARFQKIPNGENETMIPVLTSKKASELPVSEVASILQADLQNGLNKCEVSHRRAFHGWNEFDISEDEPLWKKYISQFKNPLIMLLLASAVISVLMHQFDDAVSITVAILIVVTVAFVQEYRSEKSLEELSKLVPPECHCVREGKLEHTLARDLVPGDTVCLSVGDRVPADLRLFEAVDLSIDESSLTGETTPCSKVTAPQPAATNGDLASRSNIAFMGTLVRCGKAKGVVIGTGENSEFGEVFKMMQAEEAPKTPLQKSMDLLGKQLSFYSFGIIGIIMLVGWLLGKDILEMFTISVRNYFNNYLQEC

SEQ ID NO: 6787 - protein, 305 aa, Artificial Sequence
  Synthetic polypeptide
MDSLLPPSRFSYFKKYPLHAIRRYLSTLRNQRAEEQVARFQKIPNGENETMIPVLTSKKASELPVSEVASILQFKNPLIMLLLASAVISVLMHQFDDAVSITVAILIVVTVAFVQEYRSEKSLEELSKLVPPECHCVREGKLEHTLARDLVPGDTVCLSVGDRVPADLRLFEAVDLSIDESSLTGETTPCSKVTAPQPAATNGDLASRSNIAFMGTLVRCGKAKGVVIGTGENSEFGEVFKMMQAEEAPKTPLQKSMDLLGKQLSFYSFGIIGIIMLVGWLLGKDILEMFTISVRNYFNNYLQEC

SEQ ID NO: 6788 - protein, 310 aa, Artificial Sequence
  Synthetic polypeptide
MKVARFQKIPNGENETMIPVLTSKKASELPVSEVASILQADLQNGLNKCEVSHRRAFHGWNEFDISEDEPLWKKYISQFKNPLIMLLLASAVISVLMHQFDDAVSITVAILIVVTVAFVQEYRSEKSLEELSKLVPPECHCVREGKLEHTLARDLVPGDTVCLSVGDRVPADLRLFEAVDLSIDESSLTGETTPCSKVTAPQPAATNGDLASRSNIAFMGTLVRCGKAKGVVIGTGENSEFGEVFKMMQAEEAPKTPLQKSMDLLGKQLSFYSFGIIGIIMLVGWLLGKDILEMFTISVRNYFNNYLQEC

SEQ ID NO: 6789 - protein, 49 aa, Artificial Sequence
  Synthetic polypeptide
TNVKLVIGEPFMAGMSLILVKMSHCGRSIFLSLKIPLLCCFWLLQSSVF

SEQ ID NO: 6790 - protein, 49 aa, Artificial Sequence
  Synthetic polypeptide
MDLLGKQLSFYSFGIIGIIMLVGWLLGKDILEMFTISVRNYFNNYLQEC

SEQ ID NO: 6791 - protein, 70 aa, Artificial Sequence
  Synthetic polypeptide
MLKFQEAAKCVSGSTAISTYPKTLIARRYVLQQKLGSGSFGTVYLVSDKKAKRGEELTSPRRTANHCSMK

SEQ ID NO: 6792 - protein, 470 aa, Artificial Sequence
  Synthetic polypeptide
MLKFQEAAKCVSGSTAISTYPKTLIARRYVLQQKLGSGSFGTVYLVSDKKAKRGEELKVLKEISVGELNPNETVQANLEAQLLSKLDHPAIVKFHASFVEQDNFCIITEYCEGRDLDDKIQEYKQAGKIFPENQIIEWFIQLLLGVDYMHERRILHRDLKSKNVFLKNNLLKIGDFGVSRLLMGSCDLATTLTGTPHYMSPEALKHQGYDTKSDIWSLACILYEMCCMNHAFAGSNFLSIVLKIVEGDTPSLPERYPKELNAIMESMLNKNPSLRPSAIEILKIPYLDEQLQNLMCRYSEMTLEDKNLDCQKEAAHIINAMQKRIHLQTLRALSEVQKMTPRERMRLRKLQAADEKARKLKKIVEEKYEENSKRMQELRSRNFQQLSVDVLHEKTHLKGMEEKEEQPEGRLSCSPQDEDEERWQGREEESDEPTLENLPESQPIPSMDLHELESIVEDATSDLGYHDSSY

SEQ ID NO: 6793 - protein, 365 aa, Artificial Sequence
  Synthetic polypeptide
MLKFQEAAKCVSGSTAISTYPKTLIARRYVLQQKLGSGSFGTVYLVSDKKAKRGEELKVLKEISVGELNPNETVQANLEAQLLSKLDHPAIVKFHASFVEQDNFCIITEYCEGRDLDDKIQEYKQAGKIFPENQIIEWFIQLLLGVDYMHERRILHRDLKSKNVFLKNNLLKIGDFGVSRLLMGSCDLATTLTGTPHYMSPEALKHQGYDTKSDIWQKRIHLQTLRALSEVQKMTPRERMRLRKLQAADEKARKLKKIVEEKYEENSKRMQELRSRNFQQLSVDVLHEKTHLKGMEEKEEQPEGRLSCSPQDEDEERWQGREEESDEPTLENLPESQPIPSMDLHELESIVEDATSDLGYHDSSY

SEQ ID NO: 6794 - protein, 286 aa, Artificial Sequence
  Synthetic polypeptide
MHERRILHRDLKSKNVFLKNNLLKIGDFGVSRLLMGSCDLATTLTGTPHYMSPEALKHQGYDTKSDIWSLACILYEMCCMNHAFAGSNFLSIVLKIVEGDTPSLPERYPKELNAIMESMLNKNPSLRPSAIEILKIPYLDEQLQNLMCRYSEMTLEDKNLDCQKEAAHIINAMQKRIHLQTLRALSEVQKMTPRERMRLRKLQAADEKARKLKKIVEEKYEENSKRMQELRSRNFQQLSVDVLHESDEPTLENLPESQPIPSMDLHELESIVEDATSDLGYHDSSY

SEQ ID NO: 6795 - protein, 206 aa, Artificial Sequence
  Synthetic polypeptide
MASADSRRVADGGGAGGTFQPYLDTLRQELQQTDPTLLSVVVAVLAVLLTLVFWKLIRSRRSSQRAVLLVGLCDSGKTLLFVRLLTGLYRDTQTSITDSCAVYRVNNNRGNSLTLIDLPGHESLRLQFLERFKSSARAIVFVVDSAAFQREVKDVAEFLYQVLIDSMGLKNTPSFLIACNKQDIAMAKSAKLIQQQLEKELTILPA

SEQ ID NO: 6796 - protein, 1 aa, Artificial Sequence
  Synthetic polypeptide
V

SEQ ID NO: 6797 - protein, 1752 aa, Artificial Sequence
  Synthetic polypeptide
MAARGRGLLLLTLSVLLAAGPSAAAAKLNIPKVLLPFTRATRVNFTLEASEGCYRWLSTRPEVASIEPLGLDEQQCSQKAVVQARLTQPARLTSIIFAEDITTGQVLRCDAIVDLIHDIQIVSTTRELYLEDSPLELKIQALDSEGNTFSTLAGLVFEWTIVKDSEADRFSDSHNALRILTFLESTYIPPSYISEMEKAAKQGDTILVSGMKTGSSKLKARIQEAVYKNVRPAEVRLLILENILLNPAYDVYLMVGTSIHYKVQKIRQGKITELSMPSDQYELQLQNSIPGPEGDPARPVAVLAQDTSMVTALQLGQSSLVLGHRSIRMQGASRLPNSTIYVVEPGYLGFTVHPGDRWVLETGRLYEITIEVFDKFSNKVYVSDNIRIETVLPAEFFEVLSSSQNGSYHRIRALKRGQTAIDAALTSVVDQDGGVHILQVPVWNQQEVEIHIPITLYPSILTFPWQPKTGAYQYTIRAHGGSGNFSWSSSSHLVATVTVKGVMTTGSDIGFSVIQAHDVQNPLHFGEMKVYVIEPHSMEFAPCQVEARVGQALELPLRISGLMPGGASEVVTLSDCSHFDLAVEVENQGVFQPLPGRLPPGSEHCSGIRVKAEAQGSTTLLVSYRHGHVHLSAKITIAAYLPLKAVDPSSVALVTLGSSKEMLFEGGPRPWILEPSKFFQNVTAEDTDSIGLALFAPHSSRNYQQHWILVTCQALGEQVIALSVGNKPSLTNPFPAVEPAVVKFVCAPPSRLTLAPVYTSPQLDMSCPLLQQNKQVVPVSSHRNPRLDLAAYDQEGRRFDNFSSLSIQWESTRPVLASIEPELPMQLVSQDDESGQKKLHGLQAILVHEASGTTAITATATGYQESHLSSARTKQPHDPLVPLSASIELILVEDVRVSPEEVTIYNHPGIQAELRIREGSGYFFLNTSTADVVKVAYQEARGVAMVHPLLPGSSTIMIHDLCLVFPAPAKAVVYVSDIQELYIRVVDKVEIGKTVKAYVRVLDLHKKPFLAKYFPFMDLKLRAASPIITLVALDEALDNYTITFLIRGVAIGQTSLTASVTNKAGQRINSAPQQIEVFPPFRLMPRKVTLLIGATMQVTSEGGPQPQSNILFSISNESVALVSAAGLVQGLAIGNGTVSGLVQAVDAETGKVVIISQDLVQVEVLLLRAVRIRAPIMRMRTGTQMPIYVTGITNHQNPFSFGNAVPGLTFHWSVTKRDVLDLRGRHHEASIRLPSQYNFAMNVLGRVKGRTGLRVVVKAVDPTSGQLYGLARELSDEIQVQVFEKLQLLNPEIEAEQILMSPNSYIKLQTNRDGAASLSYRVLDGPEKVPVVHVDEKGFLASGSMIGTSTIEVIAQEPFGANQTIIVAVKVSPVSYLRVSMSPVLHTQNKEALVAVPLGMTVTFTVHFHDNSGDVFHAHSSVLNFATNRDDFVQIGKGPTNNTCVVRTVSVGLTLLRVWDAEHPGLSDFMPLPVLQAISPELSGAMVVGDVLCLATVLTSLEGLSGTWSSSANSILHIDPKTGVAVARAVGSVTVYYEVAGHLRTYKEVVVSVPQRIMARHLHPIQTSFQEATASKVIVAVGDRSSNLRGECTPTQREVIQALHPETLISCQSQFKPAVFDFPSQDVFTVEPQFDTALGQYFCSITMHRLTDKQRKHLSMKKTALVVSASLSSSHFSTEQVGAEVPFSPGLFADQAEILLSNHYTSSEIRVFGAPEVLENLEHCCCLSGCVIVLIVLTAAGLPQLQVKLVGA

SEQ ID NO: 6798 - protein, 1551 aa, Artificial Sequence
  Synthetic polypeptide
MAARGRGLLLLTLSVLLAAGPSAAAAKLNIPKVLLPFTRATRVNFTLEASEGCYRWLSTRPEVASIEPLGLDEQQCSQKAVVQARLTQPARLTSIIFAEDITTGQVLRCDAIVDLIHDIQIVSTTRELYLEDSPLELKIQALDSEGNTFSTLAGLVFEWTIVKDSEADRFSDSHNALRILTFLESTYIPPSYISEMEKAAKQGDTILVSGMKTGSSKLKARIQEAVYKNVRPAEVRLLILENILLNPAYDVYLMVGTSIHYKVQKIRQGKITELSMPSDQYELQLQNSIPGPEGDPARPVAVLAQDTSMVTALQLGQSSLVLGHRSIRMQGASRLPNSTIYVVEPGYLGFTVHPGDRWVLETGRLYEITIEVFDKFSNKVYVSDNIRIETVLPAEFFEVLSSSQNGSYHRIRALKRGQTAIDAALTSVVDQDGGVHILQVPVWNQQEVEIHIPITLYPSILTFPWQPKTGAYQYTIRAHGGSGNFSWSSSSHLVATVTVKGVMTTGSDIGFSVIQAHDVQNPLHFGEMKVYVIEPHSMEFAPCQVEARVGQALELPLRISGLMPGGASEVVTLSDCSHFDLAVEVENQGVFQPLPGRLPPGSEHCSGIRVKAEAQGSTTLLVSYRHGHVHLSAKITIAAYLPLKAVDPSSVALVTLGSSKEMLFEGGPRPWILEPSKFFQNVTAEDTDSIGLALFAPHSSRNYQQHWILVTCQALGEQVIALSVGNKPSLTNPFPAVEPAVVKFVCAPPSRLTLAPVYTSPQLDMSCPLLQQNKQVVPVSSHRNPRLDLAAYDQEGRRFDNFSSLSIQWESTRPVLASIEPELPMQLVSQDDESGQKKLHGLQAILVHEASGTTAITATATGYQESHLSSARTKQPHDPLVPLSASIELILVEDVRVSPEEVTIYNHPGIQAELRIREGSGYFFLNTSTADVVKVAYQEARGVAMVHPLLPGSSTIMIHDLCLVFPAPAKAVVYVSDIQELYIRVVDKVEIGKTVKAYVRVLDLHKKPFLAKYFPFMDLKLRAASPIITLVALDEALDNYTITFLIRGVAIGQTSLTASVTNKAGQRINSAPQQIEVFPPFRLMPRKVTLLIGATMQVTSEGGPQPQSNILFSISNESVALVSAAGLVQGLAIGNGTVSGLVQAVDAETGKVVIISQDLVQVEVLLLRAVRIRAPIMRMRTGTQMPIYVTGITNHQNPFSFGNAVPGLTFHWSVTKRDVLDLRGRHHEASIRLPSQYNFAMNVLGRVKGRTGLRVVVKAVDPTSGQLYGLARELSDEIQVQVFEKLQLLNPEIEAEQILMSPNSYIKLQTNRDGAASLSYRVLDGPEKVPVVHVDEKGFLASGSMIGTSTIEVIAQEPFGANQTIIVAVKVSPVSYLRVSMSPVLHTQNKEALVAVPLGMTVTFTVHFHDNSGDVFHAHSSVLNFATNRDDFVQIGKGPTNNTCVVRTVSVGLTLLRVWDAEHPGLSDFMPLPVLQAISPELSGAMVVGDVLCLATVLTSLEGLSGTWSSSANSILHIDPKTGVAVARAVGSVTVYYEVAGHLRTYKETAG

SEQ ID NO: 6799 - protein, 1551 aa, Artificial Sequence
  Synthetic polypeptide
MAARGRGLLLLTLSVLLAAGPSAAAAKLNIPKVLLPFTRATRVNFTLEASEGCYRWLSTRPEVASIEPLGLDEQQCSQKAVVQARLTQPARLTSIIFAEDITTGQVLRCDAIVDLIHDIQIVSTTRELYLEDSPLELKIQALDSEGNTFSTLAGLVFEWTIVKDSEADRFSDSHNALRILTFLESTYIPPSYISEMEKAAKQGDTILVSGMKTGSSKLKARIQEAVYKNVRPAEVRLLILENILLNPAYDVYLMVGTSIHYKVQKIRQGKITELSMPSDQYELQLQNSIPGPEGDPARPVAVLAQDTSMVTALQLGQSSLVLGHRSIRMQGASRLPNSTIYVVEPGYLGFTVHPGDRWVLETGRLYEITIEVFDKFSNKVYVSDNIRIETVLPAEFFEVLSSSQNGSYHRIRALKRGQTAIDAALTSVVDQDGGVHILQVPVWNQQEVEIHIPITLYPSILTFPWQPKTGAYQYTIRAHGGSGNFSWSSSSHLVATVTVKGVMTTGSDIGFSVIQAHDVQNPLHFGEMKVYVIEPHSMEFAPCQVEARVGQALELPLRISGLMPGGASEVVTLSDCSHFDLAVEVENQGVFQPLPGRLPPGSEHCSGIRVKAEAQGSTTLLVSYRHGHVHLSAKITIAAYLPLKAVDPSSVALVTLGSSKEMLFEGGPRPWILEPSKFFQNVTAEDTDSIGLALFAPHSSRNYQQHWILVTCQALGEQVIALSVGNKPSLTNPFPAVEPAVVKFVCAPPSRLTLAPVYTSPQLDMSCPLLQQNKQVVPVSSHRNPRLDLAAYDQEGRRFDNFSSLSIQWESTRPVLASIEPELPMQLVSQDDESGQKKLHGLQAILVHEASGTTAITATATGYQESHLSSARTKQPHDPLVPLSASIELILVEDVRVSPEEVTIYNHPGIQAELRIREGSGYFFLNTSTADVVKVAYQEARGVAMVHPLLPGSSTIMIHDLCLVFPAPAKAVVYVSDIQELYIRVVDKVEIGKTVKAYVRVLDLHKKPFLAKYFPFMDLKLRAASPIITLVALDEALDNYTITFLIRGVAIGQTSLTASVTNKAGQRINSAPQQIEVFPPFRLMPRKVTLLIGATMQVTSEGGPQPQSNILFSISNESVALVSAAGLVQGLAIGNGTVSGLVQAVDAETGKVVIISQDLVQVEVLLLRAVRIRAPIMRMRTGTQMPIYVTGITNHQNPFSFGNAVPGLTFHWSVTKRDVLDLRGRHHEASIRLPSQYNFAMNVLGRVKGRTGLRVVVKAVDPTSGQLYGLARELSDEIQVQVFEKLQLLNPEIEAEQILMSPNSYIKLQTNRDGAASLSYRVLDGPEKVPVVHVDEKGFLASGSMIGTSTIEVIAQEPFGANQTIIVAVKVSPVSYLRVSMSPVLHTQNKEALVAVPLGMTVTFTVHFHDNSGDVFHAHSSVLNFATNRDDFVQIGKGPTNNTCVVRTVSVGLTLLRVWDAEHPGLSDFMPLPVLQAISPELSGAMVVGDVLCLATVLTSLEGLSGTWSSSANSILHIDPKTGVAVARAVGSVTVYYEVAGHLRTYKEQGV

SEQ ID NO: 6800 - skipped

SEQ ID NO: 6801 - protein, 306 aa, Artificial Sequence
  Synthetic polypeptide
AWAARLGRPGRSCLPGARGRAPPPPPLLLLLALLPLLPAPGAAAAPAPRPPELQSASAGPSVSLYLSEDEVRRLIGLDAELYYVRNDLISHYALSFSLLVPSETNFLHFTWHAKSKVEYKLGFQVDNVLAMDMPQVNISVQGEVPRTLSVFRVELSCTGKVDSEVMILMQLNLTVNSSKNFTVLNFKRRKMCYKKLEEVKTSALDKNTSRTIYDPVHAAPTTSTRVFYISVGVCCAVIFLVAIILAVLHLHSMKRIELDDSISASSSSQGLSQPSTQTTQYLRADTPNNATPITNRKRGRKKYLKT

SEQ ID NO: 6802 - protein, 116 aa, Artificial Sequence
  Synthetic polypeptide
MCYKKLEEVKTSALDKNTSRTIYDPVHAAPTTSTRVFYISVGVCCAVIFLVAIILAVLHLHSMKRIELDDSISASSSSQGLSQPSTQTTQYLRADTPNNATPITNRKRGRKKYLKT

SEQ ID NO: 6803 - protein, 811 aa, Artificial Sequence
  Synthetic polypeptide
MITSELPVLQDSTNETTAHSDAGSELEETEVKGKRKRGRPGRPPSTNKKPRKSPGEKSRIEAGIRGAGRGRANGHPQQNGEGEPVTLFEVVKLGKSAMQSVVDDWIESYKQDRDIALLDLINFFIQCSGCRGTVRIEMFRNMQNAEIIRKMTEEFDEDSGDYPLTMPGPQWKKFRSNFCEFIGVLIRQCQYSIIYDEYMMDTVISLLTGLSDSQVRAFRHTSTLAAMKLMTALVNVALNLSIHQDNTQRQYEAERNKMIGKRANERLELLLQKRKELQENQDEIENMMNSIFKGIFVHRYRDAIAEIRAICIEEIGVWMKMYSDAFLNDSYLKYVGWTLHDRQGEVRLKCLKALQSLYTNRELFPKLELFTNRFKDRIVSMTLDKEYDVAVEAIRLVTLILHGSEEALSNEDCENVYHLVYSAHRPVAVAAGEFLHKKLFSRHDPQAEEALAKRRGRNSPNGNLIRMLVLFFLESELHEHAAYLVDSLWESSQELLKDWECMTELLLEEPVQGEEAMSDRQESALIELMVCTIRQAAEAHPPVGRGTGKRVLTAKERKTQIDDRNKLTEHFIITLPMLLSKYSADAEKVANLLQIPQYFDLEIYSTGRMEKHLDALLKQIKFVVEKHVESDVLEACSKTYSILCSEEYTIQNRVDIARSQLIDEFVDRFNHSVEDLLQEGEEADDDDIYNVLSTLKRLTSFHNAHDLTKWDLFGNCYRLLKTGIEHGAMPEQIVVQALQCSHYSILWQLVKITDGSPSKPGAVARACNPSTLGGRGGQITRSRVRDQPGQYGETLSLLKIQKLAGCGGRRL

SEQ ID NO: 6804 - protein, 585 aa, Artificial Sequence
  Synthetic polypeptide
MKLMTALVNVALNLSIHQDNTQRQYEAERNKMIGKRANERLELLLQKRKELQENQDEIENMMNSIFKGIFVHRYRDAIAEIRAICIEEIGVWMKMYSDAFLNDSYLKYVGWTLHDRQGEVRLKCLKALQSLYTNRELFPKLELFTNRFKDRIVSMTLDKEYDVAVEAIRLVTLILHGSEEALSNEDCENVYHLVYSAHRPVAVAAGEFLHKKLFSRHDPQAEEALAKRRGRNSPNGNLIRMLVLFFLESELHEHAAYLVDSLWESSQELLKDWECMTELLLEEPVQGEEAMSDRQESALIELMVCTIRQAAEAHPPVGRGTGKRVLTAKERKTQIDDRNKLTEHFIITLPMLLSKYSADAEKVANLLQIPQYFDLEIYSTGRMEKHLDALLKQIKFVVEKHVESDVLEACSKTYSILCSEEYTIQNRVDIARSQLIDEFVDRFNHSVEDLLQEGEEADDDDIYNVLSTLKRLTSFHNAHDLTKWDLFGNCYRLLKTGIEHGAMPEQIVVQALQCSHYSILWQLVKITDGSPSKPGAVARACNPSTLGGRGGQITRSRVRDQPGQYGETLSLLKIQKLAGCGGRRL

SEQ ID NO: 6805 - protein, 395 aa, Artificial Sequence
  Synthetic polypeptide
MTLDKEYDVAVEAIRLVTLILQLFSRHDPQAEEALAKRRGRNSPNGNLIRMLVLFFLESELHEHAAYLVDSLWESSQELLKDWECMTELLLEEPVQGEEAMSDRQESALIELMVCTIRQAAEAHPPVGRGTGKRVLTAKERKTQIDDRNKLTEHFIITLPMLLSKYSADAEKVANLLQIPQYFDLEIYSTGRMEKHLDALLKQIKFVVEKHVESDVLEACSKTYSILCSEEYTIQNRVDIARSQLIDEFVDRFNHSVEDLLQEGEEADDDDIYNVLSTLKRLTSFHNAHDLTKWDLFGNCYRLLKTGIEHGAMPEQIVVQALQCSHYSILWQLVKITDGSPSKPGAVARACNPSTLGGRGGQITRSRVRDQPGQYGETLSLLKIQKLAGCGGRRL

SEQ ID NO: 6806 - protein, 742 aa, Artificial Sequence
  Synthetic polypeptide
MITSELPVLQDSTNETTAHSDAGSELEETEVKGKRKRGRPGRPPSTNKKPRKSPGEKSRIEAGIRGAGRGRANGHPQQNGEGEPVTLFEVVKLGKSAMQSVVDDWIESYKQDRDIALLDLINFFIQCSGCRGTVRIEMFRNMQNAEIIRKMTEEFDEDSGDYPLTMPGPQWKKFRSNFCEFIGVLIRQCQYSIIYDEYMMDTVISLLTGLSDSQVRAFRHTSTLAAMKLMTALVNVALNLSIHQDNTQRQYEAERNKMIGKRANERLELLLQKRKELQENQDEIENMMNSIFKGIFVHRYRDAIAEIRAICIEEIGVWMKMYSDAFLNDSYLKYVGWTLHDRQGEVRLKCLKALQSLYTNRELFPKLELFTNRFKDRIVSMTLDKEYDVAVEAIRLVTLILHGSEEALSNEDCENVYHLVYSAHRPVAVAAGEFLHKKLFSRHDPQAEEALAKRRGRNSPNGNLIRMLVLFFLESELHEHAAYLVDSLWESSQELLKDWECMTELLLEEPVQGEEAMSDRQESALIELMVCTIRQAAEAHPPVGRGTGKRVLTAKERKTQIDDRNKLTEHFIITLPMLLSKYSADAEKVANLLQIPQYFDLEIYSTGRMEKHLDALLKQIKFVVEKHVESDVLEACSKTYSILCSEEYTIQNRVDIARSQLIDEFVDRFNHSVEDLLQEGEEADDDDIYNVLSTLKRLTSFHNAHDLTKWDLFGNCYRLLKTGIEHGAMPEQASLFPETKQY

SEQ ID NO: 6807 - protein, 516 aa, Artificial Sequence
  Synthetic polypeptide
MKLMTALVNVALNLSIHQDNTQRQYEAERNKMIGKRANERLELLLQKRKELQENQDEIENMMNSIFKGIFVHRYRDAIAEIRAICIEEIGVWMKMYSDAFLNDSYLKYVGWTLHDRQGEVRLKCLKALQSLYTNRELFPKLELFTNRFKDRIVSMTLDKEYDVAVEAIRLVTLILHGSEEALSNEDCENVYHLVYSAHRPVAVAAGEFLHKKLFSRHDPQAEEALAKRRGRNSPNGNLIRMLVLFFLESELHEHAAYLVDSLWESSQELLKDWECMTELLLEEPVQGEEAMSDRQESALIELMVCTIRQAAEAHPPVGRGTGKRVLTAKERKTQIDDRNKLTEHFIITLPMLLSKYSADAEKVANLLQIPQYFDLEIYSTGRMEKHLDALLKQIKFVVEKHVESDVLEACSKTYSILCSEEYTIQNRVDIARSQLIDEFVDRFNHSVEDLLQEGEEADDDDIYNVLSTLKRLTSFHNAHDLTKWDLFGNCYRLLKTGIEHGAMPEQASLFPETKQY

SEQ ID NO: 6808 - protein, 326 aa, Artificial Sequence
  Synthetic polypeptide
MTLDKEYDVAVEAIRLVTLILQLFSRHDPQAEEALAKRRGRNSPNGNLIRMLVLFFLESELHEHAAYLVDSLWESSQELLKDWECMTELLLEEPVQGEEAMSDRQESALIELMVCTIRQAAEAHPPVGRGTGKRVLTAKERKTQIDDRNKLTEHFIITLPMLLSKYSADAEKVANLLQIPQYFDLEIYSTGRMEKHLDALLKQIKFVVEKHVESDVLEACSKTYSILCSEEYTIQNRVDIARSQLIDEFVDRFNHSVEDLLQEGEEADDDDIYNVLSTLKRLTSFHNAHDLTKWDLFGNCYRLLKTGIEHGAMPEQASLFPETKQY

SEQ ID NO: 6809 - protein, 548 aa, Artificial Sequence
  Synthetic polypeptide
MQSPAATAEGLSGPLFGAYTFPTFKFQPRHDSMDWRRISTLDVDRVARELDVATLQENIAGITFCNLDREVCSRCGQPVDPALLKVLRLAQLIIEYLLHCQDCLSASVAQLEARLQTSLGQQQRGQQELGRQADELKGVREESRRRRKMISTLQQLLMQTGTHSYHTCHLCDKTFMNATFLRGHIQRRHAGVAEGGKQKKQEQPVEEVLEELRAKLKWTQGELEAQREAERQRQLQEAELIHQREIEAKKEFDKWKEQEWTKLYGEIDKLKKLFWDEFKNVAKQNSTLEEKLRALQSHSVMESKLGSLRDEESEEWLRQARELQALREKTEIQKTEWKRKVKELHEEHMAEKKELQEENQRLQASLSQDQKKAAAQSQCQISTLRAQLQEQARIIASQEEMIQSLSLRKVEGIHKVPKAVDTEEDSPEEEMEDSQDEQHKVLAALRRNPTLLKHFRPILEDTLEEKLESMGIRKDAKGISIQTLRHLESLLRVQREQKARKFSEFLSLRGKLVKEVTSRAKERQENGAVVSQPDGQPSEENKTNIAIL

SEQ ID NO: 6810 - protein, 224 aa, Artificial Sequence
  Synthetic polypeptide
MQSPAATAEGLSGPLFGAYTFPTFKFQPRHDSMDWRRISTLDVDRVARELDVATLQENIAGITFCNLDREVCSRCGQPVDPALLKVLRLAQLIIEYLLHCQDCLSASVAQLEARLQTSLGQQQRGQQELGRQADELKGVREESRRRRKMISTLQQLLMQTGTHSYHTCHLCDKTFMNATFLRGHIQRRHAGVAEGVAFTVNGAVRWSDFEGLLPSSLLRICSSL

SEQ ID NO: 6811 - protein, 164 aa, Artificial Sequence
  Synthetic polypeptide
MEVTASSRHYVDRLFDPDPQKVLQGVIDMKNAVIGNNKQKANLIVLGAVPRLLYLLQQETSSTELKTECAVVLGSLAMGTENNVKSLLDCHIIPALLQGLLSPDLKFIEACLRCLRTIFTSPVTPEELLYTKLTGHGGTYLQHQLLGRLSHENHLNPGGDVAVI

SEQ ID NO: 6812 - protein, 178 aa, Artificial Sequence
  Synthetic polypeptide
MACLLETPIRMSVLSEVTASSRHYVDRLFDPDPQKVLQGVIDMKNAVIGNNKQKANLIVLGAVPRLLYLLQQETSSTELKTECAVVLGSLAMGTENNVKSLLDCHIIPALLQGLLSPDLKFIEACLRCLRTIFTSPVTPEELLYTKLTGHGGTYLQHQLLGRLSHENHLNPGGDVAVI

SEQ ID NO: 6813 - protein, 136 aa, Artificial Sequence
  Synthetic polypeptide
MKNAVIGNNKQKANLIVLGAVPRLLYLLQQETSSTELKTECAVVLGSLAMGTENNVKSLLDCHIIPALLQGLLSPDLKFIEACLRCLRTIFTSPVTPEELLYTKLTGHGGTYLQHQLLGRLSHENHLNPGGDVAVI

SEQ ID NO: 6814 - protein, 168 aa, Artificial Sequence
  Synthetic polypeptide
MSVLSEVTASSRHYVDRLFDPDPQKVLQGVIDMKNAVIGNNKQKANLIVLGAVPRLLYLLQQETSSTELKTECAVVLGSLAMGTENNVKSLLDCHIIPALLQGLLSPDLKFIEACLRCLRTIFTSPVTPEELLYTKLTGHGGTYLQHQLLGRLSHENHLNPGGDVAVI

SEQ ID NO: 6815 - protein, 6 aa, Artificial Sequence
  Synthetic polypeptide
DYCPQT

SEQ ID NO: 6816 - protein, 178 aa, Artificial Sequence
  Synthetic polypeptide
MFPVAPKPQDSSQPSDRLMTEKQQEEAEWESINVLLMMHGLKPLSLVKRTDLKDLIIFDKQSSQRMRQNLKLLVEETSCQQNMIQELIETNQQLRNELQLEQSRAANQEQRANDLEQIMESVKSKIGELEDESLSRACHQQNKIKDLQKEQKTLQAQDARGMMLAIWICQREAVKYFL

SEQ ID NO: 6817 - protein, 158 aa, Artificial Sequence
  Synthetic polypeptide
MTEQEEAEWESINVLLMMHGLKPLSLVKRTDLKDLIIFDKQSSQRMRQNLKLLVEETSCQQNMIQELIETNQQLRNELQLEQSRAANQEQRANDLEQIMESVKSKIGELEDESLSRACHQQNKIKDLQKEQKTLQAQDARGMMLAIWICQREAVKYFL

SEQ ID NO: 6818 - protein, 160 aa, Artificial Sequence
  Synthetic polypeptide
MTEKQQEEAEWESINVLLMMHGLKPLSLVKRTDLKDLIIFDKQSSQRMRQNLKLLVEETSCQQNMIQELIETNQQLRNELQLEQSRAANQEQRANDLEQIMESVKSKIGELEDESLSRACHQQNKIKDLQKEQKTLQAQDARGMMLAIWICQREAVKYFL

SEQ ID NO: 6819 - protein, 157 aa, Artificial Sequence
  Synthetic polypeptide
MTEEEAEWESINVLLMMHGLKPLSLVKRTDLKDLIIFDKQSSQRMRQNLKLLVEETSCQQNMIQELIETNQQLRNELQLEQSRAANQEQRANDLEQIMESVKSKIGELEDESLSRACHQQNKIKDLQKEQKTLQAQDARGMMLAIWICQREAVKYFL

SEQ ID NO: 6820 - protein, 122 aa, Artificial Sequence
  Synthetic polypeptide
MFPVAPKPQDSSQPSDRLMTEKQQEEAEWESINVLLMMHGLKPLSLVKRTDLKDLIIFDKQSSQRMRQNLKLLVEETSCQQNMIQELIETNQQLRTRTWDSLNGGSERSCNTFLADSPGCAW

SEQ ID NO: 6821 - protein, 102 aa, Artificial Sequence
  Synthetic polypeptide
MTEQEEAEWESINVLLMMHGLKPLSLVKRTDLKDLIIFDKQSSQRMRQNLKLLVEETSCQQNMIQELIETNQQLRTRTWDSLNGGSERSCNTFLADSPGCAW

SEQ ID NO: 6822 - protein, 104 aa, Artificial Sequence
  Synthetic polypeptide
MTEKQQEEAEWESINVLLMMHGLKPLSLVKRTDLKDLIIFDKQSSQRMRQNLKLLVEETSCQQNMIQELIETNQQLRTRTWDSLNGGSERSCNTFLADSPGCAW

SEQ ID NO: 6823 - protein, 101 aa, Artificial Sequence
  Synthetic polypeptide
MTEEEAEWESINVLLMMHGLKPLSLVKRTDLKDLIIFDKQSSQRMRQNLKLLVEETSCQQNMIQELIETNQQLRTRTWDSLNGGSERSCNTFLADSPGCAW

SEQ ID NO: 6824 - protein, 14 aa, Artificial Sequence
  Synthetic polypeptide
MTEDKNLGLTEWRE

SEQ ID NO: 6825 - protein, 205 aa, Artificial Sequence
  Synthetic polypeptide
MPLRLDIKRKLTARSDRVKSVDLHPTEPWMLASLYNGSVCVWNHETQTLVKTFEVCDLPVRAAKFVARKNWVVTGADDMQIRVFNYNTLERVHMFEAHSDYIRCIAVHPTQPFILTSSDDMLIKLWDWDKKWSCSQVFEGHTHYVMQIVINPKDNNQFASASLDRTIKARWLTPVIPALWETEAGGSQGQEIETILANTVKPRLY

SEQ ID NO: 6826 - protein, 176 aa, Artificial Sequence
  Synthetic polypeptide
MLASLYNGSVCVWNHETQTLVKTFEVCDLPVRAAKFVARKNWVVTGADDMQIRVFNYNTLERVHMFEAHSDYIRCIAVHPTQPFILTSSDDMLIKLWDWDKKWSCSQVFEGHTHYVMQIVINPKDNNQFASASLDRTIKARWLTPVIPALWETEAGGSQGQEIETILANTVKPRLY

SEQ ID NO: 6827 - protein, 184 aa, Artificial Sequence
  Synthetic polypeptide
MPLRLDIKRKLTARSDRVKSVDLHPTEPWMLASLYNGSVCVWNHETQTLVKTFEVCDLPVRAAKFVARKNWVVTGADDMQIRVFNYNTLERVHMFEAHSDYIRCIAVHPTQPFILTSSGHTHYVMQIVINPKDNNQFASASLDRTIKARWLTPVIPALWETEAGGSQGQEIETILANTVKPRLY

SEQ ID NO: 6828 - protein, 26 aa, Artificial Sequence
  Synthetic polypeptide
MHAPVVPATWEAEAGESLEPGKQRFQ

SEQ ID NO: 6829 - protein, 161 aa, Artificial Sequence
  Synthetic polypeptide
MYQVIQGIISPVNDTYGKKDLAASHHRVAMARLALQTSDWIRVDPWESEQAQWMETVKVLRHHHSKLLRSPPQMEGPDHGKALFSTPADGRIGTAPVYSSQQERYRRRVISAFPTEVPGSSHWGVSESRCRTVEAAYRARAEAGRGIASPGKHKGSGNSLS

SEQ ID NO: 6830 - protein, 88 aa, Artificial Sequence
  Synthetic polypeptide
MEGPDHGKALFSTPADGRIGTAPVYSSQQERYRRRVISAFPTEVPGSSHWGVSESRCRTVEAAYRARAEAGRGIASPGKHKGSGNSLS

SEQ ID NO: 6831 - protein, 198 aa, Artificial Sequence
  Synthetic polypeptide
MKSRIPVVLLACGSFNPITNMHLRMFEVARDHLHQTGMYQVIQGIISPVNDTYGKKDLAASHHRVAMARLALQTSDWIRVDPWESEQAQWMETVKVLRHHHSKLLRSPPQMEGPDHGKALFSTPADGRIGTAPVYSSQQERYRRRVISAFPTEVPGSSHWGVSESRCRTVEAAYRARAEAGRGIASPGKHKGSGNSLS

SEQ ID NO: 6832 - protein, 59 aa, Artificial Sequence
  Synthetic polypeptide
MLFRNRFLLLLALAALLAFVSLSLQFSSFISFSGPARCLLWEACLDAPHPRLVRQPSVL

SEQ ID NO: 6833 - protein, 182 aa, Artificial Sequence
  Synthetic polypeptide
MLFRNRFLLLLALAALLAFVSLSLQFFHLIPVSTPKNGMSSKSRKRIMPDPVTEPPVTDPVYEALLYCNIPSVAERSMEGHAPHHFKLVSVHVFIRHGDRYPLYVIPKTKRPEIDCTLVANRKPYHPKLEAFISHMSKGSGASFESPLNSLPLYPNHPLCEMGELTQTVRRWLSASQEERPH

SEQ ID NO: 6834 - protein, 144 aa, Artificial Sequence
  Synthetic polypeptide
MSSKSRKRIMPDPVTEPPVTDPVYEALLYCNIPSVAERSMEGHAPHHFKLVSVHVFIRHGDRYPLYVIPKTKRPEIDCTLVANRKPYHPKLEAFISHMSKGSGASFESPLNSLPLYPNHPLCEMGELTQTVRRWLSASQEERPH

SEQ ID NO: 6835 - protein, 165 aa, Artificial Sequence
  Synthetic polypeptide
MDVLTALLLVHLIPVSTPKNGMSSKSRKRIMPDPVTEPPVTDPVYEALLYCNIPSVAERSMEGHAPHHFKLVSVHVFIRHGDRYPLYVIPKTKRPEIDCTLVANRKPYHPKLEAFISHMSKGSGASFESPLNSLPLYPNHPLCEMGELTQTVRRWLSASQEERPH

SEQ ID NO: 6836 - protein, 173 aa, Artificial Sequence
  Synthetic polypeptide
MRYFIKSMEHSVCPSSAVHLIPVSTPKNGMSSKSRKRIMPDPVTEPPVTDPVYEALLYCNIPSVAERSMEGHAPHHFKLVSVHVFIRHGDRYPLYVIPKTKRPEIDCTLVANRKPYHPKLEAFISHMSKGSGASFESPLNSLPLYPNHPLCEMGELTQTVRRWLSASQEERPH

SEQ ID NO: 6837 - protein, 166 aa, Artificial Sequence
  Synthetic polypeptide
MEHSVCPSSAVHLIPVSTPKNGMSSKSRKRIMPDPVTEPPVTDPVYEALLYCNIPSVAERSMEGHAPHHFKLVSVHVFIRHGDRYPLYVIPKTKRPEIDCTLVANRKPYHPKLEAFISHMSKGSGASFESPLNSLPLYPNHPLCEMGELTQTVRRWLSASQEERPH

SEQ ID NO: 6838 - protein, 358 aa, Artificial Sequence [sequence omitted]

SEQ ID NO: 6839 - protein, 24 aa, Artificial Sequence
  Synthetic polypeptide
MPVSYSSVTTRYYHRAGAEEGVLR

SEQ ID NO: 6840 - protein, 8 aa, Artificial Sequence
  Synthetic polypeptide
MSYCRQEG

SEQ ID NO: 6841 - protein, 138 aa, Artificial Sequence
  Synthetic polypeptide
MSGLLTDPEQRAQEPRYPGFVLGLDVGSSVIRCHVYDRAARVCGSSVQKVENLYPQIGWVEIDPDVLWIQFVAVIKEAVKAAGIQMNQIVGLGISTQRATFITWNKKTGNHFHNFISWQDLRAVELVKSWNNSLLMKA

SEQ ID NO: 6842 - protein, 2092 aa, Artificial Sequence
  Synthetic polypeptide
MGEHGLELASMIPALRELGSATPEEYNTVVQKPRQILCQFIDRILTDVNVVAVELVKKTDSQPTSVMLLDFIQHIMKSSPLMFVNVSGSHEAKGSCIEFSNWIITRLLRIAATPSCHLLHKKICEVICSLLFLFKSKSPAIFGVLTKELLQLFEDLVYLHRRNVMGHAVEWPVVMSRFLSQLDEHMGYLQSAPLQLMSMQNLEFIEVTLLMVLTRIIAIVFFRRQELLLWQIGCVLLEYGSPKIKSLAISFLTELFQLGGLPAQPASTFFSSFLELLKHLVEMDTDQLKLYEEPLSKLIKTLFPFEAEAYRNIEPVYLNMLLEKLCVMFEDGVLMRLKSDLLKAALCHLLQYFLKFVPAGYESALQVRKVYVRNICKALLDVLGIEVDAEYLLGPLYAALKMESMEIIEEIQCQTQQENLSSNSDGISPKRRRLSSSLNPSKRAPKQTEEIKHVDMNQKSILWSALKQKAESLQISLEYSGLKNPVIEMLEGIAVVLQLTALCTVHCSHQNMNCRTFKDCQHKSKKKPSVVITWMSLDFYTKVLKSCRSLLESVQKLDLEATIDKVVKIYDALIYMQVNSSFEDHILEDLCGMLSLPWIYSHSDDGCLKLTTFAANLLTLSCRISDSYSPQAQSRCVFLLTLFPRRIFLEWRTAVYNWALQSSHEVIRASCVSGFFILLQQQNSCNRVPKILIDKVKDDSDIVKKEFASILGQLVCTLHGMFYLTSSLTEPFSEHGHVDLFCRNLKATSQHECSSSQLKASVCKPFLFLLKKKIPSPVKLAFIDNLHHLCKHLDFREDETDVKAVLGTLLNLMEDPDKDVRVAFSGNIKHILESLDSEDGFIKELFVLRMKEAYTHAQISRNNELKDTLILTTGDIGRAAKGDLVPFALLHLLHCLLSKSASVSGAAYTEIRALVAAKSVKLQSFFSQYKKPICQFLVESLHSSQMTALPNTPCQNADVRKQDVAHQREMALNTLSEIANVFDFPDLNRFLTRTLQVLLPDLAAKASPAASALIRTLGKQLNVNRREILINNFKYIFSHLVCSCSKDELERALHYLKNETEIELGSLLRQDFQGLHNELLLRIGEHYQQVFNGLSILASFASSDDPYQGPRDIISPELMADYLQPKLLGILAFFNMQLLSSSVGIEDKKMALNSLMSLMKLMGPKHVSSVRVKMMTTLRTGLRFKDDFPELCCRAWDCFVRCLDHACLGSLLSHVIVALLPLIHIQPKETAAIFHYLIIENRDAVQDFLHEIYFLPDHPELKKIKAVLQEYRKETSESTDLQTTLQLSMKAIQHENVDVRIHALTSLKETLYKNQEKLIKYATDSETVEPIISQLVTVLLKGCQDANSQARLLCGECLGELGAIDPGRLDFSTTETQGKDFTFVTGVEDSSFAYGLLMELTRAYLAYADNSRAQDSAAYAIQELLSIYDCREMETNGPGHQLWRRFPEHVREILEPHLNTRYKSSQKSTDWSGVKKPIYLSKLGSNFAEWSASWAGYLITKVRHDLASKIFTCCSIMMKHDFKVTIYLLPHILVYVLLGCNQEDQQEVYAEIMAVLKHDDQHTINTQDIASDLCQLSTQTVFSMLDHLTQWARHKFQALKAEKCPHSKSNRNKVDSMVSTVDYEDYQSVTRFLDLIPQDTLAVASFRSKAYTRAVMHFESFITEKKQNIQEHLGFLQKLYAAMHEPDGVAGVSAIRKAEPSLKEQILEHESLGLLRDATACYDRAIQLEPDQIIHYHGVVKSMLGLGQLSTVITQVNGVHANRSEWTDELNTYRVEAAWKLSQWDLVENYLAADGKSTTWSVRLGQLLLSAKKRDITAFYDSLKLVRAEQIVPLSAASFERGSYQRGYEYIVRLHMLCELEHSIKPLFQHSPGDSSQEDSLNWVARLEMTQNSYRAKEPILALRRALLSLNKRPDYNEMVGECWLQSARVARKAGHHQTAYNALLNAGESRLAELYVERAKWLWSKGDVHQALIVLQKGVELCFPENETPPEGKNMLIHGRAMLLVGRFMEETANFESNAIMKKYKDVTACLPEWEDGHFYLAKYYDKLMPMVTDNKMEKQGDLIRYIVLHFGSIFTTAKLWNQTKCPSTWE

SEQ ID NO: 6843 - protein, 2028 aa, Artificial Sequence
  Synthetic polypeptide
MGEHGLELASMIPALRELGSATPEEYNTVVQKPRQILCQFIDRILTDVNVVAVELVKKTDSQPTSVMLLDFIQHIMKSSPLMFVNVSGSHEAKGSCIEFSNWIITRLLRIAATPSCHLLHKKICEVICSLLFLFKSKSPAIFGVLTKELLQLFEDLVYLHRRNVMGHAVEWPVVMSRFLSQLDEHMGYLQSAPLQLMSMQNLEFIEVTLLMVLTRIIAIVFFRRQELLLWQIGCVLLEYGSPKIKSLAISFLTELFQLGGLPAQPASTFFSSFLELLKHLVEMDTDQLKLYEEPLSKLIKTLFPFEAEAYRNIEPVYLNMLLEKLCVMFEDGVLMRLKSDLLKAALCHLLQYFLKFVPAGYESALQVRKVYVRNICKALLDVLGIEVDAEYLLGPLYAALKMESMEIIEEIQCQTQQENLSSNSDGISPKRRRLSSSLNPSKRAPKQTEDRTFKDCQHKSKKKPSVVITWMSLDFYTKVLKSCRSLLESVQKLDLEATIDKVVKIYDALIYMQVNSSFEDHILEDLCGMLSLPWIYSHSDDGCLKLTTFAANLLTLSCRISDSYSPQAQSRCVFLLTLFPRRIFLEWRTAVYNWALQSSHEVIRASCVSGFFILLQQQNSCNRVPKILIDKVKDDSDIVKKEFASILGQLVCTLHGMFYLTSSLTEPFSEHGHVDLFCRNLKATSQHECSSSQLKASVCKPFLFLLKKKIPSPVKLAFIDNLHHLCKHLDFREDETDVKAVLGTLLNLMEDPDKDVRVAFSGNIKHILESLDSEDGFIKELFVLRMKEAYTHAQISRNNELKDTLILTTGDIGRAAKGDLVPFALLHLLHCLLSKSASVSGAAYTEIRALVAAKSVKLQSFFSQYKKPICQFLVESLHSSQMTALPNTPCQNADVRKQDVAHQREMALNTLSEIANVFDFPDLNRFLTRTLQVLLPDLAAKASPAASALIRTLGKQLNVNRREILINNFKYIFSHLVCSCSKDELERALHYLKNETEIELGSLLRQDFQGLHNELLLRIGEHYQQVFNGLSILASFASSDDPYQGPRDIISPELMADYLQPKLLGILAFFNMQLLSSSVGIEDKKMALNSLMSLMKLMGPKHVSSVRVKMMTTLRTGLRFKDDFPELCCRAWDCFVRCLDHACLGSLLSHVIVALLPLIHIQPKETAAIFHYLIIENRDAVQDFLHEIYFLPDHPELKKIKAVLQEYRKETSESTDLQTTLQLSMKAIQHENVDVRIHALTSLKETLYKNQEKLIKYATDSETVEPIISQLVTVLLKGCQDANSQARLLCGECLGELGAIDPGRLDFSTTETQGKDFTFVTGVEDSSFAYGLLMELTRAYLAYADNSRAQDSAAYAIQELLSIYDCREMETNGPGHQLWRRFPEHVREILEPHLNTRYKSSQKSTDWSGVKKPIYLSKLGSNFAEWSASWAGYLITKVRHDLASKIFTCCSIMMKHDFKVTIYLLPHILVYVLLGCNQEDQQEVYAEIMAVLKHDDQHTINTQDIASDLCQLSTQTVFSMLDHLTQWARHKFQALKAEKCPHSKSNRNKVDSMVSTVDYEDYQSVTRFLDLIPQDTLAVASFRSKAYTRAVMHFESFITEKKQNIQEHLGFLQKLYAAMHEPDGVAGVSAIRKAEPSLKEQILEHESLGLLRDATACYDRAIQLEPDQIIHYHGVVKSMLGLGQLSTVITQVNGVHANRSEWTDELNTYRVEAAWKLSQWDLVENYLAADGKSTTWSVRLGQLLLSAKKRDITAFYDSLKLVRAEQIVPLSAASFERGSYQRGYEYIVRLHMLCELEHSIKPLFQHSPGDSSQEDSLNWVARLEMTQNSYRAKEPILALRRALLSLNKRPDYNEMVGECWLQSARVARKAGHHQTAYNALLNAGESRLAELYVERAKWLWSKGDVHQALIVLQKGVELCFPENETPPEGKNMLIHGRAMLLVGRFMEETANFESNAIMKKYKDVTACLPEWEDGHFYLAKYYDKLMPMVTDNKMEKQGDLIRYIVLHFGSIFTTAKLWNQTKCPSTWE

SEQ ID NO: 6844 - protein, 2080 aa, Artificial Sequence
  Synthetic polypeptide
MGEHGLELASMIPALRELGSATPEEYNTVVQKPRQILCQFIDRILTDVNVVAVELVKKTDSQPTSVMLLDFIQHIMKSSPLMFVNVSGSHEAKGSCIEFSNWIITRLLRIAATPSCHLLHKKICEVICSLLFLFKSKSPAIFGVLTKELLQLFEDLVYLHRRNVMGHAVEWPVVMSRFLSQLDEHMGYLQSAPLQLMSMQNLEFIEVTLLMVLTRIIAIVFFRRQELLLWQIGCVLLEYGSPKIKSLAISFLTELFQLGGLPAQPASTFFSSFLELLKHLVEMDTDQLKLYEEPLSKLIKTLFPFEAEAYRNIEPVYLNMLLEKLCVMFEDGVLMRLKSDLLKAALCHLLQYFLKFVPAGYESALQVRKVYVRNICKALLDVLGIEVDAEYLLGPLYAALKMESMEIIEEIQCQTQQENLSSNSDGISPKRRRLSSSLNPSKRAPKQTEEIKHVDMNQKSILWSALKQKAESLQISLEYSGLKNPVIEMLEGIAVVLQLTALCTVHCSHQNMNCRTFKDCQHKSKKKPSVVITWMSLDFYTKVLKSCRSLLESVQKLDLEATIDKVVKIYDALIYMQVNSSFEDHILEDLCGMLSLPWIYSHSDDGCLKLTTFAANLLTLSCRISDSYSPQAQSRCVFLLTLFPRRIFLEWRTAVYNWALQSSHEVIRASCVSGFFILLQQQNSCNRVPKILIDKVKDDSDIVKKEFASILGQLVCTLHGMFYLTSSLTEPFSEHGHVDLFCRNLKATSQHECSSSQLKASVCKPFLFLLKKKIPSPVKLAFIDNLHHLCKHLDFREDETDVKAVLGTLLNLMEDPDKDVRVAFSGNIKHILESLDSEDGFIKELFVLRMKEAYTHAQISRNNELKDTLILTTGDIGRAAKGDLVPFALLHLLHCLLSKSASVSGAAYTEIRALVAAKSVKLQSFFSQYKKPICQFLVESLHSSQMTALPNTPCQNADVRKQDVAHQREMALNTLSEIANVFDFPDLNRFLTRTLQVLLPDLAAKASPAASALIRTLGKQLNVNRREILINNFKYIFSHLVCSCSKDELERALHYLKNETEIELGSLLRQDFQGLHNELLLRIGEHYQQVFNGLSILASFASSDDPYQGPRDIISPELMADYLQPKLLGILAFFNMQLLSSSVGIEDKKMALNSLMSLMKLMGPKHVSSVRVKMMTTLRTGLRFKDDFPELCCRAWDCFVRCLDHACLGSLLSHVIVALLPLIHIQPKETAAIFHYLIIENRDAVQDFLHEIYFLPDHPELKKIKAVLQEYRKETSESTDLQTTLQLSMKAIQHENVDVRIHALTSLKETLYKNQEKLIKYATDSETVEPIISQLVTVLLKGCQDANSQARLLCGECLGELGAIDPGRLDFSTTETQGKDFTFVTGVEDSSFAYGLLMELTRAYLAYADNSRAQDSAAYAIQELLSIYDCREMETNGPGHQLWRRFPEHVREILEPHLNTRYKSSQKSTDWSGVKKPIYLSKLGSNFAEWSASWAGYLITKVRHDLASKIFTCCSIMMKHDFKVTIYLLPHILVYVLLGCNQEDQQEVYAEIMAVLKHDDQHTINTQDIASDLCQLSTQTVFSMLDHLTQWARHKFQALKAEKCPHSKSNRNKVDSMVSTVDYEDYQSVTRFLDLIPQDTLAVASFRSKAYTRAVMHFESFITEKKQNIQEHLGFLQKLYAAMHEPDGVAGVSAIRKAEPSLKEQILEHESLGLLRDATACYDRAIQLEPDQIIHYHGVVKSMLGLGQLSTVITQVNGVHANRSEWTDELNTYRVEAAWKLSQWDLVENYLAADGKSTTWSVRLGQLLLSAKKRDITAFYDSLKLVRAEQIVPLSAASFERGSYQRGYEYIVRLHMLCELEHSIKPLFQHSPGDSSQEDSLNWVARLEMTQNSYRAKEPILALRRALLSLNKRPDYNEMVGECWLQSARVARKAGHHQTAYNALLNAGESRLAELYVERAKWLWSKGDVHQALIVLQKGVELCFPENETPPEGKNMLIHGRAMLLVGRFMEETANFESNAIMKKYKDVTACLPEWEDGHFYLAKYYDKLMPMVTDNKMEKQGDLIRYIVLHFGRRHDFIY

SEQ ID NO: 6845 - protein, 2016 aa, Artificial Sequence
  Synthetic polypeptide
MGEHGLELASMIPALRELGSATPEEYNTVVQKPRQILCQFIDRILTDVNVVAVELVKKTDSQPTSVMLLDFIQHIMKSSPLMFVNVSGSHEAKGSCIEFSNWIITRLLRIAATPSCHLLHKKICEVICSLLFLFKSKSPAIFGVLTKELLQLFEDLVYLHRRNVMGHAVEWPVVMSRFLSQLDEHMGYLQSAPLQLMSMQNLEFIEVTLLMVLTRIIAIVFFRRQELLLWQIGCVLLEYGSPKIKSLAISFLTELFQLGGLPAQPASTFFSSFLELLKHLVEMDTDQLKLYEEPLSKLIKTLFPFEAEAYRNIEPVYLNMLLEKLCVMFEDGVLMRLKSDLLKAALCHLLQYFLKFVPAGYESALQVRKVYVRNICKALLDVLGIEVDAEYLLGPLYAALKMESMEIIEEIQCQTQQENLSSNSDGISPKRRRLSSSLNPSKRAPKQTEDRTFKDCQHKSKKKPSVVITWMSLDFYTKVLKSCRSLLESVQKLDLEATIDKVVKIYDALIYMQVNSSFEDHILEDLCGMLSLPWIYSHSDDGCLKLTTFAANLLTLSCRISDSYSPQAQSRCVFLLTLFPRRIFLEWRTAVYNWALQSSHEVIRASCVSGFFILLQQQNSCNRVPKILIDKVKDDSDIVKKEFASILGQLVCTLHGMFYLTSSLTEPFSEHGHVDLFCRNLKATSQHECSSSQLKASVCKPFLFLLKKKIPSPVKLAFIDNLHHLCKHLDFREDETDVKAVLGTLLNLMEDPDKDVRVAFSGNIKHILESLDSEDGFIKELFVLRMKEAYTHAQISRNNELKDTLILTTGDIGRAAKGDLVPFALLHLLHCLLSKSASVSGAAYTEIRALVAAKSVKLQSFFSQYKKPICQFLVESLHSSQMTALPNTPCQNADVRKQDVAHQREMALNTLSEIANVFDFPDLNRFLTRTLQVLLPDLAAKASPAASALIRTLGKQLNVNRREILINNFKYIFSHLVCSCSKDELERALHYLKNETEIELGSLLRQDFQGLHNELLLRIGEHYQQVFNGLSILASFASSDDPYQGPRDIISPELMADYLQPKLLGILAFFNMQLLSSSVGIEDKKMALNSLMSLMKLMGPKHVSSVRVKMMTTLRTGLRFKDDFPELCCRAWDCFVRCLDHACLGSLLSHVIVALLPLIHIQPKETAAIFHYLIIENRDAVQDFLHEIYFLPDHPELKKIKAVLQEYRKETSESTDLQTTLQLSMKAIQHENVDVRIHALTSLKETLYKNQEKLIKYATDSETVEPIISQLVTVLLKGCQDANSQARLLCGECLGELGAIDPGRLDFSTTETQGKDFTFVTGVEDSSFAYGLLMELTRAYLAYADNSRAQDSAAYAIQELLSIYDCREMETNGPGHQLWRRFPEHVREILEPHLNTRYKSSQKSTDWSGVKKPIYLSKLGSNFAEWSASWAGYLITKVRHDLASKIFTCCSIMMKHDFKVTIYLLPHILVYVLLGCNQEDQQEVYAEIMAVLKHDDQHTINTQDIASDLCQLSTQTVFSMLDHLTQWARHKFQALKAEKCPHSKSNRNKVDSMVSTVDYEDYQSVTRFLDLIPQDTLAVASFRSKAYTRAVMHFESFITEKKQNIQEHLGFLQKLYAAMHEPDGVAGVSAIRKAEPSLKEQILEHESLGLLRDATACYDRAIQLEPDQIIHYHGVVKSMLGLGQLSTVITQVNGVHANRSEWTDELNTYRVEAAWKLSQWDLVENYLAADGKSTTWSVRLGQLLLSAKKRDITAFYDSLKLVRAEQIVPLSAASFERGSYQRGYEYIVRLHMLCELEHSIKPLFQHSPGDSSQEDSLNWVARLEMTQNSYRAKEPILALRRALLSLNKRPDYNEMVGECWLQSARVARKAGHHQTAYNALLNAGESRLAELYVERAKWLWSKGDVHQALIVLQKGVELCFPENETPPEGKNMLIHGRAMLLVGRFMEETANFESNAIMKKYKDVTACLPEWEDGHFYLAKYYDKLMPMVTDNKMEKQGDLIRYIVLHFGRRHDFIY

SEQ ID NO: 6846 - protein, 2079 aa, Artificial Sequence
  Synthetic polypeptide
MGEHGLELASMIPALRELGSATPEEYNTVVQKPRQILCQFIDRILTDVNVVAVELVKKTDSQPTSVMLLDFIQHIMKSSPLMFVNVSGSHEAKGSCIEFSNWIITRLLRIAATPSCHLLHKKICEVICSLLFLFKSKSPAIFGVLTKELLQLFEDLVYLHRRNVMGHAVEWPVVMSRFLSQLDEHMGYLQSAPLQLMSMQNLEFIEVTLLMVLTRIIAIVFFRRQELLLWQIGCVLLEYGSPKIKSLAISFLTELFQLGGLPAQPASTFFSSFLELLKHLVEMDTDQLKLYEEPLSKLIKTLFPFEAEAYRNIEPVYLNMLLEKLCVMFEDGVLMRLKSDLLKAALCHLLQYFLKFVPAGYESALQVRKVYVRNICKALLDVLGIEVDAEYLLGPLYAALKMESMEIIEEIQCQTQQENLSSNSDGISPKRRRLSSSLNPSKRAPKQTEEIKHVDMNQKSILWSALKQKAESLQISLEYSGLKNPVIEMLEGIAVVLQLTALCTVHCSHQNMNCRTFKDCQHKSKKKPSVVITWMSLDFYTKVLKSCRSLLESVQKLDLEATIDKVVKIYDALIYMQVNSSFEDHILEDLCGMLSLPWIYSHSDDGCLKLTTFAANLLTLSCRISDSYSPQAQSRCVFLLTLFPRRIFLEWRTAVYNWALQSSHEVIRASCVSGFFILLQQQNSCNRVPKILIDKVKDDSDIVKKEFASILGQLVCTLHGMFYLTSSLTEPFSEHGHVDLFCRNLKATSQHECSSSQLKASVCKPFLFLLKKKIPSPVKLAFIDNLHHLCKHLDFREDETDVKAVLGTLLNLMEDPDKDVRVAFSGNIKHILESLDSEDGFIKELFVLRMKEAYTHAQISRNNELKDTLILTTGDIGRAAKGDLVPFALLHLLHCLLSKSASVSGAAYTEIRALVAAKSVKLQSFFSQYKKPICQFLVESLHSSQMTALPNTPCQNADVRKQDVAHQREMALNTLSEIANVFDFPDLNRFLTRTLQVLLPDLAAKASPAASALIRTLGKQLNVNRREILINNFKYIFSHLVCSCSKDELERALHYLKNETEIELGSLLRQDFQGLHNELLLRIGEHYQQVFNGLSILASFASSDDPYQGPRDIISPELMADYLQPKLLGILAFFNMQLLSSSVGIEDKKMALNSLMSLMKLMGPKHVSSVRVKMMTTLRTGLRFKDDFPELCCRAWDCFVRCLDHACLGSLLSHVIVALLPLIHIQPKETAAIFHYLIIENRDAVQDFLHEIYFLPDHPELKKIKAVLQEYRKETSESTDLQTTLQLSMKAIQHENVDVRIHALTSLKETLYKNQEKLIKYATDSETVEPIISQLVTVLLKGCQDANSQARLLCGECLGELGAIDPGRLDFSTTETQGKDFTFVTGVEDSSFAYGLLMELTRAYLAYADNSRAQDSAAYAIQELLSIYDCREMETNGPGHQLWRRFPEHVREILEPHLNTRYKSSQKSTDWSGVKKPIYLSKLGSNFAEWSASWAGYLITKVRHDLASKIFTCCSIMMKHDFKVTIYLLPHILVYVLLGCNQEDQQEVYAEIMAVLKHDDQHTINTQDIASDLCQLSTQTVFSMLDHLTQWARHKFQALKAEKCPHSKSNRNKVDSMVSTVDYEDYQSVTRFLDLIPQDTLAVASFRSKAYTRAVMHFESFITEKKQNIQEHLGFLQKLYAAMHEPDGVAGVSAIRKAEPSLKEQILEHESLGLLRDATACYDRAIQLEPDQIIHYHGVVKSMLGLGQLSTVITQVNGVHANRSEWTDELNTYRVEAAWKLSQWDLVENYLAADGKSTTWSVRLGQLLLSAKKRDITAFYDSLKLVRAEQIVPLSAASFERGSYQRGYEYIVRLHMLCELEHSIKPLFQHSPGDSSQEDSLNWVARLEMTQNSYRAKEPILALRRALLSLNKRPDYNEMVGECWLQSARVARKAGHHQTAYNALLNAGESRLAELYVERAKWLWSKGDVHQALIVLQKGVELCFPENETPPEGKNMLIHGRAMLLVGRFMEETANFESNAIMKKYKDVTACLPEWEDGHFYLAKYYDKLMPMVTDNKMEKQGDLIRYIVLHFGRCREST

SEQ ID NO: 6847 - protein, 2015 aa, Artificial Sequence
  Synthetic polypeptide
MGEHGLELASMIPALRELGSATPEEYNTVVQKPRQILCQFIDRILTDVNVVAVELVKKTDSQPTSVMLLDFIQHIMKSSPLMFVNVSGSHEAKGSCIEFSNWIITRLLRIAATPSCHLLHKKICEVICSLLFLFKSKSPAIFGVLTKELLQLFEDLVYLHRRNVMGHAVEWPVVMSRFLSQLDEHMGYLQSAPLQLMSMQNLEFIEVTLLMVLTRIIAIVFFRRQELLLWQIGCVLLEYGSPKIKSLAISFLTELFQLGGLPAQPASTFFSSFLELLKHLVEMDTDQLKLYEEPLSKLIKTLFPFEAEAYRNIEPVYLNMLLEKLCVMFEDGVLMRLKSDLLKAALCHLLQYFLKFVPAGYESALQVRKVYVRNICKALLDVLGIEVDAEYLLGPLYAALKMESMEIIEEIQCQTQQENLSSNSDGISPKRRRLSSSLNPSKRAPKQTEDRTFKDCQHKSKKKPSVVITWMSLDFYTKVLKSCRSLLESVQKLDLEATIDKVVKIYDALIYMQVNSSFEDHILEDLCGMLSLPWIYSHSDDGCLKLTTFAANLLTLSCRISDSYSPQAQSRCVFLLTLFPRRIFLEWRTAVYNWALQSSHEVIRASCVSGFFILLQQQNSCNRVPKILIDKVKDDSDIVKKEFASILGQLVCTLHGMFYLTSSLTEPFSEHGHVDLFCRNLKATSQHECSSSQLKASVCKPFLFLLKKKIPSPVKLAFIDNLHHLCKHLDFREDETDVKAVLGTLLNLMEDPDKDVRVAFSGNIKHILESLDSEDGFIKELFVLRMKEAYTHAQISRNNELKDTLILTTGDIGRAAKGDLVPFALLHLLHCLLSKSASVSGAAYTEIRALVAAKSVKLQSFFSQYKKPICQFLVESLHSSQMTALPNTPCQNADVRKQDVAHQREMALNTLSEIANVFDFPDLNRFLTRTLQVLLPDLAAKASPAASALIRTLGKQLNVNRREILINNFKYIFSHLVCSCSKDELERALHYLKNETEIELGSLLRQDFQGLHNELLLRIGEHYQQVFNGLSILASFASSDDPYQGPRDIISPELMADYLQPKLLGILAFFNMQLLSSSVGIEDKKMALNSLMSLMKLMGPKHVSSVRVKMMTTLRTGLRFKDDFPELCCRAWDCFVRCLDHACLGSLLSHVIVALLPLIHIQPKETAAIFHYLIIENRDAVQDFLHEIYFLPDHPELKKIKAVLQEYRKETSESTDLQTTLQLSMKAIQHENVDVRIHALTSLKETLYKNQEKLIKYATDSETVEPIISQLVTVLLKGCQDANSQARLLCGECLGELGAIDPGRLDFSTTETQGKDFTFVTGVEDSSFAYGLLMELTRAYLAYADNSRAQDSAAYAIQELLSIYDCREMETNGPGHQLWRRFPEHVREILEPHLNTRYKSSQKSTDWSGVKKPIYLSKLGSNFAEWSASWAGYLITKVRHDLASKIFTCCSIMMKHDFKVTIYLLPHILVYVLLGCNQEDQQEVYAEIMAVLKHDDQHTINTQDIASDLCQLSTQTVFSMLDHLTQWARHKFQALKAEKCPHSKSNRNKVDSMVSTVDYEDYQSVTRFLDLIPQDTLAVASFRSKAYTRAVMHFESFITEKKQNIQEHLGFLQKLYAAMHEPDGVAGVSAIRKAEPSLKEQILEHESLGLLRDATACYDRAIQLEPDQIIHYHGVVKSMLGLGQLSTVITQVNGVHANRSEWTDELNTYRVEAAWKLSQWDLVENYLAADGKSTTWSVRLGQLLLSAKKRDITAFYDSLKLVRAEQIVPLSAASFERGSYQRGYEYIVRLHMLCELEHSIKPLFQHSPGDSSQEDSLNWVARLEMTQNSYRAKEPILALRRALLSLNKRPDYNEMVGECWLQSARVARKAGHHQTAYNALLNAGESRLAELYVERAKWLWSKGDVHQALIVLQKGVELCFPENETPPEGKNMLIHGRAMLLVGRFMEETANFESNAIMKKYKDVTACLPEWEDGHFYLAKYYDKLMPMVTDNKMEKQGDLIRYIVLHFGRCREST

SEQ ID NO: 6848 - protein, 98 aa, Artificial Sequence
  Synthetic polypeptide
MADDVDQQQTTNTVEEPLDLIRLSLDERIYVKMRNDRELRGRLHAYDQHLNMILGDVEETVTTIEIDEETYEEIYKVRPLGSVPLGPCRLQVALEQAT

SEQ ID NO: 6849 - protein, 99 aa, Artificial Sequence
  Synthetic polypeptide
MGEHGLELASMIPALRELGSATPEEYNTVVQKPRQILCQFIDRILTDVNVVAVELVKKTDSQPTSVMLLDFIQHIMKSSPLMFVNVSGSHEAKGSCIVK

SEQ ID NO: 6850 - protein, 226 aa, Artificial Sequence
  Synthetic polypeptide
MMAALYPSTDLSGASSSSLPSSPSSSSPNEVMALKDVREVKEENTLNEKLFLLACDKGDYYMVKKILEENSSGDLNINCVDVLGRNAVTITIENENLDILQLLLDYGCQSADALLVAIDSEVVGAVDILLNHRPKRSSRPTIVKLMERIQNPEYSTTMDVAPVILAAHRNNYEILTMLLKQDVSLPKPHAVGCECTLCSAKNKKDSLRHSSLKRKKLIKNFTKNKA

SEQ ID NO: 6851 - protein, 192 aa, Artificial Sequence
  Synthetic polypeptide
MMAALYPSTDLSGASSSSLPSSPSSSSPNEVMALKDVREVKEENTLNEKLFLLACDKGDYYMVKKILEENSSGDLNINCVDVLGRNAVTITIENENLDILQLLLDYGCQKLMERIQNPEYSTTMDVAPVILAAHRNNYEILTMLLKQDVSLPKPHAVGCECTLCSAKNKKDSLRHSSLKRKKLIKNFTKNKA

SEQ ID NO: 6852 - protein, 249 aa, Artificial Sequence
  Synthetic polypeptide
MWRLVPPKLGRLSRSLKLAALGSLLVLMVLHSPSLLASWQRNELTDRRFLQLNKCPACFGTSWCRRFLNGQVVFEAWGRLRLLDFLNVKNVYFAQYGEPREGGRRRVVLKRLGSQRELAQLDQSICKRATGRPRCDLLQAMPRTEFARLNGDVRLLTPEAVEGWSDLVHCPSQRLLDRLVRRYAETKDSGSFLLRNLKDSERMQLLLTLAFNPEPLVLQKPCKPEESGDQYSTFLKERIFNLEFHIQPN

SEQ ID NO: 6853 - protein, 38 aa, Artificial Sequence
  Synthetic polypeptide
MPAPPPPLNCPPGLEYLSQIDMILIHQQIELLEAQCGR

SEQ ID NO: 6854 - protein, 111 aa, Artificial Sequence
  Synthetic polypeptide
MRSWNSLFCLNSSRPPGHIVYPKHQAGHTGKQADHLGSQAFYPGRQHDYLVPPAGTAGIPVQNQPGRPEGVPWMPAPPPPLNCPPGLEYLSQIDMILIHQQIELLEAQCGR

SEQ ID NO: 6855 - protein, 355 aa, Artificial Sequence
  Synthetic polypeptide
MRLILPVGLIATTLAIAPVRFDREKVFRVKPQDEKQADIIKDLAKTNELDFWYPGATHHVAANMMVDFRVSEKESQAIQSALDQNKMHYEILIHDLQEEIEKQFDVKEDIPGRHSYAKYNNWEKIVAWTEKMMDKYPEMVSRIKIGSTVEDNPLYVLKIGEKNERRKAIFTDCGIHAREWVSPAFCQWFVYQATKTYGRNKIMTKLLDRMNFYILPVFNVDGYIWSWTKNRMWRKNRSKNQNSKCIGTDLNRNFNASWNSIPNTNDPCADNYRGSAPESEKETKAVTNFIRSHLNEIKVYITFHSYSQMLLFPYGYTSKLPPNHEDLAKVAKIGTDVLSTRYETRYIYGPIESTI

SEQ ID NO: 6856 - protein, 237 aa, Artificial Sequence
  Synthetic polypeptide
MLLSIGMLMLSATQVYTILTVQLFAFLNLLPVEADILAYNFENASQTFDDLPARFGYRLPAEGLKGFLINSKPENACEPIVPPPVKDNSSGTFIVLIRRLDCNFDIKVLNAQRAGYKAAIVHNVDSDDLISMGSNDIEVLKKIDIPSVFIGESSANSLKDEFTYEKGGHLILVPEFSLPLEYYLIPFLIIVGICLILIVIFMITKFVQDRHRARRNRLRKDQLKKLPVHKFKKGGKN

SEQ ID NO: 6857 - protein, 118 aa, Artificial Sequence
  Synthetic polypeptide
MLILMTSLAWDPTTVSTVEVLKKIDIPSVFIGESSANSLKDEFTYEKGGHLILVPEFSLPLEYYLIPFLIIVGICLILIVIFMITKFVQDRHRARRNRLRKDQLKKLPVHKFKKGGKN

SEQ ID NO: 6858 - protein, 4 aa, Artificial Sequence
  Synthetic polypeptide
SSRI

SEQ ID NO: 6859 - protein, 30 aa, Artificial Sequence
  Synthetic polypeptide
MTSPSPRIQIISTDSAVASPQRIQLSSLGL

SEQ ID NO: 6860 - protein, 132 aa, Artificial Sequence
  Synthetic polypeptide
MTSPSPRIQIISTDSAVASPQRIQIVTDQQTGQKIQIVTAVDASGSPKQQFILTSPDGAGTGKVILASPETSSAKQLIFTTSDNLVPGRIQIVTDSASVERLLGKTDVQRPQVVEYCVVCGDKASGCGVSHL

SEQ ID NO: 6861 - protein, 151 aa, Artificial Sequence
  Synthetic polypeptide
MTSPSPRIQIISTDSAVASPQRIQGSEPASGPLSVFTSLNKEKIVTDQQTGQKIQIVTAVDASGSPKQQFILTSPDGAGTGKVILASPETSSAKQLIFTTSDNLVPGRIQIVTDSASVERLLGKTDVQRPQVVEYCVVCGDKASGCGVSHL

SEQ ID NO: 6862 - protein, 423 aa, Artificial Sequence
  Synthetic polypeptide
MAAFGLLSYEQRPLKRPRLGPPDVYPQDPKQKEDELTAVNVKQGFNNQPAFTGDEHGSARNIVINPSKIGAYFSSILAEKLKLNTFQDTGKKKPQVNAKDNYWLVTARSQSAIHSWFSDLAGNKPLSILAKKVPILSKKEDVFAYLAKYSVPMVRATWLIKMTCAYYSAISEAKIKKRQAPDPNLEWTQISTRYLREQLAKISDFYHMASSTGDGPVPVPPEVEQAMKQWEYNEKLAFHMFQEGMLEKHEYLTWILDVLEKIRPMDDDLLKLLLPLMLQYSDEFVQSAYLSRRLAYFCARRLSLLLSDSPNLLAAHSPHMMIGPNNSSIGAPSPGPPGPGMSPVQLAFSDFLSCAQHGPLVYGLSCMLQTVTLCCPSALVWNYSTNENKSANPGSPLDLLQVAPSSLPMPGGNTAFNQQHYSQ

SEQ ID NO: 6863 - protein, 226 aa, Artificial Sequence
  Synthetic polypeptide
MGRKSLYLLIVGILIAYYIYTPLPDNVEEPWRMMWINAHLKTIQNLATFVELLGLHHFMDSFKVVGSFDEVPPTSDENVTVTETKFNNILVRVYVPKRKSEALRRGLFYIHGGGWCVGSAALSGYDLLSRWTADRLDAVVVSTNYRLAPKYHFPIQFEDVYNALRWFLRKKVLAKYGVNPERIGISGDSAGGNLAAAVTQQNMFCGQLEQCLPCISHQPSTPVDLY

SEQ ID NO: 6864 - protein, 12 aa, Artificial Sequence
  Synthetic polypeptide
MLVSHQFGTQNG

SEQ ID NO: 6865 - protein, 67 aa, Artificial Sequence
  Synthetic polypeptide
MAVSVTPIRDTKWLTLEVCREFQRGTCSRPDTECKFAHPSKSCQVENGRVIACFDSLKLLRIAGITT

SEQ ID NO: 6866 - protein, 126 aa, Artificial Sequence
  Synthetic polypeptide
MAVSVTPIRDTKWLTLEVCREFQRGTCSRPDTECKFAHPSKSCQVENGRVIACFDSLKIGPSSCRKTSSGLPLILHYGECYNYFIIYYNVIIIEIKCIINVMYLNHPQTIRHSTTTSPGKNCLPRG

SEQ ID NO: 6867 - protein, 12 aa, Artificial Sequence
  Synthetic polypeptide
MLVSHQFGTQNG

SEQ ID NO: 6868 - protein, 12 aa, Artificial Sequence
  Synthetic polypeptide
MLVSHQFGTQNG

SEQ ID NO: 6869 - protein, 153 aa, Artificial Sequence
  Synthetic polypeptide
MAVSVTPIRDTKWLTLEVCREFQRGTCSRPDTECKFAHPSKSCQVENGRVIACFDSLKGRCSRENCKYLHPPPHLKTQLEINGRNNLIQQKNMAMLAQQMQLANAMMPGAPLQPVWLLEHQRDRTVHSPGKRAEAREPSGLAQRTPPPWSPTS

SEQ ID NO: 6870 - protein, 61 aa, Artificial Sequence
  Synthetic polypeptide
MAMLAQQMQLANAMMPGAPLQPVWLLEHQRDRTVHSPGKRAEAREPSGLAQRTPPPWSPTS

SEQ ID NO: 6871 - protein, 96 aa, Artificial Sequence
  Synthetic polypeptide
MGRCSRENCKYLHPPPHLKTQLEINGRNNLIQQKNMAMLAQQMQLANAMMPGAPLQPVWLLEHQRDRTVHSPGKRAEAREPSGLAQRTPPPWSPTS

SEQ ID NO: 6872 - protein, 56 aa, Artificial Sequence
  Synthetic polypeptide
QQMQLANAMMPGAPLQPVWLLEHQRDRTVHSPGKRAEAREPSGLAQRTPPPWSPTS

SEQ ID NO: 6873 - protein, 155 aa, Artificial Sequence
  Synthetic polypeptide
MDATALERDAVQFARLAVQRDHEGRYSEAVFYYKEAAQALIYAEMAGSSLENIQEKITEYLERVQALHSAVQSKSADPLKSKHQLDLERAHFLVTQAFDEDEKENVEDAIELYTEAVDLCLKTSYETADKVLQNKLKQLARQALDRGNIHSFAIT

SEQ ID NO: 6874 - protein, 948 aa, Artificial Sequence
  Synthetic polypeptide
MSYDYHQNWGRDGGPRSSGGGYGGGPAGGHGGNRGSGGGGGGGGGGRGGRGRHPGHLKGREIGMWYAKKQGQKNKEAERQERAVVHMDERREEQIVQLLNSVQAKNDKESEAQISWFAPEDHGYGTEVSTKNTPCSENKLDIQEKKLINQEKKMFRIRNRSYIDRDSEYLLQENEPDGTLDQKLLEDLQKKKNDLRYIEMQHFREKLPSYGMQKELVNLIDNHQVTVISGETGCGKTTQVTQFILDNYIERGKGSACRIVCTQPRRISAISVAERVAAERAESCGSGNSTGYQIRLQSRLPRKQGSILYCTTGIILQWLQSDPYLSSVSHIVLDEIHERNLQSDVLMTVVKDLLNFRSDLKVILMSATLNAEKFSEYFGNCPMIHIPGFTFPVVEYLLEDVIEKIRYVPEQKEHRSQFKRGFMQGHVNRQEKEEKEAIYKERWPDYVRELRRRYSASTVDVIEMMEDDKVDLNLIVALIRYIVLEEEDGAILVFLPGWDNISTLHDLLMSQVMFKSDKFLIIPLHSLMPTVNQTQVFKRTPPGVRKIVIATNIAETSITIDDVVYVIDGGKIKETHFDTQNNISTMSAEWVSKANAKQRKGRAGRVQPGHCYHLYNGLRASLLDDYQLPEILRTPLEELCLQIKILRLGGIAYFLSRLMDPPSNEAVLLSIRHLMELNALDKQEELTPLGVHLARLPVEPHIGKMILFGALFCCLDPVLTIAASLSFKDPFVIPLGKEKIADARRKELAKDTRSDHLTVVNAFEGWEEARRRGFRYEKDYCWEYFLSSNTLQMLHNMKGQFAEHLLGAGFVSSRNPKDPESNINSDNEKIIKAVICAGLYPKVAKIRLNLGKKRKMVKVYTKTDGLVAVHPKSVNVEQTDFHYNWLIYHLKMRTSSIYLYDCTEVSPYCLLFFGGDISIQKDNDQETIAVDEWIVFQSPARIAHLVKA

SEQ ID NO: 6875 - protein, 919 aa, Artificial Sequence
  Synthetic polypeptide
MSYDYHQNWGRDGGPRSSGGGYGGGPAGGHGGNRGSGGGGGGGGGGRGGRGRHPGHLKGREIGMWYAKKQGQKNKEAERQERAVVHMDERREEQIVQLLNSVQAKNDKESEAQISWFAPEDHGYGTEVSTKNTPCSENKLDIQEKKLINQEKKMFRIRNRSYIDRDSEYLLQENEPDGTLDQKLLEDLQKKKNDLRYIEMQHFREKLPSYGMQKELVNLIDNHQVTVISGETGCGKTTQVTQFILDNYIERGKGSACRIVCTQPRRISAISVAERVAAERAESCGSGNSTGYQIRLQSRLPRKQGSILYCTTGIILQWLQSDPYLSSVSHIVLDEIHERNLQSDVLMTVVKDLLNFRSDLKVILMSATLNAEKFSEYFGNCPMIHIPGFTFPVVEYLLEDVIEKIRYVPEQKEHRSQFKRGFMQGHVNRQEKEEKEAIYKERWPDYVRELRRRYSASTVDVIEMMEDDKVDLNLIVALIRYIVLEEEDGAILVFLPGWDNISTLHDLLMSQVMFKSDKFLIIPLHSLMPTVNQTQVFKRTPPGVRKIVIATNIAETSITIDDVVYVIDGGKIKETHFDTQNNISTMSAEWVSKANAKQRKGRAGRVQPGHCYHLYNGLRASLLDDYQLPEILRTPLEELCLQIKILRLGGIAYFLSRLMDPPSNEAVLLSIRHLMELNALDKQEELTPLGVHLARLPVEPHIGKMILFGALFCCLDPVLTIAASLSFKDPFVIPLGWEEARRRGFRYEKDYCWEYFLSSNTLQMLHNMKGQFAEHLLGAGFVSSRNPKDPESNINSDNEKIIKAVICAGLYPKVAKIRLNLGKKRKMVKVYTKTDGLVAVHPKSVNVEQTDFHYNWLIYHLKMRTSSIYLYDCTEVSPYCLLFFGGDISIQKDNDQETIAVDEWIVFQSPARIAHLVKA

SEQ ID NO: 6876 - protein, 934 aa, Artificial Sequence
  Synthetic polypeptide
MSYDYHQNWGRDGGPRSSGGGYGGGPAGGHGGNRGSGGGGGGGGGGRGGRGRHPGHLKGREIGMWYAKKQGQKNKEAERQERAVVHMDERREEQIVQLLNSVQAKNDKESEAQISWFAPEDHGYGTEVSTKNTPCSENKLDIQEKKLINQEKKMFRIRNRSYIDRDSEYLLQENEPDGTLDQKLLEDLQKKKNDLRYIEMQHFREKLPSYGMQKELVNLIDNHQVTVISGETGCGKTTQVTQFILDNYIERGKGSACRIVCTQPRRISAISVAERVAAERAESCGSGNSTGYQIRLQSRLPRKQGSILYCTTGIILQWLQSDPYLSSVSHIVLDEIHERNLQSDVLMTVVKDLLNFRSDLKVILMSATLNAEKFSEYFGNCPMIHIPGFTFPVVEYLLEDVIEKIRYVPEQKEHRSQFKRGFMQGHVNRQEKEEKEAIYKERWPDYVRELRRRYSASTVDVIEMMEDDKVDLNLIVALIRYIVLEEEDGAILVFLPGWDNISTLHDLLMSQVMFKSGTMSQVFKRTPPGVRKIVIATNIAETSITIDDVVYVIDGGKIKETHFDTQNNISTMSAEWVSKANAKQRKGRAGRVQPGHCYHLYNGLRASLLDDYQLPEILRTPLEELCLQIKILRLGGIAYFLSRLMDPPSNEAVLLSIRHLMELNALDKQEELTPLGVHLARLPVEPHIGKMILFGALFCCLDPVLTIAASLSFKDPFVIPLGKEKIADARRKELAKDTRSDHLTVVNAFEGWEEARRRGFRYEKDYCWEYFLSSNTLQMLHNMKGQFAEHLLGAGFVSSRNPKDPESNINSDNEKIIKAVICAGLYPKVAKIRLNLGKKRKMVKVYTKTDGLVAVHPKSVNVEQTDFHYNWLIYHLKMRTSSIYLYDCTEVSPYCLLFFGGDISIQKDNDQETIAVDEWIVFQSPARIAHLVKA

SEQ ID NO: 6877 - protein, 934 aa, Artificial Sequence
  Synthetic polypeptide
MSYDYHQNWGRDGGPRSSGGGYGGGPAGGHGGNRGSGGGGGGGGGGRGGRGRHPGHLKGREIGMWYAKKQGQKNKEAERQERAVVHMDERREEQIVQLLNSVQAKNDKESEAQISWFAPEDHGYGTEVSTKNTPCSENKLDIQEKKLINQEKKMFRIRNRSYIDRDSEYLLQENEPDGTLDQKLLEDLQKKKNDLRYIEMQHFREKLPSYGMQKELVNLIDNHQVTVISGETGCGKTTQVTQFILDNYIERGKGSACRIVCTQPRRISAISVAERVAAERAESCGSGNSTGYQIRLQSRLPRKQGSILYCTTGIILQWLQSDPYLSSVSHIVLDEIHERNLQSDVLMTVVKDLLNFRSDLKVILMSATLNAEKFSEYFGNCPMIHIPGFTFPVVEYLLEDVIEKIRYVPEQKEHRSQFKRGFMQGHVNRQEKEEKEAIYKERWPDYVRELRRRYSASTVDVIEMMEDDKVDLNLIVALIRYIVLEEEDGAILVFLPGWDNISTLHDLLMSQVMFKSVNQTQVFKRTPPGVRKIVIATNIAETSITIDDVVYVIDGGKIKETHFDTQNNISTMSAEWVSKANAKQRKGRAGRVQPGHCYHLYNGLRASLLDDYQLPEILRTPLEELCLQIKILRLGGIAYFLSRLMDPPSNEAVLLSIRHLMELNALDKQEELTPLGVHLARLPVEPHIGKMILFGALFCCLDPVLTIAASLSFKDPFVIPLGKEKIADARRKELAKDTRSDHLTVVNAFEGWEEARRRGFRYEKDYCWEYFLSSNTLQMLHNMKGQFAEHLLGAGFVSSRNPKDPESNINSDNEKIIKAVICAGLYPKVAKIRLNLGKKRKMVKVYTKTDGLVAVHPKSVNVEQTDFHYNWLIYHLKMRTSSIYLYDCTEVSPYCLLFFGGDISIQKDNDQETIAVDEWIVFQSPARIAHLVKA

SEQ ID NO: 6878 - protein, 40 aa, Artificial Sequence
  Synthetic polypeptide
MALCNGDSKNLIMIQQRDPVWDILQKAGLIFKKGQCHKRL

SEQ ID NO: 6879 - protein, 66 aa, Artificial Sequence
  Synthetic polypeptide
MKVVGNYRVNTANSSTDTSGEHLTCLRRNEKVNPQSHIELQGAPKCQTILKKKNKIGGLIISDFKT

SEQ ID NO: 6880 - protein, 336 aa, Artificial Sequence
  Synthetic polypeptide
MSRVCIVVLEEVEDESPAFISKLPQENKSLHSPPSGNVLVRYPSLVQAIFNGDPDEVRALIFKKEDVNFQDNEKRTPLHAAAYLGDAEIIELLILSGARVNAKDSKWLTPLHRAVASCSEEAVQVLLKHSADVNARDKNWQTPLHIAAANKAVKCAEALVPLLSNVNVSDRAGRTALHHAAFSGHGEMVKLLLSRGANINAFDKKDRRAIHWAAYMGHIEVVKLLVSHGAEVTCKDKKSYTPLHAAASSGMISVVKYLLDLGVDMNEPNAYGNTPLHVACYNGQDVVVNELIDCGAIVNQKNEKGFTPLHFAAASTHGALCLELLVGNGADVNMKS

SEQ ID NO: 6881 - protein, 303 aa, Artificial Sequence
  Synthetic polypeptide
MAFLKLRDQPSLVQAIFNGDPDEVRALIFKKEDVNFQDNEKRTPLHAAAYLGDAEIIELLILSGARVNAKDSKWLTPLHRAVASCSEEAVQVLLKHSADVNARDKNWQTPLHIAAANKAVKCAEALVPLLSNVNVSDRAGRTALHHAAFSGHGEMVKLLLSRGANINAFDKKDRRAIHWAAYMGHIEVVKLLVSHGAEVTCKDKKSYTPLHAAASSGMISVVKYLLDLGVDMNEPNAYGNTPLHVACYNGQDVVVNELIDCGAIVNQKNEKGFTPLHFAAASTHGALCLELLVGNGADVNMKS

SEQ ID NO: 6882 - protein, 247 aa, Artificial Sequence
  Synthetic polypeptide
MLTFRTMKSEPHCTPQLTLEMQKSLNFLFYLEAVQVLLKHSADVNARDKNWQTPLHIAAANKAVKCAEALVPLLSNVNVSDRAGRTALHHAAFSGHGEMVKLLLSRGANINAFDKKDRRAIHWAAYMGHIEVVKLLVSHGAEVTCKDKKSYTPLHAAASSGMISVVKYLLDLGVDMNEPNAYGNTPLHVACYNGQDVVVNELIDCGAIVNQKNEKGFTPLHFAAASTHGALCLELLVGNGADVNMKS

SEQ ID NO: 6883 - protein, 187 aa, Artificial Sequence
  Synthetic polypeptide
MGRRSSDTEEESRSKRKKKHRRRSSSSSSSDSRTYSRKKGGRKSRSKSRSWSRDLQPRSHSYDRRRRHRSSSSSSYGSRRKRSRSRSRGRGKSYRVQRSRSKSRTRRSRSRPRLRSHSRSSERSSHRRTRSRSRDRERRKGRDKEKREKEKDKGKDKELHNIKRGITNVYDDEMLHQTLLAPLYDIP

SEQ ID NO: 6884 - protein, 10 aa, Artificial Sequence
  Synthetic polypeptide
VQVKTSSPFS

SEQ ID NO: 6885 - protein, 190 aa, Artificial Sequence
  Synthetic polypeptide
MGRRSSDTEEESRSKRKKKHRRRSSSSSSSDSRTYSRKKGGRKSRSKSRSWSRDLQPRSHSYDRRRRHRSSSSSSYGSRRKRSRSRSRGRGKSYRVQRSRSKSRTRRSRSRPRLRSHSRSSERSSHRRTRSRSRDRERRKGRDKEKREKEKDKGKDKELHNIKRGFHQKNCERKKKLTSNRKRKVLGRPN

SEQ ID NO: 6886 - protein, 302 aa, Artificial Sequence
  Synthetic polypeptide
MGVALRDLPGRHVSSRSHVTAVLTVFHGRCFLPGFGVVTTFPSPSPAGAMEEEDEEARALLAGGPDEADRGAPAAPGALPALCDPSRLAHRLLVLLLMCFLGFGSYFCYDNPAALQTQVKRDMQVNTTKFMLLYAWYSWPNVVLCFFGGFLIDRVFGIRWGTIIFSCFVCIGQVVFALGGIFNAFWLMEFGRFVFGIGGESLAVAQNTYAVSWFKGKELNLVFGLQLSMARIPLLSLPFLELSRQAPLGACAVAVPSAWSAPPSGIPTVRFLQVYTPKLLSVGRPPLPILYSPFQLYFFLIF

SEQ ID NO: 6887 - protein, 263 aa, Artificial Sequence
  Synthetic polypeptide
MGVALRDLPGRHVSSRSHVTAVLTVFHGRCFLPGFGVVTTFPSPSPAGAMEEEDEEARALLAGGPDEADRGAPAAPGALPALCDPSRLAHRLLVLLLMCFLGFAIFAMIILLPFRLKLNEWGTIIFSCFVCIGQVVFALGGIFNAFWLMEFGRFVFGIGGESLAVAQNTYAVSWFKGKELNLVFGLQLSMARIPLLSLPFLELSRQAPLGACAVAVPSAWSAPPSGIPTVRFLQVYTPKLLSVGRPPLPILYSPFQLYFFLIF

SEQ ID NO: 6888 - protein, 253 aa, Artificial Sequence
  Synthetic polypeptide
MEEEDEEARALLAGGPDEADRGAPAAPGALPALCDPSRLAHRLLVLLLMCFLGFGSYFCYDNPAALQTQVKRDMQVNTTKFMLLYAWYSWPNVVLCFFGGFLIDRVFGIRWGTIIFSCFVCIGQVVFALGGIFNAFWLMEFGRFVFGIGGESLAVAQNTYAVSWFKGKELNLVFGLQLSMARIPLLSLPFLELSRQAPLGACAVAVPSAWSAPPSGIPTVRFLQVYTPKLLSVGRPPLPILYSPFQLYFFLIF

SEQ ID NO: 6889 - protein, 226 aa, Artificial Sequence
  Synthetic polypeptide
MLLVTPRPERGGRGTELGEFCGTPLLFSSYFCYDNPAALQTQVKRDMQVNTTKFMLLYAWYSWPNVVLCFFGGFLIDRVFGIRWGTIIFSCFVCIGQVVFALGGIFNAFWLMEFGRFVFGIGGESLAVAQNTYAVSWFKGKELNLVFGLQLSMARIPLLSLPFLELSRQAPLGACAVAVPSAWSAPPSGIPTVRFLQVYTPKLLSVGRPPLPILYSPFQLYFFLIF

SEQ ID NO: 6890 - protein, 87 aa, Artificial Sequence
  Synthetic polypeptide
GKELNLVFGLQLSMARIPLLSLPFLELSRQAPLGACAVAVPSAWSAPPSGIPTVRFLQVYTPKLLSVGRPPLPILYSPFQLYFFLIF

SEQ ID NO: 6891 - protein, 492 aa, Artificial Sequence
  Synthetic polypeptide
MGVALRDLPGRHVSSRSHVTAVLTVFHGRCFLPGFGVVTTFPSPSPAGAMEEEDEEARALLAGGPDEADRGAPAAPGALPALCDPSRLAHRLLVLLLMCFLGFGSYFCYDNPAALQTQVKRDMQVNTTKFMLLYAWYSWPNVVLCFFGGFLIDRVFGIRWGTIIFSCFVCIGQVVFALGGIFNAFWLMEFGRFVFGIGGESLAVAQNTYAVSWFKGKELNLVFGLQLSMARIGSTVNMNLMGWLYSKIEALLGSAGHTTLGITLMIGGITCILSLICALALAYLDQRAERILHKEQGKTGEVIKLTDVKDFSLPLWLIFIICVCYYVAVFPFIGLGKVFFTEKFGFSSQAASAINSVVYVISAPMSPVFGLLVDKTGKNIIWVLCAVAATLVSHMMLAFTMWNPWIAMCLLGLSYSLLACALWPMVAFVVPEHQLGTAYGFMQSIQNLGLAIISIIAGMILDSRGYLFLEVFFIACVSWNKDHPYLKCGICR

SEQ ID NO: 6892 - protein, 453 aa, Artificial Sequence
  Synthetic polypeptide
MGVALRDLPGRHVSSRSHVTAVLTVFHGRCFLPGFGVVTTFPSPSPAGAMEEEDEEARALLAGGPDEADRGAPAAPGALPALCDPSRLAHRLLVLLLMCFLGFAIFAMIILLPFRLKLNEWGTIIFSCFVCIGQVVFALGGIFNAFWLMEFGRFVFGIGGESLAVAQNTYAVSWFKGKELNLVFGLQLSMARIGSTVNMNLMGWLYSKIEALLGSAGHTTLGITLMIGGITCILSLICALALAYLDQRAERILHKEQGKTGEVIKLTDVKDFSLPLWLIFIICVCYYVAVFPFIGLGKVFFTEKFGFSSQAASAINSVVYVISAPMSPVFGLLVDKTGKNIIWVLCAVAATLVSHMMLAFTMWNPWIAMCLLGLSYSLLACALWPMVAFVVPEHQLGTAYGFMQSIQNLGLAIISIIAGMILDSRGYLFLEVFFIACVSWNKDHPYLKCGICR

SEQ ID NO: 6893 - protein, 443 aa, Artificial Sequence
  Synthetic polypeptide
MEEEDEEARALLAGGPDEADRGAPAAPGALPALCDPSRLAHRLLVLLLMCFLGFGSYFCYDNPAALQTQVKRDMQVNTTKFMLLYAWYSWPNVVLCFFGGFLIDRVFGIRWGTIIFSCFVCIGQVVFALGGIFNAFWLMEFGRFVFGIGGESLAVAQNTYAVSWFKGKELNLVFGLQLSMARIGSTVNMNLMGWLYSKIEALLGSAGHTTLGITLMIGGITCILSLICALALAYLDQRAERILHKEQGKTGEVIKLTDVKDFSLPLWLIFIICVCYYVAVFPFIGLGKVFFTEKFGFSSQAASAINSVVYVISAPMSPVFGLLVDKTGKNIIWVLCAVAATLVSHMMLAFTMWNPWIAMCLLGLSYSLLACALWPMVAFVVPEHQLGTAYGFMQSIQNLGLAIISIIAGMILDSRGYLFLEVFFIACVSWNKDHPYLKCGICR

SEQ ID NO: 6894 - protein, 56 aa, Artificial Sequence
  Synthetic polypeptide
MAFLKLRDQQGSATARPQMVHGPLGTGCTAGGERPSREHYCLSSASCQISGSIRFS

SEQ ID NO: 6895 - protein, 501 aa, Artificial Sequence
  Synthetic polypeptide
MHNFEEELTCPICYSIFEDPRVLPCSHTFCRNCLENILQASGNFYIWRPLRIPLKCPNCRSITEIAPTGIESLPVNFALRAIIEKYQQEDHPDIVTCPEHYRQPLNVYCLLDKKLVCGHCLTIGQHHGHPIDDLQSAYLKEKDTPQKLLEQLTDTHWTDLTHLIEKLKEQKSHSEKMIQGDKEAVLQYFKELNDTLEQKKKSFLTALCDVGNLINQEYTPQIERMKEIREQQLELMALTISLQEESPLKFLEKVDDVRQHVQILKQRPLPEVQPVEIYPRVSKILKEEWSRTEIGQIKNVLIPKMKISPKRMSCSWPGTPVYSVAWGPDSEKVLYTAGKQLIIKPLQPNAKVLQWKAHDGIILKVDWNSVNDLILSAGEDCKYKVWDSYGRPLYNSQPHEHPITSVAWAPDGELFAVGSFHTLRLCDKTGWSYALEKPNTGSIFNIAWSIDGTQIAGACGNGHVVFAHVVEQHWEWKNFQVTLTKRRAMQLIFTGMGERQD

SEQ ID NO: 6896 - protein, 330 aa, Artificial Sequence
  Synthetic polypeptide
MRLKISLLKEPKHQELVSCVGWTTAEELYSCSDDHQIVKWNLLTSETTQIVKLPDDIYPIDFHWFPKSLGVKKQTQAESFVLTSSDGKFHLISKLGRVEKSVEAHCGAVLAGRWNYEGTALVTVGEDGQIKIWSKTGMLRSTLAQQGTPVYSVAWGPDSEKVLYTAGKQLIIKPLQPNAKVLQWKAHDGIILKVDWNSVNDLILSAGEDCKYKVWDSYGRPLYNSQPHEHPITSVAWAPDGELFAVGSFHTLRLCDKTGWSYALEKPNTGSIFNIAWSIDGTQIAGACGNGHVVFAHVVEQHWEWKNFQVTLTKRRAMQLIFTGMGERQD

SEQ ID NO: 6897 - protein, 193 aa, Artificial Sequence
  Synthetic polypeptide
MLRSTLAQQGTPVYSVAWGPDSEKVLYTAGKQLIIKPLQPNAKVLQWKAHDGIILKVDWNSVNDLILSAGEDCKYKVWDSYGRPLYNSQPHEHPITSVAWAPDGELFAVGSFHTLRLCDKTGWSYALEKPNTGSIFNIAWSIDGTQIAGACGNGHVVFAHVVEQHWEWKNFQVTLTKRRAMQLIFTGMGERQD

SEQ ID NO: 6898 - protein, 471 aa, Artificial Sequence
  Synthetic polypeptide
MHNFEEELTCPICYSIFEDPRVLPCSHTFCRNCLENILQASGNFYIWRPLRIPLKCPNCRSITEIAPTGIESLPVNFALRAIIEKYQQEDHPDIVTCPEHYRQPLNVYCLLDKKLVCGHCLTIGQHHGHPIDDLQSAYLKEKDTPQKLLEQLTDTHWTDLTHLIEKLKEQKSHSEKMIQGDKEAVLQYFKELNDTLEQKKKSFLTALCDVGNLINQEYTPQIERMKEIREQQLELMALTISLQEESPLKFLEKVDDVRQHVQILKQRPLPEVQPVEIYPRVSKILKEEWSRTEIGQIKNVLIPKMKISPKRMSCSWPGTPVYSVAWGPDSEKVLYTAGKQLIIKPLQPNAKVLQWKAHDGIILKVDWNSVNDLILSAGEDCKYKVWDSYGRPLYNSQPHEHPITSVAWAPDGELFAVGSFHTLRLCDKTGDMNHPFVQHIHSVHYPPVSYLVAGLVIRSTVTVFQGLCSFK

SEQ ID NO: 6899 - protein, 300 aa, Artificial Sequence
  Synthetic polypeptide
MRLKISLLKEPKHQELVSCVGWTTAEELYSCSDDHQIVKWNLLTSETTQIVKLPDDIYPIDFHWFPKSLGVKKQTQAESFVLTSSDGKFHLISKLGRVEKSVEAHCGAVLAGRWNYEGTALVTVGEDGQIKIWSKTGMLRSTLAQQGTPVYSVAWGPDSEKVLYTAGKQLIIKPLQPNAKVLQWKAHDGIILKVDWNSVNDLILSAGEDCKYKVWDSYGRPLYNSQPHEHPITSVAWAPDGELFAVGSFHTLRLCDKTGDMNHPFVQHIHSVHYPPVSYLVAGLVIRSTVTVFQGLCSFK

SEQ ID NO: 6900 - protein, 163 aa, Artificial Sequence
  Synthetic polypeptide
MLRSTLAQQGTPVYSVAWGPDSEKVLYTAGKQLIIKPLQPNAKVLQWKAHDGIILKVDWNSVNDLILSAGEDCKYKVWDSYGRPLYNSQPHEHPITSVAWAPDGELFAVGSFHTLRLCDKTGDMNHPFVQHIHSVHYPPVSYLVAGLVIRSTVTVFQGLCSFK

SEQ ID NO: 6901 - protein, 51 aa, Artificial Sequence
  Synthetic polypeptide
VNIRYGIVTAAHCTIHNLMSIPLLQLPGLQMENYLLLDRFILYACVIKLGT

SEQ ID NO: 6902 - protein, 467 aa, Artificial Sequence
  Synthetic polypeptide
MHNFEEELTCPICYSIFEDPRVLPCSHTFCRNCLENILQASGNFYIWRPLRIPLKCPNCRSITEIAPTGIESLPVNFALRAIIEKYQQEDHPDIVTCPEHYRQPLNVYCLLDKKLVCGHCLTIGQHHGHPIDDLQSAYLKEKDTPQKLLEQLTDTHWTDLTHLIEKLKEQKSHSEKMIQGDKEAVLQYFKELNDTLEQKKKSFLTALCDVGNLINQEYTPQIERMKEIREQQLELMALTISLQEESPLKFLEKVDDVRQHVQILKQRPLPEVQPVEIYPRVSKILKEEWSRTEIGQIKNVLIPKMKISPKRMSCSWPGTPVYSVAWGPDSEKVLYTAGKQLIIKPLQPNAKVLQWKAHDGIILKVDWNSVNDLILSAGEDCKYKVWDSYGRPLYNSQPHEHPITSVAWAPDGELFAVGSFHTLRLCDKTGNNFQACKLHSCKCHVQLYHFLCFNDVFYYTFFVFRYV

SEQ ID NO: 6903 - protein, 296 aa, Artificial Sequence
  Synthetic polypeptide
MRLKISLLKEPKHQELVSCVGWTTAEELYSCSDDHQIVKWNLLTSETTQIVKLPDDIYPIDFHWFPKSLGVKKQTQAESFVLTSSDGKFHLISKLGRVEKSVEAHCGAVLAGRWNYEGTALVTVGEDGQIKIWSKTGMLRSTLAQQGTPVYSVAWGPDSEKVLYTAGKQLIIKPLQPNAKVLQWKAHDGIILKVDWNSVNDLILSAGEDCKYKVWDSYGRPLYNSQPHEHPITSVAWAPDGELFAVGSFHTLRLCDKTGNNFQACKLHSCKCHVQLYHFLCFNDVFYYTFFVFRYV

SEQ ID NO: 6904 - protein, 159 aa, Artificial Sequence
  Synthetic polypeptide
MLRSTLAQQGTPVYSVAWGPDSEKVLYTAGKQLIIKPLQPNAKVLQWKAHDGIILKVDWNSVNDLILSAGEDCKYKVWDSYGRPLYNSQPHEHPITSVAWAPDGELFAVGSFHTLRLCDKTGNNFQACKLHSCKCHVQLYHFLCFNDVFYYTFFVFRYV

SEQ ID NO: 6905 - protein, 94 aa, Artificial Sequence
  Synthetic polypeptide
VNIRYGIVTAAHCTIHNLMSIPLLQLPGLQMENYLLLDRFILYACVIKLGTTSKPASSIHVSVTYSYTIFYVLMMYFIIPFLCLGMFRYTTIVV

SEQ ID NO: 6906 - protein, 445 aa, Artificial Sequence
  Synthetic polypeptide
MHNFEEELTCPICYSIFEDPRVLPCSHTFCRNCLENILQASGNFYIWRPLRIPLKCPNCRSITEIAPTGIESLPVNFALRAIIEKYQQEDHPDIVTCPEHYRQPLNVYCLLDKKLVCGHCLTIGQHHGHPIDDLQSAYLKEKDTPQKLLEQLTDTHWTDLTHLIEKLKEQKSHSEKMIQGDKEAVLQYFKELNDTLEQKKKSFLTALCDVGNLINQEYTPQIERMKEIREQQLELMALTISLQEESPLKFLEKVDDVRQHVQILKQRPLPEVQPVEIYPRVSKILKEEWSRTEIGQIKNVLIPKMKISPKRMSCSWPGTPVYSVAWGPDSEKVLYTAGKQLIIKPLQPNAKVLQWKAHDGIILKVDWNSVNDLILSAGEDCKYKVWDSYGRPLYNSQPHEHPITSVAWAPDGELFAVGSFHTLRLCDKTGCNTLNSLKMEKKDHV

SEQ ID NO: 6907 - protein, 274 aa, Artificial Sequence
  Synthetic polypeptide
MRLKISLLKEPKHQELVSCVGWTTAEELYSCSDDHQIVKWNLLTSETTQIVKLPDDIYPIDFHWFPKSLGVKKQTQAESFVLTSSDGKFHLISKLGRVEKSVEAHCGAVLAGRWNYEGTALVTVGEDGQIKIWSKTGMLRSTLAQQGTPVYSVAWGPDSEKVLYTAGKQLIIKPLQPNAKVLQWKAHDGIILKVDWNSVNDLILSAGEDCKYKVWDSYGRPLYNSQPHEHPITSVAWAPDGELFAVGSFHTLRLCDKTGCNTLNSLKMEKKDHV

SEQ ID NO: 6908 - protein, 137 aa, Artificial Sequence
  Synthetic polypeptide
MLRSTLAQQGTPVYSVAWGPDSEKVLYTAGKQLIIKPLQPNAKVLQWKAHDGIILKVDWNSVNDLILSAGEDCKYKVWDSYGRPLYNSQPHEHPITSVAWAPDGELFAVGSFHTLRLCDKTGCNTLNSLKMEKKDHV

SEQ ID NO: 6909 - protein, 56 aa, Artificial Sequence
  Synthetic polypeptide
VNIRYGIVTAAHCTIHNLMSIPLLQLPGLQMENYLLLDRFILYACVIKLGAIPSTL

SEQ ID NO: 6910 - protein, 165 aa, Artificial Sequence
  Synthetic polypeptide
MRLKISLLKEPKHQELVSCVGWTTAEELYSCSDDHQIVKWNLLTSETTQIVKLPDDIYPIDFHWFPKSLGVKKQTQAESFVLTSSDGKFHLISKLGRVEKSVEAHCGAVLAGRWNYEGTALVTVGEDGQIKIWSKTGMLRSTLAQQVTILLQENKFRAPTDSMLW

SEQ ID NO: 6911 - protein, 28 aa, Artificial Sequence
  Synthetic polypeptide
MLRSTLAQQVTILLQENKFRAPTDSMLW

SEQ ID NO: 6912 - protein, 50 aa, Artificial Sequence
  Synthetic polypeptide
YEGTALVTVGEDGQIKIWSKTGMLRSTLAQQVTILLQENKFRAPTDSMLW

SEQ ID NO: 6913 - protein, 166 aa, Artificial Sequence
  Synthetic polypeptide
MRLKISLLKEPKHQELVSCVGWTTAEELYSCSDDHQIVKWNLLTSETTQIVKLPDDIYPIDFHWFPKSLGVKKQTQAESFVLTSSDGKFHLISKLGRVEKSVEAHCGAVLAGRWNYEGTALVTVGEDGQIKIWSKTGMLRSTLAQQAVTILLQENKFRAPTDSMLW

SEQ ID NO: 6914 - protein, 29 aa, Artificial Sequence
  Synthetic polypeptide
MLRSTLAQQAVTILLQENKFRAPTDSMLW

SEQ ID NO: 6915 - protein, 51 aa, Artificial Sequence
  Synthetic polypeptide
YEGTALVTVGEDGQIKIWSKTGMLRSTLAQQAVTILLQENKFRAPTDSMLW

SEQ ID NO: 6916 - protein, 170 aa, Artificial Sequence
  Synthetic polypeptide
MRLKISLLKEPKHQELVSCVGWTTAEELYSCSDDHQIVKWNLLTSETTQIVKLPDDIYPIDFHWFPKSLGVKKQTQAESFVLTSSDGKFHLISKLGRVEKSVEAHCGAVLAGRWNYEGTALVTVGEDGQIKIWSKTGMLRSTLAQQAVPHHFHYCLTYTSCQISGDIRFS

SEQ ID NO: 6917 - protein, 33 aa, Artificial Sequence
  Synthetic polypeptide
MLRSTLAQQAVPHHFHYCLTYTSCQISGDIRFS

SEQ ID NO: 6918 - protein, 55 aa, Artificial Sequence
  Synthetic polypeptide
YEGTALVTVGEDGQIKIWSKTGMLRSTLAQQAVPHHFHYCLTYTSCQISGDIRFS

SEQ ID NO: 6919 - protein, 331 aa, Artificial Sequence
  Synthetic polypeptide
MPRKGTQPSTARRREEGPPPPSPDGASSDAEPEPPSGRTESPATAAETASEELDNRSLEEILNSIPPPPPPAMTNEAGAPRLMITHIVNQNFKSYAGEKILGPFHKRFSCIIGPNGSGKSNVIDSMLFVFGYRAQKIRSKKLSVLIHNSDEHKDIQSCTVEVHFQKIIDKEGDDYEVIPNSNFYVSRTACRDNTSVYHISGKKKTFKDVGNLLRSHGIDLDHNRFLILQGEVEQIAMMKPKGQTEHDEGMLEYLEDIIGCGRLNEPIKVLCRRVEILNEHRGEKLNRVKMVEKEKDALEGEKNIAIEFLTLENEIFRKKNHVCQYYITLGG

SEQ ID NO: 6920 - protein, 306 aa, Artificial Sequence
  Synthetic polypeptide
MPRKGTQPSTARRREEGPPPPSPDGASSDAEPEPPSGRTESPATAAAMTNEAGAPRLMITHIVNQNFKSYAGEKILGPFHKRFSCIIGPNGSGKSNVIDSMLFVFGYRAQKIRSKKLSVLIHNSDEHKDIQSCTVEVHFQKIIDKEGDDYEVIPNSNFYVSRTACRDNTSVYHISGKKKTFKDVGNLLRSHGIDLDHNRFLILQGEVEQIAMMKPKGQTEHDEGMLEYLEDIIGCGRLNEPIKVLCRRVEILNEHRGEKLNRVKMVEKEKDALEGEKNIAIEFLTLENEIFRKKNHVCQYYITLGG

SEQ ID NO: 6921 - protein, 1269 aa, Artificial Sequence
  Synthetic polypeptide
MPRKGTQPSTARRREEGPPPPSPDGASSDAEPEPPSGRTESPATAAETASEELDNRSLEEILNSIPPPPPPAMTNEAGAPRLMITHIVNQNFKSYAGEKILGPFHKRFSCIIGPNGSGKSNVIDSMLFVFGYRAQKIRSKKLSVLIHNSDEHKDIQSCTVEVHFQKIIDKEGDDYEVIPNSNFYVSRTACRDNTSVYHISGKKKTFKDVGNLLRSHGIDLDHNRFLILQGEVEQIAMMKPKGQTEHDEGMLEYLEDIIGCGRLNEPIKVLCRRVEILNEHRGEKLNRVKMVEKEKDALEGEKNIAIEFLTLENEIFRKKNHVCQYYIYELQKRIAEMETQKEKIHEDTKEINEKSNILSNEMKAKNKDVKDTEKKLNKITKFIEENKEKFTQLDLEDVQVREKLKHATSKAKKLEKQLQKDKEKVEEFKSIPAKSNNIINETTTRNNALEKEKEKEEKKLKEVMDSLKQETQGLQKEKESREKELMGFSKSVNEARSKMDVAQSELDIYLSRHNTAVSQLTKAKEALIAASETLKERKAAIRDIEGKLPQTEQELKEKEKELQKLTQEETNFKSLVHDLFQKVEEAKSSLAMNRSRGKVLDAIIQEKKSGRIPGIYGRLGDLGAIDEKYDVAISSCCHALDYIVVDSIDIAQECVNFLKRQNIGVATFIGLDKMAVWAKKMTEIQTPENTPRLFDLVKVKDEKIRQAFYFALRDTLVADNLDQATRVAYQKDRRWRVVTLQGQIIEQSGTMTGGGSKVMKGRMGSSLVIEISEEEVNKMESQLQNDSKKAMQIQEQKVQLEERVVKLRHSEREMRNTLEKFTASIQRLIEQEEYLNVQVKELEANVLATAPDKKKQKLLEENVSAFKTEYDAVAEKAGKVEAEVKRLHNTIVEINNHKLKAQQDKLDKINKQLDECASAITKAQVAIKTADRNLQKAQDSVLRTEKEIKDTEKEVDDLTAELKSLEDKAAEVVKNTNAAEESLPEIQKEHRNLLQELKVIQENEHALQKDALSIKLKLEQIDGHIAEHNSKIKYWHKEISKISLHPIEDNPIEEISVLSPEDLEAIKNPDSITNQIALLEARCHEMKPNLGAIAEYKKKEELYLQRVAELDKITYERDSFRQAYEDLRKQRLNEFMAGFYIITNKLKENYQMLTLGGDAELELVDSLDPFSEGIMFSVRPPKKSWKKIFNLSGGEKTLSSLALVFALHHYKPTPLYFMDEIDAALDFKNVSIVAFYIYPGMGVCALSQLLQRQRREDRLSLGGRNCSES

SEQ ID NO: 6922 - protein, 1211 aa, Artificial Sequence
  Synthetic polypeptide
MPRKGTQPSTARRREEGPPPPSPDGASSDAEPEPPSGRTESPATAAETASEELDNRSLEEILNSIPPPPPPAMTNEAGAPRLMITHIVNQNFKSYAGEKILGPFHKRFSCIIGPNGSGKSNVIDSMLFVFGYRAQKIRSKKLSVLIHNSDEHKDIQSCTVEVHFQKIIDKEGDDYEVIPNSNFYVSRTACRDNTSVYHISGKKKTFKDVGNLLRSHGIDLDHNRFLILQGEVEQIAMMKPKGQTEHDEGMLEYLEDIIGCGRLNEPIKVLCRRVEILNEHRGEKLNRVKMVEKEKDALEGEKNIAIEFLTLENEIFRKKNHVCQYYIYELQKRIAEMETQKEKIHEDTKEINEKSNILSNEMKAKNKDVKDTEKKLNKITKFIEENKEKFTQLDLEDVQVREKLKHATSKAKKLEKQLQKDKEKVEEFKSIPAKSNNIINETTTRNNALEKEKEKEEKKLKEVMDSLKQETQGLQKEKESREKELMGFSKSVNEARSKMDVAQSELDIYLSRHNTAVSQLTKAKEALIAASETLKERKAAIRDIEGKLPQTEQELKEKEKELQKLTQEETNFKSLVHDLFQKVEEAKSSLAMNRSRGKVLDAIIQEKKSGRIPGIYGRLGDLGAIDEKYDVAISSCCHALDYIVVDSIDIAQECVNFLKRQNIGVATFIGLDKMAVWAKKMTEIQTPENTPRLFDLVKVKDEKIRQAFYFALRDTLVADNLDQATRVAYQKDRRWRVVTLQGQIIEQSGTMTGGGSKVMKGRMGSSLVIEISEEEVNKMESQLQNDSKKAMQIQEQKVQLEERVVKLRHSEREMRNTLEKFTASIQRLIEQEEYLNVQVKELEANVLATAPDKKKQKLLEENVSAFKTEYDAVAEKAGKVEAEVKRLHNTIVEINNHKLKAQQDKLDKINKQLDECASAITKAQVAIKTADRNLQKAQDSVLRTEKEIKDTEKEVDDLTAELKSLEDKAAEVVKNTNAAEISKISLHPIEDNPIEEISVLSPEDLEAIKNPDSITNQIALLEARCHEMKPNLGAIAEYKKKEELYLQRVAELDKITYERDSFRQAYEDLRKQRLNEFMAGFYIITNKLKENYQMLTLGGDAELELVDSLDPFSEGIMFSVRPPKKSWKKIFNLSGGEKTLSSLALVFALHHYKPTPLYFMDEIDAALDFKNVSIVAFYIYPGMGVCALSQLLQRQRREDRLSLGGRNCSES

SEQ ID NO: 6923 - protein, 1244 aa, Artificial Sequence
  Synthetic polypeptide
MPRKGTQPSTARRREEGPPPPSPDGASSDAEPEPPSGRTESPATAAAMTNEAGAPRLMITHIVNQNFKSYAGEKILGPFHKRFSCIIGPNGSGKSNVIDSMLFVFGYRAQKIRSKKLSVLIHNSDEHKDIQSCTVEVHFQKIIDKEGDDYEVIPNSNFYVSRTACRDNTSVYHISGKKKTFKDVGNLLRSHGIDLDHNRFLILQGEVEQIAMMKPKGQTEHDEGMLEYLEDIIGCGRLNEPIKVLCRRVEILNEHRGEKLNRVKMVEKEKDALEGEKNIAIEFLTLENEIFRKKNHVCQYYIYELQKRIAEMETQKEKIHEDTKEINEKSNILSNEMKAKNKDVKDTEKKLNKITKFIEENKEKFTQLDLEDVQVREKLKHATSKAKKLEKQLQKDKEKVEEFKSIPAKSNNIINETTTRNNALEKEKEKEEKKLKEVMDSLKQETQGLQKEKESREKELMGFSKSVNEARSKMDVAQSELDIYLSRHNTAVSQLTKAKEALIAASETLKERKAAIRDIEGKLPQTEQELKEKEKELQKLTQEETNFKSLVHDLFQKVEEAKSSLAMNRSRGKVLDAIIQEKKSGRIPGIYGRLGDLGAIDEKYDVAISSCCHALDYIVVDSIDIAQECVNFLKRQNIGVATFIGLDKMAVWAKKMTEIQTPENTPRLFDLVKVKDEKIRQAFYFALRDTLVADNLDQATRVAYQKDRRWRVVTLQGQIIEQSGTMTGGGSKVMKGRMGSSLVIEISEEEVNKMESQLQNDSKKAMQIQEQKVQLEERVVKLRHSEREMRNTLEKFTASIQRLIEQEEYLNVQVKELEANVLATAPDKKKQKLLEENVSAFKTEYDAVAEKAGKVEAEVKRLHNTIVEINNHKLKAQQDKLDKINKQLDECASAITKAQVAIKTADRNLQKAQDSVLRTEKEIKDTEKEVDDLTAELKSLEDKAAEVVKNTNAAEESLPEIQKEHRNLLQELKVIQENEHALQKDALSIKLKLEQIDGHIAEHNSKIKYWHKEISKISLHPIEDNPIEEISVLSPEDLEAIKNPDSITNQIALLEARCHEMKPNLGAIAEYKKKEELYLQRVAELDKITYERDSFRQAYEDLRKQRLNEFMAGFYIITNKLKENYQMLTLGGDAELELVDSLDPFSEGIMFSVRPPKKSWKKIFNLSGGEKTLSSLALVFALHHYKPTPLYFMDEIDAALDFKNVSIVAFYIYPGMGVCALSQLLQRQRREDRLSLGGRNCSES

SEQ ID NO: 6924 - protein, 143 aa, Artificial Sequence
  Synthetic polypeptide
MIEDTMTLLSLLGRIMRYFLLRPETLFLLCISLALWSYFFHTDEVKTIVKSSRDAVKMVKGKVAEIMQNDRLGGLDVLEAEFSKTWEFKNHNVAVYSIQGRRDHMEDRFEVLTDLANKTHPSIFGIFDGHGGEHVRSAFHLLP

SEQ ID NO: 6925 - protein, 259 aa, Artificial Sequence
  Synthetic polypeptide
MIEDTMTLLSLLGRIMRYFLLRPETLFLLCISLALWSYFFHTDEVKTIVKSSRDAVKMVKGKVAEIMQNDRLGGLDVLEAEFSKTWEFKNHNVAVYSIQGRRDHMEDRFEVLTDLANKTHPSIFGIFDGHGGETAAEYVKSRLPEALKQHLQDYEKDKENSVLSYQTILEQQILSIDREMLEKLTVSYDEAGHKTAIPERALPHTQEEGMLHRAAKKNLNRQALQGFPIQSIRIRSYPFCPITFLHSCLYFVESKHKNG

SEQ ID NO: 6926 - protein, 80 aa, Artificial Sequence
  Synthetic polypeptide
MLEKLTVSYDEAGHKTAIPERALPHTQEEGMLHRAAKKNLNRQALQGFPIQSIRIRSYPFCPITFLHSCLYFVESKHKNG

SEQ ID NO: 6927 - protein, 132 aa, Artificial Sequence
  Synthetic polypeptide
MPAFSTTAAEYVKSRLPEALKQHLQDYEKDKENSVLSYQTILEQQILSIDREMLEKLTVSYDEAGHKTAIPERALPHTQEEGMLHRAAKKNLNRQALQGFPIQSIRIRSYPFCPITFLHSCLYFVESKHKNG

SEQ ID NO: 6928 - protein, 510 aa, Artificial Sequence
  Synthetic polypeptide
MSKDIKSVEHSPKIHQRNDPQHVNDRTFFIDASNQSLTAIPLEIFTFTELEEVHLENNQIEEIPQEIQRLKNIRVLYLDKNNLRSLCPALGLLSSLESLDLSYNPIFSSSLVVVSFLHALRELRLYQTDLKEIPVVIFKNLHHLELLGLTGNHLKCLPKEIVNQTKLREIYLKRNQFEVFPQELCVLYTLEIIDLDENKIGAIPEEIGHLTGLQKFYMASNNLPVLPASLCQCSQLSVLDLSHNLLHSIPKSFAELRKMTEIGLSGNRLEKVPRLICRWTSLHLLYLGNTGLHRLRGSFRCLVNLRFLDLSQNHLHHCPLQICALKNLEVLGLDDNKIGQLPSELGSLSKLKILGLTGNEFLSFPEEVLSLASLEKLYIGQDQGFKLTYVPEHIRKLQSLKELYIENNHLEYLPVSLGSMPNLEVLDCRHNLLKQLPDAICQAQALKELRLEDNLLTHLPENLDSLVNLKVLTLMDNPMEEPPKEVCAEGNEAIWKYLKENRNRNIMATK

SEQ ID NO: 6929 - protein, 108 aa, Artificial Sequence
  Synthetic polypeptide
MPTQRDSSTMSHTVAGGGSGDHSHQVRVKAYYRGDIMITHFEPSISFEGLCNEVRDMCSFDNEQLFTMKWIDEEGQARCFTPIIPALWEAEAGGSPEVRSSRPAWTTW

SEQ ID NO: 6930 - protein, 911 aa, Artificial Sequence
  Synthetic polypeptide
MPTEKKISSASDCINSMVEGSELKKVRSNSRIYHRYFLLDADMQSLRWEPSKKDSEKAKIDIKSIKEVRTGKNTDIFRSNGISDQISEDCAFSVIYGENYESLDLVANSADVANIWVTGLRYLISYGKHTLDMLESSQDNMRTSWVSQMFSEIDVDNLGHITLCNAVQCIRNLNPGLKTSKIELKFKELHKSKDKAGTEVTKEEFIEVFHELCTRPEIYFLLVQFSSNKEFLDTKDLMMFLEAEQGVAHINEEISLEIIHKYEPSKEGQEKGWLSIDGFTNYLMSPDCYIFDPEHKKVCQDMKQPLSHYFINSSHNTYLIEDQFRGPSDITGYIRALKMGCRSVELDVWDGPDNEPVIYTGHTMTSQIVFRSVIDIINKYAFFASEYPLILCLENHCSIKQQKVMVQHMKKLLGDKLYTTSPNVEESYLPSPDVLKGKILIKAKKLSSNCSGVEGDVTDEDEGAEMSQRMGKENMEQPNNVPVKRFQLCKELSELVSICKSVQFKEFQVSFQVQKYWEVCSFNEVLASKYANENPGDFVNYNKRFLARVFPSPMRIDSSNMNPQDFWKCGCQIVAMNFQTPGLMMDLNIGWFRQNGNCGYVLRPAIMREEVSFFSANTKDSVPGVSPQLLHIKIISGQNFPKPKGSGAKGDVVDPYVYVEIHGIPADCAEQRTKTVHQNGDAPIFDESFEFQINLPELAMVRFVVLDDDYIGDEFIGQYTIPFECLQTGYRHVPLQSLTGEVLAHASLFVHVAITNRRGGGKPHKRGLSVRKGKKSREYASLRTLWIKTVDEVFKNAQPPIRDATDLRENMQNAVVSFKELCGLSSVANLMQCMLAVSPRFLGPDNTPLVVLNLSEQYPTMELQGIVPEVLKKIVTTYDMMIQSLKALIENADAVYEKIVHCQKAAYSARR

SEQ ID NO: 6931 - protein, 19 aa, Artificial Sequence
  Synthetic polypeptide
KLFTNMNHPKRVRKRAGSP

SEQ ID NO: 6932 - protein, 426 aa, Artificial Sequence
  Synthetic polypeptide
MASDSPARSLDEIDLSALRDPAGIFELVELVGNGTYGQVYKGRHVKTGQLAAIKVMDVTGDEEEEIKQEINMLKKYSHHRNIATYYGAFIKKNPPGMDDQLWLVMEFCGAGSVTDLIKNTKGNTLKEEWIAYICREILRGLSHLHQHKVIHRDIKGQNVLLTENAEVKLVDFGVSAQLDRTVGRRNTFIGTPYWMAPEVIACDENPDATYDFKSDLWSLGITAIEMAEGAPPLCDMHPMRALFLIPRNPAPRLKSKKWSKKFQSFIESCLVKNHSQRPATEQLMKHPFIRDQPNERQVRIQLKDHIDRTKKKRGEKDETEYEYSGSEEEEEENDSGEPSSILNLPGESTLRRDFLRLQLANKERSEALRRQQLEQQQRENEEHKRQLLAERQKRIEEQKEQRRRLEEIHRMALHCFSASSLAPFHG

SEQ ID NO: 6933 - protein, 426 aa, Artificial Sequence
  Synthetic polypeptide
MASDSPARSLDEIDLSALRDPAGIFELVELVGNGTYGQVYKGRHVKTGQLAAIKVMDVTGDEEEEIKQEINMLKKYSHHRNIATYYGAFIKKNPPGMDDQLWLVMEFCGAGSVTDLIKNTKGNTLKEEWIAYICREILRGLSHLHQHKVIHRDIKGQNVLLTENAEVKIVDFGVSAQLDRTVGRRNTFIGTPYWMAPEVIACDENPDATYDFKSDLWSLGITAIEMAEGAPPLCDMHPMRALFLIPRNPAPRLKSKKWSKKFQSFIESCLVKNHSQRPATEQLMKHPFIRDQPNERQVRIQLKDHIDRTKKKRGEKDETEYEYSGSEEEEEENDSGEPSSILNLPGESTLRRDFLRLQLANKERSEALRRQQLEQQQRENEEHKRQLLAERQKRIEEQKEQRRRLEEIHRMALHCFSASSLAPFHG

SEQ ID NO: 6934 - protein, 963 aa, Artificial Sequence
  Synthetic polypeptide
MSLKNEPRVNTSALQKIAADMSNIIENLDTRELHFEGEEVDYDVSPSDPKIQEVYIPFSAIYNTQGFKEPNIQTYLSGCPIKAQVLEVERFTSTTRVPSINLYTIELTHGEFKWQVKRKFKHFQEFHRELLKYKAFIRIPIPTRRHTFRRQNVREEPREMPSLPRSSENMIREEQFLGRRKQLEDYLTKILKMPMYRNYHATTEFLDISQLSFIHDLGPKGIEGMIMKRSGGHRIPGLNCCGQGRACYRWSKRWLIVKDSFLLYMKPDSGAIAFVLLVDKEFKIKVGKKETETKYGIRIDNLSRTLILKCNSYRHARWWGGAIEEFIQKHGTNFLKDHRFGSYAAIQENALAKWYVNAKGYFEDVANAMEEANEEIFITDWWLSPEIFLKRPVVEGNRWRLDCILKRKAQQGVRIFIMLYKEVELALGINSEYTKRTLMRLHPNIKVMRHPDHVSSTVYLWAHHEKLVIIDQSVAFVGGIDLAYGRWDDNEHRLTDVGSVKRVTSGPSLGSLPPAAMESMESLRLKDKNEPVQNLPIQKSIDDVDSKLKGIGKPRKFSKFSLYKQLHRHHLHDADSISSIDSTSNTGSIRSLQTGVGELHGETRFWHGKDYCNFVFKDWVQLDKPFADFIDRYSTPRMPWHDIASAVHGKAARDVARHFIQRWNFTKIMKSKYRSLSYPFLLPKSQTTAHELRYQVPGSVHANVQLLRSAADWSAGIKYHEESIHAAYVHVIENSRHYIYIENQFFISCADDKVVFNKIGDAIAQRILKAHRENQKYRVYVVIPLLPGFEGDISTGGGNALQAIMHFNYRTMCRGENSILGQLKAELGNQWINYISFCGLRTHAELEGNLVTELIYVHSKLLIADDNTVIIGSANINDRSMLGKRDSEMAVIVQDTETVPSVMDGKEYQAGRFARGLRLQCFRVVLGYLDDPSEDIQDPVSDKFFKEVWVSTAARNATIYDKV

SEQ ID NO: 6935 - protein, 1001 aa, Artificial Sequence
  Synthetic polypeptide
MSLKNEPRVNTSALQKIAADMSNIIENLDTRELHFEGEEVDYDVSPSDPKIQEVYIPFSAIYNTQGFKEPNIQTYLSGCPIKAQVLEVERFTSTTRVPSINLYTIELTHGEFKWQVKRKFKHFQEFHRELLKYKAFIRIPIPTRRHTFRRQNVREEPREMPSLPRSSENMIREEQFLGRRKQLEDYLTKILKMPMYRNYHATTEFLDISQLSFIHDLGPKGIEGMIMKRSGGHRIPGLNCCGQGRACYRWSKRWLIVKDSFLLYMKPDSGAIAFVLLVDKEFKIKVGKKETETKYGIRIDNLSRTLILKCNSYRHARWWGGAIEEFIQKHGTNFLKDHRFGSYAAIQENALAKWYVNAKGYFEDVANAMEEANEEIFITDWWLSPEIFLKRPVVEGNRWRLDCILKRKAQQGVRIFIMLYKEVELALGINSEYTKRTLMRLHPNIKVMRHPDHVSSTVYLWAHHEKLVIIDQSVAFVGGIDLAYGRWDDNEHRLTDVGSVKRVTSGPSLGSLPPAAMESMESLRLKDKNEPVQNLPIQKSIDDVDSKLKGIGKPRKFSKFSLYKQLHRHHLHDADSISSIDSTSSYFNHYRSHHNLIHGLKPHFKLFHPSSESEQGLTRPHADTGSIRSLQTGVGELHGETRFWHGKDYCNFVFKDWVQLDKPFADFIDRYSTPRMPWHDIASAVHGKAARDVARHFIQRWNFTKIMKSKYRSLSYPFLLPKSQTTAHELRYQVPGSVHANVQLLRSAADWSAGIKYHEESIHAAYVHVIENSRHYIYIENQFFISCADDKVVFNKIGDAIAQRILKAHRENQKYRVYVVIPLLPGFEGDISTGGGNALQAIMHFNYRTMCRGENSILGQLKAELGNQWINYISFCGLRTHAELEGNLVTELIYVHSKLLIADDNTVIIGSANINDRSMLGKRDSEMAVIVQDTETVPSVMDGKEYQAGRFARGLRLQCFRVVLGYLDDPSEDIQDPVSDKFFKEVWVSTAARNATIYDKV

SEQ ID NO: 6936 - protein, 307 aa, Artificial Sequence
  Synthetic polypeptide
MYVTMMMTDQIPLELPPLLNGEVAMMPHLVNGDAAQQVILVQVNPGETFTIRAEDGTLQCIQGPAEVPMMSPNGSIPPIHVPPGYISQVIEDSTGVRRVVVTPQSPECYPPSYPSAMSPTHHLPPYLTHHPHFIHNSHTAYYPPVTGPGDMPPQFFPQHHLPHTIYGEQEIIPFYGMSTYITREDQYSKPPHKKLKDRQIDRQNRLNSPPSSIYKSSCTTVYNGYGKGHSGGSGGGGSGSGPGIKKTERRARSSPKSNDSDLQEYELEVKRVQDILSGIEKPQVGAPRGQRSYLNHLCIHSPSQGEV

SEQ ID NO: 6937 - protein, 100 aa, Artificial Sequence
  Synthetic polypeptide
MRSSCVLLTALVALAAYYVYIPLPGSVSDPWKLMLLDATFRGAQQVPLLVIPRQTRSGVDLQRTPTDLQLRVLTVRRKTNKQKGIASTSTKKTSTPKPHL

SEQ ID NO: 6938 - protein, 132 aa, Artificial Sequence
  Synthetic polypeptide
MSSCRGQKVAGGLRVVSPFPLCQPAGEPSQGKMRSSCVLLTALVALAAYYVYIPLPGSVSDPWKLMLLDATFRGAQQVPLLVIPRQTRSGVDLQRTPTDLQLRVLTVRRKTNKQKGIASTSTKKTSTPKPHL

SEQ ID NO: 6939 - protein, 23 aa, Artificial Sequence
  Synthetic polypeptide
PEVSGWYRPFLFASPLASRARAR

SEQ ID NO: 6940 - protein, 32 aa, Artificial Sequence
  Synthetic polypeptide
MGENEASLPNTSLQETSKNCIQHLKQWHSTLA

SEQ ID NO: 6941 - protein, 16 aa, Artificial Sequence
  Synthetic polypeptide
MGENEASLPNTSLQAL

SEQ ID NO: 6942 - protein, 299 aa, Artificial Sequence
  Synthetic polypeptide
MILLQHAVLPPPKQPSPSPPMSVATRSTGTLQLPPQKPFGQEASLPLAGEEELSKGGEQDCALEELCKPLYCKLCNVTLNSAQQAQAHYQGKNHGKKLRNYYAANSCPPPARMSNVVEPAATPVVPVPPQMGSFKPGGRVILATENDYCKLCDASFSSPAVAQAHYQGKNHAKRLRLAEAQSNSFSESSELGQRRARKEGNEFKMMPNRRNMYTVQNNSAGPYFNPRSRQRIPRDLAMCVTPSGQFYCSMCNVGAGEEMEFRQHLESKQHKSKVSEQRSLLQPLDTVSSLLESIKVWHD

SEQ ID NO: 6943 - protein, 298 aa, Artificial Sequence
  Synthetic polypeptide
MILLQHAVLPPPKQPSPSPPMSVATRSTGTLQLPPQKPFGQEASLPLAGEEELSKGGEQDCALEELCKPLYCKLCNVTLNSAQQAQAHYQGKNHGKKLRNYYAANSCPPPARMSNVVEPAATPVVPVPPQMGSFKPGGRVILATENDYCKLCDASFSSPAVAQAHYQGKNHAKRLRLAEAQSNSFSESSELGQRRARKEGNEFKMMPNRRNMYTVQNNSGPYFNPRSRQRIPRDLAMCVTPSGQFYCSMCNVGAGEEMEFRQHLESKQHKSKVSEQRSLLQPLDTVSSLLESIKVWHD

SEQ ID NO: 6944 - protein, 293 aa, Artificial Sequence
  Synthetic polypeptide
MILLQHAVLPPPKQPSPSPPMSVATRSTGTLQLPPQKPFGQEASLPLAGEEELSKGGEQDCALEELCKPLYCKLCNVTLNSAQQAQAHYQGKNHGKKLRNYYAANSCPPPARMSNVVEPAATPVVPVPPQMGSFKPGGRVILATENDYCKLCDASFSSPAVAQAHYQGKNHAKRLRLAEAQSNSFSESSELGQRRARKEGNEFKMMPNRRNMYTVQNNSAGPYFNPRSRQRIPRDLAMCVTPSGQFYCSMCNVGAGEEMEFRQHLESKQHKSKVSSSALGHSVIPIGVNKGMA

SEQ ID NO: 6945 - protein, 292 aa, Artificial Sequence
  Synthetic polypeptide
MILLQHAVLPPPKQPSPSPPMSVATRSTGTLQLPPQKPFGQEASLPLAGEEELSKGGEQDCALEELCKPLYCKLCNVTLNSAQQAQAHYQGKNHGKKLRNYYAANSCPPPARMSNVVEPAATPVVPVPPQMGSFKPGGRVILATENDYCKLCDASFSSPAVAQAHYQGKNHAKRLRLAEAQSNSFSESSELGQRRARKEGNEFKMMPNRRNMYTVQNNSGPYFNPRSRQRIPRDLAMCVTPSGQFYCSMCNVGAGEEMEFRQHLESKQHKSKVSSSALGHSVIPIGVNKGMA

SEQ ID NO: 6946 - protein, 245 aa, Artificial Sequence
  Synthetic polypeptide
MSELEQLRQEAEQLRNQIQDARKACNDATLVQITSNMDSVGRIQMRTRRTLRGHLAKIYAMHWGYDSRLLVSASQDGKLIIWDSYTTNKMHAIPLRSSWVMTCAYAPSGNYVACGGLDNICSIYNLKTREGNVRVSRELPGHTGYLSCCRFLDDSQIVTSSGDTTCALWDIETAQQTTTFTGHSGDVMSLSLSPDMRTFVSGACDASSKLWDIRDGMCRQSFTGHVSDINAVSGEVWRQASIEGR

SEQ ID NO: 6947 - protein, 5 aa, Artificial Sequence
  Synthetic polypeptide
INYLG

SEQ ID NO: 6948 - protein, 38 aa, Artificial Sequence
  Synthetic polypeptide
MWRWIRQQLPVTVAHALWEAEASRSLEIRSSRPAWPTR

SEQ ID NO: 6949 - protein, 253 aa, Artificial Sequence
  Synthetic polypeptide
MNKLKSSQKDKVRQFMIFTQSSEKTAVSCLSQNDWKLDVATDNFFQNPELYIRESVKGSLDRKKLEQLYNRYKDPQDENKIGIDGIQQFCDDLALDPASISVLIIAWKFRAATQCEFSKQEFMDGMTELGCDSIEKLKAQIPKMEQELKEPGRFKDFYQFTFNFAKNPGQKGLDLEMAIAYWNLVLNGRFKFLDLWNKFLLEHHKRSIPKDTWNLLLDFSTMIADDMSNYDEEEKSIHFKQRHHTIRWRRRIF

SEQ ID NO: 6950 - protein, 238 aa, Artificial Sequence
  Synthetic polypeptide
MIFTQSSEKTAVSCLSQNDWKLDVATDNFFQNPELYIRESVKGSLDRKKLEQLYNRYKDPQDENKIGIDGIQQFCDDLALDPASISVLIIAWKFRAATQCEFSKQEFMDGMTELGCDSIEKLKAQIPKMEQELKEPGRFKDFYQFTFNFAKNPGQKGLDLEMAIAYWNLVLNGRFKFLDLWNKFLLEHHKRSIPKDTWNLLLDFSTMIADDMSNYDEEEKSIHFKQRHHTIRWRRRIF

SEQ ID NO: 6951 - protein, 127 aa, Artificial Sequence
  Synthetic polypeptide
MAAASAVSVLLVAAERNRWHRLPSLLLPPRTWVWRQRTMKYTTATGRNITKVLIANRGEIACRVMRTAKKLGVQTVAVYSEADRNSMHVDMADEAYSIGPAPSQQSYLSMEKIIQVAKTSAAQTPEW

SEQ ID NO: 6952 - protein, 18 aa, Artificial Sequence
  Synthetic polypeptide
MEKIIQVAKTSAAQTPEW

SEQ ID NO: 6953 - protein, 89 aa, Artificial Sequence
  Synthetic polypeptide
MKYTTATGRNITKVLIANRGEIACRVMRTAKKLGVQTVAVYSEADRNSMHVDMADEAYSIGPAPSQQSYLSMEKIIQVAKTSAAQTPEW

SEQ ID NO: 6954 - protein, 80 aa, Artificial Sequence
  Synthetic polypeptide
MAAASAVSVLLVAAERNRWHRLPSLLLPPRTWVWRQRTMKYTTATDEAYSIGPAPSQQSYLSMEKIIQVAKTSAAQTPEW

SEQ ID NO: 6955 - protein, 641 aa, Artificial Sequence
  Synthetic polypeptide
MLSCLKEEMPPQELTRRLATVITHVDEIMQQEVRPLMAVEIIEQLHRQFAILSGGRGEDGAPIITFPEFSGFKHIPDEDFLNVMTYLTSIPSVEAASIGFIVVIDRRRDKWSSVKASLTRIAVAFPGNLQLIFILRPSRFIQRTFTDIGIKYYRNEFKTKVPIIMVNSVSDLHGYIDKSQLTRELGGTLEYRHGQWVNHRTAIENFALTLKTTAQMLQTFGSCLATAELPRSMLSTEDLLMSHTRQRDKLQDELKLLGKQGTTLLSCIQEPATKCPNSKLNLNQLENVTTMERLLVQLDETEKAFSHFWSEHHLKLNQCLQLQHFEHDFCKAKLALDNLLEEQAEFTGIGDSVMHVEQILKEHKKLEEKSQEPLEKAQLLALVGDQLIQSHHYAADAIRPRCVELRHLCDDFINGNKKKWDILGKSLEFHRQLDKVSQWCEAGIYLLASQAVDKCQSREGVDIALNDIATFLGTVKEYPLLSPKEFYNEFELLLTLDAKAKAQKVLQRLDDVQEIFHKRQVSLMKLAAKQTRPVQPVAPHPESSPKWVSSKTSQPSTSVPLARPLRTSEEPYTETELNSRGKEDDETKFEVKSEEIFESHHERGNPELEQQARLGDLSPRRPGVVAQVCNPNTFQHFGRLR

SEQ ID NO: 6956 - protein, 535 aa, Artificial Sequence
  Synthetic polypeptide
MVLILGRRLNREDLGVRDSPATKRKVFEMDPKSLTGHEFFDFSSGSSHAENILQIFNEFRDSRLFTDVIICVEGKEFPCHRAVLSACSSYFRAMFCNDHRESREMLVEINGILAEAMECFLQYVYTGKVKITTENVQYLFETSSLFQISVLRDACAKFLEEQLDPCNCLGIQRFADTHSLKTLFTKCKNFALQTFEDVSQHEEFLELDKDELIDYICSDELVIGKEEMVFEAVMRWVYRAVDLRRPLLHELLTHVRLPLLHPNYFVQTVEVDQLIQNSPECYQLLHEARRYHILGNEMMSPRTRPRRSTGYSEVIVVVGGCERVGGFNLPYTECYDPVTGEWKSLAKLPEFTKSEYAVCALRNDILVSGGRINSRDVWIYNSQLNIWIRVASLNKGRWRHKMAVLLGKVYVVGGYDGQNRLSSVECYDSFSNRWTEVAPLKEAVSSPAVTSCVGKLFVIGGGPDDNTCSDKVQSYDPETNSWLLRAAIPIAKRCITAVSLNNLIYVAGGLTKAIYCYDPVEDYWMHVQNTFSRQE

SEQ ID NO: 6957 - protein, 284 aa, Artificial Sequence
  Synthetic polypeptide
MAWRGWAQRGWGCGQAWGASVGGRSCEELTAVLTPPQLLGRRFNFFIQQKCGFRKAPRKVEPRRSDPGTSGEAYKRSALIPPVEETVFYPSPYPIRSLIKPLFFTVGFTGCAFGSAAIWQYESLKSRVQSYFDGIKADWLDSIRPQKEGDFRKEINKWWNNLSDGQRTVTGIIAANVLVFCLWRVPSLQRTMIRYFTSNPASKVLCSPMLLSTFSHFSLFHMAANMYVLWSFSSSIVNILGQEQFMAVYLSAGVISNFVSYVGKVATGRYGPSLGAAGCSGLHL

SEQ ID NO: 6958 - protein, 2 aa, Artificial Sequence
  Synthetic polypeptide
PA

SEQ ID NO: 6959 - protein, 64 aa, Artificial Sequence
  Synthetic polypeptide
HMAANMYVLWSFSSSIVNILGQEQFMAVYLSAGVISNFVSYVGKVATGRYGPSLGAAGCSGLHL

SEQ ID NO: 6960 - protein, 54 aa, Artificial Sequence
  Synthetic polypeptide
AADNDQIFHIESSLNKYVCFVELLFQHSEHSGSRAVHGSVPICRCYFQFCQLRG

SEQ ID NO: 6961 - protein, 234 aa, Artificial Sequence
  Synthetic polypeptide
MAWRGWAQRGWGCGQAWGASVGGRSCEELTAVLTPPQLLGRRFNFFIQQKCGFRKAPRKVEPRRSDPGTSGEAYKRSALIPPVEETVFYPSPYPIRSLIKPLFFTVGFTGCAFGSAAIWQYESLKSRVQSYFDGIKADWLDSIRPQKEGDFRKEINKWWNNLSDGQRTVTGIIAANVLVFCLWRVPSLQRTMIRYFTSNPASSVISNFVSYVGKVATGRYGPSLGAAGCSGLHL

SEQ ID NO: 6962 - protein, 3 aa, Artificial Sequence
  Synthetic polypeptide
TQV

SEQ ID NO: 6963 - protein, 14 aa, Artificial Sequence
  Synthetic polypeptide
MYCGIQILALWERM

SEQ ID NO: 6964 - protein, 442 aa, Artificial Sequence
  Synthetic polypeptide
MMNKLYIGNLSPAVTADDLRQLFGDRKLPLAGQVLLKSGYAFVDYPDQNWAIRAIETLSGKVELHGKIMEVDYSVSKKLRSRKIQIRNIPPHLQWEVLDGLLAQYGTVENVEQVNTDTETAVVNVTYATREEAKIAMEKLSGHQFENYSFKISYIPDEEVSSPSPPQRAQRGDHSSREQGHAPGGTSQARQIDFPLRILVPTQFVGAIIGKEGLTIKNITKQTQSRVDIHRKENSGAAEKPVTIHATPEGTSEACRMILEIMQKEADETKLAEEIPLKILAHNGLVGRLIGKEGRNLKKIEHETGTKITISSLQDLSIYNPERTITVKGTVEACASAEIEIMKKLREAFENDMLAVNQQANLIPGLNLSALGIFSTGLSVLSPPAGPRGAPPAAPYHPFTTHSGYFSSLYPHHQFGPFPHHHSTQERYRSHLYKTENLRSDS

SEQ ID NO: 6965 - protein, 385 aa, Artificial Sequence
  Synthetic polypeptide
MFSCPGHYHVDGFLNPGSRKIQIRNIPPHLQWEVLDGLLAQYGTVENVEQVFAFSLVNTDTETAVVNVTYATREEAKIAMEKLSGHQFENYSFKISYIPDEEVSSPSPPQRAQRGDHSSREQGHAPGGTSQARQIDFPLRILVPTQFVGAIIGKEGLTIKNITKQTQSRVDIHRKENSGAAEKPVTIHATPEGTSEACRMILEIMQKEADETKLAEEIPLKILAHNGLVGRLIGKEGRNLKKIEHETGTKITISSLQDLSIYNPERTITVKGTVEACASAEIEIMKKLREAFENDMLAVNQQANLIPGLNLSALGIFSTGLSVLSPPAGPRGAPPAAPYHPFTTHSGYFSSLYPHHQFGPFPHHHSTQERYRSHLYKTENLRSDS

SEQ ID NO: 6966 - protein, 448 aa, Artificial Sequence
  Synthetic polypeptide
MMNKLYIGNLSPAVTADDLRQLFGDRKLPLAGQVLLKSGYAFVDYPDQNWAIRAIETLSGKVELHGKIMEVDYSVSKKLRSRKIQIRNIPPHLQWEVLDGLLAQYGTVENVEQVFAFSLVNTDTETAVVNVTYATREEAKIAMEKLSGHQFENYSFKISYIPDEEVSSPSPPQRAQRGDHSSREQGHAPGGTSQARQIDFPLRILVPTQFVGAIIGKEGLTIKNITKQTQSRVDIHRKENSGAAEKPVTIHATPEGTSEACRMILEIMQKEADETKLAEEIPLKILAHNGLVGRLIGKEGRNLKKIEHETGTKITISSLQDLSIYNPERTITVKGTVEACASAEIEIMKKLREAFENDMLAVNQQANLIPGLNLSALGIFSTGLSVLSPPAGPRGAPPAAPYHPFTTHSGYFSSLYPHHQFGPFPHHHSTQERYRSHLYKTENLRSDS

SEQ ID NO: 6967 - protein, 399 aa, Artificial Sequence
  Synthetic polypeptide
MMNKLYIGNLSPAVTADDLRQLFGDRKLPLAGQVLLKSGYAFVDYPDQNWAIRAIETLSGKVELHGKIMEVDYSVSKKLRSRKIQIRNIPPHLQWEVLDGLLAQYGTVENVEQVNTDTETAVVNVTYATREEAKIAMEKLSGHQFENYSFKISYIPDEEVSSPSPPQRAQRGDHSSREQGHAPGGTSQARQIDFPLRILVPTQFVGAIIGKEGLTIKNITKQTQSRVDIHRKENSGAAEKPVTIHATPEGTSEACRMILEIMQKEADETKLAEEIPLKILAHNGLVGRLIGKEGRNLKKIEHETGTKITISSLQDLSIYNPERTITVKGTVEACASAEIEIMKKLREAFENDMLAVNTHSGYFSSLYPHHQFGPFPHHHSTQERYRSHLYKTENLRSDS

SEQ ID NO: 6968 - protein, 444 aa, Artificial Sequence
  Synthetic polypeptide
MSHPSWLPPKSTGEPLGHVPARMETTHSFGNPSISVSTQQPPKKFAPVVAPKPKYNPYKQPGGEGDFLPPPPPPLDDSSALPSISGNFPPPPPLDEEAFKVQGNPGGKTLEERRSSLDAEIDSLTSILADLECSSPYKPRPPQSSTGSTASPPVSTPVTGHKRMVIPNQPPLTATKKSTLKPQPAPQAGPIPVAPIGTLKPQPQPVPASYTTASTSSRPTFNVQVKSAQPSPHYMAAPSSGQIYGSGPQGYNTQPVPVSGQCPPPSTRGGMDYAYIPPPGLQPEPGYGYAPNQGRYYEGYYAAGPGYGGRNDSDPTYGQQGHPNTWKREPGYTPPGAGNQNPPGMYPVTGPKKTYITDPVSAPCAPPLQPKGGHSGQLGPSSVAPSFRPEDELEHLTKKMLYDMENPPADEYFALPCLSVKWLSIQCDGVLKAVFSEKSLHNAP

SEQ ID NO: 6969 - protein, 281 aa, Artificial Sequence
  Synthetic polypeptide
MVIPNQPPLTATKKSTLKPQPAPQAGPIPVAPIGTLKPQPQPVPASYTTASTSSRPTFNVQVKSAQPSPHYMAAPSSGQIYGSGPQGYNTQPVPVSGQCPPPSTRGGMDYAYIPPPGLQPEPGYGYAPNQGRYYEGYYAAGPGYGGRNDSDPTYGQQGHPNTWKREPGYTPPGAGNQNPPGMYPVTGPKKTYITDPVSAPCAPPLQPKGGHSGQLGPSSVAPSFRPEDELEHLTKKMLYDMENPPADEYFALPCLSVKWLSIQCDGVLKAVFSEKSLHNAP

SEQ ID NO: 6970 - protein, 418 aa, Artificial Sequence
  Synthetic polypeptide
MSHPSWLPPKSTGEPLGHVPARMETTHSFGNPSISVSTQQPPKKFAPVVAPKPKYNPYKQPGGEGDFLPPPPPPLDDSSALPSISGNFPPPPPLDEEAFKVQGNPGGKTLEERRSSLDAEIDSLTSILADLECSSPYKPRPPQSSTGSTASPPVSTPVTGHKRMVIPNQPPLTATKKSTLKPQPAPQAGPIPVAPIGTLKPQPQPVPASYTTASTSSRPTFNVQVKSAQPSPHYMAAPSSGQIYGSGPQGYNTQPVPVSGQCPPPSTRGGMDYAYIPPPGLQPEPGYGYAPNQGRYYEGYYAAGPGYGGRNDSDPTYGQQGHPNTWKREPGYTPPGAGNQNPPGMYPVTGPKKTYITDPVSAPCAPPLQPKGGHSGQLGPSSVAPSFRPEDELEHLTKKMLYDMENPPADEYFGQMPH

SEQ ID NO: 6971 - protein, 255 aa, Artificial Sequence
  Synthetic polypeptide
MVIPNQPPLTATKKSTLKPQPAPQAGPIPVAPIGTLKPQPQPVPASYTTASTSSRPTFNVQVKSAQPSPHYMAAPSSGQIYGSGPQGYNTQPVPVSGQCPPPSTRGGMDYAYIPPPGLQPEPGYGYAPNQGRYYEGYYAAGPGYGGRNDSDPTYGQQGHPNTWKREPGYTPPGAGNQNPPGMYPVTGPKKTYITDPVSAPCAPPLQPKGGHSGQLGPSSVAPSFRPEDELEHLTKKMLYDMENPPADEYFGQMPH

SEQ ID NO: 6972 - protein, 310 aa, Artificial Sequence
  Synthetic polypeptide
MAEVSIDQSKLPGVKEVCRDFAVLEDHTLAHSLQEQEIEHHLASNVQRNRLVQHDLQVAKQLQEEDLKAQAQLQKRYKDLEQQDCEIAQEIQEKLAIEAERRRIQEKKDEDIARLLQEKELQEEKKRKKHFPEFPATRAYADSYYYEDGGMKPRVMKEAVSTPSRMAHRDQEWYDAEIARKLQEEELLATQVDMRAAQVAQDEEIARLLMAEEKKAYKKAKEREKSSLDKRKQDPEWKPKTAKAANSKSKESDEPHHSKNERPARKLQAENQIKNSIPSTITTHTKYLGILLTKEVKDLYEENCKTLLKE

SEQ ID NO: 6973 - protein, 486 aa, Artificial Sequence
  Synthetic polypeptide
MAEVSIDQSKLPGVKEVCRDFAVLEDHTLAHSLQEQEIEHHLASNVQRNRLVQHDLQVAKQLQEEDLKAQAQLQKRYKDLEQQDCEIAQEIQEKLAIEAERRRIQEKKDEDIARLLQEKELQEEKKRKKHFPEFPATRAYADSYYYEDGDQPGSRRARELGSGFSRPCRLQRDGKTVKHKKEKPEHPLENLEEPEQHCSSKRSLSSSSSGKGRDNPHINNEQHERKRSTQERPRRPLLPTISGEVFLSTECDDWETKINHQTRNWEKQSRHQDRLSPKSSQKAGLHCKEVVYGRDHGQGEHRKRRHRPRTPPFSESEEQLHLHDAGMKPRVMKEAVSTPSRMAHRDQEWYDAEIARKLQEEELLATQVDMRAAQVAQDEEIARLLMAEEKKAYKKAKEREKSSLDKRKQDPEWKPKTAKAANSKSKESDEPHHSKNERPARKLQAENQIKNSIPSTITTHTKYLGILLTKEVKDLYEENCKTLLKE

SEQ ID NO: 6974 - protein, 89 aa, Artificial Sequence
  Synthetic polypeptide
MESKEPQLKGIVTRLFSQQGYFLQMHPDGTIDGTKDENSDYTLFNLIPVGLRVVAIQGVKASLYVAMNGEGYLYSSHRMKLFSGVPLSA

SEQ ID NO: 6975 - protein, 151 aa, Artificial Sequence
  Synthetic polypeptide
MAAAIASSLIRQKRQARESNSDRVSASKRRSSPSKDGRSLCERHVLGVFSKVRFCSGRKRPVRRRPEPQLKGIVTRLFSQQGYFLQMHPDGTIDGTKDENSDYTLFNLIPVGLRVVAIQGVKASLYVAMNGEGYLYSSHRMKLFSGVPLSA

SEQ ID NO: 6976 - protein, 52 aa, Artificial Sequence
  Synthetic polypeptide
MESKALFNLIPVGLRVVAIQGVKASLYVAMNGEGYLYSSHRMKLFSGVPLSA

SEQ ID NO: 6977 - protein, 65 aa, Artificial Sequence
  Synthetic polypeptide
MHPDGTIDGTKDENSDYTLFNLIPVGLRVVAIQGVKASLYVAMNGEGYLYSSHRMKLFSGVPLSA

SEQ ID NO: 6978 - protein, 29 aa, Artificial Sequence
  Synthetic polypeptide
MWRLRRAAVACCTLTVEWSRSKWISKNIK

SEQ ID NO: 6979 - protein, 537 aa, Artificial Sequence
  Synthetic polypeptide
MWRLRRAAVACEVCQSLVKHSSGIKGSLPLQKLHLVSRSIYHSHHPTLKLQRPQLRTSFQQFSSLTNLPLRKLKFSPIKYGYQPRRNFWPARLATRLLKLRYLILGSAVGGGYTAKKTFDQWKDMIPDLSEYKWIVPDIVWEIDEYIDFGSPEETAFRATDRGSESDKHFRKGLLGELILLQQQIQEHEEEARRAAGQYSTSYAQQKRKVSDKEKIDQLQEELLHTQLKYQRILERLEKENKELRKLVLQKDDKGIHHRKLKKSLIDMYSEVLDVLSDYDASYNTQDHLPRVVVVGDQSAGKTSVLEMIAQARIFPRGSGEMMTRSPVKVTLSEGPHHVALFKDSSREFDLTKEEDLAALRHEIELRMRKNVKEGCTVSPETISLNVKGPGLQRMVLVDLPGVINTVTSGMAPDTKETIFSISKAYMQNPNAIILCIQDGSVDAERSIVTDLVSQMDPHGRRTIFVLTKVDLAEKNVASPSRIQQIIEGKLFPMKALGYFAVVTGKGNSSESIEAIREYEEEFFQNSKLLKHGGSHL

SEQ ID NO: 6980 - protein, 591 aa, Artificial Sequence
  Synthetic polypeptide
MWRLRRAAVACEVCQSLVKHSSGIKGSLPLQKLHLVSRSIYHSHHPTLKLQRPQLRTSFQQFSSLTNLPLRKLKFSPIKYGYQPRRNFWPARLATRLLKLRYLILGSAVGGGYTAKKTFDQWKDMIPDLSEYKWIVPDIVWEIDEYIDFEKIRKALPSSEDLVKLAPDFDKIVESLSLLKDFFTSGHKLVSEVIGASDLLLLLGSPEETAFRATDRGSESDKHFRKGLLGELILLQQQIQEHEEEARRAAGQYSTSYAQQKRKVSDKEKIDQLQEELLHTQLKYQRILERLEKENKELRKLVLQKDDKGIHHRKLKKSLIDMYSEVLDVLSDYDASYNTQDHLPRVVVVGDQSAGKTSVLEMIAQARIFPRGSGEMMTRSPVKVTLSEGPHHVALFKDSSREFDLTKEEDLAALRHEIELRMRKNVKEGCTVSPETISLNVKGPGLQRMVLVDLPGVINTVTSGMAPDTKETIFSISKAYMQNPNAIILCIQDGSVDAERSIVTDLVSQMDPHGRRTIFVLTKVDLAEKNVASPSRIQQIIEGKLFPMKALGYFAVVTGKGNSSESIEAIREYEEEFFQNSKLLKHGGSHL

SEQ ID NO: 6981 - protein, 555 aa, Artificial Sequence
  Synthetic polypeptide
MWRLRRAAVACEVCQSLVKHSSGIKGSLPLQKLHLVSRSIYHSHHPTLKLQRPQLRTSFQQFSSLTNLPLRKLKFSPIKYGYQPRRNFWPARLATRLLKLRYLILGSAVGGGYTAKKTFDQWKDMIPDLSEYKWIVPDIVWEIDEYIDFGHKLVSEVIGASDLLLLLGSPEETAFRATDRGSESDKHFRKGLLGELILLQQQIQEHEEEARRAAGQYSTSYAQQKRKVSDKEKIDQLQEELLHTQLKYQRILERLEKENKELRKLVLQKDDKGIHHRKLKKSLIDMYSEVLDVLSDYDASYNTQDHLPRVVVVGDQSAGKTSVLEMIAQARIFPRGSGEMMTRSPVKVTLSEGPHHVALFKDSSREFDLTKEEDLAALRHEIELRMRKNVKEGCTVSPETISLNVKGPGLQRMVLVDLPGVINTVTSGMAPDTKETIFSISKAYMQNPNAIILCIQDGSVDAERSIVTDLVSQMDPHGRRTIFVLTKVDLAEKNVASPSRIQQIIEGKLFPMKALGYFAVVTGKGNSSESIEAIREYEEEFFQNSKLLKHGGSHL

SEQ ID NO: 6982 - protein, 554 aa, Artificial Sequence
  Synthetic polypeptide
MWRLRRAAVACEVCQSLVKHSSGIKGSLPLQKLHLVSRSIYHSHHPTLKLQRPQLRTSFQQFSSLTNLPLRKLKFSPIKYGYQPRRNFWPARLATRLLKLRYLILGSAVGGGYTAKKTFDQWKDMIPDLSEYKWIVPDIVWEIDEYIDFEKIRKALPSSEDLVKLAPDFDKIVESLSLLKDFFTSGHKLVSEVIGASDLLLLLGSPEETAFRATDRGSESDKHFRKVSDKEKIDQLQEELLHTQLKYQRILERLEKENKELRKLVLQKDDKGIHHRKLKKSLIDMYSEVLDVLSDYDASYNTQDHLPRVVVVGDQSAGKTSVLEMIAQARIFPRGSGEMMTRSPVKVTLSEGPHHVALFKDSSREFDLTKEEDLAALRHEIELRMRKNVKEGCTVSPETISLNVKGPGLQRMVLVDLPGVINTVTSGMAPDTKETIFSISKAYMQNPNAIILCIQDGSVDAERSIVTDLVSQMDPHGRRTIFVLTKVDLAEKNVASPSRIQQIIEGKLFPMKALGYFAVVTGKGNSSESIEAIREYEEEFFQNSKLLKHGGSHL

SEQ ID NO: 6983 - protein, 573 aa, Artificial Sequence
  Synthetic polypeptide
MWRLRRAAVACEVCQSLVKHSSGIKGSLPLQKLHLVSRSIYHSHHPTLKLQRPQLRTSFQQFSSLTNLPLRKLKFSPIKYGYQPRRNFWPARLATRLLKLRYLILGSAVGGGYTAKKTFDQWKDMIPDLSEYKWIVPDIVWEIDEYIDFEKIRKALPSSEDLVKLAPDFDKIVESLSLLKDFFTSGSPEETAFRATDRGSESDKHFRKGLLGELILLQQQIQEHEEEARRAAGQYSTSYAQQKRKVSDKEKIDQLQEELLHTQLKYQRILERLEKENKELRKLVLQKDDKGIHHRKLKKSLIDMYSEVLDVLSDYDASYNTQDHLPRVVVVGDQSAGKTSVLEMIAQARIFPRGSGEMMTRSPVKVTLSEGPHHVALFKDSSREFDLTKEEDLAALRHEIELRMRKNVKEGCTVSPETISLNVKGPGLQRMVLVDLPGVINTVTSGMAPDTKETIFSISKAYMQNPNAIILCIQDGSVDAERSIVTDLVSQMDPHGRRTIFVLTKVDLAEKNVASPSRIQQIIEGKLFPMKALGYFAVVTGKGNSSESIEAIREYEEEFFQNSKLLKHGGSHL

SEQ ID NO: 6984 - protein, 536 aa, Artificial Sequence
  Synthetic polypeptide
MWRLRRAAVACEVCQSLVKHSSGIKGSLPLQKLHLVSRSIYHSHHPTLKLQRPQLRTSFQQFSSLTNLPLRKLKFSPIKYGYQPRRNFWPARLATRLLKLRYLILGSAVGGGYTAKKTFDQWKDMIPDLSEYKWIVPDIVWEIDEYIDFEKIRKALPSSEDLVKLAPDFDKIVESLSLLKDFFTSGSPEETAFRATDRGSESDKHFRKVSDKEKIDQLQEELLHTQLKYQRILERLEKENKELRKLVLQKDDKGIHHRKLKKSLIDMYSEVLDVLSDYDASYNTQDHLPRVVVVGDQSAGKTSVLEMIAQARIFPRGSGEMMTRSPVKVTLSEGPHHVALFKDSSREFDLTKEEDLAALRHEIELRMRKNVKEGCTVSPETISLNVKGPGLQRMVLVDLPGVINTVTSGMAPDTKETIFSISKAYMQNPNAIILCIQDGSVDAERSIVTDLVSQMDPHGRRTIFVLTKVDLAEKNVASPSRIQQIIEGKLFPMKALGYFAVVTGKGNSSESIEAIREYEEEFFQNSKLLKHGGSHL

SEQ ID NO: 6985 - protein, 945 aa, Artificial Sequence
  Synthetic polypeptide
MWRLRRAAVACEVCQSLVKHSSGIKGSLPLQKLHLVSRSIYHSHHPTLKLQRPQLRTSFQQFSSLTNLPLRKLKFSPIKYGYQPRRNFWPARLATRLLKLRYLILGSAVGGGYTAKKTFDQWKDMIPDLSEYKWIVPDIVWEIDEYIDFGSPEETAFRATDRGSESDKHFRKGLLGELILLQQQIQEHEEEARRAAGQYSTSYAQQKRKVSDKEKIDQLQEELLHTQLKYQRILERLEKENKELRKLVLQKDDKGIHHRKLKKSLIDMYSEVLDVLSDYDASYNTQDHLPRVVVVGDQSAGKTSVLEMIAQARIFPRGSGEMMTRSPVKVTLSEGPHHVALFKDSSREFDLTKEEDLAALRHEIELRMRKNVKEGCTVSPETISLNVKGPGLQRMVLVDLPGVINTVTSGMAPDTKETIFSISKAYMQNPNAIILCIQDGSVDAERSIVTDLVSQMDPHGRRTIFVLTKVDLAEKNVASPSRIQQIIEGKLFPMKALGYFAVVTGKGNSSESIEAIREYEEEFFQNSKLLKTSMLKAHQVTTRNLSLAVSDCFWKMVRESVEQQADSFKATRFNLETEWKNNYPRLRELDRNELFEKAKNEILDEVISLSQVTPKHWEEILQQSLWERVSTHVIENIYLPAAQTMNSGTFNTTVDIKLKQWTDKQLPNKAVEVAWETLQEEFSRFMTEPKGKEHDDIFDKLKEAVKEESIKRHKWNDFAEDSLRVIQHNALEDRSISDKQQWDAAIYFMEEALQARLKDTENAIENMVGPDWKKRWLYWKNRTQEQCVHNETKNELEKMLKCNEEHPAYLASDEITTVRKNLESRGVEVDPSLIKDTWHQVYRRHFLKTALNHCNLCRRGFYYYQRHFVDSELECNDVVLFWRIQRMLAITANTLRQQLTNTEVRRLEKNVKEVLEDFAEDGEKKIKLLTGKRVQLAEDLSLPIP

SEQ ID NO: 6986 - protein, 999 aa, Artificial Sequence
  Synthetic polypeptide
MWRLRRAAVACEVCQSLVKHSSGIKGSLPLQKLHLVSRSIYHSHHPTLKLQRPQLRTSFQQFSSLTNLPLRKLKFSPIKYGYQPRRNFWPARLATRLLKLRYLILGSAVGGGYTAKKTFDQWKDMIPDLSEYKWIVPDIVWEIDEYIDFEKIRKALPSSEDLVKLAPDFDKIVESLSLLKDFFTSGHKLVSEVIGASDLLLLLGSPEETAFRATDRGSESDKHFRKGLLGELILLQQQIQEHEEEARRAAGQYSTSYAQQKRKVSDKEKIDQLQEELLHTQLKYQRILERLEKENKELRKLVLQKDDKGIHHRKLKKSLIDMYSEVLDVLSDYDASYNTQDHLPRVVVVGDQSAGKTSVLEMIAQARIFPRGSGEMMTRSPVKVTLSEGPHHVALFKDSSREFDLTKEEDLAALRHEIELRMRKNVKEGCTVSPETISLNVKGPGLQRMVLVDLPGVINTVTSGMAPDTKETIFSISKAYMQNPNAIILCIQDGSVDAERSIVTDLVSQMDPHGRRTIFVLTKVDLAEKNVASPSRIQQIIEGKLFPMKALGYFAVVTGKGNSSESIEAIREYEEEFFQNSKLLKTSMLKAHQVTTRNLSLAVSDCFWKMVRESVEQQADSFKATRFNLETEWKNNYPRLRELDRNELFEKAKNEILDEVISLSQVTPKHWEEILQQSLWERVSTHVIENIYLPAAQTMNSGTFNTTVDIKLKQWTDKQLPNKAVEVAWETLQEEFSRFMTEPKGKEHDDIFDKLKEAVKEESIKRHKWNDFAEDSLRVIQHNALEDRSISDKQQWDAAIYFMEEALQARLKDTENAIENMVGPDWKKRWLYWKNRTQEQCVHNETKNELEKMLKCNEEHPAYLASDEITTVRKNLESRGVEVDPSLIKDTWHQVYRRHFLKTALNHCNLCRRGFYYYQRHFVDSELECNDVVLFWRIQRMLAITANTLRQQLTNTEVRRLEKNVKEVLEDFAEDGEKKIKLLTGKRVQLAEDLSLPIP

SEQ ID NO: 6987 - protein, 963 aa, Artificial Sequence
  Synthetic polypeptide
MWRLRRAAVACEVCQSLVKHSSGIKGSLPLQKLHLVSRSIYHSHHPTLKLQRPQLRTSFQQFSSLTNLPLRKLKFSPIKYGYQPRRNFWPARLATRLLKLRYLILGSAVGGGYTAKKTFDQWKDMIPDLSEYKWIVPDIVWEIDEYIDFGHKLVSEVIGASDLLLLLGSPEETAFRATDRGSESDKHFRKGLLGELILLQQQIQEHEEEARRAAGQYSTSYAQQKRKVSDKEKIDQLQEELLHTQLKYQRILERLEKENKELRKLVLQKDDKGIHHRKLKKSLIDMYSEVLDVLSDYDASYNTQDHLPRVVVVGDQSAGKTSVLEMIAQARIFPRGSGEMMTRSPVKVTLSEGPHHVALFKDSSREFDLTKEEDLAALRHEIELRMRKNVKEGCTVSPETISLNVKGPGLQRMVLVDLPGVINTVTSGMAPDTKETIFSISKAYMQNPNAIILCIQDGSVDAERSIVTDLVSQMDPHGRRTIFVLTKVDLAEKNVASPSRIQQIIEGKLFPMKALGYFAVVTGKGNSSESIEAIREYEEEFFQNSKLLKTSMLKAHQVTTRNLSLAVSDCFWKMVRESVEQQADSFKATRFNLETEWKNNYPRLRELDRNELFEKAKNEILDEVISLSQVTPKHWEEILQQSLWERVSTHVIENIYLPAAQTMNSGTFNTTVDIKLKQWTDKQLPNKAVEVAWETLQEEFSRFMTEPKGKEHDDIFDKLKEAVKEESIKRHKWNDFAEDSLRVIQHNALEDRSISDKQQWDAAIYFMEEALQARLKDTENAIENMVGPDWKKRWLYWKNRTQEQCVHNETKNELEKMLKCNEEHPAYLASDEITTVRKNLESRGVEVDPSLIKDTWHQVYRRHFLKTALNHCNLCRRGFYYYQRHFVDSELECNDVVLFWRIQRMLAITANTLRQQLTNTEVRRLEKNVKEVLEDFAEDGEKKIKLLTGKRVQLAEDLSLPIP

SEQ ID NO: 6988 - protein, 962 aa, Artificial Sequence
  Synthetic polypeptide
MWRLRRAAVACEVCQSLVKHSSGIKGSLPLQKLHLVSRSIYHSHHPTLKLQRPQLRTSFQQFSSLTNLPLRKLKFSPIKYGYQPRRNFWPARLATRLLKLRYLILGSAVGGGYTAKKTFDQWKDMIPDLSEYKWIVPDIVWEIDEYIDFEKIRKALPSSEDLVKLAPDFDKIVESLSLLKDFFTSGHKLVSEVIGASDLLLLLGSPEETAFRATDRGSESDKHFRKVSDKEKIDQLQEELLHTQLKYQRILERLEKENKELRKLVLQKDDKGIHHRKLKKSLIDMYSEVLDVLSDYDASYNTQDHLPRVVVVGDQSAGKTSVLEMIAQARIFPRGSGEMMTRSPVKVTLSEGPHHVALFKDSSREFDLTKEEDLAALRHEIELRMRKNVKEGCTVSPETISLNVKGPGLQRMVLVDLPGVINTVTSGMAPDTKETIFSISKAYMQNPNAIILCIQDGSVDAERSIVTDLVSQMDPHGRRTIFVLTKVDLAEKNVASPSRIQQIIEGKLFPMKALGYFAVVTGKGNSSESIEAIREYEEEFFQNSKLLKTSMLKAHQVTTRNLSLAVSDCFWKMVRESVEQQADSFKATRFNLETEWKNNYPRLRELDRNELFEKAKNEILDEVISLSQVTPKHWEEILQQSLWERVSTHVIENIYLPAAQTMNSGTFNTTVDIKLKQWTDKQLPNKAVEVAWETLQEEFSRFMTEPKGKEHDDIFDKLKEAVKEESIKRHKWNDFAEDSLRVIQHNALEDRSISDKQQWDAAIYFMEEALQARLKDTENAIENMVGPDWKKRWLYWKNRTQEQCVHNETKNELEKMLKCNEEHPAYLASDEITTVRKNLESRGVEVDPSLIKDTWHQVYRRHFLKTALNHCNLCRRGFYYYQRHFVDSELECNDVVLFWRIQRMLAITANTLRQQLTNTEVRRLEKNVKEVLEDFAEDGEKKIKLLTGKRVQLAEDLSLPIP

SEQ ID NO: 6989 - protein, 981 aa, Artificial Sequence
  Synthetic polypeptide
MWRLRRAAVACEVCQSLVKHSSGIKGSLPLQKLHLVSRSIYHSHHPTLKLQRPQLRTSFQQFSSLTNLPLRKLKFSPIKYGYQPRRNFWPARLATRLLKLRYLILGSAVGGGYTAKKTFDQWKDMIPDLSEYKWIVPDIVWEIDEYIDFEKIRKALPSSEDLVKLAPDFDKIVESLSLLKDFFTSGSPEETAFRATDRGSESDKHFRKGLLGELILLQQQIQEHEEEARRAAGQYSTSYAQQKRKVSDKEKIDQLQEELLHTQLKYQRILERLEKENKELRKLVLQKDDKGIHHRKLKKSLIDMYSEVLDVLSDYDASYNTQDHLPRVVVVGDQSAGKTSVLEMIAQARIFPRGSGEMMTRSPVKVTLSEGPHHVALFKDSSREFDLTKEEDLAALRHEIELRMRKNVKEGCTVSPETISLNVKGPGLQRMVLVDLPGVINTVTSGMAPDTKETIFSISKAYMQNPNAIILCIQDGSVDAERSIVTDLVSQMDPHGRRTIFVLTKVDLAEKNVASPSRIQQIIEGKLFPMKALGYFAVVTGKGNSSESIEAIREYEEEFFQNSKLLKTSMLKAHQVTTRNLSLAVSDCFWKMVRESVEQQADSFKATRFNLETEWKNNYPRLRELDRNELFEKAKNEILDEVISLSQVTPKHWEEILQQSLWERVSTHVIENIYLPAAQTMNSGTFNTTVDIKLKQWTDKQLPNKAVEVAWETLQEEFSRFMTEPKGKEHDDIFDKLKEAVKEESIKRHKWNDFAEDSLRVIQHNALEDRSISDKQQWDAAIYFMEEALQARLKDTENAIENMVGPDWKKRWLYWKNRTQEQCVHNETKNELEKMLKCNEEHPAYLASDEITTVRKNLESRGVEVDPSLIKDTWHQVYRRHFLKTALNHCNLCRRGFYYYQRHFVDSELECNDVVLFWRIQRMLAITANTLRQQLTNTEVRRLEKNVKEVLEDFAEDGEKKIKLLTGKRVQLAEDLSLPIP

SEQ ID NO: 6990 - protein, 944 aa, Artificial Sequence
  Synthetic polypeptide
MWRLRRAAVACEVCQSLVKHSSGIKGSLPLQKLHLVSRSIYHSHHPTLKLQRPQLRTSFQQFSSLTNLPLRKLKFSPIKYGYQPRRNFWPARLATRLLKLRYLILGSAVGGGYTAKKTFDQWKDMIPDLSEYKWIVPDIVWEIDEYIDFEKIRKALPSSEDLVKLAPDFDKIVESLSLLKDFFTSGSPEETAFRATDRGSESDKHFRKVSDKEKIDQLQEELLHTQLKYQRILERLEKENKELRKLVLQKDDKGIHHRKLKKSLIDMYSEVLDVLSDYDASYNTQDHLPRVVVVGDQSAGKTSVLEMIAQARIFPRGSGEMMTRSPVKVTLSEGPHHVALFKDSSREFDLTKEEDLAALRHEIELRMRKNVKEGCTVSPETISLNVKGPGLQRMVLVDLPGVINTVTSGMAPDTKETIFSISKAYMQNPNAIILCIQDGSVDAERSIVTDLVSQMDPHGRRTIFVLTKVDLAEKNVASPSRIQQIIEGKLFPMKALGYFAVVTGKGNSSESIEAIREYEEEFFQNSKLLKTSMLKAHQVTTRNLSLAVSDCFWKMVRESVEQQADSFKATRFNLETEWKNNYPRLRELDRNELFEKAKNEILDEVISLSQVTPKHWEEILQQSLWERVSTHVIENIYLPAAQTMNSGTFNTTVDIKLKQWTDKQLPNKAVEVAWETLQEEFSRFMTEPKGKEHDDIFDKLKEAVKEESIKRHKWNDFAEDSLRVIQHNALEDRSISDKQQWDAAIYFMEEALQARLKDTENAIENMVGPDWKKRWLYWKNRTQEQCVHNETKNELEKMLKCNEEHPAYLASDEITTVRKNLESRGVEVDPSLIKDTWHQVYRRHFLKTALNHCNLCRRGFYYYQRHFVDSELECNDVVLFWRIQRMLAITANTLRQQLTNTEVRRLEKNVKEVLEDFAEDGEKKIKLLTGKRVQLAEDLSLPIP

SEQ ID NO: 6991 - protein, 136 aa, Artificial Sequence
  Synthetic polypeptide
LASDEITTVRKNLESRGVEVDPSLIKDTWHQVYRRHFLKTALNHCNLCRRGFYYYQRHFVDSELECNDVVLFWRIQRMLAITANTLRQQLTNTEVRRLEKNVKEVLEDFAEDGEKKIKLLTGKRVQLAEDLSLPIP

SEQ ID NO: 6992 - protein, 1 aa, Artificial Sequence
  Synthetic polypeptide
D

SEQ ID NO: 6993 - protein, 943 aa, Artificial Sequence
  Synthetic polypeptide
MWRLRRAAVACEVCQSLVKHSSGIKGSLPLQKLHLVSRSIYHSHHPTLKLQRPQLRTSFQQFSSLTNLPLRKLKFSPIKYGYQPRRNFWPARLATRLLKLRYLILGSAVGGGYTAKKTFDQWKDMIPDLSEYKWIVPDIVWEIDEYIDFGSPEETAFRATDRGSESDKHFRKGLLGELILLQQQIQEHEEEARRAAGQYSTSYAQQKRKVSDKEKIDQLQEELLHTQLKYQRILERLEKENKELRKLVLQKDDKGIHHRKLKKSLIDMYSEVLDVLSDYDASYNTQDHLPRVVVVGDQSAGKTSVLEMIAQARIFPRGSGEMMTRSPVKVTLSEGPHHVALFKDSSREFDLTKEEDLAALRHEIELRMRKNVKEGCTVSPETISLNVKGPGLQRMVLVDLPGVINTVTSGMAPDTKETIFSISKAYMQNPNAIILCIQDGSVDAERSIVTDLVSQMDPHGRRTIFVLTKVDLAEKNVASPSRIQQIIEGKLFPMKALGYFAVVTGKGNSSESIEAIREYEEEFFQNSKLLKTSMLKAHQVTTRNLSLAVSDCFWKMVRESVEQQADSFKATRFNLETEWKNNYPRLRELDRNELFEKAKNEILDEVISLSQVTPKHWEEILQQSLWERVSTHVIENIYLPAAQTMNSGTFNTTVDIKLKQWTDKQLPNKAVEVAWETLQEEFSRFMTEPKGKEHDDIFDKLKEAVKEESIKRHKWNDFAEDSLRVIQHNALEDRSISDKQQWDAAIYFMEEALQARLKDTENAIENMVGPDWKKRWLYWKNRTQEQCVHNETKNELEKMLKCNEEHPAYLASDEITTVRKNLESRGVEVDPSLIKDTWHQVYRRHFLKTALNHCNLCRRGFYYYQRHFVDSELECNDVVLFWRIQRMLAITANTLRQQLTNTEVRRLEKNVKEVLEDFAEDGEKKIKLLTGKRVQLAEDLISV

SEQ ID NO: 6994 - protein, 997 aa, Artificial Sequence
  Synthetic polypeptide
MWRLRRAAVACEVCQSLVKHSSGIKGSLPLQKLHLVSRSIYHSHHPTLKLQRPQLRTSFQQFSSLTNLPLRKLKFSPIKYGYQPRRNFWPARLATRLLKLRYLILGSAVGGGYTAKKTFDQWKDMIPDLSEYKWIVPDIVWEIDEYIDFEKIRKALPSSEDLVKLAPDFDKIVESLSLLKDFFTSGHKLVSEVIGASDLLLLLGSPEETAFRATDRGSESDKHFRKGLLGELILLQQQIQEHEEEARRAAGQYSTSYAQQKRKVSDKEKIDQLQEELLHTQLKYQRILERLEKENKELRKLVLQKDDKGIHHRKLKKSLIDMYSEVLDVLSDYDASYNTQDHLPRVVVVGDQSAGKTSVLEMIAQARIFPRGSGEMMTRSPVKVTLSEGPHHVALFKDSSREFDLTKEEDLAALRHEIELRMRKNVKEGCTVSPETISLNVKGPGLQRMVLVDLPGVINTVTSGMAPDTKETIFSISKAYMQNPNAIILCIQDGSVDAERSIVTDLVSQMDPHGRRTIFVLTKVDLAEKNVASPSRIQQIIEGKLFPMKALGYFAVVTGKGNSSESIEAIREYEEEFFQNSKLLKTSMLKAHQVTTRNLSLAVSDCFWKMVRESVEQQADSFKATRFNLETEWKNNYPRLRELDRNELFEKAKNEILDEVISLSQVTPKHWEEILQQSLWERVSTHVIENIYLPAAQTMNSGTFNTTVDIKLKQWTDKQLPNKAVEVAWETLQEEFSRFMTEPKGKEHDDIFDKLKEAVKEESIKRHKWNDFAEDSLRVIQHNALEDRSISDKQQWDAAIYFMEEALQARLKDTENAIENMVGPDWKKRWLYWKNRTQEQCVHNETKNELEKMLKCNEEHPAYLASDEITTVRKNLESRGVEVDPSLIKDTWHQVYRRHFLKTALNHCNLCRRGFYYYQRHFVDSELECNDVVLFWRIQRMLAITANTLRQQLTNTEVRRLEKNVKEVLEDFAEDGEKKIKLLTGKRVQLAEDLISV

SEQ ID NO: 6995 - protein, 961 aa, Artificial Sequence
  Synthetic polypeptide
MWRLRRAAVACEVCQSLVKHSSGIKGSLPLQKLHLVSRSIYHSHHPTLKLQRPQLRTSFQQFSSLTNLPLRKLKFSPIKYGYQPRRNFWPARLATRLLKLRYLILGSAVGGGYTAKKTFDQWKDMIPDLSEYKWIVPDIVWEIDEYIDFGHKLVSEVIGASDLLLLLGSPEETAFRATDRGSESDKHFRKGLLGELILLQQQIQEHEEEARRAAGQYSTSYAQQKRKVSDKEKIDQLQEELLHTQLKYQRILERLEKENKELRKLVLQKDDKGIHHRKLKKSLIDMYSEVLDVLSDYDASYNTQDHLPRVVVVGDQSAGKTSVLEMIAQARIFPRGSGEMMTRSPVKVTLSEGPHHVALFKDSSREFDLTKEEDLAALRHEIELRMRKNVKEGCTVSPETISLNVKGPGLQRMVLVDLPGVINTVTSGMAPDTKETIFSISKAYMQNPNAIILCIQDGSVDAERSIVTDLVSQMDPHGRRTIFVLTKVDLAEKNVASPSRIQQIIEGKLFPMKALGYFAVVTGKGNSSESIEAIREYEEEFFQNSKLLKTSMLKAHQVTTRNLSLAVSDCFWKMVRESVEQQADSFKATRFNLETEWKNNYPRLRELDRNELFEKAKNEILDEVISLSQVTPKHWEEILQQSLWERVSTHVIENIYLPAAQTMNSGTFNTTVDIKLKQWTDKQLPNKAVEVAWETLQEEFSRFMTEPKGKEHDDIFDKLKEAVKEESIKRHKWNDFAEDSLRVIQHNALEDRSISDKQQWDAAIYFMEEALQARLKDTENAIENMVGPDWKKRWLYWKNRTQEQCVHNETKNELEKMLKCNEEHPAYLASDEITTVRKNLESRGVEVDPSLIKDTWHQVYRRHFLKTALNHCNLCRRGFYYYQRHFVDSELECNDVVLFWRIQRMLAITANTLRQQLTNTEVRRLEKNVKEVLEDFAEDGEKKIKLLTGKRVQLAEDLISV

SEQ ID NO: 6996 - protein, 960 aa, Artificial Sequence
  Synthetic polypeptide
MWRLRRAAVACEVCQSLVKHSSGIKGSLPLQKLHLVSRSIYHSHHPTLKLQRPQLRTSFQQFSSLTNLPLRKLKFSPIKYGYQPRRNFWPARLATRLLKLRYLILGSAVGGGYTAKKTFDQWKDMIPDLSEYKWIVPDIVWEIDEYIDFEKIRKALPSSEDLVKLAPDFDKIVESLSLLKDFFTSGHKLVSEVIGASDLLLLLGSPEETAFRATDRGSESDKHFRKVSDKEKIDQLQEELLHTQLKYQRILERLEKENKELRKLVLQKDDKGIHHRKLKKSLIDMYSEVLDVLSDYDASYNTQDHLPRVVVVGDQSAGKTSVLEMIAQARIFPRGSGEMMTRSPVKVTLSEGPHHVALFKDSSREFDLTKEEDLAALRHEIELRMRKNVKEGCTVSPETISLNVKGPGLQRMVLVDLPGVINTVTSGMAPDTKETIFSISKAYMQNPNAIILCIQDGSVDAERSIVTDLVSQMDPHGRRTIFVLTKVDLAEKNVASPSRIQQIIEGKLFPMKALGYFAVVTGKGNSSESIEAIREYEEEFFQNSKLLKTSMLKAHQVTTRNLSLAVSDCFWKMVRESVEQQADSFKATRFNLETEWKNNYPRLRELDRNELFEKAKNEILDEVISLSQVTPKHWEEILQQSLWERVSTHVIENIYLPAAQTMNSGTFNTTVDIKLKQWTDKQLPNKAVEVAWETLQEEFSRFMTEPKGKEHDDIFDKLKEAVKEESIKRHKWNDFAEDSLRVIQHNALEDRSISDKQQWDAAIYFMEEALQARLKDTENAIENMVGPDWKKRWLYWKNRTQEQCVHNETKNELEKMLKCNEEHPAYLASDEITTVRKNLESRGVEVDPSLIKDTWHQVYRRHFLKTALNHCNLCRRGFYYYQRHFVDSELECNDVVLFWRIQRMLAITANTLRQQLTNTEVRRLEKNVKEVLEDFAEDGEKKIKLLTGKRVQLAEDLISV

SEQ ID NO: 6997 - protein, 979 aa, Artificial Sequence
  Synthetic polypeptide
MWRLRRAAVACEVCQSLVKHSSGIKGSLPLQKLHLVSRSIYHSHHPTLKLQRPQLRTSFQQFSSLTNLPLRKLKFSPIKYGYQPRRNFWPARLATRLLKLRYLILGSAVGGGYTAKKTFDQWKDMIPDLSEYKWIVPDIVWEIDEYIDFEKIRKALPSSEDLVKLAPDFDKIVESLSLLKDFFTSGSPEETAFRATDRGSESDKHFRKGLLGELILLQQQIQEHEEEARRAAGQYSTSYAQQKRKVSDKEKIDQLQEELLHTQLKYQRILERLEKENKELRKLVLQKDDKGIHHRKLKKSLIDMYSEVLDVLSDYDASYNTQDHLPRVVVVGDQSAGKTSVLEMIAQARIFPRGSGEMMTRSPVKVTLSEGPHHVALFKDSSREFDLTKEEDLAALRHEIELRMRKNVKEGCTVSPETISLNVKGPGLQRMVLVDLPGVINTVTSGMAPDTKETIFSISKAYMQNPNAIILCIQDGSVDAERSIVTDLVSQMDPHGRRTIFVLTKVDLAEKNVASPSRIQQIIEGKLFPMKALGYFAVVTGKGNSSESIEAIREYEEEFFQNSKLLKTSMLKAHQVTTRNLSLAVSDCFWKMVRESVEQQADSFKATRFNLETEWKNNYPRLRELDRNELFEKAKNEILDEVISLSQVTPKHWEEILQQSLWERVSTHVIENIYLPAAQTMNSGTFNTTVDIKLKQWTDKQLPNKAVEVAWETLQEEFSRFMTEPKGKEHDDIFDKLKEAVKEESIKRHKWNDFAEDSLRVIQHNALEDRSISDKQQWDAAIYFMEEALQARLKDTENAIENMVGPDWKKRWLYWKNRTQEQCVHNETKNELEKMLKCNEEHPAYLASDEITTVRKNLESRGVEVDPSLIKDTWHQVYRRHFLKTALNHCNLCRRGFYYYQRHFVDSELECNDVVLFWRIQRMLAITANTLRQQLTNTEVRRLEKNVKEVLEDFAEDGEKKIKLLTGKRVQLAEDLISV

SEQ ID NO: 6998 - protein, 942 aa, Artificial Sequence
  Synthetic polypeptide
MWRLRRAAVACEVCQSLVKHSSGIKGSLPLQKLHLVSRSIYHSHHPTLKLQRPQLRTSFQQFSSLTNLPLRKLKFSPIKYGYQPRRNFWPARLATRLLKLRYLILGSAVGGGYTAKKTFDQWKDMIPDLSEYKWIVPDIVWEIDEYIDFEKIRKALPSSEDLVKLAPDFDKIVESLSLLKDFFTSGSPEETAFRATDRGSESDKHFRKVSDKEKIDQLQEELLHTQLKYQRILERLEKENKELRKLVLQKDDKGIHHRKLKKSLIDMYSEVLDVLSDYDASYNTQDHLPRVVVVGDQSAGKTSVLEMIAQARIFPRGSGEMMTRSPVKVTLSEGPHHVALFKDSSREFDLTKEEDLAALRHEIELRMRKNVKEGCTVSPETISLNVKGPGLQRMVLVDLPGVINTVTSGMAPDTKETIFSISKAYMQNPNAIILCIQDGSVDAERSIVTDLVSQMDPHGRRTIFVLTKVDLAEKNVASPSRIQQIIEGKLFPMKALGYFAVVTGKGNSSESIEAIREYEEEFFQNSKLLKTSMLKAHQVTTRNLSLAVSDCFWKMVRESVEQQADSFKATRFNLETEWKNNYPRLRELDRNELFEKAKNEILDEVISLSQVTPKHWEEILQQSLWERVSTHVIENIYLPAAQTMNSGTFNTTVDIKLKQWTDKQLPNKAVEVAWETLQEEFSRFMTEPKGKEHDDIFDKLKEAVKEESIKRHKWNDFAEDSLRVIQHNALEDRSISDKQQWDAAIYFMEEALQARLKDTENAIENMVGPDWKKRWLYWKNRTQEQCVHNETKNELEKMLKCNEEHPAYLASDEITTVRKNLESRGVEVDPSLIKDTWHQVYRRHFLKTALNHCNLCRRGFYYYQRHFVDSELECNDVVLFWRIQRMLAITANTLRQQLTNTEVRRLEKNVKEVLEDFAEDGEKKIKLLTGKRVQLAEDLISV

SEQ ID NO: 6999 - protein, 134 aa, Artificial Sequence
  Synthetic polypeptide
LASDEITTVRKNLESRGVEVDPSLIKDTWHQVYRRHFLKTALNHCNLCRRGFYYYQRHFVDSELECNDVVLFWRIQRMLAITANTLRQQLTNTEVRRLEKNVKEVLEDFAEDGEKKIKLLTGKRVQLAEDLISV

SEQ ID NO: 7000 - protein, 1 aa, Artificial Sequence
  Synthetic polypeptide
D

SEQ ID NO: 7001 - protein, 110 aa, Artificial Sequence
  Synthetic polypeptide
MKMTVDFEECLKDSPRFRAALEEVEGDVAELELKLDKLVKLCIAMIDTGKAFCVANKQFMNGIRDLAQYSSNDAVVETSLTKFSDSLQEMINFHTITQSQAVLYSSVRMD

SEQ ID NO: 7002 - protein, 66 aa, Artificial Sequence
  Synthetic polypeptide
MIDTGKAFCVANKQFMNGIRDLAQYSSNDAVVETSLTKFSDSLQEMINFHTITQSQAVLYSSVRMD

SEQ ID NO: 7003 - protein, 715 aa, Artificial Sequence
  Synthetic polypeptide
MGCLWGLALPLFFFCWEVGVSGSSAGPSTRRADTAMTTDDTEVPAMTLAPGHAALETQTLSAETSSRASTPAGPIPEAETRGAKRISPARETRSFTKTSPNFMVLIATSVETSAASGSPEGAGMTTVQTITGSDPREAIFDTLCTDDSSEEAKTLTMDILTLAHTSTEAKGLSSESSASSDSPHPVITPSRASESSASSDGPHPVITPSRASESSASSDGPHPVITPSRASESSASSDGPHPVITPSRASESSASSDGPHPVITPSRASESSASSDGPHPVITPSRASESSASSDGPHPVITPSRASESSASSDGPHPVITPSRASESSASSDGPHPVITPSRASESSASSDGLHPVITPSRASESSASSDGPHPVITPSRASESSASSDGPHPVITPSWSPGSDVTLLAEALVTVTNIEVINCSITEIETTTSSIPGASDTDLIPTEGVKASSTSDPPALPDSTEAKPHITEVTASAETLSTAGTTESAAPDATVGTPLPTNSATEREVTAPGATTLSGALVTVSRNPLEETSALSVETPSYVKVSGAAPVSIEAGSAVGKTTSFAGSSASSYSPSEAALKNFTPSETPTMDIATKGPFPTSRDPLPSVPPTTTNSSRGTNSTLAKITTSAKTTMKPPTATPTTARTRPTTDVSAGENGGFLLLRLSVASPEDLTDPRVAERLMQQFVTLYVLEDKQPVVFTSVITEAGVEPST

SEQ ID NO: 7004 - protein, 544 aa, Artificial Sequence
  Synthetic polypeptide
MGCLWGLALPLFFFCWEVGVSGSSAGPSTRRADTAMTTDDTEVPAMTLAPGHAALETQTLSAETSSRASTPAGPIPEAETRGAKRISPARETRSFTKTSPNFMVLIATSVETSAASGSPEGAGMTTVQTITGSDPREAIFDTLCTDDSSEEAKTLTMDILTLAHTSTEAKGLSSESSASSDSPHPVITPSRASESSASSDGPHPVITPSRASESSASSDGPHPVITPSWSPGSDVTLLAEALVTVTNIEVINCSITEIETTTSSIPGASDTDLIPTEGVKASSTSDPPALPDSTEAKPHITEVTASAETLSTAGTTESAAPDATVGTPLPTNSATEREVTAPGATTLSGALVTVSRNPLEETSALSVETPSYVKVSGAAPVSIEAGSAVGKTTSFAGSSASSYSPSEAALKNFTPSETPTMDIATKGPFPTSRDPLPSVPPTTTNSSRGTNSTLAKITTSAKTTMKPPTATPTTARTRPTTDVSAGENGGFLLLRLSVASPEDLTDPRVAERLMQQFVTLYVLEDKQPVVFTSVITEAGVEPST

SEQ ID NO: 7005 - protein, 680 aa, Artificial Sequence
  Synthetic polypeptide
MTTDDTEVPAMTLAPGHAALETQTLSAETSSRASTPAGPIPEAETRGAKRISPARETRSFTKTSPNFMVLIATSVETSAASGSPEGAGMTTVQTITGSDPREAIFDTLCTDDSSEEAKTLTMDILTLAHTSTEAKGLSSESSASSDSPHPVITPSRASESSASSDGPHPVITPSRASESSASSDGPHPVITPSRASESSASSDGPHPVITPSRASESSASSDGPHPVITPSRASESSASSDGPHPVITPSRASESSASSDGPHPVITPSRASESSASSDGPHPVITPSRASESSASSDGPHPVITPSRASESSASSDGLHPVITPSRASESSASSDGPHPVITPSRASESSASSDGPHPVITPSWSPGSDVTLLAEALVTVTNIEVINCSITEIETTTSSIPGASDTDLIPTEGVKASSTSDPPALPDSTEAKPHITEVTASAETLSTAGTTESAAPDATVGTPLPTNSATEREVTAPGATTLSGALVTVSRNPLEETSALSVETPSYVKVSGAAPVSIEAGSAVGKTTSFAGSSASSYSPSEAALKNFTPSETPTMDIATKGPFPTSRDPLPSVPPTTTNSSRGTNSTLAKITTSAKTTMKPPTATPTTARTRPTTDVSAGENGGFLLLRLSVASPEDLTDPRVAERLMQQFVTLYVLEDKQPVVFTSVITEAGVEPST

SEQ ID NO: 7006 - protein, 68 aa, Artificial Sequence
  Synthetic polypeptide
TDHGHRNQGALPHQQGPSSFCPSDYNQQQPRDEQHLSQDHNLSEDHDEAPNSHAHDCPDEADHRRECR

SEQ ID NO: 7007 - protein, 68 aa, Artificial Sequence; identical to SEQ ID NO: 7006
  Synthetic polypeptide

SEQ ID NO: 7008 - protein, 688 aa, Artificial Sequence
  Synthetic polypeptide
MGCLWGLALPLFFFCWEVGVSGSSAGPSTRRADTAMTTDDTEVPAMTLAPGHAALETQTLSAETSSRASTPAGPIPEAETRGAKRISPARETRSFTKTSPNFMVLIATSVETSAASGSPEGAGMTTVQTITGSDPREAIFDTLCTDDSSEEAKTLTMDILTLAHTSTEAKGLSSESSASSDSPHPVITPSRASESSASSDGPHPVITPSRASESSASSDGPHPVITPSRASESSASSDGPHPVITPSRASESSASSDGPHPVITPSRASESSASSDGPHPVITPSRASESSASSDGPHPVITPSRASESSASSDGPHPVITPSRASESSASSDGPHPVITPSRASESSASSDGLHPVITPSRASESSASSDGPHPVITPSRASESSASSDGPHPVITPSWSPGSDVTLLAEALVTVTNIEVINCSITEIETTTSSIPGASDTDLIPTEGVKASSTSDPPALPDSTEAKPHITEVTASAETLSTAGTTESAAPDATVGTPLPTNSATEREVTAPGATTLSGALVTVSRNPLEETSALSVETPSYVKVSGAAPVSIEAGSAVGKTTSFAGSSASSYSPSEAALKNFTPSETPTMDIATKGPFPTSRDPLPSVPPTTTNSSRGTNSTLAKITTSAKTTMKPPTATPTTARTRPTTDVSAGENGGFLLLRLSVASPEDLTDPRVAERLMQQR

SEQ ID NO: 7009 - protein, 517 aa, Artificial Sequence
  Synthetic polypeptide
MGCLWGLALPLFFFCWEVGVSGSSAGPSTRRADTAMTTDDTEVPAMTLAPGHAALETQTLSAETSSRASTPAGPIPEAETRGAKRISPARETRSFTKTSPNFMVLIATSVETSAASGSPEGAGMTTVQTITGSDPREAIFDTLCTDDSSEEAKTLTMDILTLAHTSTEAKGLSSESSASSDSPHPVITPSRASESSASSDGPHPVITPSRASESSASSDGPHPVITPSWSPGSDVTLLAEALVTVTNIEVINCSITEIETTTSSIPGASDTDLIPTEGVKASSTSDPPALPDSTEAKPHITEVTASAETLSTAGTTESAAPDATVGTPLPTNSATEREVTAPGATTLSGALVTVSRNPLEETSALSVETPSYVKVSGAAPVSIEAGSAVGKTTSFAGSSASSYSPSEAALKNFTPSETPTMDIATKGPFPTSRDPLPSVPPTTTNSSRGTNSTLAKITTSAKTTMKPPTATPTTARTRPTTDVSAGENGGFLLLRLSVASPEDLTDPRVAERLMQQR

SEQ ID NO: 7010 - protein, 653 aa, Artificial Sequence
  Synthetic polypeptide
MTTDDTEVPAMTLAPGHAALETQTLSAETSSRASTPAGPIPEAETRGAKRISPARETRSFTKTSPNFMVLIATSVETSAASGSPEGAGMTTVQTITGSDPREAIFDTLCTDDSSEEAKTLTMDILTLAHTSTEAKGLSSESSASSDSPHPVITPSRASESSASSDGPHPVITPSRASESSASSDGPHPVITPSRASESSASSDGPHPVITPSRASESSASSDGPHPVITPSRASESSASSDGPHPVITPSRASESSASSDGPHPVITPSRASESSASSDGPHPVITPSRASESSASSDGPHPVITPSRASESSASSDGLHPVITPSRASESSASSDGPHPVITPSRASESSASSDGPHPVITPSWSPGSDVTLLAEALVTVTNIEVINCSITEIETTTSSIPGASDTDLIPTEGVKASSTSDPPALPDSTEAKPHITEVTASAETLSTAGTTESAAPDATVGTPLPTNSATEREVTAPGATTLSGALVTVSRNPLEETSALSVETPSYVKVSGAAPVSIEAGSAVGKTTSFAGSSASSYSPSEAALKNFTPSETPTMDIATKGPFPTSRDPLPSVPPTTTNSSRGTNSTLAKITTSAKTTMKPPTATPTTARTRPTTDVSAGENGGFLLLRLSVASPEDLTDPRVAERLMQQR

SEQ ID NO: 7011 - protein, 489 aa, Artificial Sequence
  Synthetic polypeptide
MIGYLGYCKGVEPKTECERLAGTESPVREEPGEDFPAARRLYWDDLKRKLSEKLDSTDFTGTIKLLNENSYVPREAGSQKDENLALYVENQFREFKLSKVWRDQHFVKIQVKDSAQNSVIIVDKNGRLVYLVENPGGYVAYSKAATVTGKLVHANFGTKKDFEDLYTPVNGSIVIVRAGKITFAEKVANAESLNAIGVLIYMDQTKFPIVNAELSFFGHAHLGTGDPYTPGFPSFNHTQFPPSRSSGLPNIPVQTISRAAAEKLFGNMEGDCPSDWKTDSTCRMVTSESKNVKLTVSNVLKEIKILNIFGVIKGFVEPDHYVVVGAQRDAWGPGAAKSGVGTALLLKLAQMFSDMVLKDGFQPSRSIIFASWSAGDFGSVGATEWLEGYLSSLHLKAFTYINLDKAVLGTSNFKVSASPLLYTLIEKTMQNVKHPVTGQFLYQDSNWASKVEKLTLDNAAFPFLAYSGIPAVSFCFCEAAGSHDCIAAL

SEQ ID NO: 7012 - protein, 570 aa, Artificial Sequence
  Synthetic polypeptide
MMDQARSAFSNLFGGEPLSYTRFSLARQVDGDNSHVEMKLAVDEEENADNNTKANVTKPKRCSGSICYGTIAVIVFFLIGFMIGYLGYCKGVEPKTECERLAGTESPVREEPGEDFPAARRLYWDDLKRKLSEKLDSTDFTGTIKLLNENSYVPREAGSQKDENLALYVENQFREFKLSKVWRDQHFVKIQVKDSAQNSVIIVDKNGRLVYLVENPGGYVAYSKAATVTGKLVHANFGTKKDFEDLYTPVNGSIVIVRAGKITFAEKVANAESLNAIGVLIYMDQTKFPIVNAELSFFGHAHLGTGDPYTPGFPSFNHTQFPPSRSSGLPNIPVQTISRAAAEKLFGNMEGDCPSDWKTDSTCRMVTSESKNVKLTVSNVLKEIKILNIFGVIKGFVEPDHYVVVGAQRDAWGPGAAKSGVGTALLLKLAQMFSDMVLKDGFQPSRSIIFASWSAGDFGSVGATEWLEGYLSSLHLKAFTYINLDKAVLGTSNFKVSASPLLYTLIEKTMQNVKHPVTGQFLYQDSNWASKVEKLTLDNAAFPFLAYSGIPAVSFCFCEAAGSHDCIAAL

SEQ ID NO: 7013 - protein, 288 aa, Artificial Sequence
  Synthetic polypeptide
MDQTKFPIVNAELSFFGHAHLGTGDPYTPGFPSFNHTQFPPSRSSGLPNIPVQTISRAAAEKLFGNMEGDCPSDWKTDSTCRMVTSESKNVKLTVSNVLKEIKILNIFGVIKGFVEPDHYVVVGAQRDAWGPGAAKSGVGTALLLKLAQMFSDMVLKDGFQPSRSIIFASWSAGDFGSVGATEWLEGYLSSLHLKAFTYINLDKAVLGTSNFKVSASPLLYTLIEKTMQNVKHPVTGQFLYQDSNWASKVEKLTLDNAAFPFLAYSGIPAVSFCFCEAAGSHDCIAAL

SEQ ID NO: 7014 - protein, 492 aa, Artificial Sequence
  Synthetic polypeptide
MIGYLGYCKGVEPKTECERLAGTESPVREEPGEDFPAARRLYWDDLKRKLSEKLDSTDFTGTIKLLNENSYVPREAGSQKDENLALYVENQFREFKLSKVWRDQHFVKIQVKDSAQNSVIIVDKNGRLVYLVENPGGYVAYSKAATVTGKLVHANFGTKKDFEDLYTPVNGSIVIVRAGKITFAEKVANAESLNAIGVLIYMDQTKFPIVNAELSFFGHAHLGTGDPYTPGFPSFNHTQFPPSRSSGLPNIPVQTISRAAAEKLFGNMEGDCPSDWKTDSTCRMVTSESKNVKLTVSNVLKEIKILNIFGVIKGFVEPDHYVVVGAQRDAWGPGAAKSGVGTALLLKLAQMFSDMVLKDGFQPSRSIIFASWSAGDFGSVGATEWLEGYLSSLHLKAFTYINLDKAVLGTSNFKVSASPLLYTLIEKTMQNVKHPVTGQFLYQDSNWASKVEKLTLDNAAFPFLAYSGIPAVSFCFCEAAGSHDCITALQPG

SEQ ID NO: 7015 - protein, 573 aa, Artificial Sequence
  Synthetic polypeptide
MMDQARSAFSNLFGGEPLSYTRFSLARQVDGDNSHVEMKLAVDEEENADNNTKANVTKPKRCSGSICYGTIAVIVFFLIGFMIGYLGYCKGVEPKTECERLAGTESPVREEPGEDFPAARRLYWDDLKRKLSEKLDSTDFTGTIKLLNENSYVPREAGSQKDENLALYVENQFREFKLSKVWRDQHFVKIQVKDSAQNSVIIVDKNGRLVYLVENPGGYVAYSKAATVTGKLVHANFGTKKDFEDLYTPVNGSIVIVRAGKITFAEKVANAESLNAIGVLIYMDQTKFPIVNAELSFFGHAHLGTGDPYTPGFPSFNHTQFPPSRSSGLPNIPVQTISRAAAEKLFGNMEGDCPSDWKTDSTCRMVTSESKNVKLTVSNVLKEIKILNIFGVIKGFVEPDHYVVVGAQRDAWGPGAAKSGVGTALLLKLAQMFSDMVLKDGFQPSRSIIFASWSAGDFGSVGATEWLEGYLSSLHLKAFTYINLDKAVLGTSNFKVSASPLLYTLIEKTMQNVKHPVTGQFLYQDSNWASKVEKLTLDNAAFPFLAYSGIPAVSFCFCEAAGSHDCITALQPG

SEQ ID NO: 7016 - protein, 291 aa, Artificial Sequence
  Synthetic polypeptide
MDQTKFPIVNAELSFFGHAHLGTGDPYTPGFPSFNHTQFPPSRSSGLPNIPVQTISRAAAEKLFGNMEGDCPSDWKTDSTCRMVTSESKNVKLTVSNVLKEIKILNIFGVIKGFVEPDHYVVVGAQRDAWGPGAAKSGVGTALLLKLAQMFSDMVLKDGFQPSRSIIFASWSAGDFGSVGATEWLEGYLSSLHLKAFTYINLDKAVLGTSNFKVSASPLLYTLIEKTMQNVKHPVTGQFLYQDSNWASKVEKLTLDNAAFPFLAYSGIPAVSFCFCEAAGSHDCITALQPG

SEQ ID NO: 7017 - protein, 183 aa, Artificial Sequence
  Synthetic polypeptide
MIGYLGYCKGVEPKTECERLAGTESPVREEPGEDFPAARRLYWDDLKRKLSEKLDSTDFTGTIKLLNENSYVPREAGSQKDENLALYVENQFREFKLSKVWRDQHFVKIQVKDSAQNSVIIVDKNGRLVYLVENPGGYVAYSKAATVTNVSQMKNHGLVLFTAMLQSFGECLTYIVVFAKQMH

SEQ ID NO: 7018 - protein, 264 aa, Artificial Sequence
  Synthetic polypeptide
MMDQARSAFSNLFGGEPLSYTRFSLARQVDGDNSHVEMKLAVDEEENADNNTKANVTKPKRCSGSICYGTIAVIVFFLIGFMIGYLGYCKGVEPKTECERLAGTESPVREEPGEDFPAARRLYWDDLKRKLSEKLDSTDFTGTIKLLNENSYVPREAGSQKDENLALYVENQFREFKLSKVWRDQHFVKIQVKDSAQNSVIIVDKNGRLVYLVENPGGYVAYSKAATVTNVSQMKNHGLVLFTAMLQSFGECLTYIVVFAKQMH

SEQ ID NO: 7019 - protein, 150 aa, Artificial Sequence
  Synthetic polypeptide
MIGYLGYCKGVEPKTECERLAGTESPVREEPGEDFPAARRLYWDDLKRKLSEKLDSTDFTGTIKLLNENSYVPREAGSQKDENLALYVENQFREFKLSKVWRDQHFVKIQVKDSAQNSVIIVDKNGRLVYLVENPGGYVAYSKAATVTYC

SEQ ID NO: 7020 - protein, 231 aa, Artificial Sequence
  Synthetic polypeptide
MMDQARSAFSNLFGGEPLSYTRFSLARQVDGDNSHVEMKLAVDEEENADNNTKANVTKPKRCSGSICYGTIAVIVFFLIGFMIGYLGYCKGVEPKTECERLAGTESPVREEPGEDFPAARRLYWDDLKRKLSEKLDSTDFTGTIKLLNENSYVPREAGSQKDENLALYVENQFREFKLSKVWRDQHFVKIQVKDSAQNSVIIVDKNGRLVYLVENPGGYVAYSKAATVTYC

SEQ ID NO: 7021 - protein, 118 aa, Artificial Sequence
  Synthetic polypeptide
MIGYLGYCKGVEPKTECERLAGTESPVREEPGEDFPAARRLYWDDLKRKLSEKLDSTDFTGTIKLLNENSYVPREAGSQKDENLALYVENQFREFKLSKVWRDQHFVKIQVKDSTASS

SEQ ID NO: 7022 - protein, 199 aa, Artificial Sequence
  Synthetic polypeptide
MMDQARSAFSNLFGGEPLSYTRFSLARQVDGDNSHVEMKLAVDEEENADNNTKANVTKPKRCSGSICYGTIAVIVFFLIGFMIGYLGYCKGVEPKTECERLAGTESPVREEPGEDFPAARRLYWDDLKRKLSEKLDSTDFTGTIKLLNENSYVPREAGSQKDENLALYVENQFREFKLSKVWRDQHFVKIQVKDSTASS

SEQ ID NO: 7023 - protein, 182 aa, Artificial Sequence
  Synthetic polypeptide
MAAHGGSAASSALKGLIQQFTTITGASESVGKHMLEACNNNLEMAVTMFLDGGGIAEEPSTSSASVSTVRPHTEEEVRAPIPQKQEILVEPEPLFGAPKRRRPARSIFDGFRDFQTETIRQEQELRNGGAIDKKLTTLADLFRPPIDLMHKGSFETARPEFFPALDPRTLSWDLDPDPFPVT

SEQ ID NO: 7024 - protein, 34 aa, Artificial Sequence
  Synthetic polypeptide
MHKGSFETARPEFFPALDPRTLSWDLDPDPFPVT

SEQ ID NO: 7025 - protein, 59 aa, Artificial Sequence
  Synthetic polypeptide
MELLPLWLCLGFHFLTVGWRNRSGTATAASQGVCKLHFWEAEAGRSPEVRSSRPAWSTW

SEQ ID NO: 7026 - protein, 258 aa, Artificial Sequence
  Synthetic polypeptide
MSDNGELEDKPPAPPVRMSSTIFSTGGKDPLSANHSLKPLPSVPEEKKPRHKIISIFSGTEKGSKKKEKERPEISPPSDFEHTIHVGFDAVTGEFTGMPEQWARLLQTSNITKLEQKKNPQAVLDVLKFYDSNTVKQKYLSFTPPEKDGFPSGTPALNAKGTEAPAVVTEEEDDDEETAPPVIAPRPDHTKSIYTRSVIDPVPAPVGDSHVDGAAKSLDKQKKKTKMTDEEIMEKLRTIVSIGDPKKKYTRYEKIGQG

SEQ ID NO: 7027 - protein, 656 aa, Artificial Sequence
  Synthetic polypeptide
MKKQRKILWRKGIHLAFSEKWNTGFGGFKKFYFHQHLCILKAKLGRPVTWNRQLRHFQGRKKALQIQKTWIKDEPLCAKTKFNVATQNVSTLSSKVKRKDAKHFISSSKTLLRLQAEKLLSSAKNSDHEYCREKNLLKAVTDFPSNSALGQANGHRPRTDPQPSDFPMKFNGESQSPGESGTIVVTLNNHKRKGFCYGCCQGPEHHRNGGPLIPKKFQLNQHRRIKLSPLMMYEKLSMIRFRYRILRSQHFRTKSKVCKLRKAQRSWVQKVTGDHQETRRENGEGGSCSPFPSPEPKDPSCRHQPYFPDMDSSAVVKGTNSHVPDCHTKGSSFLGKELSLDEAFPDQQNGSATNAWDQSSCSSPKWECTELIHDIPLPEHRSNTMFISETEREIMTLGQENQTSSVSDDRVKLSVSGADTSVSSVDGPVSQKAVQNENSYQMEEDGSLKQSILSSELLDHPYCKSPLEAPLVCSGLKLENQVGGGKNSQKASPVDDEQLSVCLSGFLDEVMKKYGSLVPLSEKEVLGRLKDVFNEDFSNRKPFINREITNYRARHQKCNFRIFYNKHMLDMDDLATLDGQNWLNDQVINMYGELIMDAVPDKVHFFNSFFHRQLVTKGYNGVKRWTKKEHQIEQLSMQQNTFIRTRNQVSDPSTWF

SEQ ID NO: 7028 - protein, 146 aa, Artificial Sequence
  Synthetic polypeptide
MKKYGSLVPLSEKEVLGRLKDVFNEDFSNRKPFINREITNYRARHQKCNFRIFYNKHMLDMDDLATLDGQNWLNDQVINMYGELIMDAVPDKVHFFNSFFHRQLVTKGYNGVKRWTKKEHQIEQLSMQQNTFIRTRNQVSDPSTWF

SEQ ID NO: 7029 - protein, 629 aa, Artificial Sequence
  Synthetic polypeptide
MKKQRKILWRKGIHLAFSEKWNTGFGGFKKFYFHQHLCILKAKLGRPVTWNRQLRHFQGRKKALQIQKTWIKDEPLCAKTKFNVATQNVSTLSSKVKRKDAKHFISSSKTLLRLQAEKLLSSAKNSDHEYCREKNLLKAVTDFPSNSALGQANGHRPRTDPQPSDFPMKFNGESQSPGESGTIVVTLNNHKRKGFCYGCCQGPEHHRNGGPLIPKKFQLNQHRRIKLSPLMMYEKLSMIRFRYRILRSQHFRTKSKVCKLRKAQRSWVQKVTGDHQETRRENGEGGSCSPFPSPEPKDPSCRHQPYFPDMDSSAVVKGTNSHVPDCHTKGSSFLGKELSLDEAFPDQQNGSATNAWDQSSCSSPKWECTELIHDIPLPEHRSNTMFISETEREIMTLGQENQTSSVSDDRVKLSVSGADTSVSSVDGPVSQKAVQNENSYQMEEDGSLKQSILSSELLDHPYCKSPLEAPLVCSGLKLENQVGGGKNSQKASPVDDEQLSVCLSGFLDEVMKKYGSLVPLSEKEVLGRLKDVFNEDFSNRKPFINREITNYRARHQKCNFRIFYNKHMLDMDDLATLDGQNWLNDQVINMYGELIMDAVPDKVHFFNSFFHRQLVTKGYNGVKRWTKKV

SEQ ID NO: 7030 - protein, 119 aa, Artificial Sequence
  Synthetic polypeptide
MKKYGSLVPLSEKEVLGRLKDVFNEDFSNRKPFINREITNYRARHQKCNFRIFYNKHMLDMDDLATLDGQNWLNDQVINMYGELIMDAVPDKVHFFNSFFHRQLVTKGYNGVKRWTKKV

SEQ ID NO: 7031 - protein, 394 aa, Artificial Sequence
  Synthetic polypeptide
MRGPSGALWLLLALRTVLGGMEVRWCATSDPEQHKCGNMSEAFREAGIQPSLLCVRGTSADHCVQLIAAQEADAITLDGGAIYEAGKEHGLKPVVGEVYDQEVGTSYYAVAVVRRSSHVTIDTLKGVKSCHTGINRTVGWNVPVGYLVESGRLSVMGCDVLKAVSDYFGGSCVPGAGETSYSESLCRLCRGDSSGEGVCDKSPLERYYDYSGAFRCLAEGAGDVAFVKHSTVLENTDGKTLPSWGQALLSQDFELLCRDGSRADVTEWRQCHLARVPAHAVVVRADTDGGLIFRLLNEGQRLFSHEGSSFQMFSSEAYGQKDLLFKDSTSELVPIATQTYEAWLGHEYLHAMKGLLCDPNPLLQPLAPTPRLYPMATALAQVPSFAWTIAVVYK

SEQ ID NO: 7032 - protein, 764 aa, Artificial Sequence
  Synthetic polypeptide
MPVRKQDTQRALHLLEEYRSKLSQTEDRQLRSSIERVINIFQSNLFQALIDIQEFYEVTLLDNPKCIDRSKPSEPIQPVNTWEISSLPSSTVTSETLPSSLSPSVEKYRYQDEDTPPQEHISPQITNEVIGPELVHVSEKNLSEIENVHGFVSHSHISPIKPTEAVLPSPPTVPVIPVLPVPAENTVILPTIPQANPPPVLVNTDSLETPTYVNGTDADYEYEEITLERGNSGLGFSIAGGTDNPHIGDDSSIFITKIITGGAAAQDGRLRVNDCILRVNEVDVRDVTHSKAVEALKEAGSIVRLYVKRRKPVSEKIMEIKLIKGPKGLGFSIAGGVGNQHIPGDNSIYVTKIIEGGAAHKDGKLQIGDKLLAVNNVCLEEVTHEEAVTALKNTSDFVYLKVAKPTSMYMNDGYAPPDITNSSSQPVDNHVSPSSFLGQTPASPARYSPVSKAVLGDDEITREPRKVVLHRGSTGLGFNIVGGEDGEGIFISFILAGGPADLSGELRKGDRIISVNSVDLRAASHEQAAAALKNAGQAVTIVAQYRPEEYSRFEAKIHDLREQMMNSSISSGSGSLRTSQKRSLYVRALFDYDKTKDSGLPSQGLNFKFGDILHVINASDDEWWQARQVTPDGESDEVGVIPSKRRVEKKERARLKTVKFNSKTRDKGQSFNDKRKKNLFSRKFPFYKNKDQSEQETSDADQLMRVQWKFGRMQLSHHLRKARNKNPCRFHALREVILKKLKGLKLGKIPLTETERKHNSIKDT

SEQ ID NO: 7033 - protein, 731 aa, Artificial Sequence
  Synthetic polypeptide
MPVRKQDTQRALHLLEEYRSKLSQTEDRQLRSSIERVINIFQSNLFQALIDIQEFYEVTLLDNPKCIDRSKPSEPIQPVNTWEISSLPSSTVTSETLPSSLSPSVEKYRYQDEDTPPQEHISPQITNEVIGPELVHVSEKNLSEIENVHGFVSHSHISPIKANPPPVLVNTDSLETPTYVNGTDADYEYEEITLERGNSGLGFSIAGGTDNPHIGDDSSIFITKIITGGAAAQDGRLRVNDCILRVNEVDVRDVTHSKAVEALKEAGSIVRLYVKRRKPVSEKIMEIKLIKGPKGLGFSIAGGVGNQHIPGDNSIYVTKIIEGGAAHKDGKLQIGDKLLAVNNVCLEEVTHEEAVTALKNTSDFVYLKVAKPTSMYMNDGYAPPDITNSSSQPVDNHVSPSSFLGQTPASPARYSPVSKAVLGDDEITREPRKVVLHRGSTGLGFNIVGGEDGEGIFISFILAGGPADLSGELRKGDRIISVNSVDLRAASHEQAAAALKNAGQAVTIVAQYRPEEYSRFEAKIHDLREQMMNSSISSGSGSLRTSQKRSLYVRALFDYDKTKDSGLPSQGLNFKFGDILHVINASDDEWWQARQVTPDGESDEVGVIPSKRRVEKKERARLKTVKFNSKTRDKGQSFNDKRKKNLFSRKFPFYKNKDQSEQETSDADQLMRVQWKFGRMQLSHHLRKARNKNPCRFHALREVILKKLKGLKLGKIPLTETERKHNSIKDT

SEQ ID NO: 7034 - protein, 15 aa, Artificial Sequence
  Synthetic polypeptide
MASNGIQKSILVVIW

SEQ ID NO: 7035 - protein, 52 aa, Artificial Sequence
  Synthetic polypeptide
MASNGIQKSEKTSVYEESGPSPNTVCWHFALQLPSFQNCKEYKSVVGKPPGL

SEQ ID NO: 7036 - protein, 34 aa, Artificial Sequence
  Synthetic polypeptide
MLATRLSRPLSRLPGKTLSACDRENGASILVVIW

SEQ ID NO: 7037 - protein, 26 aa, Artificial Sequence
  Synthetic polypeptide
MRVRWGIQQNSVNITHRHKNFGVLNC

SEQ ID NO: 7038 - protein, 98 aa, Artificial Sequence
  Synthetic polypeptide
GCVAVGAKGSCVPKYRGPVCSRRDSKDTEDYITEGIRFRDDIIKLNRKEGKKQNFPRLNRRLLQQSGAQQFRMRVRWGIQQNSVNITHRHKNFGVLNC

SEQ ID NO: 7039 - protein, 67 aa, Artificial Sequence
  Synthetic polypeptide
MEPSVIMGNDIIKLNRKEGKKQNFPRLNRRLLQQSGAQQFRMRVRWGIQQNSVNITHRHKNFGVLNC

SEQ ID NO: 7040 - protein, 93 aa, Artificial Sequence
  Synthetic polypeptide
MNRFGTRLVGATATSSPPPKARSNENLDKIDMSLDDIIKLNRKEGKKQNFPRLNRRLLQQSGAQQFRMRVRWGIQQNSVNITHRHKNFGVLNC

SEQ ID NO: 7041 - protein, 15 aa, Artificial Sequence
  Synthetic polypeptide
QRSCFTPSSICCTYH

SEQ ID NO: 7042 - protein, 750 aa, Artificial Sequence
  Synthetic polypeptide
MAAAGLVAVAAAAEYSGTVASGGNLPGVHCGPSSGAGPGFGPGSWSRSLDRALEEAAVTGVLSLSGRKLREFPRGAANHDLTDTTRADLSRNRLSEIPIEACHFVSLENLNLYQNCIRYIPEAILNLQALTFLNISRNQLSTLPVHLCNLPLKVLIASNNKLVSLPEEIGHLRHLMELDVSCNEIQTIPSQIGNLEALRDLNVRRNHLVHLPEELAELPLIRLDFSCNKITTIPVCYRNLRHLQTITLDNNPLQSPPAQICIKGKVHIFKYLNIQACKIAPDLPDYDRRPLGFGSCHEELYSSRPYGALDSGFNSVDSGDKRWSGNEPTDEFSDLPLRVAEITKEQRLRRESQYQENRGSLVVTNGGVEHDLDQIDYIDSCTAEEEEAEVRQPKGPDPDSLSSQFMAYIEQRRISHEGSPVKPVAIREFQKTEDMRRYLHQNRVPAEPSSLLSLSASHNQLSHTDLELHQRREQLVERTRREAQLAALQYEEEKIRTKQIQRDAVLDFVKQKASQSPQKQHPLLDGVDGECPFPSRRSQHTDDSALCMSLSGLNQVGCAATLPHSSAFTPLKSDDRPNALLSSPATETVHHSPAYSFPAAIQRNQPQRPESFLFRAGVRAETNKGHASPLPPSAAPTTDSTDSITGQNSRQREEELELIDQLRKHIEYRLKVSLPCDLGAALTDGVVLCHLANHVRPRSVPSIHVPSPAVPKLTMAKCRRNVENFLEACRKIGVPQSIKRWKASNSRCQA

SEQ ID NO: 7043 - protein, 698 aa, Artificial Sequence
  Synthetic polypeptide
MAAAGLVAVAAAAEYSGTVASGGNLPGVHCGPSSGAGPGFGPGSWSRSLDRALEEAAVTGVLSLSGRKLREFPRGAANHDLTDTTRADLSRNRLSEIPIEACHFVSLENLNLYQNCIRYIPEAILNLQALTFLNISRNQLSTLPVHLCNLPLKVLIASNNKLVSLPEEIGHLRHLMELDVSCNEIQTIPSQIGNLEALRDLNVRRNHLVHLPEELAELPLIRLDFSCNKITTIPVCYRNLRHLQTITLDNNPLQSPPAQICIKGKVHIFKYLNIQACKIAPDLPDYDRRPLGFGSCHEELYSSRPYGALDSGFNSVDSGDKRWSGNEPTDEFSDLPLRVAEITKEQRLRRESQYQENRGSLVVTNGGVEHDLDQIDYIDSCTAEEEEAEGSPVKPVAIREFQKTEDMRRYLHQNRVPAEPSSLLSLSASHNQLSHTDLELHQRREQLVERTRREAQLAALQYEEEKIRTKQIQRDAVLDFVKQKASQSPQKQHPLLDGVDGECPFPSRRSQHTDDSALCMSDDRPNALLSSPATETVHHSPAYSFPAAIQRNQPQRPESFLFRAGVRAETNKGHASPLPPSAAPTTDSTDSITGQNSRQREEELELIDQLRKHIEYRLKVSLPCDLGAALTDGVVLCHLANHVRPRSVPSIHVPSPAVPKLTMAKCRRNVENFLEACRKIGVPQSIKRWKASNSRCQA

SEQ ID NO: 7044 - protein, 596 aa, Artificial Sequence
  Synthetic polypeptide
MAAAGLVAVAAAAEYSGTVASGGNLPGVHCGPSSGAGPGFGPGSWSRSLDRALEEAAVTGVLSLSGRKLREFPRGAANHDLTDTTRAELAELPLIRLDFSCNKITTIPVCYRNLRHLQTITLDNNPLQSPPAQICIKGKVHIFKYLNIQACKIAPDLPDYDRRPLGFGSCHEELYSSRPYGALDSGFNSVDSGDKRWSGNEPTDEFSDLPLRVAEITKEQRLRRESQYQENRGSLVVTNGGVEHDLDQIDYIDSCTAEEEEAEGSPVKPVAIREFQKTEDMRRYLHQNRVPAEPSSLLSLSASHNQLSHTDLELHQRREQLVERTRREAQLAALQYEEEKIRTKQIQRDAVLDFVKQKASQSPQKQHPLLDGVDGECPFPSRRSQHTDDSALCMSLSGLNQVGCAATLPHSSAFTPLKSDDRPNALLSSPATETVHHSPAYSFPAAIQRNQPQRPESFLFRAGVRAETNKGHASPLPPSAAPTTDSTDSITGQNSRQREEELELIDQLRKHIEYRLKVSLPCDLGAALTDGVVLCHLANHVRPRSVPSIHVPSPAVPKLTMAKCRRNVENFLEACRKIGVPQSIKRWKASNSRCQA

SEQ ID NO: 7045 - protein, 345 aa, Artificial Sequence
  Synthetic polypeptide
MAYIEQRRISHEGSPVKPVAIREFQKTEDMRRYLHQNRVPAEPSSLLSLSASHNQLSHTDLELHQRREQLVERTRREAQLAALQYEEEKIRTKQIQRDAVLDFVKQKASQSPQKQHPLLDGVDGECPFPSRRSQHTDDSALCMSLSGLNQVGCAATLPHSSAFTPLKSDDRPNALLSSPATETVHHSPAYSFPAAIQRNQPQRPESFLFRAGVRAETNKGHASPLPPSAAPTTDSTDSITGQNSRQREEELELIDQLRKHIEYRLKVSLPCDLGAALTDGVVLCHLANHVRPRSVPSIHVPSPAVPKLTMAKCRRNVENFLEACRKIGVPQSIKRWKASNSRCQA

SEQ ID NO: 7046 - protein, 225 aa, Artificial Sequence
  Synthetic polypeptide
YEEEKIRTKQIQRDAVLDFVKQKASQSPQKQHPLLDGVDGECPFPSRRSQHTDDSALCMSLSGLNQVGCAATLPHSSAFTPLKSDDRPNALLSSPATETGHASPLPPSAAPTTDSTDSITGQNSRQREEELELIDQLRKHIEYRLKVSLPCDLGAALTDGVVLCHLANHVRPRSVPSIHVPSPAVPKLTMAKCRRNVENFLEACRKIGVPQSIKRWKASNSRCQA

SEQ ID NO: 7047 - protein, 187 aa, Artificial Sequence
  Synthetic polypeptide
AVLDFVKQKASQSPQKQHPLLDGVDGECPFPSRRSQHTDDSALCMSDDRPNALLSSPATETGHASPLPPSAAPTTDSTDSITGQNSRQREEELELIDQLRKHIEYRLKVSLPCDLGAALTDGVVLCHLANHVRPRSVPSIHVPSPAVPKLTMAKCRRNVENFLEACRKIGVPQSIKRWKASNSRCQA

SEQ ID NO: 7048 - protein, 69 aa, Artificial Sequence
  Synthetic polypeptide
MSGRLWSKAIFAGYKRGLRNQREHTALLKIEGVYARDETEFYLGKRCAYVYKAKNLCSMVTSVRPSLAI

SEQ ID NO: 7049 - protein, 59 aa, Artificial Sequence
  Synthetic polypeptide
MSGRLWSKAIFAGYKRGLRNQREHTALLKIEGVYARDETEFYLGKRCAYVYKAKKVESH

SEQ ID NO: 7050 - protein, 190 aa, Artificial Sequence
  Synthetic polypeptide
MASRGATRPNGPNTGNKICQFKLVLLGESAVGKSSLVLRFVKGQFHEFQESTIGAAFLTQTVCLDDTTVKFEIWDTAGQERYHSLAPMYYRGAQAAIVVYDITNEESFARAKNWVKELQRQASPNIVIALSGNKADLANKRAVDFQEAQSYADDNSLLFMETSAKTSMNVNEIFMAIDRPSRRYSRRRHC

SEQ ID NO: 7051 - protein, 176 aa, Artificial Sequence
  Synthetic polypeptide
MASRGATRPNGPNTGNKICQFKLVLLGESAVGKSSLVLRFVKGQFHEFQESTIGVKFEIWDTAGQERYHSLAPMYYRGAQAAIVVYDITNEESFARAKNWVKELQRQASPNIVIALSGNKADLANKRAVDFQEAQSYADDNSLLFMETSAKTSMNVNEIFMAIDRPSRRYSRRRHC

SEQ ID NO: 7052 - protein, 105 aa, Artificial Sequence
  Synthetic polypeptide
MSEAGGAGPGGCGAGAGAGAGPGALPPQPAALPPAPPQGSPCAAAAGGSGACGPATAVAAAGTAEGPGGGGSARIAVKKAQLRSAPRAKKLEKLGVYSACKPQLT

SEQ ID NO: 7053 - protein, 134 aa, Artificial Sequence
  Synthetic polypeptide
MGKRLDQPQMYPQYTYYYPHYLQTKSYAPAPHPMAPPSPSTNSSSNNSSNNSSGEQLSKTNLYIRGLPPGTTDQDLIKLCQPYGKIVSTKAILDKNTNQCKGYGFVDFDSPAAAQKAVASLKANGVQAQMAKIN

SEQ ID NO: 7054 - protein, 135 aa, Artificial Sequence
  Synthetic polypeptide
MGKRLDQPQMYPQYTYYYPHYLQTKQSYAPAPHPMAPPSPSTNSSSNNSSNNSSGEQLSKTNLYIRGLPPGTTDQDLIKLCQPYGKIVSTKAILDKNTNQCKGYGFVDFDSPAAAQKAVASLKANGVQAQMAKIN

SEQ ID NO: 7055 - protein, 42 aa, Artificial Sequence
  Synthetic polypeptide
EISRTLRTTWATTCRSCLQRVRKKMKWKLKTRIVKKPKNQTS

SEQ ID NO: 7056 - protein, 265 aa, Artificial Sequence
  Synthetic polypeptide
MAGEGDQQDAAHNMGNHLPLLPAESEEEDEMEVEDQDSKEAKKPNIINFDTSLPTSHTYLGADMEEFHGRTLHDDDSCQVIPVLPQVMMILIPGQTLPLQLFHPQEVSMVRNLIQKDRTFAVLAYSNVQEREAQFGTTAEIYAYREEQDFGIEIVKVKAIGRQRFKVLELRTQSDGIQQAKVQILPECVLPSTMSAVQLESLNKCQIFPSKPVSREDQCSYKWWQKYQKRKFHCANLTSWPRWLYSLYDAPGLVACGCSPSCLRG

SEQ ID NO: 7057 - protein, 264 aa, Artificial Sequence
  Synthetic polypeptide
MAGEGDQQDAAHNMGNHLPLLPESEEEDEMEVEDQDSKEAKKPNIINFDTSLPTSHTYLGADMEEFHGRTLHDDDSCQVIPVLPQVMMILIPGQTLPLQLFHPQEVSMVRNLIQKDRTFAVLAYSNVQEREAQFGTTAEIYAYREEQDFGIEIVKVKAIGRQRFKVLELRTQSDGIQQAKVQILPECVLPSTMSAVQLESLNKCQIFPSKPVSREDQCSYKWWQKYQKRKFHCANLTSWPRWLYSLYDAPGLVACGCSPSCLRG

SEQ ID NO: 7058 - protein, 350 aa, Artificial Sequence
  Synthetic polypeptide
MAAAPLKVCIVGSGNWGSAVAKIIGNNVKKLQKFASTVKMWVFEETVNGRKLTDIINNDHENVKYLPGHKLPENVVAMSNLSEAVQDADLLVFVIPHQFIHRICDEITGRVPKKALGITLIKGIDEGPEGLKLISDIIREKMGIDISVLMGANIANEVAAEKFCETTIGSKVMENGLLFKELLQTPNFRITVVDDADTVELCGALKNIVAVGAGFCDGLRCGDNTKAAVIRLGLMEMIAFARIFCKGQVSTATFLESCGVADLITTCYGGRNRRVAEAFARTGKTIEELEKEMLNGQKLQGPQTSAEVYRILKQKGLLDKRLRQQNRLNPGGRGCSETRSCHRTPAWAIE

SEQ ID NO: 7059 - protein, 50 aa, Artificial Sequence
  Synthetic polypeptide
MEEPQRARSHTVTTTASSFAENFSTSSSSFAYDREFLRTLPGFLIVAEIK

SEQ ID NO: 7060 - protein, 202 aa, Artificial Sequence
  Synthetic polypeptide
MSHGAGLVRTTCSSGSALGPGAGAAQPSASPLEGLLDLSYPRTHAALLKVAQMVTLLIAFICVRSSLWTNYSAYSYFEVVTICDLIMILAFYLVHLFRFYRVLTCISWPLSELLHYLIGTLLLLIASIVAASKSYNQSGLVAGAIFGFMATFLCMASIWLSYKISCVTQSTATWMNLEDIMLSEISQAQKDKHHMISFICGI

SEQ ID NO: 7061 - protein, 169 aa, Artificial Sequence
  Synthetic polypeptide
MSHGAGLVRTTCSSGSALGPGAGAAQPSASPLEGLLDLSYPRTHAALLKVAQMVTLLIAFICVRSSLWTNYSAYSYFEVVTICDLIMILAFYLVHLFRFYRVLTCISWPLSIFGFMATFLCMASIWLSYKISCVTQSTATWMNLEDIMLSEISQAQKDKHHMISFICGI

SEQ ID NO: 7062 - protein, 9 aa, Artificial Sequence
  Synthetic polypeptide
PRVTTRADW

SEQ ID NO: 7063 - protein, 27 aa, Artificial Sequence
  Synthetic polypeptide
MAADKPADSACLHPHEINSLVAHTKPV

SEQ ID NO: 7064 - protein, 11 aa, Artificial Sequence
  Synthetic polypeptide
MAADKPADAYD

SEQ ID NO: 7065 - protein, 675 aa, Artificial Sequence
  Synthetic polypeptide
MAADKPADQGAEKHEGTGQSSGITDQEKELSTNAFQAFTSGNYDACLQHLACLQDINKDDYKIILNTAVAEFFKSNQTTTDNLRQTLNQLKNQVHSAVEEMDGLDDVENSMLYYNQAVILYHLRQYTEAISVGEKLYQFIEPFEEKFAQAVCFLLVDLYILTYQAEKALHLLAVLEKMISQGNNNKNGKNETGNNNNKDGSNHKAESGALIEAAKSKIHQYKVRAYIQMKSLKACKREIKSVMNTAGNSAPSLFLKSNFEYLRGNYRKAVKLLNSSNIAEHPGFMKTGECLRCMFWNNLGCIHFAMSKHNLGIFYFKKALQENDNVCAQLSAGSTDPGKKFSGRPMCTLLTNKRYELLYNCGIQLLHIGRPLAAFECLIEAVQVYHANPRLWLRLAECCIAANKGTSEQETKGLPSKKGIVQSIVGQGYHRKIVLASQSIQNTVYNDGQSSAIPVASMEFAAICLRNALLLLPEEQQDPKQENGAKNSNQLGGNTESSESSETCRCSILACSAYVALALGDNLMALNHADKLLQQPKLSGSLKFLGHLYAAEALISLDRISDAITHLNPENVTDVSLGISSNEQDQGSDKGENEAMESSGKRAPQCYPSSVNSARTVMLFNLGSAYCLRSEYDKARKCLHQAASMIHPKEVPPEAILLAVYLELQNGPSVRIKMR

SEQ ID NO: 7066 - protein, 702 aa, Artificial Sequence
  Synthetic polypeptide
MAADKPADQGAEKHEGTGQSSGITDQEKELSTNAFQAFTSGNYDACLQHLACLQDINKDDYKIILNTAVAEFFKSNQTTTDNLRQTLNQLKNQVHSAVEEMDGLDDVENSMLYYNQAVILYHLRQYTEAISVGEKLYQFIEPFEEKFAQAVCFLLVDLYILTYQAEKALHLLAVLEKMISQGNNNKNGKNETGNNNNKDGSNHKAESGALIEAAKSKIHQYKVRAYIQMKSLKACKREIKSVMNTAGNSAPSLFLKSNFEYLRGNYRKAVKLLNSSNIAEHPGFMKTGECLRCMFWNNLGCIHFAMSKHNLGIFYFKKALQENDNVCAQLSAGSTDPGKKFSGRPMCTLLTNKRYELLYNCGIQLLHIGRPLAAFECLIEAVQVYHANPRLWLRLAECCIAANKGTSEQETKGLPSKKGIVQSIVGQGYHRKIVLASQSIQNTVYNDGQSSAIPVASMEFAAICLRNALLLLPEEQQDPKQENGAKNSNQLGGNTESSESSETCSSKSHDGDKFIPAPPSSPLRKQELENLKCSILACSAYVALALGDNLMALNHADKLLQQPKLSGSLKFLGHLYAAEALISLDRISDAITHLNPENVTDVSLGISSNEQDQGSDKGENEAMESSGKRAPQCYPSSVNSARTVMLFNLGSAYCLRSEYDKARKCLHQAASMIHPKEVPPEAILLAVYLELQNGPSVRIKMR

SEQ ID NO: 7067 - protein, 762 aa, Artificial Sequence
  Synthetic polypeptide
MKSIGVKTVKVCGSKSSVRIEGQPCSLGQSRRKVKLMGERSYTLSIGNGDYFWANKEMLWDYVQTLSDQGAEKHEGTGQSSGITDQEKELSTNAFQAFTSGNYDACLQHLACLQDINKDDYKIILNTAVAEFFKSNQTTTDNLRQTLNQLKNQVHSAVEEMDGLDDVENSMLYYNQAVILYHLRQYTEAISVGEKLYQFIEPFEEKFAQAVCFLLVDLYILTYQAEKALHLLAVLEKMISQGNNNKNGKNETGNNNNKDGSNHKAESGALIEAAKSKIHQYKVRAYIQMKSLKACKREIKSVMNTAGNSAPSLFLKSNFEYLRGNYRKAVKLLNSSNIAEHPGFMKTGECLRCMFWNNLGCIHFAMSKHNLGIFYFKKALQENDNVCAQLSAGSTDPGKKFSGRPMCTLLTNKRYELLYNCGIQLLHIGRPLAAFECLIEAVQVYHANPRLWLRLAECCIAANKGTSEQETKGLPSKKGIVQSIVGQGYHRKIVLASQSIQNTVYNDGQSSAIPVASMEFAAICLRNALLLLPEEQQDPKQENGAKNSNQLGGNTESSESSETCSSKSHDGDKFIPAPPSSPLRKQELENLKCSILACSAYVALALGDNLMALNHADKLLQQPKLSGSLKFLGHLYAAEALISLDRISDAITHLNPENVTDVSLGISSNEQDQGSDKGENEAMESSGKRAPQCYPSSVNSARTVMLFNLGSAYCLRSEYDKARKCLHQAASMIHPKEVPPEAILLAVYLELQNGPSVRIKMR

SEQ ID NO: 7068 - protein, 237 aa, Artificial Sequence
  Synthetic polypeptide
PVASMEFAAICLRNALLLLPEEQQDPKQENGAKNSNQLGGNTESSESSETCSSKSHDGDKFIPAPPSSPLRKQELENLKCSILACSAYVALALGDNLMALNHADKLLQQPKLSGSLKFLGHLYAAEALISLDRISDAITHLNPENVTDVSLGISSNEQDQAGKRAPQCYPSSVNSARTVMLFNLGSAYCLRSEYDKARKCLHQAASMIHPKEVPPEAILLAVYLELQNGPSVRIKMR

SEQ ID NO: 7069 - protein, 448 aa, Artificial Sequence
  Synthetic polypeptide
MEPRSMEYFCAQVQQKDVGGRLQVGQELLLYLGAPGAISDLEEDLGRLGKTVDALTGWVGSSNYRVSLMGLEILSAFVDRLSTRFKSYVAMVIVALIDRMGDAKDKVRDEAQTLILKLMDQVAPPMYIWEQLASGFKHKNFRSREGVCLCLIETLNIFGAQPLVISKLIPHLCILFGDSNSQVRDAAILAIVEIYRHVGEKVRMDLYKRGIPPARLEMIFAKFDEVQSSGGMILSVCKDKSFDDEESVDGNRPSSAASAFKVPAPKTSGNPANSARKPGSAGGPKVGAGASKEGGAGAVDEDDFIKAFTDVPSIQIYSSRELEETLNKIREILSDDKHDWDQRANALKKIRSLLVAGAAQYDCFFQHLRLLDGALKLSAKDLRSQVVREACITVAHLSTVLGNKFDHGAEAIVPTLFNLVPNSAKVMATSGCAAIRFIIRAGRGSSHL

SEQ ID NO: 7070 - protein, 447 aa, Artificial Sequence
  Synthetic polypeptide
MEPRSMEYFCAQVQQKDVGGRLQVGQELLLYLGAPGAISDLEEDLGRLGKTVDALTGWVGSSNYRVSLMGLEILSAFVDRLSTRFKSYVAMVIVALIDRMGDAKDKVRDEAQTLILKLMDQVAPPMYIWEQLASGFKHKNFRSREGVCLCLIETLNIFGAQPLVISKLIPHLCILFGDSNSQVRDAAILAIVEIYRHVGEKVRMDLYKRGIPPARLEMIFAKFDEVQSSGGMILSVCKDKSFDDEESVDGNRPSSAASAFKVPAPKTSGNPANSARKPGSAGGPKVGGASKEGGAGAVDEDDFIKAFTDVPSIQIYSSRELEETLNKIREILSDDKHDWDQRANALKKIRSLLVAGAAQYDCFFQHLRLLDGALKLSAKDLRSQVVREACITVAHLSTVLGNKFDHGAEAIVPTLFNLVPNSAKVMATSGCAAIRFIIRAGRGSSHL

SEQ ID NO: 7071 - protein, 199 aa, Artificial Sequence
  Synthetic polypeptide
MRRLICKRICDYKSFDDEESVDGNRPSSAASAFKVPAPKTSGNPANSARKPGSAGGPKVGELLSIMIYSSRELEETLNKIREILSDDKHDWDQRANALKKIRSLLVAGAAQYDCFFQHLRLLDGALKLSAKDLRSQVVREACITVAHLSTVLGNKFDHGAEAIVPTLFNLVPNSAKVMATSGCAAIRFIIRAGRGSSHL

SEQ ID NO: 7072 - protein, 214 aa, Artificial Sequence
  Synthetic polypeptide
MAMGDDKSFDDEESVDGNRPSSAASAFKVPAPKTSGNPANSARKPGSAGGPKVGGASKEGGAGAVDEDDFIKAFTDVPSIQIYSSRELEETLNKIREILSDDKHDWDQRANALKKIRSLLVAGAAQYDCFFQHLRLLDGALKLSAKDLRSQVVREACITVAHLSTVLGNKFDHGAEAIVPTLFNLVPNSAKVMATSGCAAIRFIIRAGRGSSHL

SEQ ID NO: 7073 - protein, 220 aa, Artificial Sequence
  Synthetic polypeptide
MRRLICKRICDYKSFDDEESVDGNRPSSAASAFKVPAPKTSGNPANSARKPGSAGGPKVGGASKEGGAGAVDEDDFIKAFTDVPSIQIYSSRELEETLNKIREILSDDKHDWDQRANALKKIRSLLVAGAAQYDCFFQHLRLLDGALKLSAKDLRSQVVREACITVAHLSTVLGNKFDHGAEAIVPTLFNLVPNSAKVMATSGCAAIRFIIRAGRGSSHL

SEQ ID NO: 7074 - protein, 224 aa, Artificial Sequence
  Synthetic polypeptide
MLIQRTFISYYISYQNKSFDDEESVDGNRPSSAASAFKVPAPKTSGNPANSARKPGSAGGPKVGGASKEGGAGAVDEDDFIKAFTDVPSIQIYSSRELEETLNKIREILSDDKHDWDQRANALKKIRSLLVAGAAQYDCFFQHLRLLDGALKLSAKDLRSQVVREACITVAHLSTVLGNKFDHGAEAIVPTLFNLVPNSAKVMATSGCAAIRFIIRAGRGSSHL

SEQ ID NO: 7075 - protein, 40 aa, Artificial Sequence
  Synthetic polypeptide
MIPPSSPREDGVDGLPKEAVGAEQPPSPASTSSQESKLLS

SEQ ID NO: 7076 - protein, 135 aa, Artificial Sequence
  Synthetic polypeptide
MIPPSSPREDGVDGLPKEAVGAEQPPSPASTSSQESKLQKLKRSLSFKTKSLRSKSADNFFQRTNSEDMKLQAHMVAEISPSSSPLPAPGSLTSTPARAGLHPGGKAHAFQEYIFKKPTFCDVCNHMIVGLQLLS

SEQ ID NO: 7077 - protein, 124 aa, Artificial Sequence
  Synthetic polypeptide
MIPPSSPREDGVDGLPKEAVGAEQPPSPASTSSQESKTKSLRSKSADNFFQRTNSEDMKLQAHMVAEISPSSSPLPAPGSLTSTPARAGLHPGGKAHAFQEYIFKKPTFCDVCNHMIVGLQLLS

SEQ ID NO: 7078 - protein, 160 aa, Artificial Sequence
  Synthetic polypeptide
MSFVAGVIRRLDETVVNRIAAGEVIQRPANAIKEMIENCLDAKSTSIQVIVKEGGLKLIQIQDNGTGIRKEDLDIVCERFTTSKLQSFEDLASISTYGFRGEALASISHVAHVTITTKTADGKCAYRTDELPSLWDAFTHPHSHLRLNGPFSRSLSILFY

SEQ ID NO: 7079 - protein, 7 aa, Artificial Sequence
  Synthetic polypeptide
GGWTRQW

SEQ ID NO: 7080 - protein, 62 aa, Artificial Sequence
  Synthetic polypeptide
MAFEALASISHVAHVTITTKTADGKCAYRTDELPSLWDAFTHPHSHLRLNGPFSRSLSILFY

SEQ ID NO: 7081 - protein, 78 aa, Artificial Sequence
  Synthetic polypeptide
MFKKLKQKISEEQQQLQQALAPAQASSNSSTPTRMRSRTSSFTEQLDEGTPNRENASTHASKSPDSVNGSEPSIPQIC

SEQ ID NO: 7082 - protein, 111 aa, Artificial Sequence
  Synthetic polypeptide
MFKKLKQKISEEQQQLQQALAPAQASSNSSTPTRMRSRTSSFTEQLDEGTPNRELLAGMIAEPAFLSEYTIFALDSSKHPKTQSDSVNASTHASKSPDSVNGSEPSIPQIC

SEQ ID NO: 7083 - protein, 473 aa, Artificial Sequence
  Synthetic polypeptide
MFKKLKQKISEEQQQLQQALAPAQASSNSSTPTRMRSRTSSFTEQLDEGTPNRESGDTQSFAQKLQLRVPSVESLFRSPIKESLFRSSSKESLVRTSSRESLNRLDLDSSTASFDPPSDMDSEAEDLVGNSDSLNKEQLIQRLRRMERSLSSYRGKYSELVTAYQMLQREKKKLQGILSQSQDKSLRRIAELREELQMDQQAKKHLQEEFDASLEEKDQYISVLQTQVSLLKQRLRNGPMNVDVLKPLPQLEPQAEVFTKEENPESDGEPVVEDGTSVKTLETLQQRVKRQENLLKRCKETIQSHKEQCTLLTSEKEALQEQLDERLQELEKIKDLHMAEKTKLITQLRDAKNLIEQLEQDKGMVIAETKRQMHETLEMKEEEIAQLRSRIKQMTTQGEELREQKEKSERAAFEELEKALSTAQKTEEARRKLKAEMDEQIKTIEKTSEEERISLQQELSRVKQEVVDVMKAP

SEQ ID NO: 7084 - protein, 495 aa, Artificial Sequence
  Synthetic polypeptide
MFKKLKQKISEEQQQLQQALAPAQASSNSSTPTRMRSRTSSFTEQLDEGTPNRENASTHASKSPDSVNGSEPSIPQSGDTQSFAQKLQLRVPSVESLFRSPIKESLFRSSSKESLVRTSSRESLNRLDLDSSTASFDPPSDMDSEAEDLVGNSDSLNKEQLIQRLRRMERSLSSYRGKYSELVTAYQMLQREKKKLQGILSQSQDKSLRRIAELREELQMDQQAKKHLQEEFDASLEEKDQYISVLQTQVSLLKQRLRNGPMNVDVLKPLPQLEPQAEVFTKEENPESDGEPVVEDGTSVKTLETLQQRVKRQENLLKRCKETIQSHKEQCTLLTSEKEALQEQLDERLQELEKIKDLHMAEKTKLITQLRDAKNLIEQLEQDKGMVIAETKRQMHETLEMKEEEIAQLRSRIKQMTTQGEELREQKEKSERAAFEELEKALSTAQKTEEARRKLKAEMDEQIKTIEKTSEEERISLQQELSRVKQEVVDVMKAP

SEQ ID NO: 7085 - protein, 344 aa, Artificial Sequence
  Synthetic polypeptide
NSDSLNKEQLIQRLRRMERSLSSYRGKYSELVTAYQMLQREKKKLQGILSQSQDKSLRRIAELREELQMDQQAKKHLQEEFDASLEEKDQYISVLQTQVSLLKQRLRNGPMNVDVLKPLPQLEPQAEVFTKEENPESDGEPVVEDGTSVKTLETLQQRVKRQENLLKRCKETIQSHKEQCTLLTSEKEALQEQLDERLQELEKIKDLHMAEKTKLITQLRDAKNLIEQLEQDKGMVIAETKRQMHETLEMKEEEIAQLRSRIKQMTTQGEELREQKEKSERAAFEELEKALSTAQKTEEARRKLKAEMDEQIKTIEKTSEEERISLQQELSRVKQEVVDVMKAP

SEQ ID NO: 7086 - protein, 2090 aa, Artificial Sequence
  Synthetic polypeptide
MFKKLKQKISEEQQQLQQALAPAQASSNSSTPTRMRSRTSSFTEQLDEGTPNRESGDTQSFAQKLQLRVPSVESLFRSPIKESLFRSSSKESLVRTSSRESLNRLDLDSSTASFDPPSDMDSEAEDLVGNSDSLNKEQLIQRLRRMERSLSSYRGKYSELVTAYQMLQREKKKLQGILSQSQDKSLRRIAELREELQMDQQAKKHLQEEFDASLEEKDQYISVLQTQVSLLKQRLRNGPMNVDVLKPLPQLEPQAEVFTKEENPESDGEPVVEDGTSVKTLETLQQRVKRQENLLKRCKETIQSHKEQCTLLTSEKEALQEQLDERLQELEKIKDLHMAEKTKLITQLRDAKNLIEQLEQDKGMVIAETKRQMHETLEMKEEEIAQLRSRIKQMTTQGEELREQKEKSERAAFEELEKALSTAQKTEEARRKLKAEMDEQIKTIEKTSEEERISLQQELSRVKQEVVDVMKKSSEEQIAKLQKLHEKELARKEQELTKKLQTREREFQEQMKVALEKSQSEYLKISQEKEQQESLALEELELQKKAILTESENKLRDLQQEAETYRTRILELESSLEKSLQENKNQSKDLAVHLEAEKNKHNKEITVMVEKHKTELESLKHQQDALWTEKLQVLKQQYQTEMEKLREKCEQEKETLLKDKEIIFQAHIEEMNEKTLEKLDVKQTELESLSSELSEVLKARHKLEEELSVLKDQTDKMKQELEAKMDEQKNHHQQQVDSIIKEHEVSIQRTEKALKDQINQLELLLKERDKHLKEHQAHVENLEADIKRSEGELQQASAKLDVFQSYQSATHEQTKAYEEQLAQLQQKLLDLETERILLTKQVAEVEAQKKDVCTELDAHKIQVQDLMQQLEKQNSEMEQKVKSLTQVYESKLEDGNKEQEQTKQILVEKENMILQMREGQKKEIEILTQKLSAKEDSIHILNEEYETKFKNQEKKMEKVKQKAKEMQETLKKKLLDQEAKLKKELENTALELSQKEKQFNAKMLEMAQANSAGISDAVSRLETNQKEQIESLTEVHRRELNDVISIWEKKLNQQAEELQEIHEIQLQEKEQEVAELKQKILLFGCEKEEMNKEITWLKEEGVKQDTTLNELQEQLKQKSAHVNSLAQDETKLKAHLEKLEVDLNKSLKENTFLQEQLVELKMLAEEDKRKVSELTSKLKTTDEEFQSLKSSHEKSNKSLEDKSLEFKKLSEELAIQLDICCKKTEALLEAKTNELINISSSKTNAILSRISHCQHRTTKVKEALLIKTCTVSELEAQLRQLTEEQNTLNISFQQATHQLEEKENQIKSMKADIESLVTEKEALQKEGGNQQQAASEKESCITQLKKELSENINAVTLMKEELKEKKVEISSLSKQLTDLNVQLQNSISLSEKEAAISSLRKQYDEEKCELLDQVQDLSFKVDTLSKEKISALEQVDDWSNKFSEWKKKAQSRFTQHQNTVKELQIQLELKSKEAYEKDEQINLLKEELDQQNKRFDCLKGEMEDDKSKMEKKESNLETELKSQTARIMELEDHITQKTIEIESLNEVLKNYNQQKDIEHKELVQKLQHFQELGEEKDNRVKEAEEKILTLENQVYSMKAELETKKKELEHVNLSVKSKEEELKALEDRLESESAAKLAELKRKAEQKIAAIKKQLLSQMEEKEEQYKKGTESHLSELNTKLQEREREVHILEEKLKSVESSQSETLIVPRSAKNVAAYTEQEEADSQGCVQKTYEEKISVLQRNLTEKEKLLQRVGQEKEETVSSHFEMRCQYQERLIKLEHAEAKQHEDQSMIGHLQEELEEKNKKYSLIVAQHVEKEGGKNNIQAKQNLENVFDDVQKTLQEKELTCQILEQKIKELDSCLVRQKEVHRVEMEELTSKYEKLQALQQMDGRNKPTELLEENTEEKSKSHLVQPKLLSNMEAQHNDLEFKLAGAEREKQKLGKEIVRLQKDLRMLRKEHQQELEILKKEYDQEREEKIKQEQEDLELKHNSTLKQLMREFNTQLAQKEQELEMTIKETINKAQEVEAELLESHQEETNQLLKKIAEKDDDLKRTAKRYEEILDTISITLEILFFSSRENLAQCLAHTST

SEQ ID NO: 7087 - protein, 2112 aa, Artificial Sequence
  Synthetic polypeptide
MFKKLKQKISEEQQQLQQALAPAQASSNSSTPTRMRSRTSSFTEQLDEGTPNRENASTHASKSPDSVNGSEPSIPQSGDTQSFAQKLQLRVPSVESLFRSPIKESLFRSSSKESLVRTSSRESLNRLDLDSSTASFDPPSDMDSEAEDLVGNSDSLNKEQLIQRLRRMERSLSSYRGKYSELVTAYQMLQREKKKLQGILSQSQDKSLRRIAELREELQMDQQAKKHLQEEFDASLEEKDQYISVLQTQVSLLKQRLRNGPMNVDVLKPLPQLEPQAEVFTKEENPESDGEPVVEDGTSVKTLETLQQRVKRQENLLKRCKETIQSHKEQCTLLTSEKEALQEQLDERLQELEKIKDLHMAEKTKLITQLRDAKNLIEQLEQDKGMVIAETKRQMHETLEMKEEEIAQLRSRIKQMTTQGEELREQKEKSERAAFEELEKALSTAQKTEEARRKLKAEMDEQIKTIEKTSEEERISLQQELSRVKQEVVDVMKKSSEEQIAKLQKLHEKELARKEQELTKKLQTREREFQEQMKVALEKSQSEYLKISQEKEQQESLALEELELQKKAILTESENKLRDLQQEAETYRTRILELESSLEKSLQENKNQSKDLAVHLEAEKNKHNKEITVMVEKHKTELESLKHQQDALWTEKLQVLKQQYQTEMEKLREKCEQEKETLLKDKEIIFQAHIEEMNEKTLEKLDVKQTELESLSSELSEVLKARHKLEEELSVLKDQTDKMKQELEAKMDEQKNHHQQQVDSIIKEHEVSIQRTEKALKDQINQLELLLKERDKHLKEHQAHVENLEADIKRSEGELQQASAKLDVFQSYQSATHEQTKAYEEQLAQLQQKLLDLETERILLTKQVAEVEAQKKDVCTELDAHKIQVQDLMQQLEKQNSEMEQKVKSLTQVYESKLEDGNKEQEQTKQILVEKENMILQMREGQKKEIEILTQKLSAKEDSIHILNEEYETKFKNQEKKMEKVKQKAKEMQETLKKKLLDQEAKLKKELENTALELSQKEKQFNAKMLEMAQANSAGISDAVSRLETNQKEQIESLTEVHRRELNDVISIWEKKLNQQAEELQEIHEIQLQEKEQEVAELKQKILLFGCEKEEMNKEITWLKEEGVKQDTTLNELQEQLKQKSAHVNSLAQDETKLKAHLEKLEVDLNKSLKENTFLQEQLVELKMLAEEDKRKVSELTSKLKTTDEEFQSLKSSHEKSNKSLEDKSLEFKKLSEELAIQLDICCKKTEALLEAKTNELINISSSKTNAILSRISHCQHRTTKVKEALLIKTCTVSELEAQLRQLTEEQNTLNISFQQATHQLEEKENQIKSMKADIESLVTEKEALQKEGGNQQQAASEKESCITQLKKELSENINAVTLMKEELKEKKVEISSLSKQLTDLNVQLQNSISLSEKEAAISSLRKQYDEEKCELLDQVQDLSFKVDTLSKEKISALEQVDDWSNKFSEWKKKAQSRFTQHQNTVKELQIQLELKSKEAYEKDEQINLLKEELDQQNKRFDCLKGEMEDDKSKMEKKESNLETELKSQTARIMELEDHITQKTIEIESLNEVLKNYNQQKDIEHKELVQKLQHFQELGEEKDNRVKEAEEKILTLENQVYSMKAELETKKKELEHVNLSVKSKEEELKALEDRLESESAAKLAELKRKAEQKIAAIKKQLLSQMEEKEEQYKKGTESHLSELNTKLQEREREVHILEEKLKSVESSQSETLIVPRSAKNVAAYTEQEEADSQGCVQKTYEEKISVLQRNLTEKEKLLQRVGQEKEETVSSHFEMRCQYQERLIKLEHAEAKQHEDQSMIGHLQEELEEKNKKYSLIVAQHVEKEGGKNNIQAKQNLENVFDDVQKTLQEKELTCQILEQKIKELDSCLVRQKEVHRVEMEELTSKYEKLQALQQMDGRNKPTELLEENTEEKSKSHLVQPKLLSNMEAQHNDLEFKLAGAEREKQKLGKEIVRLQKDLRMLRKEHQQELEILKKEYDQEREEKIKQEQEDLELKHNSTLKQLMREFNTQLAQKEQELEMTIKETINKAQEVEAELLESHQEETNQLLKKIAEKDDDLKRTAKRYEEILDTISITLEILFFSSRENLAQCLAHTST

SEQ ID NO: 7088 - protein, 1961 aa, Artificial Sequence
  Synthetic polypeptide
NSDSLNKEQLIQRLRRMERSLSSYRGKYSELVTAYQMLQREKKKLQGILSQSQDKSLRRIAELREELQMDQQAKKHLQEEFDASLEEKDQYISVLQTQVSLLKQRLRNGPMNVDVLKPLPQLEPQAEVFTKEENPESDGEPVVEDGTSVKTLETLQQRVKRQENLLKRCKETIQSHKEQCTLLTSEKEALQEQLDERLQELEKIKDLHMAEKTKLITQLRDAKNLIEQLEQDKGMVIAETKRQMHETLEMKEEEIAQLRSRIKQMTTQGEELREQKEKSERAAFEELEKALSTAQKTEEARRKLKAEMDEQIKTIEKTSEEERISLQQELSRVKQEVVDVMKKSSEEQIAKLQKLHEKELARKEQELTKKLQTREREFQEQMKVALEKSQSEYLKISQEKEQQESLALEELELQKKAILTESENKLRDLQQEAETYRTRILELESSLEKSLQENKNQSKDLAVHLEAEKNKHNKEITVMVEKHKTELESLKHQQDALWTEKLQVLKQQYQTEMEKLREKCEQEKETLLKDKEIIFQAHIEEMNEKTLEKLDVKQTELESLSSELSEVLKARHKLEEELSVLKDQTDKMKQELEAKMDEQKNHHQQQVDSIIKEHEVSIQRTEKALKDQINQLELLLKERDKHLKEHQAHVENLEADIKRSEGELQQASAKLDVFQSYQSATHEQTKAYEEQLAQLQQKLLDLETERILLTKQVAEVEAQKKDVCTELDAHKIQVQDLMQQLEKQNSEMEQKVKSLTQVYESKLEDGNKEQEQTKQILVEKENMILQMREGQKKEIEILTQKLSAKEDSIHILNEEYETKFKNQEKKMEKVKQKAKEMQETLKKKLLDQEAKLKKELENTALELSQKEKQFNAKMLEMAQANSAGISDAVSRLETNQKEQIESLTEVHRRELNDVISIWEKKLNQQAEELQEIHEIQLQEKEQEVAELKQKILLFGCEKEEMNKEITWLKEEGVKQDTTLNELQEQLKQKSAHVNSLAQDETKLKAHLEKLEVDLNKSLKENTFLQEQLVELKMLAEEDKRKVSELTSKLKTTDEEFQSLKSSHEKSNKSLEDKSLEFKKLSEELAIQLDICCKKTEALLEAKTNELINISSSKTNAILSRISHCQHRTTKVKEALLIKTCTVSELEAQLRQLTEEQNTLNISFQQATHQLEEKENQIKSMKADIESLVTEKEALQKEGGNQQQAASEKESCITQLKKELSENINAVTLMKEELKEKKVEISSLSKQLTDLNVQLQNSISLSEKEAAISSLRKQYDEEKCELLDQVQDLSFKVDTLSKEKISALEQVDDWSNKFSEWKKKAQSRFTQHQNTVKELQIQLELKSKEAYEKDEQINLLKEELDQQNKRFDCLKGEMEDDKSKMEKKESNLETELKSQTARIMELEDHITQKTIEIESLNEVLKNYNQQKDIEHKELVQKLQHFQELGEEKDNRVKEAEEKILTLENQVYSMKAELETKKKELEHVNLSVKSKEEELKALEDRLESESAAKLAELKRKAEQKIAAIKKQLLSQMEEKEEQYKKGTESHLSELNTKLQEREREVHILEEKLKSVESSQSETLIVPRSAKNVAAYTEQEEADSQGCVQKTYEEKISVLQRNLTEKEKLLQRVGQEKEETVSSHFEMRCQYQERLIKLEHAEAKQHEDQSMIGHLQEELEEKNKKYSLIVAQHVEKEGGKNNIQAKQNLENVFDDVQKTLQEKELTCQILEQKIKELDSCLVRQKEVHRVEMEELTSKYEKLQALQQMDGRNKPTELLEENTEEKSKSHLVQPKLLSNMEAQHNDLEFKLAGAEREKQKLGKEIVRLQKDLRMLRKEHQQELEILKKEYDQEREEKIKQEQEDLELKHNSTLKQLMREFNTQLAQKEQELEMTIKETINKAQEVEAELLESHQEETNQLLKKIAEKDDDLKRTAKRYEEILDTISITLEILFFSSRENLAQCLAHTST

SEQ ID NO: 7089 - protein, 329 aa, Artificial Sequence
  Synthetic polypeptide
MSEDSSALPWSINRDDYELQEVIGSGATAVVQAAYCAPKKEKVAIKRINLEKCQTSMDELLKEIQAMSQCHHPNIVSYYTSFVVKDELWLVMKLLSGGSVLDIIKHIVAKGEHKSGVLDESTIATILREVLEGLEYLHKNGQIHRDVKAGNILLGEDGSVQIADFGVSAFLATGGDITRNKVRKTFVGTPCWMAPEVMEQVRGYDFKADIWSFGITAIELATGAAPYHKYPPMKVLMLTLQNDPPSLETGVQDKEMLKKYGKSFRKMISLCLQKDPEKRPTAAELLRHKFFQKAKNKEFLQEKTLQRAPTISERAKKDGYNQKDSNNCW

SEQ ID NO: 7090 - protein, 437 aa, Artificial Sequence
  Synthetic polypeptide
MAEHAPRRCCLGWDFSTQQVKVVAVDAELNVFYEESVHFDRDLPEFGTQGGVHVHKDGLTVTSPVLMWVQALDIILEKMKASGFDFSQVLALSGAGQQHGSIYWKAGAQQALTSLSPDLRLHQQLQDCFSISDCPVWMDSSTTAQCRQLEAAVGGAQALSCLTGSRAYERFTGNQIAKIYQQNPEAYSHTERISLVSSFAASLFLGSYSPIDYSDGSGMNLLQIQDKVWSQACLGACAPHLEEKLSPPVPSCSVVGAISSYYVQRYGFPPGCKVVAFTGDNPASLAGMRLEEGDIAVSLGTSDTLFLWLQEPMPALEGHIFCNPVDSQHYMALLCFKNGSLMREKIRNESVSRSWSDFSKALQSTEMGNGGNLGFYFDVMEITPEIIGRHRFNTENHKVAAFPGDVEVRALIEGQFMAKRIHAEGLGYRVSRGRWIA

SEQ ID NO: 7091 - protein, 300 aa, Artificial Sequence
  Synthetic polypeptide
MDSSTTAQCRQLEAAVGGAQALSCLTGSRAYERFTGNQIAKIYQQNPEAYSHTERISLVSSFAASLFLGSYSPIDYSDGSGMNLLQIQDKVWSQACLGACAPHLEEKLSPPVPSCSVVGAISSYYVQRYGFPPGCKVVAFTGDNPASLAGMRLEEGDIAVSLGTSDTLFLWLQEPMPALEGHIFCNPVDSQHYMALLCFKNGSLMREKIRNESVSRSWSDFSKALQSTEMGNGGNLGFYFDVMEITPEIIGRHRFNTENHKVAAFPGDVEVRALIEGQFMAKRIHAEGLGYRVSRGRWIA

SEQ ID NO: 7092 - protein, 512 aa, Artificial Sequence [sequence omitted]

SEQ ID NO: 7093 - protein, 375 aa, Artificial Sequence
  Synthetic polypeptide
MDSSTTAQCRQLEAAVGGAQALSCLTGSRAYERFTGNQIAKIYQQNPEAYSHTERISLVSSFAASLFLGSYSPIDYSDGSGMNLLQIQDKVWSQACLGACAPHLEEKLSPPVPSCSVVGAISSYYVQRYGFPPGCKVVAFTGDNPASLAGMRLEEGDIAVSLGTSDTLFLWLQEPMPALEGHIFCNPVDSQHYMALLCFKNGSLMREKIRNESVSRSWSDFSKALQSTEMGNGGNLGFYFDVMEITPEIIGRHRFNTENHKVAAFPGDVEVRALIEGQFMAKRIHAEGLGYRVMSKTKILATGGASHNREILQVLADVFDAPVYVIDTANSACVGSAYRAFHGLAGGTDVPFSEVVKLAPNPRLAATPSPGASQA

SEQ ID NO: 7094 - protein, 524 aa, Artificial Sequence
  Synthetic polypeptide
MAEHAPRRCCLGWDFSTQQVKVVAVDAELNVFYEESVHFDRDLPEFGTQGGVHVHKDGLTVTSPVLMWVQALDIILEKMKASGFDFSQVLALSGAGQQHGSIYWKAGAQQALTSLSPDLRLHQQLQDCFSISDCPVWMDSSTTAQCRQLEAAVGGAQALSCLTGSRAYERFTGNQIAKIYQQNPEAYSHTERISLVSSFAASLFLGSYSPIDYSDGSGMNLLQIQDKVWSQACLGACAPHLEEKLSPPVPSCSVVGAISSYYVQRYGFPPGCKVVAFTGDNPASLAGMRLEEGDIAVSLGTSDTLFLWLQEPMPALEGHIFCNPVDSQHYMALLCFKNGSLMREKIRNESVSRSWSDFSKALQSTEMGNGGNLGFYFDVMEITPEIIGRHRFNTENHKVAAFPGDVEVRALIEGQFMAKRIHAEGLGYRVMSKTKILATGGASHNREILQVLADVFDAPVYVIDTANSACVGSAYRAFHGLAGGTDVPFSEVVKLAPNPRLAATPSPGASQAKTSGQFGYHQDT

SEQ ID NO: 7095 - protein, 387 aa, Artificial Sequence
  Synthetic polypeptide
MDSSTTAQCRQLEAAVGGAQALSCLTGSRAYERFTGNQIAKIYQQNPEAYSHTERISLVSSFAASLFLGSYSPIDYSDGSGMNLLQIQDKVWSQACLGACAPHLEEKLSPPVPSCSVVGAISSYYVQRYGFPPGCKVVAFTGDNPASLAGMRLEEGDIAVSLGTSDTLFLWLQEPMPALEGHIFCNPVDSQHYMALLCFKNGSLMREKIRNESVSRSWSDFSKALQSTEMGNGGNLGFYFDVMEITPEIIGRHRFNTENHKVAAFPGDVEVRALIEGQFMAKRIHAEGLGYRVMSKTKILATGGASHNREILQVLADVFDAPVYVIDTANSACVGSAYRAFHGLAGGTDVPFSEVVKLAPNPRLAATPSPGASQAKTSGQFGYHQDT

SEQ ID NO: 7096 - protein, 6 aa, Artificial Sequence
  Synthetic polypeptide
LPESGR

SEQ ID NO: 7097 - protein, 100 aa, Artificial Sequence
  Synthetic polypeptide
MAIKSIASRLRGSRRFLSGFVAGAVVGAAGAGLAALQFFRSQGAEGALTGKQPDGSAEKAVLEQFGFPLTGTEARDYMEGCLGTERRKVKRKIKSLFQRR

SEQ ID NO: 7098 - protein, 122 aa, Artificial Sequence
  Synthetic polypeptide
MAIKSIASRLRGSRRFLSGFVAGAVVGAAGAGLAALQFFRSQGAEGALTGKQPDGSAEKAVLEQFGFPLTGTEARCYTNHALSYDQAKRVPRWVLEHISKSKIMGTTWKVVLALNGERSKGR

SEQ ID NO: 7099 - protein, 6 aa, Artificial Sequence
  Synthetic polypeptide
LPESGR

SEQ ID NO: 7100 - protein, 151 aa, Artificial Sequence
  Synthetic polypeptide
MAIKSIASRLRGSRRFLSGFVAGAVVGAAGAGLAALQFFRSQGAEGALTGKQPDGSAEKAVLEQFGFPLTGTEARCYTNHALSYDQAKRVPRWVLEHISKSKIMGRFFKFTLLASLFLLSLNLHLCNDGLSYSDRIFLLKQKMLVYKKCIS

SEQ ID NO: 7101 - protein, 151 aa, Artificial Sequence
  Synthetic polypeptide
MAIKSIASRLRGSRRFLSGFVAGAVVGAAGAGLAALQFFRSQGAEGALTGKQPDGSAEKAVLEQFGFPLTGTEARCYTNHALSYDQAKRVPRWVLEHISKSKIMGRFFKFTLLASLFLLSLNLHLWDYMEGCLGTERRKVKRKIKSLFQRR

SEQ ID NO: 7102 - protein, 22 aa, Artificial Sequence
  Synthetic polypeptide
MFQTAWRQEKPGHTEIGAEGTL

SEQ ID NO: 7103 - protein, 98 aa, Artificial Sequence
  Synthetic polypeptide
MFQTAWRQEPVTFEDVAVYFTQNEWASLDSVQRALYREVMLENYANVASLAFPFTTPVLVSQLEQGELPWGLDPWEPMGREALRGICPGKTRPYRDRS

SEQ ID NO: 7104 - protein, 111 aa, Artificial Sequence
  Synthetic polypeptide
MLQTTWPQESVTFEDVAVYFTQNQWASLDPAQRALYGEVMLENYANVASLVAFPFPKPALISHLERGEAPWGPDPWDTEILRGISQDLTILSDTTVLKLDQLITLQTPLSV

SEQ ID NO: 7105 - protein, 289 aa, Artificial Sequence
  Synthetic polypeptide
MLQTTWPQESVTFEDVAVYFTQNQWASLDPAQRALYGEVMLENYANVASLVAFPFPKPALISHLERGEAPWGPDPWDTEILRGISQGGESWIKNEGLVIKQEASEETELHRMPVGGLLRNVSQHFDFKRKALKQTFNLNPNLILRGGMKFYECKECGKIFRYNSKLIRHQMSHTGEKPFKCKECGKAFKSSYDCIVHEKNHIGEGPYECKECGKGLSSNTALTQHQRIHTGEKPYECKECGKAFRRSAAYLQHQRLHTGEKLYKYLTILSDTTVLKLDQLITLQTPLSV

SEQ ID NO: 7106 - protein, 178 aa, Artificial Sequence
  Synthetic polypeptide
MPVGGLLRNVSQHFDFKRKALKQTFNLNPNLILRGGMKFYECKECGKIFRYNSKLIRHQMSHTGEKPFKCKECGKAFKSSYDCIVHEKNHIGEGPYECKECGKGLSSNTALTQHQRIHTGEKPYECKECGKAFRRSAAYLQHQRLHTGEKLYKYLTILSDTTVLKLDQLITLQTPLSV

SEQ ID NO: 7107 - protein, 264 aa, Artificial Sequence
  Synthetic polypeptide
MLQTTWPQESVTFEDVAVYFTQNQWASLDPAQRALYGEVMLENYANVASLVAFPFPKPALISHLERGEAPWGPDPWDTEILRGISQGGESWIKNEGLVIKQEASEETELHRMPVGGLLRNVSQHFDFKRKALKQTFNLNPNLILRGGMKFYECKECGKIFRYNSKLIRHQMSHTGEKPFKCKECGKAFKSSYDCIVHEKNHIGEGPYECKECGKGLSSNTALTQHQRIHTGEKPYECKECGKAFRRSAAYLQHQRLHTGEKLYK

SEQ ID NO: 7108 - protein, 153 aa, Artificial Sequence
  Synthetic polypeptide
MPVGGLLRNVSQHFDFKRKALKQTFNLNPNLILRGGMKFYECKECGKIFRYNSKLIRHQMSHTGEKPFKCKECGKAFKSSYDCIVHEKNHIGEGPYECKECGKGLSSNTALTQHQRIHTGEKPYECKECGKAFRRSAAYLQHQRLHTGEKLYK

SEQ ID NO: 7109 - protein, 1235 aa, Artificial Sequence
  Synthetic polypeptide
MENFILYEEIGRGSKTVVYKGRRKGTINFVAILCTDKCKRPEITNWVRLTREIKHKNIVTFHEWYETSNHLWLVVELCTGGSLKTVIAQDENLPEDVVREFGIDLISGLHHLHKLGILFCDISPRKILLEGPGTLKFSNFCLAKVEGENLEEFFALVAAEEGGGDNGENVLKKSMKSRVKGSPVYTAPEVVRGADFSISSDLWSLGCLLYEMFSGKPPFFSESISELTEKILCEDPLPPIPKDSSRPKASSDFINLLDGLLQRDPQKRLTWTRLLQHSFWKKAFAGADQESSVEDLSLSRNTMECSGPQDSKELLQNSQSRQAKGHKSGQPLGHSFRLENPTEFRPKSTLEGQLNESMFLLSSRPTPRTSTAVEVSPGEDMTHCSPQKTSPLTKITSGHLSQQDLESQMRELIYTDSDLVVTPIIDNPKIMKQPPVKFDAKILHLPTYSVDKLLFLKDQDWNDFLQQVCSQIDSTEKSMGASRAKLNLLCYLCVVAGHQEVATRLLHSPLFQLLIQHLRIAPNWDIRAKVAHVIGLLASHTAELQENTPVVEAIVLLTELIRENFRNSKLKQCLLPTLGELIYLVATQEEKKKNPRECWAVPLAAYTVLMRCLREGEERVVNHMAAKIIENVCTTFSAQSQGFITGEIGPILWYLFRHSTADSLRITAVSALCRITRHSPTAFQNVIEKVGLNSVINSLASAICKVQQYMLTLFAAMLSCGIHLQRLIQEKGFVSTIIRLLDSPSTCIRAKAFLVLLYILIYNREMLLLSCQARLVMYIERDSRKTTPGKEQQSGNEYLSKCLDLLICHIVQELPRILGDILNSLANVSGRKHPSTVQVKQLKLCLPLMPVVLHLVTSQVFRPQVVTEEFLFSYGTILSHIKSVDSGETNIDGAIGLTASEEFIKITLSAFEAIIQYPILLKDYRSTVVDYILPPLVSLVQSQNVEWRLFSLRLLSETTSLLVNQEFGDGKEKASVDSDSNLLALIRDVLLPQYEHILLEPDPVPAYALKLLVAMTEHNPTFTRLVEESKLIPLIFEVTLEHQESILGNTMQSVIALLSNLVACKDSNMELLYEQGLVSHICNLLTETATLCLDVDNKNNNEMAAPLLFSLLDILHSMLTYTSGIVRLALQAQKSGSGEDPQAAEDLLLLNRPLTDLISLLIPLLPNEDPEIFDVSSKCLSILVQLYGGENPDSLSPENVEIFAHLLTSKEDPKEQKLLLRILRRMKRLVEAVVL

SEQ ID NO: 7110 - protein, 73 aa, Artificial Sequence
  Synthetic polypeptide
MSVIFFACVVRVRDGLPLSASTDFYHTQDFLEWRRRLKSLALRLAQYPGRGSAEGCDFSIQLKKKNVFSIDVE

SEQ ID NO: 7111 - protein, 184 aa, Artificial Sequence
  Synthetic polypeptide
MAATASPQPLATEDADSENSSFYYYDYLDEVAFMLCRKDAVVSFGKVFLPVFYSLIFVLGLSGNLLLLMVLLRYVPRRRMVEIYLLNLAISNLLFLVTLPFWGISVAWHWVFGSFLCKMMGNHISIPQDTPLGCILKNWEKFDPQALKRKRLIFFVTQPGSDMDLGTSNLGQKMEVLILILSIN

SEQ ID NO: 7112 - protein, 298 aa, Artificial Sequence
  Synthetic polypeptide
MAATASPQPLATEDADSENSSFYYYDYLDEVAFMLCRKDAVVSFGKVFLPVFYSLIFVLGLSGNLLLLMVLLRYVPRRRMVEIYLLNLAISNLLFLVTLPFWGISVAWHWVFGSFLCKMVSTLYTINFYSGIFFISCMSLDKYLEIVHAQPYHRLRTRAKSLLLATIVWAVSLAVSIPDMVFVQTHENPKGVWNCHADFGGHGTIWKLFLRFQQNLLGFLLPLLAMIFFYSRIGCVLVRLRPAGQGRALKIAAALVVAFFVLWFPYNLTLFLHTLLDLQVFGNCEVSQHLDYALQLSW

SEQ ID NO: 7113 - protein, 360 aa, Artificial Sequence
  Synthetic polypeptide
MAATASPQPLATEDADSENSSFYYYDYLDEVAFMLCRKDAVVSFGKVFLPVFYSLIFVLGLSGNLLLLMVLLRYVPRRRMVEIYLLNLAISNLLFLVTLPFWGISVAWHWVFGSFLCKMVSTLYTINFYSGIFFISCMSLDKYLEIVHAQPYHRLRTRAKSLLLATIVWAVSLAVSIPDMVFVQTHENPKGVWNCHADFGGHGTIWKLFLRFQQNLLGFLLPLLAMIFFYSRIGCVLVRLRPAGQGRALKIAAALVVAFFVLWFPYNLTLFLHTLLDLQVFGNCEVSQHLDYALQMGNHISIPQDTPLGCILKNWEKFDPQALKRKRLIFFVTQPGSDMDLGTSNLGQKMEVLILILSIN

SEQ ID NO: 7114 - protein, 137 aa, Artificial Sequence
  Synthetic polypeptide
MMTAVSLTTRPQESVAFEDVAVYFTTKEWAIMVPAERALYRDVMLENYEAVAFVVPPTSKPALVSHLEQGKESCFTQPQGVLSRNDWRAGWIDKLGGSHQNTWEQRKKQPVSCRCSVGGSEKEWKREPKLADLRKHQ

SEQ ID NO: 7115 - protein, 631 aa, Artificial Sequence
  Synthetic polypeptide
MKVTLSALDTSESSFTPLVVIELAQDVKEETKEWLKNRIIAKKKDGGAQLLFRPLLNKYEQETLENQNLYLVGASKIRMLLGAEAVGLVKECNDNTMRAFTYRTRQNFKGFDDNNDDFLTMAECQFIIKHELENLRAKDEKMIPGYPQAKLYPGKSLLRRLLTSGIVIQVFPLHDSEALKKLEDTWYTRFALKYQPIDSIRGYFGETIALYFGFLEYFTFALIPMAVIGLPYYLFVWEDYDKYVIFASFNLIWSTVILELWKRGCANMTYRWGTLLMKRKFEEPRPGFHGVLGINSITGKEEPLYPSYKRQLRIYLVSLPFVCLCLYFSLYVMMIYFDMEVWALGLHENSGSEWTSVLLYVPSIIYAIVIEIMNRLYRYAAEFLTSWENHRLESAYQNHLILKVLVFNFLNCFASLFYIAFVLKDMKLLRQSLATLLITSQILNQIMESFLPYWLQRKHGVRVKRKVQALKADIDATLYEQVILEKEMGTYLGTFDDYLELFLQFGYVSLFSCVYPLAAAFAVLNNFTEVNSDALKMCRVFKRPFSEPSANIGVWQLAFETMSVISVVTNCALIGMSPQVNAVFPESKADLILIVVAVEVLASSSPSATIVSFLRPPQPCRTVSQLNLFPL

SEQ ID NO: 7116 - protein, 441 aa, Artificial Sequence
  Synthetic polypeptide
MKVTLSALDTSESSFTPLVVIELAQDVKEETKEWLKNRIIAKKKDGGAQLLFRPLLNKYEQETLENQNLYLVGASKIRMLLGAEAVGLVKECNDNTMRAFTYRTRQNFKGFDDNNDDFLTMAECQFIIKHELENLRAKDEKMIPGYPQAKLYPGKSLLRRLLTSGIVIQVFPLHDSEALKKLEDTWYTRFALKYQPIENHRLESAYQNHLILKVLVFNFLNCFASLFYIAFVLKDMKLLRQSLATLLITSQILNQIMESFLPYWLQRKHGVRVKRKVQALKADIDATLYEQVILEKEMGTYLGTFDDYLELFLQFGYVSLFSCVYPLAAAFAVLNNFTEVNSDALKMCRVFKRPFSEPSANIGVWQLAFETMSVISVVTNCALIGMSPQVNAVFPESKADLILIVVAVEVLASSSPSATIVSFLRPPQPCRTVSQLNLFPL

SEQ ID NO: 7117 - protein, 565 aa, Artificial Sequence
  Synthetic polypeptide
MKVTLSALDTSESSFTPLVVIELAQDVKEETKEWLKNRIIAKKKDGDNNDDFLTMAECQFIIKHELENLRAKDEKMIPGYPQAKLYPGKSLLRRLLTSGIVIQVFPLHDSEALKKLEDTWYTRFALKYQPIDSIRGYFGETIALYFGFLEYFTFALIPMAVIGLPYYLFVWEDYDKYVIFASFNLIWSTVILELWKRGCANMTYRWGTLLMKRKFEEPRPGFHGVLGINSITGKEEPLYPSYKRQLRIYLVSLPFVCLCLYFSLYVMMIYFDMEVWALGLHENSGSEWTSVLLYVPSIIYAIVIEIMNRLYRYAAEFLTSWENHRLESAYQNHLILKVLVFNFLNCFASLFYIAFVLKDMKLLRQSLATLLITSQILNQIMESFLPYWLQRKHGVRVKRKVQALKADIDATLYEQVILEKEMGTYLGTFDDYLELFLQFGYVSLFSCVYPLAAAFAVLNNFTEVNSDALKMCRVFKRPFSEPSANIGVWQLAFETMSVISVVTNCALIGMSPQVNAVFPESKADLILIVVAVEVLASSSPSATIVSFLRPPQPCRTVSQLNLFPL

SEQ ID NO: 7118 - protein, 520 aa, Artificial Sequence
  Synthetic polypeptide
MKVTLSALDTSESSFTPLVVIELAQDVKEETKEWLKNRIIAKKKDGVRRLLTSGIVIQVFPLHDSEALKKLEDTWYTRFALKYQPIDSIRGYFGETIALYFGFLEYFTFALIPMAVIGLPYYLFVWEDYDKYVIFASFNLIWSTVILELWKRGCANMTYRWGTLLMKRKFEEPRPGFHGVLGINSITGKEEPLYPSYKRQLRIYLVSLPFVCLCLYFSLYVMMIYFDMEVWALGLHENSGSEWTSVLLYVPSIIYAIVIEIMNRLYRYAAEFLTSWENHRLESAYQNHLILKVLVFNFLNCFASLFYIAFVLKDMKLLRQSLATLLITSQILNQIMESFLPYWLQRKHGVRVKRKVQALKADIDATLYEQVILEKEMGTYLGTFDDYLELFLQFGYVSLFSCVYPLAAAFAVLNNFTEVNSDALKMCRVFKRPFSEPSANIGVWQLAFETMSVISVVTNCALIGMSPQVNAVFPESKADLILIVVAVEVLASSSPSATIVSFLRPPQPCRTVSQLNLFPL

SEQ ID NO: 7119 - protein, 5 aa, Artificial Sequence
  Synthetic polypeptide
PVFTH

SEQ ID NO: 7120 - protein, 347 aa, Artificial Sequence
  Synthetic polypeptide
MAAPALGLVCGRCPELGLVLLLLLLSLLCGAAGSQEAGTGAGAGSLAGSCGCGTPQRPGAHGSSAAAHRYSREANAPGPVPGERQLAHSKMVPIPAGVFTMGTDDPQIKQDGEAPARRVTIDAFYMDAYEVSNTEFEKFVNSTGYLTEAEKFGDSFVFEGMLSEQVKTNIQQAVAAAPWWLPVKGANWRHPEGPDSTILHRPDHPVLHVSWNDAVAYCTWAGKRLPTEAEWEYSCRGGLHNRLFPWGNKLQPKGQHYANIWQGEFPVTNTGEDGFQGTAPVDAFPPNGYGLYNIVGNAWEWTSDWWTVHHSVEETLNPKGPPSGKDRVKKGGSYMCHRAPQTQNNLN

SEQ ID NO: 7121 - protein, 322 aa, Artificial Sequence
  Synthetic polypeptide
MAAPALGLVCGRCPELGLVLLLLLLSLLCGAAGSQEAGTGAGAGSLAGSCGCGTPQRPGAHGSSAAAHRYSREANAPGPVPGERQLAHSKMVPIPAGVFTMGTDDPQIKQDGEAPARRVTIDAFYMDAYEVSNTEFEKFVNSTGYLTEVAAAPWWLPVKGANWRHPEGPDSTILHRPDHPVLHVSWNDAVAYCTWAGKRLPTEAEWEYSCRGGLHNRLFPWGNKLQPKGQHYANIWQGEFPVTNTGEDGFQGTAPVDAFPPNGYGLYNIVGNAWEWTSDWWTVHHSVEETLNPKGPPSGKDRVKKGGSYMCHRAPQTQNNLN

SEQ ID NO: 7122 - protein, 215 aa, Artificial Sequence
  Synthetic polypeptide
MAAPALGLVCGRCPELGLVLLLLLLSLLCGAAGSQEAGTGAGAGSLAGSCGCGTPQRPGAHGSSAAAHRYSREANAPGPVPGERQLAHSKMVPIPAGVFTMGTDDPQIKQDGEAPARRVTIDAFYMDAYEVSNTEFEKFVNSTGYLTEVDAFPPNGYGLYNIVGNAWEWTSDWWTVHHSVEETLNPKGPPSGKDRVKKGGSYMCHRAPQTQNNLN

SEQ ID NO: 7123 - protein, 62 aa, Artificial Sequence
  Synthetic polypeptide
MFCHLRPMRRLCLEKIFPHWFPFSRALSGAEAVNALRPFYFAVHPDFFGQHPVERQGMVAHL

SEQ ID NO: 7124 - protein, 61 aa, Artificial Sequence
  Synthetic polypeptide
MFCHLRPMRRLCLEKIFPHWFPFSRALSGAEAVNALRPFYFAVHPDFFGQHPVERGMVAHL

SEQ ID NO: 7125 - protein, 321 aa, Artificial Sequence
  Synthetic polypeptide
MAAPALGLVCGRCPELGLVLLLLLLSLLCGAAGSQEAGTGAGAGSLAGSCGCGTPQRPGAHGSSAAAHRYSREANAPGPVPGERQLAHSKMVPIPAGVFTMGTDDPQIKQDGEAPARRVTIDAFYMDAYEVSNTEFEKFVNSTGYLTEAEKFGDSFVFEGMLSEQVKTNIQQAVAAAPWWLPVKGANWRHPEGPDSTILHRPDHPVLHVSWNDAVAYCTWAGKRLPTEAEWEYSCRGGLHNRLFPWGNKLQPKGQHYANIWQGEFPVTNTGEDGFQGTAPVDAFPPNGYGLYNIVGNAWEWTSDWWTVHHSVEETLNPGHG

SEQ ID NO: 7126 - protein, 296 aa, Artificial Sequence
  Synthetic polypeptide
MAAPALGLVCGRCPELGLVLLLLLLSLLCGAAGSQEAGTGAGAGSLAGSCGCGTPQRPGAHGSSAAAHRYSREANAPGPVPGERQLAHSKMVPIPAGVFTMGTDDPQIKQDGEAPARRVTIDAFYMDAYEVSNTEFEKFVNSTGYLTEVAAAPWWLPVKGANWRHPEGPDSTILHRPDHPVLHVSWNDAVAYCTWAGKRLPTEAEWEYSCRGGLHNRLFPWGNKLQPKGQHYANIWQGEFPVTNTGEDGFQGTAPVDAFPPNGYGLYNIVGNAWEWTSDWWTVHHSVEETLNPGHG

SEQ ID NO: 7127 - protein, 189 aa, Artificial Sequence
  Synthetic polypeptide
MAAPALGLVCGRCPELGLVLLLLLLSLLCGAAGSQEAGTGAGAGSLAGSCGCGTPQRPGAHGSSAAAHRYSREANAPGPVPGERQLAHSKMVPIPAGVFTMGTDDPQIKQDGEAPARRVTIDAFYMDAYEVSNTEFEKFVNSTGYLTEVDAFPPNGYGLYNIVGNAWEWTSDWWTVHHSVEETLNPGHG

SEQ ID NO: 7128 - protein, 463 aa, Artificial Sequence
  Synthetic polypeptide
MVRPQDTVAYEDLSEDYTQKKWKGLALSQRALHWNMMLENDRSMASLGRNMMESSELTPKQEIFKGSESSNSTSGGLFGVVPGGTETGDVCEDTFKELEGQPSNEEGSRLESDFLEIIDEDKKKSTKDRYEEYKEVEEHPPLSSSPVEHEGVLKGQKSYRCDECGKAFYWSSHLIGHRRIHTGEKPYECNECGKTFRQTSQLIVHLRTHTGEKPYECSECGKAYRHSSHLIQHQRLHNGEKPYKCNECAKAFNQSSKLFDHQRTHTGEKPYECKECGAAFSRSKNLVRHQFLHTGKKPYKCNECGRAFCSNRNLIDHQRTHTGEKPYKCNECGKAFSRSKCLIRHQSLHTGEKPYKCSECGKAFNQISQLVEHERIHTGEKPFKCSECGKAFGLSKCLIRHQRLHTSEKPYKCNECGKSFNQNSYLIIHQRIHTVKITHNTATSEWGPQQQQTREAYYALTWA

SEQ ID NO: 7129 - protein, 323 aa, Artificial Sequence
  Synthetic polypeptide
MVRPQDTVAYEDLSEDYTQKKWKGLALSQRALHWNMMLENDRSMASLGRNMMESSELTPKQEIFKGSESSNSTSGGLFGVVPGGTETGDVCEDTFKELEGQPSNEEGSRLESDFLEIIDEDKKKSTKDRYEEYKEVEEHPPLSSSPVEHEGVLKGQKSYRCDECGKAFYWSSHLIGHRRIHTGEKPYECNECGKTFRQTSQLIVHLRTHTGEKPYECSECGKAYRHSSHLIQHQRLHNGEKPYKCNECAKAFNQSSKLFDHQRTHTGEKPYECKECGAAFSRSKNLVRHQFLHTVKITHNTATSEWGPQQQQTREAYYALTWA

SEQ ID NO: 7130 - protein, 156 aa, Artificial Sequence
  Synthetic polypeptide
MTRENVAHNALRQEGLVKGKDDTWKWGTSFQGSSSSVWETSHLHFRQLRYHETSGPQEALSRLRELCRRWLRPEARTKAQILELLVLEQFLSILPGEIRTWVQLHHPGSGEEAVALVEELQKDLDGPAIQGSASQGIGLRYLLLIRFISLTIRLGS

SEQ ID NO: 7131 - protein, 373 aa, Artificial Sequence
  Synthetic polypeptide
MTRENVAHNALRQEGLVKGKDDTWKWGTSFQGSSSSVWETSHLHFRQLRYHETSGPQEALSRLRELCRRWLRPEARTKAQILELLVLEQFLSILPGEIRTWVQLHHPGSGEEAVALVEELQKDLDGPAIQVPVLVKDQDTLQKVVSAPGTTLPPVLPGSHIAAEICPHPPTDLVAFNLQDPQHDSPAPEASALSQEENPRNQLMALMLLTAQPQELVMFEEVSVCFTSEEWACLGPIQRALYWDVMLENYGNVTSLEWETMTENEEVTSKPSSSQRADSHKGTSKRLQGSVPQVLDFEEECEWQVLASQWGNETDERADTVKKVSLCERDKKKRTPPEKQGQKWKELGDSLTFGSAISESLIGYRKYRRQRNK

SEQ ID NO: 7132 - protein, 671 aa, Artificial Sequence
  Synthetic polypeptide
MAGLNCGVSIALLGVLLLGAARLPRGAEAFEIALPRESNITVLIKLGTPTLLAKPCYIVISKRHITMLSIKSGERIVFTFSCQSPENHFVIEIQKNIDCMSGPCPFGEVQLQPSTSLLPTLNRTFIWDVKAHKSIGLELQFSIPRLRQIGPGESCPDGVTHSISGRIDATVVRIGTFCSNGTVSRIKMQEGVKMALHLPWFHPRNVSGFSIANRSSIKRLCIIESVFEGEGSATLMSANYPEGFPEDELMTWQFVVPAHLRASVSFLNFNLSNCERKEERVEYYIPGSTTNPEVFKLEDKQPGNMAGNFNLSLQGCDQDAQSPGILRLQFQVLVQHPQNESNKIYVVDLSNERAMSLTIEPRPVKQSRKFVPGCFVCLESRTCSSNLTLTSGSKHKISFLCDDLTRLWMNVEKTISCTDHRYCQRKSYSLQVPSDILHLPVELHDFSWKLLVPKDRLSLVLVPAQKLQQHTHEKPCNTSFSYLVASAIPSQDLYFGSFCPGGSIKQIQVKQNISVTLRTFAPSFQQEASRQGLTVSFIPYFKEEGVFTVTPDTKSKVYLRTPNWDRGLPSLTSVSWNISVPRDQVACLTFFKERSGVVCQTGRAFMIIQEQRTRAEEIFSLDEDVLPKPSFHHHSFWVNISNCSPTSGKQLDLLFSVTLTPRTVGEVSSHL

SEQ ID NO: 7133 - protein, 86 aa, Artificial Sequence
  Synthetic polypeptide
MASVWQRLGFYASLLKRQLNGGPDVIKWERRVIPGCTRSIYSATGKWTKEYTLQTRKDVEKWWHQRIKEQASKISEADTGAEFFLA

SEQ ID NO: 7134 - protein, 186 aa, Artificial Sequence
  Synthetic polypeptide
MASVWQRLGFYASLLKRQLNGGPDVIKWERRVIPGCTRSIYSATGKWTKEYTLQTRKDVEKWWHQRIKEQASKISEADKSKPKFYVLSMFPYPSGKLHMGHVRVYTISDTIARFQKMRGMQVINPMGWDAFGLPAENAAVERNLHPQSWTQSNIKHMRKQLDRLGLCFSWDRILNPSCSNPKSRKL

SEQ ID NO: 7135 - protein, 143 aa, Artificial Sequence
  Synthetic polypeptide
MASVWQRLGFYASLLKRQLNGGPDVIKWERRVIPGCTRSIYSATGKWTKEYTLQTRKDVEKWWHQRIKEQASKISEADVINPMGWDAFGLPAENAAVERNLHPQSWTQSNIKHMRKQLDRLGLCFSWDRILNPSCSNPKSRKL

SEQ ID NO: 7136 - protein, 406 aa, Artificial Sequence
  Synthetic polypeptide
MASVWQRLGFYASLLKRQLNGGPDVIKWERRVIPGCTRSIYSATGKWTKEYTLQTRKDVEKWWHQRIKEQASKISEADKSKPKFYVLSMFPYPSGKLHMGHVRVYTISDTIARFQKMRGMQVINPMGWDAFGLPAENAAVERNLHPQSWTQSNIKHMRKQLDRLGLCFSWDREITTCLPDYYKWTQYLFIKLYEAGLAYQKEALVNWDPVDQTVLANEQVDEHGCSWRSGAKVEQKYLRQWFIKTTAYAKAMQDALADLPEWYGIKGMQAHWIGDCVGCHLDFTLKVHGQATGEKLTAYTATPEAIYGTSHVAISPSHRLLHGHSSLKEALRMALVPGKDCLTPVMAVNMLTQQEVPVVILAKADLEGSLDSKIGSAIGTVQHPAMQKTAPATKSTMSVVPRLRNP

SEQ ID NO: 7137 - protein, 363 aa, Artificial Sequence
  Synthetic polypeptide
MASVWQRLGFYASLLKRQLNGGPDVIKWERRVIPGCTRSIYSATGKWTKEYTLQTRKDVEKWWHQRIKEQASKISEADVINPMGWDAFGLPAENAAVERNLHPQSWTQSNIKHMRKQLDRLGLCFSWDREITTCLPDYYKWTQYLFIKLYEAGLAYQKEALVNWDPVDQTVLANEQVDEHGCSWRSGAKVEQKYLRQWFIKTTAYAKAMQDALADLPEWYGIKGMQAHWIGDCVGCHLDFTLKVHGQATGEKLTAYTATPEAIYGTSHVAISPSHRLLHGHSSLKEALRMALVPGKDCLTPVMAVNMLTQQEVPVVILAKADLEGSLDSKIGSAIGTVQHPAMQKTAPATKSTMSVVPRLRNP

SEQ ID NO: 7138 - protein, 805 aa, Artificial Sequence
  Synthetic polypeptide
MASVWQRLGFYASLLKRQLNGGPDVIKWERRVIPGCTRSIYSATGKWTKEYTLQTRKDVEKWWHQRIKEQASKISEADKSKPKFYVLSMFPYPSGKLHMGHVRVYTISDTIARFQKMRGMQVINPMGWDAFGLPAENAAVERNLHPQSWTQSNIKHMRKQLDRLGLCFSWDREITTCLPDYYKWTQYLFIKLYEAGLAYQKEALVNWDPVDQTVLANEQVDEHGCSWRSGAKVEQKYLRQWFIKTTAYAKAMQDALADLPEWYGIKGMQAHWIGDCVGCHLDFTLKVHGQATGEKLTAYTATPEAIYGTSHVAISPSHRLLHGHSSLKEALRMALVPGKDCLTPVMAVNMLTQQEVPVVILAKADLEGSLDSKIGIPSTSSEDTILAQTLGLAYSEVIETLPDGTERLSSSAEFTGMTRQDAFLALTQKARGKRVGGDVTSDKLKDWLISRQRYWGTPIPIVHCPVCGPTPVPLEDLPVTLPNIASFTGKGGPPLAMASEWVNCSCPRCKGAAKRETDTMDTFVDSAWYYFRYTDPHNPHSPFNTAVADYWMPVDLYIGGKEHAVMHLFYARFFSHFCHDQKMVKHREPFHKLLAQGLIKGQTFRLPSGQYLQREEVDLTGSVPVHAKTKEKLEVTWEKMSKSKHNGVDPEEVVEQYGIDTIRLYILFAAPPEKDILWDVKTDALPGVLRWQQRLWTLTTRFIEARASGKSPQPQLLSNKEKAEARKLWEYKNSVISQVTTHFTEDFSLNSAISQLMGLSNALSQASQSVILHSPEFEDALCALMVMAAPLAPHVTSEIWADPMF

SEQ ID NO: 7139 - protein, 762 aa, Artificial Sequence
  Synthetic polypeptide
MASVWQRLGFYASLLKRQLNGGPDVIKWERRVIPGCTRSIYSATGKWTKEYTLQTRKDVEKWWHQRIKEQASKISEADVINPMGWDAFGLPAENAAVERNLHPQSWTQSNIKHMRKQLDRLGLCFSWDREITTCLPDYYKWTQYLFIKLYEAGLAYQKEALVNWDPVDQTVLANEQVDEHGCSWRSGAKVEQKYLRQWFIKTTAYAKAMQDALADLPEWYGIKGMQAHWIGDCVGCHLDFTLKVHGQATGEKLTAYTATPEAIYGTSHVAISPSHRLLHGHSSLKEALRMALVPGKDCLTPVMAVNMLTQQEVPVVILAKADLEGSLDSKIGIPSTSSEDTILAQTLGLAYSEVIETLPDGTERLSSSAEFTGMTRQDAFLALTQKARGKRVGGDVTSDKLKDWLISRQRYWGTPIPIVHCPVCGPTPVPLEDLPVTLPNIASFTGKGGPPLAMASEWVNCSCPRCKGAAKRETDTMDTFVDSAWYYFRYTDPHNPHSPFNTAVADYWMPVDLYIGGKEHAVMHLFYARFFSHFCHDQKMVKHREPFHKLLAQGLIKGQTFRLPSGQYLQREEVDLTGSVPVHAKTKEKLEVTWEKMSKSKHNGVDPEEVVEQYGIDTIRLYILFAAPPEKDILWDVKTDALPGVLRWQQRLWTLTTRFIEARASGKSPQPQLLSNKEKAEARKLWEYKNSVISQVTTHFTEDFSLNSAISQLMGLSNALSQASQSVILHSPEFEDALCALMVMAAPLAPHVTSEIWADPMF

SEQ ID NO: 7140 - protein, 503 aa, Artificial Sequence
  Synthetic polypeptide
MDKYDDLGLEASKFIEDLNMYEASKDGLFRVDKGAGNNPEFEETRRVFATKMAKIHLQQQQQQLLQEETLPRGSRGPVNGGGRLGPQARWEVVGSKLTVDGAAKPPLAASTGAPGAVTTLAAGQPPYPPQEQRSRPYLHGTRHGSQDCGSRESLATSEMSAFHQPGPCEDPSCLTHGDYYDNLSLASPKWGDKPGVSPSIGLSVGSGWPSSPGSDPPLPKPCGDHPLNHRQLSLSSSRSSEGSLGGQNSGIGGRSSEKPTGLWSTASSQRVSPGLPSPNLENGAPAVGPVQPRTPSVSAPLALSCPRQGGLPRSNSGLGGEVSGVMSKPNVDPQPWFQDGPKSYLSSSAPSSSPAGLDGSQQGAVPGLGPKPGCTDLGTGPKLSPTSLVHPVMSTLPELSCKEGPLGWSSDGSLGSVLLDSPSSPRVRLPCQPLVPGPELRPSAAELKLEALTQRLEREMDAHPKADYFGQARWLMPVIPALWEAEAGGSPEVSSLRPAWPTW

SEQ ID NO: 7141 - protein, 531 aa, Artificial Sequence
  Synthetic polypeptide
MDKYDDLGLEASKFIEDLNMYEASKDGLFRVDKGAGNNPEFEETRRVFATKMAKIHLQQQQQQLLQEETLPRGSRGPVNGGGRLGPQARWEVVGSKLTVDGAAKPPLAASTGAPGAVTTLAAGQPPYPPQEQRSRPYLHGTRHGSQDCGSRESLATSEMSAFHQPGPCEDPSCLTHGDYYDNLSLASPKWGDKPGVSPSIGLSVGSGWPSSPGSDPPLPKPCGDHPLNHRQLSLSSSRSSEGSLGGQNSGIGGRSSEKPTGLWSTASSQRVSPGLPSPNLENGAPAVGPVQPRTPSVSAPLALSCPRQGGLPRSNSGLGGEVSGVMSKPNVDPQPWFQDGPKSYLSSSAPSSSPAGLDGSQQGAVPGLGPKPGCTDLGTGPKLSPTSLVHPVMSTLPELSCKEGPLGWSSDGSLGSVLLDSPSSPRVRLPCQPLVPGPELRPSAAELKLEALTQRLEREMDAHPKADYFGACVKCSKGVFGAGQACQAMGNLYHDTCFTCAACNMVTHTCNLNALGGQGGRIAETRSSRLQ

SEQ ID NO: 7142 - protein, 627 aa, Artificial Sequence
  Synthetic polypeptide
MDKYDDLGLEASKFIEDLNMYEASKDGLFRVDKGAGNNPEFEETRRVFATKMAKIHLQQQQQQLLQEETLPRGSRGPVNGGGRLGPQARWEVVGSKLTVDGAAKPPLAASTGAPGAVTTLAAGQPPYPPQEQRSRPYLHGTRHGSQDCGSRESLATSEMSAFHQPGPCEDPSCLTHGDYYDNLSLASPKWGDKPGVSPSIGLSVGSGWPSSPGSDPPLPKPCGDHPLNHRQLSLSSSRSSEGSLGGQNSGIGGRSSEKPTGLWSTASSQRVSPGLPSPNLENGAPAVGPVQPRTPSVSAPLALSCPRQGGLPRSNSGLGGEVSGVMSKPNVDPQPWFQDGPKSYLSSSAPSSSPAGLDGSQQGAVPGLGPKPGCTDLGTGPKLSPTSLVHPVMSTLPELSCKEGPLGWSSDGSLGSVLLDSPSSPRVRLPCQPLVPGPELRPSAAELKLEALTQRLEREMDAHPKADYFGACVKCSKGVFGAGQACQAMGNLYHDTCFTCAACSRKLRGKAFYFVNGKVFCEEDFLYSGFQQSADRCFLCGHLIMDMILQALGKSYHPGCFRCVICNECLDGVPFTVDSENKIYCVRDYHKVLAPKCAACGLPILPPEEAQAGKLLEAWSLRTAWAT

SEQ ID NO: 7143 - protein, 89 aa, Artificial Sequence
  Synthetic polypeptide
MLHLTDIQLQDNKTFLAMLNHVLNVDGFYFSTTYDLTHTLQRLSNTSPEFQEMSLLERADQRFVWNGHLLRELSAQPEVHRFALPVLHG

SEQ ID NO: 7144 - protein, 192 aa, Artificial Sequence
  Synthetic polypeptide
MATAAYEQLKLHITPEKFYVEACDDGADDVLTIDRVSTEVTLAVKKDVPPSAVTRPIFGILGTIHLVAGNYLIVITKKIKVGEFFSHVVWKATDFDVLSYKKTMLHLTDIQLQDNKTFLAMLNHVLNVDGFYFSTTYDLTHTLQRLSNTSPEFQEMSLLERADQRFVWNGHLLRELSAQPEVHRFALPVLHG

SEQ ID NO: 7145 - protein, 131 aa, Artificial Sequence
  Synthetic polypeptide
MWKLVMMEQMTYLPLTVCPQRLPLQSRKMFLLQLSQDQYLVYWAQSIWWQLQDNKTFLAMLNHVLNVDGFYFSTTYDLTHTLQRLSNTSPEFQEMSLLERADQRFVWNGHLLRELSAQPEVHRFALPVLHG

SEQ ID NO: 7146 - protein, 301 aa, Artificial Sequence
  Synthetic polypeptide
MCNPEEAALLRLEEVFSATLAHVNSLVLQPLLPAAPDPSDPWGRECLRLLQQLHKSSQQLWEVTEESLHSLQERLRYPDSTGLESLLLLRGADRVLQAHIEYIESYTSCMVVQAFQKAAKRRSEYWRGQRKALRQLLSGVSSEGSVGASLGQALHQPLAHHVQQYVLLLLSLGDTIGEHHPTRELVVNAVTLFGNLQSFMKQELDQAVATQALWHTLRGRLRDVLCTPAHRLLQDSQDVPVTVAPLRAERVLLFDDALVLLQPSPDAGPLHMLLCLVGHLLSLACGWQAPPHPSGLGLPRP

SEQ ID NO: 7147 - protein, 30 aa, Artificial Sequence
  Synthetic polypeptide
HCRRGCVTRTPPVWSPCCCCEVLTVYCRPT

SEQ ID NO: 7148 - protein, 2 aa, Artificial Sequence
  Synthetic polypeptide
TI

SEQ ID NO: 7149 - protein, 2026 aa, Artificial Sequence
  Synthetic polypeptide
MKQLQPQPPPKMGDFYDPEHPTPEEEENEAKIENVQKTGFIKGPMFKGVASSRFLPKGTKTKVNLEEQGRQKVSFSFSLTKKTLQNRFLTALGNEKQSDTPNPPAVPLQVDSTPKMKMEIGDTLSTAEESSPPKSRVELGKIHFKKHLLHVTSRPLLATTTAVASPPTHAAPLPAVIAESTTVDSPPSSPPPPPPPAQATTLSSPAPVTEPVALPHTPITVLMAAPVPLPVDVAVRSLKEPPIIIVPESLEADTKQDTISNSLEEHVTQILNEQADISSKKEDSHIGKDEEIPDSSKISLSCKKTGSKKKSSQSEGIFLGSESDEDSVRTSSSQRSHDLKFSASIEKERDFKKSSAPLKSEDLGKPSRSKTDRDDKYFSYSKLERDTRYVSSRCRSERERRRSRSHSRSERGSRTNLSYSRSERSHYYDSDRRYHRSSPYRERTRYSRPYTDNRARESSDSEEEYKKTYSRRTSSHSSSYRDLRTSSYSKSDRDCKTETSYLEMERRGKYSSKLERESKRTSENEAIKRCCSPPNELGFRRGSSYSKHDSSASRYKSTLSKPIPKSDKFKNSFCCTELNEEIKQSHSFSLQTPCSKGSELRMINKNPEREKAGSPAPSNRLNDSPTLKKLDELPIFKSEFITHDSHDSIKELDSLSKVKNDQLRSFCPIELNINGSPGAESDLATFCTSKTDAVLMTSDDSVTGSELSPLVKACMLSSNGFQNISRCKEKDLDDTCMLHKKSESPFRETEPLVSPHQDKLMSMPVMTVDYSKTVVKEPVDTRVSCCKTKDSDIYCTLNDSNPSLCNSEAENIEPSVMKISSNSFMNVHLESKPVICDSRNLTDHSKFACEEYKQSIGSTSSASVNHFDDLYQPIGSSGIASSLQSLPPGIKVDSLTLLKCGENTSPVLDAVLKSKKSSEFLKHAGKETIVEVGSDLPDSGKGFASRENRRNNGLSGKCLQEAQEEGNSILPERRGRPEISLDERGEGGHVHTSDDSEVVFSSCDLNLTMEDSDGVTYALKCDSSGHAPEIVSTVHEDYSGSSESSNDESDSEDTDSDDSSIPRNRLQSVVVVPKNSTLPMEETSPCSSRSSQSYRHYSDHWEDERLESRRHLYEEKFESIASKACPQTDKFFLHKGTEKNPEISFTQSSRKQIDNRLPELSHPQSDGVDSTSHTDVKSDPLGHPNSEETVKAKIPSRQQEELPIYSSDFEDVPNKSWQQTTFQNRPDSRLGKTELSFSSSCEIPHVDGLHSSEELRNLGWDFSQEKPSTTYQQPDSSYGACGGHKYQQNAEQYGGTRDYWQGNGYWDPRSGRPPGTGVVYDRTQGQVPDSLTDDREEEENWDQQDGSHFSDQSDKFLLSLQKDKGSVQAPEISSNSIKDTLAVNEKKDFSKNLEKNDIKDRGPLKKRRQEIESDSESDGELQDRKKVRVEVEQGETSVPPGSALVGPSCVMDDFRDPQRWKECAKQGKMPCYFDLIEENVYLTERKKNKSHRDIKRMQCECTPLSKDERAQGEIACGEDCLNRLLMIECSSRCPNGDYCSNRRFQRKQHADVEVILTEKKGWGLRAAKDLPSNTFVLEYCGEVLDHKEFKARVKEYARNKNIHYYFMALKNDEIIDATQKGNCSRFMNHSCEPNCETQKWTVNGQLRVGFFTTKLVPSGSELTFDYQFQRYGKEAQKCFCGSANCRGYLGGENRVSIRAAGGKMKKERSRKKDSVDGELEALMENGEGLSDKNQVLSLSRLMVRIETLEQKLTCLELIQNTHSQSCLKSFLERHGLSLLWIWMAELGDGRESNQKLQEEIIKTLEHLPIPTKNMLEESKVLPIIQRWSQTKTAVPPLSEGDGYSSENTSRAHTPLNTPDPSTKLSTEADTDTPKKLMFRRLKIISENSMDSAISDATSELEGKDGKEDLDQLENVPVEEEEELQSQQLLPQQLPECKVDSETNIEASKLPTSEPEADAEIEPKESNGTKLEEPINEETPSQDEEEGVSDVESERSQEQPDKTVDISDLATKLLDSWKDLKKKFANI

SEQ ID NO: 7150 - protein, 49 aa, Artificial Sequence
  Synthetic polypeptide
MVEDGAEELEDLVHFSVSELPSRGYGVMEEIRRQGKLCDVTLKDTVAHA

SEQ ID NO: 7151 - protein, 255 aa, Artificial Sequence
  Synthetic polypeptide
MFVELNNLLNTTPDRAEQGKLTLLCDAKTDGSFLVHHFLSFYLKANCKVCFVALIQSFSHYSIVGQKLGVSLTMARERGQLVFLEGLKSAVDVVFQAQKEPHPLQFLREANAGNLKPLFEFVREALKPVDSGEARWTYPVLLVDDLSVLLSLGMGAVAVLDFIHYCRATVCWELKGNMVVLVHDSGDAEDEENDILLNGLSHQSHLILRAEGLATGFCRDVHGQCVALTHRHPRPHLGPAPAIYDTCSCFAFHHE

SEQ ID NO: 7152 - protein, 182 aa, Artificial Sequence
  Synthetic polypeptide
MARERGQLVFLEGLKSAVDVVFQAQKEPHPLQFLREANAGNLKPLFEFVREALKPVDSGEARWTYPVLLVDDLSVLLSLGMGAVAVLDFIHYCRATVCWELKGNMVVLVHDSGDAEDEENDILLNGLSHQSHLILRAEGLATGFCRDVHGQCVALTHRHPRPHLGPAPAIYDTCSCFAFHHE

SEQ ID NO: 7153 - protein, 206 aa, Artificial Sequence
  Synthetic polypeptide
MFVELNNLLNTTPDRAEQGKLTLLCDAKTDGSFLVHHFLSFYLKANCKVCFVALIQSFSHYSIVGQKLGVSLTMARERGQLVFLEGLKSAVDVVFQAQKEPHPLQFLREANAGNLKPLFEFVREALKPVDSGEARWTYPVLLVDDLSVLLSLGMGAVAVLDFIHYCRATVCWELKCVALTHRHPRPHLGPAPAIYDTCSCFAFHHE

SEQ ID NO: 7154 - protein, 133 aa, Artificial Sequence
  Synthetic polypeptide
MARERGQLVFLEGLKSAVDVVFQAQKEPHPLQFLREANAGNLKPLFEFVREALKPVDSGEARWTYPVLLVDDLSVLLSLGMGAVAVLDFIHYCRATVCWELKCVALTHRHPRPHLGPAPAIYDTCSCFAFHHE

SEQ ID NO: 7155 - protein, 109 aa, Artificial Sequence
  Synthetic polypeptide
MFVELNNLLNTTPDRAEQGKLTLLCDAKTDGSFLVHHFLSFYLKANCKVCFVALIQSFSHYSIVGQKLGVSLTMARERGQLVFLEGLKSAVDVVFQAQKEPHPLQFLSV

SEQ ID NO: 7156 - protein, 36 aa, Artificial Sequence
  Synthetic polypeptide
MARERGQLVFLEGLKSAVDVVFQAQKEPHPLQFLSV

SEQ ID NO: 7157 - protein, 72 aa, Artificial Sequence
  Synthetic polypeptide
MFVELNNLLNTTPDRAEQGKLTLLCDAKTDGSFLVHHFLSFYLKANCKVCFVALIQSFSHYSIVGQKLPANA

SEQ ID NO: 7158 - protein, 65 aa, Artificial Sequence
  Synthetic polypeptide
MFVELNNLLNTTPDRAEQGKLTLLCDAKTDGSFLVHHFLSFYLKAGQRLGKIEKNLRDYRGRFPD

SEQ ID NO: 7159 - protein, 85 aa, Artificial Sequence
  Synthetic polypeptide
MWAPREQLLGWTAEALPAKDSAWPWEEKPRYLGPVTFEDVAVLFTEAEWKRLSLEQRNLYKEVMLENLRNLVSLELTIFQYRRHP

SEQ ID NO: 7160 - protein, 32 aa, Artificial Sequence
  Synthetic polypeptide
MNFNVWNIKEMLSIPSGSGAAGLGSPQPSWSQ

SEQ ID NO: 7161 - protein, 238 aa, Artificial Sequence
  Synthetic polypeptide
MAEGGGCRERPDAETQKSELGPLMRTTLQRGAQWYLIDSRWFKQWKKYVGFDSWDMYNVGEHNLFPGPIDNSGLFSDPESQTLKEHLIDELDYVLVPTEAWNKLLNWYGCVEGQQPIVRKVVEHGLFVKHCKVEVYLLELKLCENSDPTNVLSCHFSKADTIATIEKEMRKLFNIPAERETRLWNKYMSNTYEQLSKLDNTVQDAGLYQGQVLVIEPQNEDGTWPRQTLQSKICHYVR

SEQ ID NO: 7162 - protein, 37 aa, Artificial Sequence
  Synthetic polypeptide
MIQDKEVTLEYVSSLDFWYCKRPKNGNNQNVHWLMDG

SEQ ID NO: 7163 - protein, 559 aa, Artificial Sequence
  Synthetic polypeptide
MWGDSRPANRTGPFRGSQEERFAPGWNRDYPPPPLKSHAQERHSGNFPGRDSLPFDFQGHSGPPFANVEEHSFSYGARDGPHGDYRGGEGPGHDFRGGDFSSSDFQSRDSSQLDFRGRDIHSGDFRDREGPPMDYRGGDGTSMDYRGREAPHMNYRDRDAHAVDFRGRDAPPSDFRGRGTYDLDFRGRDGSHADFRGRDLSDLDFRAREQSRSDFRNRDVSDLDFRDKDGTQVDFRGRGSGTTDLDFRDRDTPHSDFRGRHRSRTDQDFRGREMGSCMEFKDREMPPVDPNILDYIQPSTQDREHSGMNVNRREESTHDHTIERPAFGIQKGEFEHSETREGETQGVAFEHESPADFQNSQSPVQDQDKSQLSGREEQSSDAGLFKEEGGLDFLGRQDTDYRSMEYRDVDHRLPGSQMFGYGQSKSFPEGKTARDAQRDLQDQDYRTGPSEEKPSRLIRLSGVPEDATKEEILNAFRTPDGMPVKNLQLKEYNTGYDYGYVCVEFSLLEDAIGCMEANQGTLMIQDKEVTLEYVSSLDFWYCKRPKNGNNQNVHWLMDG

SEQ ID NO: 7164 - protein, 427 aa, Artificial Sequence
  Synthetic polypeptide
MDYRGGDGTSMDYRGREAPHMNYRDRDAHAVDFRGRDAPPSDFRGRGTYDLDFRGRDGSHADFRGRDLSDLDFRAREQSRSDFRNRDVSDLDFRDKDGTQVDFRGRGSGTTDLDFRDRDTPHSDFRGRHRSRTDQDFRGREMGSCMEFKDREMPPVDPNILDYIQPSTQDREHSGMNVNRREESTHDHTIERPAFGIQKGEFEHSETREGETQGVAFEHESPADFQNSQSPVQDQDKSQLSGREEQSSDAGLFKEEGGLDFLGRQDTDYRSMEYRDVDHRLPGSQMFGYGQSKSFPEGKTARDAQRDLQDQDYRTGPSEEKPSRLIRLSGVPEDATKEEILNAFRTPDGMPVKNLQLKEYNTGYDYGYVCVEFSLLEDAIGCMEANQGTLMIQDKEVTLEYVSSLDFWYCKRPKNGNNQNVHWLMDG

SEQ ID NO: 7165 - protein, 524 aa, Artificial Sequence
  Synthetic polypeptide
MWGDSRPANRTGPFRGSQEERFAPGWNRDYPPPPLKSHAQERHSGNFPGRDSLPFDFQGHSGPPFANVEEHSFSYGARDGPHGDYRGGEGPGHDFRGGDFSSSDFQSRDSSQLDFRGRDIHSGDFRDREGPPMDYRGGDGTSMDYRGREAPHMNYRDRDAHAVDFRGRDAPPSDFRGRGTYDLDFRGRDGSHADFRGRDLSDLDFRAREQSRSDFRNRDVSDLDFRDKDGTQVDFRGRGSGTTDLDFRDRDTPHSDFRGRHRSRTDQDFRGREMGSCMEFKDREMPPVDPNILDYIQPSTQDREHSGMNVNRREESTHDHTIERPAFGIQKGEFEHSETREGETQGVAFEHESPADFQNSQSPVQDQDKSQLSGREEQSSDAGLFKEEGGLDFLGRQDTDYRSMEYRDVDHRLPGSQMFGYGQSKSFPEGKTARDAQRDLQDQDYRTGPSEEKPSRLIRLSGVPEDATKEEILNAFRTPDGMPVKNLQLKEYNTGNSNDPGQRSYPGVCIKPGFLVLQTTKKWK

SEQ ID NO: 7166 - protein, 159 aa, Artificial Sequence
  Synthetic polypeptide
MLVAGLLLWASLLTGAWPSFPTQDHLPATPRVRLSFKELKATGTAHFFNFLLNTTDYRILLKDEDHDRMYVGSKDYVLSLDLHDINREPLIIHWAASPQRIEECVLSGKDVNGECGNFVRLIQPWNRTHLYVCGTGAYNPMCTYVNRGRRAQVGVRRRQ

SEQ ID NO: 7167 - protein, 91 aa, Artificial Sequence
  Synthetic polypeptide
MYVGSKDYVLSLDLHDINREPLIIHWAASPQRIEECVLSGKDVNGECGNFVRLIQPWNRTHLYVCGTGAYNPMCTYVNRGRRAQVGVRRRQ

SEQ ID NO: 7168 - protein, 123 aa, Artificial Sequence
  Synthetic polypeptide
GTAHFFNFLLNTTDYRILLKDEDHDRMYVGSKDYVLSLDLHDINREPLIIHWAASPQRIEECVLSGKDVNPSLWPQGECGNFVRLIQPWNRTHLYVCGTGAYNPMCTYVNRGRRAQVGVRRRQ

SEQ ID NO: 7169 - protein, 385 aa, Artificial Sequence
  Synthetic polypeptide
MRAGPGPTVTLALVLAVSWAMELKPTAPPIFTGRPFVVAWDVPTQDCGPRLKVPLDLNAFDVQASPNEGFVNQNITIFYRDRLGLYPRFDSAGRSVHGGVPQNVSLWAHRKMLQKRVEHYIRTQESAGLAVIDWEDWRPVWVRNWQDKDVYRRLSRQLVASRHPDWPPDRIVKQAQYEFEFAAQQFMLETLRYVKAVRPRHLWGFYLFPDCYNHDYVQNWESYTGRCPDVEVARNDQLAWLWAESTALFPSVYLDETLASSRHGRNFVSFRVQEALRVARTHHANHALPVYVFTRPTYSRRLTGLSEMDLISTIGESAALGAAGVILWGDAGYTTSTQPALASQSAEIAASARPPPRLGSEERLCLAAHRLGCEEPLCLAAQSGK

SEQ ID NO: 7170 - protein, 433 aa, Artificial Sequence
  Synthetic polypeptide
MRAGPGPTVTLALVLAVSWAMELKPTAPPIFTGRPFVVAWDVPTQDCGPRLKVPLDLNAFDVQASPNEGFVNQNITIFYRDRLGLYPRFDSAGRSVHGGVPQNVSLWAHRKMLQKRVEHYIRTQESAGLAVIDWEDWRPVWVRNWQDKDVYRRLSRQLVASRHPDWPPDRIVKQAQYEFEFAAQQFMLETLRYVKAVRPRHLWGFYLFPDCYNHDYVQNWESYTGRCPDVEVARNDQLAWLWAESTALFPSVYLDETLASSRHGRNFVSFRVQEALRVARTHHANHALPVYVFTRPTYSRRLTGLSEMDLISTIGESAALGAAGVILWGDAGYTTSTPRPPEVLGLQTESLNGAQAGVQWRDLGSLQHPPPSSLPWPPKVPRLQPLPGRHPVWEVRSVSAWPPIVWDVRSPSAWLPSLESEERLCPAAIPSRK

SEQ ID NO: 7171 - protein, 81 aa, Artificial Sequence
  Synthetic polypeptide
MGDLELLLPGEAEVLVRGLRSFPLREMGSEGWNQQHENLEKLNMQAILDATVSQGEPIQELLVTHGKSMVVHTCNPSYSGG

SEQ ID NO: 7172 - protein, 38 aa, Artificial Sequence
  Synthetic polypeptide
MQAILDATVSQGEPIQELLVTHGKSMVVHTCNPSYSGG

SEQ ID NO: 7173 - protein, 188 aa, Artificial Sequence
  Synthetic polypeptide
MWTPTEEEKYGVVICSFRGSVPQGLVLEIGETVQILEKCEGWYRGVSTKKPNVKGIFPANYIHLKKAIVSNRGQYETVVPLEDSIVTEVTATLQEWASLWKQLYVKHKVDLFYKLRHVMNELIDLRRQLLSGHLTQDQVREVKRHITVRLDWGNEHLGLDLVPRKDFEVVDSDQISVSDLYKMETTEE

SEQ ID NO: 7174 - protein, 1775 aa, Artificial Sequence
  Synthetic polypeptide
MWTPTEEEKYGVVICSFRGSVPQGLVLEIGETVQILEKCEGWYRGVSTKKPNVKGIFPANYIHLKKAIVSNRGQYETVVPLEDSIVTEVTATLQEWASLWKQLYVKHKVDLFYKLRHVMNELIDLRRQLLSGHLTQDQVREVKRHITVRLDWGNEHLGLDLVPRKDFEVVDSDQISVSDLYKMHLSSRQSVQQSTSQVDTMRPRHGETCRMPVPHHFFLSLKSFTYNTIGEDTDVFFSLYDMREGKQISERFLVRLNKNGGPRNPEKIERMCALFTDLSSKDMKRDLYIVAHVIRIGRMLLNDSKKGPPHLHYRRPYGCAVLSILDVLQSLTEVKEEKDFVLKVYTCNNESEWSQIHENIIRKSSAKYSAPSASHGLIISLQLLRGDMEQIRRENPMIFNRGLAITRKLGFPDVIMPGDIRNDLYLTLEKGDFERGGKSVQKNIEVTMYVLYADGEILKDCISLGSGEPNRSSYHSFVLYHSNSPRWGEIIKLPIPIDRFRGSHLRFEFRHCSTKDKGEKKLFGFAFSTLMRDDGTTLSDDIHELYVYKCDENSTFNNHALYLGLPCCKEDYNGCPNIPSSLIFQRSTKESFFISTQLSSTKLTQNVDLLALLKWKAFPDRIMDVLGRLRHVSGEEIVKFLQDILDTLFVILDDNTEKYGLLVFQSLVFIINLLRDIKYFHFRPVMDTYIQKHFAGALAYKELIRCLKWYMDCSAELIRQDHIQEAMRALEYLFKFIVQSRILYSRATCGMEEEQFRSSIQELFQSIRFVLSLDSRNSETLLFTQAALLNSFPTIFDELLQMFTVQEVAEFVRGTLGSMPSTVHIGQSMDVVKLQSIARTVDSRLFSFSESRRILLPVVLHHIHLHLRQQKELLICSGILGSIFSIVKTSSLEADVMEEVEMMVESLLDVLLQTLLTIMSKSHAQEAVRGQRCPQCTAEITGEYVSCLLSLLRQMCDTHFQHLLDNFQSKDELKEFLLKIFCVFRNLMKMSVFPRDWMVMRLLTSNIIVTTVQYLSSALHKNFTETDFDFKVWNSYFSLAVLFINQPSLQLEIITSAKRKKILDKYGDMRVMMAYELFSMWQNLGEHKIHFIPGMIGPFLGVTLVPQPEVRNIMIPIFHDMMDWEQRKNGNFKQVEAELIDKLDSMVSEGKGDESYRELFSLLTQLFGPYPSLLEKVEQETWRETGISFVTSVTRLMERLLDYRDCMKGEETENKKIGCTVNLMNFYKSEINKEEMYIRYIHKLCDMHLQAENYTEAAFTLLLYCELLQWEDRPLREFLHYPSQTEWQRKEGLCRKIIHYFNKGKSWEFGIPLCRELACQYESLYDYQSLSWIRKMEASYYDNIMEQQRLEPEFFRVGFYGRKFPFFLRNKEYVCRGHDYERLEAFQQRMLSEFPQAVAMQHPNHPDDAILQCDAQYLQIYAVTPIPDYVDVLQMDRVPDRVKSFYRVNNVRKFRYDRPFHKGPKDKENEFKSLWIERTTLTLTHSLPGISRWFEVERRELVEVSPLENAIQVVENKNQELRSLISQYQHKQVHGNINLLSMCLNGVIDAAVNGGIARYQEAFFDKDYINKHPGDAEKITQLKELMQEQVHVLGVGLAVHEKFVHPEMRPLHKKLIDQFQMMRASLYHEFPGLDKLSPACSGTSTPRGNVLASHSPMSPESIKMTHRHSPMNLMGTGRHSSSSLSSHASSEAGNMVMLGDGSMGDAPEDLYHHMQLAYPNPRYQGSVTNVSVLSSSQASPSSSSLSSTHSAPSQMITSAPSSARGTQRVCSSQCD

SEQ ID NO: 7175 - protein, 83 aa, Artificial Sequence
  Synthetic polypeptide
MRRMWATQGLAVALALSVLPGSRALRPGDCEVCISYLGRFYQDLKDRDVTFSPATIENELIKFCREARGKENRLLAGCGGPHR

SEQ ID NO: 7176 - protein, 51 aa, Artificial Sequence
  Synthetic polypeptide
GHAGAGGGAGSERAAGQPGAAAGRLRSLYFLSGKILPGPQRQRCHILTSHY

SEQ ID NO: 7177 - protein, 177 aa, Artificial Sequence
  Synthetic polypeptide
MSATAAARKRGKPASGAGAGAGAGKRRRKADSAGDRGKSKGGGKMNEEISSDSESESLAPRKPEEEEEEELEETAQEKKLRLAKLYLEQLRQQEEEKAEARAFEEDQVAGRLKEDVLEQRGRLQKLVAKEIQAPASADIRVLRGHQLSITCLVVTPDDSAIFSAAKDCSIIKCRWLD

SEQ ID NO: 7178 - protein, 2391 aa, Artificial Sequence
  Synthetic polypeptide
MEQPNSKGYSLGRTPQGPECSSAPAVQVGTHRGLEYNPGKILPGSDYGLGNPPALDPKLPHLPLPPAPPTLSDLGQPRKSPLTGTDKKYPLMKQRGFYSDILSPGTLDQLGEVCRGPRMSQNLLRQADLDKFTPRVGSFEVPEDFQERMEQQCIGSTTRLLAQTDFPLQAYEPKMQVPFQVLPGQHPRKIEIERRKQQYLSLDIEQLLFSQGIDSNKLMPRHLDHQHPQTIEQGHDPIFPIYLPLKVFDNEDFDCRTPREWINMGLEPGSLDRKPVPGKALLPTDDFLGHEDPKSQKLKYKWCEVGVLDYDEEKKLYLVHKTDEKGLVRDEMGRPILNAGVTTEGRPPLQVCQYWVPRIQLLFCAEDPCMFAQRVVQANALRKNTEALLLYNLYVDCMPSDGQHVISEQSLSKIKQWALSTPRMRKGPSVLEHLSSLAREVSLDYERSMNKINFDHVVSSKPETFSYVTLPKKEEEQVPERGLVSVPKYHFWEQKEDFTFVSLLTRPEVITALSKVRAECNKVTAMSLFHSSLSKYSHLEEFEQIQSQTFSQVQMFLKDSWISSLKVAMRSSLRDMSKGWYNLYETNWEVYLMSKLRKLMELVKYMLQDTLRFLVQDSLASFSQFISDTCCSVLNCTDDMVWGDDLINSPYRPRKNPLFIMDLVLDSSGVHYSTPLEQFEASLLNLFDKGILATHAVPQLEKLVMEDIFISGDPLLESVGLHEPLVEELRATIASAVSKAMIPLQAYAKEYRKYLELNNNDIASFLKTYQTQGLLAQEVREVVLTHLREKEILDSSLPSSIIIGPFYINTDNVKQSLSKKRKALATSVLDILAKNLHKEVDSICEEFRSISRKIYEKPNSIEELAELREWMKGIPERLVGLEERIVKVMDDYQVMDEFLYNLSSDDFNDKWIASNWPSKILGQIELVQQQHVEDEEKFRKIQIMDQNNFQEKLEGLQLVVAGFSIHVEISRAHEIANEVRRVKKQLKDCQQLAMLYNNRERIFSLPITNYDKLSRMVKEFQPYLDLWTTASDWLRWSESWMNDPLSAIDAEQLEKNVVEAFKTMHKCVKQFKDMPACQEVALDIRARIEEFKPYIPLIQGLRNPGMRIRHWETLSNQININVRPKANLTFARCLEMNLQDHIESISKVAEVAGKEYAIEQALDKMEKEWSTILFNVLPYKATDTYILKSPDEASQLLDDHIVMTQNMSFSPYKKPFEQRINSWENKLKLTQEVLEEWLNCQRSWLYLEPIFSSEDINQQLPVESKRYQTMERIWKKIMKNAYENREVINVCSDLRMLDSLRDCNKILDLVQKGLSEYLETKRSAFPRFYFLSDDELLEILSQTKDPTAVQPHLRKCFENIARLLFQEDLEITHMYSAEGEEVQLCFSIYPSSNVEDWLREVERSMKASVHDIIEKAIRAYPTMPRTQWVLNWPGQVTIAGCQTYWTMEVAEALEAGNLRSQLFPQLCQQLSDLVALVRGKLSRMQRAVLSALIVIEVHAKDVVSKLIQENVVSVNDFQWISQLRYYWTNNDLYIRAVNAEFIYGYEYLGNSGRLVITPLTDRCYLTLTGALHLKFGGAPAGPAGTGKTETTKDLGKALAIQTVVFNCSDQLDFMAMGKFFKGLASAGAWACFDEFNRIDIEVLSVVAQQITTIQKAQQQRVERFMFEGVEIPLVPSCAVFITMNPGYAGRTELPDNLKALFRPVAMMVPDYAMITEISLYSFGFNEASVLAKKITTTFKLSSEQLSSQDHYDFGMRAVKTVISAAGNLKRENPSMNEELICLRAIRDVNVPKFLQEDLKLFSGIVSDLFPTIKEEDTDYGILDEAIREACRNSNLKDVEGFLTKCIQLYETTVVRHGLMLVGPTGSGKSTCYRVLAAAMTSLKGQPSISGGMYEAVNYYVLNPKSITMGQLYGEFDLLTHEWTDGIFSSFIRAGAITSDTNKKWYMFDGPVDAIWIENMNTVLDDNKKLCLSSGEIIKLTEAMTMMFEVQDLAVASPATVSRCGMVYLEPSILGLMPFIECWLRKLPPLLKPYEEHFKALFVSFLEESISFVRSSVKEVIASTNCNLTMSLLKLLDCFFKPFLPREGLKKIPSEKLSRIVELIEPWFIFSLIWSVGATGDSSGRTSFSHWLRLKMENEQLTLLFPEEGLVFDYRLEDAGISGTNDSEDEEEEYKQVAWVKWMDSSAPFTMVPDTNYCNIIVPTMDTVQMSHLLDMLLTNKKPVLCIGPTGTGKTLTISDKLLKNLALDYISHFLTFSARTSANQTQDFIDSKLDKRRKGVFGPPLGRNFIFFIDDLNMPALETYGAQPPIELLRQWMDHGGWYDRKIIGAFKNLVDINFVCAMGPPGGGRNTVTPRLMRHFNYLSFAEMDEVSKKRIFSTILGNWLAHESL

SEQ ID NO: 7179 - protein, 1317 aa, Artificial Sequence
  Synthetic polypeptide
MAGPRGLLPLCLLAFCLAGFSFVRGQVLFKGCDVKTTFVTHVPCTSCAAIKKQTCPSGWLRELPDQITQDCRYEVQLGGSMVSMSGCRRKCRKQVVQKACCPGYWGSRCHECPGGAETPCNGHGTCLDGMDRNGTCVCQENFRGSACQECQDPNRFGPDCQSVCSCVHGVCNHGPRGDGSCLCFAGYTGPHCDQELPVCQELRCPQNTQCSAEAPSCRCLPGYTQQGSECRAPNPCWPSPCSLLAQCSVSPKGQAQCHCPENYHGDGMVCLPKDPCTDNLGGCPSNSTLCVYQKPGQAFCTCRPGLVSINSNASAGCFAFCSPFSCDRSATCQVTADGKTSCVCRESEVGDGRACYGHLLHEVQKATQTGRVFLQLRVAVAMMDQGCREILTTAGPFTVLVPSVSSFSSRTMNASLAQQLCRQHIIAGQHILEDTRTQQTRRWWTLAGQEITVTFNQFTKYSYKYKDQPQQTFNIYKANNIAANGVFHVVTGLRWQAPSGTPGDPKRTIGQILASTEAFSRFETILENCGLPSILDGPGPFTVFAPSNEAVDSLRDGRLIYLFTAGLSKLQELVRYHIYNHGQLTVEKLISKGRILTMANQVLAVNISEEGRILLGPEGVPLQRVDVMAANGVIHMLDGILLPPTILPILPKHCSEEQHKIVAGSCVDCQALNTSTCPPNSVKLDIFPKECVYIHDPTGLNVLKKGCASYCNQTIMEQGCCKGFFGPDCTQCPGGFSNPCYGKGNCSDGIQGNGACLCFPDYKGIACHICSNPNKHGEQCQEDCGCVHGLCDNRPGSGGVCQQGTCAPGFSGRFCNESMGDCGPTGLAQHCHLHARCVSQEGVARCRCLDGFEGDGFSCTPSNPCSHPDRGGCSENAECVPGSLGTHHCTCHKGWSGDGRVCVAIDECELDMRGGCHTDALCSYVGPGQSRCTCKLGFAGDGYQCSPIDPCRAGNGGCHGLATCRAVGGGQRVCTCPPGFGGDGFSCYGDIFRELEANAHFSIFYQWLKSAGITLPADRRVTALVPSEAAVRQLSPEDRAFWLQPRTLPNLVRAHFLQGALFEEELARLGGQEVATLNPTTRWEIRNISGRVWVQNASVDVADLLATNGVLHILSQVLLPPRGDVPGGQGLLQQLDLVPAFSLFRELLQHHGLVPQIEAATAYTIFVPTNRSLEAQGNSSHLDADTVRHHVVLGEALSMETLRKGGHRNSLLGPAHWIVFYNHSGQPEVNHVPLEGPMLEAPGRSLIGLSGVLTVGSSRCLHSHAEALREKCVNCTRRFRCTQGFQLQDTPRKSCVYRSGFSFSRGCSYTCAKKIQL

SEQ ID NO: 7180 - protein, 16 aa, Artificial Sequence
  Synthetic polypeptide
MFQGIILFSAEAIVLD

SEQ ID NO: 7181 - protein, 105 aa, Artificial Sequence
  Synthetic polypeptide
MARGGDTGCTGPSETSASGAAAIALPGLEGPATDAQCQTLPLTVLKSRSPSPRSLPPALSCPPPQPAMLEHLSSLPTQMDYKGQKLAEQMFQGIILFSAEAIVLD

SEQ ID NO: 7182 - protein, 38 aa, Artificial Sequence
  Synthetic polypeptide
MLEHLSSLPTQMDYKGQKLAEQMFQGIILFSAEAIVLD

SEQ ID NO: 7183 - protein, 839 aa, Artificial Sequence
  Synthetic polypeptide
MPLAAYCYLRVVGKGSYGEVTLVKHRRDGKQYVIKKLNLRNASSRERRAAEQEAQLLSQLKHPNIVTYKESWEGGDGLLYIVMGFCEGGDLYRKLKEQKGQLLPENQVVEWFVQIAMALQYLHEKHILHRDLKTQNVFLTRTNIIKVGDLGIARVLENHCDMASTLIGTPYYMSPELFSNKPYNYKSDVWALGCCVYEMATLKHAFNAKDMNSLVYRIIEGKLPPMPRDYSPELAELIRTMLSKRPEERPSVRSILRQPYIKRQISFFLEATKIKTSKNNIKNGDSQSKPFATVVSGEAESNHEVIHPQPLSSEGSQTYIMGEGKCLSQEKPRASGLLKSPASLKAHTCKQDLSNTTELATISSVNIDILPAKGRDSVSDGFVQENQPRYLDASNELGGICSISQVEEEMLQDNTKSSAQPENLIPMWSSDIVTGEKNEPVKPLQPLIKEQKPKDQSLALSPKLECSGTILAHSNLRLLGSSDSPASASRVAGITGVCHHAQDQVAGECIIEKQGRIHPDLQPHNSGSEPSLSRQRRQKRREQTEHRGEKRQVRRDLFAFQESPPRFLPSHPIVGKVDVTSTQKEAENQRRVVTGSVSSSRSSEMSSSKDRPLSARERRRLKQSQEEMSSSGPSVRKASLSVAGPGKPQEEDQPLPARRLSSDCSVTQERKQIHCLSEDELSSSTSSTDKSDGDYGEGKGQTNEINALVQLMTQTLKLDSKESCEDVPVANPVSEFKLHRKYRDTLILHGKVAEEAEEIHFKELPSAIMPGSEKIRRLVEVLRTDVIRGLGVQLLEQVYDLLEEEDEFDREARTGTAGSCPNVAFPKTTLACHSPILCL

SEQ ID NO: 7184 - protein, 750 aa, Artificial Sequence
  Synthetic polypeptide
MPLAAYCYLRVVGKGSYGEVTLVKHRRDGKQYLHEKHILHRDLKTQNVFLTRTNIIKVGDLGIARVLENHCDMASTLIGTPYYMSPELFSNKPYNYKSDVWALGCCVYEMATLKHAFNAKDMNSLVYRIIEGKLPPMPRDYSPELAELIRTMLSKRPEERPSVRSILRQPYIKRQISFFLEATKIKTSKNNIKNGDSQSKPFATVVSGEAESNHEVIHPQPLSSEGSQTYIMGEGKCLSQEKPRASGLLKSPASLKAHTCKQDLSNTTELATISSVNIDILPAKGRDSVSDGFVQENQPRYLDASNELGGICSISQVEEEMLQDNTKSSAQPENLIPMWSSDIVTGEKNEPVKPLQPLIKEQKPKDQSLALSPKLECSGTILAHSNLRLLGSSDSPASASRVAGITGVCHHAQDQVAGECIIEKQGRIHPDLQPHNSGSEPSLSRQRRQKRREQTEHRGEKRQVRRDLFAFQESPPRFLPSHPIVGKVDVTSTQKEAENQRRVVTGSVSSSRSSEMSSSKDRPLSARERRRLKQSQEEMSSSGPSVRKASLSVAGPGKPQEEDQPLPARRLSSDCSVTQERKQIHCLSEDELSSSTSSTDKSDGDYGEGKGQTNEINALVQLMTQTLKLDSKESCEDVPVANPVSEFKLHRKYRDTLILHGKVAEEAEEIHFKELPSAIMPGSEKIRRLVEVLRTDVIRGLGVQLLEQVYDLLEEEDEFDREARTGTAGSCPNVAFPKTTLACHSPILCL

SEQ ID NO: 7185 - protein, 793 aa, Artificial Sequence
  Synthetic polypeptide
MPLAAYCYLRVVGKGSYGEVTLVKHRRDGKQYVIKKLNLRNASSRERRAAEQEAQLLSQLKHPNIVTYKESWEGGDGLLYIVMGFCEGGDLYRKLKEQKGQLLPENQVVEWFVQIAMALQYLHEKHILHRDLKTQNVFLTRTNIIKVGDLGIARVLENHCDMASTLIGTPYYMSPELFSNKPYNYKSDVWALGCCVYEMATLKHAFNAKDMNSLVYRIIEGKLPPMPRDYSPELAELIRTMLSKRPEERPSVRSILRQPYIKRQISFFLEATKIKTSKNNIKNGDSQSKPFATVVSGEAESNHEVIHPQPLSSEGSQTYIMGEGKCLSQEKPRASGLLKSPASLKAHTCKQDLSNTTELATISSVNIDILPAKGRDSVSDGFVQENQPRYLDASNELGGICSISQVEEEMLQDNTKSSAQPENLIPMWSSDIVTGEKNEPVKPLQPLIKEQKPKDQDQVAGECIIEKQGRIHPDLQPHNSGSEPSLSRQRRQKRREQTEHRGEKRQVRRDLFAFQESPPRFLPSHPIVGKVDVTSTQKEAENQRRVVTGSVSSSRSSEMSSSKDRPLSARERRRLKQSQEEMSSSGPSVRKASLSVAGPGKPQEEDQPLPARRLSSDCSVTQERKQIHCLSEDELSSSTSSTDKSDGDYGEGKGQTNEINALVQLMTQTLKLDSKESCEDVPVANPVSEFKLHRKYRDTLILHGKVAEEAEEIHFKELPSAIMPGSEKIRRLVEVLRTDVIRGLGVQLLEQVYDLLEEEDEFDREARTGTAGSCPNVAFPKTTLACHSPILCL

SEQ ID NO: 7186 - protein, 62 aa, Artificial Sequence
  Synthetic polypeptide
MAPFLRIAFNSYELGSLQAEDEANQPFCAVKMKEALSTAVFCASNIMAGMQELSAHVPCMNA

SEQ ID NO: 7187 - protein, 974 aa, Artificial Sequence
  Synthetic polypeptide
MMMMMMMKKMQHQRQQQADHANEANYARGTRLPLSGEGPTSQPNSSKQTVLSWQAAIDAARQAKAAQTMSTSAPPPVGSLSQRKRQQYAKSKKQGNSSNSRPARALFCLSLNNPIRRACISIVEWKPFDIFILLAIFANCVALAIYIPFPEDDSNSTNHNLEKVEYAFLIIFTVETFLKIIAYGLLLHPNAYVRNGWNLLDFVIVIVGLFSVILEQLTKETEGGNHSSGKSGGFDVKALRAFRVLRPLRLVSGVPSLQVVLNSIIKAMVPLLHIALLVLFVIIIYAIIGLELFIGKMHKTCFFADSDIVAEEDPAPCAFSGNGRQCTANGTECRSGWVGPNGGITNFDNFAFAMLTVFQCITMEGWTDVLYWMNDAMGFELPWVYFVSLVIFGSFFVLNLVLGVLSGEFSKEREKAKARGDFQKLREKQQLEEDLKGYLDWITQAEDIDPENEEEGGEEGKRNTSMPTSETESVNTENVSGEGENRGCCGSLCQAISKSKLSRRWRRWNRFNRRRCRAAVKSVTFYWLVIVLVFLNTLTISSEHYNQPDWLTQIQDIANKVLLALFTCEMLVKMYSLGLQAYFVSLFNRFDCFVVCGGITETILVELEIMSPLGISVFRCVRLLRIFKVTRHWTSLSNLVASLLNSMKSIASLLLLLFLFIIIFSLLGMQLFGGKFNFDETQTKRSTFDNFPQALLTVFQILTGEDWNAVMYDGIMAYGGPSSSGMIVCIYFIILFICGNYILLNVFLAIAVDNLADAESLNTAQKEEAEEKERKKIARKESLENKKNNKPEVNQIANSDNKVTIDDYREEDEDKDPYPPCDVPVGEEEEEEEEDEPEVPAGPRPRRISELNMKEKIAPIPEGSAFFILSKTNPIRVGCHKLINHHIFTNLILVFIMLSSAALAAEDPIRSHSFRNTILGYFDYAFTAIFTVEILLKMTTFGAFLHKGAFCRNYFNLLDMLVVGVSLVSFGIQL

SEQ ID NO: 7188 - protein, 994 aa, Artificial Sequence
  Synthetic polypeptide
MMMMMMMKKMQHQRQQQADHANEANYARGTRLPLSGEGPTSQPNSSKQTVLSWQAAIDAARQAKAAQTMSTSAPPPVGSLSQRKRQQYAKSKKQGNSSNSRPARALFCLSLNNPIRRACISIVEWKPFDIFILLAIFANCVALAIYIPFPEDDSNSTNHNLEKVEYAFLIIFTVETFLKIIAYGLLLHPNAYVRNGWNLLDFVIVIVGLFSVILEQLTKETEGGNHSSGKSGGFDVKALRAFRVLRPLRLVSGVPSLQVVLNSIIKAMVPLLHIALLVLFVIIIYAIIGLELFIGKMHKTCFFADSDIVAEEDPAPCAFSGNGRQCTANGTECRSGWVGPNGGITNFDNFAFAMLTVFQCITMEGWTDVLYWVNDAIGWEWPWVYFVSLIILGSFFVLNLVLGVLSGEFSKEREKAKARGDFQKLREKQQLEEDLKGYLDWITQAEDIDPENEEEGGEEGKRNTSMPTSETESVNTENVSGEGENRGCCGSLWCWWRRRGAAKAGPSGCRRWGQAISKSKLSRRWRRWNRFNRRRCRAAVKSVTFYWLVIVLVFLNTLTISSEHYNQPDWLTQIQDIANKVLLALFTCEMLVKMYSLGLQAYFVSLFNRFDCFVVCGGITETILVELEIMSPLGISVFRCVRLLRIFKVTRHWTSLSNLVASLLNSMKSIASLLLLLFLFIIIFSLLGMQLFGGKFNFDETQTKRSTFDNFPQALLTVFQILTGEDWNAVMYDGIMAYGGPSSSGMIVCIYFIILFICGNYILLNVFLAIAVDNLADAESLNTAQKEEAEEKERKKIARKESLENKKNNKPEVNQIANSDNKVTIDDYREEDEDKDPYPPCDVPVGEEEEEEEEDEPEVPAGPRPRRISELNMKEKIAPIPEGSAFFILSKTNPIRVGCHKLINHHIFTNLILVFIMLSSAALAAEDPIRSHSFRNTILGYFDYAFTAIFTVEILLKMTTFGAFLHKGAFCRNYFNLLDMLVVGVSLVSFGIQL

SEQ ID NO: 7189 - protein, 667 aa, Artificial Sequence
  Synthetic polypeptide
ANGTECRSGWVGPNGGITNFDNFAFAMLTVFQCITMEGWTDVLYWMNDAMGFELPWVYFVSLVIFGSFFVLNLVLGVLSGEFSKEREKAKARGDFQKLREKQQLEEDLKGYLDWITQAEDIDPENEEEGGEEGKRNTSMPTSETESVNTENVSGEGENRGCCGSLWCWWRRRGAAKAGPSGCRRWGQAISKSKLSRRWRRWNRFNRRRCRAAVKSVTFYWLVIVLVFLNTLTISSEHYNQPDWLTQIQDIANKVLLALFTCEMLVKMYSLGLQAYFVSLFNRFDCFVVCGGITETILVELEIMSPLGISVFRCVRLLRIFKVTRHWTSLSNLVASLLNSMKSIASLLLLLFLFIIIFSLLGMQLFGGKFNFDETQTKRSTFDNFPQALLTVFQILTGEDWNAVMYDGIMAYGGPSSSGMIVCIYFIILFICGNYILLNVFLAIAVDNLADAESLNTAQKEEAEEKERKKIARKESLENKKNNKPEVNQIANSDNKVTIDDYREEDEDKDPYPPCDVPVGEEEEEEEEDEPEVPAGPRPRRISELNMKEKIAPIPEGSAFFILSKTNPIRVGCHKLINHHIFTNLILVFIMLSSAALAAEDPIRSHSFRNTILGYFDYAFTAIFTVEILLKMTTFGAFLHKGAFCRNYFNLLDMLVVGVSLVSFGIQL

SEQ ID NO: 7190 - protein, 342 aa, Artificial Sequence
  Synthetic polypeptide
MSLVLLSLAALCRSAVPREPTVQCGSETGPSPEWMLQHDLIPGDLRDLRVEPVTTSVATGDYSILMNVSWVLRADASIRLLKATKICVTGKSNFQSYSCVRCNYTEAFQTQTRPSGGKWTFSYIGFPVELNTVYFIGAHNIPNANMNEDGPSMSVNFTSPGCLDHIMKYKKKCVKAGSLWDPNITACKKNEETVEVNFTTTPLGNRYMALIQHSTIIGFSQVFEPHQKKQTRASVVIPVTGDSEGATVQLTPYFPTCGSDCIRHKGTVVLCPQTGVPFPLDNNKSKPGGWLPLLLLSLLVATWVLVAGIYLMWRHGLDCAEPLTPGFFQYIYWKIFWRFVSL

SEQ ID NO: 7191 - protein, 326 aa, Artificial Sequence
  Synthetic polypeptide
MSLVLLSLAALCRSAVPREPTVQCGSETGPSPEWMLQHDLIPGDLRDLRVEPVTTSVATGDYSILMNVSWVLRADASIRLLKATKICVTGKSNFQSYSCVRCNYTEAFQTQTRPSGGKWTFSYIGFPVELNTVYFIGAHNIPNANMNEDGPSMSVNFTSPGSLWDPNITACKKNEETVEVNFTTTPLGNRYMALIQHSTIIGFSQVFEPHQKKQTRASVVIPVTGDSEGATVQLTPYFPTCGSDCIRHKGTVVLCPQTGVPFPLDNNKSKPGGWLPLLLLSLLVATWVLVAGIYLMWRHGLDCAEPLTPGFFQYIYWKIFWRFVSL

SEQ ID NO: 7192 - protein, 96 aa, Artificial Sequence
  Synthetic polypeptide
MPSALAIFTCRPNSHPFQERHVYLDEPIKIGRSVARCRPAQNNATFDCKVLSRNHALVWFDHKTGKGNLDLCQHCRIDSALLATISERLQRAIPGR

SEQ ID NO: 7193 - protein, 174 aa, Artificial Sequence
  Synthetic polypeptide
MPSALAIFTCRPNSHPFQERHVYLDEPIKIGRSVARCRPAQNNATFDCKVLSRNHALVWFDHKTGKFYLQDTKSSNGTFINSQRLSRGSEESPPCEILSGDIIQFGVDVTENTRKVTHGCIVSTIKLFLPDGMEARLRSDVIHAPLPSPVDKVAANTPSMYSQELFQLSQYLQV

SEQ ID NO: 7194 - protein, 2431 aa, Artificial Sequence
  Synthetic polypeptide
MPVTEKDLAEDAPWKKIQQNTFTRWCNEHLKCVNKRIGNLQTDLSDGLRLIALLEVLSQKRMYRKYHQRPTFRQMQLENVSVALEFLDRESIKLVSIDSKAIVDGNLKLILGLVWTLILHYSISMPVWEDEGDDDAKKQTPKQRLLGWIQNKIPYLPITNFNQNWQDGKALGALVDSCAPGLCPDWESWDPQKPVDNAREAMQQADDWLGVPQVITPEEIIHPDVDEHSVMTYLSQFPKAKLKPGAPLKPKLNPKKARAYGRGIEPTGNMVKQPAKFTVDTISAGQGDVMVFVEDPEGNKEEAQVTPDSDKNKTYSVEYLPKVTGLHKVTVLFAGQHISKSPFEVSVDKAQGDASKVTAKGPGLEAVGNIANKPTYFDIYTAGAGVGDIGVEVEDPQGKNTVELLVEDKGNQVYRCVYKPMQPGPHVVKIFFAGDTIPKSPFVVQVGEACNPNACRASGRGLQPKGVRIRETTDFKVDTKAAGSGELGVTMKGPKGLEELVKQKDFLDGVYAFEYYPSTPGRYSIAITWGGHHIPKSPFEVQVGPEAGMQKVRAWGPGLHGGIVGRSADFVVESIGSEVGSLGFAIEGPSQAKIEYNDQNDGSCDVKYWPKEPGEYAVHIMCDDEDIKDSPYMAFIHPATGGYNPDLVRAYGPGLEKSGCIVNNLAEFTVDPKDAGKAPLKIFAQDGEGQRIDIQMKNRMDGTYACSYTPVKAIKHTIAVVWGGVNIPHSPYRVNIGQGSHPQKVKVFGPGVERSGLKANEPTHFTVDCTEAGEGDVSVGIKCDARVLSEDEEDVDFDIIHNANDTFTVKYVPPAAGRYTIKVLFASQEIPASPFRVKVDPSHDASKVKAEGPGLSKAGVENGKPTHFTVYTKGAGKAPLNVQFNSPLPGDAVKDLDIIDNYDYSHTVKYTPTQQGNMQVLVTYGGDPIPKSPFTVGVAAPLDLSKIKLNGLENRVEVGKDQEFTVDTRGAGGQGKLDVTILSPSRKVVPCLVTPVTGRENSTAKFIPREEGLYAVDVTYDGHPVPGSPYTVEASLPPDPSKVKAHGPGLEGGLVGKPAEFTIDTKGAGTGGLGLTVEGPCEAKIECSDNGDGTCSVSYLPTKPGEYFVNILFEEVHIPGSPFKADIEMPFDPSKVVASGPGLEHGKVGEAGLLSVDCSEAGPGALGLEAVSDSGTKAEVSIQNNKDGTYAVTYVPLTAGMYTLTMKYGGELVPHFPARVKVEPAVDTSRIKVFGPGIEGKDVFREATTDFTVDSRPLTQVGGDHIKAHIANPSGASTECFVTDNADGTYQVEYTPFEKGLHVVEVTYDDVPIPNSPFKVAVTEGCQPSRVQAQGPGLKEAFTNKPNVFTVVTRGAGIGGLGITVEGPSESKINCRDNKDGSCSAEYIPFAPGDYDVNITYGGAHIPGSPFRVPVKDVVDPSKVKIAGPGLGSGVRARVLQSFTVDSSKAGLAPLEVRVLGPRADDTDSQSWRSPLKALSEFFKGDPKGDFNKTGLVEPVNVVDNGDGTHTVTYTPSQEGPYMVSVKYADEEIPRSPFKVKVLPTYDASKVTASGPGLSSYGVPASLPVDFAIDARDAGEGLLAVQITDQEGKPKRAIVHDNKDGTYAVTYIPDKTGRYMIGVTYGGDDIPLSPYRIRATQTGDASKCLATGPGIASTVKTGEEVGFVVDAKTAGKGKVTCTVLTPDGTEAEADVIENEDGTYDIFYTAAKPGTYVIYVRFGGVDIPNSPFTVMATDGEVTAVEEAPVNACPPGFRPWVTEEAYVPVSDMNGLGFKPFDLVIPFAVRKGEITGEVHMPSGKTATPEIVDNKDGTVTVRYAPTEVGLHEMHIKYMGSHIPESPLQFYVNYPNSGSVSAYGPGLVYGVANKTATFTIVTEDAGEGGLDLAIEGPSKAEISCIDNKDGTCTVTYLPTLPGDYSILVKYNDKHIPGSPFTAKITDDSRRCSQVKLGSAADFLLDISETDLSSLTASIKAPSGRDEPCLLKRLPNNHIGISFIPREVGEHLVSIKKNGNHVANSPVSIMVVQSEIGDARRAKVYGRGLSEGRTFEMSDFIVDTRDAGYGGISLAVEGPSKVDIQTEDLEDGTCKVSYFPTVPGVYIVSTKFADEHVPGSPFTVKISGEGRVKESITRTSRAPSVATVGSICDLNLKIPEINSSDMSAHVTSPSGRVTEAEIVPMGKNSHCVRFVPQEMGVHTVSVKYRGQHVTGSPFQFTVGPLGEGGAHKVRAGGPGLERGEAGVPAEFSIWTREAGAGGLSIAVEGPSKAEITFDDHKNGSCGVSYIAQEPGNYEVSIKFNDEHIPESPYLVPVIAPSDDARRLTVMSLQESGLKVNQPASFAIRLNGAKGKIDAKVHSPSGAVEECHVSELEPDKYAVRFIPHENGVHTIDVKFNGSHVVGSPFKVRVGEPGQAGNPALVSAYGTGLEGGTTA

SEQ ID NO: 7195 - protein, 2400 aa, Artificial Sequence
  Synthetic polypeptide
MPVTEKDLAEDAPWKKIQQNTFTRWCNEHLKCVNKRIGNLQTDLSDGLRLIALLEVLSQKRMYRKYHQRPTFRQMQLENVSVALEFLDRESIKLVSIDSKAIVDGNLKLILGLVWTLILHYSISMPVWEDEGDDDAKKQTPKQRLLGWIQNKIPYLPITNFNQNWQDGKALGALVDSCAPGLCPDWESWDPQKPVDNAREAMQQADDWLGVPQVITPEEIIHPDVDEHSVMTYLSQFPKAKLKPGAPLKPKLNPKKARAYGRGIEPTGNMVKQPAKFTVDTISAGQGDVMVFVEDPEGNKEEAQVTPDSDKNKTYSVEYLPKVTGLHKVTVLFAGQHISKSPFEVSVDKAQGDASKVTAKGPGLEAVGNIANKPTYFDIYTAGAGVGDIGVEVEDPQGKNTVELLVEDKGNQVYRCVYKPMQPGPHVVKIFFAGDTIPKSPFVVQVGEACNPNACRASGRGLQPKGVRIRETTDFKVDTKAAGSGELGVTMKGPKGLEELVKQKDFLDGVYAFEYYPSTPGRYSIAITWGGHHIPKSPFEVQVGPEAGMQKVRAWGPGLHGGIVGRSADFVVESIGSEVGSLGFAIEGPSQAKIEYNDQNDGSCDVKYWPKEPGEYAVHIMCDDEDIKDSPYMAFIHPATGGYNPDLVRAYGPGLEKSGCIVNNLAEFTVDPKDAGKAPLKIFAQDGEGQRIDIQMKNRMDGTYACSYTPVKAIKHTIAVVWGGVNIPHSPYRVNIGQGSHPQKVKVFGPGVERSGLKANEPTHFTVDCTEAGEGDVSVGIKCDARVLSEDEEDVDFDIIHNANDTFTVKYVPPAAGRYTIKVLFASQEIPASPFRVKVDPSHDASKVKAEGPGLSKAGVENGKPTHFTVYTKGAGKAPLNVQFNSPLPGDAVKDLDIIDNYDYSHTVKYTPTQQGNMQVLVTYGGDPIPKSPFTVGVAAPLDLSKIKLNGLENRVEVGKDQEFTVDTRGAGGQGKLDVTILSPSRKVVPCLVTPVTGRENSTAKFIPREEGLYAVDVTYDGHPVPGSPYTVEASLPPDPSKVKAHGPGLEGGLVGKPAEFTIDTKGAGTGGLGLTVEGPCEAKIECSDNGDGTCSVSYLPTKPGEYFVNILFEEVHIPGSPFKADIEMPFDPSKVVASGPGLEHGKVGEAGLLSVDCSEAGPGALGLEAVSDSGTKAEVSIQNNKDGTYAVTYVPLTAGMYTLTMKYGGELVPHFPARVKVEPAVDTSRIKVFGPGIEGKDVFREATTDFTVDSRPLTQVGGDHIKAHIANPSGASTECFVTDNADGTYQVEYTPFEKGLHVVEVTYDDVPIPNSPFKVAVTEGCQPSRVQAQGPGLKEAFTNKPNVFTVVTRGAGIGGLGITVEGPSESKINCRDNKDGSCSAEYIPFAPGDYDVNITYGGAHIPGSPFRVPVKDVVDPSKVKIAGPGLGSGVRARVLQSFTVDSSKAGLAPLEVRVLGPRGLVEPVNVVDNGDGTHTVTYTPSQEGPYMVSVKYADEEIPRSPFKVKVLPTYDASKVTASGPGLSSYGVPASLPVDFAIDARDAGEGLLAVQITDQEGKPKRAIVHDNKDGTYAVTYIPDKTGRYMIGVTYGGDDIPLSPYRIRATQTGDASKCLATGPGIASTVKTGEEVGFVVDAKTAGKGKVTCTVLTPDGTEAEADVIENEDGTYDIFYTAAKPGTYVIYVRFGGVDIPNSPFTVMATDGEVTAVEEAPVNACPPGFRPWVTEEAYVPVSDMNGLGFKPFDLVIPFAVRKGEITGEVHMPSGKTATPEIVDNKDGTVTVRYAPTEVGLHEMHIKYMGSHIPESPLQFYVNYPNSGSVSAYGPGLVYGVANKTATFTIVTEDAGEGGLDLAIEGPSKAEISCIDNKDGTCTVTYLPTLPGDYSILVKYNDKHIPGSPFTAKITDDSRRCSQVKLGSAADFLLDISETDLSSLTASIKAPSGRDEPCLLKRLPNNHIGISFIPREVGEHLVSIKKNGNHVANSPVSIMVVQSEIGDARRAKVYGRGLSEGRTFEMSDFIVDTRDAGYGGISLAVEGPSKVDIQTEDLEDGTCKVSYFPTVPGVYIVSTKFADEHVPGSPFTVKISGEGRVKESITRTSRAPSVATVGSICDLNLKIPEINSSDMSAHVTSPSGRVTEAEIVPMGKNSHCVRFVPQEMGVHTVSVKYRGQHVTGSPFQFTVGPLGEGGAHKVRAGGPGLERGEAGVPAEFSIWTREAGAGGLSIAVEGPSKAEITFDDHKNGSCGVSYIAQEPGNYEVSIKFNDEHIPESPYLVPVIAPSDDARRLTVMSLQESGLKVNQPASFAIRLNGAKGKIDAKVHSPSGAVEECHVSELEPDKYAVRFIPHENGVHTIDVKFNGSHVVGSPFKVRVGEPGQAGNPALVSAYGTGLEGGTTA

SEQ ID NO: 7196 - protein, 2376 aa, Artificial Sequence
  Synthetic polypeptide
MPVTEKDLAEDAPWKKIQQNTFTRWCNEHLKCVNKRIGNLQTDLSDGLRLIALLEVLSQKRMYRKYHQRPTFRQMQLENVSVALEFLDRESIKLVSIDSKAIVDGNLKLILGLVWTLILHYSISMPVWEDEGDDDAKKQTPKQRLLGWIQNKIPYLPITNFNQNWQDGKALGALVDSCAPGLCPDWESWDPQKPVDNAREAMQQADDWLGVPQVITPEEIIHPDVDEHSVMTYLSQFPKAKLKPGAPLKPKLNPKKARAYGRGIEPTGNMVKQPAKFTVDTISAGQGDVMVFVEDPEGNKEEAQVTPDSDKNKTYSVEYLPKVTGLHKVTVLFAGQHISKSPFEVSVDKAQGDASKVTAKGPGLEAVGNIANKPTYFDIYTAGAGVGDIGVEVEDPQGKNTVELLVEDKGNQVYRCVYKPMQPGPHVVKIFFAGDTIPKSPFVVQVGEACNPNACRASGRGLQPKGVRIRETTDFKVDTKAAGSGELGVTMKGPKGLEELVKQKDFLDGVYAFEYYPSTPGRYSIAITWGGHHIPKSPFEVQVGPEAGMQKVRAWGPGLHGGIVGRSADFVVESIGSEVGSLGFAIEGPSQAKIEYNDQNDGSCDVKYWPKEPGEYAVHIMCDDEDIKDSPYMAFIHPATGGYNPDLVRAYGPGLEKSGCIVNNLAEFTVDPKDAGKAPLKIFAQDGEGQRIDIQMKNRMDGTYACSYTPVKAIKHTIAVVWGGVNIPHSPYRVNIGQGSHPQKVKVFGPGVERSGLKANEPTHFTVDCTEAGEGDVSVGIKCDARVLSEDEEDVDFDIIHNANDTFTVKYVPPAAGRYTIKVLFASQEIPASPFRVKVDPSHDASKVKAEGPGLSKAGVENGKPTHFTVYTKGAGKAPLNVQFNSPLPGDAVKDLDIIDNYDYSHTVKYTPTQQGNMQVLVTYGGDPIPKSPFTVGVAAPLDLSKIKLNGLENRVEVGKDQEFTVDTRGAGGQGKLDVTILSPSRKVVPCLVTPVTGRENSTAKFIPREEGLYAVDVTYDGHPVPGSPYTVEASLPPDPSKVKAHGPGLEGGLVGKPAEFTIDTKGAGTGGLGLTVEGPCEAKIECSDNGDGTCSVSYLPTKPGEYFVNILFEEVHIPGSPFKADIEMPFDPSKVVASGPGLEHGKVGEAGLLSVDCSEAGPGALGLEAVSDSGTKAEVSIQNNKDGTYAVTYVPLTAGMYTLTMKYGGELVPHFPARVKVEPAVDTSRIKVFGPGIEGKDVFREATTDFTVDSRPLTQVGGDHIKAHIANPSGASTECFVTDNADGTYQVEYTPFEKGLHVVEVTYDDVPIPNSPFKVAVTEGCQPSRVQAQGPGLKEAFTNKPNVFTVVTRGAGIGGLGITVEGPSESKINCRDNKDGSCSAEYIPFAPGDYDVNITYGGAHIPGSPFRVPVKDVVDPSKVKIAGPGLGSGVRARVLQSFTVDSSKAGLAPLEVRVLGPRGLVEPVNVVDNGDGTHTVTYTPSQEGPYMVSVKYADEEIPRSPFKVKVLPTYDASKVTASGPGLSSYGVPASLPVDFAIDARDAGEGLLAVQITDQEGKPKRAIVHDNKDGTYAVTYIPDKTGRYMIGVTYGGDDIPLSPYRIRATQTGDASKCLATGPGIASTVKTGEEVGFVVDAKTAGKGKVTCTVLTPDGTEAEADVIENEDGTYDIFYTAAKPGTYVIYVRFGGVDIPNSPFTVMVTEEAYVPVSDMNGLGFKPFDLVIPFAVRKGEITGEVHMPSGKTATPEIVDNKDGTVTVRYAPTEVGLHEMHIKYMGSHIPESPLQFYVNYPNSGSVSAYGPGLVYGVANKTATFTIVTEDAGEGGLDLAIEGPSKAEISCIDNKDGTCTVTYLPTLPGDYSILVKYNDKHIPGSPFTAKITDDSRRCSQVKLGSAADFLLDISETDLSSLTASIKAPSGRDEPCLLKRLPNNHIGISFIPREVGEHLVSIKKNGNHVANSPVSIMVVQSEIGDARRAKVYGRGLSEGRTFEMSDFIVDTRDAGYGGISLAVEGPSKVDIQTEDLEDGTCKVSYFPTVPGVYIVSTKFADEHVPGSPFTVKISGEGRVKESITRTSRAPSVATVGSICDLNLKIPEINSSDMSAHVTSPSGRVTEAEIVPMGKNSHCVRFVPQEMGVHTVSVKYRGQHVTGSPFQFTVGPLGEGGAHKVRAGGPGLERGEAGVPAEFSIWTREAGAGGLSIAVEGPSKAEITFDDHKNGSCGVSYIAQEPGNYEVSIKFNDEHIPESPYLVPVIAPSDDARRLTVMSLQESGLKVNQPASFAIRLNGAKGKIDAKVHSPSGAVEECHVSELEPDKYAVRFIPHENGVHTIDVKFNGSHVVGSPFKVRVGEPGQAGNPALVSAYGTGLEGGTTA

SEQ ID NO: 7197 - protein, 2389 aa, Artificial Sequence
  Synthetic polypeptide
MPVTEKDLAEDAPWKKIQQNTFTRWCNEHLKCVNKRIGNLQTDLSDGLRLIALLEVLSQKRMYRKYHQRPTFRQMQLENVSVALEFLDRESIKLVSIDSKAIVDGNLKLILGLVWTLILHYSISMPVWEDEGDDDAKKQTPKQRLLGWIQNKIPYLPITNFNQNWQDGKALGALVDSCAPGLCPDWESWDPQKPVDNAREAMQQADDWLGVPQVITPEEIIHPDVDEHSVMTYLSQFPKAKLKPGAPLKPKLNPKKARAYGRGIEPTGNMVKQPAKFTVDTISAGQGDVMVFVEDPEGNKEEAQVTPDSDKNKTYSVEYLPKVTGLHKVTVLFAGQHISKSPFEVSVDKAQGDASKVTAKGPGLEAVGNIANKPTYFDIYTAGAGVGDIGVEVEDPQGKNTVELLVEDKGNQVYRCVYKPMQPGPHVVKIFFAGDTIPKSPFVVQVGEACNPNACRASGRGLQPKGVRIRETTDFKVDTKAAGSGELGVTMKGPKGLEELVKQKDFLDGVYAFEYYPSTPGRYSIAITWGGHHIPKSPFEVQVGPEAGMQKVRAWGPGLHGGIVGRSADFVVESIGSEVGSLGFAIEGPSQAKIEYNDQNDGSCDVKYWPKEPGEYAVHIMCDDEDIKDSPYMAFIHPATGGYNPDLVRAYGPGLEKSGCIVNNLAEFTVDPKDAGKAPLKIFAQDGEGQRIDIQMKNRMDGTYACSYTPVKAIKHTIAVVWGGVNIPHSPYRVNIGQGSHPQKVKVFGPGVERSGLKANEPTHFTVDCTEAGEGDVSVGIKCDARVLSEDEEDVDFDIIHNANDTFTVKYVPPAAGRYTIKVLFASQEIPASPFRVKVDPSHDASKVKAEGPGLSKAGVENGKPTHFTVYTKGAGKAPLNVQFNSPLPGDAVKDLDIIDNYDYSHTVKYTPTQQGNMQVLVTYGGDPIPKSPFTVGVAAPLDLSKIKLNGLENRVEVGKDQEFTVDTRGAGGQGKLDVTILSPSRKVVPCLVTPVTGRENSTAKFIPREEGLYAVDVTYDGHPVPGSPYTVEASLPPDPSKVKAHGPGLEGGLVGKPAEFTIDTKGAGTGGLGLTVEGPCEAKIECSDNGDGTCSVSYLPTKPGEYFVNILFEEVHIPGSPFKADIEMPFDPSKVVASGPGLEHGKVGEAGLLSVDCSEAGPGALGLEAVSDSGTKAEVSIQNNKDGTYAVTYVPLTAGMYTLTMKYGGELVPHFPARVKVEPAVDTSRIKVFGPGIEGKDVFREATTDFTVDSRPLTQVGGDHIKAHIANPSGASTECFVTDNADGTYQVEYTPFEKGLHVVEVTYDDVPIPNSPFKVAVTEGCQPSRVQAQGPGLKEAFTNKPNVFTVVTRGAGIGGLGITVEGPSESKINCRDNKDGSCSAEYIPFAPGDYDVNITYGGAHIPGSPFRVPVKDVVDPSKVKIAGPGLGSGVRARVLQSFTVDSSKAGLAPLEVRVLGPRGLVEPVNVVDNGDGTHTVTYTPSQEGPYMVSVKYADEEIPRSPFKVKVLPTYDASKVTASGPGLSSYGVPASLPVDFAIDARDAGEGLLAVQITDQEGKPKRAIVHDNKDGTYAVTYIPDKTGRYMIGVTYGGDDIPLSPYRIRATQTGDASKCLATGPGIASTVKTGEEVGFVVDAKTAGKGKVTCTVLTPDGTEAEADVIENEDGTYDIFYTAAKPGTYVIYVRFGGVDIPNSPFTVMATDGEVTAVEEAPVTEEAYVPVSDMNGLGFKPFDLVIPFAVRKGEITGEVHMPSGKTATPEIVDNKDGTVTVRYAPTEVGLHEMHIKYMGSHIPESPLQFYVNYPNSGSVSAYGPGLVYGVANKTATFTIVTEDAGEGGLDLAIEGPSKAEISCIDNKDGTCTVTYLPTLPGDYSILVKYNDKHIPGSPFTAKITDDSRRCSQVKLGSAADFLLDISETDLSSLTASIKAPSGRDEPCLLKRLPNNHIGISFIPREVGEHLVSIKKNGNHVANSPVSIMVVQSEIGDARRAKVYGRGLSEGRTFEMSDFIVDTRDAGYGGISLAVEGPSKVDIQTEDLEDGTCKVSYFPTVPGVYIVSTKFADEHVPGSPFTVKISGEGRVKESITRTSRAPSVATVGSICDLNLKIPEINSSDMSAHVTSPSGRVTEAEIVPMGKNSHCVRFVPQEMGVHTVSVKYRGQHVTGSPFQFTVGPLGEGGAHKVRAGGPGLERGEAGVPAEFSIWTREAGAGGLSIAVEGPSKAEITFDDHKNGSCGVSYIAQEPGNYEVSIKFNDEHIPESPYLVPVIAPSDDARRLTVMSLQESGLKVNQPASFAIRLNGAKGKIDAKVHSPSGAVEECHVSELEPDKYAVRFIPHENGVHTIDVKFNGSHVVGSPFKVRVGEPGQAGNPALVSAYGTGLEGGTTA

SEQ ID NO: 7198 - protein, 2359 aa, Artificial Sequence
  Synthetic polypeptide
MPVTEKDLAEDAPWKKIQQNTFTRWCNEHLKCVNKRIGNLQTDLSDGLRLIALLEVLSQKRMYRKYHQRPTFRQMQLENVSVALEFLDRESIKLVSIDSKAIVDGNLKLILGLVWTLILHYSISMPVWEDEGDDDAKKQTPKQRLLGWIQNKIPYLPITNFNQNWQDGKALGALVDSCAPGLCPDWESWDPQKPVDNAREAMQQADDWLGVPQVITPEEIIHPDVDEHSVMTYLSQFPKAKLKPGAPLKPKLNPKKARAYGRGIEPTGNMVKQPAKFTVDTISAGQGDVMVFVEDPEGNKEEAQVTPDSDKNKTYSVEYLPKVTGLHKVTVLFAGQHISKSPFEVSVDKAQGDASKVTAKGPGLEAVGNIANKPTYFDIYTAGAGVGDIGVEVEDPQGKNTVELLVEDKGNQVYRCVYKPMQPGPHVVKIFFAGDTIPKSPFVVQVGEACNPNACRASGRGLQPKGVRIRETTDFKVDTKAAGSGELGVTMKGPKGLEELVKQKDFLDGVYAFEYYPSTPGRYSIAITWGGHHIPKSPFEVQVGPEAGMQKVRAWGPGLHGGIVGRSADFVVESIGSEVGSLGFAIEGPSQAKIEYNDQNDGSCDVKYWPKEPGEYAVHIMCDDEDIKDSPYMAFIHPATGGYNPDLVRAYGPGLEKSGCIVNNLAEFTVDPKDAGKAPLKIFAQDGEGQRIDIQMKNRMDGTYACSYTPVKAIKHTIAVVWGGVNIPHSPYRVNIGQGSHPQKVKVFGPGVERSGLKANEPTHFTVDCTEAGEGDVSVGIKCDARVLSEDEEDVDFDIIHNANDTFTVKYVPPAAGRYTIKVLFASQEIPASPFRVKVDPSHDASKVKAEGPGLSKAGVENGKPTHFTVYTKGAGKAPLNVQFNSPLPGDAVKDLDIIDNYDYSHTVKYTPTQQGNMQVLVTYGGDPIPKSPFTVGVAAPLDLSKIKLNGLENRVEVGKDQEFTVDTRGAGGQGKLDVTILSPSRKVVPCLVTPVTGRENSTAKFIPREEGLYAVDVTYDGHPVPGSPYTVEASLPPDPSKVKAHGPGLEGGLVGKPAEFTIDTKGAGTGGLGLTVEGPCEAKIECSDNGDGTCSVSYLPTKPGEYFVNILFEEVHIPGSPFKADIEMPFDPSKVVASGPGLEHGKVGEAGLLSVDCSEAGPGALGLEAVSDSGTKAEVSIQNNKDGTYAVTYVPLTAGMYTLTMKYGGELVPHFPARVKVEPAVDTSRIKVFGPGIEGKDVFREATTDFTVDSRPLTQVGGDHIKAHIANPSGASTECFVTDNADGTYQVEYTPFEKGLHVVEVTYDDVPIPNSPFKVAVTEGCQPSRVQAQGPGLKEAFTNKPNVFTVVTRGAGIGGLGITVEGPSESKINCRDNKDGSCSAEYIPFAPGDYDVNITYGGAHIPGSPFRVPVKDVVDPSKVKIAGPGLGSGVRARVLQSFTVDSSKAGLAPLEVRVLGPRGLVEPVNVVDNGDGTHTVTYTPSQEGPYMVSVKYADEEIPRSPFKVKVLPTYDASKVTASGPGLSSYGVPASLPVDFAIDARDAGEGLLAVQITDQEGKPKRAIVHDNKDGTYAVTYIPDKTGRYMIGVTYGGDDIPLSPYRIRATQTGDASKCLATGPGIASTVKTGEEVGFVVDAKTAGKGKVTCTVLTPDGTEAEADVIENEDGTYDIFYTAAKPGTYVIYVRFGGVDIPNSPFTVMATDGEVTAVEEAPVNACPPGFRPWVTEEAYVPVSDMNGLGFKPFDLVIPFAVRKGEITGEVHMPSGKTATPEIVDNKDGTVTVRYAPTEVGLHEMHIKYMGSHIPESPLQFYVNYPNSGSVSAYGPGLVYGVANKTATFTIVTEDAGEGGLDLAIEGPSKAEISCIDNKDGTCTVTYLPTLPGDYSILVKYNDKHIPGSPFTAKITDDSRRCSQVKLGSAADFLLDISETDLSSLTASIKAPSGRDEPCLLKRLPNNHIGISFIPREVGEHLVSIKKNGNHVANSPVSIMVVQSEIGDARRAKVYGRGLSEGRTFEMSDFIVDTRDAGYGGISLAVEGPSKVDIQTEDLEDGTCKVSYFPTVPGVYIVSTKFADEHVPEINSSDMSAHVTSPSGRVTEAEIVPMGKNSHCVRFVPQEMGVHTVSVKYRGQHVTGSPFQFTVGPLGEGGAHKVRAGGPGLERGEAGVPAEFSIWTREAGAGGLSIAVEGPSKAEITFDDHKNGSCGVSYIAQEPGNYEVSIKFNDEHIPESPYLVPVIAPSDDARRLTVMSLQESGLKVNQPASFAIRLNGAKGKIDAKVHSPSGAVEECHVSELEPDKYAVRFIPHENGVHTIDVKFNGSHVVGSPFKVRVGEPGQAGNPALVSAYGTGLEGGTTA

SEQ ID NO: 7199 - protein, 2207 aa, Artificial Sequence
  Synthetic polypeptide
MQEHSTRRRSLSLCPDWESWDPQKPVDNAREAMQQADDWLGVPQVITPEEIIHPDVDEHSVMTYLSQFPKAKLKPGAPLKPKLNPKKARAYGRGIEPTGNMVKQPAKFTVDTISAGQGDVMVFVEDPEGNKEEAQVTPDSDKNKTYSVEYLPKVTGLHKVTVLFAGQHISKSPFEVSVDKAQGDASKVTAKGPGLEAVGNIANKPTYFDIYTAGAGVGDIGVEVEDPQGKNTVELLVEDKGNQVYRCVYKPMQPGPHVVKIFFAGDTIPKSPFVVQVGEACNPNACRASGRGLQPKGVRIRETTDFKVDTKAAGSGELGVTMKGPKGLEELVKQKDFLDGVYAFEYYPSTPGRYSIAITWGGHHIPKSPFEVQVGPEAGMQKVRAWGPGLHGGIVGRSADFVVESIGSEVGSLGFAIEGPSQAKIEYNDQNDGSCDVKYWPKEPGEYAVHIMCDDEDIKDSPYMAFIHPATGGYNPDLVRAYGPGLEKSGCIVNNLAEFTVDPKDAGKAPLKIFAQDGEGQRIDIQMKNRMDGTYACSYTPVKAIKHTIAVVWGGVNIPHSPYRVNIGQGSHPQKVKVFGPGVERSGLKANEPTHFTVDCTEAGEGDVSVGIKCDARVLSEDEEDVDFDIIHNANDTFTVKYVPPAAGRYTIKVLFASQEIPASPFRVKVDPSHDASKVKAEGPGLSKAGVENGKPTHFTVYTKGAGKAPLNVQFNSPLPGDAVKDLDIIDNYDYSHTVKYTPTQQGNMQVLVTYGGDPIPKSPFTVGVAAPLDLSKIKLNGLENRVEVGKDQEFTVDTRGAGGQGKLDVTILSPSRKVVPCLVTPVTGRENSTAKFIPREEGLYAVDVTYDGHPVPGSPYTVEASLPPDPSKVKAHGPGLEGGLVGKPAEFTIDTKGAGTGGLGLTVEGPCEAKIECSDNGDGTCSVSYLPTKPGEYFVNILFEEVHIPGSPFKADIEMPFDPSKVVASGPGLEHGKVGEAGLLSVDCSEAGPGALGLEAVSDSGTKAEVSIQNNKDGTYAVTYVPLTAGMYTLTMKYGGELVPHFPARVKVEPAVDTSRIKVFGPGIEGKDVFREATTDFTVDSRPLTQVGGDHIKAHIANPSGASTECFVTDNADGTYQVEYTPFEKGLHVVEVTYDDVPIPNSPFKVAVTEGCQPSRVQAQGPGLKEAFTNKPNVFTVVTRGAGIGGLGITVEGPSESKINCRDNKDGSCSAEYIPFAPGDYDVNITYGGAHIPGSPFRVPVKDVVDPSKVKIAGPGLGSGVRARVLQSFTVDSSKAGLAPLEVRVLGPRGLVEPVNVVDNGDGTHTVTYTPSQEGPYMVSVKYADEEIPRSPFKVKVLPTYDASKVTASGPGLSSYGVPASLPVDFAIDARDAGEGLLAVQITDQEGKPKRAIVHDNKDGTYAVTYIPDKTGRYMIGVTYGGDDIPLSPYRIRATQTGDASKCLATGPGIASTVKTGEEVGFVVDAKTAGKGKVTCTVLTPDGTEAEADVIENEDGTYDIFYTAAKPGTYVIYVRFGGVDIPNSPFTVMVTEEAYVPVSDMNGLGFKPFDLVIPFAVRKGEITGEVHMPSGKTATPEIVDNKDGTVTVRYAPTEVGLHEMHIKYMGSHIPESPLQFYVNYPNSGSVSAYGPGLVYGVANKTATFTIVTEDAGEGGLDLAIEGPSKAEISCIDNKDGTCTVTYLPTLPGDYSILVKYNDKHIPGSPFTAKITDDSRRCSQVKLGSAADFLLDISETDLSSLTASIKAPSGRDEPCLLKRLPNNHIGISFIPREVGEHLVSIKKNGNHVANSPVSIMVVQSEIGDARRAKVYGRGLSEGRTFEMSDFIVDTRDAGYGGISLAVEGPSKVDIQTEDLEDGTCKVSYFPTVPGVYIVSTKFADEHVPGSPFTVKISGEGRVKESITRTSRAPSVATVGSICDLNLKIPEINSSDMSAHVTSPSGRVTEAEIVPMGKNSHCVRFVPQEMGVHTVSVKYRGQHVTGSPFQFTVGPLGEGGAHKVRAGGPGLERGEAGVPAEFSIWTREAGAGGLSIAVEGPSKAEITFDDHKNGSCGVSYIAQEPGNYEVSIKFNDEHIPESPYLVPVIAPSDDARRLTVMSLQESGLKVNQPASFAIRLNGAKGKIDAKVHSPSGAVEECHVSELEPDKYAVRFIPHENGVHTIDVKFNGSHVVGSPFKVRVGEPGQAGNPALVSAYGTGLEGGTTA

SEQ ID NO: 7200 - protein, 2220 aa, Artificial Sequence
  Synthetic polypeptide
MQEHSTRRRSLSLCPDWESWDPQKPVDNAREAMQQADDWLGVPQVITPEEIIHPDVDEHSVMTYLSQFPKAKLKPGAPLKPKLNPKKARAYGRGIEPTGNMVKQPAKFTVDTISAGQGDVMVFVEDPEGNKEEAQVTPDSDKNKTYSVEYLPKVTGLHKVTVLFAGQHISKSPFEVSVDKAQGDASKVTAKGPGLEAVGNIANKPTYFDIYTAGAGVGDIGVEVEDPQGKNTVELLVEDKGNQVYRCVYKPMQPGPHVVKIFFAGDTIPKSPFVVQVGEACNPNACRASGRGLQPKGVRIRETTDFKVDTKAAGSGELGVTMKGPKGLEELVKQKDFLDGVYAFEYYPSTPGRYSIAITWGGHHIPKSPFEVQVGPEAGMQKVRAWGPGLHGGIVGRSADFVVESIGSEVGSLGFAIEGPSQAKIEYNDQNDGSCDVKYWPKEPGEYAVHIMCDDEDIKDSPYMAFIHPATGGYNPDLVRAYGPGLEKSGCIVNNLAEFTVDPKDAGKAPLKIFAQDGEGQRIDIQMKNRMDGTYACSYTPVKAIKHTIAVVWGGVNIPHSPYRVNIGQGSHPQKVKVFGPGVERSGLKANEPTHFTVDCTEAGEGDVSVGIKCDARVLSEDEEDVDFDIIHNANDTFTVKYVPPAAGRYTIKVLFASQEIPASPFRVKVDPSHDASKVKAEGPGLSKAGVENGKPTHFTVYTKGAGKAPLNVQFNSPLPGDAVKDLDIIDNYDYSHTVKYTPTQQGNMQVLVTYGGDPIPKSPFTVGVAAPLDLSKIKLNGLENRVEVGKDQEFTVDTRGAGGQGKLDVTILSPSRKVVPCLVTPVTGRENSTAKFIPREEGLYAVDVTYDGHPVPGSPYTVEASLPPDPSKVKAHGPGLEGGLVGKPAEFTIDTKGAGTGGLGLTVEGPCEAKIECSDNGDGTCSVSYLPTKPGEYFVNILFEEVHIPGSPFKADIEMPFDPSKVVASGPGLEHGKVGEAGLLSVDCSEAGPGALGLEAVSDSGTKAEVSIQNNKDGTYAVTYVPLTAGMYTLTMKYGGELVPHFPARVKVEPAVDTSRIKVFGPGIEGKDVFREATTDFTVDSRPLTQVGGDHIKAHIANPSGASTECFVTDNADGTYQVEYTPFEKGLHVVEVTYDDVPIPNSPFKVAVTEGCQPSRVQAQGPGLKEAFTNKPNVFTVVTRGAGIGGLGITVEGPSESKINCRDNKDGSCSAEYIPFAPGDYDVNITYGGAHIPGSPFRVPVKDVVDPSKVKIAGPGLGSGVRARVLQSFTVDSSKAGLAPLEVRVLGPRGLVEPVNVVDNGDGTHTVTYTPSQEGPYMVSVKYADEEIPRSPFKVKVLPTYDASKVTASGPGLSSYGVPASLPVDFAIDARDAGEGLLAVQITDQEGKPKRAIVHDNKDGTYAVTYIPDKTGRYMIGVTYGGDDIPLSPYRIRATQTGDASKCLATGPGIASTVKTGEEVGFVVDAKTAGKGKVTCTVLTPDGTEAEADVIENEDGTYDIFYTAAKPGTYVIYVRFGGVDIPNSPFTVMATDGEVTAVEEAPVTEEAYVPVSDMNGLGFKPFDLVIPFAVRKGEITGEVHMPSGKTATPEIVDNKDGTVTVRYAPTEVGLHEMHIKYMGSHIPESPLQFYVNYPNSGSVSAYGPGLVYGVANKTATFTIVTEDAGEGGLDLAIEGPSKAEISCIDNKDGTCTVTYLPTLPGDYSILVKYNDKHIPGSPFTAKITDDSRRCSQVKLGSAADFLLDISETDLSSLTASIKAPSGRDEPCLLKRLPNNHIGISFIPREVGEHLVSIKKNGNHVANSPVSIMVVQSEIGDARRAKVYGRGLSEGRTFEMSDFIVDTRDAGYGGISLAVEGPSKVDIQTEDLEDGTCKVSYFPTVPGVYIVSTKFADEHVPGSPFTVKISGEGRVKESITRTSRAPSVATVGSICDLNLKIPEINSSDMSAHVTSPSGRVTEAEIVPMGKNSHCVRFVPQEMGVHTVSVKYRGQHVTGSPFQFTVGPLGEGGAHKVRAGGPGLERGEAGVPAEFSIWTREAGAGGLSIAVEGPSKAEITFDDHKNGSCGVSYIAQEPGNYEVSIKFNDEHIPESPYLVPVIAPSDDARRLTVMSLQESGLKVNQPASFAIRLNGAKGKIDAKVHSPSGAVEECHVSELEPDKYAVRFIPHENGVHTIDVKFNGSHVVGSPFKVRVGEPGQAGNPALVSAYGTGLEGGTTA

SEQ ID NO: 7201 - protein, 98 aa, Artificial Sequence
  Synthetic polypeptide
MSFRFGQHLIKPSVVFLKTELSFALVNRKPVVPGHVLVCPLRPVERFHDLRPDEVADLFQTTQRVGTVVEKHFHGTSLTFSMQDGPEAGQTVKCMPII

SEQ ID NO: 7202 - protein, 208 aa, Artificial Sequence
  Synthetic polypeptide
MRRLLEPCWWILFLKITSSVLHYVVCFPALTEGYVGALHENRHGSAVQIRRRKASGDPYWAYSGAYGPEHWVTSSVSCGGRHQSPIDILDQYARVGEEYQELQLDGFDNESSNKTWMKNTGKTVAILLKDDYFVSGAGLPGRFKAEKVEFHWGHSNGSAGSEHSINGRRFPVEMQIFFYNPDDFDSFQTAISENRIIGAMAIFFQDPN

SEQ ID NO: 7203 - protein, 78 aa, Artificial Sequence
  Synthetic polypeptide
MDPVSQLASAGTFRVLKEPLAFLRALELLFAIFAFATCGGYSGGLRLSVDCVNKTESNLSIDIAFAYPFSPQNVQHQE

SEQ ID NO: 7204 - protein, 58 aa, Artificial Sequence
  Synthetic polypeptide
MCMVIFAPLFAIFAFATCGGYSGGLRLSVDCVNKTESNLSIDIAFAYPFSPQNVQHQE

SEQ ID NO: 7205 - protein, 69 aa, Artificial Sequence
  Synthetic polypeptide
MCMVIFAPHNEECKSHFHLLFAIFAFATCGGYSGGLRLSVDCVNKTESNLSIDIAFAYPFSPQNVQHQE

SEQ ID NO: 7206 - protein, 132 aa, Artificial Sequence
  Synthetic polypeptide
MSERAADDVRGEPRRAAAAAGGAAAAAARQQQQQQQQQQPPPPQPQRQQHPPPPPRRTRPEDGGPGAASTSAAAMATVGERRPLPSPEVMLGQSWNLWVEASKLPGKDGTELDESFKEFGKNREVMGLCREG

SEQ ID NO: 7207 - protein, 59 aa, Artificial Sequence
  Synthetic polypeptide
MVTVMPLEMEKTISKLMFDFQRNSTSDDDSGCALEEYAWVPPGLKPEQCGPGKPKYWAP

SEQ ID NO: 7208 - protein, 115 aa, Artificial Sequence
  Synthetic polypeptide
MFSRSSRKRLSSRSLTGLGRIERGQPCNACGDQCPGFALHKWRKICLHCKCPQEEHMVTVMPLEMEKTISKLMFDFQRNSTSDDDSGCALEEYAWVPPGLKPEQCGPGKPKYWAP

SEQ ID NO: 7209 - protein, 151 aa, Artificial Sequence
  Synthetic polypeptide
MFSRSSRKRLSSRSVSVPRSSGADRRAPPAGRERPRAAPLRPAAAHLWPQLTGLGRIERGQPCNACGDQCPGFALHKWRKICLHCKCPQEEHMVTVMPLEMEKTISKLMFDFQRNSTSDDDSGCALEEYAWVPPGLKPEQCGPGKPKYWAP

SEQ ID NO: 7210 - protein, 284 aa, Artificial Sequence
  Synthetic polypeptide
MDRPGFVAALVAGGVAGVSVDLILFPLDTIKTRLQSPQGFSKAGGFHGIYAGVPSAAIGSFPNAAAFFITYEYVKWFLHADSSSYLTPMKHMLAASAGEVVACLIRVPSEVVKQRAQVSASTRTFQIFSNILYEEGIQGLYRGYKSTVLREIPFSLVQFPLWESLKALWSWRQDHVVDSWQSAVCGAFAGGFAAAVTTPLDVAKTRITLAKAGSSTADGNVLSVLHGVWRSQGLAGVPGHPGVLLEMNVVLMPTINIHSLACGSRSYFNFQVLLNFIRLQLHQQ

SEQ ID NO: 7211 - protein, 196 aa, Artificial Sequence
  Synthetic polypeptide
MKHMLAASAGEVVACLIRVPSEVVKQRAQVSASTRTFQIFSNILYEEGIQGLYRGYKSTVLREIPFSLVQFPLWESLKALWSWRQDHVVDSWQSAVCGAFAGGFAAAVTTPLDVAKTRITLAKAGSSTADGNVLSVLHGVWRSQGLAGVPGHPGVLLEMNVVLMPTINIHSLACGSRSYFNFQVLLNFIRLQLHQQ

SEQ ID NO: 7212 - protein, 303 aa, Artificial Sequence
  Synthetic polypeptide
MLMLFVFGVLLHEVSLSGQNEAPPNTHSIPGEPLYNYASIRLPEEHIPFFLHNNRHIATVCRKDSLCPYKKHLEKLKYCWGYEKSCKPEFRFGYPVCSYVDMGWTDTLESAEDIFWKQADFGYARERLEEMHVLCQPKETSDSSLVCSRYLQYCRATNLYLDLRNIKRNHDRFKEDFFQSGEIGGHCKLDIRTLTSEGQRKSPLQSWFAELQSYTQLNFRPIEDAKCDIVIEKPTYFMKLDAGVNMYHHFCDFINLYITQHVNNSFSTDVYIVMWDTTHRWKGLALSQMRLWTVDFWVSAEMS

SEQ ID NO: 7213 - protein, 202 aa, Artificial Sequence
  Synthetic polypeptide
MGWTDTLESAEDIFWKQADFGYARERLEEMHVLCQPKETSDSSLVCSRYLQYCRATNLYLDLRNIKRNHDRFKEDFFQSGEIGGHCKLDIRTLTSEGQRKSPLQSWFAELQSYTQLNFRPIEDAKCDIVIEKPTYFMKLDAGVNMYHHFCDFINLYITQHVNNSFSTDVYIVMWDTTHRWKGLALSQMRLWTVDFWVSAEMS

SEQ ID NO: 7214 - protein, 291 aa, Artificial Sequence
  Synthetic polypeptide
MLMLFVFGVLLHEVSLSGQNEAPPNTHSIPGEPLYNYASIRLPEEHIPFFLHNNRHIATVCRKDSLCPYKKHLEKLKYCWGYEKSCKPEFRFGYPVCSYVDMGWTDTLESAEDIFWKQADFGYARERLEEMHVLCQPKETSDSSLVCSRYLQYCRATNLYLDLRNIKRNHDRFKEDFFQSGEIGGHCKLDIRTLTSEGQRKSPLQSWFAELQSYTQLNFRPIEDAKCDIVIEKPTYFMKLDAGVNMYHHFCDFINLYITQHVNNSFSTDVYIVMWDTSRVYLYQQTENGLI

SEQ ID NO: 7215 - protein, 190 aa, Artificial Sequence
  Synthetic polypeptide
MGWTDTLESAEDIFWKQADFGYARERLEEMHVLCQPKETSDSSLVCSRYLQYCRATNLYLDLRNIKRNHDRFKEDFFQSGEIGGHCKLDIRTLTSEGQRKSPLQSWFAELQSYTQLNFRPIEDAKCDIVIEKPTYFMKLDAGVNMYHHFCDFINLYITQHVNNSFSTDVYIVMWDTSRVYLYQQTENGLI

SEQ ID NO: 7216 - protein, 315 aa, Artificial Sequence
  Synthetic polypeptide
MLMLFVFGVLLHEVSLSGQNEAPPNTHSIPGEPLYNYASIRLPEEHIPFFLHNNRHIATVCRKDSLCPYKKHLEKLKYCWGYEKSCKPEFRFGYPVCSYVDMGWTDTLESAEDIFWKQADFGYARERLEEMHVLCQPKETSDSSLVCSRYLQYCRATNLYLDLRNIKRNHDRFKEDFFQSGEIGGHCKLDIRTLTSEGQRKSPLQSWFAELQSYTQLNFRPIEDAKCDIVIEKPTYFMKLDAGVNMYHHFCDFINLYITQHVNNSFSTDVYIVMWDTGFHFCFFLIFPCCHHVRSAFTSHYDSEASPAMWNCKSS

SEQ ID NO: 7217 - protein, 214 aa, Artificial Sequence
  Synthetic polypeptide
MGWTDTLESAEDIFWKQADFGYARERLEEMHVLCQPKETSDSSLVCSRYLQYCRATNLYLDLRNIKRNHDRFKEDFFQSGEIGGHCKLDIRTLTSEGQRKSPLQSWFAELQSYTQLNFRPIEDAKCDIVIEKPTYFMKLDAGVNMYHHFCDFINLYITQHVNNSFSTDVYIVMWDTGFHFCFFLIFPCCHHVRSAFTSHYDSEASPAMWNCKSS

SEQ ID NO: 7218 - protein, 215 aa, Artificial Sequence
  Synthetic polypeptide
MLMLFVFGVLLHEVSLSGQNEAPPNTHSIPGEPLYNYASIRLPEEHIPFFLHNNRHIATVCRKDSLCPYKKHLEKLKYCWGYEKSCKPEFRFGYPVCSYVDMGWTDTLESAEDIFWKQADFGYARERLEEMHVLCQPKETSDSSLVCSRYLQYCRATNLYLDLRNIKRNHDRFKEDFFQSGEIGGHCKLDIRTLTSEGQRKSPLQSCVFHLPPWF

SEQ ID NO: 7219 - protein, 43 aa, Artificial Sequence
  Synthetic polypeptide
MCLSPPAMVLRPPQPCGTVSPVKLLFLPSLRVCLYQQCENWLI

SEQ ID NO: 7220 - protein, 114 aa, Artificial Sequence
  Synthetic polypeptide
MGWTDTLESAEDIFWKQADFGYARERLEEMHVLCQPKETSDSSLVCSRYLQYCRATNLYLDLRNIKRNHDRFKEDFFQSGEIGGHCKLDIRTLTSEGQRKSPLQSCVFHLPPWF

SEQ ID NO: 7221 - protein, 206 aa, Artificial Sequence
  Synthetic polypeptide
MLMLFVFGVLLHEVSLSGQNEAPPNTHSIPGEPLYNYASIRLPEEHIPFFLHNNRHIATVCRKDSLCPYKKHLEKLKYCWGYEKSCKPEFRFGYPVCSYVDMGWTDTLESAEDIFWKQADFGYARERLEEMHVLCQPKETSDSSLVCSRYLQYCRATNLYLDLRNIKRNHDRFKEDFFQSGEIGGHCKLDIRTLTSEGQRKSPLQS

SEQ ID NO: 7222 - protein, 44 aa, Artificial Sequence
  Synthetic polypeptide
MKCLSPPAMVLRPPQPCGTVSPVKLLFLPSLRVCLYQQCENWLI

SEQ ID NO: 7223 - protein, 105 aa, Artificial Sequence
  Synthetic polypeptide
MGWTDTLESAEDIFWKQADFGYARERLEEMHVLCQPKETSDSSLVCSRYLQYCRATNLYLDLRNIKRNHDRFKEDFFQSGEIGGHCKLDIRTLTSEGQRKSPLQS

SEQ ID NO: 7224 - protein, 138 aa, Artificial Sequence
  Synthetic polypeptide
MFPVFSGCFQELQEKNKSLELVSFEEVAVHFTWEEWQDLDDAQRTLYRDVMLETYSSLVSLGHYITKPEMIFKLEQGAEPWIVEETPNLRLSGTETMVTKSWNELCEPLEAFIQCCFGELVIEKQQTMAKTSCPFCIP

SEQ ID NO: 7225 - protein, 88 aa, Artificial Sequence
  Synthetic polypeptide
MLETYSSLVSLGHYITKPEMIFKLEQGAEPWIVEETPNLRLSGTETMVTKSWNELCEPLEAFIQCCFGELVIEKQQTMAKTSCPFCIP

SEQ ID NO: 7226 - protein, 131 aa, Artificial Sequence
  Synthetic polypeptide
MLETYNSLVSLQELVSFEEVAVHFTWEEWQDLDDAQRTLYRDVMLETYSSLVSLGHYITKPEMIFKLEQGAEPWIVEETPNLRLSGTETMVTKSWNELCEPLEAFIQCCFGELVIEKQQTMAKTSCPFCIP

SEQ ID NO: 7227 - protein, 304 aa, Artificial Sequence
  Synthetic polypeptide
MIAEPAHFYLFGLICLCSGSRLRQEDFPPRIVEHPSDLIVSKGEPATLNCKAEGRPTPTIEWYKGGERVETDKDDPRSHRMLLPSGSLFFLRIVHGRKSRPDEGVYVCVARNYLGEAVSHNASLEVAILRDDFRQNPSDVMVAVGEPAVMECQPPRGHPEPTISWKKDGSPLDDKDERITIRGGKLMITYTRKSDAGKYVCVGTNMVGERESEVAELTVLERPSFVKRPSNLAVTVDDSAEFKCEARGDPVPTVRWRKDDGELPKSRGAFRHDCKFPEVSPAMWNCESIKPLSFINYPVSGISS

SEQ ID NO: 7228 - protein, 343 aa, Artificial Sequence
  Synthetic polypeptide
MKWKHVPFLVMISLLSLSPNHLFLAQLIPDPEDVERGNDHGTPIPTSDNDDNSLGYTGSRLRQEDFPPRIVEHPSDLIVSKGEPATLNCKAEGRPTPTIEWYKGGERVETDKDDPRSHRMLLPSGSLFFLRIVHGRKSRPDEGVYVCVARNYLGEAVSHNASLEVAILRDDFRQNPSDVMVAVGEPAVMECQPPRGHPEPTISWKKDGSPLDDKDERITIRGGKLMITYTRKSDAGKYVCVGTNMVGERESEVAELTVLERPSFVKRPSNLAVTVDDSAEFKCEARGDPVPTVRWRKDDGELPKSRGAFRHDCKFPEVSPAMWNCESIKPLSFINYPVSGISS

SEQ ID NO: 7229 - protein, 31 aa, Artificial Sequence
  Synthetic polypeptide
MIWKRSAVLRFYSVCGLLLQEREREKREEEE

SEQ ID NO: 7230 - protein, 30 aa, Artificial Sequence
  Synthetic polypeptide
MIWKRSAVLRFYSVCGLLLQEREREKRGRG

SEQ ID NO: 7231 - protein, 69 aa, Artificial Sequence
  Synthetic polypeptide
MLLLMSQCRKQFPPLCSAARRKQHCLGTRIITKNFSVNLSVCLLQLPVCPLWYLWKPVVGKSLLRKWAL

SEQ ID NO: 7232 - protein, 14 aa, Artificial Sequence
  Synthetic polypeptide
CWNVTKNSNNNKRR

SEQ ID NO: 7233 - protein, 469 aa, Artificial Sequence
  Synthetic polypeptide
MDSLAESRWPPGLAVMKTIDDLLRCGICFEYFNIAMIIPQCSHNYCSLCIRKFLSYKTQCPTCCVTVTEPDLKNNRILDELVKSLNFARNHLLQFALESPAKSPASSSSKNLAVKVYTPVASRQSLKQGSRLMDNFLIREMSGSTSELLIKENKSKFSPQKEASPAAKTKETRSVEEIAPDPSEAKRPEPPSTSTLKQVTKVDCPVCGVNIPESHINKHLDSCLSREEKKESLRSSVHKRKPLPKTVYNLLSDRDLKKKLKEHGLSIQGNKQQLIKRHQEFVHMYNAQCDALHPKSAAEIVREIENIEKTRMRLEASKLNESVMVFTKDQTEKEIDEIHSKYRKKHKSEFQLLVDQARKGYKKIAGMSQKTVTITKEDESTEKLSSVCMGQEDNMTSVTNHFSQSKLDSPEELEPDREEDSSSCIDIQEVLSSSESDSCNSSSSDIIRDLLEEEEAWEASHNTWHMARP

SEQ ID NO: 7234 - protein, 86 aa, Artificial Sequence
  Synthetic polypeptide
LSSVCMGQEDNMTSVTNHFSQSKLDSPEELEPDREEDSSSCIDIQEVLSSSESDSCNSSSSDIIRDLLEEEEAWEASHNTWHMARP

SEQ ID NO: 7235 - protein, 230 aa, Artificial Sequence [sequence omitted]

SEQ ID NO: 7236 - protein, 32 aa, Artificial Sequence
  Synthetic polypeptide
MVGLDNAGKTATAKGIQGVHGKIVFCKTGPWC

SEQ ID NO: 7237 - protein, 57 aa, Artificial Sequence
  Synthetic polypeptide
MFSLMASCCGWFKRWREPVRKVTLLMVGLDNAGKTATAKGIQGVHGKIVFCKTGPWC

SEQ ID NO: 7238 - protein, 73 aa, Artificial Sequence
  Synthetic polypeptide
MVGLDNAGKTATAKGIQGEMGSPYVAQAGLECLASSYSSALASKSAGITGMSHHAQPGQMGPSSCRKTSLGSH

SEQ ID NO: 7239 - protein, 98 aa, Artificial Sequence
  Synthetic polypeptide
MFSLMASCCGWFKRWREPVRKVTLLMVGLDNAGKTATAKGIQGEMGSPYVAQAGLECLASSYSSALASKSAGITGMSHHAQPGQMGPSSCRKTSLGSH

SEQ ID NO: 7240 - protein, 103 aa, Artificial Sequence
  Synthetic polypeptide
MFSLMASCCGWFKRWREPVRKVTLLMVGLDNAGKTATAKGIQGGLFLVEMGSPYVAQAGLECLASSYSSALASKSAGITGMSHHAQPGQMGPSSCRKTSLGSH

SEQ ID NO: 7241 - protein, 72 aa, Artificial Sequence
  Synthetic polypeptide
MVGLDNAGKTATAKGIQGEMGSPYVAQAGLECLASSYSSALASKSAGITGMSHHAQPGQSMEKLSSAKLVPG

SEQ ID NO: 7242 - protein, 97 aa, Artificial Sequence
  Synthetic polypeptide
MFSLMASCCGWFKRWREPVRKVTLLMVGLDNAGKTATAKGIQGEMGSPYVAQAGLECLASSYSSALASKSAGITGMSHHAQPGQSMEKLSSAKLVPG

SEQ ID NO: 7243 - protein, 102 aa, Artificial Sequence
  Synthetic polypeptide
MFSLMASCCGWFKRWREPVRKVTLLMVGLDNAGKTATAKGIQGGLFLVEMGSPYVAQAGLECLASSYSSALASKSAGITGMSHHAQPGQSMEKLSSAKLVPG

SEQ ID NO: 7244 - protein, 250 aa, Artificial Sequence
  Synthetic polypeptide
MEETKEAMSEMLRHPRISGKPILVLANKQDKEGALGEADVIECLSLEKLVNEHKCLCQIEPCSAISGYGKKIDKSIKKGLYWLLHVIARDFDALNERIQKETTEQRALEEQEKQERAERVRKLREERKQNEQEQAELDGTSGLAELDPEPTNPFQPIASVIIENEGKLEREKKNQKMEKDSDGCHLKHKMEHEQIETQGQVNHNGQKNNEFGLVENYKEALTQQLKNEDETDRPSLESVSLSCRAWTVLP

SEQ ID NO: 7245 - protein, 246 aa, Artificial Sequence
  Synthetic polypeptide
MFSLMASCCGWFKRWREPVRLANKQDKEGALGEADVIECLSLEKLVNEHKCLCQIEPCSAISGYGKKIDKSIKKGLYWLLHVIARDFDALNERIQKETTEQRALEEQEKQERAERVRKLREERKQNEQEQAELDGTSGLAELDPEPTNPFQPIASVIIENEGKLEREKKNQKMEKDSDGCHLKHKMEHEQIETQGQVNHNGQKNNEFGLVENYKEALTQQLKNEDETDRPSLESVSLSCRAWTVLP

SEQ ID NO: 7246 - protein, 353 aa, Artificial Sequence
  Synthetic polypeptide
MFSLMASCCGWFKRWREPVRKVTLLMVGLDNAGKTATAKGIQGEYPEDVAPTVGFSKINLRQGKFEVTIFDLGGGIRIRGIWKNYYAESYGVIFVVDSSDEERMEETKEAMSEMLRHPRISGKPILVLANKQDKEGALGEADVIECLSLEKLVNEHKCLCQIEPCSAISGYGKKIDKSIKKGLYWLLHVIARDFDALNERIQKETTEQRALEEQEKQERAERVRKLREERKQNEQEQAELDGTSGLAELDPEPTNPFQPIASVIIENEGKLEREKKNQKMEKDSDGCHLKHKMEHEQIETQGQVNHNGQKNNEFGLVENYKEALTQQLKNEDETDRPSLESVSLSCRAWTVLP

SEQ ID NO: 7247 - protein, 74 aa, Artificial Sequence
  Synthetic polypeptide
MEKDSDGCHLKHKMEHEQIETQGQVNHNGQKNNEFGLVENYKEALTQQLKNEDETDRPSLESVSLSCRAWTVLP

SEQ ID NO: 7248 - protein, 276 aa, Artificial Sequence
  Synthetic polypeptide
MEETKEAMSEMLRHPRISGKPILVLANKQDKEGALGEADVIECLSLEKLVNEHKCLCQIEPCSAISGYGKKIDKSIKKGLYWLLHVIARDFDALNERIQKETTEQRALEEQEKQERAERVRKLREERKQNEQEQAELDGTSGLAELDPEPTNPFQPIASVIIENEGKLEREKKNQKMEKDSDGCHLKHKMEHEQIETQGQVNHNGQKNNEFGLVENYKEALTQQLKNEDETDRPSLESGSEQRLCLAAHRLGCEEPLCPAAPSGKCGAPLPGCHPV

SEQ ID NO: 7249 - protein, 272 aa, Artificial Sequence
  Synthetic polypeptide
MFSLMASCCGWFKRWREPVRLANKQDKEGALGEADVIECLSLEKLVNEHKCLCQIEPCSAISGYGKKIDKSIKKGLYWLLHVIARDFDALNERIQKETTEQRALEEQEKQERAERVRKLREERKQNEQEQAELDGTSGLAELDPEPTNPFQPIASVIIENEGKLEREKKNQKMEKDSDGCHLKHKMEHEQIETQGQVNHNGQKNNEFGLVENYKEALTQQLKNEDETDRPSLESGSEQRLCLAAHRLGCEEPLCPAAPSGKCGAPLPGCHPV

SEQ ID NO: 7250 - protein, 379 aa, Artificial Sequence
  Synthetic polypeptide
MFSLMASCCGWFKRWREPVRKVTLLMVGLDNAGKTATAKGIQGEYPEDVAPTVGFSKINLRQGKFEVTIFDLGGGIRIRGIWKNYYAESYGVIFVVDSSDEERMEETKEAMSEMLRHPRISGKPILVLANKQDKEGALGEADVIECLSLEKLVNEHKCLCQIEPCSAISGYGKKIDKSIKKGLYWLLHVIARDFDALNERIQKETTEQRALEEQEKQERAERVRKLREERKQNEQEQAELDGTSGLAELDPEPTNPFQPIASVIIENEGKLEREKKNQKMEKDSDGCHLKHKMEHEQIETQGQVNHNGQKNNEFGLVENYKEALTQQLKNEDETDRPSLESGSEQRLCLAAHRLGCEEPLCPAAPSGKCGAPLPGCHPV

SEQ ID NO: 7251 - protein, 100 aa, Artificial Sequence
  Synthetic polypeptide
MEKDSDGCHLKHKMEHEQIETQGQVNHNGQKNNEFGLVENYKEALTQQLKNEDETDRPSLESGSEQRLCLAAHRLGCEEPLCPAAPSGKCGAPLPGCHPV

SEQ ID NO: 7252 - protein, 388 aa, Artificial Sequence
  Synthetic polypeptide
MSIAIPLGVTTSDTSYSDMAAGSDPESVEASPAVNEKSVYSTHNYGTTQRHGCRGLPYATIIPRSDLNGLPSPVEERCGDSPNSEGETVPTWCPCGLSQDGFLLNCDKCRGMSRGKVIRLHRRKQDNISGGDSSATESWDEELSPSTVLYTATQHTPTSITLTVRRTKPKKRKKSPEKGRAAPKTKKIKNSPSEAQNLDENTTEGWENRIRLWTDQYEEAFTNQYSADVQNALEQHLHSSKEFVGKPTILDTINKTELACNNTVIGSQMQLQLGRVTRVQKHRKILRAARDLALDTLIIEYRGKVMLRQQFEVNGHFFKKPYPFVLFYSKFNGVEMCVDARTFGNDARFIRRSCTPNAEVLRRLRQENCLNPGGRGCREPRSRHSTPA

SEQ ID NO: 7253 - protein, 290 aa, Artificial Sequence
  Synthetic polypeptide
MSRGKVIRLHRRKQDNISGGDSSATESWDEELSPSTVLYTATQHTPTSITLTVRRTKPKKRKKSPEKGRAAPKTKKIKAFREGSRKSLRMKNSPSEAQNLDENTTEGWENRIRLWTDQYEEAFTNQYSADVQNALEQHLHSSKEFVGKPTILDTINKTELACNNTVIGSQMQLQLGRVTRVQKHRKILRAARDLALDTLIIEYRGKVMLRQQFEVNGHFFKKPYPFVLFYSKFNGVEMCVDARTFGNDARFIRRSCTPNAEVLRRLRQENCLNPGGRGCREPRSRHSTPA

SEQ ID NO: 7254 - protein, 407 aa, Artificial Sequence
  Synthetic polypeptide
MSIAIPLGVTTSDTSYSDMAAGSDPESVEASPAVNEKSVYSTHNYGTTQRHGCRGLPYADHNYGAPPPPTPPASPPVQTIIPRSDLNGLPSPVEERCGDSPNSEGETVPTWCPCGLSQDGFLLNCDKCRGMSRGKVIRLHRRKQDNISGGDSSATESWDEELSPSTVLYTATQHTPTSITLTVRRTKPKKRKKSPEKGRAAPKTKKIKNSPSEAQNLDENTTEGWENRIRLWTDQYEEAFTNQYSADVQNALEQHLHSSKEFVGKPTILDTINKTELACNNTVIGSQMQLQLGRVTRVQKHRKILRAARDLALDTLIIEYRGKVMLRQQFEVNGHFFKKPYPFVLFYSKFNGVEMCVDARTFGNDARFIRRSCTPNAEVLRRLRQENCLNPGGRGCREPRSRHSTPA

SEQ ID NO: 7255 - protein, 11 aa, Artificial Sequence
  Synthetic polypeptide
CRDVCGCPYFR

SEQ ID NO: 7256 - protein, 10 aa, Artificial Sequence
  Synthetic polypeptide
RDVCGCPYFR

SEQ ID NO: 7257 - protein, 389 aa, Artificial Sequence
  Synthetic polypeptide
MQFPSPPAARSSPAPQAASSSEAAAPATGQPGPSCPVPGTSRRGRPGTPPAGRVEEEEEEEEEDVDKDPHPTQNTCLRCRHFSLRERKREPRRTMGGCEVREFLLQFGFFLPLLTAWPGDCSHVSNNQVVLLDTTTVLGELGWKTYPLNGWDAITEMDEHNRPIHTYQVCNVMEPNQNNWLRTNWISRDAAQKIYVEMKFTLRDCNSIPWVLGTCKETFNLFYMESDESHGIKFKPNQYTKIDTIAADESFTQMDLGDRILKLNTEIREVGPIERKGFYLAFQDIGACIALVSVRVFYKKCPFTVRNLAMFPDTIPRVDSSSLVEVRGSCVKSAEERDTPKLYCGADGDWLVPLGRCICSTGYEEIEGSCHAYLIAEWDHVTCFWILEC

SEQ ID NO: 7258 - protein, 295 aa, Artificial Sequence
  Synthetic polypeptide
MGGCEVREFLLQFGFFLPLLTAWPGDCSHVSNNQVVLLDTTTVLGELGWKTYPLNGWDAITEMDEHNRPIHTYQVCNVMEPNQNNWLRTNWISRDAAQKIYVEMKFTLRDCNSIPWVLGTCKETFNLFYMESDESHGIKFKPNQYTKIDTIAADESFTQMDLGDRILKLNTEIREVGPIERKGFYLAFQDIGACIALVSVRVFYKKCPFTVRNLAMFPDTIPRVDSSSLVEVRGSCVKSAEERDTPKLYCGADGDWLVPLGRCICSTGYEEIEGSCHAYLIAEWDHVTCFWILEC

SEQ ID NO: 7259 - protein, 35 aa, Artificial Sequence
  Synthetic polypeptide
GRGGGGRRRGQGPPSYPEHLPALPPLLFKGEEKRA

SEQ ID NO: 7260 - protein, 162 aa, Artificial Sequence
  Synthetic polypeptide
MLGAVEGPRWKQAEDIRDIYDFRDVLGTGAFSEVILAEDKRTQKLVAIKCIAKEALEGKEGSMENEIAVLHKIKHPNIVALDDIYESGGHLYLIMQLVSGGELFDRIVEKGFYTERDASRLIFQVLDAVKYLHDLGIVHRDLKEKGTWGVTCLVLNSGSATA

SEQ ID NO: 7261 - protein, 118 aa, Artificial Sequence
  Synthetic polypeptide
MLGAVEGPRWKQAEDIRDIYDFRDVLGTIKHPNIVALDDIYESGGHLYLIMQLVSGGELFDRIVEKGFYTERDASRLIFQVLDAVKYLHDLGIVHRDLKEKGTWGVTCLVLNSGSATA

SEQ ID NO: 7262 - protein, 491 aa, Artificial Sequence
  Synthetic polypeptide
MALQLGRLSSGPCWLVARGGCGGPRAWSQCGGGGLRAWSQRSAAGRVCRPPGPAGTEQSRGLGHGSTSRGGPWVGTGLAAALAGLVGLATAAFGHVQRAEMLPKTSGTRATSLGRPEEEEDELAHRCSSFMAPPVTDLGELRRRPGDMKTKMELLILETQAQVCQALAQVDGGANFSVDRWERKEGGGGISCVLQDGCVFEKAGVSISVVHGNLSEEAAKQMRSRGKVLKTKDGKLPFCAMGVSSVIHPKNPHAPTIHFNYRYFEVEEADGNKQWWFGGGCDLTPTYLNQEDAVHFHRTLKEACDQHGPDLYPKFKKWCDDYFFIAHRGERRGIGGIFFDDLDSPSKEEVFRFVQSCARAVVPSYIPLVKKHCDDSFTPQEKLWQQLRRGRYVEFNLLYDRGTKFGLFTPGSRIESILMSLPLTARWEYMHSPSENSKEAEILEVLRHPRDWGVEEEKVKKSKEGGRMKKCWEEEGETREKRWRTGQKKRR

SEQ ID NO: 7263 - protein, 38 aa, Artificial Sequence
  Synthetic polypeptide
MNRLRNAKIYVERAVKHQTSGLPPLWFPAMSHSNQGAW

SEQ ID NO: 7264 - protein, 181 aa, Artificial Sequence
  Synthetic polypeptide
MQGPDAPLLLSARELGPGRRGSASWYRQEGGAVCNWLRKPQPLEPRTSFPSARRSEFRPPRRLPWAGPASAQSEEGHAGGRCQAGSPAPARRLSGAFKTLVPGTHAQGASDTHPLGPPHTPVLDPSPQDGFPVLWRGSSKASHMNRLRNAKIYVERAVKHQTSGLPPLWFPAMSHSNQGAW

SEQ ID NO: 7265 - protein, 30 aa, Artificial Sequence
  Synthetic polypeptide
AQKRQNLRGESCQAPNFWAPSTLVPCDVPL

SEQ ID NO: 7266 - protein, 250 aa, Artificial Sequence
  Synthetic polypeptide
MASRAVVRARRCPQCPQVRAAAAAPAWAALPLSRSLPPCSNSSSFSMPLFLLLLLVLLLLLEDAGAQQGDGCGHTVLGPESGTLTSINYPQTYPNSTVCEWEIRVKMGERVRIKFGDFDIEDSDSCHFNYLRIYNGIGVSRTEIGKYCGLGLQMNHSIESKGNEITLLFMSGIHVSGRGFLASYSVIDKQGSGESMGLKPGLNPKHSTHLTKKWSDGSPCRSWSSLLLTGQGCLTWDSSTTTVPPPDHFN

SEQ ID NO: 7267 - protein, 144 aa, Artificial Sequence
  Synthetic polypeptide
MGERVRIKFGDFDIEDSDSCHFNYLRIYNGIGVSRTEIGKYCGLGLQMNHSIESKGNEITLLFMSGIHVSGRGFLASYSVIDKQGSGESMGLKPGLNPKHSTHLTKKWSDGSPCRSWSSLLLTGQGCLTWDSSTTTVPPPDHFN

SEQ ID NO: 7268 - protein, 197 aa, Artificial Sequence
  Synthetic polypeptide
MASRAVVRARRCPQCPQVRAAAAAPAWAALPLSRSLPPCSNSSSFSMPLFLLLLLVLLLLLEDAGAQQGDGCGHTVLGPESGTLTSINYPQTYPNSTVCEWEIRVKMGERVRIKFGDFDIEDSDSCHFNYLRIYNGIGVSRTEIGKYCGLGLQMNHSIESKGNEITLLFMSGIHVSGRGFLASYSVIDKQGTSIMYQ

SEQ ID NO: 7269 - protein, 91 aa, Artificial Sequence
  Synthetic polypeptide
MGERVRIKFGDFDIEDSDSCHFNYLRIYNGIGVSRTEIGKYCGLGLQMNHSIESKGNEITLLFMSGIHVSGRGFLASYSVIDKQGTSIMYQ

SEQ ID NO: 7270 - protein, 214 aa, Artificial Sequence
  Synthetic polypeptide
MASRAVVRARRCPQCPQVRAAAAAPAWAALPLSRSLPPCSNSSSFSMPLFLLLLLVLLLLLEDAGAQQGDGCGHTVLGPESGTLTSINYPQTYPNSTVCEWEIRVKMGERVRIKFGDFDIEDSDSCHFNYLRIYNGIGVSRTEIGKYCGLGLQMNHSIESKGNEITLLFMSGIHVSGRGFLASYSVIDKQDFHLWQLLTGTRSTLLCHCKQSEN

SEQ ID NO: 7271 - protein, 108 aa, Artificial Sequence
  Synthetic polypeptide
MGERVRIKFGDFDIEDSDSCHFNYLRIYNGIGVSRTEIGKYCGLGLQMNHSIESKGNEITLLFMSGIHVSGRGFLASYSVIDKQDFHLWQLLTGTRSTLLCHCKQSEN

SEQ ID NO: 7272 - protein, 201 aa, Artificial Sequence
  Synthetic polypeptide
MASRAVVRARRCPQCPQVRAAAAAPAWAALPLSRSLPPCSNSSSFSMPLFLLLLLVLLLLLEDAGAQQGDGCGHTVLGPESGTLTSINYPQTYPNSTVCEWEIRVKMGERVRIKFGDFDIEDSDSCHFNYLRIYNGIGVSRTEIGKYCGLGLQMNHSIESKGNEITLLFMSGIHVSGRGFLASYSVIDKQGTQTDSSRKQL

SEQ ID NO: 7273 - protein, 95 aa, Artificial Sequence
  Synthetic polypeptide
MGERVRIKFGDFDIEDSDSCHFNYLRIYNGIGVSRTEIGKYCGLGLQMNHSIESKGNEITLLFMSGIHVSGRGFLASYSVIDKQGTQTDSSRKQL

SEQ ID NO: 7274 - protein, 150 aa, Artificial Sequence
  Synthetic polypeptide
MASRAVVRARRCPQCPQVRAAAAAPAWAALPLSRSLPPCSNSSSFSMPLFLLLLLVLLLLLEDAGAQQGDGCGHTVLGPESGTLTSINYPQTYPNSTVCEWEIRVKMGERVRIKFGDFDIEDSDSCHFNYLRIYNGIGVSRTEIGLQLHS

SEQ ID NO: 7275 - protein, 44 aa, Artificial Sequence
  Synthetic polypeptide
MGERVRIKFGDFDIEDSDSCHFNYLRIYNGIGVSRTEIGLQLHS

SEQ ID NO: 7276 - protein, 104 aa, Artificial Sequence
  Synthetic polypeptide
MASRAVVRARRCPQCPQVRAAAAAPAWAALPLSRSLPPCSNSSSFSMPLFLLLLLVLLLLLEDAGAQQGIQLTRAVKDLFKENYKPLLNEIKEDTNGRTFHAHG

SEQ ID NO: 7277 - protein, 50 aa, Artificial Sequence
  Synthetic polypeptide
MASRAGPRAAGTDGSDFQHRERVAMHYQMRLFYSNLYPSVQYSCLAYSWW

SEQ ID NO: 7278 - protein, 37 aa, Artificial Sequence
  Synthetic polypeptide
MADDLGDEWWENQPTGAGSSPAFRSFGYMTGFLGSPV

SEQ ID NO: 7279 - protein, 267 aa, Artificial Sequence
  Synthetic polypeptide
MGRAELLEGKMSTQDPSDLWSRSDGEAELLQDLGWYHGNLTRHAAEALLLSNGCDGSYLLRDSNETTGLYSLSVRAKDSVKHFHVEYTGYSFKFGFNEFSSLKDFVKHFANQPLIGSETGTLMVLKHPYPRKVEEPSIYESVRVHTAMQTGRTEDDLVPTAPSLGTKEGYLTKQGGLVKTWKTRWFTLHRNELKYFKDQMSPEPIRILDLTECSAVQFDYSQERVNCFCLVFPFRTFYLCAKTGVEADEWIKILRWKLFQMHRWYSH

SEQ ID NO: 7280 - protein, 95 aa, Artificial Sequence
  Synthetic polypeptide
MSEPKAIDPKLSTTDRVVKAVPFPPSHRLTAKEVFDNDGKPRVDILKAHLMKEGRLEESVALRIITEGASILRQEKNLLDIDAPVTGWQELKMPF

SEQ ID NO: 7281 - protein, 13 aa, Artificial Sequence
  Synthetic polypeptide
APVTGWQELKMPF

SEQ ID NO: 7282 - protein, 45 aa, Artificial Sequence
  Synthetic polypeptide
MKEGRLEESVALRIITEGASILRQEKNLLDIDAPVTGWQELKMPF

SEQ ID NO: 7283 - protein, 457 aa, Artificial Sequence
  Synthetic polypeptide
MAPGRAVAGLLLLAAAGLGGVAEGPGLAFSEDVLSVFGANLSLSAAQLQHLLEQMGAASRVGVPEPGQLHFNQCLTAEEIFSLHGFSNATQITSSKFSVICPAVLQQLNFHPCEDRPKHKTRPSHSEVWGYGFLSVTIINLASLLGLILTPLIKKSYFPKILTFFVGLAIGTLFSNAIFQLIPEAFGFDPKVDSYVEKAVAVFGGFYLLFFFERMLKMLLKTYGQNGHTHFGNDNFGPQEKTHQPKALPAINGVTCYANPAVTEANGHIHFDNVSVVSLQDGKKEPSSCTCLKGPKLSEIGTIAWMITLCDALHNFIDGLAIGASCTLSLLQGLSTSIAILCEEFPHELGDFVILLNAGMSTRQALLFNFLSACSCYVGLAFGILVGNNFAPNIIFALAGGMFLYISLADMFPEMNDMLREKIIKWATDDIKSQLHLLWIYTLAAAHSSGLHCLYEL

SEQ ID NO: 7284 - protein, 448 aa, Artificial Sequence
  Synthetic polypeptide
MAPGRAVAGLLLLAAAGLGGVAEGPGLAFSEDVLSVFGANLSLSAAQLQHLLEQMGAASRVGVPEPGQLHFNQCLTAEEIFSLHGFSNATQITSSKFSVICPAVLQQLNFHPCEDRPKHKTRPSHSEVWGYGFLSVTIINLASLLGLILTPLIKKSYFPKILTFFVGLAIGTLFSNAIFQLIPEAFGFDPKVDSYVEKAVAVFGGFYLLFFFERMLKMLLKTYGQNGHTHFGNDNFGPQEKTHQPKALPAINGVTCYANPAVTEANGHIHFDNVSVVSLQDGKKEPSSCTCLKGPKLSEIGTIAWMITLCDALHNFIDGLAIGASCTLSLLQGLSTSIAILCEEFPHELGDFVILLNAGMSTRQALLFNFLSACSCYVGLAFGILVGNNFAPNIIFALAGGMFLYISLADMFPEMNDMLREKIIKWATDDIKSQLHLLWIYTRLTHMD

SEQ ID NO: 7285 - protein, 819 aa, Artificial Sequence
  Synthetic polypeptide
MRLHLLLLLALCGAGTTAAELSYSLRGNWSICNGNGSLELPGAVPGCVHSALFQQGLIQDSYYRFNDLNYRWVSLDNWTYSKEFKIPFEISKWQKVNLILEGVDTVSKILFNEVTIGETDNMFNRYSFDITNVVRDVNSIELRFQSAVLYAAQQSKAHTRYQVPPDCPPLVQKGECHVNFVRKEQCSFSWDWGPSFPTQGIWKDVRIEAYNICHLNYFTFSPIYDKSAQEWNLEIESTFDVVSSKPVGGQVIVAIPKLQTQQTYSIELQPGKRIVELFVNISKNITVETWWPHGHGNQTGYNMTVLFELDGGLNIEKSAKVYFRTVELIEEPIKGSPGLSFYFKINGFPIFLKGSNWIPADSFQDRVTSELLRLLLQSVVDANMNTLRVWGGGIYEQDEFYELCDELGIMVWQDFMFACALYPTDQGFLDSVTAEVAYQIKRLKSHPSIIIWSGNNENEEALMMNWYHISFTDRPIYIKDYVTLYVKNIRELVLAGDKSRPFITSSPTNGAETVAEAWVSQNPNSNYFGDVHFYDYISDCWNWKVFPKARFASEYGYQSWPSFSTLEKVSSTEDWSFNSKFSLHRQHHEGGNKQMLYQAGLHFKLPQSTDPLRTFKDTIYLTQVMQAQCVKTETEFYRRSRSEIVDQQGHTMGALYWQLNDIWQAPSWASLEYGGKWKMLHYFAQNFFAPLLPVGFENENTFYIYGVSDLHSDYSMTLSVRVHTWSSLEPVCSRVTERFVMKGGEAVCLYEEPVSELLRRCGNCTRESCVVSFYLSADHELLSPTNYHFLSSPKEAVGLCKAQITPGCKLESQALQSDI

SEQ ID NO: 7286 - protein, 762 aa, Artificial Sequence
  Synthetic polypeptide
MRLHLLLLLALCGAGTTAAELSYSLRGNWSICNGNGSLELPGAVPGCVHSALFQQGLIQDSYYRFNDLNYRWVSLDNWTYSKEFKIPFEISKWQKVNLILEGVDTVSKILFNEVTIGETDNMFNRYEQCSFSWDWGPSFPTQGIWKDVRIEAYNICHLNYFTFSPIYDKSAQEWNLEIESTFDVVSSKPVGGQVIVAIPKLQTQQTYSIELQPGKRIVELFVNISKNITVETWWPHGHGNQTGYNMTVLFELDGGLNIEKSAKVYFRTVELIEEPIKGSPGLSFYFKINGFPIFLKGSNWIPADSFQDRVTSELLRLLLQSVVDANMNTLRVWGGGIYEQDEFYELCDELGIMVWQDFMFACALYPTDQGFLDSVTAEVAYQIKRLKSHPSIIIWSGNNENEEALMMNWYHISFTDRPIYIKDYVTLYVKNIRELVLAGDKSRPFITSSPTNGAETVAEAWVSQNPNSNYFGDVHFYDYISDCWNWKVFPKARFASEYGYQSWPSFSTLEKVSSTEDWSFNSKFSLHRQHHEGGNKQMLYQAGLHFKLPQSTDPLRTFKDTIYLTQVMQAQCVKTETEFYRRSRSEIVDQQGHTMGALYWQLNDIWQAPSWASLEYGGKWKMLHYFAQNFFAPLLPVGFENENTFYIYGVSDLHSDYSMTLSVRVHTWSSLEPVCSRVTERFVMKGGEAVCLYEEPVSELLRRCGNCTRESCVVSFYLSADHELLSPTNYHFLSSPKEAVGLCKAQITPGCKLESQALQSDI

SEQ ID NO: 7287 - protein, 321 aa, Artificial Sequence
  Synthetic polypeptide
MRLHLLLLLALCGAGTTAAELSYSLRGNWSICNGNGSLELPGAVPGCVHSALFQQGLIQDSYYRFNDLNYRWVSLDNWTYSKEFKIPFEISKWQKVNLILEGVDTVSKILFNEVTIGETDNMFNRYSFDITNVVRDVNSIELRFQSAVLYAAQQSKAHTRYQVPPDCPPLVQKGECHVNFVRKEQCSFSWDWGPSFPTQGIWKDVRIEAYNICHLNYFTFSPIYDKSAQEWNLEIESTFDVVSSKPVGGQVIVAIPKLQTQQTYSIELQPGKRIVELFVNISKNITVETWWPHGHGNQTGYNMTVLFELDGGLNIEKSAKL

SEQ ID NO: 7288 - protein, 264 aa, Artificial Sequence
  Synthetic polypeptide
MRLHLLLLLALCGAGTTAAELSYSLRGNWSICNGNGSLELPGAVPGCVHSALFQQGLIQDSYYRFNDLNYRWVSLDNWTYSKEFKIPFEISKWQKVNLILEGVDTVSKILFNEVTIGETDNMFNRYEQCSFSWDWGPSFPTQGIWKDVRIEAYNICHLNYFTFSPIYDKSAQEWNLEIESTFDVVSSKPVGGQVIVAIPKLQTQQTYSIELQPGKRIVELFVNISKNITVETWWPHGHGNQTGYNMTVLFELDGGLNIEKSAKL

SEQ ID NO: 7289 - protein, 230 aa, Artificial Sequence
  Synthetic polypeptide
MRLHLLLLLALCGAGTTAAELSYSLRGNWSICNGNGSLELPGAVPGCVHSALFQQGLIQDSYYRFNDLNYRWVSLDNWTYSKEFKIPFEISKWQKVNLILEGVDTVSKILFNEVTIGETDNMFNRYSFDITNVVRDVNSIELRFQSAVLYAAQQSKAHTRYQVPPDCPPLVQKGECHVNFVRKEQCSFSWDWGPSFPTQGIWKDVRIEAYNICHLNYFTFSPIYGSGVDL

SEQ ID NO: 7290 - protein, 173 aa, Artificial Sequence
  Synthetic polypeptide
MRLHLLLLLALCGAGTTAAELSYSLRGNWSICNGNGSLELPGAVPGCVHSALFQQGLIQDSYYRFNDLNYRWVSLDNWTYSKEFKIPFEISKWQKVNLILEGVDTVSKILFNEVTIGETDNMFNRYEQCSFSWDWGPSFPTQGIWKDVRIEAYNICHLNYFTFSPIYGSGVDL

SEQ ID NO: 7291 - protein, 55 aa, Artificial Sequence
  Synthetic polypeptide
MVLESVARIVKVQLPAYLKRLPVPESITGFARLTAIWMQLETIILRRLTQKQKTK

SEQ ID NO: 7292 - protein, 59 aa, Artificial Sequence
  Synthetic polypeptide
MVLESVARIVKVQLPAYLKRLPVPESITGFARLTGNLGTHKGRTPCEDGGRDWGDRPTS

SEQ ID NO: 7293 - protein, 52 aa, Artificial Sequence
  Synthetic polypeptide
MVLESVARIVKVQLPAYLKRLPVPESITGFARLTGRTPCEDGGRDWGDRPTS

SEQ ID NO: 7294 - protein, 55 aa, Artificial Sequence
  Synthetic polypeptide
MVLESVARIVKVQLPAYLKRLPVPESITGFARLTDPPERINHADTLILDFSPLEL

SEQ ID NO: 7295 - protein, 46 aa, Artificial Sequence
  Synthetic polypeptide
MPQGLLSSELSPVSFRGKIPGFCREAIWMQLETIILRRLTQKQKTK

SEQ ID NO: 7296 - protein, 50 aa, Artificial Sequence
  Synthetic polypeptide
MPQGLLSSELSPVSFRGKIPGFCREGNLGTHKGRTPCEDGGRDWGDRPTS

SEQ ID NO: 7297 - protein, 866 aa, Artificial Sequence
  Synthetic polypeptide
MFPLKDAEMGAFTFFASALPHDVCGSNGLPLTPNSIKILGRFQILKTITHPRLCQYVDISRGKHERLVVVAEHCERSLEDLLRERKPVSCSTVLCIAFEVLQGLQYMNKHGIVHRALSPHNILLDRKGHIKLAKFGLYHMTAHGDDVDFPIGYPSYLAPEVIAQGIFKTTDHMPSKKPLPSGPKSDVWSLGIILFELCVGRKLFQSLDISERLKFLLTLDCVDDTLIVLAEEHGCLDIIKELPETVIDLLNKCLTFHPSKRPTPDQLMKDKVFSEVSPLYTPFTKPASLFSSSLRCADLTLPEDISQLCKDINNDYLAERSIEEVYYLWCLAGGDLEKELVNKEIIRSKPPICTLPNFLFEDGESFGQGRDRSSLLDDTTVTLSLCQLRNRLKDVGGEAFYPLLEDDQSNLPHSNSNNELSAAATLPLIIREKDTEYQLNRIILFDRLLKAYPYKKNQIWKEARVDIPPLMRGLTWAALLGVEGAIHAKYDAIDKDTPIPTDRQIEVDIPRCHQYDELLSSPEGHAKFRRVLKAWVVSHPDLVYWQGLDSLCAPFLYLNFNNEALAYACMSAFIPKYLYNFFLKDNSHVIQEYLTVFSQMIAFHDPELSNHLNEIGFIPDLYAIPWFLTMFTHVFPLHKIFHLWDTLLLGNSSFPFCIGVAILQQLRDRLLANGFNECILLFSDLPEIDIERCVRESINLFCWTPKSATYRQHAQPPKPSSDSSGGRSSAPYFSAECPDPPKTDLSRESIPLNDLKSEVSPRISAEDLIDLCELTVTGHFKTPSKKTKSSKPKLLVVDIRNSEDFIRGHISGSINIPFSAAFTAEGELTQGPYTAMLQNFKGKVIVIVGHVAKHTAEVADVATRKR

SEQ ID NO: 7298 - protein, 803 aa, Artificial Sequence
  Synthetic polypeptide
MFPLKDAEMGAFTFFASALPHDVCGSNGLPLTPNSIKILGRFQILKTITHPRLCQYVDISRGKHERLVVVAEHCERSLEDLLRERKPVRYPSYLAPEVIAQGIFKTTDHMPSKKPLPSGPKSDVWSLGIILFELCVGRKLFQSLDISERLKFLLTLDCVDDTLIVLAEEHGCLDIIKELPETVIDLLNKCLTFHPSKRPTPDQLMKDKVFSEVSPLYTPFTKPASLFSSSLRCADLTLPEDISQLCKDINNDYLAERSIEEVYYLWCLAGGDLEKELVNKEIIRSKPPICTLPNFLFEDGESFGQGRDRSSLLDDTTVTLSLCQLRNRLKDVGGEAFYPLLEDDQSNLPHSNSNNELSAAATLPLIIREKDTEYQLNRIILFDRLLKAYPYKKNQIWKEARVDIPPLMRGLTWAALLGVEGAIHAKYDAIDKDTPIPTDRQIEVDIPRCHQYDELLSSPEGHAKFRRVLKAWVVSHPDLVYWQGLDSLCAPFLYLNFNNEALAYACMSAFIPKYLYNFFLKDNSHVIQEYLTVFSQMIAFHDPELSNHLNEIGFIPDLYAIPWFLTMFTHVFPLHKIFHLWDTLLLGNSSFPFCIGVAILQQLRDRLLANGFNECILLFSDLPEIDIERCVRESINLFCWTPKSATYRQHAQPPKPSSDSSGGRSSAPYFSAECPDPPKTDLSRESIPLNDLKSEVSPRISAEDLIDLCELTVTGHFKTPSKKTKSSKPKLLVVDIRNSEDFIRGHISGSINIPFSAAFTAEGELTQGPYTAMLQNFKGKVIVIVGHVAKHTAEVADVATRKR

SEQ ID NO: 7299 - protein, 827 aa, Artificial Sequence
  Synthetic polypeptide
MFPLKDAEMGAFTFFASALPHDVCGSNGLPLTPNSIKILGRFQILKTITHPRLCQYVDISRGKHERLVVVAEHCERSLEDLLRERKPVSCSTVLCIAFEVLQGLQYMNKHGIVHRALSPHNILLDRKGHIKLAKFGLYHMTAHGDDVDFPIGYPSYLAPEGRKLFQSLDISERLKFLLTLDCVDDTLIVLAEEHGCLDIIKELPETVIDLLNKCLTFHPSKRPTPDQLMKDKVFSEVSPLYTPFTKPASLFSSSLRCADLTLPEDISQLCKDINNDYLAERSIEEVYYLWCLAGGDLEKELVNKEIIRSKPPICTLPNFLFEDGESFGQGRDRSSLLDDTTVTLSLCQLRNRLKDVGGEAFYPLLEDDQSNLPHSNSNNELSAAATLPLIIREKDTEYQLNRIILFDRLLKAYPYKKNQIWKEARVDIPPLMRGLTWAALLGVEGAIHAKYDAIDKDTPIPTDRQIEVDIPRCHQYDELLSSPEGHAKFRRVLKAWVVSHPDLVYWQGLDSLCAPFLYLNFNNEALAYACMSAFIPKYLYNFFLKDNSHVIQEYLTVFSQMIAFHDPELSNHLNEIGFIPDLYAIPWFLTMFTHVFPLHKIFHLWDTLLLGNSSFPFCIGVAILQQLRDRLLANGFNECILLFSDLPEIDIERCVRESINLFCWTPKSATYRQHAQPPKPSSDSSGGRSSAPYFSAECPDPPKTDLSRESIPLNDLKSEVSPRISAEDLIDLCELTVTGHFKTPSKKTKSSKPKLLVVDIRNSEDFIRGHISGSINIPFSAAFTAEGELTQGPYTAMLQNFKGKVIVIVGHVAKHTAEVADVATRKR

SEQ ID NO: 7300 - protein, 867 aa, Artificial Sequence
  Synthetic polypeptide
MFPLKDAEMGAFTFFASALPHDVCGSNGLPLTPNSIKILGRFQILKTITHPRLCQYVDISRGKHERLVVVAEHCERSLEDLLRERKPVSCSTVLCIAFEVLQGLQYMNKHGIVHRALSPHNILLDRKGHIKLAKFGLYHMTAHGDDVDFPIGYPSYLAPEVIAQGIFKTTDHMPSKKPLPSGPKSDVWSLGIILFELCVGRKLFQSLDISERLKFLLTLDCVDDTLIVLAEEHGCLDIIKELPETVIDLLNKCLTFHPSKRPTPDQLMKDKVFSEVSPLYTPFTKPASLFSSSLRCADLTLPEDISQLCKDINNDYLAERSIEEVYYLWCLAGGDLEKELVNKEIIRSKPPICTLPNFLFEDGESFGQGRDRSSLLDDTTVTLSLCQLRNRLKDVGGEAFYPLLEDDQSNLPHSNSNNELSAAATLPLIIREKDTEYQLNRIILFDRLLKAYPYKKNQIWKEARVDIPPLMRGLTWAALLGVEGAIHAKYDAIDKDTPIPTDRQIEVDIPRCHQYDELLSSPEGHAKFRRVLKAWVVSHPDLVYWQGLDSLCAPFLYLNFNNEALAYACMSAFIPKYLYNFFLKDNSHVIQEYLTVFSQMIAFHDPELSNHLNEIGFIPDLYAIPWFLTMFTHVFPLHKIFHLWDTLLLGNSSFPFCIGVAILQQLRDRLLANGFNECILLFSDLPEIDIERCVRESINLFCWTPKSATYRQHAQPPKPSSDSSGGRSSAPYFSAECPDPPKTDLSRESIPLNDLKSEVSPRISAEDLIDLCELTVTGHFKTPSKKTKSSKPKLLVVDIRNSEDFIRGHISGSINIPFSAAFTAEGELTQGPYTAMLQNFKGKVIVIVGHVAKHTAEAHRINGLISR

SEQ ID NO: 7301 - protein, 804 aa, Artificial Sequence
  Synthetic polypeptide
MFPLKDAEMGAFTFFASALPHDVCGSNGLPLTPNSIKILGRFQILKTITHPRLCQYVDISRGKHERLVVVAEHCERSLEDLLRERKPVRYPSYLAPEVIAQGIFKTTDHMPSKKPLPSGPKSDVWSLGIILFELCVGRKLFQSLDISERLKFLLTLDCVDDTLIVLAEEHGCLDIIKELPETVIDLLNKCLTFHPSKRPTPDQLMKDKVFSEVSPLYTPFTKPASLFSSSLRCADLTLPEDISQLCKDINNDYLAERSIEEVYYLWCLAGGDLEKELVNKEIIRSKPPICTLPNFLFEDGESFGQGRDRSSLLDDTTVTLSLCQLRNRLKDVGGEAFYPLLEDDQSNLPHSNSNNELSAAATLPLIIREKDTEYQLNRIILFDRLLKAYPYKKNQIWKEARVDIPPLMRGLTWAALLGVEGAIHAKYDAIDKDTPIPTDRQIEVDIPRCHQYDELLSSPEGHAKFRRVLKAWVVSHPDLVYWQGLDSLCAPFLYLNFNNEALAYACMSAFIPKYLYNFFLKDNSHVIQEYLTVFSQMIAFHDPELSNHLNEIGFIPDLYAIPWFLTMFTHVFPLHKIFHLWDTLLLGNSSFPFCIGVAILQQLRDRLLANGFNECILLFSDLPEIDIERCVRESINLFCWTPKSATYRQHAQPPKPSSDSSGGRSSAPYFSAECPDPPKTDLSRESIPLNDLKSEVSPRISAEDLIDLCELTVTGHFKTPSKKTKSSKPKLLVVDIRNSEDFIRGHISGSINIPFSAAFTAEGELTQGPYTAMLQNFKGKVIVIVGHVAKHTAEAHRINGLISR

SEQ ID NO: 7302 - protein, 828 aa, Artificial Sequence
  Synthetic polypeptide
MFPLKDAEMGAFTFFASALPHDVCGSNGLPLTPNSIKILGRFQILKTITHPRLCQYVDISRGKHERLVVVAEHCERSLEDLLRERKPVSCSTVLCIAFEVLQGLQYMNKHGIVHRALSPHNILLDRKGHIKLAKFGLYHMTAHGDDVDFPIGYPSYLAPEGRKLFQSLDISERLKFLLTLDCVDDTLIVLAEEHGCLDIIKELPETVIDLLNKCLTFHPSKRPTPDQLMKDKVFSEVSPLYTPFTKPASLFSSSLRCADLTLPEDISQLCKDINNDYLAERSIEEVYYLWCLAGGDLEKELVNKEIIRSKPPICTLPNFLFEDGESFGQGRDRSSLLDDTTVTLSLCQLRNRLKDVGGEAFYPLLEDDQSNLPHSNSNNELSAAATLPLIIREKDTEYQLNRIILFDRLLKAYPYKKNQIWKEARVDIPPLMRGLTWAALLGVEGAIHAKYDAIDKDTPIPTDRQIEVDIPRCHQYDELLSSPEGHAKFRRVLKAWVVSHPDLVYWQGLDSLCAPFLYLNFNNEALAYACMSAFIPKYLYNFFLKDNSHVIQEYLTVFSQMIAFHDPELSNHLNEIGFIPDLYAIPWFLTMFTHVFPLHKIFHLWDTLLLGNSSFPFCIGVAILQQLRDRLLANGFNECILLFSDLPEIDIERCVRESINLFCWTPKSATYRQHAQPPKPSSDSSGGRSSAPYFSAECPDPPKTDLSRESIPLNDLKSEVSPRISAEDLIDLCELTVTGHFKTPSKKTKSSKPKLLVVDIRNSEDFIRGHISGSINIPFSAAFTAEGELTQGPYTAMLQNFKGKVIVIVGHVAKHTAEAHRINGLISR

SEQ ID NO: 7303 - protein, 857 aa, Artificial Sequence
  Synthetic polypeptide
MFPLKDAEMGAFTFFASALPHDVCGSNGLPLTPNSIKILGRFQILKTITHPRLCQYVDISRGKHERLVVVAEHCERSLEDLLRERKPVSCSTVLCIAFEVLQGLQYMNKHGIVHRALSPHNILLDRKGHIKLAKFGLYHMTAHGDDVDFPIGYPSYLAPEVIAQGIFKTTDHMPSKKPLPSGPKSDVWSLGIILFELCVGRKLFQSLDISERLKFLLTLDCVDDTLIVLAEEHGCLDIIKELPETVIDLLNKCLTFHPSKRPTPDQLMKDKVFSEVSPLYTPFTKPASLFSSSLRCADLTLPEDISQLCKDINNDYLAERSIEEVYYLWCLAGGDLEKELVNKEIIRSKPPICTLPNFLFEDGESFGQGRDRSSLLDDTTVTLSLCQLRNRLKDVGGEAFYPLLEDDQSNLPHSNSNNELSAAATLPLIIREKDTEYQLNRIILFDRLLKAYPYKKNQIWKEARVDIPPLMRGLTWAALLGVEGAIHAKYDAIDKDTPIPTDRQIEVDIPRCHQYDELLSSPEGHAKFRRVLKAWVVSHPDLVYWQGLDSLCAPFLYLNFNNEALAYACMSAFIPKYLYNFFLKDNSHVIQEYLTVFSQMIAFHDPELSNHLNEIGFIPDLYAIPWFLTMFTHVFPLHKIFHLWDTLLLGNSSFPFCIGVAILQQLRDRLLANGFNECILLFSDLPEIDIERCVRESINLFCWTPKSATYRQHAQPPKPSSDSSGGRSSAPYFSAECPDPPKTDLSRESIPLNDLKSEVSPRISAEDLIDLCELTVTGHFKTPSKKTKSSKPKLLVVDIRNSEDFIRGHISGSINIPFSAAFTAEGELTQGPYTAMLQNFKGKVIVIVGHVAKHTAE

SEQ ID NO: 7304 - protein, 794 aa, Artificial Sequence
  Synthetic polypeptide
MFPLKDAEMGAFTFFASALPHDVCGSNGLPLTPNSIKILGRFQILKTITHPRLCQYVDISRGKHERLVVVAEHCERSLEDLLRERKPVRYPSYLAPEVIAQGIFKTTDHMPSKKPLPSGPKSDVWSLGIILFELCVGRKLFQSLDISERLKFLLTLDCVDDTLIVLAEEHGCLDIIKELPETVIDLLNKCLTFHPSKRPTPDQLMKDKVFSEVSPLYTPFTKPASLFSSSLRCADLTLPEDISQLCKDINNDYLAERSIEEVYYLWCLAGGDLEKELVNKEIIRSKPPICTLPNFLFEDGESFGQGRDRSSLLDDTTVTLSLCQLRNRLKDVGGEAFYPLLEDDQSNLPHSNSNNELSAAATLPLIIREKDTEYQLNRIILFDRLLKAYPYKKNQIWKEARVDIPPLMRGLTWAALLGVEGAIHAKYDAIDKDTPIPTDRQIEVDIPRCHQYDELLSSPEGHAKFRRVLKAWVVSHPDLVYWQGLDSLCAPFLYLNFNNEALAYACMSAFIPKYLYNFFLKDNSHVIQEYLTVFSQMIAFHDPELSNHLNEIGFIPDLYAIPWFLTMFTHVFPLHKIFHLWDTLLLGNSSFPFCIGVAILQQLRDRLLANGFNECILLFSDLPEIDIERCVRESINLFCWTPKSATYRQHAQPPKPSSDSSGGRSSAPYFSAECPDPPKTDLSRESIPLNDLKSEVSPRISAEDLIDLCELTVTGHFKTPSKKTKSSKPKLLVVDIRNSEDFIRGHISGSINIPFSAAFTAEGELTQGPYTAMLQNFKGKVIVIVGHVAKHTAE

SEQ ID NO: 7305 - protein, 818 aa, Artificial Sequence
  Synthetic polypeptide
MFPLKDAEMGAFTFFASALPHDVCGSNGLPLTPNSIKILGRFQILKTITHPRLCQYVDISRGKHERLVVVAEHCERSLEDLLRERKPVSCSTVLCIAFEVLQGLQYMNKHGIVHRALSPHNILLDRKGHIKLAKFGLYHMTAHGDDVDFPIGYPSYLAPEGRKLFQSLDISERLKFLLTLDCVDDTLIVLAEEHGCLDIIKELPETVIDLLNKCLTFHPSKRPTPDQLMKDKVFSEVSPLYTPFTKPASLFSSSLRCADLTLPEDISQLCKDINNDYLAERSIEEVYYLWCLAGGDLEKELVNKEIIRSKPPICTLPNFLFEDGESFGQGRDRSSLLDDTTVTLSLCQLRNRLKDVGGEAFYPLLEDDQSNLPHSNSNNELSAAATLPLIIREKDTEYQLNRIILFDRLLKAYPYKKNQIWKEARVDIPPLMRGLTWAALLGVEGAIHAKYDAIDKDTPIPTDRQIEVDIPRCHQYDELLSSPEGHAKFRRVLKAWVVSHPDLVYWQGLDSLCAPFLYLNFNNEALAYACMSAFIPKYLYNFFLKDNSHVIQEYLTVFSQMIAFHDPELSNHLNEIGFIPDLYAIPWFLTMFTHVFPLHKIFHLWDTLLLGNSSFPFCIGVAILQQLRDRLLANGFNECILLFSDLPEIDIERCVRESINLFCWTPKSATYRQHAQPPKPSSDSSGGRSSAPYFSAECPDPPKTDLSRESIPLNDLKSEVSPRISAEDLIDLCELTVTGHFKTPSKKTKSSKPKLLVVDIRNSEDFIRGHISGSINIPFSAAFTAEGELTQGPYTAMLQNFKGKVIVIVGHVAKHTAE

SEQ ID NO: 7306 - protein, 368 aa, Artificial Sequence
  Synthetic polypeptide
MFPLKDAEMGAFTFFASALPHDVCGSNGLPLTPNSIKILGRFQILKTITHPRLCQYVDISRGKHERLVVVAEHCERSLEDLLRERKPVSCSTVLCIAFEVLQGLQYMNKHGIVHRALSPHNILLDRKGHIKLAKFGLYHMTAHGDDVDFPIGYPSYLAPEVIAQGIFKTTDHMPSKKPLPSGPKSDVWSLGIILFELCVGRKLFQSLDISERLKFLLTLDCVDDTLIVLAEEHGCLDIIKELPETVIDLLNKCLTFHPSKRPTPDQLMKDKVFSEVSPLYTPFTKPASLFSSSLRCADLTLPEDISQLCKDINNDYLAERSIEEVYYLWCLAGGDLEKELVNKEIIRSKPPICTLPKDMDEIGNHHSQ

SEQ ID NO: 7307 - protein, 305 aa, Artificial Sequence
  Synthetic polypeptide
MFPLKDAEMGAFTFFASALPHDVCGSNGLPLTPNSIKILGRFQILKTITHPRLCQYVDISRGKHERLVVVAEHCERSLEDLLRERKPVRYPSYLAPEVIAQGIFKTTDHMPSKKPLPSGPKSDVWSLGIILFELCVGRKLFQSLDISERLKFLLTLDCVDDTLIVLAEEHGCLDIIKELPETVIDLLNKCLTFHPSKRPTPDQLMKDKVFSEVSPLYTPFTKPASLFSSSLRCADLTLPEDISQLCKDINNDYLAERSIEEVYYLWCLAGGDLEKELVNKEIIRSKPPICTLPKDMDEIGNHHSQ

SEQ ID NO: 7308 - protein, 329 aa, Artificial Sequence
  Synthetic polypeptide
MFPLKDAEMGAFTFFASALPHDVCGSNGLPLTPNSIKILGRFQILKTITHPRLCQYVDISRGKHERLVVVAEHCERSLEDLLRERKPVSCSTVLCIAFEVLQGLQYMNKHGIVHRALSPHNILLDRKGHIKLAKFGLYHMTAHGDDVDFPIGYPSYLAPEGRKLFQSLDISERLKFLLTLDCVDDTLIVLAEEHGCLDIIKELPETVIDLLNKCLTFHPSKRPTPDQLMKDKVFSEVSPLYTPFTKPASLFSSSLRCADLTLPEDISQLCKDINNDYLAERSIEEVYYLWCLAGGDLEKELVNKEIIRSKPPICTLPKDMDEIGNHHSQ

SEQ ID NO: 7309 - protein, 5 aa, Artificial Sequence
  Synthetic polypeptide
QPQIN

SEQ ID NO: 7310 - protein, 5 aa, Artificial Sequence
  Synthetic polypeptide
QPQIN

SEQ ID NO: 7311 - protein, 400 aa, Artificial Sequence
  Synthetic polypeptide
MFPLKDAEMGAFTFFASALPHDVCGSNGLPLTPNSIKILGRFQILKTITHPRLCQYVDISRGKHERLVVVAEHCERSLEDLLRERKPVSCSTVLCIAFEVLQGLQYMNKHGIVHRALSPHNILLDRKGHIKLAKFGLYHMTAHGDDVDFPIGYPSYLAPEVIAQGIFKTTDHMPSKKPLPSGPKSDVWSLGIILFELCVGRKLFQSLDISERLKFLLTLDCVDDTLIVLAEEHGCLDIIKELPETVIDLLNKCLTFHPSKRPTPDQLMKDKVFSEVSPLYTPFTKPASLFSSSLRCADLTLPEDISQLCKDINNDYLAERSIEEVYYLWCLAGGDLEKELVNKEIIRSKPPICTLPKLGMVDHACDPSTLGGKAGGLLEPRSLRSAWATWQNPVSTKKKN

SEQ ID NO: 7312 - protein, 337 aa, Artificial Sequence
  Synthetic polypeptide
MFPLKDAEMGAFTFFASALPHDVCGSNGLPLTPNSIKILGRFQILKTITHPRLCQYVDISRGKHERLVVVAEHCERSLEDLLRERKPVRYPSYLAPEVIAQGIFKTTDHMPSKKPLPSGPKSDVWSLGIILFELCVGRKLFQSLDISERLKFLLTLDCVDDTLIVLAEEHGCLDIIKELPETVIDLLNKCLTFHPSKRPTPDQLMKDKVFSEVSPLYTPFTKPASLFSSSLRCADLTLPEDISQLCKDINNDYLAERSIEEVYYLWCLAGGDLEKELVNKEIIRSKPPICTLPKLGMVDHACDPSTLGGKAGGLLEPRSLRSAWATWQNPVSTKKKN

SEQ ID NO: 7313 - protein, 361 aa, Artificial Sequence
  Synthetic polypeptide
MFPLKDAEMGAFTFFASALPHDVCGSNGLPLTPNSIKILGRFQILKTITHPRLCQYVDISRGKHERLVVVAEHCERSLEDLLRERKPVSCSTVLCIAFEVLQGLQYMNKHGIVHRALSPHNILLDRKGHIKLAKFGLYHMTAHGDDVDFPIGYPSYLAPEGRKLFQSLDISERLKFLLTLDCVDDTLIVLAEEHGCLDIIKELPETVIDLLNKCLTFHPSKRPTPDQLMKDKVFSEVSPLYTPFTKPASLFSSSLRCADLTLPEDISQLCKDINNDYLAERSIEEVYYLWCLAGGDLEKELVNKEIIRSKPPICTLPKLGMVDHACDPSTLGGKAGGLLEPRSLRSAWATWQNPVSTKKKN

SEQ ID NO: 7314 - protein, 24 aa, Artificial Sequence
  Synthetic polypeptide
MLPAVAVSEPVVLRFIPLPLPLPL

SEQ ID NO: 7315 - protein, 17 aa, Artificial Sequence
  Synthetic polypeptide
MLPAVAVSEPVVLRFMK

SEQ ID NO: 7316 - protein, 538 aa, Artificial Sequence
  Synthetic polypeptide
MSAPAGSSHPAASARIPPKFGGAAVSGAAAPAGPGAGPAPHQQNETGFHHVAQASLELLDPSNLPASASQIAGSTGPAQNQMQVPSGYGLHHQNYIAPSGHYSQGPGKMTSLPLDTQCGDYYSALYTVPTQNVTPNTVNQQPGAQQLYSRGPPAPHIVGSTLGSFQGAASSASHLHTSASQPYSSFVNHYNSPAMYSASSSVASQGFPSTCGHYAMSTVSNAAYPSVSYPSLPAGDTYGQMFTSQNAPTVRPVKDNSFSGQNTAISHPSPLPPLPSQQHHQQQSLSGYSTLTWSSPGLPSTQDNLIRNHTGSLAVANNNPTITVADSLSCPVMQNVQPPKSSPVVSTVLSGSSGSSSTRTPPTANHPVEPVTSVTQPSELLQQKGVQYGEYVNNQASSAPTPLSSTSDDEEEEEEDEEAGVDSSSTTSSASPMPNSYDALEGGSYPDMLSSSASSPAPDPAPEPDPASAPAPASAPAPVVPQPSKMAKPFGYGYPTLQPGYQNATAPLISGVQPSNPVYSGFQQYPQSVLLLFIKNKS

SEQ ID NO: 7317 - protein, 472 aa, Artificial Sequence
  Synthetic polypeptide
MSAPAGSSHPAASARIPPKFGGAAVSGAAAPAGPGAGPAPHQQNGPAQNQMQVPSGYGLHHQNYIAPSGHYSQGPGKMTSLPLDTQCGDYYSALYTVPTQNVTPNTVNQQPGAQQLYSRGPPAPHIVGSTLGSFQGAASSASHLHTSASQPYSSFVNHYNSPAMYSASSSVASQGFPSTCGHYAMSTVSNAAYPSVSYPSLPAGDTYGQMFTSQNAPTVRPVKDNSFSGQNTAISHPSPLPPLPSQQHHQQQSLSGYSTLTWSSPGLPSTQDNLIRNHTGSLAVANNNPTITVADSLSCPVMQNVQPPKSSPVVSTVLSGSSGSSSTRTPPTANHPVEPVTSVTQPSELLQQKGVDSSSTTSSASPMPNSYDALEGGSYPDMLSSSASSPAPDPAPEPDPASAPAPASAPAPVVPQPSKMAKPFGYGYPTLQPGYQNATAPLISGVQPSNPVYSGFQQYPQSVLLLFIKNKS

SEQ ID NO: 7318 - protein, 507 aa, Artificial Sequence
  Synthetic polypeptide
MSAPAGSSHPAASARIPPKFGGAAVSGAAAPAGPGAGPAPHQQNGPAQNQMQVPSGYGLHHQNYIAPSGHYSQGPGKMTSLPLDTQCGDYYSALYTVPTQNVTPNTVNQQPGAQQLYSRGPPAPHIVGSTLGSFQGAASSASHLHTSASQPYSSFVNHYNSPAMYSASSSVASQGFPSTCGHYAMSTVSNAAYPSVSYPSLPAGDTYGQMFTSQNAPTVRPVKDNSFSGQNTAISHPSPLPPLPSQQHHQQQSLSGYSTLTWSSPGLPSTQDNLIRNHTGSLAVANNNPTITVADSLSCPVMQNVQPPKSSPVVSTVLSGSSGSSSTRTPPTANHPVEPVTSVTQPSELLQQKGVQYGEYVNNQASSAPTPLSSTSDDEEEEEEDEEAGVDSSSTTSSASPMPNSYDALEGGSYPDMLSSSASSPAPDPAPEPDPASAPAPASAPAPVVPQPSKMAKPFGYGYPTLQPGYQNATAPLISGVQPSNPVYSGFQQYPQSVLLLFIKNKS

SEQ ID NO: 7319 - protein, 559 aa, Artificial Sequence
  Synthetic polypeptide
MSAPAGSSHPAASARIPPKFGGAAVSGAAAPAGPGAGPAPHQQNETGFHHVAQASLELLDPSNLPASASQIAGSTGPAQNQMQVPSGYGLHHQNYIAPSGHYSQGPGKMTSLPLDTQCGDYYSALYTVPTQNVTPNTVNQQPGAQQLYSRGPPAPHIVGSTLGSFQGAASSASHLHTSASQPYSSFVNHYNSPAMYSASSSVASQGFPSTCGHYAMSTVSNAAYPSVSYPSLPAGDTYGQMFTSQNAPTVRPVKDNSFSGQNTAISHPSPLPPLPSQQHHQQQSLSGYSTLTWSSPGLPSTQDNLIRNHTGSLAVANNNPTITVADSLSCPVMQNVQPPKSSPVVSTVLSGSSGSSSTRTPPTANHPVEPVTSVTQPSELLQQKGVQYGEYVNNQASSAPTPLSSTSDDEEEEEEDEEAGVDSSSTTSSASPMPNSYDALEGGSYPDMLSSSASSPAPDPAPEPDPASAPAPASAPAPVVPQPSKMAKPFGYGYPTLQPGYQNATAPLISGVQPSNPVYSGFQQYPQPHTGPPGRIQKKALLSQEMTAPYMLLHLKTFQ

SEQ ID NO: 7320 - protein, 493 aa, Artificial Sequence
  Synthetic polypeptide
MSAPAGSSHPAASARIPPKFGGAAVSGAAAPAGPGAGPAPHQQNGPAQNQMQVPSGYGLHHQNYIAPSGHYSQGPGKMTSLPLDTQCGDYYSALYTVPTQNVTPNTVNQQPGAQQLYSRGPPAPHIVGSTLGSFQGAASSASHLHTSASQPYSSFVNHYNSPAMYSASSSVASQGFPSTCGHYAMSTVSNAAYPSVSYPSLPAGDTYGQMFTSQNAPTVRPVKDNSFSGQNTAISHPSPLPPLPSQQHHQQQSLSGYSTLTWSSPGLPSTQDNLIRNHTGSLAVANNNPTITVADSLSCPVMQNVQPPKSSPVVSTVLSGSSGSSSTRTPPTANHPVEPVTSVTQPSELLQQKGVDSSSTTSSASPMPNSYDALEGGSYPDMLSSSASSPAPDPAPEPDPASAPAPASAPAPVVPQPSKMAKPFGYGYPTLQPGYQNATAPLISGVQPSNPVYSGFQQYPQPHTGPPGRIQKKALLSQEMTAPYMLLHLKTFQ

SEQ ID NO: 7321 - protein, 528 aa, Artificial Sequence
  Synthetic polypeptide
MSAPAGSSHPAASARIPPKFGGAAVSGAAAPAGPGAGPAPHQQNGPAQNQMQVPSGYGLHHQNYIAPSGHYSQGPGKMTSLPLDTQCGDYYSALYTVPTQNVTPNTVNQQPGAQQLYSRGPPAPHIVGSTLGSFQGAASSASHLHTSASQPYSSFVNHYNSPAMYSASSSVASQGFPSTCGHYAMSTVSNAAYPSVSYPSLPAGDTYGQMFTSQNAPTVRPVKDNSFSGQNTAISHPSPLPPLPSQQHHQQQSLSGYSTLTWSSPGLPSTQDNLIRNHTGSLAVANNNPTITVADSLSCPVMQNVQPPKSSPVVSTVLSGSSGSSSTRTPPTANHPVEPVTSVTQPSELLQQKGVQYGEYVNNQASSAPTPLSSTSDDEEEEEEDEEAGVDSSSTTSSASPMPNSYDALEGGSYPDMLSSSASSPAPDPAPEPDPASAPAPASAPAPVVPQPSKMAKPFGYGYPTLQPGYQNATAPLISGVQPSNPVYSGFQQYPQPHTGPPGRIQKKALLSQEMTAPYMLLHLKTFQ

SEQ ID NO: 7322 - protein, 542 aa, Artificial Sequence
  Synthetic polypeptide
MSAPAGSSHPAASARIPPKFGGAAVSGAAAPAGPGAGPAPHQQNETGFHHVAQASLELLDPSNLPASASQIAGSTGPAQNQMQVPSGYGLHHQNYIAPSGHYSQGPGKMTSLPLDTQCGDYYSALYTVPTQNVTPNTVNQQPGAQQLYSRGPPAPHIVGSTLGSFQGAASSASHLHTSASQPYSSFVNHYNSPAMYSASSSVASQGFPSTCGHYAMSTVSNAAYPSVSYPSLPAGDTYGQMFTSQNAPTVRPVKDNSFSGQNTAISHPSPLPPLPSQQHHQQQSLSGYSTLTWSSPGLPSTQDNLIRNHTGSLAVANNNPTITVADSLSCPVMQNVQPPKSSPVVSTVLSGSSGSSSTRTPPTANHPVEPVTSVTQPSELLQQKGVQYGEYVNNQASSAPTPLSSTSDDEEEEEEDEEAGVDSSSTTSSASPMPNSYDALEGGSYPDMLSSSASSPAPDPAPEPDPASAPAPASAPAPVVPQPSKMAKPFGYGYPTLQPGYQNATAPLISGVQPSNPVYSGFQQYPQVLQEESRRRHCYHRR

SEQ ID NO: 7323 - protein, 476 aa, Artificial Sequence
  Synthetic polypeptide
MSAPAGSSHPAASARIPPKFGGAAVSGAAAPAGPGAGPAPHQQNGPAQNQMQVPSGYGLHHQNYIAPSGHYSQGPGKMTSLPLDTQCGDYYSALYTVPTQNVTPNTVNQQPGAQQLYSRGPPAPHIVGSTLGSFQGAASSASHLHTSASQPYSSFVNHYNSPAMYSASSSVASQGFPSTCGHYAMSTVSNAAYPSVSYPSLPAGDTYGQMFTSQNAPTVRPVKDNSFSGQNTAISHPSPLPPLPSQQHHQQQSLSGYSTLTWSSPGLPSTQDNLIRNHTGSLAVANNNPTITVADSLSCPVMQNVQPPKSSPVVSTVLSGSSGSSSTRTPPTANHPVEPVTSVTQPSELLQQKGVDSSSTTSSASPMPNSYDALEGGSYPDMLSSSASSPAPDPAPEPDPASAPAPASAPAPVVPQPSKMAKPFGYGYPTLQPGYQNATAPLISGVQPSNPVYSGFQQYPQVLQEESRRRHCYHRR

SEQ ID NO: 7324 - protein, 511 aa, Artificial Sequence
  Synthetic polypeptide
MSAPAGSSHPAASARIPPKFGGAAVSGAAAPAGPGAGPAPHQQNGPAQNQMQVPSGYGLHHQNYIAPSGHYSQGPGKMTSLPLDTQCGDYYSALYTVPTQNVTPNTVNQQPGAQQLYSRGPPAPHIVGSTLGSFQGAASSASHLHTSASQPYSSFVNHYNSPAMYSASSSVASQGFPSTCGHYAMSTVSNAAYPSVSYPSLPAGDTYGQMFTSQNAPTVRPVKDNSFSGQNTAISHPSPLPPLPSQQHHQQQSLSGYSTLTWSSPGLPSTQDNLIRNHTGSLAVANNNPTITVADSLSCPVMQNVQPPKSSPVVSTVLSGSSGSSSTRTPPTANHPVEPVTSVTQPSELLQQKGVQYGEYVNNQASSAPTPLSSTSDDEEEEEEDEEAGVDSSSTTSSASPMPNSYDALEGGSYPDMLSSSASSPAPDPAPEPDPASAPAPASAPAPVVPQPSKMAKPFGYGYPTLQPGYQNATAPLISGVQPSNPVYSGFQQYPQVLQEESRRRHCYHRR

SEQ ID NO: 7325 - protein, 62 aa, Artificial Sequence
  Synthetic polypeptide
MLQRGLWPWRTRLLPTPGTWRPARPWPLPPPPQSLSAALRGLPLLPRLDCTDTISAHCNLPA

SEQ ID NO: 7326 - protein, 50 aa, Artificial Sequence
  Synthetic polypeptide
MANWVFCNRCFQPPHRTSCFSLTNCGHVYCDACLGKGAVAHTCNPSTLGG

SEQ ID NO: 7327 - protein, 125 aa, Artificial Sequence
  Synthetic polypeptide
MNMSVLTLQEYEFEKQFNENEAIQWMQENWKKSFLFSALYAAFIFGGRHLMNKRAKFELRKPLVLWSLTLAVFSIFGALRTGAYMVYILMTKGLKQSVCDQGFYNGPVSKFWAYAFVLSKAPELD

SEQ ID NO: 7328 - protein, 1576 aa, Artificial Sequence
  Synthetic polypeptide
MESQEFIVLYTHQKMKKSKVWQDGILKITHLGNKAILYDDKGACLESLFLKCLEVKPGDDLESDRYLITVEEVKVAGAIGIVKQNVNKEAPELNSRTFISSGRSLGCQPSGLKRKFTGFQGPRQVPKKMVIMESGESAASHEAKKTGPTIFSPFCSMPPLFPTVGKKDVNNILADPENIVTYKNRERNAMDFSSVFSPSFQINPEVLCEENYFCSPVNSGNKLSDSLLTNEPVKRDSLASHYSGVSQNIRSKAQILALLKSESSSSCEELNSEMTEHFPQKQPQGSLKIATKPKYLIQQEECAEMKSTENLYYQHQSENTMRNKSRWAMYLSSQSSPIHSSTVDGNDTERKPKAQEDDVNSNLKDLSLQKIIQFVETYAEERKKYNVDQSVGNNDPSWNQEVKLEIPSFNESSSLQVTCSSAENDGILSESDIQEDNKIPFNQNDKGCIKGSVLIKENAQEVNTCGTLEKEYEQSESSLPELKHLQIESSNNSRISDDITDMISESKMDNESLNSIHESLSNVTQPFLEVTFNLNNFETSDTEEESQESNKISQDSESWVKDILVNDGNSCFQKRSENTNCEEIEGEHLPFLTSVSDKPTVTFPVKETLPSQFCDKTYVGFDMGICKTENTGKEIEEYSDTLSNFESFKWTDAVYGDNKEDANKPIQEVRINYDFALPPNKSKGINMNLHIPHIQNQIAENSNLFSEDAQPQPFILGSDLDKNDEHVLPSTSSSDNSVQLLNTNQNHYECIALDKSNTHISNSLFYPLGKKHLISKDTEAHISEPEDLGKIRSPPPDHVEVETAREGKQYWNPRNSSELSGLVNTISILKSLCEHSTALDSLEILKKKNTVFQQGTQQTYEPDSPPEVRKPFITVVSPKSPHLHKDSQQILKEDEVELSEPLQSVQFSSSGSKEETAFQAVIPKQIERKTCDPKPVEFQGHQVKGSATSGVMVRGHSSQLGCSQFPDSTEYENFMTETPELPSTCMQIDFLQVTSPEENISTLSPVSTFSLNSRDEDFMVEFSETSLKARTLPDDLHFLNLEGMKKSRSLENENLQRLSLLSRTQVPLITLPRTDGPPDLDSHSYMINSNTYESSGSPMLNLCEKSAVLSFSIEPEDQNETFFSEESREVNPGDVSLNNISTQSKWLKYQNTSQCNVATPNRVDKRITDGFFAEAVSGMHFRDTSERQSDAVNESSLDSVHLQMIKGMLYQQRQDFSSQDSVSRKKVLSLNLKQTSKTEEIKNVLGGSTCYNYSVKDLQEISGSELCFPSGQKIKSAYLPQRQIHIPAVFQSPAHYKQTFTSCLIEHLNILLFGLAQNLQKALSKVDISFYTSLKGEKLKNAENNVPSCHHSQPAKLVMVKKEGPNKGRLFYTCDGPKADRCKFFKWLEDVTPGYSTQEGARPGMVLSDIKSIGLYLRSQKIPLYEECQLLVRKGFDFQRKQYGKLKKFTTVNPEFYNEPKTKLYLKLSRKERSSAYSKNDLWVVSKTLDFELDTFIACSAFFGPSSINEIEILPLKGYFPSNWPTNMVVHALLVCNASTELTTLKNIQDYFNPATLPLTQYLLTTVVVKISSSNM

SEQ ID NO: 7329 - protein, 474 aa, Artificial Sequence
  Synthetic polypeptide
CEKSAVLSFSIEPEDQNETFFSEESREVNPGDVSLNNISTQSKWLKYQNTSQCNVATPNRVDKRITDGFFAEAVSGMHFRDTSERQSDAVNESSLDSVHLQMIKGMLYQQRQDFSSQDSVSRKKVLSLNLKQTSKTEEIKNVLGGSTCYNYSVKDLQEISGSELCFPSGQKIKSAYLPQRQIHIPAVFQSPAHYKQTFTSCLIEHLNILLFGLAQNLQKALSKVDISFYTSLKGEKLKNAENNVPSCHHSQPAKLVMVKKEGPNKGRLFYTCDGPKADRCKFFKWLEDVTPGYSTQEGARPGMVLSDIKSIGLYLRSQKIPLYEECQLLVRKGFDFQRKQYGKLKKFTTVNPEFYNEPKTKLYLKLSRKERSSAYSKNDLWVVSKTLDFELDTFIACSAFFGPSSINEIEILPLKGYFPSNWPTNMVVHALLVCNASTELTTLKNIQDYFNPATLPLTQYLLTTVVVKISSSNM

SEQ ID NO: 7330 - protein, 414 aa, Artificial Sequence
  Synthetic polypeptide
MNLIVKLRRSFRTLIVLLATFCLVSIVISAYFLYSGYKQEMTLIETTAEAECTDIKILPYRSMELKTVKPIDTSKTDPTVLLFVESQYSQLGQDIIAILESSRFQYHMVIAPGKGDIPPLTDNGKGKYTLVIYENILKYVSMDSWNRELLEKYCVEYSVSIIGFHKANENSLPSTQLKGFPLNLFNNLALKDCFVNPQSPLLHITKAPKVEKGPLPGEDWTIFQYNHSTYQPVLLTELQTEKSLSSLSSKTLFATVIQDLGLHDGIQRVLFGNNLNFWLHKLIFIDAISFLSGKRLTLSLDRYILVDIDDIFVGKEGTRMNVKDVKALLETQNLLRTQVANFTFNLGFSGKFYHTGTEEEDEGDDLLLRSVDEFWWFPHMWSHMQPHLFHNESSLVEQMILNKEFALQYENELI

SEQ ID NO: 7331 - protein, 35 aa, Artificial Sequence
  Synthetic polypeptide
MWSHMQPHLFHNESSLVEQMILNKEFALQYENELI

SEQ ID NO: 7332 - protein, 329 aa, Artificial Sequence
  Synthetic polypeptide
MNLIVKLRRSFRTLIVLLATFCLVSIVISAYFLYSGYKQEMTLIETTAEAECTDIKILPYRSMELKTVKPIDTSKTDPTVLLFVESQYSQLGQDIIAILESSRFQYHMVIAPGKGDIPPLTDNGKGKYTLVIYENILKYVSMDSWNRELLEKYCVEYSVSIIGFHKANENSLPSTQLKGFPLNLFNNLALKDCFVNPQSPLLHITKAPKVEKGPLPGEDWTIFQYNHSTYQPVLLTELQTEKSLSSLSSKTLFATVIQDLGLHDGIQRVLFGNNLNFWLHKLIFIDAISFLSGKRLTLSLDRYILVDIDDIFVGKEGTRMNVKDVKGHG

SEQ ID NO: 7333 - protein, 437 aa, Artificial Sequence
  Synthetic polypeptide
MSQQGYVATPPYSQPQPGIGLSPPHYGHYGDPSHTASPTGMMKPAGPLGATATRGMLPPGPPPPGPHQFGQNGAHATGHPPQRFPGPPPVNNVASSHAPYQPSAQSSYPGPISTSSVTQLGSQLSAMQINSYGSGMAPPSQGPPGPLSATSLQTPPRPPQPSILQPGSQVLPPPPTTLNGPGASPLPLPMYRPDGLSGPPPPNAQYQPPPLPGQTLGAGYPPQQANSGPQMAGAQLSYPGGFPGGPAQMAGPPQPQKKLDPDSIPSPIQVIENDRASRGGQVYATNTRGQIPPLVTTDCMIQDQGNASPRFIRCTTYCFPCTSDMAKQAQIPLAAVIKPFATIPSNESPLYLVNHGESGPVRCNRCKAYMCPFMQFIEGGRRYQCGFCNCVNDVPPFYFQHLDHIGRRLDHYEKPELSLGSYEYVATLDYCRQQYSQ

SEQ ID NO: 7334 - protein, 438 aa, Artificial Sequence
  Synthetic polypeptide
MSQQGYVATPPYSQPQPGIGLSPPHYGHYGDPSHTASPTGMMKPAGPLGATATRGMLPPGPPPPGPHQFGQNGAHATGHPPQRFPGPPPVNNVASSHAPYQPSAQSSYPGPISTSSVTQLGSQLSAMQINSYGSGMAPPSQGPPGPLSATSLQTPPRPPQPSILQPGSQVLPPPPTTLNGPGASPLPLPMYRPDGLSGPPPPNAQYQPPPLPGQTLGAGYPPQQAANSGPQMAGAQLSYPGGFPGGPAQMAGPPQPQKKLDPDSIPSPIQVIENDRASRGGQVYATNTRGQIPPLVTTDCMIQDQGNASPRFIRCTTYCFPCTSDMAKQAQIPLAAVIKPFATIPSNESPLYLVNHGESGPVRCNRCKAYMCPFMQFIEGGRRYQCGFCNCVNDVPPFYFQHLDHIGRRLDHYEKPELSLGSYEYVATLDYCRQQYSQ

SEQ ID NO: 7335 - protein, 68 aa, Artificial Sequence
  Synthetic polypeptide
MCPFMQFIEGGRRYQCGFCNCVNDVPPFYFQHLDHIGRRLDHYEKPELSLGSYEYVATLDYCRQQYSQ

SEQ ID NO: 7336 - protein, 199 aa, Artificial Sequence
  Synthetic polypeptide
MLSHNTMMKQRKQQATAIMKEVHGNDVDGMDLGKKVSIPRDIMLEELSHLSNRGARLFKMRQRRSDKYTFENFQYQSRAQINHSIAMQNGKVDGSNLEGGSQQAPLTPPNTPDPRSPPNPDNIAPGYSGPLKEIPPEKFNTTAVPKYYQSPWEQAISNDPELLEALYPKLFKPEGKAELPDYRSFNSCNSHRKDLQLHS

SEQ ID NO: 7337 - protein, 196 aa, Artificial Sequence
  Synthetic polypeptide
MLSHNTMMKQRKQQATAIMKEVHGNDVDGMDLGKKVSIPRDIMLEELSHLSNRGARLFKMRQRRSDKYTFENFQYQSRAQINHSIAMQNGKVDGSNLEGGSQQAPLTPPNTPDPRSPPNPDNIAPGYSGPLKEIPPEKFNTTAVPKYYQSPWEQAISNDPELLEALYPKLFKPEGKAELPDYRSFNSHRKDLQLHS

SEQ ID NO: 7338 - protein, 78 aa, Artificial Sequence
  Synthetic polypeptide
MLGMYVPDRFSLKSSRVQDGMGLYTARRVRKGEKFGPFAGEKRMPEDLDENMDYRLMWERFYLLPICGTIKRNRRQGI

SEQ ID NO: 7339 - protein, 197 aa, Artificial Sequence
  Synthetic polypeptide
MVGVGGGDVEDVTPRPGGCQISGRGARGCNGIPGAAAWEAALPRRRPRRHPSVNPRSRAAGSPRTRGRRTEERPSGSRLGDRGRGRALPGGRLGGRGRGRAPERVGGRGRGRGTAAPRAAPAARGSRPGPAGTMAAGSITTLPALPEDGGSGAFPPGHFKDPKRLYCKNGGFFLRIHPDGRVDGVREKSDPHSNTNT

SEQ ID NO: 7340 - protein, 64 aa, Artificial Sequence
  Synthetic polypeptide
MAAGSITTLPALPEDGGSGAFPPGHFKDPKRLYCKNGGFFLRIHPDGRVDGVREKSDPHSNTNT

SEQ ID NO: 7341 - protein, 796 aa, Artificial Sequence
  Synthetic polypeptide
MSSKKNRKRLNQSAENGSSLPSAASSCAEARAPSAGSDFAATSGTLTVTNLLEKVDDKIPKTFQNSLIHLGLNTMKSANICIGRPVLLTSLNGKQEVYTAWPMAGFPGGKVGLSEMAQKNVGVRPGDAIQVQPLVGAVLQAEEMDVALSDKDMEINEEELTGCILRKLDGKIVLPGNFLYCTFYGRPYKLQVLRVKGADGMILGGPQSDSDTDAQRMAFEQSSMETSSLELSLQLSQLDLEDTQIPTSRSTPYKPIDDRITNKASDVLLDVTQSPGDGSGLMLEEVTGLKCNFESAREGNEQLTEEERLLKFSIGAKCNTDTFYFISSTTRVNFTEIDKNSKEQDNQFKVTYDMIGGLSSQLKAIREIIELPLKQPELFKSYGIPAPRGVLLYGPPGTGKTMIARAVANEVGAYVSVINGPEIISKFYGETEAKLRQIFAEATLRHPSIIFIDELDALCPKREGAQNEVEKRVVASLLTLMDGIGSEVSEGQVLVLGATNRPHALDAALRRPGRFDKEIEIGVPNAQDRLDILQKLLRRVPHLLTEAELLQLANSAHGYVGADLKVLCNEAGLCALRRILKKQPNLPDVKVAGLVKITLKDFLQAMNDIRPSAMREIAIDVPNVSWSDIGGLESIKLKLEQAVEWPLKHPESFIRMGIQPPKGVLLYGPPGCSKTMIAKALANESGLNFLAIKGPELMNKYVGESERAVRETFRKARAVAPSIIFFDELDALAVERGSSLGAGNVADRVLAQLLTEMDGIEQLKDVTILAATNRPDRIDKKLPQPPQPAATTTLIS

SEQ ID NO: 7342 - protein, 451 aa, Artificial Sequence
  Synthetic polypeptide
MAGLRNESEQEPLLGDTPGSREWDILETEEHYKSRWRSIRILYLTMFLSSVGFSVVMMSIWPYLQKIDPTADTSFLGWVIASYSLGQMVASPIFGLWSNYRPRKEPLIVSILISVAANCLYAYLHIPASHNKYYMLVARGLLGIGAGNVAVVRSYTAGATSLQERTSSMANISMCQALGFILGPVFQTCFTFLGEKGVTWDVIKLQINMYTTPVLLSAFLGILNIILILAILREHRVDDSGRQCKSINFEEASTDEAQVPQGNIDQVAVVAINVLFFVTLFIFALFETIITPLTMDMYAWTQEQAVLYNGIILAALGVEAVVIFLGVKLLSKKIGERAILLGGLIVVWVGFFILLPWGNQFPKIQWEDLHNNSIPNTTFGEIIIGLWKSPMEDDNERPTGCSIEQAWCLYTPVIHLAQFLTSAVLIGLGYPVCNLMSYTLYSKILGPKPQA

SEQ ID NO: 7343 - protein, 406 aa, Artificial Sequence
  Synthetic polypeptide
MFLSSVGFSVVMMSIWPYLQKIDPTADTSFLGWVIASYSLGQMVASPIFGLWSNYRPRKEPLIVSILISVAANCLYAYLHIPASHNKYYMLVARGLLGIGAGNVAVVRSYTAGATSLQERTSSMANISMCQALGFILGPVFQTCFTFLGEKGVTWDVIKLQINMYTTPVLLSAFLGILNIILILAILREHRVDDSGRQCKSINFEEASTDEAQVPQGNIDQVAVVAINVLFFVTLFIFALFETIITPLTMDMYAWTQEQAVLYNGIILAALGVEAVVIFLGVKLLSKKIGERAILLGGLIVVWVGFFILLPWGNQFPKIQWEDLHNNSIPNTTFGEIIIGLWKSPMEDDNERPTGCSIEQAWCLYTPVIHLAQFLTSAVLIGLGYPVCNLMSYTLYSKILGPKPQA

SEQ ID NO: 7344 - protein, 55 aa, Artificial Sequence
  Synthetic polypeptide
MAGLRNESEQEPLLGDTPGSSFTPEASETTGRNEQLQTRRLKSCNTHHEGLQLRS

SEQ ID NO: 7345 - protein, 65 aa, Artificial Sequence
  Synthetic polypeptide
MAAEIDFLREQNRRLNEDFRRYQMESFSKYSSVQNDYRNKSGNPRGPIDPLKEADCRTQETSQIP

SEQ ID NO: 7346 - protein, 42 aa, Artificial Sequence
  Synthetic polypeptide
MESFSKYSSVQNDYRNKSGNPRGPIDPLKEADCRTQETSQIP

SEQ ID NO: 7347 - protein, 41 aa, Artificial Sequence
  Synthetic polypeptide
MAAEIDFLREQNRRLNEDFRRYQMESFSKYSSVQECENGLI

SEQ ID NO: 7348 - protein, 18 aa, Artificial Sequence
  Synthetic polypeptide
MESFSKYSSVQECENGLI

SEQ ID NO: 7349 - protein, 181 aa, Artificial Sequence
  Synthetic polypeptide
MDFKIEHTWDGFPVKHEPVFIRLNPGDRGVMMDISAPFFRDPPAPLGEPGKPFNELWDYEVVEAFFLNDITEQYLEVELCPHGQHLVLLLSGRRNVWKQELPLSFRMSRGETKWEGKAYLPWSYFPPNVTKFNSFAIHGSKDKRSYEALYPVPQHELQQGQKPDLQVLQEVSRRRHYYHRR

SEQ ID NO: 7350 - protein, 110 aa, Artificial Sequence
  Synthetic polypeptide
MTSAVVDSGGTILELSSNGVENQEESEKVSEYPAVIVEPVPSARLEQGYAAQVLVYDDETYMMQDVAEEQEVETENVETGTVAHACSPNTVGGQDGRIGCIQQFETILGK

SEQ ID NO: 7351 - protein, 39 aa, Artificial Sequence
  Synthetic polypeptide
MPAVSLPPKENALFKRILVMERAFNQESESLNYSLKFCH

SEQ ID NO: 7352 - protein, 83 aa, Artificial Sequence
  Synthetic polypeptide
MAVNGCLEGPSSNFLSCLFIVALVGSESTHPLCLEQPATQRCGLAMLPKLIFNSWPQGILPLQPPKALGLQVSHWSITLMTLC

SEQ ID NO: 7353 - protein, 110 aa, Artificial Sequence
  Synthetic polypeptide
MFISLWEFFYGHFFRFWMKWLLRQMTGKCELQRIFDTYVGAQRTHRIENSLTYSKNKVLQKATHVVQSEVDKYVDDIMKEKNINPEKDASSIRRGLIPFLCSQRWYVDIV

SEQ ID NO: 7354 - protein, 33 aa, Artificial Sequence
  Synthetic polypeptide
MKEKNINPEKDASSIRRGLIPFLCSQRWYVDIV

SEQ ID NO: 7355 - protein, 29 aa, Artificial Sequence
  Synthetic polypeptide
MSSHAQPLKLISPCPYSLSSASGMSLSAA

SEQ ID NO: 7356 - protein, 605 aa, Artificial Sequence
  Synthetic polypeptide
MEIKEEGASEEGQHFLPTAQANDPGDCQFTSIQKTPNEPQLEFILACKDLVAPVRDRKLNTLVQISVIHPVEQSLTRYSSTEIVEGTRDPLFLTGVTFPSEYPIYEETKIKLTVYDVKDKSHDTVRTSVLPEHKDPPPEVGRSFLGYASFKVGELLKSKEQLLVLSLRTSDGGKVVGTIEVSVVKMGEIEDGEADHITTDVQGQKCALVCECTAPESVSGKDNLPFLNSVLKNPVCKLYRFPTSDNKWMRIREQMSESILSFHIPKELISLHIKEDLCRNQEIKELGELSPHWDNLRKNVLTHCDQMVNMYQDILTELSKETGSSFKSSSSKGEKTLEFVPINLHLQRMQVHSPHLKDALYDVITVGAPAAHFQGFKNGGLRKLLHRFETERRNTGYQFIYYSPENTAKAKEVLSNINQLQPLIATHADLLLNSASQHSPDSLKNSLKMLSEKTELFVHAFKDQLVRSALLALYTARPGGILKKPPSPKSSTEESSPQDQPPVMRGQDSIPHHSDYDEEEWDRVWANVGKSLNCIIAMVDKLIERDGGSEGSGGNNDGEKEPSLTDAIPSHPRVKSNRVMKPVPGPWRLASLAVLQGSPVPARPS

SEQ ID NO: 7357 - protein, 420 aa, Artificial Sequence
  Synthetic polypeptide
MGEIEDGEADHITTDVQGQKCALVCECTAPESVSGKDNLPFLNSVLKNPVCKLYRFPTSDNKWMRIREQMSESILSFHIPKELISLHIKEDLCRNQEIKELGELSPHWDNLRKNVLTHCDQMVNMYQDILTELSKETGSSFKSSSSKGEKTLEFVPINLHLQRMQVHSPHLKDALYDVITVGAPAAHFQGFKNGGLRKLLHRFETERRNTGYQFIYYSPENTAKAKEVLSNINQLQPLIATHADLLLNSASQHSPDSLKNSLKMLSEKTELFVHAFKDQLVRSALLALYTARPGGILKKPPSPKSSTEESSPQDQPPVMRGQDSIPHHSDYDEEEWDRVWANVGKSLNCIIAMVDKLIERDGGSEGSGGNNDGEKEPSLTDAIPSHPRVKSNRVMKPVPGPWRLASLAVLQGSPVPARPS

SEQ ID NO: 7358 - protein, 476 aa, Artificial Sequence
  Synthetic polypeptide
MIHFHPLILPHERSFLGYASFKVGELLKSKEQLLVLSLRTSDGGKVVGTIEVSVVKMGEIEDGEADHITTDVQGQKCALVCECTAPESVSGKDNLPFLNSVLKNPVCKLYRFPTSDNKWMRIREQMSESILSFHIPKELISLHIKEDLCRNQEIKELGELSPHWDNLRKNVLTHCDQMVNMYQDILTELSKETGSSFKSSSSKGEKTLEFVPINLHLQRMQVHSPHLKDALYDVITVGAPAAHFQGFKNGGLRKLLHRFETERRNTGYQFIYYSPENTAKAKEVLSNINQLQPLIATHADLLLNSASQHSPDSLKNSLKMLSEKTELFVHAFKDQLVRSALLALYTARPGGILKKPPSPKSSTEESSPQDQPPVMRGQDSIPHHSDYDEEEWDRVWANVGKSLNCIIAMVDKLIERDGGSEGSGGNNDGEKEPSLTDAIPSHPRVKSNRVMKPVPGPWRLASLAVLQGSPVPARPS

SEQ ID NO: 7359 - protein, 387 aa, Artificial Sequence
  Synthetic polypeptide
MSSAAEPPPPPPPESAPSKPAASIASGGSNSSNKGGPEGVAAQAVASAASAGPADAEMEEIFDDASPGKQKEIQEPDPTYEEKMQTDRANRFEYLLKQTELFAHFIQPAAQKTPTSPLKMKPGRPRIKKDEKQNLLSVGDYRHRRTEQEEDEELLTESSKATNVCTRFEDSPSYVKWGKLRDYQVRGLNWLISLYENGINGILADEMGLGKTLQTISLLGYMKHYRNIPGPHMVLVPKSTLHNWMSEFKRWVPTLRSVCLIGDKEQRAAFVRDVLLPGEWDVCVTSYEMLIKEKSVFKKFNWRYLVIDEAHRIKNEKSKLSEIVREFKTTNRLLLTGTPLQNNLHELWSLLNFLLPDVFNSADDFDSWFDTNNCLGDQKLVERLHMT

SEQ ID NO: 7360 - protein, 52 aa, Artificial Sequence
  Synthetic polypeptide
MYGKIIFVLLLSGIVSISASSTTGVAMHTSTSSSVTKSYISSQTNERACSLC

SEQ ID NO: 7361 - protein, 19 aa, Artificial Sequence
  Synthetic polypeptide
MYGKIIFVLLLSERACSLC

SEQ ID NO: 7362 - protein, 123 aa, Artificial Sequence
  Synthetic polypeptide
MYGKIIFVLLLSEIVSISALSTTEVAMHTSTSSSVTKSYISSQTNDTHKRDTYAATPRAHEVSEISVRTVYPPEEETGERVQLAHHFSEPEITLIIFGVMAGVIGTILLISYGIRRLIKVTAL

SEQ ID NO: 7363 - protein, 90 aa, Artificial Sequence
  Synthetic polypeptide
MYGKIIFVLLLSDTHKRDTYAATPRAHEVSEISVRTVYPPEEETGERVQLAHHFSEPEITLIIFGVMAGVIGTILLISYGIRRLIKVTAL

SEQ ID NO: 7364 - protein, 97 aa, Artificial Sequence
  Synthetic polypeptide
MHTSTSSSVTKSYISSQTNDTHKRDTYAATPRAHEVSEISVRTVYPPEEETGERVQLAHHFSEPEITLIIFGVMAGVIGTILLISYGIRRLIKVTAL

SEQ ID NO: 7365 - protein, 110 aa, Artificial Sequence
  Synthetic polypeptide
MYGKIIFVLLLSEIVSISALSTTEVAMHTSTSSSVTKSYISSQTNDTHKRDTYAATPRAHEVSEISVRTVYPPEEETEITLIIFGVMAGVIGTILLISYGIRRLIKVTAL

SEQ ID NO: 7366 - protein, 78 aa, Artificial Sequence
  Synthetic polypeptide
MYGKIIFVLLLSEIVSISALSTTEVAMHTSTSSSVTKSYISSQTNEITLIIFGVMAGVIGTILLISYGIRRLIKVTAL

SEQ ID NO: 7367 - protein, 91 aa, Artificial Sequence
  Synthetic polypeptide
MYGKIIFVLLLSEIVSISALSTTEVAMHTSTSSSVTKSYISSQTNGERVQLAHHFSEPEITLIIFGVMAGVIGTILLISYGIRRLIKVTAL

SEQ ID NO: 7368 - protein, 58 aa, Artificial Sequence
  Synthetic polypeptide
MYGKIIFVLLLSGERVQLAHHFSEPEITLIIFGVMAGVIGTILLISYGIRRLIKVTAL

SEQ ID NO: 7369 - protein, 336 aa, Artificial Sequence
  Synthetic polypeptide
MNVTSLFSFTSPAVKRLLGWKQGDEEEKWAEKAVDALVKKLKKKKGAMEELEKALSCPGQPSNCVTIPRSLDGRLQVSHRKGLPHVIYCRVWRWPDLQSHHELKPLECCEFPFGSKQKEVCINPYHYKRVESPVLPPVLVPRHSEYNPQHSLLAQFRNLGQNEPHMPLNATFPDSFQQPNSHPFPHSPNSSYPNSPGSSSSTYPHSPTSSDPGSPFQMPADTPPPAYLPPEDPMTQDGSQPMDTNMMAPPLPSEINRGDVQAVAYEEPKHWCSIVYYELNNRVGEAFHASSTSVLVDGFTDPSNNKNRFCLGLLSNVNRNSTIENTRRHIGKDVIP

SEQ ID NO: 7370 - protein, 104 aa, Artificial Sequence
  Synthetic polypeptide
MSHYFYLTPQILLPFSPLTSQEFDLIRRKAGASWQDETRWSDSSVTTYTGSYRKKQLDKSMCSQFSFRAGQHEPECKQMSLTNSSACHLLCWAGTQETTDIKGL

SEQ ID NO: 7371 - protein, 4 aa, Artificial Sequence
  Synthetic polypeptide
QILP

SEQ ID NO: 7372 - protein, 1963 aa, Artificial Sequence
  Synthetic polypeptide
MASEDNRVPSPPPTGDDGGGGGREETPTEGGALSLKPGLPIRGIRMKFAVLTGLVEVGEVSNRDIVETVFNLLVGGQFDLEMNFIIQEGESINCMVDLLEKCDITCQAEVWSMFTAILKKSIRNLQVCTEVGLVEKVLGKIEKVDNMIADLLVDMLGVLASYNLTVRELKLFFSKLQGDKGRWPPHAGKLLSVLKHMPQKYGPDAFFNFPGKSAAAIALPPIAKWPYQNGFTFHTWLRMDPVNNINVDKDKPYLYCFRTSKGLGYSAHFVGGCLIVTSIKSKGKGFQHCVKFDFKPQKWYMVTIVHIYNRWKNSELRCYVNGELASYGEITWFVNTSDTFDKCFLGSSETADANRVFCGQMTAVYLFSEALNAAQIFAIYQLGLGYKGTFKFKAESDLFLAEHHKLLLYDGKLSSAIAFTYNPRATDAQLCLESSPKDNPSIFVHSPHALMLQDVKAVLTHSIQSAMHSIGGVQVLFPLFAQLDYRQYLSDEIDLTICSTLLAFIMELLKNSIAMQEQMLACKGFLVIGYSLEKSSKSHVSRAVLELCLAFSKYLSNLQNGMPLLKQLCDHVLLNPAIWIHTPAKVQLMLYTYLSTEFIGTVNIYNTIRRVGTVLLIMHTLKYYYWAVNPQDRSGITPKGLDGPRPNQKEMLSLRAFLLMFIKQLVMKDSGVKEDELQAILNYLLTMHEDDNLMDVLQLLVALMSEHPNSMIPAFDQRNGLRVIYKLLASKSEGIRVQALKAMGYFLKHLAPKRKAEVMLGHGLFSLLAERLMLQTNLITMTTYNVLFEILIEQIGTQVIHKQHPDPDSSVKIQNPQILKVIATLLRNSPQCPESMEVRRAFLSDMIKLFNNSRENRRSLLQCSVWQEWMLSLCYFNPKNSDEQKITEMVYAIFRILLYHAVKYEWGGWRVWVDTLSITHSKVTFEIHKENLANIFREQQGKVDEEIGLCSSTSVQAASGIRRDINVSVGSQQPDTKDSPVCPHFTTNGNENSSIEKTSSLESASNIELQTTNTSYEEMKAEQENQELPDEGTLEETLTNETRNADDLEVSSDIIEAVAISSNSFITTGKDSMTVSEVTASISSPSEEDASEMPEFLDKSIVEEEEDDDYVELKVEGSPTEEANLPTELQDNSLSPAASEAGEKLDMFGNDDKLIFQEGKPVTEKQTDTETQDSKDSGIQTMTASGSSAMSPETTVSQIAVESDLGQMLEEGKKATNLTRETKLINDCHGSVSEASSEQKIAKLDVSNVATDTERLELKASPNVEAPQPHRHVLEISRQHEQPGQGIAPDAVNGQRRDSRSTVFRIPEFNWSQMHQRLLTDLLFSIETDIQMWRSHSTKTVMDFVNSSDNVIFVHNTIHLISQVMDNMVMACGGILPLLSAATSATHELENIEPTQGLSIEASVTFLQRLISLVDVLIFASSLGFTEIEAEKSMSSGGILRQCLRLVCAVAVRNCLECQQHSQLKTRGDKALKPMHSLIPLGKSAAKSPVDIVTGGISPVRDLDRLLQDMDINRLRAVVFRDIEDSKQAQFLALAVVYFISVLMVSKYRDILEPQNERHSQSCTETGSENENVSLSEITPAAFSTLTTASVEESESTSSARRRDSGIGEETATGLGSHVEVTPHTAPPGVSAGPDAISEVLSTLSLEVNKSPETKNDRGNDLDTKATPSVSVSKNVNVKDILRSLVNIPADGVTVDPALLPPACLGALGDLSVEQPVQFRSFDRSVIVAAKKSAVSPSTFNTSIPTNAVSVVSSVDSAQASDMGGESPGSRSSNAKLPSVPTVDSVSQDPVSNMSITERLEHALEKAAPLLREIFVDFAPFLSRTLLGSHGQELLIEGTSLVCMKSSSSVVELVMLLCSQRSLVGGYRQRNGGQGNVKMEQRDPVFFGHKPRNADSHQKLEEARNRVSPGVSRRRMALLILLFWLSKTDFRLLAFRIMRKQIYSTLSHQVCGNLLQQLQETNI

SEQ ID NO: 7373 - protein, 16 aa, Artificial Sequence
  Synthetic polypeptide
VIMSSLYTTQFISSLK

SEQ ID NO: 7374 - protein, 126 aa, Artificial Sequence
  Synthetic polypeptide
MQAPRAALVFALVIALVPVGRGNYEELENSGDTTVESERPNKVTIPSTFAAVTIKETLNANINSTNFAPDENQLEFILMVLIPLILLVLLLLSVVFLATYYKRKRTKQEPSSQGSQSALQTCLSIP

SEQ ID NO: 7375 - protein, 126 aa, Artificial Sequence
  Synthetic polypeptide
MASEGTNIPSPVVRQIDKQFLICSICLERYKNPKVLPCLHTFCERCLQNYIPAHSLTLSCPVCRQTSILPEKGVAALQNNFFITNLMDVLQRTPGSNAEESSILETVTAVAAGKPLSCPNHDGNKK

SEQ ID NO: 7376 - protein, 153 aa, Artificial Sequence
  Synthetic polypeptide
MHRSGRYGTQQQRAGSKTAGPPCQWSRMASEGTNIPSPVVRQIDKQFLICSICLERYKNPKVLPCLHTFCERCLQNYIPAHSLTLSCPVCRQTSILPEKGVAALQNNFFITNLMDVLQRTPGSNAEESSILETVTAVAAGKPLSCPNHDGNKK

SEQ ID NO: 7377 - protein, 40 aa, Artificial Sequence
  Synthetic polypeptide
MDVLQRTPGSNAEESSILETVTAVAAGKPLSCPNHDGNKK

SEQ ID NO: 7378 - protein, 1108 aa, Artificial Sequence
  Synthetic polypeptide
MAGLRRPQPGCYCRTAAAVNLLLGVFQVLLPCCRPGGAQGQAIEPLPNVVELWQAEEGELLLPTQGDSEEGLEEPSQEQSFSDKLFSGKGLHFQPSVLDFGIQFLGHPVAKILHAYNPSRDSEVVVNSVFAAAGHFHVPPVPCRVIPAMGKTSFRIIFLPTEEGSIESSLFINTSSYGVLSYHVSGIGTRRISTEGSAKQLPNAYFLLPKVQSIQLSQMQAETTNTSLLQVQLECSLHNKVCQQLKGCYLESDDVLRLQMSIMVTMENFSKEFEENTQHLLDHLSIVYVATDESETSDDSAVNMYILHSGNSLIWIQDIRHFSQRDALSLQFEPVLLPTSTTNFTKIASFTCKAATSCDSGIIEDVKKTTHTPTLKACLFSSVAQGYFRMDSSATQFHIETHENTSGLWSIWYRNHFDRSVVLNDVFLSKETKHMLKILNFTGPLFLPPGCWNIFSLKLAVKDIAINLFTNVFLTTNIGAIFAIPLQIYSAPTKEGSLGFEVIAHCGMHYFMGKSKAGNPNWNGSLSLDQSTWNVDSELANKLYERWKKYKNGDVCKFGTDMQMINFTTGEFQLTEACPYLGTHSEESRFGILHLHLQPLEMKRVGVVFTPADYGKVTSLILIRNNLTVIDMIGVEGFGARELLKVGGRLPGAGGSLRFKVPESTLMDCRRQLKDSKQILSITKNFKVENIGPLPITVSSLKINGYNCQGYGFEVLDCHQFSLDPNTSRDISIVFTPDFTSSWVIRDLSLVTAADLEFRFTLNVTLPHHLLPLCADVVPGPSWEESFWRLTVFFVSLSLLGVILIAFQQAQYILMEFMKTRQRQNASSSSQQNNGPMDVISPHSYKSNCKNFLDTYGPSDKGRGKNCLPVNTPQSRIQNAAKRSPATYGHSQKKHKCSVYYSKHKTSTAAASSTSTTTEEKQTSPLGSSLPAAKEDICTDAMRENWISLRYASGINVNLQKNLTLPKNLLNKEENTLKNTIVFSNPSSECSMKEGIQTCMFPKETDIKTSENTAEFKERELCPLKTSKKLPENHLPRNSPQYHQPDLPEISRKNNGNNQQVPVKNEVDHCENLKKVDTKPSSEKKIHKTSREDMFSEKQDIPFVENED

SEQ ID NO: 7379 - protein, 1191 aa, Artificial Sequence
  Synthetic polypeptide
MAGLRRPQPGCYCRTAAAVNLLLGVFQVLLPCCRPGGAQGQAIEPLPNVVELWQAEEGELLLPTQGDSEEGLEEPSQEQSFSDKLFSGKGLHFQPSVLDFGIQFLGHPVAKILHAYNPSRDSEVVVNSVFAAAGHFHVPPVPCRVIPAMGKTSFRIIFLPTEEGSIESSLFINTSSYGVLSYHVSGIGTRRISTEGSAKQLPNAYFLLPKVQSIQLSQMQAETTNTSLLQVQLECSLHNKVCQQLKGCYLESDDVLRLQMSIMVTMENFSKEFEENTQHLLDHLSIVYVATDESETSDDSAVNMYILHSGNSLIWIQDIRHFSQRDALSLQFEPVLLPTSTTNFTKIASFTCKATSCDSGIIEDVKKTTHTPTLKACLFSSVAQGYFRMDSSATQFHIETHENTSGLWSIWYRNHFDRSVVLNDVFLSKETKHMLKILNFTGPLFLPPGCWNIFSLKLAVKDIAINLFTNVFLTTNIGAIFAIPLQIYSAPTKEGSLGFEVIAHCGMHYFMGKSKAGNPNWNGSLSLDQSTWNVDSELANKLYERWKKYKNGDVCKRNVLGTTRFAHLKKSKESESFVFFLPRLIAEPGLMLNFSATALRSRMIKYFVVQNPSSWPVSLQLLPLSLYPKPEALVHLLHRWFGTDMQMINFTTGEFQLTEACPYLGTHSEESRFGILHLHLQPLEMKRVGVVFTPADYGKVTSLILIRNNLTVIDMIGVEGFGARELLKVGGRLPGAGGSLRFKVPESTLMDCRRQLKDSKQILSITKNFKVENIGPLPITVSSLKINGYNCQGYGFEVLDCHQFSLDPNTSRDISIVFTPDFTSSWVIRDLSLVTAADLEFRFTLNVTLPHHLLPLCADVVPGPSWEESFWRLTVFFVSLSLLGVILIAFQQAQYILMEFMKTRQRQNASSSSQQNNGPMDVISPHSYKSNCKNFLDTYGPSDKGRGKNCLPVNTPQSRIQNAAKRSPATYGHSQKKHKCSVYYSKHKTSTAAASSTSTTTEEKQTSPLGSSLPAAKEDICTDAMRENWISLRYASGINVNLQKNLTLPKNLLNKEENTLKNTIVFSNPSSECSMKEGIQTCMFPKETDIKTSENTAEFKERELCPLKTSKKLPENHLPRNSPQYHQPDLPEISRKNNGNNQQVPVKNEVDHCENLKKVDTKPSSEKKIHKTSREDMFSEKQDIPFVENED

SEQ ID NO: 7380 - protein, 1192 aa, Artificial Sequence
  Synthetic polypeptide
MAGLRRPQPGCYCRTAAAVNLLLGVFQVLLPCCRPGGAQGQAIEPLPNVVELWQAEEGELLLPTQGDSEEGLEEPSQEQSFSDKLFSGKGLHFQPSVLDFGIQFLGHPVAKILHAYNPSRDSEVVVNSVFAAAGHFHVPPVPCRVIPAMGKTSFRIIFLPTEEGSIESSLFINTSSYGVLSYHVSGIGTRRISTEGSAKQLPNAYFLLPKVQSIQLSQMQAETTNTSLLQVQLECSLHNKVCQQLKGCYLESDDVLRLQMSIMVTMENFSKEFEENTQHLLDHLSIVYVATDESETSDDSAVNMYILHSGNSLIWIQDIRHFSQRDALSLQFEPVLLPTSTTNFTKIASFTCKAATSCDSGIIEDVKKTTHTPTLKACLFSSVAQGYFRMDSSATQFHIETHENTSGLWSIWYRNHFDRSVVLNDVFLSKETKHMLKILNFTGPLFLPPGCWNIFSLKLAVKDIAINLFTNVFLTTNIGAIFAIPLQIYSAPTKEGSLGFEVIAHCGMHYFMGKSKAGNPNWNGSLSLDQSTWNVDSELANKLYERWKKYKNGDVCKRNVLGTTRFAHLKKSKESESFVFFLPRLIAEPGLMLNFSATALRSRMIKYFVVQNPSSWPVSLQLLPLSLYPKPEALVHLLHRWFGTDMQMINFTTGEFQLTEACPYLGTHSEESRFGILHLHLQPLEMKRVGVVFTPADYGKVTSLILIRNNLTVIDMIGVEGFGARELLKVGGRLPGAGGSLRFKVPESTLMDCRRQLKDSKQILSITKNFKVENIGPLPITVSSLKINGYNCQGYGFEVLDCHQFSLDPNTSRDISIVFTPDFTSSWVIRDLSLVTAADLEFRFTLNVTLPHHLLPLCADVVPGPSWEESFWRLTVFFVSLSLLGVILIAFQQAQYILMEFMKTRQRQNASSSSQQNNGPMDVISPHSYKSNCKNFLDTYGPSDKGRGKNCLPVNTPQSRIQNAAKRSPATYGHSQKKHKCSVYYSKHKTSTAAASSTSTTTEEKQTSPLGSSLPAAKEDICTDAMRENWISLRYASGINVNLQKNLTLPKNLLNKEENTLKNTIVFSNPSSECSMKEGIQTCMFPKETDIKTSENTAEFKERELCPLKTSKKLPENHLPRNSPQYHQPDLPEISRKNNGNNQQVPVKNEVDHCENLKKVDTKPSSEKKIHKTSREDMFSEKQDIPFVENED

SEQ ID NO: 7381 - protein, 969 aa, Artificial Sequence
  Synthetic polypeptide
PVPCRVIPAMGKTSFRIIFLPTEEGSIESSLFINTSSYGVLSYHVSGIGTRRISTEGSAKQLPNAYFLLPKVQSIQLSQMQAETTNTSLLQVQLECSLHNKVCQQLKGCYLESDDVLRLQMSIMVTMENFSKEFEENTQHLLDHLSIVYVATDESETSDDSAVNMYILHSGNSLIWIQDIRHFSQRDALSLQFEPVLLPTSTTNFTKIASFTCKAATSCDSGIIEDVKKTTHTPTLKACLFSSVAQGYFRMDSSATQFHIETHENTSGLWSIWYRNHFDRSVVLNDVFLSKETKHMLKILNFTGPLFLPPGCWNIFSLKLAVKDIAINLFTNVFLTTNIGAIFAIPLQIYSAPTKEGSLGFEVIAHCGMHYFMGKSKAGNPNWNGSLSLDQSTWNVDSELANKLYERWKKYKNGDVCKFGTDMQMINFTTGEFQLTEACPYLGTHSEESRFGILHLHLQPLEMKRVGVVFTPADYGKVTSLILIRNNLTVIDMIGVEGFGARELLKVGGRLPGAGGSLRFKVPESTLMDCRRQLKDSKQILSITKNFKVENIGPLPITVSSLKINGYNCQGYGFEVLDCHQFSLDPNTSRDISIVFTPDFTSSWVIRDLSLVTAADLEFRFTLNVTLPHHLLPLCADVVPGPSWEESFWRLTVFFVSLSLLGVILIAFQQAQYILMEFMKTRQRQNASSSSQQNNGPMDVISPHSYKSNCKNFLDTYGPSDKGRGKNCLPVNTPQSRIQNAAKRSPATYGHSQKKHKCSVYYSKHKTSTAAASSTSTTTEEKQTSPLGSSLPAAKEDICTDAMRENWISLRYASGINVNLQKNLTLPKNLLNKEENTLKNTIVFSNPSSECSMKEGIQTCMFPKETDIKTSENTAEFKERELCPLKTSKKLPENHLPRNSPQYHQPDLPEISRKNNGNNQQVPVKNEVDHCENLKKVDTKPSSEKKIHKTSREDMFSEKQDIPFVENED

SEQ ID NO: 7382 - protein, 223 aa, Artificial Sequence
  Synthetic polypeptide
MAAGTAARKAAPVLEAPPQQEQLSHTKLSAEDTWNLQQERMYKMHRGHDSMHVEMILIFLCVLVIAQIVLVQWRQRHGRSYNLVTLLQMWVVPLYFTIKLYWWRFLSMWGMFSVITSYILFRATRKPLSGRTPRLVYKWFLLIYKLSYAFGVVGYLAIMFTMCGFNLFFKIKARDSMDFGIVSLFYGLYYGVMGRDFAEICSDYMASTIGGLGWSWKPLSSAN

SEQ ID NO: 7383 - protein, 95 aa, Artificial Sequence
  Synthetic polypeptide
MADPTILVYKWFLLIYKLSYAFGVVGYLAIMFTMCGFNLFFKIKARDSMDFGIVSLFYGLYYGVMGRDFAEICSDYMASTIGGLGWSWKPLSSAN

SEQ ID NO: 7384 - protein, 163 aa, Artificial Sequence
  Synthetic polypeptide
MAAGTAARKAAPVLEAPPQQEQLVTLLQMWVVPLYFTIKLYWWRFLSMWGMFSVITSYILFRATRKPLSGRTPRLVYKWFLLIYKLSYAFGVVGYLAIMFTMCGFNLFFKIKARDSMDFGIVSLFYGLYYGVMGRDFAEICSDYMASTIGGLGWSWKPLSSAN

SEQ ID NO: 7385 - protein, 102 aa, Artificial Sequence
  Synthetic polypeptide
MAAGTAARKAAPVLEAPPQQEQLSHTKLSAEDTWNLQQERMYKMHRGHDSMHVEMILIFLCVLVIAQIVLVQWRQRHGRSYNQDGPHQMPAIQSWTSEPPEL

SEQ ID NO: 7386 - protein, 28 aa, Artificial Sequence
  Synthetic polypeptide
MADPTIKMALTRCQPFNLGLLSLQNCEK

SEQ ID NO: 7387 - protein, 57 aa, Artificial Sequence
  Synthetic polypeptide
MAAGTAARKAAPVLEAPPQQEQLSHTKLSAEDTWNKMALTRCQPFNLGLLSLQNCEK

SEQ ID NO: 7388 - protein, 39 aa, Artificial Sequence
  Synthetic polypeptide
MFGKMFFVFCQESGYDTILRVLGSNVREFLQDTLFPQPQ

SEQ ID NO: 7389 - protein, 107 aa, Artificial Sequence
  Synthetic polypeptide
MYGFVNHALELLVIRNYGPEVWEDIKKEAQLDEEGQFLVRIIYDDSKTYDLVAAASKVLNLNAGEILQMFGKMFFVFCQESGYDTILRVLGSNVREFLQDTLFPQPQ

SEQ ID NO: 7390 - protein, 87 aa, Artificial Sequence
  Synthetic polypeptide
MLMCFIKEAQLDEEGQFLVRIIYDDSKTYDLVAAASKVLNLNAGEILQMFGKMFFVFCQESGYDTILRVLGSNVREFLQDTLFPQPQ

SEQ ID NO: 7391 - protein, 300 aa, Artificial Sequence
  Synthetic polypeptide
MAAQGCAASRLLQLLLQLLLLLLLLAAGGARARWRGEGTSAHLRDIFLGRCAEYRALLSPEQRNKNCTAIWEAFKVALDKDPCSVLPSDYDLFINLSRHSIPRDKSLFWENSHLLVNSFADNTRRFMPLSDVLYGRVADFLSWCRQKNDSGLDYQSCPTSEDCENNPVDSFWKRASIQYSKDSSGVIHVMLNGSEPTGAYPIKGFFADYEIPNLQKEKITRIEIWVMHEIGGPNVESCGEGSMKVLEKRLKDMGFQYSCINDYRPVKLLQCVDHSTHPDCALKSKIGHRGVHREDHVQTE

SEQ ID NO: 7392 - protein, 315 aa, Artificial Sequence
  Synthetic polypeptide
MAAQGCAASRLLQLLLQLLLLLLLLAAGGARARWRGEGTSAHLRDIFLGRCAEYRALLSPEQRQIRNSREPPVLHTTQNKNCTAIWEAFKVALDKDPCSVLPSDYDLFINLSRHSIPRDKSLFWENSHLLVNSFADNTRRFMPLSDVLYGRVADFLSWCRQKNDSGLDYQSCPTSEDCENNPVDSFWKRASIQYSKDSSGVIHVMLNGSEPTGAYPIKGFFADYEIPNLQKEKITRIEIWVMHEIGGPNVESCGEGSMKVLEKRLKDMGFQYSCINDYRPVKLLQCVDHSTHPDCALKSKIGHRGVHREDHVQTE

SEQ ID NO: 7393 - protein, 24 aa, Artificial Sequence
  Synthetic polypeptide
SPCSGKIATSLLTALQTTPVVLCP

SEQ ID NO: 7394 - protein, 150 aa, Artificial Sequence
  Synthetic polypeptide
GLDYQSCPTSEDCENNPVDSFWKRASIQYSKDSSGVIHVMLNGSEPTGAYPIKGFFADYEIPNLQKEKITRIEIWVMHEIGGPNVESCGEGSMKVLEKRLKDMGFQYSCINDYRPVKLLQCVDHSTHPDCALKSKIGHRGVHREDHVQTE

SEQ ID NO: 7395 - protein, 50 aa, Artificial Sequence
  Synthetic polypeptide
VQSQQEPIPSKVFLQIMKFQTSRRKKLHESRSGLCMKLGDPMWNPAGKAA

SEQ ID NO: 7396 - protein, 91 aa, Artificial Sequence
  Synthetic polypeptide
MANCEFSPVSGDKPCCRLSRRAQLCLGVSILVLILVVVLAVVVPRWRQQWSGPGTTKRFPETVLARCVKYTEIHPEMRRGFAVLAGLVSSS

SEQ ID NO: 7397 - protein, 333 aa, Artificial Sequence
  Synthetic polypeptide
MSNNGADLTFGYISCFVAILLFGSNFVPLKKFDTGDGMFLQWVLCAAIWLVALVVNLILHCPKFWPFAMLGGCIWATGNIAVVPIIKTIGLGLGILIWGSFNALTGWASSRFGWFGLDAEEVSNPLLNYIGAGLSVVSAFIFLFIKSEIPNNTCSMDTTPLITEHVINTTQDPCSWVDKLSTVHHRIVGCSLAVISGVLYGSTFVPIIYIKDHSKRNDSIYAGASQYDLDYVFAHFSGIFLTSTVYFLAYCIAMKNSPKLYPEAVLPGFLSGVLWAIATCCWFIANHSLSAVVSFPIITAGPGFIAAMWGIFMFKEIKLLRRLRQQHHLSPGV

SEQ ID NO: 7398 - protein, 53 aa, Artificial Sequence
  Synthetic polypeptide
MLVPLAKLSCLDGLQLLLCLELLPIILFIPGIRTRDGKSLTKNSFQSCKFYSW

SEQ ID NO: 7399 - protein, 68 aa, Artificial Sequence
  Synthetic polypeptide
MLVPLAKLSCLAYQCFHALKIKKNYLPLCATRWSSTSTVPRITTHYTIYPRDKDKRWEVTHQEQLPVL

SEQ ID NO: 7400 - protein, 1109 aa, Artificial Sequence
  Synthetic polypeptide
MAPTLLQKLFNKRGSSGSSAAASAQGRAPKEGPAFSWSCSEFDLNEIRLIVYQDCDRRGRQVLFDSKAVQKIEEVTAQKTEDVPIKISAKCCQGSSSVSSSSSSSISSHSSSGGSSHHAKEQLPKYQYTRPASDVNMLGEMMFGSVAMSYKGSTLKIHYIRSPPQLMISKVFSARMGSFCGSTNNLQDSFEYINQDPNLGKLNTNQNSLGPCRTGSNLAHSTPVDMPSRGQNEDRDSGIARSASLSSLLITPFPSPSSSTSSSSSYQRRWLRSQTTSLENGIIPRRSTDETFSLAEETCSSNPAMVRRKKIAISIIFSLCEKEEAQRNFQDFFFSHFPLFESHMNRLKSAIEKAMISCRKIAESSLRVQFYVSRLMEALGEFRGTIWNLYSVPRIAEPVWLTMMSGTLEKNQLCQRFLKEFTLLIEQINKNQFFAALLTAVLTYHLAWVPTVMPVDHPPIKAFSEKRTSQSVNMLAKTHPYNPLWAQLGDLYGAIGSPVRLTRTVVVGKQKDLVQRILYVLTYFLRCSELQENQLTWSGNHGEGDQVLNGSKIITALEKGEVEESEYVVITVRNEPALVPPILPPTAAERHNPWPTGFPECPEGTDSRDLGLKPDKEANRRPEQGSEACSAGCLGPASDASWKPQNAFCGDEKNKEAPQDGSSRLPSCEVLGAGMKMDQQAVCELLKVEMPTRLPDRSVAWPCPDRHLREKPSLEKVTFQIGSFASPESDFESRMKKMEERVKACGPSLEASEAADVAQDPQVSRSPFKPGFQENVCCPQNRLSEGDEGESDKGFAEDRGSRNDMAADIAGQLSHAADLGTASHGAGGTGGRRLEATRGLYVKAAEGPVLEPVAPRCVQRGPGLVAGANIPCGDDNKKANFRTEGDIPRNESSDSALGDSDDEACASAMLDLGHGGDRTGGSLEVELPLPRSQSISTQNVRNFGRSLLAGYCPTYMPDLVLHGTGSDEKLKQCLVADLVHTVHHPVLDEPIAEAVCIIADTDKWSVQVATSQRKVTDNMKLGQDVLVSSQVSSLLQSILQLYKLHLPADFCIMHLEDRLQEMYLKSKMLSEYLRGHTRVHVKELGVVLGLIGRRDLPCRRGNFGLWTFG

SEQ ID NO: 7401 - protein, 1132 aa, Artificial Sequence
  Synthetic polypeptide
MCGGTANTTNQPESWQDSARCVSDAVPGAGRIYRALLCTKIKKHTGVDRSTDHTELDNSWSCSEFDLNEIRLIVYQDCDRRGRQVLFDSKAVQKIEEVTAQKTEDVPIKISAKCCQGSSSVSSSSSSSISSHSSSGGSSHHAKEQLPKYQYTRPASDVNMLGEMMFGSVAMSYKGSTLKIHYIRSPPQLMISKVFSARMGSFCGSTNNLQDSFEYINQDPNLGKLNTNQNSLGPCRTGSNLAHSTPVDMPSRGQNEDRDSGIARSASLSSLLITPFPSPSSSTSSSSSYQRRWLRSQTTSLENGIIPRRSTDETFSLAEETCSSNPAMVRRKKIAISIIFSLCEKEEAQRNFQDFFFSHFPLFESHMNRLKSAIEKAMISCRKIAESSLRVQFYVSRLMEALGEFRGTIWNLYSVPRIAEPVWLTMMSGTLEKNQLCQRFLKEFTLLIEQINKNQFFAALLTAVLTYHLAWVPTVMPVDHPPIKAFSEKRTSQSVNMLAKTHPYNPLWAQLGDLYGAIGSPVRLTRTVVVGKQKDLVQRILYVLTYFLRCSELQENQLTWSGNHGEGDQVLNGSKIITALEKGEVEESEYVVITVRNEPALVPPILPPTAAERHNPWPTGFPECPEGTDSRDLGLKPDKEANRRPEQGSEACSAGCLGPASDASWKPQNAFCGDEKNKEAPQDGSSRLPSCEVLGAGMKMDQQAVCELLKVEMPTRLPDRSVAWPCPDRHLREKPSLEKVTFQIGSFASPESDFESRMKKMEERVKACGPSLEASEAADVAQDPQVSRSPFKPGFQENVCCPQNRLSEGDEGESDKGFAEDRGSRNDMAADIAGQLSHAADLGTASHGAGGTGGRRLEATRGLYVKAAEGPVLEPVAPRCVQRGPGLVAGANIPCGDDNKKANFRTEGDIPRNESSDSALGDSDDEACASAMLDLGHGGDRTGGSLEVELPLPRSQSISTQNVRNFGRSLLAGYCPTYMPDLVLHGTGSDEKLKQCLVADLVHTVHHPVLDEPIAEAVCIIADTDKWSVQVATSQRKVTDNMKLGQDVLVSSQVSSLLQSILQLYKLHLPADFCIMHLEDRLQEMYLKSKMLSEYLRGHTRVHVKELGVVLGLIGRRDLPCRRGNFGLWTFG

SEQ ID NO: 7402 - protein, 219 aa, Artificial Sequence
  Synthetic polypeptide
MAGVGDAAAPGEGGGGGVDGPQRDGRGEAEQPGGSGGQGPPPAPQLTETLGFYESDRRRERRRGRTELSLLRFLSAELTRGYFLEHNEAKYTERRERVYTCLRIPRELEKLMVFGIFLCLDAFLYVFTLLPLRVFLALFRLLTLPCYGLRDRRLLQPAQVCDILKGVILVICYFMMHYVDYSMMYHLIRGQSVIKLYIIYNMLEAGTVAHTCNPSTWGG

SEQ ID NO: 7403 - protein, 108 aa, Artificial Sequence
  Synthetic polypeptide
MVFGIFLCLDAFLYVFTLLPLRVFLALFRLLTLPCYGLRDRRLLQPAQVCDILKGVILVICYFMMHYVDYSMMYHLIRGQSVIKLYIIYNMLEAGTVAHTCNPSTWGG

SEQ ID NO: 7404 - protein, 45 aa, Artificial Sequence
  Synthetic polypeptide
MMHYVDYSMMYHLIRGQSVIKLYIIYNMLEAGTVAHTCNPSTWGG

SEQ ID NO: 7405 - protein, 16 aa, Artificial Sequence
  Synthetic polypeptide
FEGCHFGNLLFYDALC

SEQ ID NO: 7406 - protein, 249 aa, Artificial Sequence
  Synthetic polypeptide
MFKCWSVVLVLGFIFLESEGRPTKEGGYGLKSYQPLMRLRHKQEKNQESSRVKGFMIQDGPFGSCENKYCGLGRHCVTSRETGQAECACMDLCKRHYKPVCGSDGEFYENHCEVHRAACLKKQKITIVHNEDCFFKGDKCKTTEYSKMKNMLLDLQNQKYIMQENENPNGDDISRKKLLVDQMFKYFDADSNGLVDINELTQVIKQEELGKDLFDCTLYVLLKYDDFNADKHLALEEFYRAFQCTSSTY

SEQ ID NO: 7407 - protein, 248 aa, Artificial Sequence
  Synthetic polypeptide
MFKCWSVVLVLGFIFLESEGRPTKEGGYGLKSYQPLMRLRHKEKNQESSRVKGFMIQDGPFGSCENKYCGLGRHCVTSRETGQAECACMDLCKRHYKPVCGSDGEFYENHCEVHRAACLKKQKITIVHNEDCFFKGDKCKTTEYSKMKNMLLDLQNQKYIMQENENPNGDDISRKKLLVDQMFKYFDADSNGLVDINELTQVIKQEELGKDLFDCTLYVLLKYDDFNADKHLALEEFYRAFQCTSSTY

SEQ ID NO: 7408 - protein, 175 aa, Artificial Sequence
  Synthetic polypeptide
MFKCWSVVLVLGFIFLESEGRPTKEGGYGLKSYQPLMRLRHKQEKNQESSRVKGFMIQDGPFGSCENKYCGLGRHCVTSRETGQAECACMDLCKRHYKPVCGSDGEFYENHCEVHRAACLKKQKITIVHNEDCFFKGWARWLMPAIPGLWEAEAGGSRGQEFNTSPANLVKPRLY

SEQ ID NO: 7409 - protein, 174 aa, Artificial Sequence
  Synthetic polypeptide
MFKCWSVVLVLGFIFLESEGRPTKEGGYGLKSYQPLMRLRHKEKNQESSRVKGFMIQDGPFGSCENKYCGLGRHCVTSRETGQAECACMDLCKRHYKPVCGSDGEFYENHCEVHRAACLKKQKITIVHNEDCFFKGWARWLMPAIPGLWEAEAGGSRGQEFNTSPANLVKPRLY

SEQ ID NO: 7410 - protein, 364 aa, Artificial Sequence
  Synthetic polypeptide
MEVVEAAAAQLETLKFNGTDFGVGEGPAAPSPGSAPVPGTQPPLQSFEGSPDAGQTVEVKPAGEQPLQPVLNAVAAGTPAPQPQPPAESPACGDCVTSPGAAEPARAPDSLETSDSDSDSDSETDSDSSSSSSSSSSSSSSSSSSCISLPPVLSDGDDDLQIEKENKNFPLKTKDELLLNELPSVEELTIILPEDIELKPLGMVSSIIEQLVIIESMTNLPPVNEETVIFKSDRQAAGKIFEIFGPVAHPFYVLRFNSSDHIESKGIKIKETMYFAPSMKDFTQYIFTEKLKQDKGSDASWKNDQEPPPEALDFSDDEKEKEAKQRKKSQIQGRKKLKSEFNEPGTGISHRYCGLGSRPLQSSL

SEQ ID NO: 7411 - protein, 378 aa, Artificial Sequence
  Synthetic polypeptide
MEVVEAAAAQLETLKFNGTDFGVGEGPAAPSPGSAPVPGTQPPLQSFEGSPDAGQTVEVKPAGEQPLQPVLNAVAAGTPAPQPQPPAESPACGDCVTSPGAAEPARAPDSLETSDSDSDSDSETDSDSSSSSSSSSSSSSSSSSSCISLPPVLSDGDDDLQIEKENKNFPLKTKDELLLNELPSVEELTIILPEDIELKPLGMVSSIIEQLVIIESMTNLPPVNEETVIFKSDRQAAGKIFEIFGPVAHPFYVLRFNSSDHIESKGIKIKETMYFAPSMKDFTQYIFTEKLKQDKGSDASWKNDQEPPPEALDFSDDEKEKEAKQRKKSQIQGRKKLKSEFNEPGTGISHRYCGLGSRPLQSNTWTQKCTNSLTSLFK

SEQ ID NO: 7412 - protein, 58 aa, Artificial Sequence
  Synthetic polypeptide
GPEACSVSTRAPIPSLALSTRQSSASRRKLPSAAPGEHAAQSTKGKKCRTGKKSHPSI

SEQ ID NO: 7413 - protein, 61 aa, Artificial Sequence
  Synthetic polypeptide
MPKAPKGKSAGREKKVIHPYSRKAAQITREAHKQEKKEKSQLKIYFSGKPSQILKHMVGAF

SEQ ID NO: 7414 - protein, 33 aa, Artificial Sequence
  Synthetic polypeptide
METPPLPPASRWLYLQNVQNPASFHHLHCDCPP

SEQ ID NO: 7415 - protein, 1007 aa, Artificial Sequence
  Synthetic polypeptide
MPQAQKKTTSVSLTIGSSSPKTGVTTAVIQPLSVPVQQVHSPTSYLCRPDGTTTAYFPPVFTKELQNTAVAEGQVVVLECRVRGAPPLQVQWFRQGSEIQDSPDFRILQKKPRSTAEPEEICTLVIAETFPEDAGIFTCSARNDYGSATSTAQLVVTSANTENCSYESMGESNNDHFQHFPPPPPILETSSLELASKKPSEIQQVNNPELGLSRAALQMQFNAAERETNGVHPSRGVNGLINGKANSNKSLPTPAVLLSPTKEPPPLLAKPKLDPLKLQQLQNQIRLEQEAGARQPPPAPRSAPPSPPFPPPPAFPELAACTPPASPEPMSALASRSAPAMQSSGSFNYARPKQFIAAQNLGPASGHGTPASSPSSSSLPSPMSPTPRQFGRAPVPPFAQPFGAEPEAPWGSSSPSPPPPPPPVFSPTAAFPVPDVFPLPPPPPPLPSPGQASHCSSPATRFGHSQTPAAFLSALLPSQPPPAAVNALGLPKGVTPAGFPKKASRTARIASDEEIQGTKDAVIQDLERKLRFKEDLLNNGQPRLTYEERMARRLLGADSATVFNIQEPEEETANQEYKVSSCEQRLISEIEYRLERSPVDESGDEVQYGDVPVENGMAPFFEMKLKHYKIFEGMPVTFTCRVAGNPKPKIYWFKDGKQISPKSDHYTIQRDLDGTCSLHTTASTLDDDGNYTIMAANPQGRISCTGRLMVQAVNQRGRSPRSPSGHPHVRRPRSRSRDSGDENEPIQERFFRPHFLQAPGDLTVQEGKLCRMDCKVSGLPTPDLSWQLDGKPVRPDSAHKMLVRENGVHSLIIEPVTSRDAGIYTCIATNRAGQNSFSLELVVAAKEAHKPPVFIEKLQNTGVADGYPVRLECRVLGVPPPQIFWKKENESLTHSTDRVSMHQDNHGYICLLIQGATKEDAGWYTVSAKNEAGIVSCTARLDVYTQWHQQSQSTKPKKVRPSASRYAALSDQGLDIKAAFQPEANPSHLTLNTALVEKSYLKMYSTK

SEQ ID NO: 7416 - protein, 783 aa, Artificial Sequence
  Synthetic polypeptide
MPQAQKKTTSVSLTIGSSSPKTGVTTAVIQPLSVPVQQVHSPTSYLCRPDGTTTAYFPPVFTKELQNTAVAEGQVVVLECRVRGAPPLQVQWFRQGSEIQDSPDFRILQKKPRSTAEPEEICTLVIAETFPEDAGIFTCSARNDYGSATSTAQLVVTSANTENCSYESMGESNNDHFQHFPPPPPILETSSLELASKKPSEIQQVNNPELGLSRAALQMQFNAAERETNGVHPSRGVNGLINGKANSNKSLPTPAVLLSPTKEPPPLLAKPKLGFPKKASRTARIASDEEIQGTKDAVIQDLERKLRFKEDLLNNGQPRLTYEERMARRLLGADSATVFNIQEPEEETANQEYKVSSCEQRLISEIEYRLERSPVDESGDEVQYGDVPVENGMAPFFEMKLKHYKIFEGMPVTFTCRVAGNPKPKIYWFKDGKQISPKSDHYTIQRDLDGTCSLHTTASTLDDDGNYTIMAANPQGRISCTGRLMVQAVNQRGRSPRSPSGHPHVRRPRSRSRDSGDENEPIQERFFRPHFLQAPGDLTVQEGKLCRMDCKVSGLPTPDLSWQLDGKPVRPDSAHKMLVRENGVHSLIIEPVTSRDAGIYTCIATNRAGQNSFSLELVVAAKEAHKPPVFIEKLQNTGVADGYPVRLECRVLGVPPPQIFWKKENESLTHSTDRVSMHQDNHGYICLLIQGATKEDAGWYTVSAKNEAGIVSCTARLDVYTQWHQQSQSTKPKKVRPSASRYAALSDQGLDIKAAFQPEANPSHLTLNTALVEKSYLKMYSTK

SEQ ID NO: 7417 - protein, 678 aa, Artificial Sequence
  Synthetic polypeptide
MSALASRSAPAMQSSGSFNYARPKQFIAAQNLGPASGHGTPASSPSSSSLPSPMSPTPRQFGRAPVPPFAQPFGAEPEAPWGSSSPSPPPPPPPVFSPTAAFPVPDVFPLPPPPPPLPSPGQASHCSSPATRFGHSQTPAAFLSALLPSQPPPAAVNALGLPKGVTPAGFPKKASRTARIASDEEIQGTKDAVIQDLERKLRFKEDLLNNGQPRLTYEERMARRLLGADSATVFNIQEPEEETANQEYKVSSCEQRLISEIEYRLERSPVDESGDEVQYGDVPVENGMAPFFEMKLKHYKIFEGMPVTFTCRVAGNPKPKIYWFKDGKQISPKSDHYTIQRDLDGTCSLHTTASTLDDDGNYTIMAANPQGRISCTGRLMVQAVNQRGRSPRSPSGHPHVRRPRSRSRDSGDENEPIQERFFRPHFLQAPGDLTVQEGKLCRMDCKVSGLPTPDLSWQLDGKPVRPDSAHKMLVRENGVHSLIIEPVTSRDAGIYTCIATNRAGQNSFSLELVVAAKEAHKPPVFIEKLQNTGVADGYPVRLECRVLGVPPPQIFWKKENESLTHSTDRVSMHQDNHGYICLLIQGATKEDAGWYTVSAKNEAGIVSCTARLDVYTQWHQQSQSTKPKKVRPSASRYAALSDQGLDIKAAFQPEANPSHLTLNTALVEKSYLKMYSTK

SEQ ID NO: 7418 - protein, 186 aa, Artificial Sequence
  Synthetic polypeptide
MDKVCAVFGGSRGIGRAVAQLMARKGYRLAVIARNLEGAKAAAGDLGGDHLAFSCDVAKEHDVQNTFEELEKHLGRVNFLVNAAGINRDGLLVRTKTEDMVSQLHTNLLGSMLTCKAAMRTMIQQQGGSIVNVGSIVGLKGNSGQSVYSASKGGLVGFSRALAKEVARKKIRVNVVAPELSQPLEF

SEQ ID NO: 7419 - protein, 193 aa, Artificial Sequence
  Synthetic polypeptide
VCAVFGGSRGIGRAVAQLMARKGYRLAVIARNLEGAKAAAGDLGGDHLAFSCDVAKEHDVQNTFEELEKHLGRVNFLVNAAGINRDGLLVRTKTEDMVSQLHTNLLGSMLTCKAAMRTMIQQQGGSIVNVGHRREMLLHKRSIVGLKGNSGQSVYSASKGGLVGFSRALAKEVARKKIRVNVVAPELSQPLEF

SEQ ID NO: 7420 - protein, 423 aa, Artificial Sequence
  Synthetic polypeptide
MEKYVRLQKIGEGSFGKAILVKSTEDGRQYVIKEINISRMSSKEREESRREVAVLANMKHPNIVQYRESFEENGSLYIVMDYCEGGDLFKRINAQKGVLFQEDQILDWFVQICLALKHVHDRKILHRDIKSQNIFLTKDGTVQLGDFGIARVLNSTVELARTCIGTPYYLSPEICENKPYNNKSDIWALGCVLYELCTLKHAFEAGSMKNLVLKIISGSFPPVSLHYSYDLRSLVSQLFKRNPRDRPSVNSILEKGFIAKRIEKFLSPQLIAEEFCLKTFSKFGSQPIPAKRPASGQNSISVMPAQKITKPAAKYGIPLAYKKYGDKKLHEKKPLQKHKQAHQTPEKRVNTGEERRKISEEAARKRRLEFIEKEKKQKDQIISLMKAEQMKRQEKERLERINRAREQGWRNVLSAGGSGEVKP

SEQ ID NO: 7421 - protein, 19 aa, Artificial Sequence
  Synthetic polypeptide
MVGGGGKRRPGGEGPQLGT

SEQ ID NO: 7422 - protein, 126 aa, Artificial Sequence
  Synthetic polypeptide
MNYARFITAASAARNPSPIRTMTDILSRGPKSMISLAGGLPNPNMFPFKTAVITVENGKTIQFGEEMMKRALQYSPSAGIPELLSWLKQLQIKLHNPPTIHYPPSQGQMDLCVTSGSQQGLCKDVL

SEQ ID NO: 7423 - protein, 130 aa, Artificial Sequence
  Synthetic polypeptide
MNYARFITAASAARNPSPIRTMSEKRADILSRGPKSMISLAGGLPNPNMFPFKTAVITVENGKTIQFGEEMMKRALQYSPSAGIPELLSWLKQLQIKLHNPPTIHYPPSQGQMDLCVTSGSQQGLCKDVL

SEQ ID NO: 7424 - protein, 117 aa, Artificial Sequence
  Synthetic polypeptide
MHSVQMGVQWRGPADILSRGPKSMISLAGGLPNPNMFPFKTAVITVENGKTIQFGEEMMKRALQYSPSAGIPELLSWLKQLQIKLHNPPTIHYPPSQGQMDLCVTSGSQQGLCKDVL

SEQ ID NO: 7425 - protein, 594 aa, Artificial Sequence
  Synthetic polypeptide
MSLQVLNDKNVSNEKNTENCDFLFSPPEVTGRSSVLRVSQKENVPPKNLAKAMKVTFQTPLRDPQTHRILSPSMASKLEAPFTQDDTLGLENSHPVWTQKENQQLIKEVDAKTTHGILQKPVEADTDLLGDASPAFGSGSSSESGPGALADLDCSSSSQSPGSSENQMVSPGKVSGSPEQAVEENLSSYSLDRRVTPASETLEDPCRTESQHKAETPHGAEEECKAETPHGAEEECRHGGVCAPAAVATSPPGAIPKEACGGAPLQGLPGEALGCPAGVGTPVPADGTQTLTCAHTSAPESTAPTNHLVAGRAMTLSPQEEVAAGQMASSSRSGPVKLEFDVSDGATSKRAPPPRRLGERSGLKPPLRKAAVRQQKAPQEVEEDDGRSGAGEDPPMPASRGSYHLDWDKMDDPNFIPFGGDTKSGCSEAQPPESPETRLGQPAAEQLHAGPATEEPGPCLSQQLHSASAEDTPVVQLAAETPTAESKERALNSASTSLPTSCPGSEPVPTHQQGQPALELKEESFRDPAEVLGTGAEVDYLEQFGTSSFKESALRKQSLYLKFDPLLRDSPGRPVPVATETSRVRPCLGKRKKK

SEQ ID NO: 7426 - protein, 225 aa, Artificial Sequence
  Synthetic polypeptide
MAAPLGGMFSGQPPGPPQAPPGLPGQASLLQAAPGAPRPSSSTLVDELESSFEACFASLVSQDYVNGTDQEEIRTGVDQCIQKFLDIARQTECFFLQKRLQLSVQKPEQVIKEDVSELRNELQRKDALVQKHLTKLRHWQQVLEDINVQHKKPADIPQGSLAYLEQASANIPAPLKPTKGPEATELRRPLEGGKGKDTDSPLESLEGTSPANSLIFGFLTSRIVR

SEQ ID NO: 7427 - protein, 222 aa, Artificial Sequence
  Synthetic polypeptide
PLGGMFSGQPPGPPQAPPGLPGQASLLQAAPGAPRPSSSTLVDELESSFEACFASLVSQDYVNGTDQEEIRTGVDQCIQKFLDIARQTECFFLQKRLQLSVQKPEQVIKEDVSELRNELQRKDALVQKHLTKLRHWQQVLEDINVQHKKPADIPQGSLAYLEQASANIPAPLKPTKGPEATELRRPLEGGKGKDTDSPLESLEGTSPANSLIFGFLTSRIVR

SEQ ID NO: 7428 - protein, 306 aa, Artificial Sequence
  Synthetic polypeptide
MSQVRQVGLLAAGCQPWNKDVCAASGDRFAYCATLAIYIYQLDHRYNEFKLHAIMSEHKKTITAISWCPHNPDLFASGSTDNLVIIWNVAEQKVIAKLDSTKGIPASLSWCWNAEDVVAFVSHRGPLFIWTISGPDSGVIVHKDAHSFLSDICMFRWHTHQKGKVVFGHIDGSLSIFHPGNKNQKHVLRPESLEGTDEEDPVTALEWDPLSTDYLLVVNLHYGIRLVDSESLSCITTFNLPSAAASVQCLAWVPSAPGMFITGEGACFYFAFHHDCKFPEASSAMQNCESIKPLFFINYPVLGMSL

SEQ ID NO: 7429 - protein, 330 aa, Artificial Sequence
  Synthetic polypeptide
MAWMTYISNWFEQDDWYEGLQRANMSQVRQVGLLAAGCQPWNKDVCAASGDRFAYCATLAIYIYQLDHRYNEFKLHAIMSEHKKTITAISWCPHNPDLFASGSTDNLVIIWNVAEQKVIAKLDSTKGIPASLSWCWNAEDVVAFVSHRGPLFIWTISGPDSGVIVHKDAHSFLSDICMFRWHTHQKGKVVFGHIDGSLSIFHPGNKNQKHVLRPESLEGTDEEDPVTALEWDPLSTDYLLVVNLHYGIRLVDSESLSCITTFNLPSAAASVQCLAWVPSAPGMFITGEGACFYFAFHHDCKFPEASSAMQNCESIKPLFFINYPVLGMSL

SEQ ID NO: 7430 - protein, 313 aa, Artificial Sequence
  Synthetic polypeptide
MAWMTYISNWFEQDDWYEGLQRANMSQVRQVGLLAAGCQPWNKDVCAASGDRFAYCATLAIYIYQLDHRYNEFKLHAIMSEHKKTITAISWCPHNPDLFASGSTDNLVIIWNVAEQKVIAKLDSTKGIPASLSWCWNAEDVVAFVSHRGPLFIWTISGPDSGVIVHKDAHSFLSDICMFRWHTHQKGKVVFGHIDGSLSIFHPDEEDPVTALEWDPLSTDYLLVVNLHYGIRLVDSESLSCITTFNLPSAAASVQCLAWVPSAPGMFITGEGACFYFAFHHDCKFPEASSAMQNCESIKPLFFINYPVLGMSL

SEQ ID NO: 7431 - protein, 1003 aa, Artificial Sequence
  Synthetic polypeptide
MGAERRLLSIKEAFRLAQQPHQNQAKLVVALSRTYRTMDDKTVFHEEFIHYLKYVMVVYKREPAVERVIEFAAKFVTSFHQSDMEDDEEEEDGGLLNYLFTFLLKSHEANSNAVRFRVCLLINKLLGSMPENAQIDDDVFDKINKAMLIRLKDKIPNVRIQAVLALSRLQDPKDDECPVVNAYATLIENDSNPEVRRAVLSCIAPSAKTLPKIVGRTKDVKEAVRKLAYQVLAEKVHMRAMSIAQRVMLLQQGLNDRSDAVKQAMQKHLLQGWLRFSEGNILELLHRLDVENSSEVAVSVLNALFSITPLSELVGLCKNNDGRKLIPVETLTPEIALYWCALCEYLKSKGDEGEEFLEQILPEPVVYADYLLSYIQSIPVVNEEHRGDFSYIGNLMTKEFIGQQLILIIKSLDTSEEGGRKKLLAVLQEILILPTIPISLVSFLVERLLHIIIDDNKRTQIVTEIISEIRAPIVTVGVNNDPADVRKKELKMAEIKVKLIEAKEALENCITLQDFNRASELKEEIKALEDARINLLKETEQLEIKEVHIEKNDAETLQKCLILCYELLKQMSISTGLSATMNGIIESLILPGIISIHPVVRNLAVLCLGCCGLQNQDFARKHFVLLLQVLQIDDVTIKISALKAIFDQLMTFGIEPFKTKKIKTLHCEGTEINSDDEQESKEVEETATAKNVLKLLSDFLDSEVSELRTGAAEGLAKLMFSGLLVSSRILSRLILLWYNPVTEEDVQLRHCLGVFFPVFAYASRTNQECFEEAFLPTLQTLANAPASSPLAEIDITNVAELLVDLTRPSGLNPQAKTSQDYQALTVHDNLAMKICNEILTSPCSPEIRVYTKALSSLELSSHLAKDLLVLLNEILEQVKDRTCLRALEKIKIQLEKGNKEFGDQAEAAQDATLTTTTFQNEDEKNKEVYMTPLRGVKATQASKSTQLKTNRGQRKVTVSARTNRRCQTAEADSESDHEVPEPESEMKMRLPRRAKTAALEKRS

SEQ ID NO: 7432 - protein, 1025 aa, Artificial Sequence
  Synthetic polypeptide
MDVKERRPYCSLTKSRREKERRYTNSSADNEECRVPTQKSYSSSETLKAFDHDSSRLLYGNRVKDLVHREADEFTRQGQNFTLRQLGVCEPATRRGLAFCAEMGLPHRGYSISAGSDADTENEAVMSPEHAMRLWGRGVKSGRSSCLSSRSNSALTLTDTEHENKSDSENEQPASNQGQSTLQPLPPSHKQHSAQHHPSITSLNRNSLTNRRNQSPAPPAALPAELQTTPESVQLQDSWVLGSNVPLESRHFLFKTGTGTTPLFSTATPGYTMASGSVYSPPTRPLPRNTLSRSAFKFKKSSKYCSWKCTALCAVGVSVLLAILLSYFIAMHLFGLNWQLQQTENDTFENGKVNSDTMPTNTVSLPSGDNGKLGGFTQENNTIDSGELDIGRRAIQEIPPGIFWRSQLFIDQPQFLKFNISLQKDALIGVYGRKGLPPSHTQYDFVELLDGSRLIAREQRSLLETERAGRQARSVSLHEAGFIQYLDSGIWHLAFYNDGKNAEQVSFNTIVIESVVECPRNCHGNGECVSGTCHCFPGFLGPDCSRAACPVLCSGNGQYSKGRCLCFSGWKGTECDVPTTQCIDPQCGGRGICIMGSCACNSGYKGESCEEADCIDPGCSNHGVCIHGECHCSPGWGGSNCEILKTMCPDQCSGHGTYLQESGSCTCDPNWTGPDCSNEICSVDCGSHGVCMGGTCRCEEGWTGPACNQRACHPRCAEHGTCKDGKCECSQGWNGEHCTIEGCPGLCNSNGRCTLDQNGWHCVCQPGWRGAGCDVAMETLCTDSKDNEGDGLIDCMDPDCCLQSSCQNQPYCRGLPDPQDIISQSLQSPSQQAAKSFYDRISFLIGSDSTHVIPGESPFNKSLASVIRGQVLTADGTPLIGVNVSFFHYPEYGYTITRQDGMFDLVANGGASLTLVFERSPFLTQYHTVWIPWNVFYVMDTLVMKKEENDIPSCDLSGFVRPNPIIVSSPLSTFFRSSPEDSPIIPETQGDGVKDGLVRIHCDYCTNKSVHVSLMEQSQCFPYEE

SEQ ID NO: 7433 - protein, 1172 aa, Artificial Sequence
  Synthetic polypeptide
MPRRAGSGQLPLPRGWEEARDYDGKVFYIDHNTRRTSWIDPRDRLTKPLSFADCVGDELPWGWEAGFDPQIGVYYIDHINKTTQIEDPRKQWRGEQEKMLKDYLSVAQDALRTQKELYHVKEQRLALALDEYVRLNDAYKEKSSSHTSLFSGSSSSTKYDPDILKAEISTTRLRVKKLKRELSQMKQELLYKEQGFETLQQIDKKMSGGQSGYELSEAKAILTELKSIRKAISSGEKEKQDLMQSLAKLQERFHLDQNIGRSEPDLRCSPVNSHLCLSRQTLDAGSQTSISGDIGVRSRSNLAEKVRLSLQYEEAKRSMANLKIELSKLDSEAWPGALDIEKEKLMLINEKEELLKELQFVTPQKRTQDELERLEAERQRLEEELLSVRGTPSRALAERLRLEERRKELLQKLEETTKLTTYLHSQLKSLSASTLSMSSGSSLGSLASSRGSLNTSSRGSLNSLSSTELYYSSQSDQIDVDYQYKLDFLLQEKSGYIPSGPITTIHENEVVKSPSQPGQSGLCGVAAAATGHTPPLAEAPKSVASLSSRSSLSSLSPPGSPLVLEGTFPMSSSHDASLHQFTADFEDCELSSHFADISLIENQILLDSDSGGASQSLSEDKDLNECAREPLYEGTADVEKSLPKRRVIHLLGEKTTCVSAAVSDESVAGDSGVYEAFVKQPSEMEDVTYSEEDVAIVETAQVQIGLRYNAKSSSFMVIIAQLRNLHAFLIPHTSKVYFRVAVLPSSTDVSCLFRTKVHPPTESILFNDVFRVAISQTALQQKTLRVDLCSVSKHRREECLAGTQISLADLPFSSEVFTLWYNLLPSKQMPCKKNEENEDSVFQPNQPLVDSIDLDAVSALLARTSAELLAVEQELAQEEEEESGQEEPRGPDGDWLTMLREASDEIVAEKEAEVKLPEDSSCTEDLSSCTSVPEMNEDGNRKESNCAKDLRSQPPTRIPTLVDKETNTDEAANDNMAVRPKERSSLSSRQHPFVRSSVIVRSQTFSPGERNQYICRLNRSDSDSSTLAKKSLFVRNSTERRSLRVKRTVCQSVLRRTTQECPVRTSLDLELDLQASLTRQSRLNDELQALRDLRQKLEELKAQGETDLPPGVLEDERFQRLLKQAEKQAEQSKEEQKQGLNAEKLMRQVSKDVCRLREQSQKVPRQVQSFRN

SEQ ID NO: 7434 - protein, 1123 aa, Artificial Sequence
  Synthetic polypeptide
MPRRAGSGQLPLPRGWEEARDYDGKVFYIDHNTRRTSWIDPRDRLTKPLSFADCVGDELPWGWEAGFDPQIGVYYIDHINKTTQIEDPRKQWRGEQEKMLKDYLSVAQDALRTQKELYHVKEQRLALALDEYVRLNDAYKEKSSSHTSLFSGSSSSTKYDPDILKAEISTTRLRVKKLKRELSQMKQELLYKEQGFETLQQIDKKMSGGQSGYELSEAKAILTELKSIRKAISSGEKEKQDLMQSLAKLQERFHLDQNIGRSEPDLRCSPVNSHLCLSRQTLDAGSQTSISGDIGVRSRSNLAEKVRLSLQYEEAKRSMANLKIELSKLDSEAWPGALDIEKEKLMLINEKEELLKELQFVTPQKRTQDELERLEAERQRLEEELLSVRGTPSRALAERLRLEERRKELLQKLEETTKLTTYLHSQLKSLSASTLSMSSGSSLGSLASSRGSLNTSSRGSLNSLSSTELYYSSQSDQIDVDYQYKLDFLLQEKSGYIPSGPITTIHENEVVKSPSQPGQSGLCGVAAAATGHTPPLAEAPKSVASLSSRSSLSSLSPPGSPLVLEGTFPMSSSHDASLHQFTADFEDYVEKSLPKRRVIHLLGEKTTCVSAAVSDESVAGDSGVYEAFVKQPSEMEDVTYSEEDVAIVETAQVQIGLRYNAKSSSFMVIIAQLRNLHAFLIPHTSKVYFRVAVLPSSTDVSCLFRTKVHPPTESILFNDVFRVAISQTALQQKTLRVDLCSVSKHRREECLAGTQISLADLPFSSEVFTLWYNLLPSKQMPCKKNEENEDSVFQPNQPLVDSIDLDAVSALLARTSAELLAVEQELAQEEEEESGQEEPRGPDGDWLTMLREASDEIVAEKEAEVKLPEDSSCTEDLSSCTSVPEMNEDGNRKESNCAKDLRSQPPTRIPTLVDKETNTDEAANDNMAVRPKERSSLSSRQHPFVRSSVIVRSQTFSPGERNQYICRLNRSDSDSSTLAKKSLFVRNSTERRSLRVKRTVCQSVLRRTTQECPVRTSLDLELDLQASLTRQSRLNDELQALRDLRQKLEELKAQGETDLPPGVLEDERFQRLLKQAEKQAEQSKEEQKQGLNAEKLMRQVSKDVCRLREQSQKVPRQVQSFRN

SEQ ID NO: 7435 - protein, 1196 aa, Artificial Sequence
  Synthetic polypeptide
MPRRAGSGQLPLPRGWEEARDYDGKVFYIDHNTRRTSWIDPRDRLTKPLSFADCVGDELPWGWEAGFDPQIGVYYIDHINKTTQIEDPRKQWRGEQEKMLKDYLSVAQDALRTQKELYHVKEQRLALALDEYVRLNDAYKEKSSSHTSLFSGSSSSTKYDPDILKAEISTTRLRVKKLKRELSQMKQELLYKEQGFETLQQIDKKMSGGQSGYELSEAKAILTELKSIRKAISSGEKEKQDLMQSLAKLQERFHLDQNIGRSEPDLRCSPVNSHLCLSRQTLDAGSQTSISGDIGVRSRSNLAEKVRLSLQYEEAKRSMANLKIELSKLDSEAWPGALDIEKEKLMLINEKEELLKELQFVTPQKRTQDELERLEAERQRLEEELLSVRGTPSRALAERLRLEERRKELLQKLEETTKLTTYLHSQLKSLSASTLSMSSGSSLGSLASSRGSLNTSSRGSLNSLSSTELYYSSQSDQIDVDYQYKLDFLLQEKSGYIPSGPITTIHENEVVKSPSQPGQSGLCGVAAAATGHTPPLAEAPKSVASLSSRSSLSSLSPPGSPLVLEGTFPMSSSHDASLHQFTADFEDCELSSHFADISLIENQILLDSDSGGASQSLSEDKDLNECAREPLYEGTADVEKSLPKRRVIHLLGEKTTCVSAAVSDESVAGDSGVYEAFVKQPSEMEDVTYSEEDVAIVETAQVQIGLRYNAKSSSFMVIIAQLRNLHAFLIPHTSKVYFRVAVLPSSTDVSCLFRTKVHPPTESILFNDVFRVAISQTALQQKTLRVDLCSVSKHRREECLAGTQISLADLPFSSEVFTLWYNLLPSKQMPCKKNEENEDSVFQPNQPLVDSIDLDAVSALLARTSAELLAVEQELAQEEEEESGQEEPRGPDGDWLNTYFLCCWELKDDVFTRLTVKPLLTMLREASDEIVAEKEAEVKLPEDSSCTEDLSSCTSVPEMNEDGNRKESNCAKDLRSQPPTRIPTLVDKETNTDEAANDNMAVRPKERSSLSSRQHPFVRSSVIVRSQTFSPGERNQYICRLNRSDSDSSTLAKKSLFVRNSTERRSLRVKRTVCQSVLRRTTQECPVRTSLDLELDLQASLTRQSRLNDELQALRDLRQKLEELKAQGETDLPPGVLEDERFQRLLKQAEKQAEQSKEEQKQGLNAEKLMRQVSKDVCRLREQSQKVPRQVQSFRN

SEQ ID NO: 7436 - protein, 854 aa, Artificial Sequence
  Synthetic polypeptide
MANLKIELSKLDSEAWPGALDIEKEKLMLINEKEELLKELQFVTPQKRTQDELERLEAERQRLEEELLSVRGTPSRALAERLRLEERRKELLQKLEETTKLTTYLHSQLKSLSASTLSMSSGSSLGSLASSRGSLNTSSRGSLNSLSSTELYYSSQSDQIDVDYQYKLDFLLQEKSGYIPSGPITTIHENEVVKSPSQPGQSGLCGVAAAATGHTPPLAEAPKSVASLSSRSSLSSLSPPGSPLVLEGTFPMSSSHDASLHQFTADFEDCELSSHFADISLIENQILLDSDSGGASQSLSEDKDLNECAREPLYEGTADVEKSLPKRRVIHLLGEKTTCVSAAVSDESVAGDSGVYEAFVKQPSEMEDVTYSEEDVAIVETAQVQIGLRYNAKSSSFMVIIAQLRNLHAFLIPHTSKVYFRVAVLPSSTDVSCLFRTKVHPPTESILFNDVFRVAISQTALQQKTLRVDLCSVSKHRREECLAGTQISLADLPFSSEVFTLWYNLLPSKQMPCKKNEENEDSVFQPNQPLVDSIDLDAVSALLARTSAELLAVEQELAQEEEEESGQEEPRGPDGDWLTMLREASDEIVAEKEAEVKLPEDSSCTEDLSSCTSVPEMNEDGNRKESNCAKDLRSQPPTRIPTLVDKETNTDEAANDNMAVRPKERSSLSSRQHPFVRSSVIVRSQTFSPGERNQYICRLNRSDSDSSTLAKKSLFVRNSTERRSLRVKRTVCQSVLRRTTQECPVRTSLDLELDLQASLTRQSRLNDELQALRDLRQKLEELKAQGETDLPPGVLEDERFQRLLKQAEKQAEQSKEEQKQGLNAEKLMRQVSKDVCRLREQSQKVPRQVQSFRN

SEQ ID NO: 7437 - protein, 300 aa, Artificial Sequence
  Synthetic polypeptide
MPRLRVHGACLPTKSVLFLFYHRLTMLREASDEIVAEKEAEVKLPEDSSCTEDLSSCTSVPEMNEDGNRKESNCAKDLRSQPPTRIPTLVDKETNTDEAANDNMAVRPKERSSLSSRQHPFVRSSVIVRSQTFSPGERNQYICRLNRSDSDSSTLAKKSLFVRNSTERRSLRVKRTVCQSVLRRTTQECPVRTSLDLELDLQASLTRQSRLNDELQALRDLRQKLEELKAQGETDLPPGVLEDERFQRLLKQAEKQAEQSKEEQKQGLNAEKLMRQVSKDVCRLREQSQKVPRQVQSFRN

SEQ ID NO: 7438 - protein, 203 aa, Artificial Sequence
  Synthetic polypeptide
MSANEDQEMELEALRSIYEGDESFRELSPVSFQYRIGENGDPKAFLIEISWTETYPQTPPILSMNAFFNNTISSAVKQSILAKLQEAVEANLGTAMTYTLFEYAKDNKEQFMENHNPINSATSISNIISIETPNTAPSSKKKDKKEQLSKAQKRKLADKTEAEAGELLEPRRQPLQQAETVPLHFSLGNNSKTLSQKKKKKRK

SEQ ID NO: 7439 - protein, 108 aa, Artificial Sequence
  Synthetic polypeptide
MTYTLFEYAKDNKEQFMENHNPINSATSISNIISIETPNTAPSSKKKDKKEQLSKAQKRKLADKTEAEAGELLEPRRQPLQQAETVPLHFSLGNNSKTLSQKKKKKRK

SEQ ID NO: 7440 - protein, 140 aa, Artificial Sequence
  Synthetic polypeptide
MNAFFNNTISSAVKQSILAKLQEAVEANLGTAMTYTLFEYAKDNKEQFMENHNPINSATSISNIISIETPNTAPSSKKKDKKEQLSKAQKRKLADKTEAEAGELLEPRRQPLQQAETVPLHFSLGNNSKTLSQKKKKKRK

SEQ ID NO: 7441 - protein, 120 aa, Artificial Sequence
  Synthetic polypeptide
MAVKLGTLLLALALGLAQPASARRKLLVFLLDGFRSDYISDEALESLPGFKEIVSRGVKVDYLTPDFPSLSYPNYYTLMTGEEIRTQTGTEGRPHIDTGGRRLPADQGERPQKKSTLMTS

SEQ ID NO: 7442 - protein, 285 aa, Artificial Sequence
  Synthetic polypeptide
MAPRGRRRPRPHRSEGARRSKNTLERTHSMKDKAGQKCKPIDVFDFPDNSDVSSIGRLGENEKDEETYETFDPPLHSTAIYADEEEFSKHCGLSLSSTPPGKEAKRSSDTSGNEASEIESVKISAKKPGRKLRPISDDSESIEESDTRRKVKSAEKISTQRHEVIRTTASSELSEKPAESVTSKKTGPLSAQPSVEKENLAIESQSKTQKKGKISHDKRKKSRSKAIGSDTSDIVHIWCPEGMKTSDIKELNIVLPEFEKTHLEHHIIHDSKDGINLSAHQLWVG

SEQ ID NO: 7443 - protein, 227 aa, Artificial Sequence
  Synthetic polypeptide
MDKALKEVFDYSYRDYILSWYGNLSRDEGQLYHLLLEDFWEIARQLHHRLSHVDVVKVVCNDVVRTLLTHFCDLKAANARHEEQPRPFVLHACLRNSDDEVRFLQTCSRVLVFCLLPSKDVQSLSLRIMLAEILTTKVLKPVVELLSNPDYINQMLLAQLAYREQMNEHHKRAYTYAPSYEDFIKLINSNSDVEFLKQLRYQIVVEIIQATTISSFPQLKRHKGWLK

SEQ ID NO: 7444 - protein, 306 aa, Artificial Sequence
  Synthetic polypeptide
MDKALKEVFDYSYRDYILSWYGNLSRDEGQLYHLLLEDFWEIARQLHHRLSHVDVVKVVCNDVVRTLLTHFCDLKAANARHEEQPRPFVLHACLRNSDDEVRFLQTCSRVLVFCLLPSKDVQSLSLRIMLAEILTTKVLKPVVELLSNPDYINQMLLAQLAYREQMNEHHKRAYTYAPSYEDFIKLINSNSDVEFLKQLRYQIVVEIIQATTISSFPQLKRHKGKETAAMKADLLRARNMKRYINQLTVAKKQCEKRIRILGGPAYDQQEDGALDEGEGPQSQKQKLQIEGSISPQVATLCLPYLM

SEQ ID NO: 7445 - protein, 305 aa, Artificial Sequence
  Synthetic polypeptide
MDKALKEVFDYSYRDYILSWYGNLSRDEGQLYHLLLEDFWEIARQLHHRLSHVDVVKVVCNDVVRTLLTHFCDLKAANARHEEQPRPFVLHACLRNSDDEVRFLQTCSRVLVFCLLPSKDVQSLSLRIMLAEILTTKVLKPVVELLSNPDYINQMLLAQLAYREQMNEHHKRAYTYAPSYEDFIKLINSNSDVEFLKQLRYQIVVEIIQATTISSFPQLKRHKGKETAAMKADLLRARNMKRYINQLTVAKKQCEKRIRILGGPAYDQQEDGALDEGEGPQSQKKLQIEGSISPQVATLCLPYLM

SEQ ID NO: 7446 - protein, 41 aa, Artificial Sequence
  Synthetic polypeptide
MVISESMDILFRIRGGLDLAFQLATPNGDHPRELKTHPHRN

SEQ ID NO: 7447 - protein, 35 aa, Artificial Sequence
  Synthetic polypeptide
MDILFRIRGGLDLAFQLATPNGDHPRELKTHPHRN

SEQ ID NO: 7448 - protein, 1618 aa, Artificial Sequence
  Synthetic polypeptide
MGRHLALLLLLLLLFQHFGDSDGSQRLEQTPLQFTHLEYNVTVQENSAAKTYVGHPVKMGVYITHPAWEVRYKIVSGDSENLFKAEEYILGDFCFLRIRTKGGNTAILNREVKDHYTLIVKALEKNTNVEARTKVRVQVLDTNDLRPLFSPTSYSVSLPENTAIRTSIARVSATDADIGTNGEFYYSFKDRTDMFAIHPTSGVIVLTGRLDYLETKLYEMEILAADRGMKLYGSSGISSMAKLTVHIEQANECAPVITAVTLSPSELDRDPAYAIVTVDDCDQGANGDIASLSIVAGDLLQQFRTVRSFPGSKEYKVKAIGGIDWDSHPFGYNLTLQAKDKGTPPQFSSVKVIHVTSPQFKAGPVKFEKDVYRAEISEFAPPNTPVVMVKAIPAYSHLRYVFKSTPGKAKFSLNYNTGLISILEPVKRQQAAHFELEVTTSDRKASTKVLVKVLGANSNPPEFTQTAYKAAFDENVPIGTTVMSLSAVDPDEGENGYVTYSIANLNHVPFAIDHFTGAVSTSENLDYELMPRVYTLRIRASDWGLPYRREVEVLATITLNNLNDNTPLFEKINCEGTIPRDLGVGEQITTVSAIDADELQLVQYQIEAGNELDFFSLNPNSGVLSLKRSLMDGLGAKVSFHSLRITATDGENFATPLYINITVAASHKLVNLQCEETGVAKMLAEKLLQANKLHNQGEVEDIFFDSHSVNAHIPQFRSTLPTGIQVKENQPVGSSVIFMNSTDLDTGFNGKLVYAVSGGNEDSCFMIDMETGMLKILSPLDRETTDKYTLNITVYDLGIPQKAAWRLLHVVVVDANDNPPEFLQESYFVEVSEDKEVHSEIIQVEATDKDLGPNGHVTYSIVTDTDTFSIDSVTGVVNIARPLDRELQHEHSLKIEARDQAREEPQLFSTVVVKVSLEDVNDNPPTFIPPNYRVKVREDLPEGTVIMWLEAHDPDLGQSGQVRYSLLDHGEGNFDVDKLSGAVRIVQQLDFEKKQVYNLTVRAKDKGKPVSLSSTCYVEVEVVDVNENLHPPVFSSFVEKGTVKEDAPVGSLVMTVSAHDEDARRDGEIRYSIRDGSGVGVFKIGEETGVIETSDRLDRESTSHYWLTVFATDQGVVPLSSFIEIYIEVEDVNDNAPQTSEPVYYPEIMENSPKDVSVVQIEAFDPDSSSNDKLMYKITSGNPQGFFSIHPKTGLITTTSRKLDREQQDEHILEVTVTDNGSPPKSTIARVIVKILDENDNKPQFLQKFYKIRLPEREKPDRERNARREPLYHVIATDKDEGPNAEISYSIEDGNEHGKFFIEPKTGVVSSKRFSAAGEYDILSIKAVDNGRPQKSSTTRLHIEWISKPKPSLEPISFEESFFTFTVMESDPVAHMIGVISVEPPGIPLWFDITGGNYDSHFDVDKGTGTIIVAKPLDAEQKSNYNLTVEATDGTTTILTQVFIKVIDTNDHRPQFSTSKYEVVIPEDTAPETEILQISAVDQDEKNKLIYTLQSSRDPLSLKKFRLDPATGSLYTSEKLDHEAVHQHTLTVMVRDQDVPVKRNFARIVVNVSDTNDHAPWFTASSYKGRVYESAAVGSVVLQVTALDKDKGKNAEVLYSIESGMVNSGCLFMKQKKD

SEQ ID NO: 7449 - protein, 473 aa, Artificial Sequence
  Synthetic polypeptide
MEFSIKQSPLSVQSVVKCIKMKQAPEILGSANGKTPSCEVNRECSVFLSKAQLSSSLQEGVMQKFNGHDALPFIPADKLKDLTSRVFNGEPGAHDAKLRFESQEMKGIGTPPNTTPIKNGSPEIKLKITKTYMNGKPLFESSICGDSAADVSQSEENGQKPENKARRNRKRSIKYDSLLEQGLVEAALVSKISSPSDKKIPAKKESCPNTGRDKDHLLKYNVGDLVWSKVSGYPWWPCMVSADPLLHSYTKLKGQKKSARQYHVQFFGDAPERAWIFEKSLVAFEGEGQFEKLCQESAKQAPTKAEKIKLLKPISGKLRAQWEMGIVQAEEAASMSVEERKAKFTFLYVGDQLHLNPQVAKEAGIAAESLGEMAESSGVSEEAAENPKSVREECIPMKRRRRAKLCSSAETLESHPDIGKSTPQKTAEADPRRGVGSPPGRKKTTVSMPRSRKGDAASQFLVFCQKHRDEVER

SEQ ID NO: 7450 - protein, 67 aa, Artificial Sequence
  Synthetic polypeptide
SSAETLESHPDIGKSTPQKTAEADPRRGVGSPPGRKKTTVSMPRSRKGDAASQFLVFCQKHRDEVER

SEQ ID NO: 7451 - protein, 908 aa, Artificial Sequence
  Synthetic polypeptide
MRGVGWQMLSLSLGLVLAILNKVAPQACPAQCSCSGSTVDCHGLALRSVPRNIPRNTERLDLNGNNITRITKTDFAGLRHLRVLQLMENKISTIERGAFQDLKELERLRLNRNHLQLFPELLFLGTAKLYRLDLSENQIQAIPRKAFRGAVDIKNLQLDYNQISCIEDGAFRALRDLEVLTLNNNNITRLSVASFNHMPKLRTFRLHSNNLYCDCHLAWLSDWLRQRPRVGLYTQCMGPSHLRGHNVAEVQKREFVCSGHQSFMAPSCSVLHCPAACTCSNNIVDCRGKGLTEIPTNLPETITEIRLEQNTIKVIPPGAFSPYKKLRRIDLSNNQISELAPDAFQGLRSLNSLVLYGNKITELPKSLFEGLFSLQLLLLNANKINCLRVDAFQDLHNLNLLSLYDNKLQTIAKGTFSPLRAIQTMHLAQNPFICDCHLKWLADYLHTNPIETSGARCTSPRRLANKRIGQIKSKKFRCSGTEDYRSKLSGDCFADLACPEKCRCEGTTVDCSNQKLNKIPEHIPQYTAELRLNNNEFTVLEATGIFKKLPQLRKINFSNNKITDIEEGAFEGASGVNEILLTSNRLENVQHKMFKGLESLKTLMLRSNRITCVGNDSFIGLSSVRLLSLYDNQITTVAPGAFDTLHSLSTLNLLANPFNCNCYLAWLGEWLRKKRIVTGNPRCQKPYFLKEIPIQDVAIQDFTCDDGNDDNSCSPLSRCPTECTCLDTVVRCSNKGLKVLPKGIPRDVTELYLDGNQFTLVPKELSNYKHLTLIDLSNNRISTLSNQSFSNMTQLLTLILSYNRLRCIPPRTFDGLKSLRLLSLHGNDISVVPEGAFNDLSALSHLAIGANPLYCDCNMQWLSDWVKSEYKEPGIARCAGPGEMADKLLLTTPSKKFTCQVHLVTQEL

SEQ ID NO: 7452 - protein, 916 aa, Artificial Sequence
  Synthetic polypeptide
MRGVGWQMLSLSLGLVLAILNKVAPQACPAQCSCSGSTVDCHGLALRSVPRNIPRNTERLDLNGNNITRITKTDFAGLRHLRVLQLMENKISTIERGAFQDLKELERLRLNRNHLQLFPELLFLGTAKLYRLDLSENQIQAIPRKAFRGAVDIKNLQLDYNQISCIEDGAFRALRDLEVLTLNNNNITRLSVASFNHMPKLRTFRLHSNNLYCDCHLAWLSDWLRQRPRVGLYTQCMGPSHLRGHNVAEVQKREFVCSGHQSFMAPSCSVLHCPAACTCSNNIVDCRGKGLTEIPTNLPETITEIRLEQNTIKVIPPGAFSPYKKLRRIDLSNNQISELAPDAFQGLRSLNSLVLYGNKITELPKSLFEGLFSLQLLLLNANKINCLRVDAFQDLHNLNLLSLYDNKLQTIAKGTFSPLRAIQTMHLAQNPFICDCHLKWLADYLHTNPIETSGARCTSPRRLANKRIGQIKSKKFRCSAKEQYFIPGTEDYRSKLSGDCFADLACPEKCRCEGTTVDCSNQKLNKIPEHIPQYTAELRLNNNEFTVLEATGIFKKLPQLRKINFSNNKITDIEEGAFEGASGVNEILLTSNRLENVQHKMFKGLESLKTLMLRSNRITCVGNDSFIGLSSVRLLSLYDNQITTVAPGAFDTLHSLSTLNLLANPFNCNCYLAWLGEWLRKKRIVTGNPRCQKPYFLKEIPIQDVAIQDFTCDDGNDDNSCSPLSRCPTECTCLDTVVRCSNKGLKVLPKGIPRDVTELYLDGNQFTLVPKELSNYKHLTLIDLSNNRISTLSNQSFSNMTQLLTLILSYNRLRCIPPRTFDGLKSLRLLSLHGNDISVVPEGAFNDLSALSHLAIGANPLYCDCNMQWLSDWVKSEYKEPGIARCAGPGEMADKLLLTTPSKKFTCQVHLVTQEL

SEQ ID NO: 7453 - protein, 920 aa, Artificial Sequence
  Synthetic polypeptide
MRGVGWQMLSLSLGLVLAILNKVAPQACPAQCSCSGSTVDCHGLALRSVPRNIPRNTERLDLNGNNITRITKTDFAGLRHLRVLQLMENKISTIERGAFQDLKELERLRLNRNHLQLFPELLFLGTAKLYRLDLSENQIQAIPRKAFRGAVDIKNLQLDYNQISCIEDGAFRALRDLEVLTLNNNNITRLSVASFNHMPKLRTFRLHSNNLYCDCHLAWLSDWLRQRPRVGLYTQCMGPSHLRGHNVAEVQKREFVCSDEEEGHQSFMAPSCSVLHCPAACTCSNNIVDCRGKGLTEIPTNLPETITEIRLEQNTIKVIPPGAFSPYKKLRRIDLSNNQISELAPDAFQGLRSLNSLVLYGNKITELPKSLFEGLFSLQLLLLNANKINCLRVDAFQDLHNLNLLSLYDNKLQTIAKGTFSPLRAIQTMHLAQNPFICDCHLKWLADYLHTNPIETSGARCTSPRRLANKRIGQIKSKKFRCSAKEQYFIPGTEDYRSKLSGDCFADLACPEKCRCEGTTVDCSNQKLNKIPEHIPQYTAELRLNNNEFTVLEATGIFKKLPQLRKINFSNNKITDIEEGAFEGASGVNEILLTSNRLENVQHKMFKGLESLKTLMLRSNRITCVGNDSFIGLSSVRLLSLYDNQITTVAPGAFDTLHSLSTLNLLANPFNCNCYLAWLGEWLRKKRIVTGNPRCQKPYFLKEIPIQDVAIQDFTCDDGNDDNSCSPLSRCPTECTCLDTVVRCSNKGLKVLPKGIPRDVTELYLDGNQFTLVPKELSNYKHLTLIDLSNNRISTLSNQSFSNMTQLLTLILSYNRLRCIPPRTFDGLKSLRLLSLHGNDISVVPEGAFNDLSALSHLAIGANPLYCDCNMQWLSDWVKSEYKEPGIARCAGPGEMADKLLLTTPSKKFTCQVHLVTQEL

SEQ ID NO: 7454 - protein, 912 aa, Artificial Sequence
  Synthetic polypeptide
MRGVGWQMLSLSLGLVLAILNKVAPQACPAQCSCSGSTVDCHGLALRSVPRNIPRNTERLDLNGNNITRITKTDFAGLRHLRVLQLMENKISTIERGAFQDLKELERLRLNRNHLQLFPELLFLGTAKLYRLDLSENQIQAIPRKAFRGAVDIKNLQLDYNQISCIEDGAFRALRDLEVLTLNNNNITRLSVASFNHMPKLRTFRLHSNNLYCDCHLAWLSDWLRQRPRVGLYTQCMGPSHLRGHNVAEVQKREFVCSDEEEGHQSFMAPSCSVLHCPAACTCSNNIVDCRGKGLTEIPTNLPETITEIRLEQNTIKVIPPGAFSPYKKLRRIDLSNNQISELAPDAFQGLRSLNSLVLYGNKITELPKSLFEGLFSLQLLLLNANKINCLRVDAFQDLHNLNLLSLYDNKLQTIAKGTFSPLRAIQTMHLAQNPFICDCHLKWLADYLHTNPIETSGARCTSPRRLANKRIGQIKSKKFRCSGTEDYRSKLSGDCFADLACPEKCRCEGTTVDCSNQKLNKIPEHIPQYTAELRLNNNEFTVLEATGIFKKLPQLRKINFSNNKITDIEEGAFEGASGVNEILLTSNRLENVQHKMFKGLESLKTLMLRSNRITCVGNDSFIGLSSVRLLSLYDNQITTVAPGAFDTLHSLSTLNLLANPFNCNCYLAWLGEWLRKKRIVTGNPRCQKPYFLKEIPIQDVAIQDFTCDDGNDDNSCSPLSRCPTECTCLDTVVRCSNKGLKVLPKGIPRDVTELYLDGNQFTLVPKELSNYKHLTLIDLSNNRISTLSNQSFSNMTQLLTLILSYNRLRCIPPRTFDGLKSLRLLSLHGNDISVVPEGAFNDLSALSHLAIGANPLYCDCNMQWLSDWVKSEYKEPGIARCAGPGEMADKLLLTTPSKKFTCQVHLVTQEL

SEQ ID NO: 7455 - protein, 117 aa, Artificial Sequence
  Synthetic polypeptide
MTQLLTLILSYNRLRCIPPRTFDGLKSLRLLSLHGNDISVVPEGAFNDLSALSHLAIGANPLYCDCNMQWLSDWVKSEYKEPGIARCAGPGEMADKLLLTTPSKKFTCQVHLVTQEL

SEQ ID NO: 7456 - protein, 8 aa, Artificial Sequence
  Synthetic polypeptide
IRLGEVGI

SEQ ID NO: 7457 - protein, 206 aa, Artificial Sequence
  Synthetic polypeptide
MQKSEGSGGTQLKNRATGNYDQRTSSSTQLKHRNAVQGSKSSLSTSSPESARKLHPRPSDKLNPKTINPFGEQSRVPSAFAAIYSKGGIPCRLVHGSVKHRLQWECPPESLSFDPLLITLAEGLRETKHPYTFVSKEGFRELLLVKGAPEKAIPLLPRLIPVLKAALVHSDDEVFERGLNALVQLSVVVGPSLNDHLKHLLTSGHG

SEQ ID NO: 7458 - protein, 108 aa, Artificial Sequence
  Synthetic polypeptide
MQKSEGSGGTQLKNRATGNYDQRTSSSTQLKHRNAVQGSKSSLSTSSPESARKLHPRPSDKLNPKTINPVHSDDEVFERGLNALVQLSVVVGPSLNDHLKHLLTSGHG

SEQ ID NO: 7459 - protein, 153 aa, Artificial Sequence
  Synthetic polypeptide
MQKSEGSGGTQLKNRATGNYDQRTSSSTQLKHRNAVQGSKSSLSTSSPESARKLHPRPSDKLNPKTINPGLRETKHPYTFVSKEGFRELLLVKGAPEKAIPLLPRLIPVLKAALVHSDDEVFERGLNALVQLSVVVGPSLNDHLKHLLTSGHG

SEQ ID NO: 7460 - protein, 40 aa, Artificial Sequence
  Synthetic polypeptide
MEEEAMNGDRTESDWQGLVSEGLYTELCMQQVLEKCLLNK

SEQ ID NO: 7461 - protein, 1011 aa, Artificial Sequence
  Synthetic polypeptide
MQRRGAGLGWPRQQQQQPPPLAVGPRAAAMVPSGGVPQGLGGRSACALLLLCYLNVVPSLGRQTSLTTSVIPKAEQSVAYKDFIYFTVFEGNVRNVSEVSVEYLCSQPCVVNLEAVVSSEFRSSIPVYKKRWKNEKHLHTSRTQIVHVKFPSIMVYRDDYFIRHSISVSAVIVRAWITHKYSGRDWNVKWEENLLHAVAKNYTLLQTIPPFERPFKDHQVCLEWNMGYIWNLRANRIPQCPLENDVVALLGFPYASSGENTGIVKKFPRFRNRELEATRRQRMDYPVFTVSLWLYLLHYCKANLCGILYFVDSNEMYGTPSVFLTEEGYLHIQMHLVKGEDLAVKTKFIIPLKEWFRLDISFNGGQIVVTTSIGQDLKSYHNQTISFREDFHYNDTAGYFIIGGSRYVAGIEGFFGPLKYYRLRSLHPAQIFNPLLEKQLAEQIKLYYERCAEVQEIVSVYASAAKHGGERQEACHLHNSYLDLQRRYGRPSMCRAFPWEKELKDKHPSLFQALLEMDLLTVPRNQNESVSEIGGKIFEKAVKRLSSIDGLHQISSIVPFLTDSSCCGYHKASYYLAVFYETGLNVPRDQLQGMLYSLVGGQGSERLSSMNLGYKHYQGIDNYPLDWELSYAYYSNIATKTPLDQHTLQGDQAYVETIRLKDDEILKVQTKEDGDVFMWLKHEATRGNAAAQQRLAQMLFWGQQGVAKNPEAAIEWYAKGALETEDPALIYDYAIVLFKGQGVKKNRRLALELMKKAASKGLHQAVNGLGWYYHKFKKNYAKAAKYWLKAEEMGNPDASYNLGVLHLDGIFPGVPGRNQTLAGEYFHKAAQGGHMEGTLWCSLYYITGNLETFPRDPEKAVVWAKHVAEKNGYLGHVIRKGLNAYLEGSWHEALLYYVLAAETGIEVSQTNLAHICEERPDLARRYLGVNCVWRYYNFSVFQIDAPSFAYLKMGDLYYYGHQNQSQDLELSVQMYAQAALDGDSQEHGWSWKPLSIANYAGAENQTPHILA

SEQ ID NO: 7462 - protein, 976 aa, Artificial Sequence
  Synthetic polypeptide
MAPRPKKQPDKNPLHGRELNVVPSLGRQTSLTTSVIPKAEQSVAYKDFIYFTVFEGNVRNVSEVSVEYLCSQPCVVNLEAVVSSEFRSSIPVYKKRWKNEKHLHTSRTQIVHVKFPSIMVYRDDYFIRHSISVSAVIVRAWITHKYSGRDWNVKWEENLLHAVAKNYTLLQTIPPFERPFKDHQVCLEWNMGYIWNLRANRIPQCPLENDVVALLGFPYASSGENTGIVKKFPRFRNRELEATRRQRMDYPVFTVSLWLYLLHYCKANLCGILYFVDSNEMYGTPSVFLTEEGYLHIQMHLVKGEDLAVKTKFIIPLKEWFRLDISFNGGQIVVTTSIGQDLKSYHNQTISFREDFHYNDTAGYFIIGGSRYVAGIEGFFGPLKYYRLRSLHPAQIFNPLLEKQLAEQIKLYYERCAEVQEIVSVYASAAKHGGERQEACHLHNSYLDLQRRYGRPSMCRAFPWEKELKDKHPSLFQALLEMDLLTVPRNQNESVSEIGGKIFEKAVKRLSSIDGLHQISSIVPFLTDSSCCGYHKASYYLAVFYETGLNVPRDQLQGMLYSLVGGQGSERLSSMNLGYKHYQGIDNYPLDWELSYAYYSNIATKTPLDQHTLQGDQAYVETIRLKDDEILKVQTKEDGDVFMWLKHEATRGNAAAQQRLAQMLFWGQQGVAKNPEAAIEWYAKGALETEDPALIYDYAIVLFKGQGVKKNRRLALELMKKAASKGLHQAVNGLGWYYHKFKKNYAKAAKYWLKAEEMGNPDASYNLGVLHLDGIFPGVPGRNQTLAGEYFHKAAQGGHMEGTLWCSLYYITGNLETFPRDPEKAVVWAKHVAEKNGYLGHVIRKGLNAYLEGSWHEALLYYVLAAETGIEVSQTNLAHICEERPDLARRYLGVNCVWRYYNFSVFQIDAPSFAYLKMGDLYYYGHQNQSQDLELSVQMYAQAALDGDSQEHGWSWKPLSIANYAGAENQTPHILA

SEQ ID NO: 7463 - protein, 858 aa, Artificial Sequence
  Synthetic polypeptide
MVYRDDYFIRHSISVSAVIVRAWITHKYSGRDWNVKWEENLLHAVAKNYTLLQTIPPFERPFKDHQVCLEWNMGYIWNLRANRIPQCPLENDVVALLGFPYASSGENTGIVKKFPRFRNRELEATRRQRMDYPVFTVSLWLYLLHYCKANLCGILYFVDSNEMYGTPSVFLTEEGYLHIQMHLVKGEDLAVKTKFIIPLKEWFRLDISFNGGQIVVTTSIGQDLKSYHNQTISFREDFHYNDTAGYFIIGGSRYVAGIEGFFGPLKYYRLRSLHPAQIFNPLLEKQLAEQIKLYYERCAEVQEIVSVYASAAKHGGERQEACHLHNSYLDLQRRYGRPSMCRAFPWEKELKDKHPSLFQALLEMDLLTVPRNQNESVSEIGGKIFEKAVKRLSSIDGLHQISSIVPFLTDSSCCGYHKASYYLAVFYETGLNVPRDQLQGMLYSLVGGQGSERLSSMNLGYKHYQGIDNYPLDWELSYAYYSNIATKTPLDQHTLQGDQAYVETIRLKDDEILKVQTKEDGDVFMWLKHEATRGNAAAQQRLAQMLFWGQQGVAKNPEAAIEWYAKGALETEDPALIYDYAIVLFKGQGVKKNRRLALELMKKAASKGLHQAVNGLGWYYHKFKKNYAKAAKYWLKAEEMGNPDASYNLGVLHLDGIFPGVPGRNQTLAGEYFHKAAQGGHMEGTLWCSLYYITGNLETFPRDPEKAVVWAKHVAEKNGYLGHVIRKGLNAYLEGSWHEALLYYVLAAETGIEVSQTNLAHICEERPDLARRYLGVNCVWRYYNFSVFQIDAPSFAYLKMGDLYYYGHQNQSQDLELSVQMYAQAALDGDSQEHGWSWKPLSIANYAGAENQTPHILA

SEQ ID NO: 7464 - protein, 22 aa, Artificial Sequence
  Synthetic polypeptide
CTPKPPWMETPRNMDGAGSHYP

SEQ ID NO: 7465 - protein, 102 aa, Artificial Sequence
  Synthetic polypeptide
TNLAHICEERPDLARRYLGVNCVWRYYNFSVFQIDAPSFAYLKMGDLYYYGHQNQSQDLELSVQMYAQAALDGDSQEHGWSWKPLSIANYAGAENQTPHILA

SEQ ID NO: 7466 - protein, 88 aa, Artificial Sequence
  Synthetic polypeptide
MAWIKRKFGERPPPKRLTREAMRNYLKERGDQTVLILHAKVAQKSYGNEKRIKKSKPFSVLITVQEVRMTMEAVCFKKEEKETTSLGN

SEQ ID NO: 7467 - protein, 125 aa, Artificial Sequence
  Synthetic polypeptide
MNLHFVFIFSKVIHSSWFLNTCLKIGLTFLCPWGAPTIFETMRKFGERPPPKRLTREAMRNYLKERGDQTVLILHAKVAQKSYGNEKRIKKSKPFSVLITVQEVRMTMEAVCFKKEEKETTSLGN

SEQ ID NO: 7468 - protein, 102 aa, Artificial Sequence
  Synthetic polypeptide
MDHTEGSPAEEPPAHAPSPGKFGERPPPKRLTREAMRNYLKERGDQTVLILHAKVAQKSYGNEKRIKKSKPFSVLITVQEVRMTMEAVCFKKEEKETTSLGN

SEQ ID NO: 7469 - protein, 87 aa, Artificial Sequence
  Synthetic polypeptide
MGGCRKFGERPPPKRLTREAMRNYLKERGDQTVLILHAKVAQKSYGNEKRIKKSKPFSVLITVQEVRMTMEAVCFKKEEKETTSLGN

SEQ ID NO: 7470 - protein, 89 aa, Artificial Sequence
  Synthetic polypeptide
MAPVVTGKFGERPPPKRLTREAMRNYLKERGDQTVLILHAKVAQKSYGNEKRIKKSKPFSVLITVQEVRMTMEAVCFKKEEKETTSLGN

SEQ ID NO: 7471 - protein, 67 aa, Artificial Sequence
  Synthetic polypeptide
MRNYLKERGDQTVLILHAKVAQKSYGNEKRIKKSKPFSVLITVQEVRMTMEAVCFKKEEKETTSLGN

SEQ ID NO: 7472 - protein, 243 aa, Artificial Sequence
  Synthetic polypeptide
MKASLQRPEIKLESLKEDIKEFFKISGWEKKLQNAVYSELSVFPLPSHPAAPPEHLKEPLVYMRKAQGSWEKRILKSLNSMCTELSIPLARKRPVGEQKELLNKWNEMGTDEPDLSLFRPVYAPKDFLEVLINLRNPNYENGDSLSFRTHLGLIQVPLKVKDIPELGALGRSASNKVINKKQNMGPRKQDPNQREGEFPRNDSKEKFQDKGCTTGLKHNNPRLEQEVGRFQDGCLQEKHQKYR

SEQ ID NO: 7473 - protein, 274 aa, Artificial Sequence
  Synthetic polypeptide
MLQEESDLSLIIAQIVQKLKGSNLYSQLERQAWASLQRPEIKLESLKEDIKEFFKISGWEKKLQNAVYSELSVFPLPSHPAAPPEHLKEPLVYMRKAQGSWEKRILKSLNSMCTELSIPLARKRPVGEQKELLNKWNEMGTDEPDLSLFRPVYAPKDFLEVLINLRNPNYENGDSLSFRTHLGLIQVPLKVKDIPELGALGRSASNKVINKKQNMGPRKQDPNQREGEFPRNDSKEKFQDKGCTTGLKHNNPRLEQEVGRFQDGCLQEKHQKYR

SEQ ID NO: 7474 - protein, 209 aa, Artificial Sequence
  Synthetic polypeptide
MLQEESDLSLIIAQIVQKLKGSNLYSQLERQAWGSWEKRILKSLNSMCTELSIPLARKRPVGEQKELLNKWNEMGTDEPDLSLFRPVYAPKDFLEVLINLRNPNYENGDSLSFRTHLGLIQVPLKVKDIPELGALGRSASNKVINKKQNMGPRKQDPNQREGEFPRNDSKEKFQDKGCTTGLKHNNPRLEQEVGRFQDGCLQEKHQKYR

SEQ ID NO: 7475 - protein, 358 aa, Artificial Sequence
  Synthetic polypeptide
MLQEESDLSLIIAQIVQKLKGSNLYSQLERQAWASLQRPEIKLESLKEDIKEFFKISGWEKKLQNAVYSELSVFPLPSHPAAPPEHLKEPLVYMRKAQGSWEKRILKSLNSMCTELSIPLARKRPVGEQKELLNKWNEMGTDEPDLSLFRPVYAPKDFLEVLINLRNPNYENGDSLSFRTHLGLIQVPLKVKDIPELKECFVELGLNIGQLGIDDSTQVPPELFENEHVRIGQKVLAEQDSAAAQQYIRQGSPTALRAELWALILNISSQPEDVLYYEQLKTNVIQHDLLVDSLIYKDVKLTASNDDYYFVFEDYLYQICYFYKLKVCGNPALSKSISTIFFNSMSLFHISVSHFGNS

SEQ ID NO: 7476 - protein, 293 aa, Artificial Sequence
  Synthetic polypeptide
MLQEESDLSLIIAQIVQKLKGSNLYSQLERQAWGSWEKRILKSLNSMCTELSIPLARKRPVGEQKELLNKWNEMGTDEPDLSLFRPVYAPKDFLEVLINLRNPNYENGDSLSFRTHLGLIQVPLKVKDIPELKECFVELGLNIGQLGIDDSTQVPPELFENEHVRIGQKVLAEQDSAAAQQYIRQGSPTALRAELWALILNISSQPEDVLYYEQLKTNVIQHDLLVDSLIYKDVKLTASNDDYYFVFEDYLYQICYFYKLKVCGNPALSKSISTIFFNSMSLFHISVSHFGNS

SEQ ID NO: 7477 - protein, 484 aa, Artificial Sequence
  Synthetic polypeptide
MLQEESDLSLIIAQIVQKLKGSNLYSQLERQAWASLQRPEIKLESLKEDIKEFFKISGWEKKLQNAVYSELSVFPLPSHPAAPPEHLKEPLVYMRKAQGSWEKRILKSLNSMCTELSIPLARKRPVGEQKELLNKWNEMGTDEPDLSLFRPVYAPKDFLEVLINLRNPNYENGDSLSFRTHLGLIQVPLKVKDIPELKECFVELGLNIGQLGIDDSTQVPPELFENEHVRIGQKVLAEQDSAAAQQYIRQGSPTALRAELWALILNISSQPEDVLYYEQLKTNVIQHDLLVDSLIYKDVKLTASNDDYYFVFEDYLYQVLLCFSRDTSVLSHFAFNSASPPKSYIRGKLGLEEYAVFYPPNGVIPFHGFSMYVAPLCFLYHEPSKLYQIFREMYVRFFFRLHSISSHPSGIVSLCLLFETLLQTYLPQLFYHLREIGAQPLRISFKWMVRAFSGYLATDQLLLLWDRILGYNSLEILAESSCPQ

SEQ ID NO: 7478 - protein, 419 aa, Artificial Sequence
  Synthetic polypeptide
MLQEESDLSLIIAQIVQKLKGSNLYSQLERQAWGSWEKRILKSLNSMCTELSIPLARKRPVGEQKELLNKWNEMGTDEPDLSLFRPVYAPKDFLEVLINLRNPNYENGDSLSFRTHLGLIQVPLKVKDIPELKECFVELGLNIGQLGIDDSTQVPPELFENEHVRIGQKVLAEQDSAAAQQYIRQGSPTALRAELWALILNISSQPEDVLYYEQLKTNVIQHDLLVDSLIYKDVKLTASNDDYYFVFEDYLYQVLLCFSRDTSVLSHFAFNSASPPKSYIRGKLGLEEYAVFYPPNGVIPFHGFSMYVAPLCFLYHEPSKLYQIFREMYVRFFFRLHSISSHPSGIVSLCLLFETLLQTYLPQLFYHLREIGAQPLRISFKWMVRAFSGYLATDQLLLLWDRILGYNSLEILAESSCPQ

SEQ ID NO: 7479 - protein, 1222 aa, Artificial Sequence
  Synthetic polypeptide
MKVRLLRQLSAAAKVKAPSGLQGPPQAHQFISLLLEEYGALCQAARSISTFLGTLENEHLKKFQVTWELHNKHLFENLVFSEPLLQSNLPALVSQIRLGTTTHDTCSEDTYSTLLQRYQRSEEELRRVAEEWLECQKRIDAYVDEQMTMKTKQRMLTEDWELFKQRRFIEEQLTNKKAVTGENNFTDTMRHMLSSRLSMPDCPNCNYRRRCACDDCSLSHILTCGIMDPPVTDDIHIHQLPLQVDPAPDYLAERSPPSVSSASSGSGSSSPITIQQHPRLILTDSGSAPTFCSDDEDVAPLSAKFADIYPLSNYDDTEVVANMNGIHSELNGGGENMALKDESPQISSTSSSSSEADDEEADGESSGEPPGAPKEDGVLGSRSPRTEESKADSPPPSYPTQQAEQAPNTCECHVCKQEASGLTPSAMTAGALPPGHQFLSPEKPTHPALHLYPHIHGHVPLHTVPHLPRPLIHPTLYATPPFTHSKALPPAPVQNHTNKHQVFNASLQDHIYPSCFGNTPEWNSSKFISLWGSEVMNDKNWNPGTFLPDTISGSEILGPTLSETRPEALPPPSSNETPAVSDSKEKKNAAKKKCLYNFQDAFMEANKVVMATSSATSSVSCTATTVQSSNSQFRVSSKRPPSVGDVFHGISKEDHRHSAPAAPRNSPTGLAPLPALSPAALSPAALSPASTPHLANLAAPSFPKTATTTPGFVDTRKSFCPAPLPPATDGSISAPPSVCSDPDCEGHRCENGVYDPQQDDGDESADEDSCSEHSSSTSTSTNQKEGKYCDCCYCEFFGHGGPPAAPTSRNYAEMREKLRLRLTKRKEEQPKKMDQISERESVVDHRRVEDLLQFINSSETKPVSSTRAAKRARHKQRKLEEKARLEAEARAREHLHLQEEQRRREEEEDEEEEEDRFKEEFQRLQELQKLRAVKKKKKERPSKDCPKLDMLTRNFQAATESVPNSGNIHNGSLEQTEEPETSSHSPSRHMNHSEPRPGLGADGDAADPVDTRDSKFLLPKEVNGKQHEPLSFFFDIMQHHKEGNGKQKLRQTSKASSEPARRPTEPPKATEGQSKPRAQTESKAKVVDLMSITEQKREERKVNSNNNNKKQLNHIKDEKSNPTPMEPTSPGEHQQNSKLVLAESPQPKGKNKKNKKKKGDRVNNSIDDVFLPKDIDLDSVDMDETEREVEYFKRARWLTPVISTFCEAEVEGSLEPRSLRPA

SEQ ID NO: 7480 - protein, 1263 aa, Artificial Sequence
  Synthetic polypeptide
MKVRLLRQLSAAAKVKAPSGLQGPPQAHQFISLLLEEYGALCQAARSISTFLGTLENEHLKKFQVTWELHNKHLFENLVFSEPLLQSNLPALVSQIRLGTTTHDTCSEDTYSTLLQRYQRSEEELRRVAEEWLECQKRIDAYVDEQMTMKTKQRMLTEDWELFKQRRFIEEQLTNKKAVTGENNFTDTMRHMLSSRLSMPDCPNCNYRRRCACDDCSLSHILTCGIMDPPVTDDIHIHQLPLQVDPAPDYLAERSPPSVSSASSGSGSSSPITIQQHPRLILTDSGSAPTFCSDDEDVAPLSAKFADIYPLSNYDDTEVVANMNGIHSELNGGGENMALKDESPQISSTSSSSSEADDEEADGESSGEPPGAPKEDGVLGSRSPRTEESKADSPPPSYPTQQAEQAPNTCECHVCKQEASGLTPSAMTAGALPPGHQFLSPEKPTHPALHLYPHIHGHVPLHTVPHLPRPLIHPTLYATPPFTHSKALPPAPVQNHTNKHQVFNASLQDHIYPSCFGNTPEWNSSKFISLWGSEVMNDKNWNPGTFLPDTISGSEILGPTLSETRPEALPPPSSNETPAVSDSKEKKNAAKKKCLYNFQDAFMEANKVVMATSSATSSVSCTATTVQSSNSQFRVSSKRPPSVGDVFHGISKEDHRHSAPAAPRNSPTGLAPLPALSPAALSPAALSPASTPHLANLAAPSFPKTATTTPGFVDTRKSFCPAPLPPATDGSISAPPSVCSDPDCEGHRCENGVYDPQQDDGDESADEDSCSEHSSSTSTSTNQKEGKYCDCCYCEFFGHGGPPAAPTSRNYAEMREKLRLRLTKRKEEQPKKMDQISERESVVDHRRVEDLLQFINSSETKPVSSTRAAKRARHKQRKLEEKARLEAEARAREHLHLQEEQRRREEEEDEEEEEDRFKEEFQRLQELQKLRAVKKKKKERPSKDCPKLDMLTRNFQAATESVPNSGNIHNGSLEQTEEPETSSHSPSRHMNHSEPRPGLGADGDAADPVDTRDSKFLLPKEVNGKQHEPLSFFFDIMQHHKEGNGKQKLRQTSKASSEPARRPTEPPKATEGQSKPRAQTESKAKVVDLMSITEQKREERKVNSNNNNKKQLNHIKDEKSNPTPMEPTSPGEHQQNSKLVLAESPQPKGKNKKNKKKKGDRVNNSIDGVSLLLPSLGYNGAILAHCNLRLPGSSDCAASASQVVGITDDVFLPKDIDLDSVDMDETEREVEYFKRARWLTPVISTFCEAEVEGSLEPRSLRPA

SEQ ID NO: 7481 - protein, 1244 aa, Artificial Sequence
  Synthetic polypeptide
MKVRLLRQLSAAAKVKAPSGLQGPPQAHQFISLLLEEYGALCQAARSISTFLGTLENEHLKKFQVTWELHNKHLFENLVFSEPLLQSNLPALVSQIRLGTTTHDTCSEDTYSTLLQRYQRSEEELRRVAEEWLECQKRIDAYVDEQDLQTSVNKSIDTGTLVQSWLRGAAMTMKTKQRMLTEDWELFKQRRFIEEQLTNKKAVTGENNFTDTMRHMLSSRLSMPDCPNCNYRRRCACDDCSLSHILTCGIMDPPVTDDIHIHQLPLQVDPAPDYLAERSPPSVSSASSGSGSSSPITIQQHPRLILTDSGSAPTFDDEDVAPLSAKFADIYPLSNYDDTEVVANMNGIHSELNGGGENMALKDESPQISSTSSSSSEADDEEADGESSGEPPGAPKEDGVLGSRSPRTEESKADSPPPSYPTQQAEQAPNTCECHVCKQEASGLTPSAMTAGALPPGHQFLSPEKPTHPALHLYPHIHGHVPLHTVPHLPRPLIHPTLYATPPFTHSKALPPAPVQNHTNKHQVFNASLQDHIYPSCFGNTPEWNSSKFISLWGSEVMNDKNWNPGTFLPDTISGSEILGPTLSETRPEALPPPSSNETPAVSDSKEKKNAAKKKCLYNFQDAFMEANKVVMATSSATSSVSCTATTVQSSNSQFRVSSKRPPSVGDVFHGISKEDHRHSAPAAPRNSPTGLAPLPALSPAALSPAALSPASTPHLANLAAPSFPKTATTTPGFVDTRKSFCPAPLPPATDGSISAPPSVCSDPDCEGHRCENGVYDPQQDDGDESADEDSCSEHSSSTSTSTNQKEGKYCDCCYCEFFGHGGPPAAPTSRNYAEMREKLRLRLTKRKEEQPKKMDQISERESVVDHRRVEDLLQFINSSETKPVSSTRAAKRARHKQRKLEEKARLEAEARAREHLHLQEEQRRREEEEDEEEEEDRFKEEFQRLQELQKLRAVKKKKKERPSKDCPKLDMLTRNFQAATESVPNSGNIHNGSLEQTEEPETSSHSPSRHMNHSEPRPGLGADGDAADPVDTRDSKFLLPKEVNGKQHEPLSFFFDIMQHHKEGNGKQKLRQTSKASSEPARRPTEPPKATEGQSKPRAQTESKAKVVDLMSITEQKREERKVNSNNNNKKQLNHIKDEKSNPTPMEPTSPGEHQQNSKLVLAESPQPKGKNKKNKKKKGDRVNNSIDDVFLPKDIDLDSVDMDETEREVEYFKRARWLTPVISTFCEAEVEGSLEPRSLRPA

SEQ ID NO: 7482 - protein, 143 aa, Artificial Sequence
  Synthetic polypeptide
MILALCNFRLLGSSDSPVSGSGVAGTTGMRHNTREKNKPTNKLSLKLITQIRTASYLSNQSELLQWRCFIGAVAHDCNPSTLGGRGGWITRSGVQDQPGQDGETWYLLNIQNISRARWQAPVIPATQEAEAGESLELRGQRLQ

SEQ ID NO: 7483 - protein, 59 aa, Artificial Sequence
  Synthetic polypeptide
MILALCNFRLLGSSDSPVSGSGVAGTTGMRHNTRTGVLIRRGRDIRSRSAQRRSHAGIQ

SEQ ID NO: 7484 - protein, 193 aa, Artificial Sequence
  Synthetic polypeptide
MNGDSRAAVVTSPPPTTAPHKERYFDRVDENNPEYLRERNMAPDLRQDFNMMEQKKRVSMILQSPAFCEELESMIQEQFKKGKNPTGLLALQQIADFMTTNVPNVYPAAPQGGMAALNMSLGMVTPVNDLRGSDSIAYDKGEKLLRCKLAAFYRLADLFGWSQLIYNHITEYKFHRESVCCGPCCGPRTRGKE

SEQ ID NO: 7485 - protein, 98 aa, Artificial Sequence
  Synthetic polypeptide
MELLTFRDVAIEFSPEEWKCLDPAQQNLYRDVMLENYRNLISLGVAISNPDLVIYLEQRKEPYKVKIHETVAKHPGRPTIRENRKELTLKYWGLVPPI

SEQ ID NO: 7486 - protein, 754 aa, Artificial Sequence
  Synthetic polypeptide
MAKAKKVGARRKASGAPAGARGGPAKANSNPFEVKVNRQKFQILGRKTRHDVGLPGVSRARALRKRTQTLLKEYKERDKSNVFRDKRFGEYNSNMSPEEKMMKRFALEQQRHHEKKSIYNLNEDEELTHYGQSLADIEKHNDIVDSDSDAEDRGTLSAELTAAHFGGGGGLLHKKTQQEGEEREKPKSRKELIEELIAKSKQEKRERQAQREDALELTEKLDQDWKEIQTLLSHKTPKSENRDKKEKPKPDAYDMMVRELGFEMKAQPSNRMKTEAELAKEEQEHLRKLEAERLRRMLGKDEDENVKKPKHMSADDLNDGFVLDKDDRRLLSYKDGKMNVEEDVQEEQSKEASDPESNEEEGDSSGGEDTEESDSPDSHLDLESNVESEEENEKPAKEQRQTPGKGLISGKERAGKATRDELPYTFAAPESYEELRSLLLGRSMEEQLLVVERIQKCNHPSLAEGNKAKLEKLFGFLLEYVGDLATDDPPDLTVIDKLVVHLYHLCQMFPESASDAIKFVLRDAMHEMEEMIETKGRAALPGLDVLIYLKITGLLFPTSDFWHPVVTPALVCLSQLLTKCPILSLQDVVKGLFVCCLFLEYVALSQRFIPELINFLLGILYIATPNKASQGSTLVHPFRALGKNSELLVVSAREDVATWQQSSLSLRWASRLRAPTSTEANHIRLSCLAVGLALLKRCVLMYGSLPSFHAIMGPLQALLTDHLADCSHPQELQDESSMRTATRLVPARSLEHRA

SEQ ID NO: 7487 - protein, 235 aa, Artificial Sequence
  Synthetic polypeptide
MELENIVANSLLLKARQEKDYSSLCDKQPIGRRLFRQFCDTKPTLKRHIEFLDAVAEYEVADDEDRSDCGLSILDRFFNDKLAAPLPEIPPDVVTECRLGLKEENPSKKAFEECTRVAHNYLRGEPFEEYQESSYFSQFLQWKWLERQPVTKNTFRHYRVLGKGGFGEVCACQVRATGKMYACKKLQKKRIKKRKGEAMALNEKRILEKVQSRFVNKGKNHMVISTAAGRAFDRS

SEQ ID NO: 7488 - protein, 267 aa, Artificial Sequence
  Synthetic polypeptide
MELENIVANSLLLKARQGGYGKKSGRSKKWKEILTLPPVSQCSELRHSIEKDYSSLCDKQPIGRRLFRQFCDTKPTLKRHIEFLDAVAEYEVADDEDRSDCGLSILDRFFNDKLAAPLPEIPPDVVTECRLGLKEENPSKKAFEECTRVAHNYLRGEPFEEYQESSYFSQFLQWKWLERQPVTKNTFRHYRVLGKGGFGEVCACQVRATGKMYACKKLQKKRIKKRKGEAMALNEKRILEKVQSRFVNKGKNHMVISTAAGRAFDRS

SEQ ID NO: 7489 - protein, 1859 aa, Artificial Sequence
  Synthetic polypeptide
MATLEKLMKAFESLKSFQQQQQQQQQQQQQQQQQQQQQPPPPPPPPPPPQLPQPPPQAQPLLPQPQPPPPPPPPPPGPAVAEEPLHRPKKELSATKKDRVNHCLTICENIVAQSVRNSPEFQKLLGIAMELFLLCSDDAESDVRMVADECLNKVIKALMDSNLPRLQLELYKEIKKNGAPRSLRAALWRFAELAHLVRPQKCRPYLVNLLPCLTRTSKRPEESVQETLAAAVPKIMASFGNFANDNEIKVLLKAFIANLKSSSPTIRRTAAGSAVSICQHSRRTQYFYSWLLNVLLGLLVPVEDEHSTLLILGVLLTLRYLVPLLQQQVKDTSLKGSFGVTRKEMEVSPSAEQLVQVYELTLHHTQHQDHNVVTGALELLQQLFRTPPPELLQTLTAVGGIGQLTAAKEESGGRSRSGSIVELIAGGGSSCSPVLSRKQKGKVLLGEEEALEDDSESRSDVSSSALTASVKDEISGELAASSGVSTPGSAGHDIITEQPRSQHTLQADSVDLASCDLTSSATDGDEEDILSHSSSQVSAVPSDPAMDLNDGTQASSPISDSSQTTTEGPDSAVTPSDSSEIVLDGTDNQYLGLQIGQPQDEDEEATGILPDEASEAFRNSSMALQQAHLLKNMSHCRQPSDSSVDKFVLRDEATEPGDQENKPCRIKGDIGQSTDDDSAPLVHCVRLLSASFLLTGGKNVLVPDRDVRVSVKALALSCVGAAVALHPESFFSKLYKVPLDTTEYPEEQYVSDILNYIDHGDPQVRGATAILCGTLICSILSRSRFHVGDWMGTIRTLTGNTFSLADCIPLLRKTLKDESSVTCKLACTAVRNCVMSLCSSSYSELGLQLIIDVLTLRNSSYWLVRTELLETLAEIDFRLVSFLEAKAENLHRGAHHYTGLLKLQERVLNNVVIHLLGDEDPRVRHVAAASLIRLVPKLFYKCDQGQADPVVAVARDQSSVYLKLLMHETQPPSHFSVSTITRIYRGYNLLPSITDVTMENNLSRVIAAVSHELITSTTRALTFGCCEALCLLSTAFPVCIWSLGWHCGVPPLSASDESRKSCTVGMATMILTLLSSAWFPLDLSAHQDALILAGNLLAASAPKSLRSSWASEEEANPAATKQEEVWPALGDRALVPMVEQLFSHLLKVINICAHVLDDVAPGPAIKAALPSLTNPPSLSPIRRKGKEKEPGEQASVPLSPKKGSEASAASRQSDTSGPVTTSKSSSLGSFYHLPSYLKLHDVLKATHANYKVTLDLQNSTEKFGGFLRSALDVLSQILELATLQDIGKCVEEILGYLKSCFSREPMMATVCVQQLLKTLFGTNLASQFDGLSSNPSKSQGRAQRLGSSSVRPGLYHYCFMAPYTHFTQALADASLRNMVQAEQENDTSGWFDVLQKVSTQLKTNLTSVTKNRADKNAIHNHIRLFEPLVIKALKQYTTTTCVQLQKQVLDLLAQLVQLRVNYCLLDSDQVFIGFVLKQFEYIEVGQFRESEAIIPNIFFFLVLLSYERYHSKQIIGIPKIIQLCDGIMASGRKAVTHAIPALQPIVHDLFVLRGTNKADAGKELETQKEVVVSMLLRLIQYHQVLEMFILVLQQCHKENEDKWKRLSRQIADIILPMLAKQQMHIDSHEALGVLNTLFEILAPSSLRPVDMLLRSMFVTPNTMASVSTVQLWISGILAILRVLISQSTEDIVLSRIQELSFSPYLISCTVINRLRDGDSTSTLEEHSEGKQIKNLPEETFSRFLLQLVGILLEDIVTKQLKVEMSEQQHTFYCQELGTLLMCLIHIFKSGMFRRITAAATRLFRSDGCGGSFYTLDSLNLRARSMITTHPALVLLWCQILLLVNHTDYRWWAEVQQTPK

SEQ ID NO: 7490 - protein, 2429 aa, Artificial Sequence
  Synthetic polypeptide
MATLEKLMKAFESLKSFQQQQQQQQQQQQQQQQQQQQQPPPPPPPPPPPQLPQPPPQAQPLLPQPQPPPPPPPPPPGPAVAEEPLHRPKKELSATKKDRVNHCLTICENIVAQSVRNSPEFQKLLGIAMELFLLCSDDAESDVRMVADECLNKVIKALMDSNLPRLQLELYKEIKKNGAPRSLRAALWRFAELAHLVRPQKCRPYLVNLLPCLTRTSKRPEESVQETLAAAVPKIMASFGNFANDNEIKVLLKAFIANLKSSSPTIRRTAAGSAVSICQHSRRTQYFYSWLLNVLLGLLVPVEDEHSTLLILGVLLTLRYLVPLLQQQVKDTSLKGSFGVTRKEMEVSPSAEQLVQVYELTLHHTQHQDHNVVTGALELLQQLFRTPPPELLQTLTAVGGIGQLTAAKEESGGRSRSGSIVELIAGGGSSCSPVLSRKQKGKVLLGEEEALEDDSESRSDVSSSALTASVKDEISGELAASSGVSTPGSAGHDIITEQPRSQHTLQADSVDLASCDLTSSATDGDEEDILSHSSSQVSAVPSDPAMDLNDGTQASSPISDSSQTTTEGPDSAVTPSDSSEIVLDGTDNQYLGLQIGQPQDEDEEATGILPDEASEAFRNSSMALQQAHLLKNMSHCRQPSDSSVDKFVLRDEATEPGDQENKPCRIKGDIGQSTDDDSAPLVHCVRLLSASFLLTGGKNVLVPDRDVRVSVKALALSCVGAAVALHPESFFSKLYKVPLDTTEYPEEQYVSDILNYIDHGDPQVRGATAILCGTLICSILSRSRFHVGDWMGTIRTLTGNTFSLADCIPLLRKTLKDESSVTCKLACTAVRNCVMSLCSSSYSELGLQLIIDVLTLRNSSYWLVRTELLETLAEIDFRLVSFLEAKAENLHRGAHHYTGLLKLQERVLNNVVIHLLGDEDPRVRHVAAASLIRLVPKLFYKCDQGQADPVVAVARDQSSVYLKLLMHETQPPSHFSVSTITRIYRGYNLLPSITDVTMENNLSRVIAAVSHELITSTTRALTFGCCEALCLLSTAFPVCIWSLGWHCGVPPLSASDESRKSCTVGMATMILTLLSSAWFPLDLSAHQDALILAGNLLAASAPKSLRSSWASEEEANPAATKQEEVWPALGDRALVPMVEQLFSHLLKVINICAHVLDDVAPGPAIKAALPSLTNPPSLSPIRRKGKEKEPGEQASVPLSPKKGSEASAASRQSDTSGPVTTSKSSSLGSFYHLPSYLKLHDVLKATHANYKVTLDLQNSTEKFGGFLRSALDVLSQILELATLQDIGKCVEEILGYLKSCFSREPMMATVCVQQLLKTLFGTNLASQFDGLSSNPSKSQGRAQRLGSSSVRPGLYHYCFMAPYTHFTQALADASLRNMVQAEQENDTSGWFDVLQKVSTQLKTNLTSVTKNRADKNAIHNHIRLFEPLVIKALKQYTTTTCVQLQKQVLDLLAQLVQLRVNYCLLDSDQVFIGFVLKQFEYIEVGQFRESEAIIPNIFFFLVLLSYERYHSKQIIGIPKIIQLCDGIMASGRKAVTHAIPALQPIVHDLFVLRGTNKADAGKELETQKEVVVSMLLRLIQYHQVLEMFILVLQQCHKENEDKWKRLSRQIADIILPMLAKQQMHIDSHEALGVLNTLFEILAPSSLRPVDMLLRSMFVTPNTMASVSTVQLWISGILAILRVLISQSTEDIVLSRIQELSFSPYLISCTVINRLRDGDSTSTLEEHSEGKQIKNLPEETFSRFLLQLVGILLEDIVTKQLKVEMSEQQHTFYCQELGTLLMCLIHIFKSGMFRRITAAATRLFRSDGCGGSFYTLDSLNLRARSMITTHPALVLLWCQILLLVNHTDYRWWAEVQQTPKRHSLSSTKLLSPQMSGEEEDSDLAAKLGMCNREIVRRGALILFCDYVCQNLHDSEHLTWLIVNHIQDLISLSHEPPVQDFISAVHRNSAASGLFIQAIQSRCENLSTPTMLKKTLQCLEGIHLSQSGAVLTLYVDRLLCTPFRVLARMVDILACRRVEMLLAANLQSSMAQLPMEELNRIQEYLQSSGLAQRHQRLYSLLDRFRLSTMQDSLSPSPPVSSHPLDGDGHVSLETVSPDKDWYVHLVKSQCWTRSDSALLEGAELVNRIPAEDMNAFMMNSEFNLSLLAPCLSLGMSEISGGQKSALFEAAREVTLARVSGTVQQLPAVHHVFQPELPAEPAAYWSKLNDLFGDAALYQSLPTLARALAQYLVVVSKLPSHLHLPPEKEKDIVKFVVATLEALSWHLIHEQIPLSLDLQAGLDCCCLALQLPGLWSVVSSTEFVTHACSLIYCVHFILEAVAVQPGEQLLSPERRTNTPKAISEEEEEVDPNTQNPKYITAACEMVAEMVESLQSVLALGHKRNSGVPAFLTPLLRNIIISLARLPLVNSYTRVPPLPGVVVYACNPSYSGD

SEQ ID NO: 7491 - protein, 709 aa, Artificial Sequence
  Synthetic polypeptide
MFRAGEASKRPLPGPSPPRVRSVEVARGRAGYGFTLSGQAPCVLSCVMRGSPADFVGLRAGDQILAVNEINVKKASHEDVVKLIGKCSGVLHMVIAEGVGRFESCSSDEEGGLYEGKGWLKPKLDSKALGINRAERVVEEMQSGGIFNMIFENPSLCASNSEPLKLKQRSLSESAATRFDVGHESINNPNPNMLSKEEISKVIHDDSVFSIGLESHDDFALDASILNVAMIVGYLGSIELPSTSSNLESDSLQAIRGCMRRLRAEQKIHSLVTMKIMHDCVQLSTDKAGVVAEYPAEKLAFSAVCPDDRRFFGLVTMQTNDDGSLAQEEEGALRTSCHVFMVDPDLFNHKIHQGIARRFGFECTADPDTNGCLEFPASSLPVLQFISVLYRDMGELIEGMRARAFLDGDADAHQNNSTSSNSDSGIGNFHQEEKSNRVLVVDLGGSSSRHGPGGSAWDGVGGRGAQPWGAPWTGPFCPDPEGSPPFEAAHQTDRFWDLNKHLGPASPVEVPPASLRSSVPPSKRGTVGAGCGFNQRWLPVHVLREWQCGHTSDQDSYTDSTDGWSSINCGTLPPPMSKIPADRYRVEGSFAQPPLNAPKREWSRKAFGMQSIFGPHRNVRKTKEDKKGSKFGRGTGLTQPSQRTSARRSFGRSKRFSITRSLDDLEPHLQPSSPALISSLISSPHLQPSSPALISSLISSPHLQPHLQP

SEQ ID NO: 7492 - protein, 107 aa, Artificial Sequence
  Synthetic polypeptide
MKKHDFAENLPSSLLIIILVIFTLSGSKFGRGTGLTQPSQRTSARRSFGRSKRFSITRSLDDLEPHLQPSSPALISSLISSPHLQPSSPALISSLISSPHLQPHLQP

SEQ ID NO: 7493 - protein, 705 aa, Artificial Sequence
  Synthetic polypeptide
MFRAGEASKRPLPGPSPPRVRSVEVARGRAGYGFTLSGQAPCVLSCVMRGSPADFVGLRAGDQILAVNEINVKKASHEDVVKLIGKCSGVLHMVIAEGVGRFESCSSDEEGGLYEGKGWLKPKLDSKALGINRAERVVEEMQSGGIFNMIFENPSLCASNSEPLKLKQRSLSESAATRFDVGHESINNPNPNMLSKEEISKVIHDDSVFSIGLESHDDFALDASILNVAMIVGYLGSIELPSTSSNLESDSLQAIRGCMRRLRAEQKIHSLVTMKIMHDCVQLSTDKAGVVAEYPAEKLAFSAVCPDDRRFFGLVTMQTNDDGSLAQEEEGALRTSCHVFMVDPDLFNHKIHQGIARRFGFECTADPDTNGCLEFPASSLPVLQFISVLYRDMGELIEGMRARAFLDGDADAHQNNSTSSNSDSGIGNFHQEEKSNRVLVVDLGGSSSRHGPGGSAWDGVGGRGAQPWGAPWTGPFCPDPEGSPPFEAAHQTDRFWDLNKHLGPASPVEVPPASLRSSVPPSKRGTVGAGCGFNQRWLPVHVLREWQCGHTSDQDSYTDSTDGWSSINCGTLPPPMSKIPADRYRVEGSFAQPPLNAPKREWSRKAFGMQSIFGPHRNVRKTKEDKKGSKFGRGTGLTQPSQRTSARRSFGRSKRFSITRSLDDLEPSSPALISSLISSPHLQPSSPALISSLISSPHLQPHLQP

SEQ ID NO: 7494 - protein, 103 aa, Artificial Sequence
  Synthetic polypeptide
MKKHDFAENLPSSLLIIILVIFTLSGSKFGRGTGLTQPSQRTSARRSFGRSKRFSITRSLDDLEPSSPALISSLISSPHLQPSSPALISSLISSPHLQPHLQP

SEQ ID NO: 7495 - protein, 700 aa, Artificial Sequence
  Synthetic polypeptide
MFRAGEASKRPLPGPSPPRVRSVEVARGRAGYGFTLSGQAPCVLSCVMRGSPADFVGLRAGDQILAVNEINVKKASHEDVVKLIGKCSGVLHMVIAEGVGRFESCSSDEEGGLYEGKGWLKPKLDSKALGINRAERVVEEMQSGGIFNMIFENPSLCASNSEPLKLKQRSLSESAATRFDVGHESINNPNPNMLSKEEISKVIHDDSVFSIGLESHDDFALDASILNVAMIVGYLGSIELPSTSSNLESDSLQAIRGCMRRLRAEQKIHSLVTMKIMHDCVQLSTDKAGVVAEYPAEKLAFSAVCPDDRRFFGLVTMQTNDDGSLAQEEEGALRTSCHVFMVDPDLFNHKIHQGIARRFGFECTADPDTNGCLEFPASSLPVLQFISVLYRDMGELIEGMRARAFLDGDADAHQNNSTSSNSDSGIGNFHQEEKSNRVLVVDLGGSSSRHGPGGSAWDGVGGRGAQPWGAPWTGPFCPDPEGSPPFEAAHQTDRFWDLNKHLGPASPVEVPPASLRSSVPPSKRGTVGAGCGFNQRWLPVHVLREWQCGHTSDQDSYTDSTDGWSSINCGTLPPPMSKIPADRYRVEGSFAQPPLNAPKREWSRKAFGMQSIFGPHRNVRKTKEDKKGSKFGRGTGLTQPSQRTSARRSFGRSKRFSITRSLDDLEPSSPASSPALISSPHLQPSSPASSPALISSLISS

SEQ ID NO: 7496 - protein, 98 aa, Artificial Sequence
  Synthetic polypeptide
MKKHDFAENLPSSLLIIILVIFTLSGSKFGRGTGLTQPSQRTSARRSFGRSKRFSITRSLDDLEPSSPASSPALISSPHLQPSSPASSPALISSLISS

SEQ ID NO: 7497 - protein, 696 aa, Artificial Sequence
  Synthetic polypeptide
MFRAGEASKRPLPGPSPPRVRSVEVARGRAGYGFTLSGQAPCVLSCVMRGSPADFVGLRAGDQILAVNEINVKKASHEDVVKLIGKCSGVLHMVIAEGVGRFESCSSDEEGGLYEGKGWLKPKLDSKALGINRAERVVEEMQSGGIFNMIFENPSLCASNSEPLKLKQRSLSESAATRFDVGHESINNPNPNMLSKEEISKVIHDDSVFSIGLESHDDFALDASILNVAMIVGYLGSIELPSTSSNLESDSLQAIRGCMRRLRAEQKIHSLVTMKIMHDCVQLSTDKAGVVAEYPAEKLAFSAVCPDDRRFFGLVTMQTNDDGSLAQEEEGALRTSCHVFMVDPDLFNHKIHQGIARRFGFECTADPDTNGCLEFPASSLPVLQFISVLYRDMGELIEGMRARAFLDGDADAHQNNSTSSNSDSGIGNFHQEEKSNRVLVVDLGGSSSRHGPGGSAWDGVGGRGAQPWGAPWTGPFCPDPEGSPPFEAAHQTDRFWDLNKHLGPASPVEVPPASLRSSVPPSKRGTVGAGCGFNQRWLPVHVLREWQCGHTSDQDSYTDSTDGWSSINCGTLPPPMSKIPADRYRVEGSFAQPPLNAPKREWSRKAFGMQSIFGPHRNVRKTKEDKKGSKFGRGTGLTQPSQRTSARRSFGRSKRFSITRSLDDLEPHLQPSSPALISSPHLQPHLQPSSPASSPA

SEQ ID NO: 7498 - protein, 94 aa, Artificial Sequence
  Synthetic polypeptide
MKKHDFAENLPSSLLIIILVIFTLSGSKFGRGTGLTQPSQRTSARRSFGRSKRFSITRSLDDLEPHLQPSSPALISSPHLQPHLQPSSPASSPA

SEQ ID NO: 7499 - protein, 692 aa, Artificial Sequence
  Synthetic polypeptide
MFRAGEASKRPLPGPSPPRVRSVEVARGRAGYGFTLSGQAPCVLSCVMRGSPADFVGLRAGDQILAVNEINVKKASHEDVVKLIGKCSGVLHMVIAEGVGRFESCSSDEEGGLYEGKGWLKPKLDSKALGINRAERVVEEMQSGGIFNMIFENPSLCASNSEPLKLKQRSLSESAATRFDVGHESINNPNPNMLSKEEISKVIHDDSVFSIGLESHDDFALDASILNVAMIVGYLGSIELPSTSSNLESDSLQAIRGCMRRLRAEQKIHSLVTMKIMHDCVQLSTDKAGVVAEYPAEKLAFSAVCPDDRRFFGLVTMQTNDDGSLAQEEEGALRTSCHVFMVDPDLFNHKIHQGIARRFGFECTADPDTNGCLEFPASSLPVLQFISVLYRDMGELIEGMRARAFLDGDADAHQNNSTSSNSDSGIGNFHQEEKSNRVLVVDLGGSSSRHGPGGSAWDGVGGRGAQPWGAPWTGPFCPDPEGSPPFEAAHQTDRFWDLNKHLGPASPVEVPPASLRSSVPPSKRGTVGAGCGFNQRWLPVHVLREWQCGHTSDQDSYTDSTDGWSSINCGTLPPPMSKIPADRYRVEGSFAQPPLNAPKREWSRKAFGMQSIFGPHRNVRKTKEDKKGSKFGRGTGLTQPSQRTSARRSFGRSKRFSITRSLDDLEPSSPALISSPHLQPHLQPSSPASSPA

SEQ ID NO: 7500 - protein, 90 aa, Artificial Sequence
  Synthetic polypeptide
MKKHDFAENLPSSLLIIILVIFTLSGSKFGRGTGLTQPSQRTSARRSFGRSKRFSITRSLDDLEPSSPALISSPHLQPHLQPSSPASSPA

SEQ ID NO: 7501 - protein, 688 aa, Artificial Sequence
  Synthetic polypeptide
MFRAGEASKRPLPGPSPPRVRSVEVARGRAGYGFTLSGQAPCVLSCVMRGSPADFVGLRAGDQILAVNEINVKKASHEDVVKLIGKCSGVLHMVIAEGVGRFESCSSDEEGGLYEGKGWLKPKLDSKALGINRAERVVEEMQSGGIFNMIFENPSLCASNSEPLKLKQRSLSESAATRFDVGHESINNPNPNMLSKEEISKVIHDDSVFSIGLESHDDFALDASILNVAMIVGYLGSIELPSTSSNLESDSLQAIRGCMRRLRAEQKIHSLVTMKIMHDCVQLSTDKAGVVAEYPAEKLAFSAVCPDDRRFFGLVTMQTNDDGSLAQEEEGALRTSCHVFMVDPDLFNHKIHQGIARRFGFECTADPDTNGCLEFPASSLPVLQFISVLYRDMGELIEGMRARAFLDGDADAHQNNSTSSNSDSGIGNFHQEEKSNRVLVVDLGGSSSRHGPGGSAWDGVGGRGAQPWGAPWTGPFCPDPEGSPPFEAAHQTDRFWDLNKHLGPASPVEVPPASLRSSVPPSKRGTVGAGCGFNQRWLPVHVLREWQCGHTSDQDSYTDSTDGWSSINCGTLPPPMSKIPADRYRVEGSFAQPPLNAPKREWSRKAFGMQSIFGPHRNVRKTKEDKKGSKFGRGTGLTQPSQRTSARRSFGRSKRFSITRSLDDLEPSSPALISSLISSPHLQPHLQP

SEQ ID NO: 7502 - protein, 86 aa, Artificial Sequence
  Synthetic polypeptide
MKKHDFAENLPSSLLIIILVIFTLSGSKFGRGTGLTQPSQRTSARRSFGRSKRFSITRSLDDLEPSSPALISSLISSPHLQPHLQP

SEQ ID NO: 7503 - protein, 683 aa, Artificial Sequence
  Synthetic polypeptide
MFRAGEASKRPLPGPSPPRVRSVEVARGRAGYGFTLSGQAPCVLSCVMRGSPADFVGLRAGDQILAVNEINVKKASHEDVVKLIGKCSGVLHMVIAEGVGRFESCSSDEEGGLYEGKGWLKPKLDSKALGINRAERVVEEMQSGGIFNMIFENPSLCASNSEPLKLKQRSLSESAATRFDVGHESINNPNPNMLSKEEISKVIHDDSVFSIGLESHDDFALDASILNVAMIVGYLGSIELPSTSSNLESDSLQAIRGCMRRLRAEQKIHSLVTMKIMHDCVQLSTDKAGVVAEYPAEKLAFSAVCPDDRRFFGLVTMQTNDDGSLAQEEEGALRTSCHVFMVDPDLFNHKIHQGIARRFGFECTADPDTNGCLEFPASSLPVLQFISVLYRDMGELIEGMRARAFLDGDADAHQNNSTSSNSDSGIGNFHQEEKSNRVLVVDLGGSSSRHGPGGSAWDGVGGRGAQPWGAPWTGPFCPDPEGSPPFEAAHQTDRFWDLNKHLGPASPVEVPPASLRSSVPPSKRGTVGAGCGFNQRWLPVHVLREWQCGHTSDQDSYTDSTDGWSSINCGTLPPPMSKIPADRYRVEGSFAQPPLNAPKREWSRKAFGMQSIFGPHRNVRKTKEDKKGSKFGRGTGLTQPSQRTSARRSFGRSKRFSITRSLDDLEPSSPASSPALISSLISS

SEQ ID NO: 7504 - protein, 81 aa, Artificial Sequence
  Synthetic polypeptide
MKKHDFAENLPSSLLIIILVIFTLSGSKFGRGTGLTQPSQRTSARRSFGRSKRFSITRSLDDLEPSSPASSPALISSLISS

SEQ ID NO: 7505 - protein, 679 aa, Artificial Sequence
  Synthetic polypeptide
MFRAGEASKRPLPGPSPPRVRSVEVARGRAGYGFTLSGQAPCVLSCVMRGSPADFVGLRAGDQILAVNEINVKKASHEDVVKLIGKCSGVLHMVIAEGVGRFESCSSDEEGGLYEGKGWLKPKLDSKALGINRAERVVEEMQSGGIFNMIFENPSLCASNSEPLKLKQRSLSESAATRFDVGHESINNPNPNMLSKEEISKVIHDDSVFSIGLESHDDFALDASILNVAMIVGYLGSIELPSTSSNLESDSLQAIRGCMRRLRAEQKIHSLVTMKIMHDCVQLSTDKAGVVAEYPAEKLAFSAVCPDDRRFFGLVTMQTNDDGSLAQEEEGALRTSCHVFMVDPDLFNHKIHQGIARRFGFECTADPDTNGCLEFPASSLPVLQFISVLYRDMGELIEGMRARAFLDGDADAHQNNSTSSNSDSGIGNFHQEEKSNRVLVVDLGGSSSRHGPGGSAWDGVGGRGAQPWGAPWTGPFCPDPEGSPPFEAAHQTDRFWDLNKHLGPASPVEVPPASLRSSVPPSKRGTVGAGCGFNQRWLPVHVLREWQCGHTSDQDSYTDSTDGWSSINCGTLPPPMSKIPADRYRVEGSFAQPPLNAPKREWSRKAFGMQSIFGPHRNVRKTKEDKKGSKFGRGTGLTQPSQRTSARRSFGRSKRFSITRSLDDLEPHLQPSSPASSPA

SEQ ID NO: 7506 - protein, 77 aa, Artificial Sequence
  Synthetic polypeptide
MKKHDFAENLPSSLLIIILVIFTLSGSKFGRGTGLTQPSQRTSARRSFGRSKRFSITRSLDDLEPHLQPSSPASSPA

SEQ ID NO: 7507 - protein, 675 aa, Artificial Sequence
  Synthetic polypeptide
MFRAGEASKRPLPGPSPPRVRSVEVARGRAGYGFTLSGQAPCVLSCVMRGSPADFVGLRAGDQILAVNEINVKKASHEDVVKLIGKCSGVLHMVIAEGVGRFESCSSDEEGGLYEGKGWLKPKLDSKALGINRAERVVEEMQSGGIFNMIFENPSLCASNSEPLKLKQRSLSESAATRFDVGHESINNPNPNMLSKEEISKVIHDDSVFSIGLESHDDFALDASILNVAMIVGYLGSIELPSTSSNLESDSLQAIRGCMRRLRAEQKIHSLVTMKIMHDCVQLSTDKAGVVAEYPAEKLAFSAVCPDDRRFFGLVTMQTNDDGSLAQEEEGALRTSCHVFMVDPDLFNHKIHQGIARRFGFECTADPDTNGCLEFPASSLPVLQFISVLYRDMGELIEGMRARAFLDGDADAHQNNSTSSNSDSGIGNFHQEEKSNRVLVVDLGGSSSRHGPGGSAWDGVGGRGAQPWGAPWTGPFCPDPEGSPPFEAAHQTDRFWDLNKHLGPASPVEVPPASLRSSVPPSKRGTVGAGCGFNQRWLPVHVLREWQCGHTSDQDSYTDSTDGWSSINCGTLPPPMSKIPADRYRVEGSFAQPPLNAPKREWSRKAFGMQSIFGPHRNVRKTKEDKKGSKFGRGTGLTQPSQRTSARRSFGRSKRFSITRSLDDLEPSSPASSPA

SEQ ID NO: 7508 - protein, 73 aa, Artificial Sequence
  Synthetic polypeptide
MKKHDFAENLPSSLLIIILVIFTLSGSKFGRGTGLTQPSQRTSARRSFGRSKRFSITRSLDDLEPSSPASSPA

SEQ ID NO: 7509 - protein, 671 aa, Artificial Sequence
  Synthetic polypeptide
MFRAGEASKRPLPGPSPPRVRSVEVARGRAGYGFTLSGQAPCVLSCVMRGSPADFVGLRAGDQILAVNEINVKKASHEDVVKLIGKCSGVLHMVIAEGVGRFESCSSDEEGGLYEGKGWLKPKLDSKALGINRAERVVEEMQSGGIFNMIFENPSLCASNSEPLKLKQRSLSESAATRFDVGHESINNPNPNMLSKEEISKVIHDDSVFSIGLESHDDFALDASILNVAMIVGYLGSIELPSTSSNLESDSLQAIRGCMRRLRAEQKIHSLVTMKIMHDCVQLSTDKAGVVAEYPAEKLAFSAVCPDDRRFFGLVTMQTNDDGSLAQEEEGALRTSCHVFMVDPDLFNHKIHQGIARRFGFECTADPDTNGCLEFPASSLPVLQFISVLYRDMGELIEGMRARAFLDGDADAHQNNSTSSNSDSGIGNFHQEEKSNRVLVVDLGGSSSRHGPGGSAWDGVGGRGAQPWGAPWTGPFCPDPEGSPPFEAAHQTDRFWDLNKHLGPASPVEVPPASLRSSVPPSKRGTVGAGCGFNQRWLPVHVLREWQCGHTSDQDSYTDSTDGWSSINCGTLPPPMSKIPADRYRVEGSFAQPPLNAPKREWSRKAFGMQSIFGPHRNVRKTKEDKKGSKFGRGTGLTQPSQRTSARRSFGRSKRFSITRSLDDLEPHLQP

SEQ ID NO: 7510 - protein, 69 aa, Artificial Sequence
  Synthetic polypeptide
MKKHDFAENLPSSLLIIILVIFTLSGSKFGRGTGLTQPSQRTSARRSFGRSKRFSITRSLDDLEPHLQP

SEQ ID NO: 7511 - protein, 717 aa, Artificial Sequence
  Synthetic polypeptide
MFRAGEASKRPLPGPSPPRVRSVEVARGRAGYGFTLSGQAPCVLSCVMRGSPADFVGLRAGDQILAVNEINVKKASHEDVVKLIGKCSGVLHMVIAEGVGRFESCSSDEEGGLYEGKGWLKPKLDSKALGINRAERVVEEMQSGGIFNMIFENPSLCASNSEPLKLKQRSLSESAATRFDVGHESINNPNPNMLSKEEISKVIHDDSVFSIGLESHDDFALDASILNVAMIVGYLGSIELPSTSSNLESDSLQAIRGCMRRLRAEQKIHSLVTMKIMHDCVQLSTDKAGVVAEYPAEKLAFSAVCPDDRRFFGLVTMQTNDDGSLAQEEEGALRTSCHVFMVDPDLFNHKIHQGIARRFGFECTADPDTNGCLEFPASSLPVLQFISVLYRDMGELIEGMRARAFLDGDADAHQNNSTSSNSDSGIGNFHQEEKSNRVLVVDLGGSSSRHGPGGSAWDGVGGRGAQPWGAPWTGPFCPDPEGSPPFEAAHQTDRFWDLNKHLGPASPVEVPPASLRSSVPPSKRGTVGAGCGFNQRWLPVHVLREWQCGHTSDQDSYTDSTDGWSSINCGTLPPPMSKIPADRYRVEGSFAQPPLNAPKREWSRKAFGMQSIFGPHRNVRKTKEDKKGSKFGRGTGLTQPSQRTSARRSFGRSKRFSITRSLDDLEPHLQPSSPASSPASSPSLISSPHLQPHLQPSSPASSPALISSPHLQPHLQP

SEQ ID NO: 7512 - protein, 115 aa, Artificial Sequence
  Synthetic polypeptide
MKKHDFAENLPSSLLIIILVIFTLSGSKFGRGTGLTQPSQRTSARRSFGRSKRFSITRSLDDLEPHLQPSSPASSPASSPSLISSPHLQPHLQPSSPASSPALISSPHLQPHLQP

SEQ ID NO: 7513 - protein, 713 aa, Artificial Sequence
  Synthetic polypeptide
MFRAGEASKRPLPGPSPPRVRSVEVARGRAGYGFTLSGQAPCVLSCVMRGSPADFVGLRAGDQILAVNEINVKKASHEDVVKLIGKCSGVLHMVIAEGVGRFESCSSDEEGGLYEGKGWLKPKLDSKALGINRAERVVEEMQSGGIFNMIFENPSLCASNSEPLKLKQRSLSESAATRFDVGHESINNPNPNMLSKEEISKVIHDDSVFSIGLESHDDFALDASILNVAMIVGYLGSIELPSTSSNLESDSLQAIRGCMRRLRAEQKIHSLVTMKIMHDCVQLSTDKAGVVAEYPAEKLAFSAVCPDDRRFFGLVTMQTNDDGSLAQEEEGALRTSCHVFMVDPDLFNHKIHQGIARRFGFECTADPDTNGCLEFPASSLPVLQFISVLYRDMGELIEGMRARAFLDGDADAHQNNSTSSNSDSGIGNFHQEEKSNRVLVVDLGGSSSRHGPGGSAWDGVGGRGAQPWGAPWTGPFCPDPEGSPPFEAAHQTDRFWDLNKHLGPASPVEVPPASLRSSVPPSKRGTVGAGCGFNQRWLPVHVLREWQCGHTSDQDSYTDSTDGWSSINCGTLPPPMSKIPADRYRVEGSFAQPPLNAPKREWSRKAFGMQSIFGPHRNVRKTKEDKKGSKFGRGTGLTQPSQRTSARRSFGRSKRFSITRSLDDLEPSSPASSPASSPSLISSPHLQPHLQPSSPASSPALISSPHLQPHLQP

SEQ ID NO: 7514 - protein, 111 aa, Artificial Sequence
  Synthetic polypeptide
MKKHDFAENLPSSLLIIILVIFTLSGSKFGRGTGLTQPSQRTSARRSFGRSKRFSITRSLDDLEPSSPASSPASSPSLISSPHLQPHLQPSSPASSPALISSPHLQPHLQP

SEQ ID NO: 7515 - protein, 696 aa, Artificial Sequence
  Synthetic polypeptide
MFRAGEASKRPLPGPSPPRVRSVEVARGRAGYGFTLSGQAPCVLSCVMRGSPADFVGLRAGDQILAVNEINVKKASHEDVVKLIGKCSGVLHMVIAEGVGRFESCSSDEEGGLYEGKGWLKPKLDSKALGINRAERVVEEMQSGGIFNMIFENPSLCASNSEPLKLKQRSLSESAATRFDVGHESINNPNPNMLSKEEISKVIHDDSVFSIGLESHDDFALDASILNVAMIVGYLGSIELPSTSSNLESDSLQAIRGCMRRLRAEQKIHSLVTMKIMHDCVQLSTDKAGVVAEYPAEKLAFSAVCPDDRRFFGLVTMQTNDDGSLAQEEEGALRTSCHVFMVDPDLFNHKIHQGIARRFGFECTADPDTNGCLEFPASSLPVLQFISVLYRDMGELIEGMRARAFLDGDADAHQNNSTSSNSDSGIGNFHQEEKSNRVLVVDLGGSSSRHGPGGSAWDGVGGRGAQPWGAPWTGPFCPDPEGSPPFEAAHQTDRFWDLNKHLGPASPVEVPPASLRSSVPPSKRGTVGAGCGFNQRWLPVHVLREWQCGHTSDQDSYTDSTDGWSSINCGTLPPPMSKIPADRYRVEGSFAQPPLNAPKREWSRKAFGMQSIFGPHRNVRKTKEDKKGSKFGRGTGLTQPSQRTSARRSFGRSKRFSITRSLDDLEPSSPASSPALISSLISSPHLQPSSPASSPA

SEQ ID NO: 7516 - protein, 94 aa, Artificial Sequence
  Synthetic polypeptide
MKKHDFAENLPSSLLIIILVIFTLSGSKFGRGTGLTQPSQRTSARRSFGRSKRFSITRSLDDLEPSSPASSPALISSLISSPHLQPSSPASSPA

SEQ ID NO: 7517 - protein, 692 aa, Artificial Sequence
  Synthetic polypeptide
MFRAGEASKRPLPGPSPPRVRSVEVARGRAGYGFTLSGQAPCVLSCVMRGSPADFVGLRAGDQILAVNEINVKKASHEDVVKLIGKCSGVLHMVIAEGVGRFESCSSDEEGGLYEGKGWLKPKLDSKALGINRAERVVEEMQSGGIFNMIFENPSLCASNSEPLKLKQRSLSESAATRFDVGHESINNPNPNMLSKEEISKVIHDDSVFSIGLESHDDFALDASILNVAMIVGYLGSIELPSTSSNLESDSLQAIRGCMRRLRAEQKIHSLVTMKIMHDCVQLSTDKAGVVAEYPAEKLAFSAVCPDDRRFFGLVTMQTNDDGSLAQEEEGALRTSCHVFMVDPDLFNHKIHQGIARRFGFECTADPDTNGCLEFPASSLPVLQFISVLYRDMGELIEGMRARAFLDGDADAHQNNSTSSNSDSGIGNFHQEEKSNRVLVVDLGGSSSRHGPGGSAWDGVGGRGAQPWGAPWTGPFCPDPEGSPPFEAAHQTDRFWDLNKHLGPASPVEVPPASLRSSVPPSKRGTVGAGCGFNQRWLPVHVLREWQCGHTSDQDSYTDSTDGWSSINCGTLPPPMSKIPADRYRVEGSFAQPPLNAPKREWSRKAFGMQSIFGPHRNVRKTKEDKKGSKFGRGTGLTQPSQRTSARRSFGRSKRFSITRSLDDLEPHLQPSSPASSPALISSPHLQPHLQP

SEQ ID NO: 7518 - protein, 90 aa, Artificial Sequence
  Synthetic polypeptide
MKKHDFAENLPSSLLIIILVIFTLSGSKFGRGTGLTQPSQRTSARRSFGRSKRFSITRSLDDLEPHLQPSSPASSPALISSPHLQPHLQP

SEQ ID NO: 7519 - protein, 688 aa, Artificial Sequence
  Synthetic polypeptide
MFRAGEASKRPLPGPSPPRVRSVEVARGRAGYGFTLSGQAPCVLSCVMRGSPADFVGLRAGDQILAVNEINVKKASHEDVVKLIGKCSGVLHMVIAEGVGRFESCSSDEEGGLYEGKGWLKPKLDSKALGINRAERVVEEMQSGGIFNMIFENPSLCASNSEPLKLKQRSLSESAATRFDVGHESINNPNPNMLSKEEISKVIHDDSVFSIGLESHDDFALDASILNVAMIVGYLGSIELPSTSSNLESDSLQAIRGCMRRLRAEQKIHSLVTMKIMHDCVQLSTDKAGVVAEYPAEKLAFSAVCPDDRRFFGLVTMQTNDDGSLAQEEEGALRTSCHVFMVDPDLFNHKIHQGIARRFGFECTADPDTNGCLEFPASSLPVLQFISVLYRDMGELIEGMRARAFLDGDADAHQNNSTSSNSDSGIGNFHQEEKSNRVLVVDLGGSSSRHGPGGSAWDGVGGRGAQPWGAPWTGPFCPDPEGSPPFEAAHQTDRFWDLNKHLGPASPVEVPPASLRSSVPPSKRGTVGAGCGFNQRWLPVHVLREWQCGHTSDQDSYTDSTDGWSSINCGTLPPPMSKIPADRYRVEGSFAQPPLNAPKREWSRKAFGMQSIFGPHRNVRKTKEDKKGSKFGRGTGLTQPSQRTSARRSFGRSKRFSITRSLDDLEPSSPASSPALISSPHLQPHLQP

SEQ ID NO: 7520 - protein, 86 aa, Artificial Sequence
  Synthetic polypeptide
MKKHDFAENLPSSLLIIILVIFTLSGSKFGRGTGLTQPSQRTSARRSFGRSKRFSITRSLDDLEPSSPASSPALISSPHLQPHLQP

SEQ ID NO: 7521 - protein, 683 aa, Artificial Sequence
  Synthetic polypeptide
MFRAGEASKRPLPGPSPPRVRSVEVARGRAGYGFTLSGQAPCVLSCVMRGSPADFVGLRAGDQILAVNEINVKKASHEDVVKLIGKCSGVLHMVIAEGVGRFESCSSDEEGGLYEGKGWLKPKLDSKALGINRAERVVEEMQSGGIFNMIFENPSLCASNSEPLKLKQRSLSESAATRFDVGHESINNPNPNMLSKEEISKVIHDDSVFSIGLESHDDFALDASILNVAMIVGYLGSIELPSTSSNLESDSLQAIRGCMRRLRAEQKIHSLVTMKIMHDCVQLSTDKAGVVAEYPAEKLAFSAVCPDDRRFFGLVTMQTNDDGSLAQEEEGALRTSCHVFMVDPDLFNHKIHQGIARRFGFECTADPDTNGCLEFPASSLPVLQFISVLYRDMGELIEGMRARAFLDGDADAHQNNSTSSNSDSGIGNFHQEEKSNRVLVVDLGGSSSRHGPGGSAWDGVGGRGAQPWGAPWTGPFCPDPEGSPPFEAAHQTDRFWDLNKHLGPASPVEVPPASLRSSVPPSKRGTVGAGCGFNQRWLPVHVLREWQCGHTSDQDSYTDSTDGWSSINCGTLPPPMSKIPADRYRVEGSFAQPPLNAPKREWSRKAFGMQSIFGPHRNVRKTKEDKKGSKFGRGTGLTQPSQRTSARRSFGRSKRFSITRSLDDLEPHLQPSSPALISSLISS

SEQ ID NO: 7522 - protein, 81 aa, Artificial Sequence
  Synthetic polypeptide
MKKHDFAENLPSSLLIIILVIFTLSGSKFGRGTGLTQPSQRTSARRSFGRSKRFSITRSLDDLEPHLQPSSPALISSLISS

SEQ ID NO: 7523 - protein, 679 aa, Artificial Sequence
  Synthetic polypeptide
MFRAGEASKRPLPGPSPPRVRSVEVARGRAGYGFTLSGQAPCVLSCVMRGSPADFVGLRAGDQILAVNEINVKKASHEDVVKLIGKCSGVLHMVIAEGVGRFESCSSDEEGGLYEGKGWLKPKLDSKALGINRAERVVEEMQSGGIFNMIFENPSLCASNSEPLKLKQRSLSESAATRFDVGHESINNPNPNMLSKEEISKVIHDDSVFSIGLESHDDFALDASILNVAMIVGYLGSIELPSTSSNLESDSLQAIRGCMRRLRAEQKIHSLVTMKIMHDCVQLSTDKAGVVAEYPAEKLAFSAVCPDDRRFFGLVTMQTNDDGSLAQEEEGALRTSCHVFMVDPDLFNHKIHQGIARRFGFECTADPDTNGCLEFPASSLPVLQFISVLYRDMGELIEGMRARAFLDGDADAHQNNSTSSNSDSGIGNFHQEEKSNRVLVVDLGGSSSRHGPGGSAWDGVGGRGAQPWGAPWTGPFCPDPEGSPPFEAAHQTDRFWDLNKHLGPASPVEVPPASLRSSVPPSKRGTVGAGCGFNQRWLPVHVLREWQCGHTSDQDSYTDSTDGWSSINCGTLPPPMSKIPADRYRVEGSFAQPPLNAPKREWSRKAFGMQSIFGPHRNVRKTKEDKKGSKFGRGTGLTQPSQRTSARRSFGRSKRFSITRSLDDLEPSSPALISSLISS

SEQ ID NO: 7524 - protein, 77 aa, Artificial Sequence
  Synthetic polypeptide
MKKHDFAENLPSSLLIIILVIFTLSGSKFGRGTGLTQPSQRTSARRSFGRSKRFSITRSLDDLEPSSPALISSLISS

SEQ ID NO: 7525 - protein, 675 aa, Artificial Sequence; identical to SEQ ID NO: 7507
  Synthetic polypeptide

SEQ ID NO: 7526 - protein, 73 aa, Artificial Sequence; identical to SEQ ID NO: 7508
  Synthetic polypeptide

SEQ ID NO: 7527 - protein, 671 aa, Artificial Sequence; identical to SEQ ID NO: 7509
  Synthetic polypeptide

SEQ ID NO: 7528 - protein, 69 aa, Artificial Sequence; identical to SEQ ID NO: 7510
  Synthetic polypeptide

SEQ ID NO: 7529 - protein, 667 aa, Artificial Sequence
  Synthetic polypeptide
MFRAGEASKRPLPGPSPPRVRSVEVARGRAGYGFTLSGQAPCVLSCVMRGSPADFVGLRAGDQILAVNEINVKKASHEDVVKLIGKCSGVLHMVIAEGVGRFESCSSDEEGGLYEGKGWLKPKLDSKALGINRAERVVEEMQSGGIFNMIFENPSLCASNSEPLKLKQRSLSESAATRFDVGHESINNPNPNMLSKEEISKVIHDDSVFSIGLESHDDFALDASILNVAMIVGYLGSIELPSTSSNLESDSLQAIRGCMRRLRAEQKIHSLVTMKIMHDCVQLSTDKAGVVAEYPAEKLAFSAVCPDDRRFFGLVTMQTNDDGSLAQEEEGALRTSCHVFMVDPDLFNHKIHQGIARRFGFECTADPDTNGCLEFPASSLPVLQFISVLYRDMGELIEGMRARAFLDGDADAHQNNSTSSNSDSGIGNFHQEEKSNRVLVVDLGGSSSRHGPGGSAWDGVGGRGAQPWGAPWTGPFCPDPEGSPPFEAAHQTDRFWDLNKHLGPASPVEVPPASLRSSVPPSKRGTVGAGCGFNQRWLPVHVLREWQCGHTSDQDSYTDSTDGWSSINCGTLPPPMSKIPADRYRVEGSFAQPPLNAPKREWSRKAFGMQSIFGPHRNVRKTKEDKKGSKFGRGTGLTQPSQRTSARRSFGRSKRFSITRSLDDLEP

SEQ ID NO: 7530 - protein, 65 aa, Artificial Sequence
  Synthetic polypeptide
MKKHDFAENLPSSLLIIILVIFTLSGSKFGRGTGLTQPSQRTSARRSFGRSKRFSITRSLDDLEP

SEQ ID NO: 7531 - protein, 725 aa, Artificial Sequence
  Synthetic polypeptide
MFRAGEASKRPLPGPSPPRVRSVEVARGRAGYGFTLSGQAPCVLSCVMRGSPADFVGLRAGDQILAVNEINVKKASHEDVVKLIGKCSGVLHMVIAEGVGRFESCSSDEEGGLYEGKGWLKPKLDSKALGINRAERVVEEMQSGGIFNMIFENPSLCASNSEPLKLKQRSLSESAATRFDVGHESINNPNPNMLSKEEISKVIHDDSVFSIGLESHDDFALDASILNVAMIVGYLGSIELPSTSSNLESDSLQAIRGCMRRLRAEQKIHSLVTMKIMHDCVQLSTDKAGVVAEYPAEKLAFSAVCPDDRRFFGLVTMQTNDDGSLAQEEEGALRTSCHVFMVDPDLFNHKIHQGIARRFGFECTADPDTNGCLEFPASSLPVLQFISVLYRDMGELIEGMRARAFLDGDADAHQNNSTSSNSDSGIGNFHQEEKSNRVLVVDLGGSSSRHGPGGSAWDGVGGRGAQPWGAPWTGPFCPDPEGSPPFEAAHQTDRFWDLNKHLGPASPVEVPPASLRSSVPPSKRGTVGAGCGFNQRWLPVHVLREWQCGHTSDQDSYTDSTDGWSSINCGTLPPPMSKIPADRYRVEGSFAQPPLNAPKREWSRKAFGMQSIFGPHRNVRKTKEDKKGSKFGRGTGLTQPSQRTSARRSFGRSKRFSITRSLDDLEPHLQPSSPASSPALISSPHLQPSSPALISSLISSPHLQPHLQPSSPALISSLISSLISS

SEQ ID NO: 7532 - protein, 123 aa, Artificial Sequence
  Synthetic polypeptide
MKKHDFAENLPSSLLIIILVIFTLSGSKFGRGTGLTQPSQRTSARRSFGRSKRFSITRSLDDLEPHLQPSSPASSPALISSPHLQPSSPALISSLISSPHLQPHLQPSSPALISSLISSLISS

SEQ ID NO: 7533 - protein, 721 aa, Artificial Sequence
  Synthetic polypeptide
MFRAGEASKRPLPGPSPPRVRSVEVARGRAGYGFTLSGQAPCVLSCVMRGSPADFVGLRAGDQILAVNEINVKKASHEDVVKLIGKCSGVLHMVIAEGVGRFESCSSDEEGGLYEGKGWLKPKLDSKALGINRAERVVEEMQSGGIFNMIFENPSLCASNSEPLKLKQRSLSESAATRFDVGHESINNPNPNMLSKEEISKVIHDDSVFSIGLESHDDFALDASILNVAMIVGYLGSIELPSTSSNLESDSLQAIRGCMRRLRAEQKIHSLVTMKIMHDCVQLSTDKAGVVAEYPAEKLAFSAVCPDDRRFFGLVTMQTNDDGSLAQEEEGALRTSCHVFMVDPDLFNHKIHQGIARRFGFECTADPDTNGCLEFPASSLPVLQFISVLYRDMGELIEGMRARAFLDGDADAHQNNSTSSNSDSGIGNFHQEEKSNRVLVVDLGGSSSRHGPGGSAWDGVGGRGAQPWGAPWTGPFCPDPEGSPPFEAAHQTDRFWDLNKHLGPASPVEVPPASLRSSVPPSKRGTVGAGCGFNQRWLPVHVLREWQCGHTSDQDSYTDSTDGWSSINCGTLPPPMSKIPADRYRVEGSFAQPPLNAPKREWSRKAFGMQSIFGPHRNVRKTKEDKKGSKFGRGTGLTQPSQRTSARRSFGRSKRFSITRSLDDLEPSSPASSPALISSPHLQPSSPALISSLISSPHLQPHLQPSSPALISSLISSLISS

SEQ ID NO: 7534 - protein, 119 aa, Artificial Sequence
  Synthetic polypeptide
MKKHDFAENLPSSLLIIILVIFTLSGSKFGRGTGLTQPSQRTSARRSFGRSKRFSITRSLDDLEPSSPASSPALISSPHLQPSSPALISSLISSPHLQPHLQPSSPALISSLISSLISS

SEQ ID NO: 7535 - protein, 716 aa, Artificial Sequence
  Synthetic polypeptide
MFRAGEASKRPLPGPSPPRVRSVEVARGRAGYGFTLSGQAPCVLSCVMRGSPADFVGLRAGDQILAVNEINVKKASHEDVVKLIGKCSGVLHMVIAEGVGRFESCSSDEEGGLYEGKGWLKPKLDSKALGINRAERVVEEMQSGGIFNMIFENPSLCASNSEPLKLKQRSLSESAATRFDVGHESINNPNPNMLSKEEISKVIHDDSVFSIGLESHDDFALDASILNVAMIVGYLGSIELPSTSSNLESDSLQAIRGCMRRLRAEQKIHSLVTMKIMHDCVQLSTDKAGVVAEYPAEKLAFSAVCPDDRRFFGLVTMQTNDDGSLAQEEEGALRTSCHVFMVDPDLFNHKIHQGIARRFGFECTADPDTNGCLEFPASSLPVLQFISVLYRDMGELIEGMRARAFLDGDADAHQNNSTSSNSDSGIGNFHQEEKSNRVLVVDLGGSSSRHGPGGSAWDGVGGRGAQPWGAPWTGPFCPDPEGSPPFEAAHQTDRFWDLNKHLGPASPVEVPPASLRSSVPPSKRGTVGAGCGFNQRWLPVHVLREWQCGHTSDQDSYTDSTDGWSSINCGTLPPPMSKIPADRYRVEGSFAQPPLNAPKREWSRKAFGMQSIFGPHRNVRKTKEDKKGSKFGRGTGLTQPSQRTSARRSFGRSKRFSITRSLDDLEPHLQPSSPALISSPHLQPSSPASSPALISSLISSPHLQPSSPASSPASSP

SEQ ID NO: 7536 - protein, 114 aa, Artificial Sequence
  Synthetic polypeptide
MKKHDFAENLPSSLLIIILVIFTLSGSKFGRGTGLTQPSQRTSARRSFGRSKRFSITRSLDDLEPHLQPSSPALISSPHLQPSSPASSPALISSLISSPHLQPSSPASSPASSP

SEQ ID NO: 7537 - protein, 712 aa, Artificial Sequence
  Synthetic polypeptide
MFRAGEASKRPLPGPSPPRVRSVEVARGRAGYGFTLSGQAPCVLSCVMRGSPADFVGLRAGDQILAVNEINVKKASHEDVVKLIGKCSGVLHMVIAEGVGRFESCSSDEEGGLYEGKGWLKPKLDSKALGINRAERVVEEMQSGGIFNMIFENPSLCASNSEPLKLKQRSLSESAATRFDVGHESINNPNPNMLSKEEISKVIHDDSVFSIGLESHDDFALDASILNVAMIVGYLGSIELPSTSSNLESDSLQAIRGCMRRLRAEQKIHSLVTMKIMHDCVQLSTDKAGVVAEYPAEKLAFSAVCPDDRRFFGLVTMQTNDDGSLAQEEEGALRTSCHVFMVDPDLFNHKIHQGIARRFGFECTADPDTNGCLEFPASSLPVLQFISVLYRDMGELIEGMRARAFLDGDADAHQNNSTSSNSDSGIGNFHQEEKSNRVLVVDLGGSSSRHGPGGSAWDGVGGRGAQPWGAPWTGPFCPDPEGSPPFEAAHQTDRFWDLNKHLGPASPVEVPPASLRSSVPPSKRGTVGAGCGFNQRWLPVHVLREWQCGHTSDQDSYTDSTDGWSSINCGTLPPPMSKIPADRYRVEGSFAQPPLNAPKREWSRKAFGMQSIFGPHRNVRKTKEDKKGSKFGRGTGLTQPSQRTSARRSFGRSKRFSITRSLDDLEPSSPALISSPHLQPSSPASSPALISSLISSPHLQPSSPASSPASSP

SEQ ID NO: 7538 - protein, 110 aa, Artificial Sequence
  Synthetic polypeptide
MKKHDFAENLPSSLLIIILVIFTLSGSKFGRGTGLTQPSQRTSARRSFGRSKRFSITRSLDDLEPSSPALISSPHLQPSSPASSPALISSLISSPHLQPSSPASSPASSP

SEQ ID NO: 7539 - protein, 708 aa, Artificial Sequence
  Synthetic polypeptide
MFRAGEASKRPLPGPSPPRVRSVEVARGRAGYGFTLSGQAPCVLSCVMRGSPADFVGLRAGDQILAVNEINVKKASHEDVVKLIGKCSGVLHMVIAEGVGRFESCSSDEEGGLYEGKGWLKPKLDSKALGINRAERVVEEMQSGGIFNMIFENPSLCASNSEPLKLKQRSLSESAATRFDVGHESINNPNPNMLSKEEISKVIHDDSVFSIGLESHDDFALDASILNVAMIVGYLGSIELPSTSSNLESDSLQAIRGCMRRLRAEQKIHSLVTMKIMHDCVQLSTDKAGVVAEYPAEKLAFSAVCPDDRRFFGLVTMQTNDDGSLAQEEEGALRTSCHVFMVDPDLFNHKIHQGIARRFGFECTADPDTNGCLEFPASSLPVLQFISVLYRDMGELIEGMRARAFLDGDADAHQNNSTSSNSDSGIGNFHQEEKSNRVLVVDLGGSSSRHGPGGSAWDGVGGRGAQPWGAPWTGPFCPDPEGSPPFEAAHQTDRFWDLNKHLGPASPVEVPPASLRSSVPPSKRGTVGAGCGFNQRWLPVHVLREWQCGHTSDQDSYTDSTDGWSSINCGTLPPPMSKIPADRYRVEGSFAQPPLNAPKREWSRKAFGMQSIFGPHRNVRKTKEDKKGSKFGRGTGLTQPSQRTSARRSFGRSKRFSITRSLDDLEPSSPALISSPHLQPHLQPSSPASSPALISSPHLQPHLQPHLQ

SEQ ID NO: 7540 - protein, 106 aa, Artificial Sequence
  Synthetic polypeptide
MKKHDFAENLPSSLLIIILVIFTLSGSKFGRGTGLTQPSQRTSARRSFGRSKRFSITRSLDDLEPSSPALISSPHLQPHLQPSSPASSPALISSPHLQPHLQPHLQ

SEQ ID NO: 7541 - protein, 704 aa, Artificial Sequence
  Synthetic polypeptide
MFRAGEASKRPLPGPSPPRVRSVEVARGRAGYGFTLSGQAPCVLSCVMRGSPADFVGLRAGDQILAVNEINVKKASHEDVVKLIGKCSGVLHMVIAEGVGRFESCSSDEEGGLYEGKGWLKPKLDSKALGINRAERVVEEMQSGGIFNMIFENPSLCASNSEPLKLKQRSLSESAATRFDVGHESINNPNPNMLSKEEISKVIHDDSVFSIGLESHDDFALDASILNVAMIVGYLGSIELPSTSSNLESDSLQAIRGCMRRLRAEQKIHSLVTMKIMHDCVQLSTDKAGVVAEYPAEKLAFSAVCPDDRRFFGLVTMQTNDDGSLAQEEEGALRTSCHVFMVDPDLFNHKIHQGIARRFGFECTADPDTNGCLEFPASSLPVLQFISVLYRDMGELIEGMRARAFLDGDADAHQNNSTSSNSDSGIGNFHQEEKSNRVLVVDLGGSSSRHGPGGSAWDGVGGRGAQPWGAPWTGPFCPDPEGSPPFEAAHQTDRFWDLNKHLGPASPVEVPPASLRSSVPPSKRGTVGAGCGFNQRWLPVHVLREWQCGHTSDQDSYTDSTDGWSSINCGTLPPPMSKIPADRYRVEGSFAQPPLNAPKREWSRKAFGMQSIFGPHRNVRKTKEDKKGSKFGRGTGLTQPSQRTSARRSFGRSKRFSITRSLDDLEPSSPALISSLISSPHLQPHLQPSSPALISSLISSLISS

SEQ ID NO: 7542 - protein, 102 aa, Artificial Sequence
  Synthetic polypeptide
MKKHDFAENLPSSLLIIILVIFTLSGSKFGRGTGLTQPSQRTSARRSFGRSKRFSITRSLDDLEPSSPALISSLISSPHLQPHLQPSSPALISSLISSLISS

SEQ ID NO: 7543 - protein, 699 aa, Artificial Sequence
  Synthetic polypeptide
MFRAGEASKRPLPGPSPPRVRSVEVARGRAGYGFTLSGQAPCVLSCVMRGSPADFVGLRAGDQILAVNEINVKKASHEDVVKLIGKCSGVLHMVIAEGVGRFESCSSDEEGGLYEGKGWLKPKLDSKALGINRAERVVEEMQSGGIFNMIFENPSLCASNSEPLKLKQRSLSESAATRFDVGHESINNPNPNMLSKEEISKVIHDDSVFSIGLESHDDFALDASILNVAMIVGYLGSIELPSTSSNLESDSLQAIRGCMRRLRAEQKIHSLVTMKIMHDCVQLSTDKAGVVAEYPAEKLAFSAVCPDDRRFFGLVTMQTNDDGSLAQEEEGALRTSCHVFMVDPDLFNHKIHQGIARRFGFECTADPDTNGCLEFPASSLPVLQFISVLYRDMGELIEGMRARAFLDGDADAHQNNSTSSNSDSGIGNFHQEEKSNRVLVVDLGGSSSRHGPGGSAWDGVGGRGAQPWGAPWTGPFCPDPEGSPPFEAAHQTDRFWDLNKHLGPASPVEVPPASLRSSVPPSKRGTVGAGCGFNQRWLPVHVLREWQCGHTSDQDSYTDSTDGWSSINCGTLPPPMSKIPADRYRVEGSFAQPPLNAPKREWSRKAFGMQSIFGPHRNVRKTKEDKKGSKFGRGTGLTQPSQRTSARRSFGRSKRFSITRSLDDLEPSSPASSPALISSLISSPHLQPSSPASSPASSP

SEQ ID NO: 7544 - protein, 97 aa, Artificial Sequence
  Synthetic polypeptide
MKKHDFAENLPSSLLIIILVIFTLSGSKFGRGTGLTQPSQRTSARRSFGRSKRFSITRSLDDLEPSSPASSPALISSLISSPHLQPSSPASSPASSP

SEQ ID NO: 7545 - protein, 695 aa, Artificial Sequence
  Synthetic polypeptide
MFRAGEASKRPLPGPSPPRVRSVEVARGRAGYGFTLSGQAPCVLSCVMRGSPADFVGLRAGDQILAVNEINVKKASHEDVVKLIGKCSGVLHMVIAEGVGRFESCSSDEEGGLYEGKGWLKPKLDSKALGINRAERVVEEMQSGGIFNMIFENPSLCASNSEPLKLKQRSLSESAATRFDVGHESINNPNPNMLSKEEISKVIHDDSVFSIGLESHDDFALDASILNVAMIVGYLGSIELPSTSSNLESDSLQAIRGCMRRLRAEQKIHSLVTMKIMHDCVQLSTDKAGVVAEYPAEKLAFSAVCPDDRRFFGLVTMQTNDDGSLAQEEEGALRTSCHVFMVDPDLFNHKIHQGIARRFGFECTADPDTNGCLEFPASSLPVLQFISVLYRDMGELIEGMRARAFLDGDADAHQNNSTSSNSDSGIGNFHQEEKSNRVLVVDLGGSSSRHGPGGSAWDGVGGRGAQPWGAPWTGPFCPDPEGSPPFEAAHQTDRFWDLNKHLGPASPVEVPPASLRSSVPPSKRGTVGAGCGFNQRWLPVHVLREWQCGHTSDQDSYTDSTDGWSSINCGTLPPPMSKIPADRYRVEGSFAQPPLNAPKREWSRKAFGMQSIFGPHRNVRKTKEDKKGSKFGRGTGLTQPSQRTSARRSFGRSKRFSITRSLDDLEPHLQPSSPASSPALISSPHLQPHLQPHLQ

SEQ ID NO: 7546 - protein, 93 aa, Artificial Sequence
  Synthetic polypeptide
MKKHDFAENLPSSLLIIILVIFTLSGSKFGRGTGLTQPSQRTSARRSFGRSKRFSITRSLDDLEPHLQPSSPASSPALISSPHLQPHLQPHLQ

SEQ ID NO: 7547 - protein, 691 aa, Artificial Sequence
  Synthetic polypeptide
MFRAGEASKRPLPGPSPPRVRSVEVARGRAGYGFTLSGQAPCVLSCVMRGSPADFVGLRAGDQILAVNEINVKKASHEDVVKLIGKCSGVLHMVIAEGVGRFESCSSDEEGGLYEGKGWLKPKLDSKALGINRAERVVEEMQSGGIFNMIFENPSLCASNSEPLKLKQRSLSESAATRFDVGHESINNPNPNMLSKEEISKVIHDDSVFSIGLESHDDFALDASILNVAMIVGYLGSIELPSTSSNLESDSLQAIRGCMRRLRAEQKIHSLVTMKIMHDCVQLSTDKAGVVAEYPAEKLAFSAVCPDDRRFFGLVTMQTNDDGSLAQEEEGALRTSCHVFMVDPDLFNHKIHQGIARRFGFECTADPDTNGCLEFPASSLPVLQFISVLYRDMGELIEGMRARAFLDGDADAHQNNSTSSNSDSGIGNFHQEEKSNRVLVVDLGGSSSRHGPGGSAWDGVGGRGAQPWGAPWTGPFCPDPEGSPPFEAAHQTDRFWDLNKHLGPASPVEVPPASLRSSVPPSKRGTVGAGCGFNQRWLPVHVLREWQCGHTSDQDSYTDSTDGWSSINCGTLPPPMSKIPADRYRVEGSFAQPPLNAPKREWSRKAFGMQSIFGPHRNVRKTKEDKKGSKFGRGTGLTQPSQRTSARRSFGRSKRFSITRSLDDLEPSSPASSPALISSPHLQPHLQPHLQ

SEQ ID NO: 7548 - protein, 89 aa, Artificial Sequence
  Synthetic polypeptide
MKKHDFAENLPSSLLIIILVIFTLSGSKFGRGTGLTQPSQRTSARRSFGRSKRFSITRSLDDLEPSSPASSPALISSPHLQPHLQPHLQ

SEQ ID NO: 7549 - protein, 687 aa, Artificial Sequence
  Synthetic polypeptide
MFRAGEASKRPLPGPSPPRVRSVEVARGRAGYGFTLSGQAPCVLSCVMRGSPADFVGLRAGDQILAVNEINVKKASHEDVVKLIGKCSGVLHMVIAEGVGRFESCSSDEEGGLYEGKGWLKPKLDSKALGINRAERVVEEMQSGGIFNMIFENPSLCASNSEPLKLKQRSLSESAATRFDVGHESINNPNPNMLSKEEISKVIHDDSVFSIGLESHDDFALDASILNVAMIVGYLGSIELPSTSSNLESDSLQAIRGCMRRLRAEQKIHSLVTMKIMHDCVQLSTDKAGVVAEYPAEKLAFSAVCPDDRRFFGLVTMQTNDDGSLAQEEEGALRTSCHVFMVDPDLFNHKIHQGIARRFGFECTADPDTNGCLEFPASSLPVLQFISVLYRDMGELIEGMRARAFLDGDADAHQNNSTSSNSDSGIGNFHQEEKSNRVLVVDLGGSSSRHGPGGSAWDGVGGRGAQPWGAPWTGPFCPDPEGSPPFEAAHQTDRFWDLNKHLGPASPVEVPPASLRSSVPPSKRGTVGAGCGFNQRWLPVHVLREWQCGHTSDQDSYTDSTDGWSSINCGTLPPPMSKIPADRYRVEGSFAQPPLNAPKREWSRKAFGMQSIFGPHRNVRKTKEDKKGSKFGRGTGLTQPSQRTSARRSFGRSKRFSITRSLDDLEPHLQPSSPALISSLISSLISS

SEQ ID NO: 7550 - protein, 85 aa, Artificial Sequence
  Synthetic polypeptide
MKKHDFAENLPSSLLIIILVIFTLSGSKFGRGTGLTQPSQRTSARRSFGRSKRFSITRSLDDLEPHLQPSSPALISSLISSLISS

SEQ ID NO: 7551 - protein, 683 aa, Artificial Sequence
  Synthetic polypeptide
MFRAGEASKRPLPGPSPPRVRSVEVARGRAGYGFTLSGQAPCVLSCVMRGSPADFVGLRAGDQILAVNEINVKKASHEDVVKLIGKCSGVLHMVIAEGVGRFESCSSDEEGGLYEGKGWLKPKLDSKALGINRAERVVEEMQSGGIFNMIFENPSLCASNSEPLKLKQRSLSESAATRFDVGHESINNPNPNMLSKEEISKVIHDDSVFSIGLESHDDFALDASILNVAMIVGYLGSIELPSTSSNLESDSLQAIRGCMRRLRAEQKIHSLVTMKIMHDCVQLSTDKAGVVAEYPAEKLAFSAVCPDDRRFFGLVTMQTNDDGSLAQEEEGALRTSCHVFMVDPDLFNHKIHQGIARRFGFECTADPDTNGCLEFPASSLPVLQFISVLYRDMGELIEGMRARAFLDGDADAHQNNSTSSNSDSGIGNFHQEEKSNRVLVVDLGGSSSRHGPGGSAWDGVGGRGAQPWGAPWTGPFCPDPEGSPPFEAAHQTDRFWDLNKHLGPASPVEVPPASLRSSVPPSKRGTVGAGCGFNQRWLPVHVLREWQCGHTSDQDSYTDSTDGWSSINCGTLPPPMSKIPADRYRVEGSFAQPPLNAPKREWSRKAFGMQSIFGPHRNVRKTKEDKKGSKFGRGTGLTQPSQRTSARRSFGRSKRFSITRSLDDLEPSSPALISSLISSLISS

SEQ ID NO: 7552 - protein, 81 aa, Artificial Sequence
  Synthetic polypeptide
MKKHDFAENLPSSLLIIILVIFTLSGSKFGRGTGLTQPSQRTSARRSFGRSKRFSITRSLDDLEPSSPALISSLISSLISS

SEQ ID NO: 7553 - protein, 678 aa, Artificial Sequence
  Synthetic polypeptide
MFRAGEASKRPLPGPSPPRVRSVEVARGRAGYGFTLSGQAPCVLSCVMRGSPADFVGLRAGDQILAVNEINVKKASHEDVVKLIGKCSGVLHMVIAEGVGRFESCSSDEEGGLYEGKGWLKPKLDSKALGINRAERVVEEMQSGGIFNMIFENPSLCASNSEPLKLKQRSLSESAATRFDVGHESINNPNPNMLSKEEISKVIHDDSVFSIGLESHDDFALDASILNVAMIVGYLGSIELPSTSSNLESDSLQAIRGCMRRLRAEQKIHSLVTMKIMHDCVQLSTDKAGVVAEYPAEKLAFSAVCPDDRRFFGLVTMQTNDDGSLAQEEEGALRTSCHVFMVDPDLFNHKIHQGIARRFGFECTADPDTNGCLEFPASSLPVLQFISVLYRDMGELIEGMRARAFLDGDADAHQNNSTSSNSDSGIGNFHQEEKSNRVLVVDLGGSSSRHGPGGSAWDGVGGRGAQPWGAPWTGPFCPDPEGSPPFEAAHQTDRFWDLNKHLGPASPVEVPPASLRSSVPPSKRGTVGAGCGFNQRWLPVHVLREWQCGHTSDQDSYTDSTDGWSSINCGTLPPPMSKIPADRYRVEGSFAQPPLNAPKREWSRKAFGMQSIFGPHRNVRKTKEDKKGSKFGRGTGLTQPSQRTSARRSFGRSKRFSITRSLDDLEPSSPASSPASSP

SEQ ID NO: 7554 - protein, 76 aa, Artificial Sequence
  Synthetic polypeptide
MKKHDFAENLPSSLLIIILVIFTLSGSKFGRGTGLTQPSQRTSARRSFGRSKRFSITRSLDDLEPSSPASSPASSP

SEQ ID NO: 7555 - protein, 52 aa, Artificial Sequence
  Synthetic polypeptide
MNLGKELSNETHVSNDQQPSSPASSPALISSPHLQPSSPASSPALISSLISS

SEQ ID NO: 7556 - protein, 40 aa, Artificial Sequence
  Synthetic polypeptide
MNLGKELSNETHVSNDQQPSSPALISSLISSPHLQPHLQP

SEQ ID NO: 7557 - protein, 35 aa, Artificial Sequence
  Synthetic polypeptide
MNLGKELSNETHVSNDQQPSSPASSPALISSLISS

SEQ ID NO: 7558 - protein, 27 aa, Artificial Sequence
  Synthetic polypeptide
MNLGKELSNETHVSNDQQPSSPASSPA

SEQ ID NO: 7559 - protein, 65 aa, Artificial Sequence
  Synthetic polypeptide
MNLGKELSNETHVSNDQQPSSPASSPASSPSLISSPHLQPHLQPSSPASSPALISSPHLQPHLQP

SEQ ID NO: 7560 - protein, 48 aa, Artificial Sequence
  Synthetic polypeptide
MNLGKELSNETHVSNDQQPSSPASSPALISSLISSPHLQPSSPASSPA

SEQ ID NO: 7561 - protein, 40 aa, Artificial Sequence
  Synthetic polypeptide
MNLGKELSNETHVSNDQQPSSPASSPALISSPHLQPHLQP

SEQ ID NO: 7562 - protein, 27 aa, Artificial Sequence
  Synthetic polypeptide
MNLGKELSNETHVSNDQQPSSPASSPA

SEQ ID NO: 7563 - protein, 23 aa, Artificial Sequence
  Synthetic polypeptide
MNLGKELSNETHVSNDQQPHLQP

SEQ ID NO: 7564 - protein, 19 aa, Artificial Sequence
  Synthetic polypeptide
MNLGKELSNETHVSNDQQP

SEQ ID NO: 7565 - protein, 73 aa, Artificial Sequence
  Synthetic polypeptide
MNLGKELSNETHVSNDQQPSSPASSPALISSPHLQPSSPALISSLISSPHLQPHLQPSSPALISSLISSLISS

SEQ ID NO: 7566 - protein, 51 aa, Artificial Sequence
  Synthetic polypeptide
MNLGKELSNETHVSNDQQPSSPASSPALISSLISSPHLQPSSPASSPASSP

SEQ ID NO: 7567 - protein, 43 aa, Artificial Sequence
  Synthetic polypeptide
MNLGKELSNETHVSNDQQPSSPASSPALISSPHLQPHLQPHLQ

SEQ ID NO: 7568 - protein, 30 aa, Artificial Sequence
  Synthetic polypeptide
MNLGKELSNETHVSNDQQPSSPASSPASSP

SEQ ID NO: 7569 - protein, 136 aa, Artificial Sequence
  Synthetic polypeptide
MTEAALVEGQVKLRDGKKWKSRWLVLRKPSPVADCLLMLVYKDKSERIKGLRERSSLTLEDICGLEPGLPYEGLVHTLAIVCLSQAIMLGFDSHEAMCAWDARIRYALGEGWARWLIPVIPVLREAEVGGSPEPRR

SEQ ID NO: 7570 - protein, 1431 aa, Artificial Sequence
  Synthetic polypeptide
MSSVSEVNVDIKDFLMSINLEQYLLHFHESGFTTVKDCAAINDSLLQKIGISPTGHRRRILKQLQIILSKMQDIPIYANVHKTKKNDDPSKDYHVPSSDQNICIELSNSGSVQTSSPPQLETVRKNLEDSDASVERSQYPQSDDKLSPPKRDFPTAEEPHLNLGSLNDSLFGSDNIKIESLITKKTVDHTVEEQQTEKVKLITENLSKLPNADSECLSFVGCSTSGTNSGNGTNGLLEGSPPSPFFKFQGEMIVNDLYVPSSPILAPVRSRSKLVSRPSRSFLLRHRPVPEIPGSTKGVSGSYFRERRNVATSTEKSVAWQNSNEENSSSIFPYGETFLFQRLENSKKRSIKNEFLTQGEALKGEAATATNSFIIKSSIYDNRKEKISEDKVEDIWIPREDKNNFLIDTASESEYSTVEECFQSLRRKNSKASKSRTQKALILDSVNRHSYPLSSTSGNADSSAVSSQAISPYACFYGASAKKVKSGWLDKLSPQGKRMFQKRWVKFDGLSISYYNNEKEMYSKGIIPLSAISTVRVQGDNKFEVVTTQRTFVFRVEKEEERNDWISILLNALKSQSLTSQSQAVVTPEKCGYLELRGYKAKIFTVLSGNSVWLCKNEQDFKSGLGITIIPMNVANVKQVDRTVKQSFEIITPYRSFSFTAETEKEKQDWIEAVQQSIAETLSDYEVAEKIWFNESNRSCADCKAPDPDWASINLCVVICKKCAGQHRSLGPKDSKVRSLKMDASIWSNELIELFIVIGNKRANDFWAGNLQKDEELHMDSPVEKRKNFITQKYKEGKFRKTLLASLTKEELNKALCAAVVKPDVLETMALLFSGADVMCATGDPVHSTPYLLAKKAGQSLQMEFLYHNKFSDFPQHDIHSEGVLSQESSQSTFLCDFLYQAPSAASKLSSEKKLLEETNKKWCVLEGGFLSYYENDKSTTPNGTININEVICLAIHKEDFYLNTGPIFIFEIYLPSERVFLFGAETSQAQRKWTEAIAKHFVPLFAENLTEADYDLIGQLFYKDCHALDQWRKGWFAMDKSSLHFCLQMQEVQGDRMHLRRLQELTISTMVQNGEKLDVLLLVEKGRTLYIHGHTKLDFTVWHTAIEKAAGTDGNALQDQQLSKNDVPIIVNSCIAFVTQYGLGCKYIYQKNGDPLHISELLESFKKDARSFKLRAGKHQLEDVTAVLKSFLSDIDDALLTKELYPYWISALDTQDDKERIKKYGAFIRSLPGVNRATLAAIIEHLYRVQKCSEINHMNAHNLALVFSSCLFQTKGQTSEEVNVIEDLINNYVEIFEVKEDQVKQMDIENSFITKWKDTQVSQAGDLLIEVYVERKEPDCSIIIRISPVMEAEELTNDILAIKNIIPTKGDIWATFEVIENEELERPLHYKENVLEQVLRWSSLAEPGSAYLVVKRFLTADTIKHCSGES

SEQ ID NO: 7571 - protein, 129 aa, Artificial Sequence
  Synthetic polypeptide
MELLTFRDVAIEFSPEEWKCLDPDQQNLYRDVMLENYRNLVSLGVAISNPDLVTCLEQRKEPYNVKIHKIVARPPAMCSHFTQDHWPVQGIEDSFHKLILRRYEKCGHDNLQLRKGCKSLNEWRGGMCL

SEQ ID NO: 7572 - protein, 152 aa, Artificial Sequence
  Synthetic polypeptide
MTKTALLKLFVAIVITFILILPEYFKTPKERTLELSCLEVCLQSNFTYSLSSLNFSFVTFLQPVRETQIIMRIFLNPSNFRNFTRTCQDITGEFKMCSSCLVCESKGNMDFISQEQTSKGWLQWLTPVIPAIQESEEGGSLESKSWRPAWTT

SEQ ID NO: 7573 - protein, 124 aa, Artificial Sequence
  Synthetic polypeptide
MTKTALLKLFVAIVITFILILPEYFKTPKERTLELSCLEVCLQSNFTYSLSSLNFSFVTFLQPVRETQIIMRIFLNPSNFRNFTRTCQDITGWLQWLTPVIPAIQESEEGGSLESKSWRPAWTT

SEQ ID NO: 7574 - protein, 814 aa, Artificial Sequence
  Synthetic polypeptide
MKRIFSLLEKTWLGAPIQFAWQKTSGNYLAVTGADYIVKIFDRHGQKRSEINLPGNCVAMDWDKDGDVLAVIAEKSSCIYLWDANTNKTSQLDNGMRDQMSFLLWSKVGSFLAVGTVKGNLLIYNHQTSRKIPVLGKHTKRITCGCWNAENLLALGGEDKMITVSNQEGDTIRQTQVRSEPSNMQFFLMKMDDRTSAAESMISVVLGKKTLFFLNLNEPDNPADLEFQQDFGNIVCYNWYGDGRIMIGFSCGHFVVISTHTGELGQEIFQARNHKDNLTSIAVSQTLNKVATCGDNCIKIQDLVDLKDMYVILNLDEENKGLGTLSWTDDGQLLALSTQRGSLHVFLTKLPILGDACSTRIAYLTSLLEVTVANPVEGELPITVSVDVEPNFVAVGLYHLAVGMNNRAWFYVLGENAVKKLKDMEYLGTVASICLHSDYAAALFEGKVQLHLIESEILDAQEERETRLFPAVDDKCRILCHALTSDFLIYGTDTGVVQYFYIEDWQFVNDYRHPVSVKKIFPDPNGTRLVFIDEKSDGFVYCPVNDATYEIPDFSPTIKGVLWENWPMDKGVFIAYDDDKVYTYVFHKDTIQGAKVILAGSTKVPFAHKPLLLYNGELTCQTQSGKVNNIYLSTHGFLSNLKDTGPDELRPMLAQNLMLKRFSDAWEMCRILNDEAAWNELARACLHHMEVEFAIRVYRRIGNVGIVMSLEQIKGIEDYNLLAGHLAMFTNDYNLAQDLYLASSCPIAALEMRRDLQHWDSALQLAKHLAPDQIPFISKEYAIQLEFAGDYVNALAHYEKGITGDNKARHNGSC

SEQ ID NO: 7575 - protein, 654 aa, Artificial Sequence
  Synthetic polypeptide
MITVSNQEGDTIRQTQVRSEPSNMQFFLMKMDDRTSAAESMISVVLGKKTLFFLNLNEPDNPADLEFQQDFGNIVCYNWYGDGRIMIGFSCGHFVVISTHTGELGQEIFQARNHKDNLTSIAVSQTLNKVATCGDNCIKIQDLVDLKDMYVILNLDEENKGLGTLSWTDDGQLLALSTQRGSLHVFLTKLPILGDACSTRIAYLTSLLEVTVANPVEGELPITVSVDVEPNFVAVGLYHLAVGMNNRAWFYVLGENAVKKLKDMEYLGTVASICLHSDYAAALFEGKVQLHLIESEILDAQEERETRLFPAVDDKCRILCHALTSDFLIYGTDTGVVQYFYIEDWQFVNDYRHPVSVKKIFPDPNGTRLVFIDEKSDGFVYCPVNDATYEIPDFSPTIKGVLWENWPMDKGVFIAYDDDKVYTYVFHKDTIQGAKVILAGSTKVPFAHKPLLLYNGELTCQTQSGKVNNIYLSTHGFLSNLKDTGPDELRPMLAQNLMLKRFSDAWEMCRILNDEAAWNELARACLHHMEVEFAIRVYRRIGNVGIVMSLEQIKGIEDYNLLAGHLAMFTNDYNLAQDLYLASSCPIAALEMRRDLQHWDSALQLAKHLAPDQIPFISKEYAIQLEFAGDYVNALAHYEKGITGDNKARHNGSC

SEQ ID NO: 7576 - protein, 282 aa, Artificial Sequence
  Synthetic polypeptide
MKPGCAAGSPGNEWIFFSTDEITTRYRNTMSNGGLQRSVILSALILLRAVTGFSGDGRAIWSKNPNFTPVNESQLFLYDTFPKNFFWGIGTGALQVEGSWKKDGKGPSIWDHFIHTHLKNVSSTNGSSDSYIFLEKDLSALDFIGVSFYQFSISWPRLFPDGIVTVANAKGLQYYSTLLDALVLRNIEPIVTLYHWDLPLALQEKYGGWKNDTIIDIFNDYATYCFQMFGDRVKYWITIHNPYLVAWHGYGTGMHAPGEKGNLAAVYTVGHNLIKNGTFESL

SEQ ID NO: 7577 - protein, 159 aa, Artificial Sequence
  Synthetic polypeptide
MANIAVQRIKREFKEVLKSEETSKNQIKVDLVDENFTELRGEIAGPPDTPYEGGRYQLEIKIPETYPFNPPKVRFITKIWHPNISSVTGAICLDILKDQWAAAMTLRTVLLSLQALLAAAEPDDPQDAVVANQLQWLSLLVTTETGPKLLVSDLLRNSL

SEQ ID NO: 7578 - protein, 108 aa, Artificial Sequence
  Synthetic polypeptide
MANIAVQRIKREFKEVLKSEEVRFITKIWHPNISSVTGAICLDILKDQWAAAMTLRTVLLSLQALLAAAEPDDPQDAVVANQLQWLSLLVTTETGPKLLVSDLLRNSL

SEQ ID NO: 7579 - protein, 300 aa, Artificial Sequence
  Synthetic polypeptide
MNWSHSCISFCWIYFAASRLRAAETADGKYAQKLFNDLFEDYSNALRPVEDTDKVLNVTLQITLSQIKDMDERNQILTAYLWIRQIWHDAYLTWDRDQYDGLDSIRIPSDLVWRPDIVLYNKADDESSEPVNTNVVLRYDGLITWDAPAITKSSCVVDVTYFPFDNQQCNLTFGSWTYNGNQVDIFNALDSGDLSDFIEDVEWEVHGMPAVKNVISYGCCSEPYPDVTFTLLLKRRSSFYIVNLLIPCVLISFLAPLSFYLPAASGEKVSLGVTILLAMTVFQLMVAEIMPASENVPLIV

SEQ ID NO: 7580 - protein, 204 aa, Artificial Sequence
  Synthetic polypeptide
MLPGLAAAAAHRCSWSSLCRLRLRCRAAACNPSDRQEWQNLVTFGSFSNMVPCSHPYIGTLSQVKLYSTNVQKEGQGSQTLRVEKVPSFETAEGIGTELKAPLKQEPLQVRVKAVLKKREYGSKYTQNNFITGVRAINEFCLKSSDLEQLRKIRRRSPHEDTESFTVYLRSDVEAKSLEVWGSPEALAREKKLRKEAEIEYREN

SEQ ID NO: 7581 - protein, 579 aa, Artificial Sequence
  Synthetic polypeptide
MLPGLAAAAAHRCSWSSLCRLRLRCRAAACNPSDRQEWQNLVTFGSFSNMVPCSHPYIGTLSQVKLYSTNVQKEGQGSQTLRVEKVPSFETAEGIGTELKAPLKQEPLQVRVKAVLKKREYGSKYTQNNFITGVRAINEFCLKSSDLEQLRKIRRRSPHEDTESFTVYLRSDVEAKSLEVWGSPEALAREKKLRKEAEIEYRERLFRNQKILREYRDFLGNTKPRSRTASVFFKGPGKVVMVAICINGLNCFFKFLAWIYTGSASMFSEAIHSLSDTCNQGLLALGISKSVQTPDPSHPYGFSNMRYISSLISGVGIFMMGAGLSWYHGVMGLLHPQPIESLLWAYCILAGSLVSEGATLLVAVNELRRNARAKGMSFYKYVMESRDPSTNVILLEDTAAVLGVIIAATCMGLTSITGNPLYDSLGSLGVGTLLGMVSAFLIYTNTEALLGRSIQPEQVQRLTELLENDPSVRAIHDVKATDLGLGKVRFKAEVDFDGRVVTRSYLEKQDFDQMLQEIQEVKTPEELETFMLKHGENIIDTLGAEVDRLEKELKKRNPEVRHVDLEILFSTMSLSFIIK

SEQ ID NO: 7582 - protein, 466 aa, Artificial Sequence
  Synthetic polypeptide
MEEEMQPAEEGPSVPKIYKQRSPYSVLKTFPSKRPALAKRYERPTLVELPHVRAPPPPPPPFAPHAAVSISSSEPPPQQFQAQSSYPPGPGRAAAAASSSSPSCTPATSQGHLRTPAQPPPASPAASSSSSFAAVVRYGPGAAAAAGTGGTGSDSASLELSAESRMILDAFAQQCSRVLSLLNCGGKLLDSNHSQSMISCVKQEGSSYNERQEHCHIGKGVHSQTSDNVDIEMQYMQRKQQTSAFLRVFTDSLQNYLLSGSFPTPNPSSASEYGHLADVDPLSTSPVHTLGGWTSPATSESHGHPSSSTLPEEEEEEDEEGYCPRCQELEQEVISLQQENEELRRKLESIPVPCQTVLDYLKMVLQHHNQLLIPQPADQPTEGSKQLLNNYPVYITSKQWDEAVNSSKKDGRRLLRYLIRFVFTTDELKYSCGLGKRKRNMNHPFVQCICTVYATCLFVINIIVAQ

SEQ ID NO: 7583 - protein, 462 aa, Artificial Sequence
  Synthetic polypeptide
MQPAEEGPSVPKIYKQRSPYSVLKTFPSKRPALAKRYERPTLVELPHVRAPPPPPPPFAPHAAVSISSSEPPPQQFQAQSSYPPGPGRAAAAASSSSPSCTPATSQGHLRTPAQPPPASPAASSSSSFAAVVRYGPGAAAAAGTGGTGSDSASLELSAESRMILDAFAQQCSRVLSLLNCGGKLLDSNHSQSMISCVKQEGSSYNERQEHCHIGKGVHSQTSDNVDIEMQYMQRKQQTSAFLRVFTDSLQNYLLSGSFPTPNPSSASEYGHLADVDPLSTSPVHTLGGWTSPATSESHGHPSSSTLPEEEEEEDEEGYCPRCQELEQEVISLQQENEELRRKLESIPVPCQTVLDYLKMVLQHHNQLLIPQPADQPTEGSKQLLNNYPVYITSKQWDEAVNSSKKDGRRLLRYLIRFVFTTDELKYSCGLGKRKRNMNHPFVQCICTVYATCLFVINIIVAQ

SEQ ID NO: 7584 - protein, 414 aa, Artificial Sequence
  Synthetic polypeptide
MEEEMQPAEEGPSVPKIYKQRSPYSVLKTFPSKRPALAKRYERPTLVELPHVRAPPPPPPPFAPHAAVSISSSEPPPQQFQAQSSYPPGPGRAAAAASSSSPSCTPATSQGHLRTPAQPPPASPAASSSSSFAAVVRYGPGAAAAAGTGGTGSDSASLELSAESRMILDAFAQQCSRVLSLLNCGGKLLDSNHSQSMISCVKQEGSSYNERQEHCHIGKGVHSQTSDNVDIEMQYMQRKQQTSAFLRVFTDSLQNYLLSGSFPTPNPSSASEYGHLADVDPLSTSPVHTLGGWTSPATSESHGHPSSSTLPEEEEEEDEEGYCPRCQELEQEVISLQQENEELRRKLESIPVPCQTVLDYLKMVLQHHNQLLIPQPADQPTEEHESSLCPVYLYCICYLPICHQHHRGSVIQDQ

SEQ ID NO: 7585 - protein, 410 aa, Artificial Sequence
  Synthetic polypeptide
MQPAEEGPSVPKIYKQRSPYSVLKTFPSKRPALAKRYERPTLVELPHVRAPPPPPPPFAPHAAVSISSSEPPPQQFQAQSSYPPGPGRAAAAASSSSPSCTPATSQGHLRTPAQPPPASPAASSSSSFAAVVRYGPGAAAAAGTGGTGSDSASLELSAESRMILDAFAQQCSRVLSLLNCGGKLLDSNHSQSMISCVKQEGSSYNERQEHCHIGKGVHSQTSDNVDIEMQYMQRKQQTSAFLRVFTDSLQNYLLSGSFPTPNPSSASEYGHLADVDPLSTSPVHTLGGWTSPATSESHGHPSSSTLPEEEEEEDEEGYCPRCQELEQEVISLQQENEELRRKLESIPVPCQTVLDYLKMVLQHHNQLLIPQPADQPTEEHESSLCPVYLYCICYLPICHQHHRGSVIQDQ

SEQ ID NO: 7586 - protein, 110 aa, Artificial Sequence
  Synthetic polypeptide
MNGRADFREPNAEVPRPIPHIGPDYIPTEEERRVFAECNDESFWFRSVPLAATSMLITQGLISKGILSSHPKYGSIPKLIRGNRTMRTRGHRKGNITHRGLLWGDGSGEG

SEQ ID NO: 7587 - protein, 83 aa, Artificial Sequence
  Synthetic polypeptide
MNGRADFREPNAEVPRPIPPVPLAATSMLITQGLISKGILSSHPKYGSIPKLIRGNRTMRTRGHRKGNITHRGLLWGDGSGEG

SEQ ID NO: 7588 - protein, 56 aa, Artificial Sequence
  Synthetic polypeptide
MLITQGLISKGILSSHPKYGSIPKLIRGNRTMRTRGHRKGNITHRGLLWGDGSGEG

SEQ ID NO: 7589 - protein, 52 aa, Artificial Sequence
  Synthetic polypeptide
MASASARGNQDKDAHFPPPSKQLCALGLLSLQNCEPSELLFFINYPAYGILL

SEQ ID NO: 7590 - protein, 35 aa, Artificial Sequence
  Synthetic polypeptide
MGGNHSHKPPVFDENEEENLSSMKRIPGAKKVGDH

SEQ ID NO: 7591 - protein, 35 aa, Artificial Sequence
  Synthetic polypeptide
MAENLKRLVSNETLRTLQEKLDFWLKEYNAPRESN

SEQ ID NO: 7592 - protein, 341 aa, Artificial Sequence
  Synthetic polypeptide
MAENLKRLVSNETLRTLQEKLDFWLKEYNTNTCDQNLNHCLELIEQVAKVQGQLFGILTAAAQEGGRNDGVETIKSRLLPWLEASFTAASLGKSVDSKVPSLQDTFDRERHKDPSPRDRDMQQLDSNLNSTRSQCNQVQDDLVETEKNLEESKNRSAISLLAAEEEINQLKKQLKSLQAQEDARHRNTDQRSSENRRSEPWSLEERKREQWNSLKQNADQQDTEAMSDYKKQLRNLKEEIAVLSAEKSALQGRSSRSRSPSPAPRSRSCSRSRSASPSTAVKVRRPSPNRSKLSNVARKAALLSRFSDSYSQARLDAQCLLRRCIDKAETVQRIIYIATVG

SEQ ID NO: 7593 - protein, 309 aa, Artificial Sequence
  Synthetic polypeptide
MAENLKRLVSNETLRTLQEKLDFWLKEYNTNTCDQNLNHCLELIEQVAKVQGQLFGILTAAAQEGGRNDGVETIKSRLLPWLEASFTAASLGKSVDSKVPSLQDTFDRERHKDPSPRDRDMQQLDSNLNSTRSQCNQVQDELKSLQAQEDARHRNTDQRSSENRRSEPWSLEERKREQWNSLKQNADQQDTEAMSDYKKQLRNLKEEIAVLSAEKSALQGRSSRSRSPSPAPRSRSCSRSRSASPSTAVKVRRPSPNRSKLSNVARKAALLSRFSDSYSQARLDAQCLLRRCIDKAETVQRIIYIATVG

SEQ ID NO: 7594 - protein, 451 aa, Artificial Sequence
  Synthetic polypeptide
MSASGVLSFTQQGWEQVLAKVKRAVVYLDAACAESLHWGCGSTRLLEAVGGPDCHLREFEPDAIGGGAKQPKAVFVLSCLLKGRTVEILRDIICRSHFQYCVVVTTVSHAVHLTANHVPAAAAAEMEGQQPVFEQLEEKLCEWMGNMNYTAEVFHVPLLLAPVAPHFALTPAFASLFPLLPQDVHLLNSARPDKRKLGSLGDVDSTTLTPELLLQIRCLVSGLSSLCEHLGVREECFAVGSLSQVIAADLANYAPAKNRKKTAAGRASVVFVDRTLDLTGAVGHHGDNLVEKIISALPQLPGHTNDVMVNMIALTALHTEEENYNVVAPGCLSQSSDTTAKALWEALLNTKHKEAVMEVRRHLVEAASRENLPIKMSMGRVTPGQLMSYIQLFKNNLKALMNHCGLLQLGLATAQTLKHPQTAKWDNFLAFERLLLQALMPSRHAIPATML

SEQ ID NO: 7595 - protein, 449 aa, Artificial Sequence
  Synthetic polypeptide
MSASGVLSFTQQGWEQVLAKVKRAVVYLDAACAESLHWGCGSTRLLEAVGGPDCHLREFEPDAIGGGAKQPKAVFVLSCLLKGRTVEILRDIICRSHFQYCVVVTTVSHAVHLTANHVPAAAAAEMEGQQPVFEQLEEKLCEWMGNMNYTAEVFHVPLLLAPVAPHFALTPAFASLFPLLPQDVHLLNSARPDKRKLGSLGDVDSTTLTPELLLQIRCLVSGLSSLCEHLGVREECFAVGSLSQVIAADLANYAPAKNRKKTAAGRASVVFVDRTLDLTGAVGHHGDNLVEKIISALPQLPGHTNDVMVNMIALTALHTEEENYNVVAPGCLSQSSDTTAKALWEALLNTKHKEAVMEVRRHLVEAASRENLPIKMSMGRVTPGQLMSYIQLFKNNLKALMNHCGLLQLGLATAQTLKHPQTAKWDNFLAFERLLLQGFAVLARLVSSS

SEQ ID NO: 7596 - protein, 416 aa, Artificial Sequence
  Synthetic polypeptide
MSASGVLSFTQQGWEQVLAKVKRAVVYLDAACAESLHWGCGSTRLLEAVGGPDCHLREFEPDAIGGGAKQPKAVFVLSCLLKGRTVEILRDIICRSHFQYCVVVTTVSHAVHLTANHVPAAAAAEMEGQQPVFEQLEEKLCEWMGNMNYTAEVFHVPLLLAPVAPHFALTPAFASLFPLLPQDVHLLNSARPDKRKLGSLGDVDSTTLTPELLLQIRCLVSGLSSLCEHLGVREECFAVGSLSQVIAADLANYAPAKNRKKTAAGRASVVFVDRTLDLTGAVGHHGDNLVEKIISALPQLPGHTNDVMVNMIALTALHTEEENYNVVAPGCLSQSSDTTAKALWEALLNTKHKEAVMEVRRHLVEAASRENLPIKMSMGGDYRLGKYTRESSKVLDMFYTLLWLVSTWIYTYVKII

SEQ ID NO: 7597 - protein, 248 aa, Artificial Sequence
  Synthetic polypeptide
MSAGEVERLVSELSGGTGGDEEEEWLYGGPWDVHVHSDLAKDLDENEVERPEEENASANPPSGIEDETAENGVPKPKVTETEDDSDSDSDDDEDDVHVTIGDIKTGAPQYGSYGTAPVNLNIKTGGRVYGTTGTKVKGVDLDAPGSINGVPLLEVDLDSFEDKPWRKPGADLSDYFNYGFNEDTWKAYCEKQKRIRMGLEVIPVTSTTNKITAEDCTMEVTPGAEIQDGRFNLFKVQDPVVFLSASGT

SEQ ID NO: 7598 - protein, 233 aa, Artificial Sequence
  Synthetic polypeptide
MSAGEVERLVSELSGGTGGDEEEEWLYGDENEVERPEEENASANPPSGIEDETAENGVPKPKVTETEDDSDSDSDDDEDDVHVTIGDIKTGAPQYGSYGTAPVNLNIKTGGRVYGTTGTKVKGVDLDAPGSINGVPLLEVDLDSFEDKPWRKPGADLSDYFNYGFNEDTWKAYCEKQKRIRMGLEVIPVTSTTNKITAEDCTMEVTPGAEIQDGRFNLFKVQDPVVFLSASGT

SEQ ID NO: 7599 - protein, 101 aa, Artificial Sequence
  Synthetic polypeptide
MAPWAEAEHSALNPLRAVWLTLTAAFLLTLLLQLLPPGLLPGCAIFQDLIRYGKTKCGEPSRPAACRAFDVPKSQSSILLLGTWMLELLQSHWAMKIKVTP

SEQ ID NO: 7600 - protein, 76 aa, Artificial Sequence
  Synthetic polypeptide
FLLTLLLQLLPPGLLPGCAIFQDLIRYGKTKCGEPSRPAACRAFDVPKSQSSILLLGTWMLELLQSHWAMKIKVTP

SEQ ID NO: 7601 - protein, 139 aa, Artificial Sequence
  Synthetic polypeptide
MAPWAEAEHSALNPLRAVWLTLTAAFLLTLLLQLLPPGLLPGCAIFQDLIRYGKTKCGEPSRPAACRAFDVPKRYFSHFYIISVLWNGFLLWCLTQSLFLGAPFPSWLHGLLRILGAAQFQEEVPYFRLAPGSANYIAS

SEQ ID NO: 7602 - protein, 114 aa, Artificial Sequence
  Synthetic polypeptide
FLLTLLLQLLPPGLLPGCAIFQDLIRYGKTKCGEPSRPAACRAFDVPKRYFSHFYIISVLWNGFLLWCLTQSLFLGAPFPSWLHGLLRILGAAQFQEEVPYFRLAPGSANYIAS

SEQ ID NO: 7603 - protein, 205 aa, Artificial Sequence
  Synthetic polypeptide
MAPWAEAEHSALNPLRAVWLTLTAAFLLTLLLQLLPPGLLPGCAIFQDLIRYGKTKCGEPSRPAACRAFDVPKRYFSHFYIISVLWNGFLLWCLTQSLFLGAPFPSWLHGLLRILGAAQFQGGELALSAFLVLVFLWLHSLRRLFECLYVSVFSNVMIHVVQYCFGLVYYVLVGLTVLSQVPMDGRNEEVPYFRLAPGSANYIAS

SEQ ID NO: 7604 - protein, 544 aa, Artificial Sequence
  Synthetic polypeptide
MLFTVSCSKMSSIVDRDDSSIFDGLVEEDDKDKAKRVSRNKSEKKRRDQFNVLIKELGSMLPGNARKMDKSTVLQKSIDFLRKHKEITAQSDASEIRQDWKPTFLSNEEFTQLMLEALDGFFLAIMTDGSIIYVSESVTSLLEHLPSDLVDQSIFNFIPEGEHSEVYKILSTHLLESDSLTPEYLKSKNQLEFCCHMLRGTIDPKEPSTYEYVKFIGNFKSLNSVSSSAHNGFEGTIQRTHRPSYEDRVCFVATVRLATPQFIKEMCTVEEPNEEFTSRHSLEWKFLFLDHRAPPIIGYLPFEVLGTSGYDYYHVDDLENLAKCHEHLMQYGKGKSCYYRFLTKGQQWIWLQTHYYITYHQWNSRPEFIVCTHTVVSYAEVRAERRRELGIEESLPETAADKSQDSGSDNRINTVSLKEALERFDHSPTPSASSRSSRKSSHTAVSDPSSTPTKIPTDTSTPPRQHLPAHEKMVQRRSSFSSQSINSQSVGSSLTQPVMSQATNLPIPQGMSQACWQAPVATATWEAEVGAHTHTHTHTHTHTH

SEQ ID NO: 7605 - protein, 70 aa, Artificial Sequence
  Synthetic polypeptide
MLRTESCRPRSPAGQVAAASPLLLLLLLLAWCAGACRGAPILPQGLQPEQQLQLWNEQRTTWKKVRAFVG

SEQ ID NO: 7606 - protein, 106 aa, Artificial Sequence
  Synthetic polypeptide
MARGGAACKSDARLLLGRDALRPAPALLAPAVLLGAALGLGLGLWLGCRAGRQRTRHQKDDTQNLLKNLESNAQTPSETGSPSRRRKREVQMSKDKEAVDSQHGIS

SEQ ID NO: 7607 - protein, 210 aa, Artificial Sequence
  Synthetic polypeptide
MELEELGIREECGVFGCIASGEWPTQLDVPHVITLGLVGLQHRGQESAGIVTSDGSSVPTFKSHKGMGLVNHVFTEDNLKKLYVSNLGIGHTRYATTGKCELENCQPFVVETLHGKIAVAHNGELVNAARLRKKMGLSSCRKTSSGLPLILDYGELYNYFIIYYSIVIIEIKCTINVIRLNHPQIIPCPWSMEKLSSTKLVPGAKKVGDC

SEQ ID NO: 7608 - protein, 155 aa, Artificial Sequence
  Synthetic polypeptide
MELEELGIREECGVFGCIASGEWPTQLDVPHVITLGLVGLQHRGQESAGIVTSDGSSVPTFKSHKGMGLVNHVFTEDNLKKLYVSNLGIGHTRYATTGKCELENCQPFVVETLHGKIAVAHNGELVNAARLRKKVLPIAHYYHLSSVSCPDQQQH

SEQ ID NO: 7609 - protein, 662 aa, Artificial Sequence
  Synthetic polypeptide
MARGGAACKSDARLLLGRDALRPAPALLAPAVLLGAALGLGLGLWLGCRAGRQRTRHQKDDTQNLLKNLESNAQTPSETGSPSRRRKREVQMSKDKEAVDECEPPSNSNITAFALKAKVIYPINQKFRPLADGSSNPSLHENLKQAVLPHQPVEASPSSSLGSLSQGEKDDCSSSSSVHSATSDDRFLSRTFLRVNAFPEVLACESVDVDLCIYSLHLKDLLHLDTALRQEKHMMFIQIFKMCLLDLLPKKKSDDELYQKILSKQEKDLEELEKGLQVKLSNTEMSGAGDSEYITLADVEKKEREYSEQLIDNMEAFWKQMANIQHFLVDQFKCSSSKARQLMMTLTERMIAAEGLLCDSQELQALDALERTMGRAHMAKVIEFLKLQVQEETRCRLAAISHGLELLAGEGKLSGRQKEELLTQQHKAFWQEAERFSREFVQRGKDLVTASLAHQVEGTAKLTLAQEEEQRSFLAEAQPTADPEKFLEAFHEVLERQRLMQCDLEEEENVRATEAVVALCQELYFSTVDTFQKFVDALFLQTLPGMTGLPPEECDYLRQEVQENAAWQLGKSNRFRRQQWKLFQELLEQDQQPKGSTNCHNYEDCSEMSPYTKSVSQTSRFPPYQQHPVTKKDHLQNKSHKVPKNKLTNVYKGLRETFIECH

SEQ ID NO: 7610 - protein, 481 aa, Artificial Sequence
  Synthetic polypeptide
MYDADEDMQYDEDDDEITPDLWQEACWIVISSYFDEKGLVRQQLDSFDEFIQMSVQRIVEDAPPIDLQAEAQHASGEVEEPPRYLLKFEQIYLSKPTHWERDGAPSPMMPNEARLRNLTYSAPLYVDITKTVIKEGEEQLQTQHQKTFIGKIPIMLRSTYCLLNGLTDRDLCELNECPLDPGGYFIINGSEKVLIAQEKMATNTVYVFAKKDSKYAYTGECRSCLENSSRPTSTIWVSMLARGGQGAKKSAIGQRIVATLPYIKQEVPIIIVFRALGFVSDRDILEHIIYDFEDPEMMEMVKPSLDEAFVIQEQNVALNFIGSRGAKPGVTKEKRIKYAKEVLQKEMLPHVGVSDFCETKKAYFLGYMVHRLLLAALGRRELDDRDHYGNKRLDLAGPLLAFLFRGMFKNLLKEVRIYAQKFIDRGKDFNLELAIKTRIISDGLKYSLATGNWGDQKKAHQARAGVSQIQRPQSGKSTEMD

SEQ ID NO: 7611 - protein, 406 aa, Artificial Sequence
  Synthetic polypeptide
MLDCNQPRYLLKFEQIYLSKPTHWERDGAPSPMMPNEARLRNLTYSAPLYVDITKTVIKEGEEQLQTQHQKTFIGKIPIMLRSTYCLLNGLTDRDLCELNECPLDPGGYFIINGSEKVLIAQEKMATNTVYVFAKKDSKYAYTGECRSCLENSSRPTSTIWVSMLARGGQGAKKSAIGQRIVATLPYIKQEVPIIIVFRALGFVSDRDILEHIIYDFEDPEMMEMVKPSLDEAFVIQEQNVALNFIGSRGAKPGVTKEKRIKYAKEVLQKEMLPHVGVSDFCETKKAYFLGYMVHRLLLAALGRRELDDRDHYGNKRLDLAGPLLAFLFRGMFKNLLKEVRIYAQKFIDRGKDFNLELAIKTRIISDGLKYSLATGNWGDQKKAHQARAGVSQIQRPQSGKSTEMD

SEQ ID NO: 7612 - protein, 474 aa, Artificial Sequence
  Synthetic polypeptide
MQYDEDDDEITPDLWQEACWIVISSYFDEKGLVRQQLDSFDEFIQMSVQRIVEDAPPIDLQAEAQHASGEVEEPPRYLLKFEQIYLSKPTHWERDGAPSPMMPNEARLRNLTYSAPLYVDITKTVIKEGEEQLQTQHQKTFIGKIPIMLRSTYCLLNGLTDRDLCELNECPLDPGGYFIINGSEKVLIAQEKMATNTVYVFAKKDSKYAYTGECRSCLENSSRPTSTIWVSMLARGGQGAKKSAIGQRIVATLPYIKQEVPIIIVFRALGFVSDRDILEHIIYDFEDPEMMEMVKPSLDEAFVIQEQNVALNFIGSRGAKPGVTKEKRIKYAKEVLQKEMLPHVGVSDFCETKKAYFLGYMVHRLLLAALGRRELDDRDHYGNKRLDLAGPLLAFLFRGMFKNLLKEVRIYAQKFIDRGKDFNLELAIKTRIISDGLKYSLATGNWGDQKKAHQARAGVSQIQRPQSGKSTEMD

SEQ ID NO: 7613 - protein, 243 aa, Artificial Sequence
  Synthetic polypeptide
MDSNTAPLGPSCPQPPPAPQPQARSRLNATASLEQERSERPRAPGPQAGPGPGVRDAAAPAEPQAQHTRSRERADGTGPTKGDMEIPFEEVLERAKAGDPKAQTEVGKHYLQLAGDTDEELNSCTAVDWLVLAAKQGRREAVKLLRRCLADRRGITSENEREVRQLSSETDLERAVRKAALVMYWKLNPKKKKQVAVAELLENVGQVNEHDGGAQPGPVPKSLQKQRRMLERLVSSEFSPSEQ

SEQ ID NO: 7614 - protein, 7 aa, Artificial Sequence
  Synthetic polypeptide
SRAVARL

SEQ ID NO: 7615 - protein, 722 aa, Artificial Sequence
  Synthetic polypeptide
MSLSEEQARSFLDQNPDFARQYFGKKLSPENVAAACEDGCPPDCDSLRDLCQVEESTALLELVQDMQESINMERVVFKVLRRLCTLLQADRCSLFMYRQRNGVAELATRLFSVQPDSVLEDCLVPPDSEIVFPLDIGVVGHVAQTKKMVNVEDVAECPHFSSFADELTDYKTKNMLATPIMNGKDVVAVIMAVNKLNGPFFTSEDEDVFLKYLNFATLYLKIYHLSYLHNCETRRGQVLLWSANKVFEELTDIERQFHKAFYTVRAYLNCERYSVGLLDMTKEKEFFDVWSVLMGESQPYSGPRTPDGREIVFYKVIDYVLHGKEEIKVIPTPSADHWALASGLPSYVAESGFICNIMNASADEMFKFQEGALDDSGWLIKNVLSMPIVNKKEEIVGVATFYNRKDGKPFDEQDEVLMESLTQFLGWSVMNTDTYDKMNKLENRKDIAQDMVLYHVKCDRDEIQLILPTRARLGKEPADCDEDELGEILKEELPGPTTFDIYEFHFSDLECTELDLVKCGIQMYYELGVVRKFQIPQEVLVRFLFSISKGYRRITYHNWRHGFNVAQTMFTLLMTGKLKSYYTDLEAFAMVTAGLCHDIDHRGTNNLYQMKSQNPLAKLHGSSILERHHLEFGKFLLSEETLNIYQNLNRRQHEHVIHLMDIAIIATDLALYFKKRAMFQKIVDESKNYQDKKSWVEYLSLETTRKEIVILGNRARLHLKKE

SEQ ID NO: 7616 - protein, 443 aa, Artificial Sequence
  Synthetic polypeptide
MTKEKEFFDVWSVLMGESQPYSGPRTPDGREIVFYKVIDYVLHGKEEIKVIPTPSADHWALASGLPSYVAESGFICNIMNASADEMFKFQEGALDDSGWLIKNVLSMPIVNKKEEIVGVATFYNRKDGKPFDEQDEVLMESLTQFLGWSVMNTDTYDKMNKLENRKDIAQDMVLYHVKCDRDEIQLILPTRARLGKEPADCDEDELGEILKEELPGPTTFDIYEFHFSDLECTELDLVKCGIQMYYELGVVRKFQIPQEVLVRFLFSISKGYRRITYHNWRHGFNVAQTMFTLLMTGKLKSYYTDLEAFAMVTAGLCHDIDHRGTNNLYQMKSQNPLAKLHGSSILERHHLEFGKFLLSEETLNIYQNLNRRQHEHVIHLMDIAIIATDLALYFKKRAMFQKIVDESKNYQDKKSWVEYLSLETTRKEIVILGNRARLHLKKE

SEQ ID NO: 7617 - protein, 82 aa, Artificial Sequence
  Synthetic polypeptide
TLNIYQNLNRRQHEHVIHLMDIAIIATDLALYFKKRAMFQKIVDESKNYQDKKSWVEYLSLETTRKEIVILGNRARLHLKKE

SEQ ID NO: 7618 - protein, 311 aa, Artificial Sequence
  Synthetic polypeptide
MRGSGPRGAGRRRPPSGGGDTPITPASLAGCYSAPRRAPLWTCLLLCAALRTLLASPSNEVNLLDSRTVMGDLGWIAFPKNGWEEIGEVDENYAPIHTYQVCKVMEQNQNNWLLTSWISNEGASRIFIELKFTLRDCNSLPGGLGTCKETFNMYYFESDDQNGRNIKENQYIKIDTIAADESFTELDLGDRVMKLNTEVRDVGPLSKKGFYLAFQDVGACIALVSVRVYYKKCPSVVRHLAVFPDTITGADSSQLLEVSGSCVNHSVTDEPPKMHCSAEGEWLVPIGKCMCKAGYEEKNGTCQVHIHLDGR

SEQ ID NO: 7619 - protein, 722 aa, Artificial Sequence
  Synthetic polypeptide
MAASGLDHLKNGYRRRFCRPSRARDINTEQGQNVLEILQDCFEEKSLANDFSTNSTKSVPNSTRKIKDTCIQSPSKECQKSHPKSVPVSSKKKEASLQFVVEPSEATNRSVQAHEVHQKILATDVSSKNTPDSKKISSRNINDHHSEADEEFYLSVGSPSVLLDAKTSVSQNVIPSSAQKRETYTFENSVNMLPSSTEVSVKTKKRLNFDDKVMLKKIEIDNKVSDEEDKTSEGQERKPSGSSQNRIRDSEYEIQRQAKKSFSTLFLETVKRKSESSPIVRHAATAPPHSCPPDDTKLIEDEFIIDESDQSFASRSWITIPRKAGSLKQRTISPAESTALLQGRKSREKHHNILPKTLANDKHSHKPHPVETSQPSDKTVLDTSYALIGETVNNYRSTKYEMYSKNAEKPSRSKRTIKQKQRRKFMAKPAEEQLDVGQSKDENIHTSHITQDEFQRNSDRNMEEHEEMGNDCVSKKQMPPVGSKKSSTRKDKEESKKKRFSSESKNKLVPEEVTSTVTKSRRISRRPSDWWVVKSEESPVYSNSSVRNELPMHHNSSRKSTKKTNQSSKNIRKKTIPLKRQKTATKGNQRVQKFLNAEGSGGIVGHDEISRCSLSEPLESDEADLAKKKNLDCSRSTRSSKNEDNIMTAQNVPLKPQTSGYTCNIPTESNLDSGEHKTSVLEESGPSRLNNNYLMSGKNDVDDEEVHGSSDEELLLMEERRN

SEQ ID NO: 7620 - protein, 629 aa, Artificial Sequence
  Synthetic polypeptide
EASLQFVVEPSEATNRSVQAHEVHQKILATDVSSKNTPDSKKISSRNINDHHSEADEEFYLSVGSPSVLLDAKTSVSQNVIPSSAQKRETYTFENSVNMLPSSTEVSVKTKKRLNFDDKVMLKKIEIDNKVSDEEDKTSEGQERKPSGSSQNRIRDSEYEIQRQAKKSFSTLFLETVKRKSESSPIVRHAATAPPHSCPPDDTKLIEDEFIIDESDQSFASRSWITIPRKAGSLKQRTISPAESTALLQGRKSREKHHNILPKTLANDKHSHKPHPVETSQPSDKTVLDTSYALIGETVNNYRSTKYEMYSKNAEKPSRSKRTIKQKQRRKFMAKPAEEQLDVGQSKDENIHTSHITQDEFQRNSDRNMEEHEEMGNDCVSKKQMPPVGSKKSSTRKDKEESKKKRFSSESKNKLVPEEVTSTVTKSRRISRRPSDWWVVKSEESPVYSNSSVRNELPMHHNSSRKSTKKTNQSSKNIRKKTIPLKRQKTATKGNQRVQKFLNAEGSGGIVGHDEISRCSLSEPLESDEADLAKKKNLDCSRSTRSSKNEDNIMTAQNVPLKPQTSGYTCNIPTESNLDSGEHKTSVLEESGPSRLNNNYLMSGKNDVDDEEVHGSSDEELLLMEERRN

SEQ ID NO: 7621 - protein, 437 aa, Artificial Sequence
  Synthetic polypeptide
MTDGKLSTSTNGVAFMGILDGRPGNPLQNLQHVNLKAPRLLSAPEYGPKLKLRALEDRHSLQSVDSGIPTLEIGNPEPVPCSAVHVRRKQSDSDLIPERAFQSACALPSCAPPAPSSTEREQSVRKSSTFPRTGYDSVKLYSPTSKALTRSDDVSVCSVSSLGTELSTTLSVSNEDILDLVVTSSSSAIVTLENDDDPQFTNVTLSSIKETRGLHQQDCVHEAEEGSKLKILGPFSNFFARNLLARKQSARLDKHNDLGWKLFGKAPLRENAQKDSKRIQKEYEDKAGRPSKPPSPKQNVRKNLDFEPLSTTALILEDRPANLPAKPAEEAQKHRQQYEEMVVQAKKRELKEAQRRKKQLEERCRVEESIGNAVLTWNNEILPNWETMWCSRKVRDLWWQGIPPSVRGKVWSLAIGNELNITHGAVACTCNPTYSGG

SEQ ID NO: 7622 - protein, 209 aa, Artificial Sequence
  Synthetic polypeptide
MMAISPALLFMDRNLLARKQSARLDKHNDLGWKLFGKAPLRENAQKDSKRIQKEYEDKAGRPSKPPSPKQNVRKNLDFEPLSTTALILEDRPANLPAKPAEEAQKHRQQYEEMVVQAKKRELKEAQRRKKQLEERCRVEESIGNAVLTWNNEILPNWETMWCSRKVRDLWWQGIPPSVRGKVWSLAIGNELNITHGAVACTCNPTYSGG

SEQ ID NO: 7623 - protein, 157 aa, Artificial Sequence
  Synthetic polypeptide
MEYEDKAGRPSKPPSPKQNVRKNLDFEPLSTTALILEDRPANLPAKPAEEAQKHRQQYEEMVVQAKKRELKEAQRRKKQLEERCRVEESIGNAVLTWNNEILPNWETMWCSRKVRDLWWQGIPPSVRGKVWSLAIGNELNITHGAVACTCNPTYSGG

SEQ ID NO: 7624 - protein, 56 aa, Artificial Sequence
  Synthetic polypeptide
LPNWETMWCSRKVRDLWWQGIPPSVRGKVWSLAIGNELNITHGAVACTCNPTYSGG

SEQ ID NO: 7625 - protein, 50 aa, Artificial Sequence
  Synthetic polypeptide
MWCSRKVRDLWWQGIPPSVRGKVWSLAIGNELNITHGAVACTCNPTYSGG

SEQ ID NO: 7626 - protein, 217 aa, Artificial Sequence
  Synthetic polypeptide
MSFLFGSRSSKTFKPKKNIPEGSHQYELLKHAEATLGSGNLRMAVMLPEGEDLNEWVAVNTVDFFNQINMLYGTITDFCTEESCPVMSAGPKYEYHWADGTNIKKPIKCSAPKYIDYLMTWVQDQLDDETLFPSKIGVPFPKNFMSVAKTILKRLFRVYAHIYHQHFDPVIQLQEEAHLNTSFKHFIFFVQCRILRSLENSKFESVLLVAVKVYLLR

SEQ ID NO: 7627 - protein, 222 aa, Artificial Sequence
  Synthetic polypeptide
MEGATDVNESGSRSSKTFKPKKNIPEGSHQYELLKHAEATLGSGNLRMAVMLPEGEDLNEWVAVNTVDFFNQINMLYGTITDFCTEESCPVMSAGPKYEYHWADGTNIKKPIKCSAPKYIDYLMTWVQDQLDDETLFPSKIGVPFPKNFMSVAKTILKRLFRVYAHIYHQHFDPVIQLQEEAHLNTSFKHFIFFVQCRILRSLENSKFESVLLVAVKVYLLR

SEQ ID NO: 7628 - protein, 199 aa, Artificial Sequence
  Synthetic polypeptide
MSFLFGSRSSKTFKPKKNIPEGSHQYELLKHAEATLGSGNLRMAVMLPEGEDLNEWVAVNTVDFFNQINMLYGTITDFCTEESCPVMSAGPKYEYHWADGTNIKKPIKCSAPKYIDYLMTWVQDQLDDETLFPSKIGVPFPKNFMSVAKTILKRLFRVYAHIYHQHFDPVIQLQEEAHLNTSFKHFIFFVQNPEESGEF

SEQ ID NO: 7629 - protein, 204 aa, Artificial Sequence
  Synthetic polypeptide
MEGATDVNESGSRSSKTFKPKKNIPEGSHQYELLKHAEATLGSGNLRMAVMLPEGEDLNEWVAVNTVDFFNQINMLYGTITDFCTEESCPVMSAGPKYEYHWADGTNIKKPIKCSAPKYIDYLMTWVQDQLDDETLFPSKIGVPFPKNFMSVAKTILKRLFRVYAHIYHQHFDPVIQLQEEAHLNTSFKHFIFFVQNPEESGEF

SEQ ID NO: 7630 - protein, 106 aa, Artificial Sequence
  Synthetic polypeptide
MNSFFGTPAASWCLLESDVSSAPDKEAGRERRALSVQQRGGPAWSGSLEWSRQSAGDRRRLGLSRQTAKSSWSRSRDRTCCCRRAWWILVPAADRARRERSPQLRN

SEQ ID NO: 7631 - protein, 94 aa, Artificial Sequence
  Synthetic polypeptide
MLTRKIKLWDINAHITCRLCSGYLIDATTVTECLHTFCRSCLVKYLEENNTCPTCRIVIHQSHPLQYIGHDRTMQDIVYKLVPGLQEAWLEPAP

SEQ ID NO: 7632 - protein, 60 aa, Artificial Sequence
  Synthetic polypeptide
MTVCRSCLVKYLEENNTCPTCRIVIHQSHPLQYIGHDRTMQDIVYKLVPGLQEAWLEPAP

SEQ ID NO: 7633 - protein, 189 aa, Artificial Sequence
  Synthetic polypeptide
MVLLSLWLIAAALVEVRTSADGQAGNEEMVQIDLPIKRYREYELVTPVSTNLEGRYLSHTLSASHKKRSARDVSSNPEQLFFNITAFGKDFHLRLKPNTQLVAPGAVVEWHETSLVPGNITDPINNHQPGSATYRIRRTEPLQTNCAYVGDIVDIPGTSVAISNCDGLNSVITPVRHSSHMEKQVLEIS

SEQ ID NO: 7634 - protein, 20 aa, Artificial Sequence
  Synthetic polypeptide
MVETAAEMEAYVLEDILEVQ

SEQ ID NO: 7635 - protein, 225 aa, Artificial Sequence
  Synthetic polypeptide
MAKHIQKEIQRGVESWVSLGNRRPHLSIILVGDNPASHTYVRNKIRAASAVGICSELILKPKDVSQEELLDVTDQLNMDPRVSGILVQLPLPDHVDERTICNGIAPEKDVDGFHIINIGRLCLDQHSLIPATASAVWEIIKRTGIQTFGKNVVVAGRSKNVGMPIAMLLHTDGEHERPGGDATVTIAHRYTPKEQLKIHTQLADIIIVAAAPVSALPCPGLALRG

SEQ ID NO: 7636 - protein, 148 aa, Artificial Sequence
  Synthetic polypeptide
MDPRVSGILVQLPLPDHVDERTICNGIAPEKDVDGFHIINIGRLCLDQHSLIPATASAVWEIIKRTGIQTFGKNVVVAGRSKNVGMPIAMLLHTDGEHERPGGDATVTIAHRYTPKEQLKIHTQLADIIIVAAAPVSALPCPGLALRG

SEQ ID NO: 7637 - protein, 283 aa, Artificial Sequence
  Synthetic polypeptide
MTVPVRGFSLLRGRLGRAPALGRSTAPSVRAPGEPGSAFRGFRSSGVRHEAIIISGTEMAKHIQKEIQRGVESWVSLGNRRPHLSIILVGDNPASHTYVRNKIRAASAVGICSELILKPKDVSQEELLDVTDQLNMDPRVSGILVQLPLPDHVDERTICNGIAPEKDVDGFHIINIGRLCLDQHSLIPATASAVWEIIKRTGIQTFGKNVVVAGRSKNVGMPIAMLLHTDGEHERPGGDATVTIAHRYTPKEQLKIHTQLADIIIVAAAPVSALPCPGLALRG

SEQ ID NO: 7638 - protein, 233 aa, Artificial Sequence
  Synthetic polypeptide
MAKHIQKEIQRGVESWVSLGNRRPHLSIILVGDNPASHTYVRNKIRAASAVGICSELILKPKDVSQEELLDVTDQLNMDPRVSGILVQLPLPDHVDERTICNGIAPEKDVDGFHIINIGRLCLDQHSLIPATASAVWEIIKRTGIQTFGKNVVVAGRSKNVGMPIAMLLHTDGEHERPGGDATVTIAHRYTPKEQLKIHTQLADIIIVAAALYCWCSWLMQQVDRHELGDKDF

SEQ ID NO: 7639 - protein, 156 aa, Artificial Sequence
  Synthetic polypeptide
MDPRVSGILVQLPLPDHVDERTICNGIAPEKDVDGFHIINIGRLCLDQHSLIPATASAVWEIIKRTGIQTFGKNVVVAGRSKNVGMPIAMLLHTDGEHERPGGDATVTIAHRYTPKEQLKIHTQLADIIIVAAALYCWCSWLMQQVDRHELGDKDF

SEQ ID NO: 7640 - protein, 291 aa, Artificial Sequence
  Synthetic polypeptide
MTVPVRGFSLLRGRLGRAPALGRSTAPSVRAPGEPGSAFRGFRSSGVRHEAIIISGTEMAKHIQKEIQRGVESWVSLGNRRPHLSIILVGDNPASHTYVRNKIRAASAVGICSELILKPKDVSQEELLDVTDQLNMDPRVSGILVQLPLPDHVDERTICNGIAPEKDVDGFHIINIGRLCLDQHSLIPATASAVWEIIKRTGIQTFGKNVVVAGRSKNVGMPIAMLLHTDGEHERPGGDATVTIAHRYTPKEQLKIHTQLADIIIVAAALYCWCSWLMQQVDRHELGDKDF

SEQ ID NO: 7641 - protein, 159 aa, Artificial Sequence
  Synthetic polypeptide
MRAPLLPPAPVVLSLLILGSGHYAAGLDLNDTYSGKREPFSGDHSADGFEVTSRSEMSSGSEISPVSEMPSSSEPSSGADYDYSEEYDNEPQIPGYIVDDSVRVEQVVKPPQNKTESENTSDKPKRKKKGGKNGKNRRNRKKKNPCKNGKNRRNRKKKN

SEQ ID NO: 7642 - protein, 286 aa, Artificial Sequence
  Synthetic polypeptide
MAHRGPSRASKGPGPTARAPSPGAPPPPRSPRSRPLLLLLLLLGACGAAGRSPEPGRLGPHAQLTRVPRSPPAGRAEPGGGEDRQARGTEPGAPGPSPGPAPGPGEDGAPAAGYRRWERAAPLAGVASRAQVSLISTSFVLKGDATHNQAMVHWTGENSSVILILTKYYHADMGKVLESSLWRSSDFGTSYTKLTLQPGVTTVIDNFYICPTNKRKPSSQEPTTPSDAQKNIRQTHVERHPPACLASPQSSLGHPAQGKSPDCPSLRCTVVSWWDPGTGRGNTGGS

SEQ ID NO: 7643 - protein, 114 aa, Artificial Sequence
  Synthetic polypeptide
MGKVLESSLWRSSDFGTSYTKLTLQPGVTTVIDNFYICPTNKRKPSSQEPTTPSDAQKNIRQTHVERHPPACLASPQSSLGHPAQGKSPDCPSLRCTVVSWWDPGTGRGNTGGS

SEQ ID NO: 7644 - protein, 29 aa, Artificial Sequence
  Synthetic polypeptide
APVLWLKTPEATFTMVGIWIILLGMSYAS

SEQ ID NO: 7645 - protein, 340 aa, Artificial Sequence
  Synthetic polypeptide
MRTADREARPGLPSLLLLLLAGAGLSAASPPAAPRFNVSLDSVPELRWLPVLRHYDLDLVRAAMAQVIGDRVPKWVHVLIGKVVLELERFLPQPFTGEIRGMCDFMNLSLADCLLVNLAYESSVFCTSIVAQDSRGHIYHGRNLDYPFGNVLRKLTVDVQFLKNGQIAFTGTTFIGYVGLWTGQSPHKFTVSGDERDKGWWWENAIAALFRRHIPVSWLIRATLSESENFEAAVGKLAKTPLIADVYYIVGGTSPREGVVITRNRDGPADIWPLDPLNGAWFRVETNYDHWKPAPKEDDRRTSAIKALNATGQANLSLEALFQILSVVPVYNNELVLSVQ

SEQ ID NO: 7646 - protein, 25 aa, Artificial Sequence
  Synthetic polypeptide
MKTGHFEIVTMLLATMILVDIFQKN

SEQ ID NO: 7647 - protein, 93 aa, Artificial Sequence
  Synthetic polypeptide
MPASMFCLDDLGPHIELGPGGCISLSRKGHVQEWKMCKKGRRRHFTEKETEWKQPEALIQCRCLCRASCPACRTMSQINLFSLPNLRYCYSNT

SEQ ID NO: 7648 - protein, 240 aa, Artificial Sequence
  Synthetic polypeptide
MKFPGPLENQRLSFLLEKAITREAQMWKVNVRKMPSNQNVSPSQRDEVIQWLAKLKYQFNLYPETFALASSLLDRFLATVKAHPKYLSCIAISCFFLAAKTVEEDERIPVLKVLARDSFCGCSSSEILRMERIILDKLNWDLHTATPLDFLHIFHAIAVSTRPQLLFSLPKLSPSQHLAVLTKQLLHCMACNQLLQFRGSMLALAMVSLEMEKLIPDWLSLTIELLQKAQQHGCSWRPLS

SEQ ID NO: 7649 - protein, 226 aa, Artificial Sequence
  Synthetic polypeptide
MTPRHHCEAYSSAGEEEEEEEEEKNVSPSQRDEVIQWLAKLKYQFNLYPETFALASSLLDRFLATVKAHPKYLSCIAISCFFLAAKTVEEDERIPVLKVLARDSFCGCSSSEILRMERIILDKLNWDLHTATPLDFLHIFHAIAVSTRPQLLFSLPKLSPSQHLAVLTKQLLHCMACNQLLQFRGSMLALAMVSLEMEKLIPDWLSLTIELLQKAQQHGCSWRPLS

SEQ ID NO: 7650 - protein, 122 aa, Artificial Sequence
  Synthetic polypeptide
MAAAVRCMGRALIHHQRHSLSKMVYQTSLCSCSVNIRVPNRHFAAATKPGAVAHVCNPSTLGGRGGQITRSGVRDHPGQHGETLSLLKIEKMSWSWWQAPVVPATREAEAGEPLEPGRRTLQ

SEQ ID NO: 7651 - protein, 46 aa, Artificial Sequence
  Synthetic polypeptide
MGVLKVWLGLALALAEFAVLPHHSEGACVYQDSLLALIPGLMAAQD

SEQ ID NO: 7652 - protein, 37 aa, Artificial Sequence
  Synthetic polypeptide
MGVLKVWLGLALALAEFAVLPHHSEGACVYQDSLLAV

SEQ ID NO: 7653 - protein, 715 aa, Artificial Sequence
  Synthetic polypeptide
MGVLKVWLGLALALAEFAVLPHHSEGACVYQDSLLADATIWKPDSCQSCRCHGDIVICKPAVCRNPQCAFEKGEVLQIAANQCCPECVLRTPGSCHHEKKIHEHGTEWASSPCSVCSCNHGEVRCTPQPCPPLSCGHQELAFIPEGSCCPVCVGLGKPCSYEGHVFQDGEDWRLSRCAKCLCRNGVAQCFTAQCQPLFCNQDETVVRVPGKCCPQCSARSCSAAGQVYEHGEQWSENACTTCICDRGEVRCHKQACLPLRCGKGQSRARRHGQCCEECVSPAGSCSYDGVVRYQDEMWKGSACEFCMCDHGQVTCQTGECAKVECARDEELIHLDGKCCPECISRNGYCVYEETGEFMSSNASEVKRIPEGEKWEDGPCKVCECRGAQVTCYEPSCPPCPVGTLALEVKGQCCPDCTSVHCHPDCLTCSQSPDHCDLCQDPTKLLQNGWCVHSCGLGFYQAGSLCLACQPQCSTCTSGLECSSCQPPLLMRHGQCVPTCGDGFYQDRHSCAVCHESCAGCWGPTEKHCLACRDPLHVLRDGGCESSCGKGFYNRQGTCSACDQSCDSCGPSSPRCLTCTEKTVLHDGKCMSECPGGYYADATGRCKVCHNSCASCSGPTPSHCTACSPPKALRQGHCLPRCGEGFYSDHGVCKACHSSCLACMGPAPSHCTGCKKPEEGLQVEQLSDVGIPSGECLAQCRAHFYLESTGICEACF

SEQ ID NO: 7654 - protein, 6 aa, Artificial Sequence
  Synthetic polypeptide
REKCFK

SEQ ID NO: 7655 - protein, 3 aa, Artificial Sequence
  Synthetic polypeptide
MFL

SEQ ID NO: 7656 - protein, 3 aa, Artificial Sequence
  Synthetic polypeptide
MFL

SEQ ID NO: 7657 - protein, 811 aa, Artificial Sequence
  Synthetic polypeptide
MGVLKVWLGLALALAEFAVLPHHSEGACVYQDSLLADATIWKPDSCQSCRCHGDIVICKPAVCRNPQCAFEKGEVLQIAANQCCPECVLRTPGSCHHEKKIHEHGTEWASSPCSVCSCNHGEVRCTPQPCPPLSCGHQELAFIPEGSCCPVCVGLGKPCSYEGHVFQDGEDWRLSRCAKCLCRNGVAQCFTAQCQPLFCNQDETVVRVPGKCCPQCSARSCSAAGQVYEHGEQWSENACTTCICDRGEVRCHKQACLPLRCGKGQSRARRHGQCCEECVSPAGSCSYDGVVRYQDEMWKGSACEFCMCDHGQVTCQTGECAKVECARDEELIHLDGKCCPECISRNGYCVYEETGEFMSSNASEVKRIPEGEKWEDGPCKVCECRGAQVTCYEPSCPPCPVGTLALEVKGQCCPDCTSVHCHPDCLTCSQSPDHCDLCQDPTKLLQNGWCVHSCGLGFYQAGSLCLACQPQCSTCTSGLECSSCQPPLLMRHGQCVPTCGDGFYQDRHSCAVCHESCAGCWGPTEKHCLACRDPLHVLRDGGCESSCGKGFYNRQGTCSACDQSCDSCGPSSPRCLTCTEKTVLHDGKCMSECPGGYYADATGRCKVCHNSCASCSGPTPSHCTACSPPKALRQGHCLPRCGEGFYSDHGVCKACHSSCLACMGPAPSHCTGCKKPEEGLQVEQLSDVGIPSGECLAQCRAHFYLESTGICEACHQSCFRCAGKSPHNCTDCGPSHVLLDGQCLSQCPDGYFHQEGSCTECHPTCRQCHGPLESDCISCYPHISLTNGNCRTSCREEQFLNLVGYCAELKF

SEQ ID NO: 7658 - protein, 3 aa, Artificial Sequence
  Synthetic polypeptide
MFL

SEQ ID NO: 7659 - protein, 822 aa, Artificial Sequence
  Synthetic polypeptide
MGVLKVWLGLALALAEFAVLPHHSEGACVYQDSLLADATIWKPDSCQSCRCHGDIVICKPAVCRNPQCAFEKGEVLQIAANQCCPECVLRTPGSCHHEKKIHEHGTEWASSPCSVCSCNHGEVRCTPQPCPPLSCGHQELAFIPEGSCCPVCVGLGKPCSYEGHVFQDGEDWRLSRCAKCLCRNGVAQCFTAQCQPLFCNQDETVVRVPGKCCPQCSARSCSAAGQVYEHGEQWSENACTTCICDRGEVRCHKQACLPLRCGKGQSRARRHGQCCEECVSPAGSCSYDGVVRYQDEMWKGSACEFCMCDHGQVTCQTGECAKVECARDEELIHLDGKCCPECISRNGYCVYEETGEFMSSNASEVKRIPEGEKWEDGPCKVCECRGAQVTCYEPSCPPCPVGTLALEVKGQCCPDCTSVHCHPDCLTCSQSPDHCDLCQDPTKLLQNGWCVHSCGLGFYQAGSLCLACQPQCSTCTSGLECSSCQPPLLMRHGQCVPTCGDGFYQDRHSCAVCHESCAGCWGPTEKHCLACRDPLHVLRDGGCESSCGKGFYNRQGTCSACDQSCDSCGPSSPRCLTCTEKTVLHDGKCMSECPGGYYADATGRCKVCHNSCASCSGPTPSHCTACSPPKALRQGHCLPRCGEGFYSDHGVCKACHSSCLACMGPAPSHCTGCKKPEEGLQVEQLSDVGIPSGECLAQCRAHFYLESTGICEACHQSCFRCAGKSPHNCTDCGPSHVLLDGQCLSQCPDGYFHQEGSCTECHPTCRQCHGPLESDCISCYPHISLTNGNCRTSCREEQFLNLVGYCAGFLRTLKMHMCAVNL

SEQ ID NO: 7660 - protein, 1340 aa, Artificial Sequence
  Synthetic polypeptide
MGVLKVWLGLALALAEFAVLPHHSEGACVYQDSLLADATIWKPDSCQSCRCHGDIVICKPAVCRNPQCAFEKGEVLQIAANQCCPECVLRTPGSCHHEKKIHEHGTEWASSPCSVCSCNHGEVRCTPQPCPPLSCGHQELAFIPEGSCCPVCVGLGKPCSYEGHVFQDGEDWRLSRCAKCLCRNGVAQCFTAQCQPLFCNQDETVVRVPGKCCPQCSARSCSAAGQVYEHGEQWSENACTTCICDRGEVRCHKQACLPLRCGKGQSRARRHGQCCEECVSPAGSCSYDGVVRYQDEMWKGSACEFCMCDHGQVTCQTGECAKVECARDEELIHLDGKCCPECISRNGYCVYEETGEFMSSNASEVKRIPEGEKWEDGPCKVCECRGAQVTCYEPSCPPCPVGTLALEVKGQCCPDCTSVHCHPDCLTCSQSPDHCDLCQDPTKLLQNGWCVHSCGLGFYQAGSLCLACQPQCSTCTSGLECSSCQPPLLMRHGQCVPTCGDGFYQDRHSCAVCHESCAGCWGPTEKHCLACRDPLHVLRDGGCESSCGKGFYNRQGTCSACDQSCDSCGPSSPRCLTCTEKTVLHDGKCMSECPGGYYADATGRCKVCHNSCASCSGPTPSHCTACSPPKALRQGHCLPRCGEGFYSDHGVCKACHSSCLACMGPAPSHCTGCKKPEEGLQVEQLSDVGIPSGECLAQCRAHFYLESTGICEACHQSCFRCAGKSPHNCTDCGPSHVLLDGQCLSQCPDGYFHQEGSCTECHPTCRQCHGPLESDCISCYPHISLTNGNCRTSCREEQFLNLVGYCADCHHLCQHCAADLHNTGSICLRCQNAHYLLLGDHCVPDCPSGYYAERGACKKCHSSCRTCQGRGPFSCSSCDTNLVLSHTGTCSTTCFPGHYLDDNHVCQPCNTHCGSCDSQASCTSCRDPNKVLLFGECQYESCAPQYYLDFSTNTCKECDWSCSACSGPLKTDCLQCMDGYVLQDGACVEQCLSSFYQDSGLCKNCDSYCLQCQGPHECTRCKGPFLLLEAQCVQECGKGYFADHAKHKCTACPQGCLQCSHRDRCHLCDHGFFLKSGLCVYNCVPGFSVHTSNETCSGKIHTPSLHVNGSLILPIGSIKPLDFSLLNVQDQEGRVEDLLFHVVSTPTNGQLVLSRNGKEVQLDKAGRFSWKDVNEKKVRFVHSKEKLRKGYLFLKISDQQFFSEPQLINIQAFSTQAPYVLRNEVLHISRGERATITTQMLDIRDDDNPQDVVIEIIDPPLHGQLLQTLQSPATPIYQFQLDELSRGLLHYAHDGSDSTSDVAVLQANDGHSFHNILFQVKTVPQLGAMACTYSLHYSEG

SEQ ID NO: 7661 - protein, 259 aa, Artificial Sequence
  Synthetic polypeptide
MASIWVGHRGTVRDYPDFSPSVDAEAIQKAIRGIGTDEKMLISILTERSNAQRQLIVKEYQAAYGKELKDDLKGDLSGHFEHLMVALVTPPAVFDAKQLKKSMKGAGTNEDALIEILTTRTSRQMKDISQAYYTVYKKSLGDDISSETSGDFRKALLTLADGRRDESLKVDEHLAKQDAQILYKAGENRWGTDEDKFTEILCLRSFPQLKLTFDEYRNISQKDIVDSIKGELSGHFEDLLLAIAPNMVQDTHSTLNKYC

SEQ ID NO: 7662 - protein, 220 aa, Artificial Sequence
  Synthetic polypeptide
MLISILTERSNAQRQLIVKEYQAAYGKELKDDLKGDLSGHFEHLMVALVTPPAVFDAKQLKKSMKGAGTNEDALIEILTTRTSRQMKDISQAYYTVYKKSLGDDISSETSGDFRKALLTLADGRRDESLKVDEHLAKQDAQILYKAGENRWGTDEDKFTEILCLRSFPQLKLTFDEYRNISQKDIVDSIKGELSGHFEDLLLAIAPNMVQDTHSTLNKYC

SEQ ID NO: 7663 - protein, 67 aa, Artificial Sequence
  Synthetic polypeptide
MKKFSRMPKSEGGSGGGAAGGGAGGAGAGAGCGSGGSSVGVRVFAVGRHQVTLEESLAEALLLAAAM

SEQ ID NO: 7664 - protein, 249 aa, Artificial Sequence [sequence omitted]

SEQ ID NO: 7665 - protein, 135 aa, Artificial Sequence
  Synthetic polypeptide
MDQEEGLKALDNIVTQFNAYEDFLDSQITTVDLYYLEDETLARQLVELGYRGTGERVKREDFEARKAAIEIARLAERAQQKTLTSAGKDLQDNFLTALAMREEDNRSGKLSVIWKPQSKTYHRYVKIKSKQSKQH

SEQ ID NO: 7666 - protein, 125 aa, Artificial Sequence
  Synthetic polypeptide
MDQEEGLKALDNIVTQFNAYEDFLDSQITTVDLYYLEDETLARQLVELGYRGTGERVKREDFEARKAAIEIARLAERAQQKTLTSAGKDLQDNFLTALAMREEDNRSGKLSVLIPRTFPNKWLEH

SEQ ID NO: 7667 - protein, 236 aa, Artificial Sequence
  Synthetic polypeptide
MVVLSVPAEVTVILLDIEGTTTPIAFVKDILFPYIEENVKEYLQTHWEEEECQQDVSLLRKQAEEDAHLDGAVPIPAASGNGVDDLQQMIQAVVDNVCWQMSLDRKTTALKQLQGHMWRAAFTAGRMKAEFFADVVPAVRKWREAGMKVYIYSSGSVEAQKLLFGHSTEGDILELVDGHFDTKIGHKVESESYRKIADSIGCSTNNILFLTDVTRDTTTDFHPSGSSRVSAALQIQ

SEQ ID NO: 7668 - protein, 148 aa, Artificial Sequence
  Synthetic polypeptide
MIQAVVDNVCWQMSLDRKTTALKQLQGHMWRAAFTAGRMKAEFFADVVPAVRKWREAGMKVYIYSSGSVEAQKLLFGHSTEGDILELVDGHFDTKIGHKVESESYRKIADSIGCSTNNILFLTDVTRDTTTDFHPSGSSRVSAALQIQ

SEQ ID NO: 7669 - protein, 90 aa, Artificial Sequence
  Synthetic polypeptide
MKVYIYSSGSVEAQKLLFGHSTEGDILELVDGHFDTKIGHKVESESYRKIADSIGCSTNNILFLTDVTRDTTTDFHPSGSSRVSAALQIQ

SEQ ID NO: 7670 - protein, 37 aa, Artificial Sequence
  Synthetic polypeptide
QMLLVSFPHLQVICTPRYHLIHSHSLINQPSQHLPVL

SEQ ID NO: 7671 - protein, 877 aa, Artificial Sequence
  Synthetic polypeptide
MKLKEVDRTAMQAWSPAQNHPIYLATGTSAQQLDATFSTNASLEIFELDLSDPSLDMKSCATFSSSHRYHKLIWGPYKMDSKGDVSGVLIAGGENGNIILYDPSKIIAGDKEVVIAQNDKHTGPVRALDVNIFQTNLVASGANESEIYIWDLNNFATPMTPGAKTQPPEDISCIAWNRQVQHILASASPSGRATVWDLRKNEPIIKVSDHSNRMHCSGLAWHPDVATQMVLASEDDRLPVIQMWDLRFASSPLRVLENHARGILAIAWSMADPELLLSCGKDAKILCSNPNTGEVLYELPTNTQWCFDIQWCPRNPAVLSAASFDGRISVYSIMGGSTDGLRQKQVDKLSSSFGNLDPFGTGQPLPPLQIPQQTAQHSIVLPLKKPPKWIRRPVGASFSFGGKLVTFENVRMPSHQGAEQQQQQHHVFISQVVTEKEFLSRSDQLQQAVQSQGFINYCQKKIDASQTEFEKNVWSFLKVNFEDDSRGKYLELLGYRKEDLGKKHIKEEKEESEFLPSSGGTFNISVSGDIDGLITQALLTGNFESAVDLCLHDNRMADAIILAIAGGQELLARTQKKYFAKSQSKITRLITAVVMKNWKEIVESCDLKNWREALAAVLTYAKPDEFSALCDLLGTRLENEGDSLLQTQACLCYICAGNVEKLVACWTKAQDGSHPLSLQDLIEKVVILRKAVQLTQAMDTSTVGVLLAAKMSQYANLLAAQGSIAAALAFLPDNTNQPNIMQLRDRLCRAQGEPVAGHESPKIPYEKQQLPKGRPGPVAGHHQMPRVQTQQYYPHGENPPPPGFIMHGNVNPNAAGQLPTSPGHMHTQVPPYPQPQPYQPAQPASSSPLRFICGECPIQVYHVLNLLYHILLYLFYV

SEQ ID NO: 7672 - protein, 916 aa, Artificial Sequence
  Synthetic polypeptide
MKLKEVDRTAMQAWSPAQNHPIYLATGTSAQQLDATFSTNASLEIFELDLSDPSLDMKSCATFSSSHRYHKLIWGPYKMDSKGDVSGVLIAGGENGNIILYDPSKIIAGDKEVVIAQNDKHTGPVRALDVNIFQTNLVASGANESEIYIWDLNNFATPMTPGAKTQPPEDISCIAWNRQVQHILASASPSGRATVWDLRKNEPIIKVSDHSNRMHCSGLAWHPDVATQMVLASEDDRLPVIQMWDLRFASSPLRVLENHARGILAIAWSMADPELLLSCGKDAKILCSNPNTGEVLYELPTNTQWCFDIQWCPRNPAVLSAASFDGRISVYSIMGGSTDGLRQKQVDKLSSSFGNLDPFGTGQPLPPLQIPQQTAQHSIVLPLKKPPKWIRRPVGASFSFGGKLVTFENVRMPSHQGAEQQQQQHHVFISQVVTEKEFLSRSDQLQQAVQSQGFINYCQKKIDASQTEFEKNVWSFLKVNFEDDSRGKYLELLGYRKEDLGKKIALALNKVDGANVALKDSDQVAQSDGEESPAAEEQLLGEHIKEEKEESEFLPSSGGTFNISVSGDIDGLITQALLTGNFESAVDLCLHDNRMADAIILAIAGGQELLARTQKKYFAKSQSKITRLITAVVMKNWKEIVESCDLKNWREALAAVLTYAKPDEFSALCDLLGTRLENEGDSLLQTQACLCYICAGNVEKLVACWTKAQDGSHPLSLQDLIEKVVILRKAVQLTQAMDTSTVGVLLAAKMSQYANLLAAQGSIAAALAFLPDNTNQPNIMQLRDRLCRAQGEPVAGHESPKIPYEKQQLPKGRPGPVAGHHQMPRVQTQQYYPHGENPPPPGFIMHGNVNPNAAGQLPTSPGHMHTQVPPYPQPQPYQPAQPASSSPLRFICGECPIQVYHVLNLLYHILLYLFYV

SEQ ID NO: 7673 - protein, 911 aa, Artificial Sequence
  Synthetic polypeptide
MLGESDERCTNAGSGCRRSSPGTSAQQLDATFSTNASLEIFELDLSDPSLDMKSCATFSSSHRYHKLIWGPYKMDSKGDVSGVLIAGGENGNIILYDPSKIIAGDKEVVIAQNDKHTGPVRALDVNIFQTNLVASGANESEIYIWDLNNFATPMTPGAKTQPPEDISCIAWNRQVQHILASASPSGRATVWDLRKNEPIIKVSDHSNRMHCSGLAWHPDVATQMVLASEDDRLPVIQMWDLRFASSPLRVLENHARGILAIAWSMADPELLLSCGKDAKILCSNPNTGEVLYELPTNTQWCFDIQWCPRNPAVLSAASFDGRISVYSIMGGSTDGLRQKQVDKLSSSFGNLDPFGTGQPLPPLQIPQQTAQHSIVLPLKKPPKWIRRPVGASFSFGGKLVTFENVRMPSHQGAEQQQQQHHVFISQVVTEKEFLSRSDQLQQAVQSQGFINYCQKKIDASQTEFEKNVWSFLKVNFEDDSRGKYLELLGYRKEDLGKKIALALNKVDGANVALKDSDQVAQSDGEESPAAEEQLLGEHIKEEKEESEFLPSSGGTFNISVSGDIDGLITQALLTGNFESAVDLCLHDNRMADAIILAIAGGQELLARTQKKYFAKSQSKITRLITAVVMKNWKEIVESCDLKNWREALAAVLTYAKPDEFSALCDLLGTRLENEGDSLLQTQACLCYICAGNVEKLVACWTKAQDGSHPLSLQDLIEKVVILRKAVQLTQAMDTSTVGVLLAAKMSQYANLLAAQGSIAAALAFLPDNTNQPNIMQLRDRLCRAQGEPVAGHESPKIPYEKQQLPKGRPGPVAGHHQMPRVQTQQYYPHGENPPPPGFIMHGNVNPNAAGQLPTSPGHMHTQVPPYPQPQPYQPAQPASSSPLRFICGECPIQVYHVLNLLYHILLYLFYV

SEQ ID NO: 7674 - protein, 947 aa, Artificial Sequence
  Synthetic polypeptide
MKLKEVDRTAMQAWSPAQNHPIYLATGTSAQQLDATFSTNASLEIFELDLSDPSLDMKSCATFSSSHRYHKLIWGPYKMDSKGDVSGVLIAGGENGNIILYDPSKIIAGDKEVVIAQNDKHTGPVRALDVNIFQTNLVASGANESEIYIWDLNNFATPMTPGAKTQPPEDISCIAWNRQVQHILASASPSGRATVWDLRKNEPIIKVSDHSNRMHCSGLAWHPDVATQMVLASEDDRLPVIQMWDLRFASSPLRVLENHARGILAIAWSMADPELLLSCGKDAKILCSNPNTGEVLYELPTNTQWCFDIQWCPRNPAVLSAASFDGRISVYSIMGGSTDGLRQKQVDKLSSSFGNLDPFGTGQPLPPLQIPQQTAQHSIVLPLKKPPKWIRRPVGASFSFGGKLVTFENVRMPSHQGAEQQQQQHHVFISQVVTEKEFLSRSDQLQQAVQSQGFINYCQKKIDASQTEFEKNVWSFLKVNFEDDSRGKYLELLGYRKEDLGKKIALALNKVDGANVALKDSDQVAQSDGEESPAAEEQLLGEHIKEEKEESEFLPSSGGTFNISVSGDIDGLITQALLTGNFESAVDLCLHDNRMADAIILAIAGGQELLARTQKKYFAKSQSKITRLITAVVMKNWKEIVESCDLKNWREALAAVLTYAKPDEFSALCDLLGTRLENEGDSLLQTQACLCYICAGNVEKLVACWTKAQDGSHPLSLQDLIEKVVILRKAVQLTQAMDTSTVGVLLAAKMSQYANLLAAQGSIAAALAFLPDNTNQPNIMQLRDRLCRAQGEPVAGHESPKIPYEKQQLPKGRPGPVAGHHQMPRVQTQQYYPHVRIAPTVTTWSNKTPTALPSHPPAASPSDTQGENPPPPGFIMHGNVNPNAAGQLPTSPGHMHTQVPPYPQPQPYQPAQPASSSPLRFICGECPIQVYHVLNLLYHILLYLFYV

SEQ ID NO: 7675 - protein, 680 aa, Artificial Sequence
  Synthetic polypeptide
MVKLVLLSIVLLKVTVPKLSNDLLQLDFMPIHRGILAIAWSMADPELLLSCGKDAKILCSNPNTGEVLYELPTNTQWCFDIQWCPRNPAVLSAASFDGRISVYSIMGGSTDGLRQKQVDKLSSSFGNLDPFGTGQPLPPLQIPQQTAQHSIVLPLKKPPKWIRRPVGASFSFGGKLVTFENVRMPSHQGAEQQQQQHHVFISQVVTEKEFLSRSDQLQQAVQSQGFINYCQKKIDASQTEFEKNVWSFLKVNFEDDSRGKYLELLGYRKEDLGKKHIKEEKEESEFLPSSGGTFNISVSGDIDGLITQALLTGNFESAVDLCLHDNRMADAIILAIAGGQELLARTQKKYFAKSQSKITRLITAVVMKNWKEIVESCDLKNWREALAAVLTYAKPDEFSALCDLLGTRLENEGDSLLQTQACLCYICAGNVEKLVACWTKAQDGSHPLSLQDLIEKVVILRKAVQLTQAMDTSTVGVLLAAKMSQYANLLAAQGSIAAALAFLPDNTNQPNIMQLRDRLCRAQGEPVAGHESPKIPYEKQQLPKGRPGPVAGHHQMPRVQTQQYYPHVRIAPTVTTWSNKTPTALPSHPPAASPSDTQGENPPPPGFIMHGNVNPNAAGQLPTSPGHMHTQVPPYPQPQPYQPAQPASSSPLRFICGECPIQVYHVLNLLYHILLYLFYV

SEQ ID NO: 7676 - protein, 147 aa, Artificial Sequence
  Synthetic polypeptide
MLGSRAAGFARGLRAVALAWLPGWRGRSFALARAAGAPHGGDLQPPACPEPRGRQLSLSAAAVVDSAPRPLQPYLRLMRLDKPIGTWLLYLPCTWSIGLAAEPGCFPDWYMLSLFGTGAILMRGAGCTINDMWDQDYDKKDPVKKIK

SEQ ID NO: 7677 - protein, 44 aa, Artificial Sequence
  Synthetic polypeptide
GCFPDWYMLSLFGTGAILMRGAGCTINDMWDQDYDKKDPVKKIK

SEQ ID NO: 7678 - protein, 197 aa, Artificial Sequence
  Synthetic polypeptide
MTPISQVRMRKGSAHTAAQPGRLGLHPAGATAHACRGMTSIRARPGLTSAMLGSRAAGFARGLRAVALAWLPGWRGRSFALARAAGAPHGGDLQPPACPEPRGRQLSLSAAAVVDSAPRPLQPYLRLMRLDKPIGTWLLYLPCTWSIGLAAEPGCFPDWYMLSLFGTGAILMRGAGCTINDMWDQDYDKKDPVKKIK

SEQ ID NO: 7679 - protein, 160 aa, Artificial Sequence
  Synthetic polypeptide
MTSIRARPGLTSAMLGSRAAGFARGLRAVALAWLPGWRGRSFALARAAGAPHGGDLQPPACPEPRGRQLSLSAAAVVDSAPRPLQPYLRLMRLDKPIGTWLLYLPCTWSIGLAAEPGCFPDWYMLSLFGTGAILMRGAGCTINDMWDQDYDKKDPVKKIK

SEQ ID NO: 7680 - protein, 1284 aa, Artificial Sequence
  Synthetic polypeptide
MSLLQSALDFLAGPGSLGGASGRDQSDFVGQTVELGELRLRVRRVLAEGGFAFVYEAQDVGSGREYALKRLLSNEEEKNRAIIQEVCFMKKLSGHPNIVQFCSAASIGKEESDTGQAEFLLLTELCKGQLVEFLKKMESRGPLSCDTVLKIFYQTCRAVQHMHRQKPPIIHRDLKVENLLLSNQGTIKLCDFGSATTISHYPDYSWSAQRRALVEEEITRNTTPMYRTPEIIDLYSNFPIGEKQDIWALGCILYLLCFRQHPFEDGAKLRIVNGKYSIPPHDTQYTVFHSLIRAMLQVNPEERLSIAEVVHQLQEIAAARNVNPKSPITELLEQNGGYGSATLSRGPPPPVGPAGSGYSGGLALAEYDQPYGGFLDILRGGTERLFTNLKDTSSKVIQSVANYAKGDLDISYITSRIAVMSFPAEGVESALKNNIEDVRLFLDSKHPGHYAVYNLSPRTYRPSRFHNRVSECGWAARRAPHLHTLYNICRNMHAWLRQDHKNVCVVHCMDGRAASAVAVCSFLCFCRLFSTAEAAVYMFSMKRCPPGIWPSHKRYIEYMCDMVAEEPITPHSKPILVRAVVMTPVPLFSKQRSGCRPFCEVYVGDERVASTSQEYDKMRDFKIEDGKAVIPLGVTVQGDVLIVIYHARSTLGGRLQAKMASMKMFQIQFHTGFVPRNATTVKFAKYDLDACDIQEKYPDLFQVNLEVEVEPRDRPSREAPPWENSSMRGLNPKILFSSREEQQDILSKFGKPELPRQPGSTAQYDAGAGSPEAEPTDSDSPPSSSADASRFLHTLDWQEEKEAETGAENASSKESESALMEDRDESEVSDEGGSPISSEGQEPRADPEPPGLAAGLVQQDLVFEVETPAVLPEPVPQEDGVDLLGLHSEVGAGPAVPPQACKAPSSNTDLLSCLLGPPEAASQGPPEDLLSEDPLLLASPAPPLSVQSTPRGGPPAAADPFGPLLPSSGNNSQPCSNPDLFGEFLNSDSVTVPPSFPSAHSAPPPSCSADFLHLGDLPGEPSKMTASSSNPDLLGGWAAWTETAASAVAPTPATEGPLFSPGGQPAPCGSQASWTKSQNPDPFADLGDLSSGLQGSPAGFPPGGFIPKTATTPKGSSSWQTSRPPAQGASWPPQAKPPPKACTQPRPNYASNFSVIGAREERGVRAPSFAQKPKVSENDFEDLLSNQGFSSRSDKKGPKTIAEMRKQDLAKDTDPLKLKLLDWIEGKERNIRALLSTLHTVLWDGESRWTPVGMADLVAPEQVKKHYRRAVLAVHPDKVLTQEK

SEQ ID NO: 7681 - protein, 1205 aa, Artificial Sequence
  Synthetic polypeptide
MSLLQSALDFLAGPGSLGGASGRDQSDFVGQTVELGELRLRVRRVLAEGQLVEFLKKMESRGPLSCDTVLKIFYQTCRAVQHMHRQKPPIIHRDLKVENLLLSNQGTIKLCDFGSATTISHYPDYSWSAQRRALVEEEITRNTTPMYRTPEIIDLYSNFPIGEKQDIWALGCILYLLCFRQHPFEDGAKLRIVNGKYSIPPHDTQYTVFHSLIRAMLQVNPEERLSIAEVVHQLQEIAAARNVNPKSPITELLEQNGGYGSATLSRGPPPPVGPAGSGYSGGLALAEYDQPYGGFLDILRGGTERLFTNLKDTSSKVIQSVANYAKGDLDISYITSRIAVMSFPAEGVESALKNNIEDVRLFLDSKHPGHYAVYNLSPRTYRPSRFHNRVSECGWAARRAPHLHTLYNICRNMHAWLRQDHKNVCVVHCMDGRAASAVAVCSFLCFCRLFSTAEAAVYMFSMKRCPPGIWPSHKRYIEYMCDMVAEEPITPHSKPILVRAVVMTPVPLFSKQRSGCRPFCEVYVGDERVASTSQEYDKMRDFKIEDGKAVIPLGVTVQGDVLIVIYHARSTLGGRLQAKMASMKMFQIQFHTGFVPRNATTVKFAKYDLDACDIQEKYPDLFQVNLEVEVEPRDRPSREAPPWENSSMRGLNPKILFSSREEQQDILSKFGKPELPRQPGSTAQYDAGAGSPEAEPTDSDSPPSSSADASRFLHTLDWQEEKEAETGAENASSKESESALMEDRDESEVSDEGGSPISSEGQEPRADPEPPGLAAGLVQQDLVFEVETPAVLPEPVPQEDGVDLLGLHSEVGAGPAVPPQACKAPSSNTDLLSCLLGPPEAASQGPPEDLLSEDPLLLASPAPPLSVQSTPRGGPPAAADPFGPLLPSSGNNSQPCSNPDLFGEFLNSDSVTVPPSFPSAHSAPPPSCSADFLHLGDLPGEPSKMTASSSNPDLLGGWAAWTETAASAVAPTPATEGPLFSPGGQPAPCGSQASWTKSQNPDPFADLGDLSSGLQGSPAGFPPGGFIPKTATTPKGSSSWQTSRPPAQGASWPPQAKPPPKACTQPRPNYASNFSVIGAREERGVRAPSFAQKPKVSENDFEDLLSNQGFSSRSDKKGPKTIAEMRKQDLAKDTDPLKLKLLDWIEGKERNIRALLSTLHTVLWDGESRWTPVGMADLVAPEQVKKHYRRAVLAVHPDKVLTQEK

SEQ ID NO: 7682 - protein, 55 aa, Artificial Sequence
  Synthetic polypeptide
RWAQGQLYPRRPARPPPATPTCSAASLGPLRPPPRGPRRICSARTRCSWQARPLP

SEQ ID NO: 7683 - protein, 63 aa, Artificial Sequence
  Synthetic polypeptide
MEGESTSAVLSGFVLGALAFQHLNTDSDTHFGTRRQEDHLSPGVQDQRGQHKETSCLQKNFKN

SEQ ID NO: 7684 - protein, 194 aa, Artificial Sequence
  Synthetic polypeptide
MCIKFSSVIAKKNERWHSDGIVYPKPTWLGEELLAKLAKWSVENKKSDFKSTLSLISIMKYSKAYQELKEKYKEMVKVWPEVTDPEKFVYEDVAIAAYLLILWEEERAERRLTARQSFVDLGCGNGLLVHILSSEGHPGRGIDVRRRKIWDMYGPQTQLEPLDQRVTRTFKPHYAQYSMERIGCCGRELQERIS

SEQ ID NO: 7685 - protein, 435 aa, Artificial Sequence
  Synthetic polypeptide
MAEVGRTGISYPGALLPQGFWAAVEVWLERPQVANKRLCGARLEARWSAALPCAEARGPGTSAGSEQKERGPGPGQGSPGGGPGPRSLSGPEQGTACCELEEAQGQCQQEEAQREAASVPLRDSGHPGHAEGREGDFPAADLDSLWEDFSQSLARGNSELLAFLTSSGAGSQPEAQRELDVVLRTVIPKTSPHCPLTTPRREIVVQDVLNGTITFLPLEEDDEGNLKVKMSNVYQIQLSHSKEEWFISVLIFCPERWHSDGIVYPKPTWLGEELLAKLAKWSVENKKSDFKSTLSLISIMKYSKAYQELKEKYKEMVKVWPEVTDPEKFVYEDVAIAAYLLILWEEERAERRLTARQSFVDLGCGNGLLVHILSSEGHPGRGIDVRRRKIWDMYGPQTQLEPLDQRVTRTFKPHYAQYSMERIGCCGRELQERIS

SEQ ID NO: 7686 - protein, 645 aa, Artificial Sequence
  Synthetic polypeptide
MNMVKRIMGRPRQEECSPQDNALGLMHLRRLFTELCHPPRHMTQKEQEEKLYMMLPVFNRVFGNAPPNTMTEKFSDLLQFTTQVSRLMVTEIRRRASNKSTEAASRAIVQFLEINQSEEASRGWMLLTTINLLASSGQKTVDCMTTMSVPSTLVKCLYLFFDLPHVPEAVGGAQNELPLAERRGLLQKVFVQILVKLCSFVSPAEELAQKDDLQLLFSAITSWCPPYNLPWRKSAGEVLMTISRHGLSVNVVKYIHEKECLSTCVQNMQQSDDLSPLEIVEMFAGLSCFLKDSSDVSQTLLDDFRIWQGYNFLCDLLLRLEQAKEAESKDALKDLVNLITSLTTYGVSELKPAGITTGAPFLLPGFAVPQPAGKGHSVRNVQAFAVLQNAFLKAKTSFLAQIILDAITNIYMADNANYFILESQHTLSQFAEKISKLPEVQNKYFEMLEFVVFSLNYIPCKELISVSILLKSSSSYHCSIIAMKTLLKFTRHDYIFKDVFREVGLLEVMVNLLHKYAALLKDPTQALNEQGDSRNNSSVEDQKHLALLVMETLTVLLQGSNTNAGIFREFGGARCAHNIVKYPQCRQHALMTIQQLVLSPNGDDDMGTLLGLMHSAPPTELQLKTDILRDSGLLDSRTRAEKETK

SEQ ID NO: 7687 - protein, 67 aa, Artificial Sequence
  Synthetic polypeptide
MPPPLPLLLLTVLVVAAARPGCEFERNPAGECHRPPAADSGGVLNESCEMVSKVTWEPTNVKCSGQG

SEQ ID NO: 7688 - protein, 2127 aa, Artificial Sequence
  Synthetic polypeptide
MHVSLAEALEVRGGPLQEEEIWAVLNQSAESLQELFRKVSLADPAALGFIISPWSLLLLPSGSVSFTDENISNQDLRAFTAPEVLQNQSLTSLSDVEKIHIYSLGMTLYWGADYEVPQSQPIKLGDHLNSILLGMCEDVIYARVSVRTVLDACSAHIRNSNCAPSFSYVKHLVKLVLGNLSGTDQLSCNSEQKPDRSQAIRDRLRGKGLPTGRSSTSDVLDIQKPPLSHQTFLNKGLSKSMGFLSIKDTQDENYFKDILSDNSGREDSENTFSPYQFKTSGPEKKPIPGIDVLSKKKIWASSMDLLCTADRDFSSGETATYRRCHPEAVTVRTSTTPRKKEARYSDGSIALDIFGPQKMDPIYHTRELPTSSAISSALDRIRERQKKLQVLREAMNVEEPVRRYKTYHGDVFSTSSESPSIISSESDFRQVRRSEASKRFESSSGLPGVDETLSQGQSQRPSRQYETPFEGNLINQEIMLKRQEEELMQLQAKMALRQSRLSLYPGDTIKASMLDITRDPLREIALETAMTQRKLRNFFGPEFVKMTIEPFISLDLPRSILTKKGKNEDNRRKVNIMLLNGQRLELTCDTKTICKDVFDMVVAHIGLVEHHLFALATLKDNEYFFVDPDLKLTKVAPEGWKEEPKKKTKATVNFTLFFRIKFFMDDVSLIQHTLTCHQYYLQLRKDILEERMHCDDETSLLLASLALQAEYGDYQPEVHGVSYFRMEHYLPARVMEKLDLSYIKEELPKLHNTYVGASEKETELEFLKVCQRLTEYGVHFHRVHPEKKSQTGILLGVCSKGVLVFEVHNGVRTLVLRFPWRETKKISFSKKKITLQNTSDGIKHGFQTDNSKICQYLLHLCSYQHKFQLQMRARQSNQDAQDIERASFRSLNLQAESVRGFNMGRAISTGSLASSTLNKLAVRPLSVQAEILKRLSCSELSLYQPLQNSSKEKNDKASWEEKPREMSKSYHDLSQASLYPHRKNVIVNMEPPPQTVAELVGKPSHQMSRSDAESLAGVTKLNNSKSVASLNRSPERRKHESDSSSIEDPGQAYVLDVLHKRWSIVSSPEREITLVNLKKDAKYGLGFQIIGGEKMGRLDLGIFISSVAPGGPADLDGCLKPGDRLISVNSVSLEGVSHHAAIEILQNAPEDVTLVISQPKEKISKVPSTPVHLTNEMKNYMKKSSYMQDSAIDSSSKDHHWSRGTLRHISENSFGPSGGLREGSLSSQDSRTESASLSQSQVNGFFASHLGDQTWQESQHGSPSPSVISKATEKETFTDSNQSKTKKPGISDVTDYSDRGDSDMDEATYSSSQDHQTPKQESSSSVNTSNKMNFKTFSSSPPKPGDIFEVELAKNDNSLGISVTGGVNTSVRHGGIYVKAVIPQGAAESDGRIHKGDRVLAVNGVSLEGATHKQAVETLRNTGQVVHLLLEKGQSPTSKEHVPVTPQCTLSDQNAQGQGPEKVKKTTQVKDYSFVTEENTFEVKLFKNSSGLGFSFSREDNLIPEQINASIVRVKKLFPGQPAAESGKIDVGDVILKVNGASLKGLSQQEVISALRGTAPEVFLLLCRPPPGVLPEIDTALLTPLQSPAQVLPNSSKDSSQPSCVEQSTSSDENEMSDKSKKQCKSPSRRDSYSDSSGSGEDDLVTAPANISNSTWSSALHQTLSNMVSQAQSHHEAPKSQEDTICTMFYYPQKIPNKPEFEDSNPSPLPPDMAPGQSYQPQSESASSSSMDKYHIHHISEPTRQENWTPLKNDLENHLEDFELEVELLITLIKSEKGSLGFTVTKGNQRIGCYVHDVIQDPAKSDGRLKPGDRLIKVNDTDVTNMTHTDAVNLLRAASKTVRLVIGRVLELPRIPMLPHLLPDITLTCNKEELGFSLCGGHDSLYQVVYISDINPRSVAAIEGNLQLLDVIHYVNGVSTQGMTLEEVNRALDMSLPSLVLKATRNDLPVVPSSKRSAVSAPKSTKGNGSYSVGSCSQPALTPNDSFSTVAGEEINEISYPKGKCSTYQIKGSPNLTLPKESYIQEDDIYDDSQEAEVIQSLLDVVDEEAQNLLNENNAAGYSCGPGTLKMNGKLSEERTEDTDCDGSPLPEYFTESQQPADQEILSHVWLSGSQAHGALLTASAAV

SEQ ID NO: 7689 - protein, 2151 aa, Artificial Sequence
  Synthetic polypeptide
MHVSLAEALEVRGGPLQEEEIWAVLNQSAESLQELFRKVSLADPAALGFIISPWSLLLLPSGSVSFTDENISNQDLRAFTAPEVLQNQSLTSLSDVEKIHIYSLGMTLYWGADYEVPQSQPIKLGDHLNSILLGMCEDVIYARVSVRTVLDACSAHIRNSNCAPSFSYVKHLVKLVLGNLSGTDQLSCNSEQKPDRSQAIRDRLRGKGLPTGRSSTSDVLDIQKPPLSHQTFLNKGLSKSMGFLSIKDTQDENYFKDILSDNSGREDSENTFSPYQFKTSGPEKKPIPGIDVLSKKKIWASSMDLLCTADRDFSSGETATYRRCHPEAVTVRTSTTPRKKEARYSDGSIALDIFGPQKMDPIYHTRELPTSSAISSALDRIRERQKKLQVLREAMNVEEPVRRYKTYHGDVFSTSSESPSIISSESDFRQVRRSEASKRFESSSGLPGVDETLSQGQSQRPSRQYETPFEGNLINQEIMLKRQEEELMQLQAKMALRQSRLSLYPGDTIKASMLDITRDPLREIALETAMTQRKLRNFFGPEFVKMTIEPFISLDLPRSILTKKGKNEDNRRKVNIMLLNGQRLELTCDTKTICKDVFDMVVAHIGLVEHHLFALATLKDNEYFFVDPDLKLTKVAPEGWKEEPKKKTKATVNFTLFFRIKFFMDDVSLIQHTLTCHQYYLQLRKDILEERMHCDDETSLLLASLALQAEYGDYQPEVHGVSYFRMEHYLPARVMEKLDLSYIKEELPKLHNTYVGASEKETELEFLKVCQRLTEYGVHFHRVHPEKKSQTGILLGVCSKGVLVFEVHNGVRTLVLRFPWRETKKISFSKKKITLQNTSDGIKHGFQTDNSKICQYLLHLCSYQHKFQLQMRARQSNQDAQDIERASFRSLNLQAESVRGFNMGRAISTGSLASSTLNKLAVRPLSVQAEILKRLSCSELSLYQPLQNSSKEKNDKASWEEKPREMSKSYHDLSQASLYPHRKNVIVNMEPPPQTVAELVGKPSHQMSRSDAESLAGVTKLNNSKSVASLNRSPERRKHESDSSSIEDPGQAYVLGMTMHSSGNSSSQVPLKENDVLHKRWSIVSSPEREITLVNLKKDAKYGLGFQIIGGEKMGRLDLGIFISSVAPGGPADLDGCLKPGDRLISVNSVSLEGVSHHAAIEILQNAPEDVTLVISQPKEKISKVPSTPVHLTNEMKNYMKKSSYMQDSAIDSSSKDHHWSRGTLRHISENSFGPSGGLREGSLSSQDSRTESASLSQSQVNGFFASHLGDQTWQESQHGSPSPSVISKATEKETFTDSNQSKTKKPGISDVTDYSDRGDSDMDEATYSSSQDHQTPKQESSSSVNTSNKMNFKTFSSSPPKPGDIFEVELAKNDNSLGISVTVLFDKGGVNTSVRHGGIYVKAVIPQGAAESDGRIHKGDRVLAVNGVSLEGATHKQAVETLRNTGQVVHLLLEKGQSPTSKEHVPVTPQCTLSDQNAQGQGPEKVKKTTQVKDYSFVTEENTFEVKLFKNSSGLGFSFSREDNLIPEQINASIVRVKKLFPGQPAAESGKIDVGDVILKVNGASLKGLSQQEVISALRGTAPEVFLLLCRPPPGVLPEIDTALLTPLQSPAQVLPNSSKDSSQPSCVEQSTSSDENEMSDKSKKQCKSPSRRDSYSDSSGSGEDDLVTAPANISNSTWSSALHQTLSNMVSQAQSHHEAPKSQEDTICTMFYYPQKIPNKPEFEDSNPSPLPPDMAPGQSYQPQSESASSSSMDKYHIHHISEPTRQENWTPLKNDLENHLEDFELEVELLITLIKSEKGSLGFTVTKGNQRIGCYVHDVIQDPAKSDGRLKPGDRLIKVNDTDVTNMTHTDAVNLLRAASKTVRLVIGRVLELPRIPMLPHLLPDITLTCNKEELGFSLCGGHDSLYQVVYISDINPRSVAAIEGNLQLLDVIHYVNGVSTQGMTLEEVNRALDMSLPSLVLKATRNDLPVVPSSKRSAVSAPKSTKGNGSYSVGSCSQPALTPNDSFSTVAGEEINEISYPKGKCSTYQIKGSPNLTLPKESYIQEDDIYDDSQEAEVIQSLLDVVDEEAQNLLNENNAAGYSCGPGTLKMNGKLSEERTEDTDCDGSPLPEYFTESQQPADQEILSHVWLSGSQAHGALLTASAAV

SEQ ID NO: 7690 - protein, 1955 aa, Artificial Sequence
  Synthetic polypeptide
MHVSLAEALEVRGGPLQEEEIWAVLNQSAESLQELFRKVSLADPAALGFIISPWSLLLLPSGSVSFTDENISNQDLRAFTAPEVLQNQSLTSLSDVEKIHIYSLGMTLYWGADYEVPQSQPIKLGDHLNSILLGMCEDVIYARVSVRTVLDACSAHIRNSNCAPSFSYVKHLVKLVLGNLSGTDQLSCNSEQKPDRSQAIRDRLRGKGLPTGRSSTSDVLDIQKPPLSHQTFLNKGLSKSMGFLSIKDTQDENYFKDILSDNSGREDSENTFSPYQFKTSGPEKKPIPGIDVLSKKKIWASSMDLLCTADRDFSSGETATYRRCHPEAVTVRTSTTPRKKEARYSDGSIALDIFGPQKMDPIYHTRELPTSSAISSALDRIRERQKKLQVLREAMNVEEPVRRYKTYHGDVFSTSSESPSIISSESDFRQVRRSEASKRFESSSGLPGVDETLSQGQSQRPSRQYETPFEGNLINQEIMLKRQEEELMQLQAKMALRQSRLSLYPGDTIKASMLDITRDPLREIALETAMTQRKLRNFFGPEFVKMTIEPFISLDLPRSILTKKGKNEDNRRKVNIMLLNGQRLELTCDTKTICKDVFDMVVAHIGLVEHHLFALATLKDNEYFFVDPDLKLTKVAPEGWKEEPKKKTKATVNFTLFFRIKFFMDDVSLIQHTLTCHQYYLQLRKDILEERMHCDDETSLLLASLALQAEYGDYQPEVHGVSYFRMEHYLPARVMEKLDLSYIKEELPKLHNTYVGASEKETELEFLKVCQRLTEYGVHFHRVHPEKKSQTGILLGVCSKGVLVFEVHNGVRTLVLRFPWRETKKISFSKKKITLQNTSDGIKHGFQTDNSKICQYLLHLCSYQHKFQLQMRARQSNQDAQDIDVLHKRWSIVSSPEREITLVNLKKDAKYGLGFQIIGGEKMGRLDLGIFISSVAPGGPADLDGCLKPGDRLISVNSVSLEGVSHHAAIEILQNAPEDVTLVISQPKEKISKVPSTPVHLTNEMKNYMKKSSYMQDSAIDSSSKDHHWSRGTLRHISENSFGPSGGLREGSLSSQDSRTESASLSQSQVNGFFASHLGDQTWQESQHGSPSPSVISKATEKETFTDSNQSKTKKPGISDVTDYSDRGDSDMDEATYSSSQDHQTPKQESSSSVNTSNKMNFKTFSSSPPKPGDIFEVELAKNDNSLGISVTGGVNTSVRHGGIYVKAVIPQGAAESDGRIHKGDRVLAVNGVSLEGATHKQAVETLRNTGQVVHLLLEKGQSPTSKEHVPVTPQCTLSDQNAQGQGPEKVKKTTQVKDYSFVTEENTFEVKLFKNSSGLGFSFSREDNLIPEQINASIVRVKKLFPGQPAAESGKIDVGDVILKVNGASLKGLSQQEVISALRGTAPEVFLLLCRPPPGVLPEIDTALLTPLQSPAQVLPNSSKDSSQPSCVEQSTSSDENEMSDKSKKQCKSPSRRDSYSDSSGSGEDDLVTAPANISNSTWSSALHQTLSNMVSQAQSHHEAPKSQEDTICTMFYYPQKIPNKPEFEDSNPSPLPPDMAPGQSYQPQSESASSSSMDKYHIHHISEPTRQENWTPLKNDLENHLEDFELEVELLITLIKSEKGSLGFTVTKGNQRIGCYVHDVIQDPAKSDGRLKPGDRLIKVNDTDVTNMTHTDAVNLLRAASKTVRLVIGRVLELPRIPMLPHLLPDITLTCNKEELGFSLCGGHDSLYQVVYISDINPRSVAAIEGNLQLLDVIHYVNGVSTQGMTLEEVNRALDMSLPSLVLKATRNDLPVVPSSKRSAVSAPKSTKGNGSYSVGSCSQPALTPNDSFSTVAGEEINEISYPKGKCSTYQIKGSPNLTLPKESYIQEDDIYDDSQEAEVIQSLLDVVDEEAQNLLNENNAAGYSCGPGTLKMNGKLSEERTEDTDCDGSPLPEYFTESQQPADQEILSHVWLSGSQAHGALLTASAAV

SEQ ID NO: 7691 - protein, 2146 aa, Artificial Sequence
  Synthetic polypeptide
MHVSLAEALEVRGGPLQEEEIWAVLNQSAESLQELFRKVSLADPAALGFIISPWSLLLLPSGSVSFTDENISNQDLRAFTAPEVLQNQSLTSLSDVEKIHIYSLGMTLYWGADYEVPQSQPIKLGDHLNSILLGMCEDVIYARVSVRTVLDACSAHIRNSNCAPSFSYVKHLVKLVLGNLSGTDQLSCNSEQKPDRSQAIRDRLRGKGLPTGRSSTSDVLDIQKPPLSHQTFLNKGLSKSMGFLSIKDTQDENYFKDILSDNSGREDSENTFSPYQFKTSGPEKKPIPGIDVLSKKKIWASSMDLLCTADRDFSSGETATYRRCHPEAVTVRTSTTPRKKEARYSDGSIALDIFGPQKMDPIYHTRELPTSSAISSALDRIRERQKKLQVLREAMNVEEPVRRYKTYHGDVFSTSSESPSIISSESDFRQVRRSEASKRFESSSGLPGVDETLSQGQSQRPSRQYETPFEGNLINQEIMLKRQEEELMQLQAKMALRQSRLSLYPGDTIKASMLDITRDPLREIALETAMTQRKLRNFFGPEFVKMTIEPFISLDLPRSILTKKGKNEDNRRKVNIMLLNGQRLELTCDTKTICKDVFDMVVAHIGLVEHHLFALATLKDNEYFFVDPDLKLTKVAPEGWKEEPKKKTKATVNFTLFFRIKFFMDDVSLIQHTLTCHQYYLQLRKDILEERMHCDDETSLLLASLALQAEYGDYQPEVHGVSYFRMEHYLPARVMEKLDLSYIKEELPKLHNTYVGASEKETELEFLKVCQRLTEYGVHFHRVHPEKKSQTGILLGVCSKGVLVFEVHNGVRTLVLRFPWRETKKISFSKKKITLQNTSDGIKHGFQTDNSKICQYLLHLCSYQHKFQLQMRARQSNQDAQDIERASFRSLNLQAESVRGFNMGRAISTGSLASSTLNKLAVRPLSVQAEILKRLSCSELSLYQPLQNSSKEKNDKASWEEKPREMSKSYHDLSQASLYPHRKNVIVNMEPPPQTVAELVGKPSHQMSRSDAESLAGVTKLNNSKSVASLNRSPERRKHESDSSSIEDPGQAYVLGMTMHSSGNSSSQVPLKENDVLHKRWSIVSSPEREITLVNLKKDAKYGLGFQIIGGEKMGRLDLGIFISSVAPGGPADLDGCLKPGDRLISVNSVSLEGVSHHAAIEILQNAPEDVTLVISQPKEKISKVPSTPVHLTNEMKNYMKKSSYMQDSAIDSSSKDHHWSRGTLRHISENSFGPSGGLREGSLSSQDSRTESASLSQSQVNGFFASHLGDQTWQESQHGSPSPSVISKATEKETFTDSNQSKTKKPGISDVTDYSDRGDSDMDEATYSSSQDHQTPKQESSSSVNTSNKMNFKTFSSSPPKPGDIFEVELAKNDNSLGISVTGGVNTSVRHGGIYVKAVIPQGAAESDGRIHKGDRVLAVNGVSLEGATHKQAVETLRNTGQVVHLLLEKGQSPTSKEHVPVTPQCTLSDQNAQGQGPEKVKKTTQVKDYSFVTEENTFEVKLFKNSSGLGFSFSREDNLIPEQINASIVRVKKLFPGQPAAESGKIDVGDVILKVNGASLKGLSQQEVISALRGTAPEVFLLLCRPPPGVLPEIDTALLTPLQSPAQVLPNSSKDSSQPSCVEQSTSSDENEMSDKSKKQCKSPSRRDSYSDSSGSGEDDLVTAPANISNSTWSSALHQTLSNMVSQAQSHHEAPKSQEDTICTMFYYPQKIPNKPEFEDSNPSPLPPDMAPGQSYQPQSESASSSSMDKYHIHHISEPTRQENWTPLKNDLENHLEDFELEVELLITLIKSEKGSLGFTVTKGNQRIGCYVHDVIQDPAKSDGRLKPGDRLIKVNDTDVTNMTHTDAVNLLRAASKTVRLVIGRVLELPRIPMLPHLLPDITLTCNKEELGFSLCGGHDSLYQVVYISDINPRSVAAIEGNLQLLDVIHYVNGVSTQGMTLEEVNRALDMSLPSLVLKATRNDLPVVPSSKRSAVSAPKSTKGNGSYSVGSCSQPALTPNDSFSTVAGEEINEISYPKGKCSTYQIKGSPNLTLPKESYIQEDDIYDDSQEAEVIQSLLDVVDEEAQNLLNENNAAGYSCGPGTLKMNGKLSEERTEDTDCDGSPLPEYFTESQQPADQEILSHVWLSGSQAHGALLTASAAV

SEQ ID NO: 7692 - protein, 19 aa, Artificial Sequence
  Synthetic polypeptide
MAFTERVNSSGNSLLVTGH

SEQ ID NO: 7693 - protein, 66 aa, Artificial Sequence
  Synthetic polypeptide
MAFTERVNSSGNRNPTYKGCEGPLQGELKTTAQGNKRGHKQMEKHSVLMDRKNQYRENGHTAQSNL

SEQ ID NO: 7694 - protein, 24 aa, Artificial Sequence
  Synthetic polypeptide
MAFTERVNSSGNSAQWCPGWSAVV

SEQ ID NO: 7695 - protein, 73 aa, Artificial Sequence
  Synthetic polypeptide
MAFTERVNSSGNSLPWPPKVPRLQPLPGRHPVWEVRSVSARPPIVWDVRSPSAWLPSLESEERLCLAAIPSGK

SEQ ID NO: 7696 - protein, 26 aa, Artificial Sequence
  Synthetic polypeptide
MAFTERVNSSGNRENSQNQIEEHSTG

SEQ ID NO: 7697 - protein, 49 aa, Artificial Sequence
  Synthetic polypeptide
MAGRLLGKALAAVSLSLALASVTIRSSRCRGIQAFREECSPADKLSLAE

SEQ ID NO: 7698 - protein, 276 aa, Artificial Sequence
  Synthetic polypeptide
MVNSSRVQPQQPGDAKRPPAPRAPDPGRLMAGCAAVGASLAAPGGLCEQRGLEIEMQRIRQAAARDPPAGAAASPSPPLSSCSRQAWSRDNPGFEAEEEEEEVEGEEGGMVVEMDVEWRPGSRRSAASSAVSSVGARSRGLGGYHGAGHPSGRRRRREDQGPPCPSPVGGGDPLHRHLPLEGQPPRVAWAERLVRGLRGLWGTRLMEESSTNREKYLKSVLRELVTYLLFLIVLCICYHTLKIEPQIPVSHVIMRVSDQYSTVYCIARWFCPTSLM

SEQ ID NO: 7699 - protein, 197 aa, Artificial Sequence
  Synthetic polypeptide
MSTAALITLVRSGGNQVRRRVLLSSRLLQDDRRVTPTCHSSTSEPRCSRFDPDGSGSPATWDNFGIWDNRIDEPILLPPSIKYGKPIPKISLENVGCASQIGKRKENEDRFDFAQLTDEVLYFAVYDGHGGPAAADFCHTHMEKCIMDLLPKEKNLETLLTLAFLEIDKAFSSHARLSADVCSTLHRTWQVLNNYLD

SEQ ID NO: 7700 - protein, 48 aa, Artificial Sequence
  Synthetic polypeptide
MPNYKLTYFNMRGRAEIIRYIFAYLDIQYEDHRIEQADWPEIKSKGSK

SEQ ID NO: 7701 - protein, 137 aa, Artificial Sequence
  Synthetic polypeptide
MRPLRPRAALLALLASLLAAPPVAPAEAPHLVHVDAARALWPLRRFWRSTGFCPPLPHSQADQYVLSWDQQLNLAYVGAVPHRGIKQVRTHWLLELVTTSLHSHHPVWAPYLSGQPPWPPASLPAPTLTPVSCQRDP

SEQ ID NO: 7702 - protein, 108 aa, Artificial Sequence
  Synthetic polypeptide
MRPLRPRAALLALLASLLAAPPVAPAEAPHLVHVDAARALWPLRRFWRSTGFCPPLPHSQADQYVLSWDQQLNLAYVGAVPHRGIKQVRTHWLLELVTTRPTSCLPAA

SEQ ID NO: 7703 - protein, 133 aa, Artificial Sequence
  Synthetic polypeptide
MRPLRPRAALLALLASLLAAPPVAPAEAPHLVHVDAARALWPLRRFWRSTGFCPPLPHSQADQYVLSWDQQLNLAYVGAVPHRGIKQVRTHWLLELVTTRAFALAMPSAAWMSSCWLVPLHGSLRCLLREVPR

SEQ ID NO: 7704 - protein, 72 aa, Artificial Sequence
  Synthetic polypeptide
LAHPGPGIGAGPSPGSAGPSPLPGMDGRWALLDPESIVRAFALAMPSAAWMSSCWLVPLHGSLRCLLREVPR

SEQ ID NO: 7705 - protein, 441 aa, Artificial Sequence
  Synthetic polypeptide
MARKQNRNSKELGLVPLTDDTSHAGPPGPGRALLECDHLRSGVPGGRRRKDWSCSLLVASLAGAFGSSFLYGYNLSVVNAPTPYIKAFYNESWERRHGRPIDPDTLTLLWSVTVSIFAIGGLVGTLIVKMIGKVLGRKHTLLANNGFAISAALLMACSLQAGAFEMLIVGRFIMGIDGGVALSVLPMYLSEISPKEIRGSLGQVTAIFICIGVFTGQLLGLPELLGKESTWPYLFGVIVVPAVVQLLSLPFLPDSPRYLLLEKHNEARAVKAFQTFLGKADVSQEVEEVLAESRVQRSIRLVSVLELLRAPYVRWQVVTVIVTMACYQLCGLNAIWFYTNSIFGKAGIPPAKIPYVTLSTGGIETLAAVFSGLVIEHLGRRPLLIGGFGLMGLFFGTLTITLTLQDHAPWVPYLSIVGILAIIASFCSGPASVSPSVQRQG

SEQ ID NO: 7706 - protein, 412 aa, Artificial Sequence
  Synthetic polypeptide
MKLSKKDRGEDEESDSAKKKLDWSCSLLVASLAGAFGSSFLYGYNLSVVNAPTPYIKAFYNESWERRHGRPIDPDTLTLLWSVTVSIFAIGGLVGTLIVKMIGKVLGRKHTLLANNGFAISAALLMACSLQAGAFEMLIVGRFIMGIDGGVALSVLPMYLSEISPKEIRGSLGQVTAIFICIGVFTGQLLGLPELLGKESTWPYLFGVIVVPAVVQLLSLPFLPDSPRYLLLEKHNEARAVKAFQTFLGKADVSQEVEEVLAESRVQRSIRLVSVLELLRAPYVRWQVVTVIVTMACYQLCGLNAIWFYTNSIFGKAGIPPAKIPYVTLSTGGIETLAAVFSGLVIEHLGRRPLLIGGFGLMGLFFGTLTITLTLQDHAPWVPYLSIVGILAIIASFCSGPASVSPSVQRQG

SEQ ID NO: 7707 - protein, 98 aa, Artificial Sequence
  Synthetic polypeptide
MDNLSDTLKKLKITAVDKTEDSLEGCLDCLLQALAQNKFMRIPCVDAGLISPLVQLLNSKDQEVLLQTGRALGNICYDSQAKVRGSLEPRSARLAWAS

SEQ ID NO: 7708 - protein, 140 aa, Artificial Sequence
  Synthetic polypeptide
MADNLSDTLKKLKITAVDKTEDSLEGCLDCLLQALAQNNTETSEKIQASGILQLFASLLTPQSSCKAKVANIIAEVAKNEFMRIPCVDAGLISPLVQLLNSKDQEVLLQTGRALGNICYDSQAKVRGSLEPRSARLAWAS

SEQ ID NO: 7709 - protein, 139 aa, Artificial Sequence
  Synthetic polypeptide
MDNLSDTLKKLKITAVDKTEDSLEGCLDCLLQALAQNNTETSEKIQASGILQLFASLLTPQSSCKAKVANIIAEVAKNEFMRIPCVDAGLISPLVQLLNSKDQEVLLQTGRALGNICYDSQAKVRGSLEPRSARLAWAS

SEQ ID NO: 7710 - protein, 366 aa, Artificial Sequence
  Synthetic polypeptide
MRPLRPRAALLALLASLLAAPPVAPAEAPHLVHVDAARALWPLRRFWRSTGFWGSTGRGLSYNFTHLDGYLDLLRENQLLPGFELMGSASGHFTDFEDKQQVFEWKDLVSSLARRYIGRYGLAHVSKWNFETWNEPDHHDFDNVSMTMQGFLNYYDACSEGLRAASPALRLGGPGDSFHTPPRSPLSWGLLRHCHDGTNFFTGEAGVRLDYISLHRKVRPAPPSAPVFCALSRCAPGRADPGGAEAAPPAGCAQLHLHPGAGEGRRAADPAALPQVRGHPHLQRRGGPAGGLVPATAVEGGRDLRGHGGEGGPAQRPARPPATFLPRRDRRAVAAPPGPSCPGHPQICCLVTHTRRHAVRTHTRMH

SEQ ID NO: 7711 - protein, 8 aa, Artificial Sequence
  Synthetic polypeptide
RTGNHPYS

SEQ ID NO: 7712 - protein, 42 aa, Artificial Sequence
  Synthetic polypeptide
MATVEPETTPTPNPPTTEEEKTESNQEVANPEHYIKHPLQNR

SEQ ID NO: 7713 - protein, 62 aa, Artificial Sequence
  Synthetic polypeptide
MLDLTSRGQVGTSRRMAEAACSAHFLETTPTPNPPTTEEEKTESNQEVANPEHYIKHPLQNR

SEQ ID NO: 7714 - protein, 70 aa, Artificial Sequence
  Synthetic polypeptide
MKKKQNKKERKKMRAEDGENDAIKKQAESLRESQETTPTPNPPTTEEEKTESNQEVANPEHYIKHPLQNR

SEQ ID NO: 7715 - protein, 50 aa, Artificial Sequence
  Synthetic polypeptide
MATVEPETTPTPNPPTTEEEKTESNQEVANPEHYIKHPLQNRCNAISDIM

SEQ ID NO: 7716 - protein, 70 aa, Artificial Sequence
  Synthetic polypeptide
MLDLTSRGQVGTSRRMAEAACSAHFLETTPTPNPPTTEEEKTESNQEVANPEHYIKHPLQNRCNAISDIM

SEQ ID NO: 7717 - protein, 8 aa, Artificial Sequence
  Synthetic polypeptide
RTGNHPYS

SEQ ID NO: 7718 - protein, 78 aa, Artificial Sequence
  Synthetic polypeptide
MKKKQNKKERKKMRAEDGENDAIKKQAESLRESQETTPTPNPPTTEEEKTESNQEVANPEHYIKHPLQNRCNAISDIM

SEQ ID NO: 7719 - protein, 8 aa, Artificial Sequence
  Synthetic polypeptide
RTGNHPYS

SEQ ID NO: 7720 - protein, 55 aa, Artificial Sequence
  Synthetic polypeptide
MATVEPETTPTPNPPTTEEEKTESNQEVANPEHYIKHPLQNRNCHSHPNLQQPLL

SEQ ID NO: 7721 - protein, 75 aa, Artificial Sequence
  Synthetic polypeptide
MLDLTSRGQVGTSRRMAEAACSAHFLETTPTPNPPTTEEEKTESNQEVANPEHYIKHPLQNRNCHSHPNLQQPLL

SEQ ID NO: 7722 - protein, 83 aa, Artificial Sequence
  Synthetic polypeptide
MKKKQNKKERKKMRAEDGENDAIKKQAESLRESQETTPTPNPPTTEEEKTESNQEVANPEHYIKHPLQNRNCHSHPNLQQPLL

SEQ ID NO: 7723 - protein, 8 aa, Artificial Sequence
  Synthetic polypeptide
RTGNHPYS

SEQ ID NO: 7724 - protein, 50 aa, Artificial Sequence
  Synthetic polypeptide
MATVEPETTPTPNPPTTEEEKTESNQEVANPEHYIKHPLQNSVWSSKEEF

SEQ ID NO: 7725 - protein, 70 aa, Artificial Sequence
  Synthetic polypeptide
MLDLTSRGQVGTSRRMAEAACSAHFLETTPTPNPPTTEEEKTESNQEVANPEHYIKHPLQNSVWSSKEEF

SEQ ID NO: 7726 - protein, 78 aa, Artificial Sequence
  Synthetic polypeptide
MKKKQNKKERKKMRAEDGENDAIKKQAESLRESQETTPTPNPPTTEEEKTESNQEVANPEHYIKHPLQNSVWSSKEEF

SEQ ID NO: 7727 - protein, 8 aa, Artificial Sequence
  Synthetic polypeptide
RTGNHPYS

SEQ ID NO: 7728 - protein, 71 aa, Artificial Sequence
  Synthetic polypeptide
MATVEPETTPTPNPPTTEEEKTESNQEVANPEHYIKHPLQNRFVEILCQAVLLMPCFQWHVLTWCLCVTFR

SEQ ID NO: 7729 - protein, 91 aa, Artificial Sequence
  Synthetic polypeptide
MLDLTSRGQVGTSRRMAEAACSAHFLETTPTPNPPTTEEEKTESNQEVANPEHYIKHPLQNRFVEILCQAVLLMPCFQWHVLTWCLCVTFR

SEQ ID NO: 7730 - protein, 99 aa, Artificial Sequence
  Synthetic polypeptide
MKKKQNKKERKKMRAEDGENDAIKKQAESLRESQETTPTPNPPTTEEEKTESNQEVANPEHYIKHPLQNRFVEILCQAVLLMPCFQWHVLTWCLCVTFR

SEQ ID NO: 7731 - protein, 139 aa, Artificial Sequence
  Synthetic polypeptide
MARKQNRNSKELGLVPLTDDTSHAGPPGPGRALLECDHLRSGVPGGRRRKDWSCSLLVASLAGAFGSSFLYGYNLSVVNAPTPYIKAFYNESWERRHGRPIDPDTLTLLWSVTVSIFAIGGLVGTLIVKMIGKVLGSSR

SEQ ID NO: 7732 - protein, 110 aa, Artificial Sequence
  Synthetic polypeptide
MKLSKKDRGEDEESDSAKKKLDWSCSLLVASLAGAFGSSFLYGYNLSVVNAPTPYIKAFYNESWERRHGRPIDPDTLTLLWSVTVSIFAIGGLVGTLIVKMIGKVLGSSR

SEQ ID NO: 7733 - protein, 45 aa, Artificial Sequence
  Synthetic polypeptide
MASMGTLAFDEYGRPFLIIKDQDRKSRLMGLEALKALTGRGGSRL

SEQ ID NO: 7734 - protein, 69 aa, Artificial Sequence
  Synthetic polypeptide
VRKLLGPPEKGKCILASVAVSAGWGEVIPVVAPWRPWGPSPSMNMGALSSSSRIRTASPVLWDLRPSRH

SEQ ID NO: 7735 - protein, 30 aa, Artificial Sequence
  Synthetic polypeptide
SPSMNMGALSSSSRIRTASPVLWDLRPSRH

SEQ ID NO: 7736 - protein, 844 aa, Artificial Sequence
  Synthetic polypeptide
MSEAPRFFVGPEDTEINPGNYRHFFHHADEDDEEEDDSPPERQIVVGICSMAKKSKSKPMKEILERISLFKYITVVVFEEEVILNEPVENWPLCDCLISFHSKGFPLDKAVAYAKLRNPFVINDLNMQYLIQDRREVYSILQAEGILLPRYAILNRDPNNPKECNLIEGEDHVEVNGEVFQKPFVEKPVSAEDHNVYIYYPTSAGGGSQRLFRKIGSRSSVYSPESNVRKTGSYIYEEFMPTDGTDVKVYTVGPDYAHAEARKSPALDGKVERDSEGKEVRYPVILNAREKLIAWKVCLAFKQTVCGFDLLRANGQSYVCDVNGFSFVKNSMKYYDDCAKILGNIVMRELAPQFHIPWSIPLEAEDIPIVPTTSGTMMELRCVIAVIRHGDRTPKQKMKMEVRHQKFFDLFEKCDGYKSGKLKLKKPKQLQEVLDIARQLLMELGQNNDSEIEENKPKLEQLKTVLEMYGHFSGINRKVQLTYLPHGCPKTSSEEEDSRREEPSLLLVLKWGGELTPAGRVQAEELGRAFRCMYPGGQGDYAGFPGCGLLRLHSTYRHDLKIYASDEGRVQMTAAAFAKGLLALEGELTPILVQMVKSANMNGLLDSDSDSLSSCQQRVKARLHEILQKDRDFTAEDYEKLTPSGSISLIKSMHLIKNPVKTCDKVYSLIQSLTSQIRHRMEDPKSSDIQLYHSETLELMLRRWSKLEKDFKTKNGRYDISKIPDIYDCIKYDVQHNGSLKLENTMELYRLSKALADIVIPQEYGITKAEKLEIAKGYCTPLVRKIRSDLQRTQDDDTVNKLHPVYSRGVLSPERHVRTRLYFTSESHVHSLLSILRYGALCNF

SEQ ID NO: 7737 - protein, 118 aa, Artificial Sequence
  Synthetic polypeptide
YDCIKYDVQHNGSLKLENTMELYRLSKALADIVIPQEYGITKAEKLEIAKGYCTPLVRKIRSDLQRTQDDDTVNKLHPVYSRGVLSPERHVRTRLYFTSESHVHSLLSILRYGALCNF

SEQ ID NO: 7738 - protein, 1188 aa, Artificial Sequence
  Synthetic polypeptide
MSEAPRFFVGPEDTEINPGNYRHFFHHADEDDEEEDDSPPERQIVVGICSMAKKSKSKPMKEILERISLFKYITVVVFEEEVILNEPVENWPLCDCLISFHSKGFPLDKAVAYAKLRNPFVINDLNMQYLIQDRREVYSILQAEGILLPRYAILNRDPNNPKECNLIEGEDHVEVNGEVFQKPFVEKPVSAEDHNVYIYYPTSAGGGSQRLFRKIGSRSSVYSPESNVRKTGSYIYEEFMPTDGTDVKVYTVGPDYAHAEARKSPALDGKVERDSEGKEVRYPVILNAREKLIAWKVCLAFKQTVCGFDLLRANGQSYVCDVNGFSFVKNSMKYYDDCAKILGNIVMRELAPQFHIPWSIPLEAEDIPIVPTTSGTMMELRCVIAVIRHGDRTPKQKMKMEVRHQKFFDLFEKCDGYKSGKLKLKKPKQLQEVLDIARQLLMELGQNNDSEIEENKPKLEQLKTVLEMYGHFSGINRKVQLTYLPHGCPKTSSEEEDSRREEPSLLLVLKWGGELTPAGRVQAEELGRAFRCMYPGGQGDYAGFPGCGLLRLHSTYRHDLKIYASDEGRVQMTAAAFAKGLLALEGELTPILVQMVKSANMNGLLDSDSDSLSSCQQRVKARLHEILQKDRDFTAEDYEKLTPSGSISLIKSMHLIKNPVKTCDKVYSLIQSLTSQIRHRMEDPKSSDIQLYHSETLELMLRRWSKLEKDFKTKNGRYDISKIPDIYDCIKYDVQHNGSLKLENTMELYRLSKALADIVIPQEYGITKAEKLEIAKGYCTPLVRKIRSDLQRTQDDDTVNKLHPVYSRGVLSPERHVRTRLYFTSESHVHSLLSILRYGALCNESKDEQWKRAMDYLNVVNELNYMTQIVIMLYEDPNKDLSSEERFHVELHFSPGAKGCEEDKNLPSGYGYRPASRENEGRRPFKIDNDDEPHTSKRDEVDRAVILFKPMVSEPIHIHRKSPLPRSRKTATNDEESPLSVSSPEGTGTWLHYTSGVGTGRRRRRSGEQITSSPVSPKSLAFTSSIFGSWQQVVSENANYLRTPRTLVEQKQNPTVGSHCAGLFSTSVLGGSSSAPNLQDYARTHRKKLTSSGCIDGFELYSMVPSICPLETLHNALSLKQVDEFLASIASPSSDVPRKTAEISSTALRSSPIMRKKVSLNTYTPAKILPTPPATLKSTKASSKPGQA

SEQ ID NO: 7739 - protein, 1209 aa, Artificial Sequence
  Synthetic polypeptide
MSEAPRFFVGPEDTEINPGNYRHFFHHADEDDEEEDDSPPERQIVVGICSMAKKSKSKPMKEILERISLFKYITVVVFEEEVILNEPVENWPLCDCLISFHSKGFPLDKAVAYAKLRNPFVINDLNMQYLIQDRREVYSILQAEGILLPRYAILNRDPNNPKECNLIEGEDHVEVNGEVFQKPFVEKPVSAEDHNVYIYYPTSAGGGSQRLFRKIGSRSSVYSPESNVRKTGSYIYEEFMPTDGTDVKVYTVGPDYAHAEARKSPALDGKVERDSEGKEVRYPVILNAREKLIAWKVCLAFKQTVCGFDLLRANGQSYVCDVNGFSFVKNSMKYYDDCAKILGNIVMRELAPQFHIPWSIPLEAEDIPIVPTTSGTMMELRCVIAVIRHGDRTPKQKMKMEVRHQKFFDLFEKCDGYKSGKLKLKKPKQLQEVLDIARQLLMELGQNNDSEIEENKPKLEQLKTVLEMYGHFSGINRKVQLTYLPHGCPKTSSEEEDSRREEPSLLLVLKWGGELTPAGRVQAEELGRAFRCMYPGGQGDYAGFPGCGLLRLHSTYRHDLKIYASDEGRVQMTAAAFAKGLLALEGELTPILVQMVKSANMNGLLDSDSDSLSSCQQRVKARLHEILQKDRDFTAEDYEKLTPSGSISLIKSMHLIKNPVKTCDKVYSLIQSLTSQIRHRMEDPKSSDIQLYHSETLELMLRRWSKLEKDFKTKNGRYDISKIPDIYDCIKYDVQHNGSLKLENTMELYRLSKALADIVIPQEYGITKAEKLEIAKGYCTPLVRKIRSDLQRTQDDDTVNKLHPVYSRGVLSPERHVRTRLYFTSESHVHSLLSILRYGALCNESKDEQWKRAMDYLNVVNELNYMTQIVIMLYEDPNKDLSSEERFHVELHFSPGAKGCEEDKNLPSGYGYRPASRENEGRRPFKIDNDDEPHTSKRDEVDRAVILFKPMVSEPIHIHRKSPLPRSRKTATNDEESPLSVSSPEGTGTWLHYTSGVGTGRRRRRSGEQITSSPVSPKSLAFTSSIFGSWQQVVSENANYLRTPRTLVEQKQNPTVGSHCAGLFSTSVLGGSSSAPNLQDYARTHRKKLTSSGCIDDATRGSAVKRFSISFARHPTNGFELYSMVPSICPLETLHNALSLKQVDEFLASIASPSSDVPRKTAEISSTALRSSPIMRKKVSLNTYTPAKILPTPPATLKSTKASSKPGQA

SEQ ID NO: 7740 - protein, 364 aa, Artificial Sequence
  Synthetic polypeptide
YDCIKYDVQHNGSLKLENTMELYRLSKALADIVIPQEYGITKAEKLEIAKGYCTPLVRKIRSDLQRTQDDDTVNKLHPVYSRGVLSPERHVRTRLYFTSESHVHSLLSILRYGALCNESKDEQWKRAMDYLNVVNELNYMTQIVIMLYEDPNKDLSSEERFHVELHFSPGAKGCEEDKNLPSGYGYRPASRENEGRRPFKIDNDDEPHTSKRDEVDRAVILFKPMVSEPIHIHRKSPLPRSRKTATNDVVSENANYLRTPRTLVEQKQNPTVGFELYSMVPSICPLETLHNALSLKQVDEFLASIASPSSDVPRKTAEISSTALRSSPIMRKKVSLNTYTPAKILPTPPATLKSTKASSKPGQA

SEQ ID NO: 7741 - protein, 47 aa, Artificial Sequence
  Synthetic polypeptide
KVVKKTKICHLAMDIDQLPERMKAGDLLKLIMMMNHILLKEMKLIEL

SEQ ID NO: 7742 - protein, 29 aa, Artificial Sequence
  Synthetic polypeptide
MDTAEEVSLLKPARPRAHQKERTTPDALP

SEQ ID NO: 7743 - protein, 130 aa, Artificial Sequence
  Synthetic polypeptide
MDTAEEDICRVCRSEGTPEKPLYHPCVCTGSIKFIHQECLVQWLKHSRKEYCELCKHRFAFTPIYSPDMPSRLPIQDIFAGLVTSIGTAIRYWFHYTLVAFAWLGVVPLTAYTFKNKRQLNSGTQKKKEN

SEQ ID NO: 7744 - protein, 119 aa, Artificial Sequence
  Synthetic polypeptide
MDTAEEDICRVCRSEGTPEKPLYHPCVCTGSIKFIHQECLVQWLKHSRKEYCELCKHRFAFTPIYSPDMPSRLPIQDIFAGLVTSIGTAIRYWFHYTLVAFAWLGVVPLTAWAVAWEEA

SEQ ID NO: 7745 - protein, 724 aa, Artificial Sequence
  Synthetic polypeptide
MDTAEEDICRVCRSEGTPEKPLYHPCVCTGSIKFIHQECLVQWLKHSRKEYCELCKHRFAFTPSRIYKCLFTGSVSSLLTLPLDMLSTENLLADCLQGCFVVTCTLCAFISLVWLREQIVHGGAPIWLEHAAPPFNAAGHHQNEAPAGGNGAENVAADQPANPPAENAVVGENPDAQDDQAEEEEEDNEEEDDAGVEDAADANNGAQDDMNWNALEWDRAAEELTWERMLGLDGSLVFLEHVFWVVSLNTLFILVFAFCPYHIGHFSLVGLGFEEHVQASHFEGLITTIVGYILLAITLIICHGLATLVKFHRSRRLLGVCYIVVKVSLLVVVEIGVFPLICGWWLDICSLEMFDATLKDRELSFQSAPGTTMFLHWLVGMVYVFYFASFILLLREVLRPGVLWFLRNLNDPDFNPVQEMIHLPIYRHLRRFILSVIVFGSIVLLMLWLPIRIIKSVLPNFLPYNVMLYSDAPVSELSLELLLLQVVLPALLEQGHTRQWLKGLVRAWTVTAGYLLDLHSYLLGDQEENENSANQQVNNNQHARNNNAIPVVGEGLHAAHQAILQQGGPVGFQPYRRPLNFPLRIFLLIVFMCITLLIASLICLTLPVFAGRWLMSFWTGTAKIHELYTAACGLYVCWLTIRAVTVMVAWMPQGRRVIFQKVKEWSLMIMKTLIVAVLLAGVVPLLLGLLFELVIVAPLRVPLDQTPLFYPWQMGLSGPNIIVS

SEQ ID NO: 7746 - protein, 667 aa, Artificial Sequence
  Synthetic polypeptide
MDTAEEGRIYKCLFTGSVSSLLTLPLDMLSTENLLADCLQGCFVVTCTLCAFISLVWLREQIVHGGAPIWLEHAAPPFNAAGHHQNEAPAGGNGAENVAADQPANPPAENAVVGENPDAQDDQAEEEEEDNEEEDDAGVEDAADANNGAQDDMNWNALEWDRAAEELTWERMLGLDGSLVFLEHVFWVVSLNTLFILVFAFCPYHIGHFSLVGLGFEEHVQASHFEGLITTIVGYILLAITLIICHGLATLVKFHRSRRLLGVCYIVVKVSLLVVVEIGVFPLICGWWLDICSLEMFDATLKDRELSFQSAPGTTMFLHWLVGMVYVFYFASFILLLREVLRPGVLWFLRNLNDPDFNPVQEMIHLPIYRHLRRFILSVIVFGSIVLLMLWLPIRIIKSVLPNFLPYNVMLYSDAPVSELSLELLLLQVVLPALLEQGHTRQWLKGLVRAWTVTAGYLLDLHSYLLGDQEENENSANQQVNNNQHARNNNAIPVVGEGLHAAHQAILQQGGPVGFQPYRRPLNFPLRIFLLIVFMCITLLIASLICLTLPVFAGRWLMSFWTGTAKIHELYTAACGLYVCWLTIRAVTVMVAWMPQGRRVIFQKVKEWSLMIMKTLIVAVLLAGVVPLLLGLLFELVIVAPLRVPLDQTPLFYPWQMGLSGPNIIVS

SEQ ID NO: 7747 - protein, 772 aa, Artificial Sequence
  Synthetic polypeptide
MDTAEEDICRVCRSEGTPEKPLYHPCVCTGSIKFIHQECLVQWLKHSRKEYCELCKHRFAFTPIYSPDMPSRLPIQDIFAGLVTSIGTAIRYWFHYTLVAFAWLGVVPLTACRIYKCLFTGSVSSLLTLPLDMLSTENLLADCLQGCFVVTCTLCAFISLVWLREQIVHGGAPIWLEHAAPPFNAAGHHQNEAPAGGNGAENVAADQPANPPAENAVVGENPDAQDDQAEEEEEDNEEEDDAGVEDAADANNGAQDDMNWNALEWDRAAEELTWERMLGLDGSLVFLEHVFWVVSLNTLFILVFAFCPYHIGHFSLVGLGFEEHVQASHFEGLITTIVGYILLAITLIICHGLATLVKFHRSRRLLGVCYIVVKVSLLVVVEIGVFPLICGWWLDICSLEMFDATLKDRELSFQSAPGTTMFLHWLVGMVYVFYFASFILLLREVLRPGVLWFLRNLNDPDFNPVQEMIHLPIYRHLRRFILSVIVFGSIVLLMLWLPIRIIKSVLPNFLPYNVMLYSDAPVSELSLELLLLQVVLPALLEQGHTRQWLKGLVRAWTVTAGYLLDLHSYLLGDQEENENSANQQVNNNQHARNNNAIPVVGEGLHAAHQAILQQGGPVGFQPYRRPLNFPLRIFLLIVFMCITLLIASLICLTLPVFAGRWLMSFWTGTAKIHELYTAACGLYVCWLTIRAVTVMVAWMPQGRRVIFQKVKEWSLMIMKTLIVAVLLAGVVPLLLGLLFELVIVAPLRVPLDQTPLFYPWQMGLSGPNIIVS

SEQ ID NO: 7748 - protein, 470 aa, Artificial Sequence
  Synthetic polypeptide
MGKPGCRTCCKIKFYLLFSYFQVQASHFEGLITTIVGYILLAITLIICHGLATLVKFHRSRRLLGVCYIVVKVSLLVVVEIGVFPLICGWWLDICSLEMFDATLKDRELSFQSAPGTTMFLHWLVGMVYVFYFASFILLLREVLRPGVLWFLRNLNDPDFNPVQEMIHLPIYRHLRRFILSVIVFGSIVLLMLWLPIRIIKSVLPNFLPYNVMLYSDAPVSELSLELLLLQVVLPALLEQGHTRQWLKGLVRAWTVTAGYLLDLHSYLLGDQEENENSANQQVNNNQHARNNNAIPVVGEGLHAAHQAILQQGGPVGFQPYRRPLNFPLRIFLLIVFMCITLLIASLICLTLPVFAGRWLMSFWTGTAKIHELYTAACGLYVCWLTIRAVTVMVAWMPQGRRVIFQKVKEWSLMIMKTLIVAVLLAGVVPLLLGLLFELVIVAPLRVPLDQTPLFYPWQMGLSGPNIIVS

SEQ ID NO: 7749 - protein, 45 aa, Artificial Sequence
  Synthetic polypeptide
MLHVEMLTLVFLVLWMCVFSQDPGSKAVADRYAVYWNSSNPRQQK

SEQ ID NO: 7750 - protein, 115 aa, Artificial Sequence
  Synthetic polypeptide
MSDNGVCVLAFKCPGLLRYTAYRCKQLSDTSIIAVASHCPLLQKVHVGNQDKLTDEGLKQLGSKCRELKDIHFGQCYKISDEGMIVIAKGCLKLQRIYMQENKLKGYNTTSYMFY

SEQ ID NO: 7751 - protein, 513 aa, Artificial Sequence
  Synthetic polypeptide
MGHLLSKEPRNRPSQKRPRCCSWCRRRRPLLRLPRRTPAKVPPQPAAPRSRDCFFRGPCMLCFIVHSPGAPAPAGPEEEPPLSPPPRDGAYAAASSSQHLARRYAALAAEDCAAAARRFLLSSAAAAAAAAASASSPASCCKELGLAAAAAWEQQGRSLFLASLGPVRFLGPPAAVQLFRGPTPSPAELPTPPEMVCKRKGAGVPACTPCKQPRCGGGGCGGGGGGGGGGGPAGGGASPPRPPDAGCCQAPEQPPQPLCPPPSSPTSEGAPTEAGGDAVRAGGTAPLSAQQQHECGDADCRESPENPCDCHREPPPETPDINQLPPSILLKIFSNLSLDERCLSASLVCKYWRDLCLDFQFWKQLDLSSRQQVTDELLEKIASRSQNIIEINISDCRSMSDNGVCVLAFKCPGLLRYTAYRCKQLSDTSIIAVASHCPLLQKVHVGNQDKLTDEGLKQLGSKCRELKDIHFGQCYKISDEGMIVIAKGCLKLQRIYMQENKLKGYNTTSYMFY

SEQ ID NO: 7752 - protein, 1012 aa, Artificial Sequence
  Synthetic polypeptide
MKLSRQFTVFGSAIFCVVIFSLYLMLDRGHLDYPRNPRREGSFPQGQLSMLQEKIDHLERLLAENNEIISNIRDSVINLSESVEDGPKSSQSNFSQGAGSHLLPSQLSLSVDTADCLFASQSGSHNSDVQMLDVYSLISFDNPDGGVWKQGFDITYESNEWDTEPLQVFVVPHSHNDPGWLKTFNDYFRDKTQYIFNNMVLKLKEDSRRKFIWSEISYLSKWWDIIDIQKKDAVKSLIENGQLEIVTGGWVMPDEATPHYFALIDQLIEGHQWLENNIGVKPRSGWAIDPFGHSPTMAYLLNRAGLSHMLIQRVHYAVKKHFALHKTLEFFWRQNWDLGSVTDILCHMMPFYSYDIPHTCGPDPKICCQFDFKRLPGGRFGCPWGVPPETIHPGNVQSRARMLLDQYRKKSKLFRTKVLLAPLGDDFRYCEYTEWDLQFKNYQQLFDYMNSQSKFKVKIQFGTLSDFFDALDKADETQRDKGQSMFPVLSGDFFTYADRDDHYWSGYFTSRPFYKRMDRIMESHLRAAEILYYFALRQAHKYKINKFLSSSLYTALTEARRNLGLFQHHDAITGTAKDWVVVDYGTRLFHSLMVLEKIIGNSAFLLILKDKLTYDSYSPDTFLEMDLKQKSQDSLPQKNIIRLSAEPRYLVVYNPLEQDRISLVSVYVSSPTVQVFSASGKPVEVQVSAVWDTANTISETAYEISFRAHIPPLGLKVYKILESASSNSHLADYVLYKNKVEDSGIFTIKNMINTEEGITLENSFVLLRFDQTGLMKQMMTKEDGKHHEVNVQFSWYGTTIKRDKSGAYLFLPDGNAKPYVYTTPPFVRVTHGRIYSEVTCFFDHVTHRVRLYHIQGIEGQSVEVSNIVDIRKVYNREIAMKISSDIKSQNRFYTDLNGYQIQPRMTLSKLPLQANVYPMTTMAYIQDAKHRLTLLSAQSLGVSSLNSGQIEVIMDRRLMQDDNRGLEQGIQDNKITANLFRILLEKRSAVNTQEGPHQMPVPCSWNSQPPEL

SEQ ID NO: 7753 - protein, 1181 aa, Artificial Sequence
  Synthetic polypeptide
MKLSRQFTVFGSAIFCVVIFSLYLMLDRGHLDYPRNPRREGSFPQGQLSMLQEKIDHLERLLAENNEIISNIRDSVINLSESVEDGPKSSQSNFSQGAGSHLLPSQLSLSVDTADCLFASQSGSHNSDVQMLDVYSLISFDNPDGGVWKQGFDITYESNEWDTEPLQVFVVPHSHNDPGWLKTFNDYFRDKTQYIFNNMVLKLKEDSRRKFIWSEISYLSKWWDIIDIQKKDAVKSLIENGQLEIVTGGWVMPDEATPHYFALIDQLIEGHQWLENNIGVKPRSGWAIDPFGHSPTMAYLLNRAGLSHMLIQRVHYAVKKHFALHKTLEFFWRQNWDLGSVTDILCHMMPFYSYDIPHTCGPDPKICCQFDFKRLPGGRFGCPWGVPPETIHPGNVQSRARMLLDQYRKKSKLFRTKVLLAPLGDDFRYCEYTEWDLQFKNYQQLFDYMNSQSKFKVKIQFGTLSDFFDALDKADETQRDKGQSMFPVLSGDFFTYADRDDHYWSGYFTSRPFYKRMDRIMESHLRAAEILYYFALRQAHKYKINKFLSSSLYTALTEARRNLGLFQHHDAITGTAKDWVVVDYGTRLFHSLMVLEKIIGNSAFLLILKDKLTYDSYSPDTFLEMDLKQKSQDSLPQKNIIRLSAEPRYLVVYNPLEQDRISLVSVYVSSPTVQVFSASGKPVEVQVSAVWDTANTISETAYEISFRAHIPPLGLKVYKILESASSNSHLADYVLYKNKVEDSGIFTIKNMINTEEGITLENSFVLLRFDQTGLMKQMMTKEDGKHHEVNVQFSWYGTTIKRDKSGAYLFLPDGNAKPYVYTTPPFVRVTHGRIYSEVTCFFDHVTHRVRLYHIQGIEGQSVEVSNIVDIRKVYNREIAMKISSDIKSQNRFYTDLNGYQIQPRMTLSKLPLQANVYPMTTMAYIQDAKHRLTLLSAQSLGVSSLNSGQIEVIMDRRLMQDDNRGLEQGIQDNKITANLFRILLEKRSAVNTEEEKKSVSYPSLLSHITSSLMNHPVIPMANKFSSPTLELQGEFSPLQSSLPCDIHLVNLRTIQSKVGNGHSNEAALILHRKGFDCRFSSKGTGLFCSTTQGKILVQKLLNKFIVESLTPSSLSLMHSPPGTQNISEINLSPMEISTFRIQLRWAINPMTNILIGGRIGEDTERRQHDHGGSAGSDAAAR

SEQ ID NO: 7754 - protein, 70 aa, Artificial Sequence
  Synthetic polypeptide
MVYYPELFVWVSQEPFPNKDMEGRLPKEELSTSWVTPLGKHSEEFAADFLWTLPQVPFPFAYFPLYPLQQ

SEQ ID NO: 7755 - protein, 114 aa, Artificial Sequence
  Synthetic polypeptide
MKGVWNYSALSRREDETRTQRSRMTDRVPCSKCFQVHCQISVLNCVYYPELFVWVSQEPFPNKDMEGRLPKEELSTSWVTPLGKHSEEFAADFLWTLPQVPFPFAYFPLYPLQQ

SEQ ID NO: 7756 - protein, 668 aa, Artificial Sequence
  Synthetic polypeptide
MGCFCAVPEEFYCEVLLLDESKLTLTTQQQGIKKSTKGSVVLDHVFHHVNLVEIDYFGLRYCDRSHQTYWLDPAKTLAEHKELINTGPPYTLYFGIKFYAEDPCKLKEEITRYQFFLQVKQDVLQGRLPCPVNTAAQLGAYAIQSELGDYDPYKHTAGYVSEYRFVPDQKEELEEAIERIHKTLMGQIPSEAELNYLRTAKSLEMYGVDLHPVYGENKSEYFLGLTPVGVVVYKNKKQVGKYFWPRITKVHFKETQFELRVLGKDCNETSFFFEARSKTACKHLWKCSVEHHTFFRMPENESNSLSRKLSKFGSIRYKHRYSGRTALQMSRDLSIQLPRPDQNVTRSRSKTYPKRIAQTQPAESNSISRITANMENGENEGTIKIIAPSPVKSFKKAKNENSPDTQRSKSHAPWEENGPQSGLYNSPSDRTKSPKFPYTRRRNPSCGSDNDSVQPVRRRKAHNSGEDSDLKQRRRSRSRCNTSSGSESENSNREYRKKRNRIRQENDMVDSAPQWEAVLRRQKEKNQADPNNRRSRHRSRSRSPDIQAKEELWKHIQKELVDPSGLSEEQLKEIPYTKIETQGDPIRIRHSHSPRSYRQYRRSQCSDGERSVLSEVNSKTDLVPPLPVTRSSDAQGSGDATVHQVCDHHCEPEFPHLKVITTHMYYMG

SEQ ID NO: 7757 - protein, 320 aa, Artificial Sequence
  Synthetic polypeptide
MSRPSSVSPRQPAPGGGGGGGPSPCGPGGGGRAKGLKDIRIDEEVKIAVNIALERFRYGDQREMEFPSSLTSTERAFIHRLSQSLGLVSKSKGKGANRYLTVKKKDGSETAHAMMTCNLTHNTKHAVRSLIQRFPVTNKERTELLPKTERGNVFAVEAENREMSKTSGRLNNGIPQIPVKRGESEFDSFRQSLPVFEKQEEIVKIIKENKVVLIVGETGSGKTTQIPQFLLDDCFKNGIPCRIFCTQPRRLAAIAVAERVAAERRERIGQTIGYQIRLESRVSPKTLLTFCTNGVLLRTLMAGDSTLSTVTHVIVGLEHP

SEQ ID NO: 7758 - protein, 779 aa, Artificial Sequence
  Synthetic polypeptide
MSRPSSVSPRQPAPGGGGGGGPSPCGPGGGGRAKGLKDIRIDEEVKIAVNIALERFRYGDQREMEFPSSLTSTERAFIHRLSQSLGLVSKSKGKGANRYLTVKKKDGSETAHAMMTCNLTHNTKHAVRSLIQRFPVTNKERTELLPKTERGNVFAVEAENREMSKTSGRLNNGIPQIPVKRGESEFDSFRQSLPVFEKQEEIVKIIKENKVVLIVGETGSGKTTQIPQFLLDDCFKNGIPCRIFCTQPRRLAAIAVAERVAAERRERIGQTIGYQIRLESRVSPKTLLTFCTNGVLLRTLMAGDSTLSTVTHVIVDEVHERDRFSDFLLTKLRDLLQKHPTLKLILSSAALDVNLFIRYFGSCPVIYIQGRPFEVKEMFLEDILRTTGYTNKEMLKYKKEKQQEEKQQTTLTEWYSAQENSFKPESQRQRTVLNVTDEYDLLDDGGDAVFSQLTEKDVNCLEPWLIKEMDACLSDIWLHKDIDAFAQVFHLILTENVSVDYRHSETSATALMVAAGRGFASQVEQLISMGANVHSKASNGWMALDWAKHFGQTEIVDLLESYSATLEFGNLDESSLVQTNGSDLSAEDRELLKAYHHSFDDEKVDLDLIMHLLYNICHSCDAGAVLIFLPGYDEIVGLRDRILFDDKRFADSTHRYQVFMLHSNMQTSDQKKVLKNPPAGVRKIILSTNIAETSITVNDVVFVIDSGKVKEKSFDALNFVTMLKMVWISKASAIQRKGRISFEALRKIRHQFEKSPYQSNMNSSKIEVRANITFMVTVP

SEQ ID NO: 7759 - protein, 759 aa, Artificial Sequence
  Synthetic polypeptide
MSRPSSVSPRQPAPGGGGGGGPSPCGPGGGGRAKGLKDIRIDEEVKIAVNIALERFRYGDQREMEFPSSLTSTERAFIHRLSQSLGLVSKSKGKGANRYLTVKKKDGSETAHAMMTCNLTHNTKHAVRSLIQRFPVTNKERTELLPKTERGNVFAVEAENREMSKTSGRLNNGIPQIPVKRGESEFDSFRQSLPVFEKQEEIVKIIKENKVVLIVGETGSGKTTQIPQFLLDDCFKNGIPCRIFCTQPRRLAAIAVAERVAAERRERIGQTIGYQIRLESRVSPKTLLTFCTNGVLLRTLMAGDSTLSTVTHVIVDEVHERDRFSDFLLTKLRDLLQKHPTLKLILSSAALDVNLFIRYFGSCPVIYIQGRPFEVKEMFLEDILRTTGYTNKEMLKYKKEKQQEEKQQTTLTEWYSAQENSFKPESQRQRTVLNVTDEYDLLDDGGDAVFSQLTEKDVNCLEPWLIKEMDACLSDIWLHKDIDAFAQVFHLILTENVSVDYRHSETSATALMVAAGRGFASQVEQLISMGANVHSKASNGWMALDWAKHFGQTEIVDLLESYSATLEFGNLDESSLVQTNGSDLSAEDRELLKAYHHSFDDEKVDLDLIMHLLYNICHSCDAGAVLIFLPGYDEIVGLRDRILFDDKRFADSTHRYQVFMLHSNMQTSDQKKVLKNPPAGVRKIILSTNIAETSITVNDVVFVIDSGKVKEKSFDALNFVTMLKMVWISKASAIQRKGRSTADKSRAFNGNFKQLESRS

SEQ ID NO: 7760 - protein, 26 aa, Artificial Sequence
  Synthetic polypeptide
MIKAILIFNNHGKPRLSKFYQPYKKL

SEQ ID NO: 7761 - protein, 923 aa, Artificial Sequence
  Synthetic polypeptide
MGPPSSSGFYVSRAVALLLAGLVAALLLALAVLAALYGHCERVPPSELPGLRDLEAESSPPLRQKPTPTPKPSSARELAVTTTPSNWRPPGPWDQLRLPPWLVPLHYDLELWPQLRPDELPAGSLPFTGRVNITVRCTVATSRLLLHSLFQDCERAEVRGPLSPGTGNATVGRVPVDDVWFALDTEYMVLELSEPLKPGSSYELQLSFSGLVKEDLREGLFLNVYTDQGERRALLASQLEPTFARYVFPCFDEPALKATFNITMIHHPSYVALSNMPKLGQSEKEDVNGSKWTVTTFSTTPHMPTYLVAFVICDYDHVNRTERGKEIRIWARKDAIANGSADFALNITGPIFSFLEDLFNISYSLPKTDIIALPSFDNHAMENWGLMIFDESGLLLEPKDQLTEKKTLISYVVSHEIGHQWFGNLVTMNWWNNIWLNEGFASYFEFEVINYFNPKLPRNEIFFSNILHNILREDHALVTRAVAMKVENFKTSEIQELFDIFTYSKGASMARMLSCFLNEHLFVSALKSYLKTFSYSNAEQDDLWRHFQMAIDDQSTVILPATIKNIMDSWTHQSGFPVITLNVSTGVMKQEPFYLENIKNRTLLTSNDTWIVPILWIKNGTTQPLVWLDQSSKVFPEMQVSDSDHDWVILNLNMTGYYRVNYDKLGWKKLNQQLEKDPKAIPVIHRLQLIDDAFSLSKNNYIEIETALELTKYLAEEDEIIVWHTVLVNLVTRDLVSEVNIYDIYSLLKRYLLKRLNLIWNIYSTIIRENVLALQDDYLALISLEKLFVTACWLGLEDCLQLSKELFAKWVDHPENEIPYPIKDVVLCYGIALGSDKEWDILLNTYTNTTNKEEKIQLAYAMSCSKDPWILNRYMEYAISTSPFTSNETNIIEVVASSEVGRYVAKDFLVNNWQAVSKSTLGG

SEQ ID NO: 7762 - protein, 177 aa, Artificial Sequence
  Synthetic polypeptide
MAVPAALILRESPSMKKAVSLINAIDTGRFPRLLTRILQKLHLKAESSFSEEEEEKLQAAFSLEKQDLHLVLETISFILEQAVYHNVKPAALQQQLENIHLRQDKAEAFVNTWSSMGQETVEKFRQRILAPCKLETVGWQLNLQMAHSAQAKLKSPQAVLQLGVNNEDSKRILAHYP

SEQ ID NO: 7763 - protein, 163 aa, Artificial Sequence
  Synthetic polypeptide
MKKAVSLINAIDTGRFPRLLTRILQKLHLKAESSFSEEEEEKLQAAFSLEKQDLHLVLETISFILEQAVYHNVKPAALQQQLENIHLRQDKAEAFVNTWSSMGQETVEKFRQRILAPCKLETVGWQLNLQMAHSAQAKLKSPQAVLQLGVNNEDSKRILAHYP

SEQ ID NO: 7764 - protein, 815 aa, Artificial Sequence
  Synthetic polypeptide
MNLHQVLTGAVNPGDHCFSVGSIGDQRFTAYASGCDIVILGSDFERLQIIPGAKHGNIQVGCVDCSMQQGKIAASYGNVISIFEPVNLPKQKKNLELYSQWQKSGQFFLESIAHNITWDPTGSRLLTGSSYLQLWSNTNLEKPTEDENLNKTDLNFGDWKCIWHCKTASQVHLMKFSPDGEFFATAGKDDCLLKVWYNVENWRTAVTSPDGSSEKQSQGEIDFSFVYLAHPRAVNGFSWRKTSKYMPRASVCNVLLTCCKDNVCRLWVETFLPNDCLLYGGDCSHWTESINLTNNFKRNASSKERVQNALEVNLRHFRRGRRRSLALVAHTGYLPHQQDPHHVHRNTPLHANALCHFHIAASINPATDIPLLPSITSLSLNENEEKTGPFVVHWLNNKELHFTLSMEVFLQQLRKSFEQPSSEASVEDSNQADVKSDEETDDGVDDLKINPEKKELGCDKMVPNSSFTSLSSAAIDHQIEVLLSEWSKNADMLFSIHPMDGSLLVWHVDWLDEYQPGMFRQVQVSFVSRIPVAFPTGDANSLCKSIMMYACTKNVDLAIQQGKQKPSGLTRSTSMLISSGHNKSSNSLKLSIFTPNVMMISKHADGSLNQWLVSFAEESAFSTVLSISHKSRYCGHRFHLNDLACHSVLPLLLTTSHHNALRTPDVDNPEQPFDALNIEECSLTQQNKSTVDVAFQDPSAVYSELILWRVDPVGPLSFSGGVSELARINSLHVSAFSNVAWLPTLIPSYCLGAYCNSPSACFVASDGQYLRLYEAVIDAKKLLSELSNPEISAHRQKGVPLSQMILWTWTFGLML

SEQ ID NO: 7765 - protein, 2834 aa, Artificial Sequence
  Synthetic polypeptide
MNLHQVLTGAVNPGDHCFSVGSIGDQRFTAYASGCDIVILGSDFERLQIIPGAKHGNIQVGCVDCSMQQGKIAASYGNVISIFEPVNLPKQKKNLELYSQWQKSGQFFLESIAHNITWDPTGSRLLTGSSYLQLWSNTNLEKPTEDENLNKTDLNFGDWKCIWHCKTASQVHLMKFSPDGEFFATAGKDDCLLKVWYNVENWRTAVTSPDGSSEKQSQGEIDFSFVYLAHPRAVNGFSWRKTSKYMPRASVCNVLLTCCKDNVCRLWVETFLPNDCLLYGGDCSHWTESINLTNNFKRNASSKERVQNALEVNLRHFRRGRRRSLALVAHTGYLPHQQDPHHVHRNTPLHANALCHFHIAASINPATDIPLLPSITSLSLNENEEKTGPFVVHWLNNKELHFTLSMEVFLQQLRKSFEQPSSEASVEDSNQADVKSDEETDDGVDDLKINPEKKELGCDKMVPNSSFTSLSSAAIDHQIEVLLSEWSKNADMLFSIHPMDGSLLVWHVDWLDEYQPGMFRQVQVSFVSRIPVAFPTGDANSLCKSIMMYACTKNVDLAIQQGKQKPSGLTRSTSMLISSGHNKSSNSLKLSIFTPNVMMISKHADGSLNQWLVSFAEESAFSTVLSISHKSRYCGHRFHLNDLACHSVLPLLLTTSHHNALRTPDVDNPEQPFDALNIEECSLTQQNKSTVDVAFQDPSAVYSELILWRVDPVGPLSFSGGVSELARINSLHVSAFSNVAWLPTLIPSYCLGAYCNSPSACFVASDGQYLRLYEAVIDAKKLLSELSNPEISKYVGEVFNIVSQQSTARPGCIIALDPITKLHGRKTQLLHVFEEDFILNNLEKKSLGKDSILSNAGSSPNGFSEKFYLIVIECTQDNRSLLHMWNLHLKSIPVSLDEKVDTKLSEAVWQPEEHYSSSPEKILSPFSQKYQACRANLQSTSRLTLFSEMVYSQELHLPEGVEIISIKPSAGHLSSSSIYPACSAPYLLATSCSDEKVRFWRCRVTDGESATSKNGKIDLAYIWEEWPLLIEDGLQSNSSITVPGRPVEVSCAHTNRLAVAYKQPASNSRSSQDFVMHVSIFECESTGGSCWVLEQTIHLDELSTVLDSGISVDSNLVAYNKQDMYLSSKENITSNTKHLVHLDWMSREDGSHILTVGIGSKLFMYGPLAGKVQDQTGKETLAFPLWESTKVVPLSKFVLLRSVDLVSSVDGSPPFPVSLSWVRDGILVVGMDCEMHVYCQWQPSSKQEPVITDSYSGSTPSITSLIKQSNSSSGLHPPKKTLTRSMTSLAQKICGKKTAFDPSVDMEDSGLFEAAHVLSPTLPQYHPLQLLELMDLGKVRRAKAILSHLVKCIAGEVVALNEAESNHERRLRSLTISASGSTTRDPQAFNKAENTDYTEIDSVPPLPLYALLAADDDSCYSSLEKSSNESTLSKSNQLSKESYDELFQTQLLMTDTHMLETDEENTKPRVIDLSQYSPTYFGPEHAQVLSGHLLHSSLPGLSRMEQMSLMALADTIATTSTDIGESRDRSQGGETLDECGLKFLLAVRLHTFLTTSLPAYRAQLLHQGLSTSHFAWAFHSVAEEELLNMLPAMQKDDPTWSELRAMGVGWWVRNTRILRKCIEKVAKAAFYRKNDPLDAAIFYLAMKKKAVIWGLYRAEKNTRMTQFFGHNFEDERWRKAALKNAFSLLGKQRFEHSAAFFLLAGCLRDAIEVCLEKLNDIQLALVIARLYESEFDTSAAYKSILRKKVLGIDSPVSELCSLNINMHHDPFLRSMAYWILEDYSGALETLIKQPIRENDDQVLSASNPTVFNFYNYLRTHPLLLRRHFGSSDTFSTHMSLTGKSGLAGTINLSERRLFFTTASAHLKAGCPMLALEVLSKMPKVIKKTRPFYRASSFLDTSKDCSPSSPLKLDAREDKSSAVDWSQSLINGFGSSSEGSSEKQSNSTLSFDWSQPSVVFQDDSLELKWDSDNDEENEDVPISMKELKPLQRKTDKKLDDISSNYTESFSTLDENDLLNPSEDIIAVQLKFRACLKILTVELRTLSTGYEIDGGKLRYQLYHWLEKEVIALQRTCDFCSDAEELQSAFGRNEDEFGLNEDAEDLPHQTKVKQLRENFQEKRQWLLKYQSLLRMFLSYCILHGSHGGGLASVRMELILLLQESQQETSEPLFSSPLSEQTSVPLLFACTANAKTVVANPLLHLSNLTHDILHAIINFDSPPHPDIQSNKVYVMHTLAASLSACIYQCLCGSHNYSSFQTNQFTGMVYQTVLLPHRPSLKTGSLDEALTPNTSPAQWPGITCLIRLLNSSGEEAQSGLTVLLCEILTAVYLSLFIHGLATHSSNELFRIVAHPLNEKMWSAVFGGGAHVPSKEQTHSKTLPVSSLVEEGEKQNKRFRPSKMSCRESAPLTPSSAPVSQESLAVKEKFIPPELSIWDYFIAKPFLPSSQSRAEYDSEESLGSDDDDNDDDDDVLASDFHLQEHSNSNSYSWSLMRLAMVQLVLNNLKTFYPFAGHDLAELPVSSPLCHAVLKTLQCWEQVLLRRLEIHGGPPQNYIASHTAEESLSAGPAILRHKALLEPTNTPFKSKHHLALSVKRLWQYLVKQEEIQETFIKNIFTKKRCLNEIEADLGYPGGKARIIHKESDIITAFAVNKANRNCIAIASSHDVQELDVSGILATQVYTWVDDDIEVETKGSEDFLVIHARDDLTAVQGTTPYTHSNPGTPINMPWLGSTQTGRGASVMIKKAINNVRRMTSHPTLPYYLTGAQDGSVRMFEWGHSQQITCFRSGGNSRVTRMRFNYQGNKFGIVDADGYLSLYQTNWKCCPVTGSMPKPYLFK

SEQ ID NO: 7766 - protein, 2855 aa, Artificial Sequence
  Synthetic polypeptide
MNLHQVLTGAVNPGDHCFSVGSIGDQRFTAYASGCDIVILGSDFERLQIIPGAKHGNIQVGCVDCSMQQGKIAASYGNVISIFEPVNLPKQKKNLELYSQWQKSGQFFLESIAHNITWDPTGSRLLTGSSYLQLWSNTNLEKPTEDENLNKTDLNFGDWKCIWHCKTASQVHLMKFSPDGEFFATAGKDDCLLKVWYNVENWRTAVTSPDGSSEKQSQGEIDFSFVYLAHPRAVNGFSWRKTSKYMPRASVCNVLLTCCKDNVCRLWVETFLPNDCLLYGGDCSHWTESINLTNNFKRNASSKERVQNALEVNLRHFRRGRRRSLALVAHTGYLPHQQDPHHVHRNTPLHANALCHFHIAASINPATDIPLLPSITSLSLNENEEKTGPFVVHWLNNKELHFTLSMEVFLQQLRKSFEQPSSEASVEDSNQADVKSDEETDDGVDDLKINPEKKELGCDKMVPNSSFTSLSSAAIDHQIEVLLSEWSKNADMLFSIHPMDGSLLVWHVDWLDEYQPGMFRQVQVSFVSRIPVAFPTGDANSLCKSIMMYACTKNVDLAIQQGKQKPSGLTRSTSMLISSGHNKSSNSLKLSIFTPNVMMISKHADGSLNQWLVSFAEESAFSTVLSISHKSRYCGHRFHLNDLACHSVLPLLLTTSHHNALRTPDVDNPEQPFDALNIEECSLTQQNKSTVDVAFQDPSAVYSELILWRVDPVGPLSFSGGVSELARINSLHVSAFSNVAWLPTLIPSYCLGAYCNSPSACFVASDGQYLRLYEAVIDAKKLLSELSNPEISKYVGEVFNIVSQQSTARPGCIIALDPITKLHGRKTQLLHVFEEDFILNNLEKKSLGKDSILSNAGSSPNGFSEKFYLIVIECTQDNRSLLHMWNLHLKSIPVSLDEKVDTKLSEAVWQPEEHYSSSPEKILSPFSQKYQACRANLQSTSRLTLFSEMVYSQELHLPEGVEIISIKPSAGHLSSSSIYPACSAPYLLATSCSDEKVRFWRCRVTDGESATSKNGKIDLAYIWEEWPLLIEDGLQSNSSITVPGRPVEVSCAHTNRLAVAYKQPASNSRSSQDFVMHVSIFECESTGGSCWVLEQTIHLDELSTVLDSGISVDSNLVAYNKQDMYLSSKENITSNTKHLVHLDWMSREDGSHILTVGIGSKLFMYGPLAGKVQDQTGKETLAFPLWESTKVVPLSKFVLLRSVDLVSSVDGSPPFPVSLSWVRDGILVVGMDCEMHVYCQWQPSSKQEPVITDSYSGSTPSITSLIKQSNSSSGLHPPKKTLTRSMTSLAQKICGKKTAFDPSVDMEDSGLFEAAHVLSPTLPQYHPLQLLELMDLGKVRRAKAILSHLVKCIAGEVVALNEAESNHERRLRSLTISASGSTTRDPQAFNKAENTDYTEIDSVPPLPLYALLAADDDSCYSSLEKSSNESTLSKSNQLSKESYDELFQTQLLMTDTHMLETDEENTKPRVIDLSQYSPTYFGPEHAQVLSGHLLHSSLPGLSRMEQMSLMALADTIATTSTDIGESRDRSQGGETLDECGLKFLLAVRLHTFLTTSLPAYRAQLLHQGLSTSHFAWAFHSVAEEELLNMLPAMQKDDPTWSELRAMGVGWWVRNTRILRKCIEKVAKAAFYRKNDPLDAAIFYLAMKKKAVIWGLYRAEKNTRMTQFFGHNFEDERWRKAALKNAFSLLGKQRFEHSAAFFLLAGCLRDAIEVCLEKLNDIQLALVIARLYESEFDTSAAYKSILRKKVLGIDSPVSELCSLNINMHHDPFLRSMAYWILEDYSGALETLIKQPIRENDDQVLSASNPTVFNFYNYLRTHPLLLRRHFGSSDTFSTHMSLTGKSGLAGTINLSERRLFFTTASAHLKAGCPMLALEVLSKMPKVIKKTRPFYRASSFLDTSKDCSPSSPLKLDAREDKSSAVDWSQSLINGFGSSSEGSSEKQSNSTLSFDWSQPSVVFQDDSLELKWDSDNDEENEDVPISMKELKPLQRKTDKKLDDISSNYTESFSTLDENDLLNPSEDIIAVQLKFRACLKILTVELRTLSTGYEIDGGKLRYQLYHWLEKEVIALQRTCDFCSDAEELQSAFGRNEDEFGLNEDAEDLPHQTKVKQLRENFQEKRQWLLKYQSLLRMFLSYCILHGSHGGGLASVRMELILLLQESQQETSEPLFSSPLSEQTSVPLLFACTANAKTVVANPLLHLSNLTHDILHAIINFDSPPHPDIQSNKVYVMHTLAASLSACIYQCLCGSHNYSSFQTNQFTGMVYQTVLLPHRPSLKTGSLDEALTPNTSPAQWPGITCLIRLLNSSGEEAQSGLTVLLCEILTAVYLSLFIHGLATHSSNELFRIVAHPLNEKMWSAVFGGGAHVPSKEQTHSKTLPVSSLVEEGEKQNKRFRPSKMSCRESAPLTPSSAPVSQESLAVKEKFIPPELSIWDYFIAKPFLPSSQSRAEYDSEESLGSDDDDNDDDDDVLASDFHLQEHSNSNSYSWSLMRLAMVQLVLNNLKTFYPFAGHDLAELPVSSPLCHAVLKTLQCWEQVLLRRLEIHGGPPQNYIASHTAEESLSAGPAILRHKALLEPTNTPFKSKHHLALSVKRLWQYLVKQEEIQETFIKNIFTKKRCLNESLEDNSETIKNSMMEEPNINKIEADLGYPGGKARIIHKESDIITAFAVNKANRNCIAIASSHDVQELDVSGILATQVYTWVDDDIEVETKGSEDFLVIHARDDLTAVQGTTPYTHSNPGTPINMPWLGSTQTGRGASVMIKKAINNVRRMTSHPTLPYYLTGAQDGSVRMFEWGHSQQITCFRSGGNSRVTRMRFNYQGNKFGIVDADGYLSLYQTNWKCCPVTGSMPKPYLFK

SEQ ID NO: 7767 - protein, 708 aa, Artificial Sequence
  Synthetic polypeptide
MGSPLRFDGRVVLVTGAGAGLGRAYALAFAERGALVVVNDLGGDFKGVGKGSLAADKVVEEIRRRGGKAVANYDSVEEGEKVVKTALDAFGRIDVVVNNAGILRDRSFARISDEDWDIIHRVHLRGSFQVTRAAWEHMKKQKYGRIIMTSSASGIYGNFGQANYSAAKLGLLGLANSLAIEGRKSNIHCNTIAPNAGSRMTQTVMPEDLVEALKPEYVAPLVLWLCHESCEENGGLFEVGAGWIGKLRWERTLGAIVRQKNHPMTPEAVKANWKKICDFENASKPQSIQESTGSIIEVLSKIDSEGGVSANHTSRATSTATSGFAGAIGQKLPPFSYAYTELEAIMYALGVGASIKDPKDLKFIYEGSSDFSCLPTFGVIIGQKSMMGGGLAEIPGLSINFAKVLHGEQYLELYKPLPRAGKLKCEAVVADVLDKGSGVVIIMDVYSYSEKELICHNQFSLFLVGSGGFGGKRTSDKVKVAVAIPNRPPDAVLTDTTSLNQAALYRLSGDWNPLHIDPNFASLAGFDKPILHGLCTFGFSARRVLQQFADNDVSRFKAIKARFAKPVYPGQTLQTEMWKEGNRIHFQTKVQETGDIVISNAYVDLAPTSGTSAKTPSEGGKLQSTFVFEEIGRRLKDIGPEVVKKVNAVFEWHITKGGNIGAKWTIDLKSGSGKVYQGPAKGAADTTIILSDEDFMEVVLGKLDPQKV

SEQ ID NO: 7768 - protein, 690 aa, Artificial Sequence
  Synthetic polypeptide
MGSPLRFDGRVVLVTGAGAVNDLGGDFKGVGKGSLAADKVVEEIRRRGGKAVANYDSVEEGEKVVKTALDAFGRIDVVVNNAGILRDRSFARISDEDWDIIHRVHLRGSFQVTRAAWEHMKKQKYGRIIMTSSASGIYGNFGQANYSAAKLGLLGLANSLAIEGRKSNIHCNTIAPNAGSRMTQTVMPEDLVEALKPEYVAPLVLWLCHESCEENGGLFEVGAGWIGKLRWERTLGAIVRQKNHPMTPEAVKANWKKICDFENASKPQSIQESTGSIIEVLSKIDSEGGVSANHTSRATSTATSGFAGAIGQKLPPFSYAYTELEAIMYALGVGASIKDPKDLKFIYEGSSDFSCLPTFGVIIGQKSMMGGGLAEIPGLSINFAKVLHGEQYLELYKPLPRAGKLKCEAVVADVLDKGSGVVIIMDVYSYSEKELICHNQFSLFLVGSGGFGGKRTSDKVKVAVAIPNRPPDAVLTDTTSLNQAALYRLSGDWNPLHIDPNFASLAGFDKPILHGLCTFGFSARRVLQQFADNDVSRFKAIKARFAKPVYPGQTLQTEMWKEGNRIHFQTKVQETGDIVISNAYVDLAPTSGTSAKTPSEGGKLQSTFVFEEIGRRLKDIGPEVVKKVNAVFEWHITKGGNIGAKWTIDLKSGSGKVYQGPAKGAADTTIILSDEDFMEVVLGKLDPQKV

SEQ ID NO: 7769 - protein, 684 aa, Artificial Sequence
  Synthetic polypeptide
MEKIISQCRFFVSMNDLGGDFKGVGKGSLAADKVVEEIRRRGGKAVANYDSVEEGEKVVKTALDAFGRIDVVVNNAGILRDRSFARISDEDWDIIHRVHLRGSFQVTRAAWEHMKKQKYGRIIMTSSASGIYGNFGQANYSAAKLGLLGLANSLAIEGRKSNIHCNTIAPNAGSRMTQTVMPEDLVEALKPEYVAPLVLWLCHESCEENGGLFEVGAGWIGKLRWERTLGAIVRQKNHPMTPEAVKANWKKICDFENASKPQSIQESTGSIIEVLSKIDSEGGVSANHTSRATSTATSGFAGAIGQKLPPFSYAYTELEAIMYALGVGASIKDPKDLKFIYEGSSDFSCLPTFGVIIGQKSMMGGGLAEIPGLSINFAKVLHGEQYLELYKPLPRAGKLKCEAVVADVLDKGSGVVIIMDVYSYSEKELICHNQFSLFLVGSGGFGGKRTSDKVKVAVAIPNRPPDAVLTDTTSLNQAALYRLSGDWNPLHIDPNFASLAGFDKPILHGLCTFGFSARRVLQQFADNDVSRFKAIKARFAKPVYPGQTLQTEMWKEGNRIHFQTKVQETGDIVISNAYVDLAPTSGTSAKTPSEGGKLQSTFVFEEIGRRLKDIGPEVVKKVNAVFEWHITKGGNIGAKWTIDLKSGSGKVYQGPAKGAADTTIILSDEDFMEVVLGKLDPQKV

SEQ ID NO: 7770 - protein, 733 aa, Artificial Sequence
  Synthetic polypeptide
MVILEAPHLLRRKEPETPGLSSRIGPSLCPGFCRKRSVSCCFQNLCNNPMEKIISQCRFFVSMNDLGGDFKGVGKGSLAADKVVEEIRRRGGKAVANYDSVEEGEKVVKTALDAFGRIDVVVNNAGILRDRSFARISDEDWDIIHRVHLRGSFQVTRAAWEHMKKQKYGRIIMTSSASGIYGNFGQANYSAAKLGLLGLANSLAIEGRKSNIHCNTIAPNAGSRMTQTVMPEDLVEALKPEYVAPLVLWLCHESCEENGGLFEVGAGWIGKLRWERTLGAIVRQKNHPMTPEAVKANWKKICDFENASKPQSIQESTGSIIEVLSKIDSEGGVSANHTSRATSTATSGFAGAIGQKLPPFSYAYTELEAIMYALGVGASIKDPKDLKFIYEGSSDFSCLPTFGVIIGQKSMMGGGLAEIPGLSINFAKVLHGEQYLELYKPLPRAGKLKCEAVVADVLDKGSGVVIIMDVYSYSEKELICHNQFSLFLVGSGGFGGKRTSDKVKVAVAIPNRPPDAVLTDTTSLNQAALYRLSGDWNPLHIDPNFASLAGFDKPILHGLCTFGFSARRVLQQFADNDVSRFKAIKARFAKPVYPGQTLQTEMWKEGNRIHFQTKVQETGDIVISNAYVDLAPTSGTSAKTPSEGGKLQSTFVFEEIGRRLKDIGPEVVKKVNAVFEWHITKGGNIGAKWTIDLKSGSGKVYQGPAKGAADTTIILSDEDFMEVVLGKLDPQKV

SEQ ID NO: 7771 - protein, 568 aa, Artificial Sequence
  Synthetic polypeptide
MKKQKIIMTSSASGIYGNFGQANYSAAKLGLLGLANSLAIEGRKSNIHCNTIAPNAGSRMTQTVMPEDLVEALKPEYVAPLVLWLCHESCEENGGLFEVGAGWIGKLRWERTLGAIVRQKNHPMTPEAVKANWKKICDFENASKPQSIQESTGSIIEVLSKIDSEGGVSANHTSRATSTATSGFAGAIGQKLPPFSYAYTELEAIMYALGVGASIKDPKDLKFIYEGSSDFSCLPTFGVIIGQKSMMGGGLAEIPGLSINFAKVLHGEQYLELYKPLPRAGKLKCEAVVADVLDKGSGVVIIMDVYSYSEKELICHNQFSLFLVGSGGFGGKRTSDKVKVAVAIPNRPPDAVLTDTTSLNQAALYRLSGDWNPLHIDPNFASLAGFDKPILHGLCTFGFSARRVLQQFADNDVSRFKAIKARFAKPVYPGQTLQTEMWKEGNRIHFQTKVQETGDIVISNAYVDLAPTSGTSAKTPSEGGKLQSTFVFEEIGRRLKDIGPEVVKKVNAVFEWHITKGGNIGAKWTIDLKSGSGKVYQGPAKGAADTTIILSDEDFMEVVLGKLDPQKV

SEQ ID NO: 7772 - protein, 571 aa, Artificial Sequence
  Synthetic polypeptide
MKKQKYGRIIMTSSASGIYGNFGQANYSAAKLGLLGLANSLAIEGRKSNIHCNTIAPNAGSRMTQTVMPEDLVEALKPEYVAPLVLWLCHESCEENGGLFEVGAGWIGKLRWERTLGAIVRQKNHPMTPEAVKANWKKICDFENASKPQSIQESTGSIIEVLSKIDSEGGVSANHTSRATSTATSGFAGAIGQKLPPFSYAYTELEAIMYALGVGASIKDPKDLKFIYEGSSDFSCLPTFGVIIGQKSMMGGGLAEIPGLSINFAKVLHGEQYLELYKPLPRAGKLKCEAVVADVLDKGSGVVIIMDVYSYSEKELICHNQFSLFLVGSGGFGGKRTSDKVKVAVAIPNRPPDAVLTDTTSLNQAALYRLSGDWNPLHIDPNFASLAGFDKPILHGLCTFGFSARRVLQQFADNDVSRFKAIKARFAKPVYPGQTLQTEMWKEGNRIHFQTKVQETGDIVISNAYVDLAPTSGTSAKTPSEGGKLQSTFVFEEIGRRLKDIGPEVVKKVNAVFEWHITKGGNIGAKWTIDLKSGSGKVYQGPAKGAADTTIILSDEDFMEVVLGKLDPQKV

SEQ ID NO: 7773 - protein, 446 aa, Artificial Sequence
  Synthetic polypeptide
MISAHYNLCPLGSSDSPTSASQVAGITESTGSIIEVLSKIDSEGGVSANHTSRATSTATSGFAGAIGQKLPPFSYAYTELEAIMYALGVGASIKDPKDLKFIYEGSSDFSCLPTFGVIIGQKSMMGGGLAEIPGLSINFAKVLHGEQYLELYKPLPRAGKLKCEAVVADVLDKGSGVVIIMDVYSYSEKELICHNQFSLFLVGSGGFGGKRTSDKVKVAVAIPNRPPDAVLTDTTSLNQAALYRLSGDWNPLHIDPNFASLAGFDKPILHGLCTFGFSARRVLQQFADNDVSRFKAIKARFAKPVYPGQTLQTEMWKEGNRIHFQTKVQETGDIVISNAYVDLAPTSGTSAKTPSEGGKLQSTFVFEEIGRRLKDIGPEVVKKVNAVFEWHITKGGNIGAKWTIDLKSGSGKVYQGPAKGAADTTIILSDEDFMEVVLGKLDPQKV

SEQ ID NO: 7774 - protein, 37 aa, Artificial Sequence
  Synthetic polypeptide
MAQSGLTATSASQVQAILLPQPASVRHYAWALTRCGL

SEQ ID NO: 7775 - protein, 97 aa, Artificial Sequence
  Synthetic polypeptide
MAQPGTLNLNNEVVKMRKEVKRIRVLVIRKLVRSVGRLKSKKGTEDALLKNQRRAQRLLEEIHAMKELKPDIVTKSALGDDINFEKIFKKIHKASPE

SEQ ID NO: 7776 - protein, 31 aa, Artificial Sequence
  Synthetic polypeptide
MEVYIPSFRYEESDLERGYTVNADCRYRSLS

SEQ ID NO: 7777 - skipped

SEQ ID NO: 7778 - protein, 176 aa, Artificial Sequence
  Synthetic polypeptide
MEVYIPSFRYEESDLERGYTVFKIEVLMNGRKHFVEKRYSEFHALHKKLKKCIKTPEIPSKHVRNWVPKVLEQRRQGLETYLQAVILENEELPKLFLDFLNVRHLPSLPKAESCGSFDETESEESSKLSHQPVLLFLRDPYVLPAASDFPNVVIEGVLHGIFYPHLQPSAASRRIL

SEQ ID NO: 7779 - protein, 209 aa, Artificial Sequence
  Synthetic polypeptide
MEVYIPSFRYEESDLERGYTVVIVWHRAFQTKMESYEVIVLEIAFSNGRLTYQVFKIEVLMNGRKHFVEKRYSEFHALHKKLKKCIKTPEIPSKHVRNWVPKVLEQRRQGLETYLQAVILENEELPKLFLDFLNVRHLPSLPKAESCGSFDETESEESSKLSHQPVLLFLRDPYVLPAASDFPNVVIEGVLHGIFYPHLQPSAASRRIL

SEQ ID NO: 7780 - protein, 866 aa, Artificial Sequence
  Synthetic polypeptide
MVSKSDQLLIVVSILEGRHFPKRPKHMLVVEAKFDGEQLATDPVDHTDQPEFATELAWEIDRKALHQHRLQRTPIKLQCFALDPVTSAKETIGYIVLDLRTAQETKQAPKWYQLLSNKYTKFKSEIQISIALETDTKPPVDSFKAKGAPPRDGKVPAILAGLDPRDIVAVLNEEGGYHQIGPAEYCTDSFIMSVTIAFATQLEQLIPCTMKLPERQPEFFFYYSLLGNDVTNEPFNDLINPNFEPERASVRIRSSVEILRVYLALQSKLQIHLCCGDQSLGSTEIPLTGLLKKGSTEINQHPVTVEGAFTLDPPNRAKQKLAPIPVELAPTVGVSVALQREGIDSQSLIELKTQNEHEPEHSKKKVLTPIKEKTLTGPKSPTVSPVPSHNQSPPTKDDATESEVESLQYDKDTKPNPKASSSVPASLAQLVTTSNASEVASGQKIAVPATSHHFCFSIDLRSIHALEIGFPINCILRYSYPFFGSAAPIMTNPPVEVRKNMEVFLPQSYCAFDFATMPHQLQDTFLRIPLLVELWHKDKMSKDLLLGIARIQLSNILSSEKTRFLGSNGEQCWRQTYSESVPVIAAQGSNNRIADLSYTVTLEDYGLVKMREIFISDSSQGVSAVQQKPSSLPPAPCPSEIQTEPRETLEYKAALELEMWKEMQEDIFENQLKQKELAHMQALAEEWKKRDRERESLVKKKVAEYTILEGKLQKTLIDLEKREQQLASVESELQREKKELQSERQRNLQELQDSIRRAKEDCIHQVELERLKIKQLEEDKHRLQQQLNDAENKYKILEKEFQQFKDQQNNKPEIRLQSEINLLTLEKVELERKLESATKSKLHYKQQWGRALKELARLKQNWKKLL

SEQ ID NO: 7781 - protein, 840 aa, Artificial Sequence
  Synthetic polypeptide
MLVVEAKFDGEQLATDPVDHTDQPEFATELAWEIDRKALHQHRLQRTPIKLQCFALDPVTSAKETIGYIVLDLRTAQETKQAPKWYQLLSNKYTKFKSEIQISIALETDTKPPVDSFKAKGAPPRDGKVPAILAGLDPRDIVAVLNEEGGYHQIGPAEYCTDSFIMSVTIAFATQLEQLIPCTMKLPERQPEFFFYYSLLGNDVTNEPFNDLINPNFEPERASVRIRSSVEILRVYLALQSKLQIHLCCGDQSLGSTEIPLTGLLKKGSTEINQHPVTVEGAFTLDPPNRAKQKLAPIPVELAPTVGVSVALQREGIDSQSLIELKTQNEHEPEHSKKKVLTPIKEKTLTGPKSPTVSPVPSHNQSPPTKDDATESEVESLQYDKDTKPNPKASSSVPASLAQLVTTSNASEVASGQKIAVPATSHHFCFSIDLRSIHALEIGFPINCILRYSYPFFGSAAPIMTNPPVEVRKNMEVFLPQSYCAFDFATMPHQLQDTFLRIPLLVELWHKDKMSKDLLLGIARIQLSNILSSEKTRFLGSNGEQCWRQTYSESVPVIAAQGSNNRIADLSYTVTLEDYGLVKMREIFISDSSQGVSAVQQKPSSLPPAPCPSEIQTEPRETLEYKAALELEMWKEMQEDIFENQLKQKELAHMQALAEEWKKRDRERESLVKKKVAEYTILEGKLQKTLIDLEKREQQLASVESELQREKKELQSERQRNLQELQDSIRRAKEDCIHQVELERLKIKQLEEDKHRLQQQLNDAENKYKILEKEFQQFKDQQNNKPEIRLQSEINLLTLEKVELERKLESATKSKLHYKQQWGRALKELARLKQNWKKLL

SEQ ID NO: 7782 - protein, 884 aa, Artificial Sequence
  Synthetic polypeptide
MEPRPTAPSSGAPGLAGVGETPSAAALAAARVELPGTAVPSVPEDAAPASRDGGGVRDEGPAAAGDGLGRPLGPTPSQSRFQVDLVSENAGRAAAAAAAAAAAAAAAGAGAGAKQTPADGEASGESEPAKGSEEAKGRFRVNFVDPAASSSAEDSLSDAAGVGVDGPNVSFQNGGDTVLSEGSSLHSGGGGGSGHHQHYYYDTHTNTYYLRTFGHNTMDAVPRIDHYRHTAAQLGEKLLRPSLAELHDELEKEPFEDGFANGEESTPTRDAVVTYTAESKGVVKFGWIKGVLVRCMLNIWGVMLFIRLSWIVGQAGIGLSVLVIMMATVVTTITGLSTSAIATNGFVRGGGAYYLISRSLGPEFGGAIGLIFAFANAVAVAMYVVGFAETVVELLKEHSILMIDEINDIRIIGAITVVILLGISVAGMEWEAKAQIVLLVILLLAIGDFVIGTFIPLESKKPKGFFGYKSEIFNENFGPDFREEETFFSVFAIFFPAATGILAGANISGDLADPQSAIPKGTLLAILITTLVYVGIAVSVGSCVVRDATGNVNDTIVTELTNCTSAACKLNFDFSSCESSPCSYGLMNNFQVMSMVSGFTPLISAGIFSATLSSALASLVSAPKIFQALCKDNIYPAFQMFAKGYGKNNEPLRGYILTFLIALGFILIAELNVIAPIISNFFLASYALINFSVFHASLAKSPGWRPAFKYYNMWISLLGAILCCIVMFVINWWAALLTYVIVLGLYIYVTYKKPDVNWGSSTQALTYLNALQHSIRLSGVEDHVKNFRPQCLVMTGAPNSRPALLHLVHDFTKNVGLMICGHVHMGPRRQAMKEMSIDQAKYQRWLIKNKMKAFYAPVHADDLREGAQYLMQCGPEKPKDWTPL

SEQ ID NO: 7783 - protein, 1102 aa, Artificial Sequence
  Synthetic polypeptide
MRLTHICCCCLLYQLGFLSNGIVSELQFAPDREEWEVVFPALWRREPVDPAGGSGGSADPGWVRGVGGGGSARAQAAGSSREVRSVAPVPLEEPVEGRSESRLRPPPPSEGEEDEELESQELPRGSSGAAALSPGAPASWQPPPPPQPPPSPPPAQHAEPDGDEVLLRIPAFSRDLYLLLRRDGRFLAPRFAVEQRPNPGPGPTGAASAPQPPAPPDAGCFYTGAVLRHPGSLASFSTCGGGLMGFIQLNEDFIFIEPLNDTMAITGHPHRVYRQKRSMEEKVTEKSALHSHYCGIISDKGRPRSRKIAESGRGKRYSYKLPQEYNIETVVVADPAMVSYHGADAARRFILTILNMVFNLFQHKSLSVQVNLRVIKLILLHETPPELYIGHHGEKMLESFCKWQHEEFGKKNDIHLEMSTNWGEDMTSVDAAILITRKDFCVHKDEPCDTVGIAYLSGMCSEKRKCIIAEDNGLNLAFTIAHEMGHNMGINHDNDHPSCADGLHIMSGEWIKGQNLGDVSWSRCSKEDLERFLRSKASNCLLQTNPQSVNSVMVPSKLPGMTYTADEQCQILFGPLASFCQEMQHVICTGLWCKVEGEKECRTKLDPPMDGTDCDLGKWCKAGECTSRTSAPEHLAGEWSLWSPCSRTCSAGISSRERKCPGLDSEARDCNGPRKQYRICENPPCPAGLPGFRDWQCQAYSVRTSSPKHILQWQAVLDEEKPCALFCSPVGKEQPILLSEKVMDGTSCGYQGLDICANGRCQKVGCDGLLGSLAREDHCGVCNGNGKSCKIIKGDFNHTRGAGYVEVLVIPAGARRIKVVEEKPAHSYLALRDAGKQSINSDWKIEHSGAFNLAGTTVHYVRRGLWEKISAKGPTTAPLHLLVLLFQDQNYGLHYEYTIPSDPLPENQSSKAPEPLFMWTHTSWEDCDATCGGGERKTTVSCTKIMSKNISIVDNEKCKYLTKPEPQIRKCNEQPCQTRWMMTEWTPCSRTCGKGMQSRQVACTQQLSNGTLIRARERDCIGPKPASAQRCEGQDCMTVWEAGVWSECSVKCGKGIRHRTVRCTNPRKKCVLSTRPREAEDCEDYSKCYVWRMGDWSKPTSY

SEQ ID NO: 7784 - protein, 109 aa, Artificial Sequence
  Synthetic polypeptide
MADEIAKAQVARPGGDTIFGKIIRKEIPAKIIFEDDRCLAFHDISPQAPTHFLVIPKKHISQISVAEDDDESLTRCRKDSTEEIEMFDGMSLSLQMTASGSICHTPDPH

SEQ ID NO: 7785 - skipped

SEQ ID NO: 7786 - protein, 1073 aa, Artificial Sequence
  Synthetic polypeptide
MNSPVDPGARQALRKKPPERTPEDLNTIYSYLHGMEILSNLREHQLRLMSARARYERYSGNQVLFCSETIARCWYILLSGSVLVKGSMVLPPCSFGKQFGGKRGCDCLVLEPSEMIVVENAKDNEDSILQREIPARQSRRRFRKINYKGERQTITDDVEVNSYLSLPADLTKMHLTENPHPQVTHVSSSQSGCSIASDSGSSSLSDIYQATESEVGDVDLTRLPEGPVDSEDDEEEDEEIDRTDPLQGRDLVRECLEKEPADKTDDDIEQLLEFMHQLPAFANMTMSVRRELCSVMIFEVVEQAGAIILEDGQELDSWYVILNGTVEISHPDGKVENLFMGNSFGITPTLDKQYMHGIVRTKVDDCQFVCIAQQDYWRILNHVEKNTHKVEEEGEIVMVHEHRELDRSGTRKGHIVIKATPERLIMHLIEEHSIVDPTYIEDFLLTYRTFLESPLDVGIKLLEWFKIDSLRDKVTRIVLLWVNNHFNDFEGDPAMTRFLEEFEKNLEDTKMNGHLRLLNIACAAKAKWRQVVLQKASRESPLQFSLNGGSEKGFGIFVEGVEPGSKAADSGLKRGDQIMEVNGQNFENITFMKAVEILRNNTHLALTVKTNIFVFKELLFRTEQEKSGVPHIPKIAEKKSNRHSIQHVPGDIEQTSQEKGSKKVKANTVSGGRNKIRKILDKTRFSILPPKLFSDGGLSQSQDDSIVGTRHCRHSLAIMPIPGTLSSSSPDLLQPTTSMLDFSNPSDIPDQVIRVFKVDQQSCYIIISKDTTAKEVVFHAVHEFGLTGASDTYSLCEVSVTPEGVIKQRRLPDQFSKLADRIQLNGRYYLKNNMETETLCSDEDAQELVKESQLSMLQLSTIEVATQLSMRDFDLFRNIEPTEYIDDLFKLNSKTGNTHLKRFEDIVNQETFWVASEILTEANQLKRMKIIKHFIKIALHCRECKNFNSMFAIISGLNLASVARLRGTWEKLPSKYEKHLQDLQDIFDPSRNMAKYRNILSSQSMQPPIIPLFPVVKKDMTFLHEGNDSKVDGLVNFEKLRMISKEIRQVVRMTSANMDPAMMFRQRHDEFVT

SEQ ID NO: 7787 - protein, 1078 aa, Artificial Sequence
  Synthetic polypeptide
MNSPVDPGARQALRKKPPERTPEDLNTIYSYLHGMEILSNLREHQLRLMSARARYERYSGNQVLFCSETIARCWYILLSGSVLVKGSMVLPPCSFGKQFGGKRGCDCLVLEPSEMIVVENAKDNEDSILQREIPARQSRRRFRKINYKGERQTITDDVEVNSYLSLPADLTKMHLTENPHPQVTHVSSSQSGCSIASDSGSSSLSDIYQATESEVGDVDLTRLPEGPVDSEDDEEEDEEIDRTDPLQGRDLVRECLEKEPADKTDDDIEQLLEFMHQLPAFANMTMSVRRELCSVMIFEVVEQAGAIILEDGQELDSWYVILNGTVEISHPDGKVENLFMGNSFGITPTLDKQYMHGIVRTKVDDCQFVCIAQQDYWRILNHVEKNTHKVEEEGEIVMVHEHRELDRSGTRKGHIVIKATPERLIMHLIEEHSIVDPTYIEDFLLTYRTFLESPLDVGIKLLEWFKIDSLRDKVTRIVLLWVNNHFNDFEGDPAMTRFLEEFEKNLEDTKMNGHLRLLNIACAAKAKWRQVVLQKASRESPLQFSLNGGSEKGFGIFVEGVEPGSKAADSGLKRGDQIMEVNGQNFENITFMKAVEILRNNTHLALTVKTNIFVFKELLFRTEQEKSGVPHIPKIAEKKSNRHSIQHVPGDIEQTSQEKGSKKVKANTVSGGRNKIRKILDKTRFSILPPKLFSDGGLSQSQDDSIVGTRHCRHSLAIMPIPGTLSSSSPDLLQPTTSMLDFSNPSAVGFYYIPDQVIRVFKVDQQSCYIIISKDTTAKEVVFHAVHEFGLTGASDTYSLCEVSVTPEGVIKQRRLPDQFSKLADRIQLNGRYYLKNNMETETLCSDEDAQELVKESQLSMLQLSTIEVATQLSMRDFDLFRNIEPTEYIDDLFKLNSKTGNTHLKRFEDIVNQETFWVASEILTEANQLKRMKIIKHFIKIALHCRECKNFNSMFAIISGLNLASVARLRGTWEKLPSKYEKHLQDLQDIFDPSRNMAKYRNILSSQSMQPPIIPLFPVVKKDMTFLHEGNDSKVDGLVNFEKLRMISKEIRQVVRMTSANMDPAMMFRQRHDEFVT

SEQ ID NO: 7788 - protein, 1123 aa, Artificial Sequence
  Synthetic polypeptide
MAPTLFQKLFSKRTGLGAPGRDARDPDCGFSWPLPEFDPSQIRLIVYQDCERRGRNVLFDSSVKRRNEDISVSDLNTIYSYLHGMEILSNLREHQLRLMSARARYERYSGNQVLFCSETIARCWYILLSGSVLVKGSMVLPPCSFGKQFGGKRGCDCLVLEPSEMIVVENAKDNEDSILQREIPARQSRRRFRKINYKGERQTITDDVEVNSYLSLPADLTKMHLTENPHPQVTHVSSSQSGCSIASDSGSSSLSDIYQATESEVGDVDLTRLPEGPVDSEDDEEEDEEIDRTDPLQGRDLVRECLEKEPADKTDDDIEQLLEFMHQLPAFANMTMSVRRELCSVMIFEVVEQAGAIILEDGQELDSWYVILNGTVEISHPDGKVENLFMGNSFGITPTLDKQYMHGIVRTKVDDCQFVCIAQQDYWRILNHVEKNTHKVEEEGEIVMVHEHRELDRSGTRKGHIVIKATPERLIMHLIEEHSIVDPTYIEDFLLTYRTFLESPLDVGIKLLEWFKIDSLRDKVTRIVLLWVNNHFNDFEGDPAMTRFLEEFEKNLEDTKMNGHLRLLNIACAAKAKWRQVVLQKASRESPLQFSLNGGSEKGFGIFVEGVEPGSKAADSGLKRGDQIMEVNGQNFENITFMKAVEILRNNTHLALTVKTNIFVFKELLFRTEQEKSGVPHIPKIAEKKSNRHSIQHVPGDIEQTSQEKGSKKVKANTVSGGRNKIRKILDKTRFSILPPKLFSDGGLSQSQDDSIVGTRHCRHSLAIMPIPGTLSSSSPDLLQPTTSMLDFSNPSDIPDQVIRVFKVDQQSCYIIISKDTTAKEVVFHAVHEFGLTGASDTYSLCEVSVTPEGVIKQRRLPDQFSKLADRIQLNGRYYLKNNMETETLCSDEDAQELVKESQLSMLQLSTIEVATQLSMRDFDLFRNIEPTEYIDDLFKLNSKTGNTHLKRFEDIVNQETFWVASEILTEANQLKRMKIIKHFIKIALHCRECKNFNSMFAIISGLNLASVARLRGTWEKLPSKYEKHLQDLQDIFDPSRNMAKYRNILSSQSMQPPIIPLFPVVKKDMTFLHEGNDSKVDGLVNFEKLRMISKEIRQVVRMTSANMDPAMMFRQRHDEFVT

SEQ ID NO: 7789 - protein, 788 aa, Artificial Sequence
  Synthetic polypeptide
MSVRRELCSVMIFEVVEQAGAIILEDGQELDSWYVILNGTVEISHPDGKVENLFMGNSFGITPTLDKQYMHGIVRTKVDDCQFVCIAQQDYWRILNHVEKNTHKVEEEGEIVMVHEHRELDRSGTRKGHIVIKATPERLIMHLIEEHSIVDPTYIEDFLLTYRTFLESPLDVGIKLLEWFKIDSLRDKVTRIVLLWVNNHFNDFEGDPAMTRFLEEFEKNLEDTKMNGHLRLLNIACAAKAKWRQVVLQKASRESPLQFSLNGGSEKGFGIFVEGVEPGSKAADSGLKRGDQIMEVNGQNFENITFMKAVEILRNNTHLALTVKTNIFVFKELLFRTEQEKSGVPHIPKIAEKKSNRHSIQHVPGDIEQTSQEKGSKKVKANTVSGGRNKIRKILDKTRFSILPPKLFSDGGLSQSQDDSIVGTRHCRHSLAIMPIPGTLSSSSPDLLQPTTSMLDFSNPSDIPDQVIRVFKVDQQSCYIIISKDTTAKEVVFHAVHEFGLTGASDTYSLCEVSVTPEGVIKQRRLPDQFSKLADRIQLNGRYYLKNNMETETLCSDEDAQELVKESQLSMLQLSTIEVATQLSMRDFDLFRNIEPTEYIDDLFKLNSKTGNTHLKRFEDIVNQETFWVASEILTEANQLKRMKIIKHFIKIALHCRECKNFNSMFAIISGLNLASVARLRGTWEKLPSKYEKHLQDLQDIFDPSRNMAKYRNILSSQSMQPPIIPLFPVVKKDMTFLHEGNDSKVDGLVNFEKLRMISKEIRQVVRMTSANMDPAMMFRQRHDEFVT

SEQ ID NO: 7790 - protein, 441 aa, Artificial Sequence
  Synthetic polypeptide
MKLWVSALLMAWFGVLSCVQAEFFTSIGHMTDLIYAEKELVQSLKEYILVEEAKLSKIKSWANKMEALTSKSAADAEGYLAHPVNAYKLVKRLNTDWPALEDLVLQDSAAGFIANLSVQRQFFPTDEDEIGAAKALMRLQDTYRLDPGTISRGELPGTKYQAMLSVDDCFGMGRSAYNEGDYYHTVLWMEQVLKQLDAGEEATTTKSQVLDYLSYAVFQLGDLHRALELTRRLLSLDPSHERAGGNLRYFEQLLEEEREKTLTNQTEAELATPEGIYERPVDYLPERDVYESLCRGEGVKLTPRRQKRLFCRYHHGNRAPQLLIAPFKEEDEWDSPHIVRYYDVMSDEEIERIKEIAKPKLARATVRDPKTGVLTVASYRVSKSSWLEEDDDPVVARVNRRMQHITGLTVKTAELLQVSWLTSVTQYLGRPRQEDCSKPGV

SEQ ID NO: 7791 - protein, 64 aa, Artificial Sequence
  Synthetic polypeptide
MSVVGIDLGFQSCYVAVARAGGIETIANEYSDRCTPACISFGPKNRSIGAAAKSQGLEHLWILV

SEQ ID NO: 7792 - protein, 44 aa, Artificial Sequence
  Synthetic polypeptide
MNPVPQMEMQKSPVFCVAHAGSCRPELFLFGHLGSSWGLDLKEE

SEQ ID NO: 7793 - protein, 122 aa, Artificial Sequence
  Synthetic polypeptide
MDEKVFTKELDQWIEQLNECKQLSESQVKSLCEKAKEILTKESNVQEVRCPVTVCGDVHGQFHDLMELFRIGGKSPDTNYLFMGDYVDRGYYSVETVTLLVALKRLGHRWGEDKTDGEDEHP

SEQ ID NO: 7794 - protein, 57 aa, Artificial Sequence
  Synthetic polypeptide
MELFRIGGKSPDTNYLFMGDYVDRGYYSVETVTLLVALKRLGHRWGEDKTDGEDEHP

SEQ ID NO: 7795 - protein, 109 aa, Artificial Sequence
  Synthetic polypeptide
MPFNGSDVLNLLFLYPLTSNEAKEILTKESNVQEVRCPVTVCGDVHGQFHDLMELFRIGGKSPDTNYLFMGDYVDRGYYSVETVTLLVALKRLGHRWGEDKTDGEDEHP

SEQ ID NO: 7796 - protein, 472 aa, Artificial Sequence
  Synthetic polypeptide
MIIEMATGNPYLPSSSDLDLLHKIVLKVGNLSPHLQNIFSKSPIFAGVVLPQVQHPKNARKKYPKLNGLLADIVHACLQIDPADRISSSDLLHHEYFTRDGFIEKFMPELKAKLLQEAKVNSLIKPKESSKENELRKDERKTVYTNTLLSSSVLGKEIEKEKKPKEIKVRVIKVKGGRGDISEPKKKEYEGGLGQQDANENVHPMSPDTKLVTIEPPNPINPSTNCNGLKENPHCGGSVTMPPINLTNSNLMAANLSSNLFHPSVRLTERAKKRRTSSQSIGQVMPNSRQEDPGPIQSQMEKGIFNERTGHSDQMANENKRKLNFSRSDRKEFHFPELPVTIQSKDTKGMEVKQIKMLKRESKKTESSKIPTLLNVDQNQEKQEAKEILTKESNVQEVRCPVTVCGDVHGQFHDLMELFRIGGKSPDTNYLFMGDYVDRGYYSVETVTLLVALKRLGHRWGEDKTDGEDEHP

SEQ ID NO: 7797 - protein, 96 aa, Artificial Sequence
  Synthetic polypeptide
MIIEMATGNPYLPSSSDLDLLHKIVLKVGNLSPHLQNIFSKSPIFAGVVLPQVQHPKNARKKYPKLNGLLADIVHDCCCDGRKKKLERCLVCSKHQ

SEQ ID NO: 7798 - protein, 285 aa, Artificial Sequence
  Synthetic polypeptide
MEMYETLGKVGEGSYGTVMKCKHKNTGQIVAIKIFYERPEQSVNKIAMREIKFLKQFHHENLVNLIEVFRQKKKIHLVFEFIDHTVLDELQHYCHGLESKRLRKYLFQILRAIDYLHSNNIIHRDIKPENILVSQSGITKLCDFGFARTLAAPGDIYTDYVATRWYRAPELVLKDTSYGKPVDIWALGCMIIEMATGNPYLPSSSDLDLLHKIVLKVGNLSPHLQNIFSKSPIFAGVVLPQVQHPKNARKKYPKLNGLLADIVHDCCCDGRKKKLERCLVCSKHQ

SEQ ID NO: 7799 - protein, 8 aa, Artificial Sequence
  Synthetic polypeptide
SLMDCWQI

SEQ ID NO: 7800 - protein, 148 aa, Artificial Sequence
  Synthetic polypeptide
MEMYETLGKVGEGSYGTVMKCKHKNTGQIVAIKIFYERPEQSVNKIAMREIKFLKQFHHENLVNLIEVFRQKKKIHLVFEFIDHTVLDELQHYCHGLESKRLRKYLFQILRAIDYLHSNNLGPSGCRKTSSGLPLILHYGKLYNDFIV

SEQ ID NO: 7801 - protein, 305 aa, Artificial Sequence
  Synthetic polypeptide
MEEKRRKYSISSDNSDTTDSHATSTSASRCSKLPSSTKSGWPRQNEKKPSEVFRTDLITAMKIPDSYQLSPDDYYILADPWRQEWEKGVQVPAGAEAIPEPVVRILPPLEGPPAQASPSSTMLGEGSQPDWPGGSRYDLDEIDAYWLELINSELKEMERPELDELTLERVLEELETLCHQNMARAIETQEGLGIEYDEDVVCDVCRSPEGEDGNEMVFCDKCNVCVHQACYGILKVPTGSWLCRTCALGVQPKCLLCPKRGGALKPTRSGTKWVHVSCALWIPEECMVAGTCSPSYSGGRGRRIT

SEQ ID NO: 7802 - protein, 967 aa, Artificial Sequence
  Synthetic polypeptide
MSQPGIPASGGAPASLQAQNGAALASGSPYTNGPVQNALLSSQESVSQGYNFQLPGSYPHPIPAKTLNPVSGQSNYGGSQGSGQTLNRPPVASNPVTPSLHSGPAPRMPLPASQNPATTPMPSSSFLPEANLPPPLNWQYNYPSTASQTNHCPRASSQPTVSGNTSLTTNHQYVSSGYPSLQNSFIKSGPSVPPLVNPPLPTTFQPGAPHGPPPAGGPPPVRALTPLTSSYRDVPQPLFNSAVNQEGITSNTNNGSMVVHSSYDEIEGGGLLATPQLTNKNPKMSRSVGYSYPSLPPGYQNTTPPGATGVPPSSLNYPSGPQAFTQTPLGANHLTTSMSGLSLQPEGLRVVNLLQERNMLPSTPLKPPVPNLHEDIQKLNCNPELFRCTLTSIPQTQALLNKAKLPLGLLLHPFKDLVQLPVVTSSTIVRCRSCRTYINPFVSFLDQRRWKCNLCYRVNDVPEEFLYNPLTRVYGEPHRRPEVQNATIEFMAPSEYMLRPPQPPVYLFVFDVSHNAVETGYLNSVCQSLLDNLDLLPGNTRTKIGFITFDSTIHFYGLQESLSQPQMLIVSDIEDVFIPMPENLLVNLNESKELVQDLLKTLPQMFTKTLETQSALGPALQAAFKLMSPTGGRMSVFQTQLPTLGVGALKPREEPNHRSSAKDIHMTPSTDFYKKLALDCSGQQVAVDLFLLSGQYSDLASLGCISRYSAGSVYYYPSYHHQHNPVQVQKLQKELQRYLTRKIGFEAVMRIRCTKGLSIHTFHGNFFVRSTDLLSLPNVNPDAGYAVQMSVEESLTDTQLVSFQSALLYTSSKGERRIRVHTLCLPVVSTLNDVFLGADVQAISGLLANMAVDRSMTASLSDARDALVNAVIDSLSAYRSSVLSNQQPGLMVPFSLRLFPLFVLALLKQKSFQTGTNARLDERIFAMCQVKNQPLVYLMLTTHPSLYRVDNLSDELGQQERNSVSNK

SEQ ID NO: 7803 - protein, 99 aa, Artificial Sequence
  Synthetic polypeptide
MSQHRHQRHSRVISSSPVDTTSVGFCPTFKKFKRNDDECRAFVKRVIMSRFFKIIMISTVTSNAFFMALWTSYDIRYRLFRLLEGGGTAIENNMYESPW

SEQ ID NO: 7804 - protein, 402 aa, Artificial Sequence
  Synthetic polypeptide
MSQHRHQRHSRVISSSPVDTTSVGFCPTFKKFKRNDDECRAFVKRVIMSRFFKIIMISTVTSNAFFMALWTSYDIRYRLFRLLEFSEIFFVSICTSELSMKVYVDPINYWKNGYNLLDVIIIIVMFLPYALRQLMGKQFTYLYIADGMQSLRILKLIGYSQGIRTLITAVGQTVYTVASVLLLLFLLMYIFAILGFCLFGSPDNGDHDNWGNLAAAFFTLFSLATVDGWTDLQKQLDNREFALSRAFTIIFILLASFIFLNMFVGVMIMHTEDSIRKFERELMLEQQEMLMGEKQVILQRQQEEISRLMHIQKNADCTSFSELVENFKKTLSHTDPMVLDDFGTSLPFIDIYFSTLDYQDTTVHKLQELYYEIVHVLSLMLEDLPQEKPQSLEKVAKMIDKT

SEQ ID NO: 7805 - protein, 334 aa, Artificial Sequence
  Synthetic polypeptide
MSSRGGKKKSTKTSRSAKAGVIFPVGRMLRYIKKGHPKYRIGVGAPVYMAAVLEYLTAEILELAGNAARDNKKGRVTPRHILLAVANDEELNQLLKGVTIASGGVLPNIHPELLAKKRGSKGKLEAIITPPPAKKAKSPSQKKPVSKKAGGKKGARKSKKKQGEVSKAASADSTTEGTPADGFTVLSTKSLFLGQKLNLIHSEISNLAGFEVEAIINPTNADIDLKDDLGNTLEKKGGKEFVEAVLELRKKNGPLEVAGAAVSAGHGLPAKFVIHCNSPVWGADKCEELLEKTVKNCLALADDKKLKSIAFPSIGSGRKISLDSQDTASPAVTL

SEQ ID NO: 7806 - protein, 333 aa, Artificial Sequence
  Synthetic polypeptide
MSSRGGKKKSTKTSRSAKAGVIFPVGRMLRYIKKGHPKYRIGVGAPVYMAAVLEYLTAEILELAGNAARDNKKGRVTPRHILLAVANDEELNQLLKGVTIASGGVLPNIHPELLAKKRGSKGKLEAIITPPPAKKAKSPSQKKPVSKKAGGKKGARKSKKQGEVSKAASADSTTEGTPADGFTVLSTKSLFLGQKLNLIHSEISNLAGFEVEAIINPTNADIDLKDDLGNTLEKKGGKEFVEAVLELRKKNGPLEVAGAAVSAGHGLPAKFVIHCNSPVWGADKCEELLEKTVKNCLALADDKKLKSIAFPSIGSGRKISLDSQDTASPAVTL

SEQ ID NO: 7807 - protein, 331 aa, Artificial Sequence
  Synthetic polypeptide
MSSRGGKKKSTKTSRSAKAGVIFPVGRMLRYIKKGHPKYRIGVGAPVYMAAVLEYLTAEILELAGNAARDNKKGRVTPRHILLAVANDEELNQLLKGVTIASGGVLPNIHPELLAKKRGSKGKLEAIITPPPAKKAKSPSQKKPVSKKAGGKKGARKSKKKQGEVSKAASADSTTEGTPADGFTVLSTKSLFLGQKLQVVQADIASIDSDAVVHPTNTDFYIGGEVGNTLEKKGGKEFVEAVLELRKKNGPLEVAGAAVSAGHGLPAKFVIHCNSPVWGADKCEELLEKTVKNCLALADDKKLKSIAFPSIGSGRKISLDSQDTASPAVTL

SEQ ID NO: 7808 - protein, 162 aa, Artificial Sequence
  Synthetic polypeptide
MSSRGGKKKSTKTSRSAKAGVIFPVGRMLRYIKKGHPKYRIGVGAPVYMAAVLEYLTGNTLEKKGGKEFVEAVLELRKKNGPLEVAGAAVSAGHGLPAKFVIHCNSPVWGADKCEELLEKTVKNCLALADDKKLKSIAFPSIGSGRKISLDSQDTASPAVTL

SEQ ID NO: 7809 - protein, 3745 aa, Artificial Sequence
  Synthetic polypeptide
MFRIGRRQLWKHSVTRVLTQRLKGEKEAKRALLDARHNYLFAIVASCLDLNKTEVEDAILEGNQIERIDQLFAVGGLRHLMFYYQDVEEAETGQLGSLGGVNLVSGKIKKPKVFVTEGNDVALTGVCVFFIRTDPSKAITPDNIHQEVSFNMLDAADGGLLNSVRRLLSDIFIPALRATSHGWGELEGLQDAANIRQEFLSSLEGFVNVLSGAQESLKEKVNLRKCDILELKTLKEPTDYLTLANNPETLGKIEDCMKVWIKQTEQVLAENNQLLKEADDVGPRAELEHWKKRLSKFNYLLEQLKSPDVKAVLAVLAAAKSKLLKTWREMDIRITDATNEAKDNVKYLYTLEKCCDPLYSSDPLSMMDAIPTLINAIKMIYSISHYYNTSEKITSLFVKVTNQIISACKAYITNNGTASIWNQPQDVVEEKILSAIKLKQEYQLCFHKTKQKLKQNPNAKQFDFSEMYIFGKFETFHRRLAKIIDIFTTLKTYSVLQDSTIEGLEDMATKYQGIVATIKKKEYNFLDQRKMDFDQDYEEFCKQTNDLHNELRKFMDVTFAKIQNTNQALRMLKKFERLNIPNLGIDDKYQLILENYGADIDMISKLYTKQKYDPPLARNQPPIAGKILWARQLFHRIQQPMQLFQQHPAVLSTAEAKPIIRSYNRMAKVLLEFEVLFHRAWLRQIEEIHVGLEASLLVKAPGTGELFVNFDPQILILFRETECMAQMGLEVSPLATSLFQKRDRYKRNFSNMKMMLAEYQRVKSKIPAAIEQLIVPHLAKVDEALQPGLAALTWTSLNIEAYLENTFAKIKDLELLLDRVNDLIEFRIDAILEEMSSTPLCQLPQEEPLTCEEFLQMTKDLCVNGAQILHFKSSLVEEAVNELVNMLLDVEVLSEEESEKISNENSVNYKNESSAKREEGNFDTLTSSINARANALLLTTVTRKKKETEMLGEEARELLSHFNHQNMDALLKVTRNTLEAIRKRIHSSHTINFRDSNSASNMKQNSLPIFRASVTLAIPNIVMAPALEDVQQTLNKAVECIISVPKGVRQWSSELLSKKKIQERKMAALQSNEDSDSDVEMGENELQDTLEIASVNLPIPVQTKNYYKNVSENKEIVKLVSVLSTIINSTKKEVITSMDCFKRYNHIWQKGKEEAIKTFITQSPLLSEFESQILYFQNLEQEINAEPEYVCVGSIALYTADLKFALTAETKAWMVVIGRHCNKKYRSEMENIFMLIEEFNKKLNRPIKDLDDIRIAMAALKEIREEQISIDFQVGPIEESYALLNRYGLLIAREEIDKVDTLHYAWEKLLARAGEVQNKLVSLQPSFKKELISAVEVFLQDCHQFYLDYDLNGPMASGLKPQEASDRLIMFQNQFDNIYRKYITYTGGEELFGLPATQYPQLLEIKKQLNLLQKIYTLYNSVIETVNSYYDILWSEVNIEKINNELLEFQNRCRKLPRALKDWQAFLDLKKIIDDFSECCPLLEYMASKAMMERHWERITTLTGHSLDVGNESFKLRNIMEAPLLKYKEEIEDICISAVKERDIEQKLKQVINEWDNKTFTFGSFKTRGELLLRGDSTSEIIANMEDSLMLLGSLLSNRYNMPFKAQIQKWVQYLSNSTDIIESWMTVQNLWIYLEAVFVGGDIAKQLPKEAKRFSNIDKSWVKIMTRAHEVPSVVQCCVGDETLGQLLPHLLDQLEICQKSLTGYLEKKRLCFPRFFFVSDPALLEILGQASDSHTIQAHLLNVFDNIKSVKFHEKIYDRILSISSQEGETIELDKPVMAEGNVEVWLNSLLEESQSSLHLVIRQAAANIQETGFQLTEFLSSFPAQVGLLGIQMIWTRDSEEALRNAKFDKKIMQKTNQAFLELLNTLIDVTTRDLSSTERVKYETLITIHVHQRDIFDDLCHMHIKSPMDFEWLKQCRFYFNEDSDKMMIHITDVAFIYQNEFLGCTDRLVITPLTDRCYITLAQALGMSMGGAPAGPAGTGKTETTKDMGRCLGKYVVVFNCSDQMDFRGLGRIFKGLAQSGSWGCFDEFNRIDLPVLSVAAQQISIILTCKKEHKKSFIFTDGDNVTMNPEFGLFLTMNPGYAGRQELPENLKINFRSVAMMVPDRQIIIRVKLASCGFIDNVVLARKFFTLYKLCEEQLSKQVHYDFGLRNILSVLRTLGAAKRANPMDTESTIVMRVLRDMNLSKLIDEDEPLFLSLIEDLFPNILLDKAGYPELEAAISRQVEEAGLINHPPWKLKVIQLFETQRVRHGMMTLGPSGAGKTTCIHTLMRAMTDCGKPHREMRMNPKAITAPQMFGRLDVATNDWTDGIFSTLWRKTLRAKKGEHIWIILDGPVDAIWIENLNSVLDDNKTLTLANGDRIPMAPNCKIIFEPHNIDNASPATVSRNGMVFMSSSILDWSPILEGFLKKRSPQEAEILRQLYTESFPDLYRFCIQNLEYKMEVLEAFVITQSINMLQGLIPLKEQGGEVSQAHLGRLFVFALLWSAGAALELDGRRRLELWLRSRPTGTLELPPPAGPGDTAFDYYVAPDGTWTHWNTRTQEYLYPSDTTPEYGSILVPNVDNVRTDFLIQTIAKQGKAVLLIGEQGTAKTVIIKGFMSKYDPECHMIKSLNFSSATTPLMFQRTIESYVDKRMGTTYGPPAGKKMTVFIDDVNMPIINEWGDQVTNEIVRQLMEQNGFYNLEKPGEFTSIVDIQFLAAMIHPGGGRNDIPQRLKRQFSIFNCTLPSEASVDKIFGVIGVGHYCTQRGFSEEVRDSVTKLVPLTRRLWQMTKIKMLPTPAKFHYVFNLRDLSRVWQGMLNTTSEVIKEPNDLLKLWKHECKRVIADRFTVSSDVTWFDKALVSLVEEEFGEEKKLLVDCGIDTYFVDFLRDAPEAAGETSEEADAETPKIYEPIESFSHLKERLNMFLQLYNESIRGAGMDMVFFADAMVHLVKISRVIRTPQGNALLVGVGGSGKQSLTRLASFIAGYVSFQITLTRSYNTSNLMEDLKVLYRTAGQQGKGITFIFTDNEIKDESFLEYMNNVLSSGEVSNLFARDEIDEINSDLASVMKKEFPRCLPTNENLHDYFMSRVRQNLHIVLCFSPVGEKFRNRALKFPALISGCTIDWFSRWPKDALVAVSEHFLTSYDIDCSLEIKKEVVQCMGSFQDGVAEKCVDYFQRFRRSTHVTPKSYLSFIQGYKFIYGEKHVEVRTLANRMNTGLEKLKEASESVAALSKELEAKEKELQVANDKADMVLKEVTMKAQAAEKVKAEVQKVKDRAQAIVDSISKDKAIAEEKLEAAKPALEEAEAALQTIRPSDIATVRTLGRPPHLIMRIMDCVLLLFQRKVSAVKIDLEKSCTMPSWQESLKLMTAGNFLQNLQQFPKDTINEEVIEFLSPYFEMPDYNIETAKRVCGNVAGLCSWTKAMASFFSINKEVLPLKANLVVQENRHLLAMQDLQKAQAELDDKQAELDVVQAEYEQAMTEKQTLLEDAERCRHKMQTASTLISGLAGEKERWTEQSQEFAAQTKRLVGDVLLATAFLSYSGPFNQEFRDLLLNDWRKEMKARKIPFGKNLNLSEMLIDAPTISEWNLQGLPNDDLSIQNGIIVTKASRYPLLIDPQTQGKIWIKNKESRNELQITSLNHKYFRNHLEDSLSLGRPLLIEDVGEELDPALDNVLERNFIKTGSTFKVKVGDKEVDVLDGFRLYITTKLPNPAYTPEISARTSIIDFTVTMKGLEDQLLGRVILTEKQANREPNHE

SEQ ID NO: 7810 - protein, 271 aa, Artificial Sequence
  Synthetic polypeptide
MKAAAGEFADDPCSSVKRGNMVRAARALLSAVTRLLILADMADVYKLLVQLKVVEDGILKLRNAGNEQDLGIQYKALKPEVDKLNIMAAKRQQELKDVGHRDQMAAARGILQKNVPILYTASQACLQHPDVAAYKANRDLIYKQLQQAVTGISNAAQATASDDASQHQGGGGGELAYALNNFDKQIIVDPLSFSEERFRPSLEERLESIISGAALMADSSCTRDDRRERIVAECNAVRQALQDLLSEYMGNGYCEDQMTHSLWKLLKALQR

SEQ ID NO: 7811 - protein, 374 aa, Artificial Sequence
  Synthetic polypeptide
MTAVHAGNINFKWDPKSLEIRTLAVERLLEPLVTQVTTLVNTNSKGPSNKKRGRSKKAHVLAASVEQATENFLEKGDKIAKESQFLKEELVAAVEDVRKQGDLMKAAAGEFADDPCSSVKRGNMVRAARALLSAVTRLLILADMADVYKLLVQLKVVEDGILKLRNAGNEQDLGIQYKALKPEVDKLNIMAAKRQQELKDVGHRDQMAAARGILQKNVPILYTASQACLQHPDVAAYKANRDLIYKQLQQAVTGISNAAQATASDDASQHQGGGGGELAYALNNFDKQIIVDPLSFSEERFRPSLEERLESIISGAALMADSSCTRDDRRERIVAECNAVRQALQDLLSEYMGNGYCEDQMTHSLWKLLKALQR

SEQ ID NO: 7812 - protein, 129 aa, Artificial Sequence
  Synthetic polypeptide
KQLQQAVTGISNAAQATASDDASQHQGGGGGELAYALNNFDKQIIVDPLSFSEERFRPSLEERLESIISGAALMADSSCTRDDRRERIVAECNAVRQALQDLLSEYMGNGYCEDQMTHSLWKLLKALQR

SEQ ID NO: 7813 - protein, 52 aa, Artificial Sequence
  Synthetic polypeptide
MAPQSLPSSRMAPLGMLLGLLMAACFTFCLSHQNLLNACVTVVDQRSSSCFP

SEQ ID NO: 7814 - protein, 60 aa, Artificial Sequence
  Synthetic polypeptide
MNSGTSLTMAPQSLPSSRMAPLGMLLGLLMAACFTFCLSHQNLLNACVTVVDQRSSSCFP

SEQ ID NO: 7815 - protein, 62 aa, Artificial Sequence
  Synthetic polypeptide
MQEMSDMSLTMAPQSLPSSRMAPLGMLLGLLMAACFTFCLSHQNLLNACVTVVDQRSSSCFP

SEQ ID NO: 7816 - protein, 161 aa, Artificial Sequence
  Synthetic polypeptide
MAAPVDLELKKAFTELQAKVIDTQQKVKLADIQIEQLNRTKKHAHLTDTEIMTLVDETNMYEGVGRMFILQSKEAIHSQLLEKQKIAEEKIKELEEFHPFSRLQVPRLCKIISLAQISSMNSRANLVFHISFGCLTGTLNPKRSSESSLPNQVLLLHFFSQ

SEQ ID NO: 7817 - protein, 360 aa, Artificial Sequence
  Synthetic polypeptide
MLTDSGGGGTSFEEDLDSVAPRSAPAGASEPPPPGGVGLGIRTVRLFGEAGPASGVGSSGGGGSGSGTGGGDAALDFKLAAAVLRTGGGGGASGSDEDEVSEVESFILDQEDLDNPVLKTTSEIFLSSTAEGADLRTVDPETQARLEALLEAAGIGKLSTADGKAFADPEVLRRLTSSVSCALDEAAAALTRMKAENSHNAGQVDTRSLAEACSDGDVNAVRKLLDEGRSVNEHTEEGESLLCLACSAGYYELAQVLLAMHANVEDRGNKGDITPLMAASSGGYLDIVKLLLLHDADVNSQSATDLKKEEILPFATTWMDLKDIMLSGISQTQKGKYCMISLFFFPHSLMDIGMHDLTEY

SEQ ID NO: 7818 - protein, 346 aa, Artificial Sequence
  Synthetic polypeptide
MLTDSGGGGTSFEEDLDSVAPRSAPAGASEPPPPGGVGLGIRTVRLFGEAGPASGVGSSGGGGSGSGTGGGDAALDFKLAAAVLRTGGGGGASGSDEDEVSEVESFILDQEDLDNPVLKTTSEIFLSSTAEGADLRTVDPETQARLEALLEAADPEVLRRLTSSVSCALDEAAAALTRMKAENSHNAGQVDTRSLAEACSDGDVNAVRKLLDEGRSVNEHTEEGESLLCLACSAGYYELAQVLLAMHANVEDRGNKGDITPLMAASSGGYLDIVKLLLLHDADVNSQSATDLKKEEILPFATTWMDLKDIMLSGISQTQKGKYCMISLFFFPHSLMDIGMHDLTEY

SEQ ID NO: 7819 - protein, 349 aa, Artificial Sequence
  Synthetic polypeptide
MLTDSGGGGTSFEEDLDSVAPRSAPAGASEPPPPGGVGLGIRTVRLFGEAGPASGVGSSGGGGSGSGTGGGDAALDFKLAAAVLRTGGGGGASGSDEDEVSEVESFILDQEDLDNPVLKTTSEIFLSSTAEGADLRTVDPETQARLEALLEAAAFADPEVLRRLTSSVSCALDEAAAALTRMKAENSHNAGQVDTRSLAEACSDGDVNAVRKLLDEGRSVNEHTEEGESLLCLACSAGYYELAQVLLAMHANVEDRGNKGDITPLMAASSGGYLDIVKLLLLHDADVNSQSATDLKKEEILPFATTWMDLKDIMLSGISQTQKGKYCMISLFFFPHSLMDIGMHDLTEY

SEQ ID NO: 7820 - protein, 400 aa, Artificial Sequence
  Synthetic polypeptide
MWSRRQGRLRPTVCGVEELRRRRREREAALRKARREQQLVSKRLLRNDAPEEAGEGCVAAILGETEVQQFLRQAQRGTEEKEREGALVSLRRGLQHPETQQTFIRLEGSMRTLVGLLTSNQALLQLEAARCLHELSHSEQSTVAEACLPATSYLLTYLSSHSSDFIELCLYTLGNLIVESEAVRRQLLPQGIVPALAACIQSPHVAVLEALGYALSQLLQAEEAPEKIIPSILASTLPQHMLQMLQPGPKLNPGVAVEFAWCLHYIICSQVSNPLLIGHGALSTLGLLLLDLAGAVQKTEDAGLELLACPVLRCLSNLLTEAAVETVGGQMQLRDERVVAALFILLQFFFQKQPSLLPEGLWLLNNLTANSPSFCTSLLSLDLIEPLLQLLPVSNVVSVM

SEQ ID NO: 7821 - protein, 160 aa, Artificial Sequence
  Synthetic polypeptide
MLQMLQPGPKLNPGVAVEFAWCLHYIICSQVSNPLLIGHGALSTLGLLLLDLAGAVQKTEDAGLELLACPVLRCLSNLLTEAAVETVGGQMQLRDERVVAALFILLQFFFQKQPSLLPEGLWLLNNLTANSPSFCTSLLSLDLIEPLLQLLPVSNVVSVM

SEQ ID NO: 7822 - protein, 406 aa, Artificial Sequence
  Synthetic polypeptide
MWSRRQGRLRPTVCGVEELRRRRREREAALRKARREQQLVSKRLLRNDAPEEAGEGCVAAILGETEVQQFLRQAQRGTEEKEREGALVSLRRGLQHPETQQTFIRLEGSMRTLVGLLTSNQALLQLEAARCLHELSHSEQSTVAEACLPATSYLLTYLSSHSSDFIELCLYTLGNLIVESEAVRRQLLPQGIVPALAACIQSPHVAVLEALGYALSQLLQAEEAPEKIIPPASASSSILASTLPQHMLQMLQPGPKLNPGVAVEFAWCLHYIICSQVSNPLLIGHGALSTLGLLLLDLAGAVQKTEDAGLELLACPVLRCLSNLLTEAAVETVGGQMQLRDERVVAALFILLQFFFQKQPSLLPEGLWLLNNLTANSPSFCTSLLSLDLIEPLLQLLPVSNVVSVM

SEQ ID NO: 7823 - protein, 456 aa, Artificial Sequence
  Synthetic polypeptide
MWSRRQGRLRPTVCGVEELRRRRREREAALRKARREQQLVSKRLLRNDAPEEAGEGCVAAILGETEVQQFLRQAQRGTEEKEREGALVSLRRGLQHPETQQTFIRLEGSMRTLVGLLTSNQALLQLEAARCLHELSHSEQSTVAEACLPATSYLLTYLSSHSSDFIELCLYTLGNLIVESEAVRRQLLPQGIVPALAACIQSPHVAVLEALGYALSQLLQAEEAPEKIIPSILASTLPQHMLQMLQPGPKLNPGVAVEFAWCLHYIICSQVSNPLLIGHGALSTLGLLLLDLAGAVQKTEDAGLELLACPVLRCLSNLLTEAAVETVGGQMQLRDERVVAALFILLQFFFQKQPSLLPEGLWLLNNLTANSPSFCTSLLSLDLIEPLLQLLPVSNVVSVMVLTVLCNVAEKGPAYCQRLWPGPLLPALLHTLAFSDTEVVGQSLELLHLLFLYQPE

SEQ ID NO: 7824 - protein, 216 aa, Artificial Sequence
  Synthetic polypeptide
MLQMLQPGPKLNPGVAVEFAWCLHYIICSQVSNPLLIGHGALSTLGLLLLDLAGAVQKTEDAGLELLACPVLRCLSNLLTEAAVETVGGQMQLRDERVVAALFILLQFFFQKQPSLLPEGLWLLNNLTANSPSFCTSLLSLDLIEPLLQLLPVSNVVSVMVLTVLCNVAEKGPAYCQRLWPGPLLPALLHTLAFSDTEVVGQSLELLHLLFLYQPE

SEQ ID NO: 7825 - protein, 462 aa, Artificial Sequence
  Synthetic polypeptide
MWSRRQGRLRPTVCGVEELRRRRREREAALRKARREQQLVSKRLLRNDAPEEAGEGCVAAILGETEVQQFLRQAQRGTEEKEREGALVSLRRGLQHPETQQTFIRLEGSMRTLVGLLTSNQALLQLEAARCLHELSHSEQSTVAEACLPATSYLLTYLSSHSSDFIELCLYTLGNLIVESEAVRRQLLPQGIVPALAACIQSPHVAVLEALGYALSQLLQAEEAPEKIIPPASASSSILASTLPQHMLQMLQPGPKLNPGVAVEFAWCLHYIICSQVSNPLLIGHGALSTLGLLLLDLAGAVQKTEDAGLELLACPVLRCLSNLLTEAAVETVGGQMQLRDERVVAALFILLQFFFQKQPSLLPEGLWLLNNLTANSPSFCTSLLSLDLIEPLLQLLPVSNVVSVMVLTVLCNVAEKGPAYCQRLWPGPLLPALLHTLAFSDTEVVGQSLELLHLLFLYQPE

SEQ ID NO: 7826 - protein, 506 aa, Artificial Sequence
  Synthetic polypeptide
MWSRRQGRLRPTVCGVEELRRRRREREAALRKARREQQLVSKRLLRNDAPEEAGEGCVAAILGETEVQQFLRQAQRGTEEKEREGALVSLRRGLQHPETQQTFIRLEGSMRTLVGLLTSNQALLQLEAARCLHELSHSEQSTVAEACLPATSYLLTYLSSHSSDFIELCLYTLGNLIVESEAVRRQLLPQGIVPALAACIQSPHVAVLEALGYALSQLLQAEEAPEKIIPSILASTLPQHMLQMLQPGPKLNPGVAVEFAWCLHYIICSQVSNPLLIGHGALSTLGLLLLDLAGAVQKTEDAGLELLACPVLRCLSNLLTEAAVETVGGQMQLRDERVVAALFILLQFFFQKQPSLLPEGLWLLNNLTANSPSFCTSLLSLDLIEPLLQLLPVSNVVSVMVLTVLCNVAEKGPAYCQRLWPGPLLPALLHTLAFSDTEVVGQSLELLHLLFLYQPEAVQVFLQQSGLQALERHQEEAQLQDRVYALQQTALQGEKRRTRFLLTNED

SEQ ID NO: 7827 - protein, 266 aa, Artificial Sequence
  Synthetic polypeptide
MLQMLQPGPKLNPGVAVEFAWCLHYIICSQVSNPLLIGHGALSTLGLLLLDLAGAVQKTEDAGLELLACPVLRCLSNLLTEAAVETVGGQMQLRDERVVAALFILLQFFFQKQPSLLPEGLWLLNNLTANSPSFCTSLLSLDLIEPLLQLLPVSNVVSVMVLTVLCNVAEKGPAYCQRLWPGPLLPALLHTLAFSDTEVVGQSLELLHLLFLYQPEAVQVFLQQSGLQALERHQEEAQLQDRVYALQQTALQGEKRRTRFLLTNED

SEQ ID NO: 7828 - protein, 512 aa, Artificial Sequence
  Synthetic polypeptide
MWSRRQGRLRPTVCGVEELRRRRREREAALRKARREQQLVSKRLLRNDAPEEAGEGCVAAILGETEVQQFLRQAQRGTEEKEREGALVSLRRGLQHPETQQTFIRLEGSMRTLVGLLTSNQALLQLEAARCLHELSHSEQSTVAEACLPATSYLLTYLSSHSSDFIELCLYTLGNLIVESEAVRRQLLPQGIVPALAACIQSPHVAVLEALGYALSQLLQAEEAPEKIIPPASASSSILASTLPQHMLQMLQPGPKLNPGVAVEFAWCLHYIICSQVSNPLLIGHGALSTLGLLLLDLAGAVQKTEDAGLELLACPVLRCLSNLLTEAAVETVGGQMQLRDERVVAALFILLQFFFQKQPSLLPEGLWLLNNLTANSPSFCTSLLSLDLIEPLLQLLPVSNVVSVMVLTVLCNVAEKGPAYCQRLWPGPLLPALLHTLAFSDTEVVGQSLELLHLLFLYQPEAVQVFLQQSGLQALERHQEEAQLQDRVYALQQTALQGEKRRTRFLLTNED

SEQ ID NO: 7829 - protein, 72 aa, Artificial Sequence
  Synthetic polypeptide
MDRTCEERPAEDGSDEEDPDSMEAPTRIRDTPEDIVLEAPASGLAFHPARDLLAAGDVDGDVFVGNYTYPCR

SEQ ID NO: 7830 - protein, 424 aa, Artificial Sequence
  Synthetic polypeptide
MAERAALEELVKLQGERVRGLKQQKASAELIEEEVAKLLKLKAQLGPDESKQKFVLKTPKGTRDYSPRQMAVREKVFDVIIRCFKRHGAEVIDTPVFELKETLMGKYGEDSKLIYDLKDQGGELLSLRYDLTVPFARYLAMNKLTNIKRYHIAKVYRRDNPAMTRGRYREFYQCDFDIAGNFDPMIPDAECLKIMCEILSSLQIGDFLVKVNDRRILDGMFAICGVSDSKFRTICSSVDKLDKVSWEEVKNEMVGEKGLAPEVADRIGDYVQQHGGVSLVEQLLQDPKLSQNKQALEGLGDLKLLFEYLTLFGIDDKISFDLSLARGLDYYTGVIYEAVLLQTPAQAGEEPLGVGSVAAGGRYDGLVGMFDPKGRKVPCVGLSIGVERIFSIVEQRLELSMVVCACSQEAEVGGSLELGRSKLQ

SEQ ID NO: 7831 - protein, 404 aa, Artificial Sequence
  Synthetic polypeptide
MAERAALEELVKLQGERVRGLKQQKASAELIEEEVAKLLKLKAQLGPDESKQKFVLKTPKGTRDYSPRQMAVREKVFDVIIRCFKRHGAEVIDTPVFELKETLMGKYGEDSKLIYDLKDQGGELLSLRYDLTVPFARYLAMNKLTNIKRYHIAKDFDIAGNFDPMIPDAECLKIMCEILSSLQIGDFLVKVNDRRILDGMFAICGVSDSKFRTICSSVDKLDKVSWEEVKNEMVGEKGLAPEVADRIGDYVQQHGGVSLVEQLLQDPKLSQNKQALEGLGDLKLLFEYLTLFGIDDKISFDLSLARGLDYYTGVIYEAVLLQTPAQAGEEPLGVGSVAAGGRYDGLVGMFDPKGRKVPCVGLSIGVERIFSIVEQRLELSMVVCACSQEAEVGGSLELGRSKLQ

SEQ ID NO: 7832 - protein, 310 aa, Artificial Sequence
  Synthetic polypeptide
MAERAALEELVKLQGERVRGLKQQKASAELIEEEVAKLLKLKAQLGPDESKQKFVLKTPKDFDIAGNFDPMIPDAECLKIMCEILSSLQIGDFLVKVNDRRILDGMFAICGVSDSKFRTICSSVDKLDKVSWEEVKNEMVGEKGLAPEVADRIGDYVQQHGGVSLVEQLLQDPKLSQNKQALEGLGDLKLLFEYLTLFGIDDKISFDLSLARGLDYYTGVIYEAVLLQTPAQAGEEPLGVGSVAAGGRYDGLVGMFDPKGRKVPCVGLSIGVERIFSIVEQRLELSMVVCACSQEAEVGGSLELGRSKLQ

SEQ ID NO: 7833 - protein, 355 aa, Artificial Sequence
  Synthetic polypeptide
MAVREKVFDVIIRCFKRHGAEVIDTPVFELKETLMGKYGEDSKLIYDLKDQGGELLSLRYDLTVPFARYLAMNKLTNIKRYHIAKVYRRDNPAMTRGRYREFYQCDFDIAGNFDPMIPDAECLKIMCEILSSLQIGDFLVKVNDRRILDGMFAICGVSDSKFRTICSSVDKLDKVSWEEVKNEMVGEKGLAPEVADRIGDYVQQHGGVSLVEQLLQDPKLSQNKQALEGLGDLKLLFEYLTLFGIDDKISFDLSLARGLDYYTGVIYEAVLLQTPAQAGEEPLGVGSVAAGGRYDGLVGMFDPKGRKVPCVGLSIGVERIFSIVEQRLELSMVVCACSQEAEVGGSLELGRSKLQ

SEQ ID NO: 7834 - protein, 229 aa, Artificial Sequence
  Synthetic polypeptide
MTRGRYREFYQCDFDIAGNFDPMIPDAECLKIMCEILSSLQIGDFLVKVSWEEVKNEMVGEKGLAPEVADRIGDYVQQHGGVSLVEQLLQDPKLSQNKQALEGLGDLKLLFEYLTLFGIDDKISFDLSLARGLDYYTGVIYEAVLLQTPAQAGEEPLGVGSVAAGGRYDGLVGMFDPKGRKVPCVGLSIGVERIFSIVEQRLELSMVVCACSQEAEVGGSLELGRSKLQ

SEQ ID NO: 7835 - protein, 364 aa, Artificial Sequence
  Synthetic polypeptide
MAERAALEELVKLQGERVRGLKQQKASAELIEEEVAKLLKLKAQLGPDESKQKFVLKTPKETLMGKYGEDSKLIYDLKDQGGELLSLRYDLTVPFARYLAMNKLTNIKRYHIAKDFDIAGNFDPMIPDAECLKIMCEILSSLQIGDFLVKVNDRRILDGMFAICGVSDSKFRTICSSVDKLDKVSWEEVKNEMVGEKGLAPEVADRIGDYVQQHGGVSLVEQLLQDPKLSQNKQALEGLGDLKLLFEYLTLFGIDDKISFDLSLARGLDYYTGVIYEAVLLQTPAQAGEEPLGVGSVAAGGRYDGLVGMFDPKGRKVPCVGLSIGVERIFSIVEQRLELSMVVCACSQEAEVGGSLELGRSKLQ

SEQ ID NO: 7836 - protein, 384 aa, Artificial Sequence
  Synthetic polypeptide
MAERAALEELVKLQGERVRGLKQQKASAELIEEEVAKLLKLKAQLGPDESKQKFVLKTPKETLMGKYGEDSKLIYDLKDQGGELLSLRYDLTVPFARYLAMNKLTNIKRYHIAKVYRRDNPAMTRGRYREFYQCDFDIAGNFDPMIPDAECLKIMCEILSSLQIGDFLVKVNDRRILDGMFAICGVSDSKFRTICSSVDKLDKVSWEEVKNEMVGEKGLAPEVADRIGDYVQQHGGVSLVEQLLQDPKLSQNKQALEGLGDLKLLFEYLTLFGIDDKISFDLSLARGLDYYTGVIYEAVLLQTPAQAGEEPLGVGSVAAGGRYDGLVGMFDPKGRKVPCVGLSIGVERIFSIVEQRLELSMVVCACSQEAEVGGSLELGRSKLQ

SEQ ID NO: 7837 - protein, 350 aa, Artificial Sequence
  Synthetic polypeptide
MAERAALEELVKLQGERVRGLKQQKASAELIEEEVAKLLKLKAQLGPDESKQKFVLKTPKGTRDYSPRQMAVREKVFDVIIRCFKRHGAEVIDTPVFELKDFDIAGNFDPMIPDAECLKIMCEILSSLQIGDFLVKVNDRRILDGMFAICGVSDSKFRTICSSVDKLDKVSWEEVKNEMVGEKGLAPEVADRIGDYVQQHGGVSLVEQLLQDPKLSQNKQALEGLGDLKLLFEYLTLFGIDDKISFDLSLARGLDYYTGVIYEAVLLQTPAQAGEEPLGVGSVAAGGRYDGLVGMFDPKGRKVPCVGLSIGVERIFSIVEQRLELSMVVCACSQEAEVGGSLELGRSKLQ

SEQ ID NO: 7838 - protein, 314 aa, Artificial Sequence
  Synthetic polypeptide
MAERAALEELVKLQGERVRGLKQQKASAELIEEEVAKLLKLKAQLGPDESKQKFVLKTPKGTRDYSPRQMAVREKVFDVIIRCFKRHGAEVIDTPVFELKVNDRRILDGMFAICGVSDSKFRTICSSVDKLDKVSWEEVKNEMVGEKGLAPEVADRIGDYVQQHGGVSLVEQLLQDPKLSQNKQALEGLGDLKLLFEYLTLFGIDDKISFDLSLARGLDYYTGVIYEAVLLQTPAQAGEEPLGVGSVAAGGRYDGLVGMFDPKGRKVPCVGLSIGVERIFSIVEQRLELSMVVCACSQEAEVGGSLELGRSKLQ

SEQ ID NO: 7839 - protein, 1226 aa, Artificial Sequence
  Synthetic polypeptide
MEPPGGSLGPGRGTRDKKKGRSPDELPSAGGDGGKSKKFTLKRLMADELERFTSMRIKKEKEKPNSAHRNSSASYGDDPTAQSLQDVSDEQVLVLFEQMLLDMNLNEEKQQPLREKDIIIKREMVSQYLYTSKAGMSQKESSKSAMMYIQELRSGLRDMPLLSCLESLRVSLNNNPVSWVQTFGAEGLASLLDILKRLHDEKEETAGSYDSRNKHEIIRCLKAFMNNKFGIKTMLETEEGILLLVRAMDPAVPNMMIDAAKLLSALCILPQPEDMNERVLEAMTERAEMDEVERFQPLLDGLKSGTTIALKVGCLQLINALITPAEELDFRVHIRSELMRLGLHQVLQDLREIENEDMRVQLNVFDEQGEEDSYDLKGRLDDIRMEMDDFNEVFQILLNTVKDSKAEPHFLSILQHLLLVRNDYEARPQYYKLIEECISQIVLHKNGADPDFKCRHLQIEIEGLIDQMIDKTKVEKSEAKAAELEKKLDSELTARHELQVEMKKMESDFEQKLQDLQGEKDALHSEKQQIATEKQDLEAEVSQLTGEVAKLTKELEDAKKEMASLSAAAITVPPSVPSRAPVPPAPPLPGDSGTIIPPPPAPGDSTTPPPPPPPPPPPPPLPGGVCISSPPSLPGGTAISPPPPLSGDATIPPPPPLPEGVGIPSPSSLPGGTAIPPPPPLPGSARIPPPPPPLPGSAGIPPPPPPLPGEAGMPPPPPPLPGGPGIPPPPPFPGGPGIPPPPPGMGMPPPPPFGFGVPAAPVLPFGLTPKKLYKPEVQLRRPNWSKLVAEDLSQDCFWTKVKEDRFENNELFAKLTLTFSAQTKTKKDQEGGEEKKSVQKKKVKELKVLDSKTAQNLSIFLGSFRMPYQEIKNVILEVNEAVLTESMIQNLIKQMPEPEQLKMLSELKDEYDDLAESEQFGVVMGTVPRLRPRLNAILFKLQFSEQVENIKPEIVSVTAACEELRKSESFSNLLEITLLVGNYMNAGSRNAGAFGFNISFLCKLRDTKSTDQKMTLLHFLAELCENDYPDVLKFPDELAHVEKASRVSAENLQKNLDQMKKQISDVERDVQNFPAATDEKDKFVEKMTSFVKDAQEQYNKLRMMHSNMETLYKELGEYFLFDPKKLSVEEFFMDLHNFRNMFLQAVKENQKRRETEEKMRRAKLAKEKAEKERLEKQQKREQLIDMNAEGDETGVMDSLLEALQSGAAFRRKRGPRQEAIKLQTVL

SEQ ID NO: 7840 - protein, 1172 aa, Artificial Sequence
  Synthetic polypeptide
MRIKKEKEKPNSAHRNSSASYGDDPTAQSLQDVSDEQVLVLFEQMLLDMNLNEEKQQPLREKDIIIKREMVSQYLYTSKAGMSQKESSKSAMMYIQELRSGLRDMPLLSCLESLRVSLNNNPVSWVQTFGAEGLASLLDILKRLHDEKEETAGSYDSRNKHEIIRCLKAFMNNKFGIKTMLETEEGILLLVRAMDPAVPNMMIDAAKLLSALCILPQPEDMNERVLEAMTERAEMDEVERFQPLLDGLKSGTTIALKVGCLQLINALITPAEELDFRVHIRSELMRLGLHQVLQDLREIENEDMRVQLNVFDEQGEEDSYDLKGRLDDIRMEMDDFNEVFQILLNTVKDSKAEPHFLSILQHLLLVRNDYEARPQYYKLIEECISQIVLHKNGADPDFKCRHLQIEIEGLIDQMIDKTKVEKSEAKAAELEKKLDSELTARHELQVEMKKMESDFEQKLQDLQGEKDALHSEKQQIATEKQDLEAEVSQLTGEVAKLTKELEDAKKEMASLSAAAITVPPSVPSRAPVPPAPPLPGDSGTIIPPPPAPGDSTTPPPPPPPPPPPPPLPGGVCISSPPSLPGGTAISPPPPLSGDATIPPPPPLPEGVGIPSPSSLPGGTAIPPPPPLPGSARIPPPPPPLPGSAGIPPPPPPLPGEAGMPPPPPPLPGGPGIPPPPPFPGGPGIPPPPPGMGMPPPPPFGFGVPAAPVLPFGLTPKKLYKPEVQLRRPNWSKLVAEDLSQDCFWTKVKEDRFENNELFAKLTLTFSAQTKTKKDQEGGEEKKSVQKKKVKELKVLDSKTAQNLSIFLGSFRMPYQEIKNVILEVNEAVLTESMIQNLIKQMPEPEQLKMLSELKDEYDDLAESEQFGVVMGTVPRLRPRLNAILFKLQFSEQVENIKPEIVSVTAACEELRKSESFSNLLEITLLVGNYMNAGSRNAGAFGFNISFLCKLRDTKSTDQKMTLLHFLAELCENDYPDVLKFPDELAHVEKASRVSAENLQKNLDQMKKQISDVERDVQNFPAATDEKDKFVEKMTSFVKDAQEQYNKLRMMHSNMETLYKELGEYFLFDPKKLSVEEFFMDLHNFRNMFLQAVKENQKRRETEEKMRRAKLAKEKAEKERLEKQQKREQLIDMNAEGDETGVMDSLLEALQSGAAFRRKRGPRQEAIKLQTVL

SEQ ID NO: 7841 - protein, 1230 aa, Artificial Sequence
  Synthetic polypeptide
MEPPGGSLGPGRGTRDKKKGRSPDELPSAGGDGGKSKKFTLKRLMADELERFTSMRIKKEKEKPNSAHRNSSASYGDDPTAQSLQDVSDEQVLVLFEQMLLDMNLNEEKQQPLREKDIIIKREMVSQYLYTSKAGMSQKESSKSAMMYIQELRSGLRDMPLLSCLESLRVSLNNNPVSWVQTFGAEGLASLLDILKRLHDEKEETAGSYDSRNKHEIIRCLKAFMNNKFGIKTMLETEEGILLLVRAMDPAVPNMMIDAAKLLSALCILPQPEDMNERVLEAMTERAEMDEVERFQPLLDGLKSGTTIALKVGCLQLINALITPAEELDFRVHIRSELMRLGLHQVLQDLREIENEDMRVQLNVFDEQGEEDSYDLKGRLDDIRMEMDDFNEVFQILLNTVKDSKAEPHFLSILQHLLLVRNDYEARPQYYKLIEECISQIVLHKNGADPDFKCRHLQIEIEGLIDQMIDKTKVEKSEAKAAELEKKLDSELTARHELQVEMKKMESDFEQKLQDLQGEKDALHSEKQQIATEKQDLEAEVSQLTGEVAKLTKELEDAKKEMASLSAAAITVPPSVPSRAPVPPAPPLPGDSGTIIPPPPAPGDSTTPPPPPPPPPPPPPLPGGVCISSPPSLPGGTAISPPPPLSGDATIPPPPPLPEGVGIPSPSSLPGGTAIPPPPPLPGSARIPPPPPPLPGSAGIPPPPPPLPGEAGMPPPPPPLPGGPGIPPPPPFPGGPGIPPPPPGMGMPPPPPFGFGVPAAPVLPFGLTPKKLYKPEVQLRRPNWSKLVAEDLSQDCFWTKVKEDRFENNELFAKLTLTFSAQTKRTKKAKKDQEGGEEKKSVQKKKVKELKVLDSKTAQNLSIFLGSFRMPYQEIKNVILEVNEAVLTESMIQNLIKQMPEPEQLKMLSELKDEYDDLAESEQFGVVMGTVPRLRPRLNAILFKLQFSEQVENIKPEIVSVTAACEELRKSESFSNLLEITLLVGNYMNAGSRNAGAFGFNISFLCKLRDTKSTDQKMTLLHFLAELCENDYPDVLKFPDELAHVEKASRVSAENLQKNLDQMKKQISDVERDVQNFPAATDEKDKFVEKMTIFVKDAQEQYNKLRMMHSNMETLYKELGEYFLFDPKKLSVEEFFMDLHNFRNMFLQAVKENQKRRETEEKMRRAKLAKEKAEKERLEKQQKREQLIDMNAEGDETGVMDSLLEALQSGAAFRRKRGPRQEAIKLQTVL

SEQ ID NO: 7842 - protein, 1220 aa, Artificial Sequence
  Synthetic polypeptide
MEPPGGSLGPGRGTRDKKKGRSPDELPSAGGDGGKSKKFLERFTSMRIKKEKEKPNSAHRNSSASYGDDPTAQSLQDVSDEQVLVLFEQMLLDMNLNEEKQQPLREKDIIIKREMVSQYLYTSKAGMSQKESSKSAMMYIQELRSGLRDMPLLSCLESLRVSLNNNPVSWVQTFGAEGLASLLDILKRLHDEKEETAGSYDSRNKHEIIRCLKAFMNNKFGIKTMLETEEGILLLVRAMDPAVPNMMIDAAKLLSALCILPQPEDMNERVLEAMTERAEMDEVERFQPLLDGLKSGTTIALKVGCLQLINALITPAEELDFRVHIRSELMRLGLHQVLQDLREIENEDMRVQLNVFDEQGEEDSYDLKGRLDDIRMEMDDFNEVFQILLNTVKDSKAEPHFLSILQHLLLVRNDYEARPQYYKLIEECISQIVLHKNGADPDFKCRHLQIEIEGLIDQMIDKTKVEKSEAKAAELEKKLDSELTARHELQVEMKKMESDFEQKLQDLQGEKDALHSEKQQIATEKQDLEAEVSQLTGEVAKLTKELEDAKKEMASLSAAAITVPPSVPSRAPVPPAPPLPGDSGTIIPPPPAPGDSTTPPPPPPPPPPPPPLPGGVCISSPPSLPGGTAISPPPPLSGDATIPPPPPLPEGVGIPSPSSLPGGTAIPPPPPLPGSARIPPPPPPLPGSAGIPPPPPPLPGEAGMPPPPPPLPGGPGIPPPPPFPGGPGIPPPPPGMGMPPPPPFGFGVPAAPVLPFGLTPKKLYKPEVQLRRPNWSKLVAEDLSQDCFWTKVKEDRFENNELFAKLTLTFSAQTKTSKAKKDQEGGEEKKSVQKKKVKELKVLDSKTAQNLSIFLGSFRMPYQEIKNVILEVNEAVLTESMIQNLIKQMPEPEQLKMLSELKDEYDDLAESEQFGVVMGTVPRLRPRLNAILFKLQFSEQVENIKPEIVSVTAACEELRKSESFSNLLEITLLVGNYMNAGSRNAGAFGFNISFLCKLRDTKSTDQKMTLLHFLAELCENDYPDVLKFPDELAHVEKASRVSAENLQKNLDQMKKQISDVERDVQNFPAATDEKDKFVEKMTSFVKDAQEQYNKLRMMHSNMETLYKELGEYFLFDPKKLSVEEFFMDLHNFRNMFLQAVKENQKRRETEEKMRRAKLAKEKAEKERLEKQQKREQLIDMNAEGDETGVMDSLLEALQSGAAFRRKRGPRQEAIKLQTVL

SEQ ID NO: 7843 - protein, 1229 aa, Artificial Sequence
  Synthetic polypeptide
MEPPGGSLGPGRGTRDKKKGRSPDELPSAGGDGGKSKKFTLKRLMADELERFTSMRIKKEKEKPNSAHRNSSASYGDDPTAQSLQDVSDEQVLVLFEQMLLDMNLNEEKQQPLREKDIIIKREMVSQYLYTSKAGMSQKESSKSAMMYIQELRSGLRDMPLLSCLESLRVSLNNNPVSWVQTFGAEGLASLLDILKRLHDEKEETAGSYDSRNKHEIIRCLKAFMNNKFGIKTMLETEEGILLLVRAMDPAVPNMMIDAAKLLSALCILPQPEDMNERVLEAMTERAEMDEVERFQPLLDGLKSGTTIALKVGCLQLINALITPAEELDFRVHIRSELMRLGLHQVLQDLREIENEDMRVQLNVFDEQGEEDSYDLKGRLDDIRMEMDDFNEVFQILLNTVKDSKAEPHFLSILQHLLLVRNDYEARPQYYKLIEECISQIVLHKNGADPDFKCRHLQIEIEGLIDQMIDKTKVEKSEAKAAELEKKLDSELTARHELQVEMKKMESDFEQKLQDLQGEKDALHSEKQQIATEKQDLEAEVSQLTGEVAKLTKELEDAKKEMASLSAAAITVPPSVPSRAPVPPAPPLPGDSGTIIPPPPAPGDSTTPPPPPPPPPPPPPLPGGVCISSPPSLPGGTAISPPPPLSGDATIPPPPPLPEGVGIPSPSSLPGGTAIPPPPPLPGSARIPPPPPPLPGSAGIPPPPPPLPGEAGMPPPPPPLPGGPGIPPPPPFPGGPGIPPPPPGMGMPPPPPFGFGVPAAPVLPFGLTPKKLYKPEVQLRRPNWSKLVAEDLSQDCFWTKVKEDRFENNELFAKLTLTFSAQTKTSKAKKDQEGGEEKKSVQKKKVKELKVLDSKTAQNLSIFLGSFRMPYQEIKNVILEVNEAVLTESMIQNLIKQMPEPEQLKMLSELKDEYDDLAESEQFGVVMGTVPRLRPRLNAILFKLQFSEQVENIKPEIVSVTAACEELRKSESFSNLLEITLLVGNYMNAGSRNAGAFGFNISFLCKLRDTKSTDQKMTLLHFLAELCENDYPDVLKFPDELAHVEKASRVSAENLQKNLDQMKKQISDVERDVQNFPAATDEKDKFVEKMTSFVKDAQEQYNKLRMMHSNMETLYKELGEYFLFDPKKLSVEEFFMDLHNFRNMFLQAVKENQKRRETEEKMRRAKLAKEKAEKERLEKQQKREQLIDMNAEGDETGVMDSLLEALQSGAAFRRKRGPRQEAIKLQTVL

SEQ ID NO: 7844 - protein, 1205 aa, Artificial Sequence
  Synthetic polypeptide
MEPPGGSLGPGRGTRDKKKGRSPDELPSAGGDGGKSKKFLERFTSMRIKKEKEKPNSAHRNSSASYGDDPTAQSLQDVSDEQVLVLFEQMLLDMNLNEEKQQPLREKDIIIKREMVSQYLYTSKAGMSQKESSKSAMMYIQELRSGLRDMPLLSCLESLRVSLNNNPVSWVQTFGAEGLASLLDILKRLHDEKEETAGSYDSRNKHEIIRCLKAFMNNKFGIKTMLETEEGILLLVRAMDPAVPNMMIDAAKLLSALCILPQPEDMNERVLEAMTERAEMDEVERFQPLLDGLKSGTTIALKVGCLQLINALITPAEELDFRVHIRSELMRLGLHQVLQDLREIENEDMRVQLNVFDEQGEEDSYDLKGRLDDIRMEMDDFNEVFQILLNTVKDSKAEPHFLSILQHLLLVRNDYEARPQYYKLIEECISQIVLHKNGADPDFKCRHLQIEIEGLIDQMIDKTKVEKSEAKAAELEKKLDSELTARHELQVEMKKMESDFEQKLQDLQGEKDALHSEKQQIATEKQDLEAEVSQLTGEVAKLTKELEDAKKEMASLSAAAITVPPSVPSRAPVPPAPPLPGDSGTIIPPPPAPGDSTTPPPPPPPPPPPPPLPGGTAISPPPPLSGDATIPPPPPLPEGVGIPSPSSLPGGTAIPPPPPLPGSARIPPPPPPLPGSAGIPPPPPPLPGEAGMPPPPPPLPGGPGIPPPPPFPGGPGIPPPPPGMGMPPPPPFGFGVPAAPVLPFGLTPKKLYKPEVQLRRPNWSKLVAEDLSQDCFWTKVKEDRFENNELFAKLTLTFSAQTKTKKDQEGGEEKKSVQKKKVKELKVLDSKTAQNLSIFLGSFRMPYQEIKNVILEVNEAVLTESMIQNLIKQMPEPEQLKMLSELKDEYDDLAESEQFGVVMGTVPRLRPRLNAILFKLQFSEQVENIKPEIVSVTAACEELRKSESFSNLLEITLLVGNYMNAGSRNAGAFGFNISFLCKLRDTKSTDQKMTLLHFLAELCENDYPDVLKFPDELAHVEKASRVSAENLQKNLDQMKKQISDVERDVQNFPAATDEKDKFVEKMTIFVKDAQEQYNKLRMMHSNMETLYKELGEYFLFDPKKLSVEEFFMDLHNFRNMFLQAVKENQKRRETEEKMRRAKLAKEKAEKERLEKQQKREQLIDMNAEGDETGVMDSLLEALQSGAAFRRKRGPRQEAIKLQTVL

SEQ ID NO: 7845 - protein, 1221 aa, Artificial Sequence
  Synthetic polypeptide
MEPPGGSLGPGRGTRDKKKGRSPDELPSAGGDGGKSKKFLERFTSMRIKKEKEKPNSAHRNSSASYGDDPTAQSLQDVSDEQVLVLFEQMLLDMNLNEEKQQPLREKDIIIKREMVSQYLYTSKAGMSQKESSKSAMMYIQELRSGLRDMPLLSCLESLRVSLNNNPVSWVQTFGAEGLASLLDILKRLHDEKEETAGSYDSRNKHEIIRCLKAFMNNKFGIKTMLETEEGILLLVRAMDPAVPNMMIDAAKLLSALCILPQPEDMNERVLEAMTERAEMDEVERFQPLLDGLKSGTTIALKVGCLQLINALITPAEELDFRVHIRSELMRLGLHQVLQDLREIENEDMRVQLNVFDEQGEEDSYDLKGRLDDIRMEMDDFNEVFQILLNTVKDSKAEPHFLSILQHLLLVRNDYEARPQYYKLIEECISQIVLHKNGADPDFKCRHLQIEIEGLIDQMIDKTKVEKSEAKAAELEKKLDSELTARHELQVEMKKMESDFEQKLQDLQGEKDALHSEKQQIATEKQDLEAEVSQLTGEVAKLTKELEDAKKEMASLSAAAITVPPSVPSRAPVPPAPPLPGDSGTIIPPPPAPGDSTTPPPPPPPPPPPPPLPGGVCISSPPSLPGGTAISPPPPLSGDATIPPPPPLPEGVGIPSPSSLPGGTAIPPPPPLPGSARIPPPPPPLPGSAGIPPPPPPLPGEAGMPPPPPPLPGGPGIPPPPPFPGGPGIPPPPPGMGMPPPPPFGFGVPAAPVLPFGLTPKKLYKPEVQLRRPNWSKLVAEDLSQDCFWTKVKEDRFENNELFAKLTLTFSAQTKRTKKAKKDQEGGEEKKSVQKKKVKELKVLDSKTAQNLSIFLGSFRMPYQEIKNVILEVNEAVLTESMIQNLIKQMPEPEQLKMLSELKDEYDDLAESEQFGVVMGTVPRLRPRLNAILFKLQFSEQVENIKPEIVSVTAACEELRKSESFSNLLEITLLVGNYMNAGSRNAGAFGFNISFLCKLRDTKSTDQKMTLLHFLAELCENDYPDVLKFPDELAHVEKASRVSAENLQKNLDQMKKQISDVERDVQNFPAATDEKDKFVEKMTIFVKDAQEQYNKLRMMHSNMETLYKELGEYFLFDPKKLSVEEFFMDLHNFRNMFLQAVKENQKRRETEEKMRRAKLAKEKAEKERLEKQQKREQLIDMNAEGDETGVMDSLLEALQSGAAFRRKRGPRQEAIKLQTVL

SEQ ID NO: 7846 - protein, 39 aa, Artificial Sequence
  Synthetic polypeptide
AGDRRKDEASKTSQGEGREGAAREAAEERATHRHECRGR

SEQ ID NO: 7847 - protein, 1217 aa, Artificial Sequence
  Synthetic polypeptide
MEPPGGSLGPGRGTRDKKKGRSPDELPSAGGDGGKSKKFLERFTSMRIKKEKEKPNSAHRNSSASYGDDPTAQSLQDVSDEQVLVLFEQMLLDMNLNEEKQQPLREKDIIIKREMVSQYLYTSKAGMSQKESSKSAMMYIQELRSGLRDMPLLSCLESLRVSLNNNPVSWVQTFGAEGLASLLDILKRLHDEKEETAGSYDSRNKHEIIRCLKAFMNNKFGIKTMLETEEGILLLVRAMDPAVPNMMIDAAKLLSALCILPQPEDMNERVLEAMTERAEMDEVERFQPLLDGLKSGTTIALKVGCLQLINALITPAEELDFRVHIRSELMRLGLHQVLQDLREIENEDMRVQLNVFDEQGEEDSYDLKGRLDDIRMEMDDFNEVFQILLNTVKDSKAEPHFLSILQHLLLVRNDYEARPQYYKLIEECISQIVLHKNGADPDFKCRHLQIEIEGLIDQMIDKTKVEKSEAKAAELEKKLDSELTARHELQVEMKKMESDFEQKLQDLQGEKDALHSEKQQIATEKQDLEAEVSQLTGEVAKLTKELEDAKKEMASLSAAAITVPPSVPSRAPVPPAPPLPGDSGTIIPPPPAPGDSTTPPPPPPPPPPPPPLPGGVCISSPPSLPGGTAISPPPPLSGDATIPPPPPLPEGVGIPSPSSLPGGTAIPPPPPLPGSARIPPPPPPLPGSAGIPPPPPPLPGEAGMPPPPPPLPGGPGIPPPPPFPGGPGIPPPPPGMGMPPPPPFGFGVPAAPVLPFGLTPKKLYKPEVQLRRPNWSKLVAEDLSQDCFWTKVKEDRFENNELFAKLTLTFSAQTKTKKDQEGGEEKKSVQKKKVKELKVLDSKTAQNLSIFLGSFRMPYQEIKNVILEVNEAVLTESMIQNLIKQMPEPEQLKMLSELKDEYDDLAESEQFGVVMGTVPRLRPRLNAILFKLQFSEQVENIKPEIVSVTAACEELRKSESFSNLLEITLLVGNYMNAGSRNAGAFGFNISFLCKLRDTKSTDQKMTLLHFLAELCENDYPDVLKFPDELAHVEKASRVSAENLQKNLDQMKKQISDVERDVQNFPAATDEKDKFVEKMTSFVKDAQEQYNKLRMMHSNMETLYKELGEYFLFDPKKLSVEEFFMDLHNFRNMFLQAVKENQKRRETEEKMRRAKLAKEKAEKERLEKQQKREQLIDMNAEGDETGVMDSLLEALQSGAAFRRKRGPRQEAIKLQTVL

SEQ ID NO: 7848 - protein, 836 aa, Artificial Sequence
  Synthetic polypeptide
MEPSPSPAPQAQPPKPVPKPRTVFGGLSGPATTQRPGLSPALGGPGVSRSPEPSPRPPPLPTSSSEQSSALNTVEMMPNSIYFGLDSRGRAQAAQDKAPDSSQISAPTPALRPTTGTVHIMDPGCLYYGVQPVGTPGAPDRRESRGVCQGRAEHRLSRQDLEAREDAGYASLELPGDSTLLSPTLETEETSDDLISPYASFSFTADRLTPLLSGWLDKLSPQGNYVFQRRFVQFNGRSLMYFGSDKDPFPKGVIPLTAIEMTRSSKDNKFQVITGQRVFVFRTESEAQRDMWCSTLQSCLKEQRLLGHPRPPQPPRPLRTGMLELRGHKAKVFAALSPGELALYKSEQAFSLGIGICFIELQGCSVRETKSRSFDLLTPHRCFSFTAESGGARQSWAAALQEAVTETLSDYEVAEKIWSNRANRQCADCGSSRPDWAAVNLGVVICKQCAGQHRALGSGISKVQSLKLDTSVWSNEIVQLFIVLGNDRANRFWAGTLPPGEGLHPDATPGPRGEFISRKYRLGLFRKPHPQYPDHSQLLQALCAAVARPNLLKNMTQLLCVEAFEDPSPGVYNEVVVRATYSGFLYCSPVSNKAGPSPPRRGRDAPPRLWCVLGAALEMFASENSPEPLSLIQPQDIVCLGVSPPPTDPGDRFPFSFELILAGGRIQHFGTDGADSLEAWTSAVGKWFSPLSCHQLLGPGLLRLGRLWLRSPSHTAPAPGLWLSGFGLLRGDHLFLCSAPGPGPPAPEDMVHLRRLQEISVVSAADTPDKKEHLVLVETGRTLYLQGEGRLDFTAWNAAIGGAAGGGGTGLQEQQMSRGDIPIIVDACISFVTQHG

SEQ ID NO: 7849 - protein, 934 aa, Artificial Sequence
  Synthetic polypeptide
MAAPQDLDIAVWLATVHLEQYADTFRRHGLATAGAARGLGHEELKQLGISATGHRKRILRLLQTGTEEGSLDPKSDSAMEPSPSPAPQAQPPKPVPKPRTVFGGLSGPATTQRPGLSPALGGPGVSRSPEPSPRPPPLPTSSSEQSSALNTVEMMPNSIYFGLDSRGRAQAAQDKAPDSSQISAPTPALRPTTGTVHIMDPGCLYYGVQPVGTPGAPDRRESRGVCQGRAEHRLSRQDLEAREDAGYASLELPGDSTLLSPTLETEETSDDLISPYASFSFTADRLTPLLSGWLDKLSPQGNYVFQRRFVQFNGRSLMYFGSDKDPFPKGVIPLTAIEMTRSSKDNKFQVITGQRVFVFRTESEAQRDMWCSTLQSCLKEQRLLGHPRPPQPPRPLRTGMLELRGHKAKVFAALSPGELALYKSEQAFSLGIGICFIELQGCSVRETKSRSFDLLTPHRCFSFTAESGGARQSWAAALQEAVTETLSDYEVAEKIWSNRANRQCADCGSSRPDWAAVNLGVVICKQCAGQHRALGSGISKVQSLKLDTSVWSNEIVQLFIVLGNDRANRFWAGTLPPGEGLHPDATPGPRGEFISRKYRLGLFRKPHPQYPDHSQLLQALCAAVARPNLLKNMTQLLCVEAFEGEEPWFPPAPDGSCPGLLPSDPSPGVYNEVVVRATYSGFLYCSPVSNKAGPSPPRRGRDAPPRLWCVLGAALEMFASENSPEPLSLIQPQDIVCLGVSPPPTDPGDRFPFSFELILAGGRIQHFGTDGADSLEAWTSAVGKWFSPLSCHQLLGPGLLRLGRLWLRSPSHTAPAPGLWLSGFGLLRGDHLFLCSAPGPGPPAPEDMVHLRRLQEISVVSAADTPDKKEHLVLVETGRTLYLQGEGRLDFTAWNAAIGGAAGGGGTGLQEQQMSRGDIPIIVDACISFVTQHG

SEQ ID NO: 7850 - protein, 596 aa, Artificial Sequence
  Synthetic polypeptide
MTRSSKDNKFQVITGQRVFVFRTESEAQRDMWCSTLQSCLKEQRLLGHPRPPQPPRPLRTGMLELRGHKAKVFAALSPGELALYKSEQAFSLGIGICFIELQGCSVRETKSRSFDLLTPHRCFSFTAESGGARQSWAAALQEAVTETLSDYEVAEKIWSNRANRQCADCGSSRPDWAAVNLGVVICKQCAGQHRALGSGISKVQSLKLDTSVWSNEIVQLFIVLGNDRANRFWAGTLPPGEGLHPDATPGPRGEFISRKYRLGLFRKPHPQYPDHSQLLQALCAAVARPNLLKNMTQLLCVEAFEGEEPWFPPAPDGSCPGLLPSDPSPGVYNEVVVRATYSGFLYCSPVSNKAGPSPPRRGRDAPPRLWCVLGAALEMFASENSPEPLSLIQPQDIVCLGVSPPPTDPGDRFPFSFELILAGGRIQHFGTDGADSLEAWTSAVGKWFSPLSCHQLLGPGLLRLGRLWLRSPSHTAPAPGLWLSGFGLLRGDHLFLCSAPGPGPPAPEDMVHLRRLQEISVVSAADTPDKKEHLVLVETGRTLYLQGEGRLDFTAWNAAIGGAAGGGGTGLQEQQMSRGDIPIIVDACISFVTQHG

SEQ ID NO: 7851 - protein, 569 aa, Artificial Sequence
  Synthetic polypeptide
MGLPALEFSDCCLDSPHFRETLKSHEAELDKTNKFIKELIKDGKSLISALKNLSSAKRKFADSLNEFKFQCIGDAETDDEMCIARSLQEFATVLRNLEDERIRMIENASEVLITPLEKFRKEQIGAAKEAKKKYDKETEKYCGILEKHLNLSSKKKESQLQEADSQVDLVRQHFYEVSLEYVFKVQEVQERKMFEFVEPLLAFLQGLFTFYHHGYELAKDFGDFKTQLTISIQNTRNRFEGTRSEVESLMKKMKENPLEHKTISPYTMEGYLYVQEKRHFGTSWVKHYCTYQRDSKQITMVPFDQKSGGKGGEDESVILKSCTRRKTDSIEKRFCFDVEAVDRPGVITMQALSEEDRRLWMEAMDGREPVYNSNKDSQSEGTAQLDSIGFSIIRKCIHAVETRGINEQGLYRIVGVNSRVQKLLSVLMDPKTASETETDICAEWEIKTITSALKTYLRMLPGPLMMYQFQRSFIKAAKLENQESRVSEIHSLVHRLPEKNRQMLQLLMNHLAKENRYNQKRTSASYHHNIHTCAYVSAISPVRQGNPVLLPKGIPFPGTLEPIDSPLDL

SEQ ID NO: 7852 - protein, 10 aa, Artificial Sequence
  Synthetic polypeptide
MRSWTALASA

SEQ ID NO: 7853 - protein, 17 aa, Artificial Sequence
  Synthetic polypeptide
TPRLLLRQKQISVLNGR

SEQ ID NO: 7854 - protein, 93 aa, Artificial Sequence
  Synthetic polypeptide
AKLENQESRVSEIHSLVHRLPEKNRQMLQLLMNHLAKENRYNQKRTSASYHHNIHTCAYVSAISPVRQGNPVLLPKGIPFPGTLEPIDSPLDL

SEQ ID NO: 7855 - protein, 395 aa, Artificial Sequence
  Synthetic polypeptide
MDSKESLTPGREENPSSVLAQERGDVMDFYKTLRGGATVKVSASSPSLAVASQSDSKQRRLLVDFPKGSVSNAQQPDLSKAVSLSMGLYMGETETKVMGNDLGFPQQGQISLSSGETDLKLLEESIANLNRSTSVPENPKSSASTAVSAAPTEKEFPKTHSDVSSEQQHLKGQTGTNGGNVKLYTTDQSTFDILQDLEFSSGSPGKETNESPWRSDLLIDENCLLSPLAGEDDSFLLEGNSNEDCKPLILPDTKPKIKDNGDLVLSSPSNVTLPQVKTEKEDFIELCTPGVIKQEKLGTVYCQASFPGANIIGNKMSAISVHGVSTSGGQMYHYDMNTASLSQQQDQKPIFNVIPPIPVGSENWNRCQGSGDDNLTSLGTLNFPGRTVFSNGYSR

SEQ ID NO: 7856 - protein, 369 aa, Artificial Sequence
  Synthetic polypeptide
MDSKESLTPGREENPSSVLAQERGDVMDFYKTLRGGATVKVSASSPSLAVASQSDSKQRRLLVDFPKGSVSNAQQPDLSKAVSLSMGLYMGETETKVMGNDLGFPQQGQISLSSGETDLKLLEESIANLNRSTSVPENPKSSASTAVSAAPTEKEFPKTHSDVSSEQQHLKGQTGTNGGNVKLYTTDQSTFDILQDLEFSSGSPGKETNESPWRSDLLIDENCLLSPLAGEDDSFLLEGNSNEDCKPLILPDTKPKIKDNGDLVLSSPSNVTLPQVKTEKEDFIELCTPGVIKQEKLGTVYCQASFPGANIIASLSQQQDQKPIFNVIPPIPVGSENWNRCQGSGDDNLTSLGTLNFPGRTVFSNGYSR

SEQ ID NO: 7857 - protein, 402 aa, Artificial Sequence
  Synthetic polypeptide
MDSKESLTPGREENPSSVLAQERGDVMDFYKTLRGGATVKVSASSPSLAVASQSDSKQRRLLVDFPKGSVSNAQQPDLSKAVSLSMGLYMGETETKVMGNDLGFPQQGQISLSSGETDLKLLEESIANLNRSTSVPENPKSSASTAVSAAPTEKEFPKTHSDVSSEQQHLKGQTGTNGGNVKLYTTDQSTFDILQDLEFSSGSPGKETNESPWRSDLLIDENCLLSPLAGEDDSFLLEGNSNEDCKPLILPDTKPKIKDNGDLVLSSPSNVTLPQVKTEKEDFIELCTPGVIKQEKLGTVYCQASFPGANIIGNKMSAISVHGVSTSGGQMYHYDMNTASLSQQQDQKPIFNVIPPIPVGSENWNRCQGSGDDNLTSLGTLNFPGRTVFSNGYSRNETTKPG

SEQ ID NO: 7858 - protein, 376 aa, Artificial Sequence
  Synthetic polypeptide
MDSKESLTPGREENPSSVLAQERGDVMDFYKTLRGGATVKVSASSPSLAVASQSDSKQRRLLVDFPKGSVSNAQQPDLSKAVSLSMGLYMGETETKVMGNDLGFPQQGQISLSSGETDLKLLEESIANLNRSTSVPENPKSSASTAVSAAPTEKEFPKTHSDVSSEQQHLKGQTGTNGGNVKLYTTDQSTFDILQDLEFSSGSPGKETNESPWRSDLLIDENCLLSPLAGEDDSFLLEGNSNEDCKPLILPDTKPKIKDNGDLVLSSPSNVTLPQVKTEKEDFIELCTPGVIKQEKLGTVYCQASFPGANIIASLSQQQDQKPIFNVIPPIPVGSENWNRCQGSGDDNLTSLGTLNFPGRTVFSNGYSRNETTKPG

SEQ ID NO: 7859 - protein, 173 aa, Artificial Sequence
  Synthetic polypeptide
MGVSVDVHQVYKYPFEQVVASFLRKYPNPMDKNVISVKIMEEKRDESTGVIYRKRIAICQNVVPEILRKSLSTLVILCWKKVSILKVPNIQLEEESWLNPRERNMAIRSHCLTWTQYASMKEESVFRESMENPNWTEFIQRGRISITGVGFLNCVLETFASTFLRQGAQKVQG

SEQ ID NO: 7860 - protein, 161 aa, Artificial Sequence
  Synthetic polypeptide
MGVSVDVHQVYKYPFEQVVASFLRKYPNPMDKNVISVKIMEEKRDESTGVIYRKRIAICQNVVPEILRKVSILKVPNIQLEEESWLNPRERNMAIRSHCLTWTQYASMKEESVFRESMENPNWTEFIQRGRISITGVGFLNCVLETFASTFLRQGAQKVQG

SEQ ID NO: 7861 - protein, 132 aa, Artificial Sequence
  Synthetic polypeptide
MDKNVISVKIMEEKRDESTGVIYRKRIAICQNVVPEILRKVSILKVPNIQLEEESWLNPRERNMAIRSHCLTWTQYASMKEESVFRESMENPNWTEFIQRGRISITGVGFLNCVLETFASTFLRQGAQKVQG

SEQ ID NO: 7862 - protein, 567 aa, Artificial Sequence
  Synthetic polypeptide
MAERGGDGGESERFNPGELRMAQQQALRFRGPAPPPNAVMRGPPPLMRPPPPFGMMRGPPPPPRPPFGRPPFDPNMPPMPPPGGIPPPMGPPHLQRPPFMPPPMSSMPPPPGMMFPPGMPPVTAPGTPALPPTEEIWVENKTPDGKVYYYNARTRESAWTKPDGVKVIQQSELTPMLAAQAQVQAQAQAQAQAQAQAQAQAQAQAQAQAQAQAQAQAQAQAQAQAQAQAQAQAQAQAQAQAQVQAQVQAQVQAQAVGASTPTTSSPAPAVSTSTSSSTPSSTTSTTTTATSVAQTVSTPTTQDQTPSSAVSVATPTVSVSTPAPTATPVQTVPQPHPQTLPPAVPHSVPQPTTAIPAFPPVMVPPFRVPLPGMPIPLPGVAMMQIVSCPYVKTVATTKTGVLPGMAPPIVPMIHPQVAIAASPATLAGATAVSEWTEYKTADGKTYYYNNRTLESTWEKPQELKEKEKLEEKIKEPIKEPSEEPLPMETEEEDPKEEPIKEIKEEPKEEEMTEEEKAAQKAKPVATAPIPGTPCMCSFCVSVLHFGNSWDISNFFIIFISVTVICDQ

SEQ ID NO: 7863 - protein, 546 aa, Artificial Sequence
  Synthetic polypeptide
MAERGGDGGESERFNPGELRMAQQQALRFRGPAPPPNAVMRGPPPLMRPPPPFGMMRGPPPPPRPPFGRPPFDPNMPPMPPPGGIPPPMGPPHLQRPPFMPPPMSSMPPPPGMMFPPGMPPVTAPGTPALPPTEEIWVENKTPDGKVYYYNARTRESAWTKPDGVKVIQQSELTPMLAAQAQVQAQAQAQAQAQAQAQAQAQAQAQAQAQAQAQAQAQAQAQAQAQAQAQAQAQAQAQAQAQVQAQVQAQVQAQAVGASTPTTSSPAPAVSTSTSSSTPSSTTSTTTTATSVAQTVSTPTTQDQTPSSAVSVATPTVSVSTPAPTATPVQTVPQPHPQTLPPAVPHSVPQPTTAIPAFPPVMVPPFRVPLPGMPIPLPGVLPGMAPPIVPMIHPQVAIAASPATLAGATAVSEWTEYKTADGKTYYYNNRTLESTWEKPQELKEKEKLEEKIKEPIKEPSEEPLPMETEEEDPKEEPIKEIKEEPKEEEMTEEEKAAQKAKPVATAPIPGTPCMCSFCVSVLHFGNSWDISNFFIIFISVTVICDQ

SEQ ID NO: 7864 - protein, 341 aa, Artificial Sequence [sequence omitted]

SEQ ID NO: 7865 - protein, 422 aa, Artificial Sequence
  Synthetic polypeptide
MGQPGNGSAFLLAPNGSHAPDHDVTQERDEVWVVGMGIVMSLIVLAIVFGNVLVITAIAKFERLQTVTNYFITSLACADLVMGLAVVPFGAAHILMKMWTFGNFWCEFWTSIDVLCVTASIETLCVIAVDRYFAITSPFKYQSLLTKNKARVIILMVWIVSGLTSFLPIQMHWYRATHQEAINCYANETCCDFFTNQAYAIASSIVSFYVPLVIMVFVYSRVFQEAKRQLQKIDKSEGRFHVQNLSQVEQDGRTGHGLRRSSKFCLKEHKALKTLGIIMGTFTLCWLPFFIVNIVHVIQDNLIRKEVYILLNWIGYVNSGFNPLIYCRSPDFRIAFQELLCLRRSSLKAYGNGYSSNGNTGEQSGYHVEQEKENKLLCEDLPGTEDFVGHQGTRMKPEIIILSKLTEEQKTKHRMLSLISGS

SEQ ID NO: 7866 - protein, 34 aa, Artificial Sequence
  Synthetic polypeptide
MAGNDCGALLDEELSSFFLNYLADTQMSTHGGRS

SEQ ID NO: 7867 - protein, 922 aa, Artificial Sequence
  Synthetic polypeptide
MAGNDCGALLDEELSSFFLNYLADTQGGGSGEEQLYADFPELDLSQLDASDFDSATCFGELQWCPENSETEPNQYSPDDSELFQIDSENEALLAELTKTLDDIPEDDVGLAAFPALDGGDALSCTSASPAPSSAPPSPAPEKPSAPAPEVDELSLADSTQDKKAPMMQSQSRSCTELHKHLTSAQCCLQDRGLQPPCLQSPRLPAKEDKEPGEDCPSPQPAPASPRDSLALGRADPGAPVSQEDMQAMVQLIRYMHTYCLPQRKLPPQTPEPLPKACSNPSQQVRSRPWSRHHSKASWAEFSILRELLAQDVLCDVSKPYRLATPVYASLTPRSRPRPPKDSQASPGRPSSVEEVRIAASPKSTGPRPSLRPLRLEVKREVRRPARLQQQEEEDEEEEEEEEEEEKEEEEEWGRKRPGRGLPWTKLGRKLESSVCPVRRSRRLNPELGPWLTFADEPLVPSEPQGALPSLCLAPKAYDVERELGSPTDEDSGQDQQLLRGPQIPALESPCESGCGDMDEDPSCPQLPPRDSPRCLMLALSQSDPTFGKKSFEQTLTVELCGTAGLTPPTTPPYKPTEEDPFKPDIKHSLGKEIALSLPSPEGLSLKATPGAAHKLPKKHPERSELLSHLRHATAQPASQAGQKRPFSCSFGDHDYCQVLRPEGVLQRKVLRSWEPSGVHLEDWPQQGAPWAEAQAPGREEDRSCDAGAPPKDSTLLRDHEIRASLTKHFGLLETALEEEDLASCKSPEYDTVFEDSSSSSGESSFLPEEEEEEGEEEEEDDEEEDSGVSPTCSDHCPYQSPPSKANRQLCSRSRSSSGSSPCHSWSPATRRNFRCESRGPCSDRTPSIRHARKRREKAIGEGRVVYIQNLSSDMSSRELKRRFEVFGEIEECEVLTRNRRMATIKKPENKYWQGCGETGTLV

SEQ ID NO: 7868 - protein, 961 aa, Artificial Sequence
  Synthetic polypeptide
MAGNDCGALLDEELSSFFLNYLADTQGGGSGEEQLYADFPELDLSQLDASDFDSATCFGELQWCPENSETEPNQYSPDDSELFQIDSENEALLAELTKTLDDIPEDDVGLAAFPALDGGDALSCTSASPAPSSAPPSPAPEKPSAPAPEVDELSLLQKLLLATSYPTSSSDTQKEGTAWRQAGLRSKSQRPCVKADSTQDKKAPMMQSQSRSCTELHKHLTSAQCCLQDRGLQPPCLQSPRLPAKEDKEPGEDCPSPQPAPASPRDSLALGRADPGAPVSQEDMQAMVQLIRYMHTYCLPQRKLPPQTPEPLPKACSNPSQQVRSRPWSRHHSKASWAEFSILRELLAQDVLCDVSKPYRLATPVYASLTPRSRPRPPKDSQASPGRPSSVEEVRIAASPKSTGPRPSLRPLRLEVKREVRRPARLQQQEEEDEEEEEEEEEEEKEEEEEWGRKRPGRGLPWTKLGRKLESSVCPVRRSRRLNPELGPWLTFADEPLVPSEPQGALPSLCLAPKAYDVERELGSPTDEDSGQDQQLLRGPQIPALESPCESGCGDMDEDPSCPQLPPRDSPRCLMLALSQSDPTFGKKSFEQTLTVELCGTAGLTPPTTPPYKPTEEDPFKPDIKHSLGKEIALSLPSPEGLSLKATPGAAHKLPKKHPERSELLSHLRHATAQPASQAGQKRPFSCSFGDHDYCQVLRPEGVLQRKVLRSWEPSGVHLEDWPQQGAPWAEAQAPGREEDRSCDAGAPPKDSTLLRDHEIRASLTKHFGLLETALEEEDLASCKSPEYDTVFEDSSSSSGESSFLPEEEEEEGEEEEEDDEEEDSGVSPTCSDHCPYQSPPSKANRQLCSRSRSSSGSSPCHSWSPATRRNFRCESRGPCSDRTPSIRHARKRREKAIGEGRVVYIQNLSSDMSSRELKRRFEVFGEIEECEVLTRNRRMATIKKPENKYWQGCGETGTLV

SEQ ID NO: 7869 - protein, 897 aa, Artificial Sequence
  Synthetic polypeptide
MGGGSGEEQLYADFPELDLSQLDASDFDSATCFGELQWCPENSETEPNQYSPDDSELFQIDSENEALLAELTKTLDDIPEDDVGLAAFPALDGGDALSCTSASPAPSSAPPSPAPEKPSAPAPEVDELSLADSTQDKKAPMMQSQSRSCTELHKHLTSAQCCLQDRGLQPPCLQSPRLPAKEDKEPGEDCPSPQPAPASPRDSLALGRADPGAPVSQEDMQAMVQLIRYMHTYCLPQRKLPPQTPEPLPKACSNPSQQVRSRPWSRHHSKASWAEFSILRELLAQDVLCDVSKPYRLATPVYASLTPRSRPRPPKDSQASPGRPSSVEEVRIAASPKSTGPRPSLRPLRLEVKREVRRPARLQQQEEEDEEEEEEEEEEEKEEEEEWGRKRPGRGLPWTKLGRKLESSVCPVRRSRRLNPELGPWLTFADEPLVPSEPQGALPSLCLAPKAYDVERELGSPTDEDSGQDQQLLRGPQIPALESPCESGCGDMDEDPSCPQLPPRDSPRCLMLALSQSDPTFGKKSFEQTLTVELCGTAGLTPPTTPPYKPTEEDPFKPDIKHSLGKEIALSLPSPEGLSLKATPGAAHKLPKKHPERSELLSHLRHATAQPASQAGQKRPFSCSFGDHDYCQVLRPEGVLQRKVLRSWEPSGVHLEDWPQQGAPWAEAQAPGREEDRSCDAGAPPKDSTLLRDHEIRASLTKHFGLLETALEEEDLASCKSPEYDTVFEDSSSSSGESSFLPEEEEEEGEEEEEDDEEEDSGVSPTCSDHCPYQSPPSKANRQLCSRSRSSSGSSPCHSWSPATRRNFRCESRGPCSDRTPSIRHARKRREKAIGEGRVVYIQNLSSDMSSRELKRRFEVFGEIEECEVLTRNRRMATIKKPENKYWQGCGETGTLV

SEQ ID NO: 7870 - protein, 24 aa, Artificial Sequence
  Synthetic polypeptide
GLQQPLPAGQIPALVPAPLQSLLG

SEQ ID NO: 7871 - protein, 173 aa, Artificial Sequence
  Synthetic polypeptide
MPALACLRRLCRHVSPQAVLFLLFIFCLFSVFISAYYLYGWKRGLEPSADAPEPDCGDPPPVAPSRLLPLKPVQAATPSRTDPLVLVFVESLYSQLGQEVVAILESSRFKYRTEIAPGKGDMPTLTDKGRGRFALIIYENILKYVNLDAWNRELLDKYCVAYGVGIIGFFKPL

SEQ ID NO: 7872 - protein, 773 aa, Artificial Sequence
  Synthetic polypeptide
MPALACLRRLCRHVSPQAVLFLLFIFCLFSVFISAYYLYGWKRGLEPSADAPEPDCGDPPPVAPSRLLPLKPVQAATPSRTDPLVLVFVESLYSQLGQEVVAILESSRFKYRTEIAPGKGDMPTLTDKGRGRFALIIYENILKYVNLDAWNRELLDKYCVAYGVGIIGFFKANENSLLSAQLKGFPLFLHSNLGLKDCSINPKSPLLYVTRPSEVEKGVLPGEDWTVFQSNHSTYEPVLLAKTRSSESIPHLGADAGLHAALHATVVQDLGLHDGIQRVLFGNNLNFWLHKLVFVDAVAFLTGKRLSLPLDRYILVDIDDIFVGKEGTRMKVEDVKALFDTQNELRAHIPNFTFNLGYSGKFFHTGTNAEDAGDDLLLSYVKEFWWFPHMWSHMQPHLFHNQSVLAEQMALNKKFAVEHGIPTDMGYAVAPHHSGVYPVHVQLYEAWKQVWSIRVTSTEEYPHLKPARYRRGFIHNGIMVLPRQTCGLFTHTIFYNEYPGGSSELDKIINGGELFLTVLLNPISIFMTHLSNYGNDRLGLYTFKHLVRFLHSWTNLRLQTLPPVQLAQKYFQIFSEEKDPLWQDPCEDKRHKDIWSKEKTCDRFPKLLIIGPQKTGTTALYLFLGMHPDLSSNYPSSETFEEIQFFNGHNYHKGIDWYMEFFPIPSNTTSDFYFEKSANYFDSEVAPRRAAALLPKAKVLTILINPADRAYSWYQILVLDGKLLRTEPAKVMDMVQKFLGVTNTIDYHKTLALLKRLWLVGLEERRLRMCELP

SEQ ID NO: 7873 - protein, 830 aa, Artificial Sequence
  Synthetic polypeptide
MPALACLRRLCRHVSPQAVLFLLFIFCLFSVFISAYYLYGWKRGLEPSADAPEPDCGDPPPVAPSRLLPLKPVQAATPSRTDPLVLVFVESLYSQLGQEVVAILESSRFKYRTEIAPGKGDMPTLTDKGRGRFALIIYENILKYVNLDAWNRELLDKYCVAYGVGIIGFFKANENSLLSAQLKGFPLFLHSNLGLKDCSINPKSPLLYVTRPSEVEKGVLPGEDWTVFQSNHSTYEPVLLAKTRSSESIPHLGADAGLHAALHATVVQDLGLHDGIQRVLFGNNLNFWLHKLVFVDAVAFLTGKRLSLPLDRYILVDIDDIFVGKEGTRMKVEDVKALFDTQNELRAHIPNFTFNLGYSGKFFHTGTNAEDAGDDLLLSYVKEFWWFPHMWSHMQPHLFHNQSVLAEQMALNKKFAVEHGIPTDMGYAVAPHHSGVYPVHVQLYEAWKQVWSIRVTSTEEYPHLKPARYRRGFIHNGIMVLPRQTCGLFTHTIFYNEYPGGSSELDKIINGGELFLTVLLNPISIFMTHLSNYGNDRLGLYTFKHLVRFLHSWTNLRLQTLPPVQLAQKYFQIFSEEKDPLWQDPCEDKRHKDIWSKEKTCDRFPKLLIIGPQKTGTTALYLFLGMHPDLSSNYPSSETFEEIQFFNGHNYHKGIDWYMEFFPIPSNTTSDFYFEKSANYFDSEVAPRRAAALLPKAKVLTILINPADRAYSWYQHQRAHDDPVALKYTFHEVITAGSDASSKLRALQNRCLVPGWYATHIERWLSAYHANQILVLDGKLLRTEPAKVMDMVQKFLGVTNTIDYHKTLALLKRLWLVGLEERRLRMCELP

SEQ ID NO: 7874 - protein, 15 aa, Artificial Sequence
  Synthetic polypeptide
MMKSQLFSSYNGRVE

SEQ ID NO: 7875 - protein, 31 aa, Artificial Sequence
  Synthetic polypeptide
MVPAETSSSGLLEEQKMMKSQLFSSYNGRVE

SEQ ID NO: 7876 - protein, 573 aa, Artificial Sequence
  Synthetic polypeptide
MEATRLRQKAEELVKDNELLPPPSPSLGSFDPLAELTGKDSNVTASPTAPACPSDKPAPVQKPPSSGTSSEFEVVTPEEQNSPESSSHANAMALGPLPREDGNLMLHLQRLETTLSVCAEEPDHGQLFTHLGRMALEFNRLASKVHKNEQRTSILQTLCEQLRKENEALKAKLDKGLEQRDQAAERLREENLELKKLLMSNGNKEGASGRPGSPKMEGTGKKAVAGQQQASVTAGKVPEVVALGAAEKKVKMLEQQRSELLEVNKQWDQHFRSMKQQYEQKITELRQKLADLQKQVTDLEAEREQKQRDFDRKLLLAKSKIEMEETDKEQLTAEAKELRQKVKYLQDQLSPLTRQREYQEKEIQRLNKALEEALSIQTPPSSPPTAFGSPEGAGALLRKQELVTQNELLKQQVKIFEEDFQRERSDRERMNEEKEELKKQVEKLQAQVTLSNAQLKAFKDEEKAREALRQQKRKAKASGERYHVEPHPEHLCGAYPYAYPPMPAMVPHHGFEDWSQIRYPPPPMAMEHPPPLPNSRLFHLPEYTWRLPCGGVRNPNQSSQVMDPPTARPTEPG

SEQ ID NO: 7877 - protein, 626 aa, Artificial Sequence
  Synthetic polypeptide
MEGRGPYRIYDPGGSVPSGEASAAFERLVKENSRLKEKMQGIKMLGELLEESQMEATRLRQKAEELVKDNELLPPPSPSLGSFDPLAELTGKDSNVTASPTAPACPSDKPAPVQKPPSSGTSSEFEVVTPEEQNSPESSSHANAMALGPLPREDGNLMLHLQRLETTLSVCAEEPDHGQLFTHLGRMALEFNRLASKVHKNEQRTSILQTLCEQLRKENEALKAKLDKGLEQRDQAAERLREENLELKKLLMSNGNKEGASGRPGSPKMEGTGKKAVAGQQQASVTAGKVPEVVALGAAEKKVKMLEQQRSELLEVNKQWDQHFRSMKQQYEQKITELRQKLADLQKQVTDLEAEREQKQRDFDRKLLLAKSKIEMEETDKEQLTAEAKELRQKVKYLQDQLSPLTRQREYQEKEIQRLNKALEEALSIQTPPSSPPTAFGSPEGAGALLRKQELVTQNELLKQQVKIFEEDFQRERSDRERMNEEKEELKKQVEKLQAQVTLSNAQLKAFKDEEKAREALRQQKRKAKASGERYHVEPHPEHLCGAYPYAYPPMPAMVPHHGFEDWSQIRYPPPPMAMEHPPPLPNSRLFHLPEYTWRLPCGGVRNPNQSSQVMDPPTARPTEPG

SEQ ID NO: 7878 - protein, 562 aa, Artificial Sequence
  Synthetic polypeptide
MEGRGPYRIYDPGGSVPSGEASAAFERLVKENSRLKEKMQGIKMLGELLEESQMEATRLRQKAEELVKDNELLPPPSPSLGSFDPLAELTGKDSNVTASPTAPACPSDKPAPVQKPPSSGTSSEFEVVTPEEQNSPESSSHANAMALGPLPREDGNLMLHLQRLETTLSVCAEEPDHGQLFTHLGRMALEFNRLASKVHKNEQRTSILQTLCEQLRKENEALKAKLDKGLEQRDQAAERLREENLELKKLLMSNGNKEGASGRPGSPKMEGTGKKAVAGQQQASVTAGKVPEVVALGAAEKKVKMLEQQRSELLEVNKQWDQHFRSMKQQYEQKITELRQKLADLQKQVTDLEAEREQKQRDFDRKLLLAKSKIEMEETDKEQLTAEAKELRQKVKYLQDQLSPLTRQREYQEKEIQRLNKALEEALSIQTPPSSPPTAFGSPEGAGALLRKQELVTQNELLKQQVKIFEEDFQRERSDRERMNEEKEELKKQVEKLQAQVTLSNAQLKAFKDEEKAREALRQQKRKAKPEYTWRLPCGGVRNPNQSSQVMDPPTARPTEPG

SEQ ID NO: 7879 - protein, 491 aa, Artificial Sequence
  Synthetic polypeptide
MEATRLRQKAEELVKDNELLPPPSPSLGSFDPLAELTGKDSNVTASPTAPACPSDKPAPVQKPPSSGTSSEFEVVTPEEQNSPESSSHANAMALGPLPREDGNLMLHLQRLETTLSVCAEEPDHGQLFTHLGRMALEFNRLASKVHKNEQRTSILQTLCEQLRKENEALKAKLDKGLEQRDQAAERLREENLELKKLLMSNGNKEGASGRPGSPKMEGTGKKAVAGQQQASVTAGKVPEVVALGAAEKKVKMLEQQRSELLEVNKQWDQHFRSMKQQYEQKITELRQKLADLQKQVTDLEAEREQKQRDFDRKLLLAKSKIEMEETDKEQLTAEAKELRQKVKYLQDQLSPLTRQREYQEKEIQRLNKALEEALSIQTPPSSPPTAFGSPEGAGALLRKQELVTQNELLKQQVKIFEEDFQRERSDRERMNEEKEELKKQVEKLQAQVTLSNAQLKAFKDEEKAREALRQQKRKAKDKAEGSNKWWKEYGN

SEQ ID NO: 7880 - protein, 544 aa, Artificial Sequence
  Synthetic polypeptide
MEGRGPYRIYDPGGSVPSGEASAAFERLVKENSRLKEKMQGIKMLGELLEESQMEATRLRQKAEELVKDNELLPPPSPSLGSFDPLAELTGKDSNVTASPTAPACPSDKPAPVQKPPSSGTSSEFEVVTPEEQNSPESSSHANAMALGPLPREDGNLMLHLQRLETTLSVCAEEPDHGQLFTHLGRMALEFNRLASKVHKNEQRTSILQTLCEQLRKENEALKAKLDKGLEQRDQAAERLREENLELKKLLMSNGNKEGASGRPGSPKMEGTGKKAVAGQQQASVTAGKVPEVVALGAAEKKVKMLEQQRSELLEVNKQWDQHFRSMKQQYEQKITELRQKLADLQKQVTDLEAEREQKQRDFDRKLLLAKSKIEMEETDKEQLTAEAKELRQKVKYLQDQLSPLTRQREYQEKEIQRLNKALEEALSIQTPPSSPPTAFGSPEGAGALLRKQELVTQNELLKQQVKIFEEDFQRERSDRERMNEEKEELKKQVEKLQAQVTLSNAQLKAFKDEEKAREALRQQKRKAKDKAEGSNKWWKEYGN

SEQ ID NO: 7881 - protein, 1615 aa, Artificial Sequence
  Synthetic polypeptide
MTIALLGFAIFLLHCATCEKPLEGILSSSAWHFTHSHYNATIYENSSPKTYVESFEKMGIYLAEPQWAVRYRIISGDVANVFKTEEYVVGNFCFLRIRTKSSNTALLNREVRDSYTLIIQATEKTLELEALTRVVVHILDQNDLKPLFSPPSYRVTISEDMPLKSPICKVTATDADLGQNAEFYYAFNTRSEMFAIHPTSGVVTVAGKLNVTWRGKHELQVLAVDRMRKISEGNGFGSLAALVVHVEPALRKPPAIASVVVTPPDSNDGTTYATVLVDANSSGAEVESVEVVGGDPGKHFKAIKSYARSNEFSLVSVKDINWMEYLHGFNLSLQARSGSGPYFYSQIRGFHLPPSKLSSLKFEKAVYRVQLSEFSPPGSRVVMVRVTPAFPNLQYVLKPSSENVGFKLNARTGLITTTKLMDFHDRAHYQLHIRTSPGQASTVVVIDIVDCNNHAPLFNRSSYDGTLDENIPPGTSVLAVTATDRDHGENGYVTYSIAGPKALPFSIDPYLGIISTSKPMDYELMKRIYTFRVRASDWGSPFRREKEVSIFLQLRNLNDNQPMFEEVNCTGSIRQDWPVGKSIMTMSAIDVDELQNLKYEIVSGNELEYFDLNHFSGVISLKRPFINLTAGQPTSYSLKITASDGKNYASPTTLNITVVKDPHFEVPVTCDKTGVLTQFTKTILHFIGLQNQESSDEEFTSLSTYQINHYTPQFEDHFPQSIDVLESVPINTPLARLAATDPDAGFNGKLVYVIADGNEEGCFDIELETGLLTVAAPLDYEATNFYILNVTVYDLGTPQKSSWKLLTVNVKDWNDNAPRFPPGGYQLTISEDTEVGTTIAELTTKDADSEDNGRVRYTLLSPTEKFSLHPLTGELVVTGHLDRESEPRYILKVEARDQPSKGHQLFSVTDLIITLEDVNDNSPQCITEHNRLKVPEDLPPGTVLTFLDASDPDLGPAGEVRYVLMDGAHGTFRVDLMTGALILERELDFERRAGYNLSLWASDGGRPLARRTLCHVEVIVLDVNENLHPPHFASFVHQGQVQENSPSGTQVIVVAAQDDDSGLDGELQYFLRAGTGLAAFSINQDTGMIQTLAPLDREFASYYWLTVLAVDRGSVPLSSVTEVYIEVTDANDNPPQMSQAVFYPSIQEDAPVGTSVLQLDAWDPDSSSKGKLTFNITSGNYMGFFMIHPVTGLLSTAQQLDRENKDEHILEVTVLDNGEPSLKSTSRVVVGILDVNDNPPIFSHKLFNVRLPERLSPVSPGPVYRLVASDLDEGLNGRVTYSIEDSDEEAFSIDLVTGVVSSSSTFTAGEYNILTIKATDSGQPPLSASVRLHIEWIPWPRPSSIPLAFDETYYSFTVMETDPVNHMVGVISVEGRPGLFWFNISGGDKDMDFDIEKTTGSIVIARPLDTRRRSNYNLTVEVTDGSRTIATQVHIFMIANINHHRPQFLETRYEVRVPQDTVPGVELLRVQAIDQDKGKSLIYTIHGSQDPGSASLFQLDPSSGVLVTVGKLDLGSGPSQHTLTVMVRDQEIPIKRNFVWVTIHVEDGNLHPPRFTQLHYEASVPDTIAPGTELLQVRAMDADRGVNAEVHYSLLKATREAEGGESLEPGRQRLQ

SEQ ID NO: 7882 - protein, 1604 aa, Artificial Sequence
  Synthetic polypeptide
MTIALLGFAIFLLHCATCEKPLEGILSSSAWHFTHSHYNATIYENSSPKTYVESFEKMGIYLAEPQWAVRYRIISGDVANVFKTEEYVVGNFCFLRIRTKSSNTALLNREVRDSYTLIIQATEKTLELEALTRVVVHILDQNDLKPLFSPPSYRVTISEDMPLKSPICKVTATDADLGQNAEFYYAFNTRSEMFAIHPTSGVVTVAGKLNVTWRGKHELQVLAVDRMRKISEGNGFGSLAALVVHVEPALRKPPAIASVVVTPPDSNDGTTYATVLVDANSSGAEVESVEVVGGDPGKHFKAIKSYARSNEFSLVSVKDINWMEYLHGFNLSLQARSGSGPYFYSQIRGFHLPPSKLSSLKFEKAVYRVQLSEFSPPGSRVVMVRVTPAFPNLQYVLKPSSENVGFKLNARTGLITTTKLMDFHDRAHYQLHIRTSPGQASTVVVIDIVDCNNHAPLFNRSSYDGTLDENIPPGTSVLAVTATDRDHGENGYVTYSIAGPKALPFSIDPYLGIISTSKPMDYELMKRIYTFRVRASDWGSPFRREKEVSIFLQLRNLNDNQPMFEEVNCTGSIRQDWPVGKSIMTMSAIDVDELQNLKYEIVSGNELEYFDLNHFSGVISLKRPFINLTAGQPTSYSLKITASDGKNYASPTTLNITVVKDPHFEVPVTCDKTGVLTQFTKTILHFIGLQNQESSDEEFTSLSTYQINHYTPQFEDHFPQSIDVLESVPINTPLARLAATDPDAGFNGKLVYVIADGNEEGCFDIELETGLLTVAAPLDYEATNFYILNVTVYDLGTPQKSSWKLLTVNVKDWNDNAPRFPPGGYQLTISEDTEVGTTIAELTTKDADSEDNGRVRYTLLSPTEKFSLHPLTGELVVTGHLDRESEPRYILKVEARDQPSKGHQLFSVTDLIITLEDVNDNSPQCITEHNRLKVPEDLPPGTVLTFLDASDPDLGPAGEVRYVLMDGAHGTFRVDLMTGALILERELDFERRAGYNLSLWASDGGRPLARRTLCHVEVIVLDVNENLHPPHFASFVHQGQVQENSPSGTQVIVVAAQDDDSGLDGELQYFLRAGTGLAAFSINQDTGMIQTLAPLDREFASYYWLTVLAVDRGSVPLSSVTEVYIEVTDANDNPPQMSQAVFYPSIQEDAPVGTSVLQLDAWDPDSSSKGKLTFNITSGNYMGFFMIHPVTGLLSTAQQLDRENKDEHILEVTVLDNGEPSLKSTSRVVVGILDVNDNPPIFSHKLFNVRLPERLSPVSPGPVYRLVASDLDEGLNGRVTYSIEDSDEEAFSIDLVTGVVSSSSTFTAGEYNILTIKATDSGQPPLSASVRLHIEWIPWPRPSSIPLAFDETYYSFTVMETDPVNHMVGVISVEGRPGLFWFNISGGDKDMDFDIEKTTGSIVIARPLDTRRRSNYNLTVEVTDGSRTIATQVHIFMIANINHHRPQFLETRYEVRVPQDTVPGVELLRVQAIDQDKGKSLIYTIHGSQDPGSASLFQLDPSSGVLVTVGKLDLGSGPSQHTLTVMVRDQEIPIKRNFVWVTIHVEDGNLHPPRFTQLHYEASVPDTIAPGTELLQVRAMDADRGVNAEVHYSLLKAWHGDMHL

SEQ ID NO: 7883 - protein, 1616 aa, Artificial Sequence
  Synthetic polypeptide
MTIALLGFAIFLLHCATCEKPLEGILSSSAWHFTHSHYNATIYENSSPKTYVESFEKMGIYLAEPQWAVRYRIISGDVANVFKTEEYVVGNFCFLRIRTKSSNTALLNREVRDSYTLIIQATEKTLELEALTRVVVHILDQNDLKPLFSPPSYRVTISEDMPLKSPICKVTATDADLGQNAEFYYAFNTRSEMFAIHPTSGVVTVAGKLNVTWRGKHELQVLAVDRMRKISEGNGFGSLAALVVHVEPALRKPPAIASVVVTPPDSNDGTTYATVLVDANSSGAEVESVEVVGGDPGKHFKAIKSYARSNEFSLVSVKDINWMEYLHGFNLSLQARSGSGPYFYSQIRGFHLPPSKLSSLKFEKAVYRVQLSEFSPPGSRVVMVRVTPAFPNLQYVLKPSSENVGFKLNARTGLITTTKLMDFHDRAHYQLHIRTSPGQASTVVVIDIVDCNNHAPLFNRSSYDGTLDENIPPGTSVLAVTATDRDHGENGYVTYSIAGPKALPFSIDPYLGIISTSKPMDYELMKRIYTFRVRASDWGSPFRREKEVSIFLQLRNLNDNQPMFEEVNCTGSIRQDWPVGKSIMTMSAIDVDELQNLKYEIVSGNELEYFDLNHFSGVISLKRPFINLTAGQPTSYSLKITASDGKNYASPTTLNITVVKDPHFEVPVTCDKTGVLTQFTKTILHFIGLQNQESSDEEFTSLSTYQINHYTPQFEDHFPQSIDVLESVPINTPLARLAATDPDAGFNGKLVYVIADGNEEGCFDIELETGLLTVAAPLDYEATNFYILNVTVYDLGTPQKSSWKLLTVNVKDWNDNAPRFPPGGYQLTISEDTEVGTTIAELTTKDADSEDNGRVRYTLLSPTEKFSLHPLTGELVVTGHLDRESEPRYILKVEARDQPSKGHQLFSVTDLIITLEDVNDNSPQCITEHNRLKVPEDLPPGTVLTFLDASDPDLGPAGEVRYVLMDGAHGTFRVDLMTGALILERELDFERRAGYNLSLWASDGGRPLARRTLCHVEVIVLDVNENLHPPHFASFVHQGQVQENSPSGTQVIVVAAQDDDSGLDGELQYFLRAGTGLAAFSINQDTGMIQTLAPLDREFASYYWLTVLAVDRGSVPLSSVTEVYIEVTDANDNPPQMSQAVFYPSIQEDAPVGTSVLQLDAWDPDSSSKGKLTFNITSGNYMGFFMIHPVTGLLSTAQQLDRENKDEHILEVTVLDNGEPSLKSTSRVVVGILDVNDNPPIFSHKLFNVRLPERLSPVSPGPVYRLVASDLDEGLNGRVTYSIEDSDEEAFSIDLVTGVVSSSSTFTAGEYNILTIKATDSGQPPLSASVRLHIEWIPWPRPSSIPLAFDETYYSFTVMETDPVNHMVGVISVEGRPGLFWFNISGGDKDMDFDIEKTTGSIVIARPLDTRRRSNYNLTVEVTDGSRTIATQVHIFMIANINHHRPQFLETRYEVRVPQDTVPGVELLRVQAIDQDKGKSLIYTIHGSQDPGSASLFQLDPSSGVLVTVGKLDLGSGPSQHTLTVMVRDQEIPIKRNFVWVTIHVEDGNLHPPRFTQLHYEASVPDTIAPGTELLQVRAMDADRGVNAEVHYSLLKDAVAHACNPSTLGGRGGRIT

SEQ ID NO: 7884 - protein, 36 aa, Artificial Sequence
  Synthetic polypeptide
MKAESPGKHEFSVDMTCGGCAEAVSRVLNKLGEENC

SEQ ID NO: 7885 - protein, 22 aa, Artificial Sequence
  Synthetic polypeptide
MTCGGCAEAVSRVLNKLGEENC

SEQ ID NO: 7886 - protein, 31 aa, Artificial Sequence
  Synthetic polypeptide
MPKHEFSVDMTCGGCAEAVSRVLNKLGEENC

SEQ ID NO: 7887 - protein, 47 aa, Artificial Sequence
  Synthetic polypeptide
MKAESPGKHEFSVDMTCGGCAEAVSRVLNKLGAELENGNEDHLAHIA

SEQ ID NO: 7888 - protein, 33 aa, Artificial Sequence
  Synthetic polypeptide
MTCGGCAEAVSRVLNKLGAELENGNEDHLAHIA

SEQ ID NO: 7889 - protein, 42 aa, Artificial Sequence
  Synthetic polypeptide
MPKHEFSVDMTCGGCAEAVSRVLNKLGAELENGNEDHLAHIA

SEQ ID NO: 7890 - protein, 39 aa, Artificial Sequence
  Synthetic polypeptide
MKAESPGKHEFSVDMTCGGCAEAVSRVLNKLGEEVCRSL

SEQ ID NO: 7891 - protein, 25 aa, Artificial Sequence
  Synthetic polypeptide
MTCGGCAEAVSRVLNKLGEEVCRSL

SEQ ID NO: 7892 - protein, 34 aa, Artificial Sequence
  Synthetic polypeptide
MPKHEFSVDMTCGGCAEAVSRVLNKLGEEVCRSL

SEQ ID NO: 7893 - protein, 6 aa, Artificial Sequence
  Synthetic polypeptide
MPKKIV

SEQ ID NO: 7894 - protein, 134 aa, Artificial Sequence
  Synthetic polypeptide
MRRKEKRLLQAVALVLAALVLLPNVGLWALYRERQPDGTPGGSGAAVAPAAGQGSHSRQKKTFFLGDGQKLKDWHDKEAIRRDAQRVGNGEQGRPYPMTDAERVDQAYRENGFNIYVSDKISLNRSLPDIRHPK

SEQ ID NO: 7895 - protein, 354 aa, Artificial Sequence
  Synthetic polypeptide
MRRKEKRLLQAVALVLAALVLLPNVGLWALYRERQPDGTPGGSGAAVAPAAGQGSHSRQKKTFFLGDGQKLKDWHDKEAIRRDAQRVGNGEQGRPYPMTDAERVDQAYRENGFNIYVSDKISLNRSLPDIRHPNCNSKRYLETLPNTSIIIPFHNEGWSSLLRTVHSVLNRSPPELVAEIVLVDDFSDREHLKKPLEDYMALFPSVRILRTKKREGLIRTRMLGASVATGDVITFLDSHCEANVNWLPPLLDRIARNRKTIVCPMIDVIDHDDFRYETQAGDAMRGAFDWEMYYKRIPIPPELQKADPSDPFESPVMAGGLFAVDRKWFWELGGYDPGLEIWGGEQYEISFKLT

SEQ ID NO: 7896 - protein, 292 aa, Artificial Sequence
  Synthetic polypeptide
MRRKEKRLLQAVALVLAALVLLPNVGLWALYRERQPDGTPGGSGAAVAPAAGQGSHSRQKKTFFLGDGQKLKDWHDKEAIRRDAQRVGNGEQGRPYPMTDAERVDQAYRENGFNIYVSDKISLNRSLPDIRHPNCNSKRYLETLPNTSIIIPFHNEGWSSLLRTVHSVLNRSPPELVAEIVLVDDFSDRDRIARNRKTIVCPMIDVIDHDDFRYETQAGDAMRGAFDWEMYYKRIPIPPELQKADPSDPFESPVMAGGLFAVDRKWFWELGGYDPGLEIWGGEQYEISFKLT

SEQ ID NO: 7897 - protein, 777 aa, Artificial Sequence
  Synthetic polypeptide
MLWRVLLSKRPPFPHPELDFQEAPIPSCPGRLPGRKNSVALAAAPRKEPTGDREKPLPFPVLAPFSNPEHSAPAKVVRAAVPKQRKGSKVGDFGDAINWPTPGEIAHKSVQPQSHKPQPTRKLPPKKDMKEQEKGEGSDSKESPKTKSDESGEEKNGDEDCQRGGQKKKGNKHKWVPLQIDMKPEVPREKLASRPTRPPEPRHIPANRGEIKGSESATYVPVAPPTPAWQPEIKPEPAWHDQDETSSVKSDGAGGARASFRGRGRGRGRGRGRGRGGTRTHFDYQFGYRKFDGVEGPRTPKYMNNITYYFDNVSSTELYSVDQELLKDYIKRQIEYYFSVDNLERDFFLRRKMDADGFLPITLIASFHRVQALTTDISLIFAALKDSKVVEIVDEKVRRREEPEKWPLPPIVDYSQTDFSQLLNCPEFVPRQHYQKETESAPGSPRAVTPVPTKTEEVSNLKTLPKGLSASLPDLDSENWIEVKKRPRPSPARPKKSEESRFSHLTSLPQQLPSQQLMSKDQDEQEELDFLFDEEMEQMDGRKNTFTAWSDEESDYEIDDRDVNKILIVTQTPHYMRRHPGGDRTGNHTSRAKMSAELAKVINDGLFYYEQDLWAEKFEPEYSQIKQEVENFKKVNMISREQFDTLTPEPPVDPNQEVPPGPPRFQQVPTDALANKLFGAPEPSTIARSLPTTVPESPNYRNTRTPRTPRTPQLKDSSQTSRFYPVVKEGRTLDAKMPRKRKTRHSSNPPLESHVGWVMDSREHRPRTASIRAHTLF

SEQ ID NO: 7898 - protein, 27 aa, Artificial Sequence
  Synthetic polypeptide
SRTCGLKSLNLSIPRSSKKSRTSKRSI

SEQ ID NO: 7899 - protein, 19 aa, Artificial Sequence
  Synthetic polypeptide
KTQFKPTLGEPCGLGDGFP

SEQ ID NO: 7900 - protein, 9 aa, Artificial Sequence
  Synthetic polypeptide
MARHGGSRL

SEQ ID NO: 7901 - protein, 84 aa, Artificial Sequence
  Synthetic polypeptide
MMPQEQYTHHRSTMPGSVGPQVYKVGIYGWRKRCLYFFVLLLMILILVNLAMTIWILKVMNFTIHISQLQRYGTNLSPHEQVSG

SEQ ID NO: 7902 - protein, 83 aa, Artificial Sequence
  Synthetic polypeptide
MPQEQYTHHRSTMPGSVGPQVYKVGIYGWRKRCLYFFVLLLMILILVNLAMTIWILKVMNFTIHISQLQRYGTNLSPHEQVSG

SEQ ID NO: 7903 - protein, 330 aa, Artificial Sequence
  Synthetic polypeptide
MHPQVVILSLILHLADSVAGSVKVGGEAGPSVTLPCHYSGAVTSMCWNRGSCSLFTCQNGIVWTNGTHVTYRKDTRYKLLGDLSRRDVSLTIENTAVSDSGVYCCRVEHRGWFNDMKITVSLEIVPPKVTTTPIVTTVPTVTTVRTSTTVPTTTTVPMTTVPTTTVPTTMSIPTTTTVLTTMTVSTTTSVPTTTSIPTTTSVPVTTTVSTFVPPMPLPRQNHEPVATSPSSPQPAETHPTTLQGAIRREPTSSPLYSYTTDGNDTVTESSDGLWNNNQTQLFLEHSLLTANTTKGIYAGVCISVLVLLALLGVIIAKKYFFKKEVQQLRC

SEQ ID NO: 7904 - protein, 165 aa, Artificial Sequence
  Synthetic polypeptide
MPGGAGAARLCLLAFALQPLRPRAAREPGWTRGSEEGSPKLQHELIIPQWKTSESPVREKHPLKAELRVMAEGRELILDLEKNEQLFAPSYTETHYTSSGNPQTTTRKLEDHCFYHGTVRETELSSVTLSTCRGIRCVPWMGSINFTWELVRNAASQVPRRPTGF

SEQ ID NO: 7905 - protein, 167 aa, Artificial Sequence
  Synthetic polypeptide
MPGGAGAARLCLLAFALQPLRPRAAREPGWTISRGSEEGSPKLQHELIIPQWKTSESPVREKHPLKAELRVMAEGRELILDLEKNEQLFAPSYTETHYTSSGNPQTTTRKLEDHCFYHGTVRETELSSVTLSTCRGIRCVPWMGSINFTWELVRNAASQVPRRPTGF

SEQ ID NO: 7906 - protein, 215 aa, Artificial Sequence
  Synthetic polypeptide
MWGACKVKVHDSLATISITLRRYLRLGATMAKSKFEYVRDFEADDTCLAHCWVVVRLDGRNFHRFAEKHNFAKPNDSRALQLMTKCAQTVMEELEDIVIAYGQSDEYSFVFKRKTNWFKRRASKFMTHVASQFASSYVFYWRDYFEDQPLLYPPGFDGRVVVYPSNQTLKDYLSWRQADCHINNLYNTVFWALIQQSGLTPVQAQGRLQFFIGKM

SEQ ID NO: 7907 - protein, 1 aa, Artificial Sequence
  Synthetic polypeptide
H

SEQ ID NO: 7908 - protein, 337 aa, Artificial Sequence
  Synthetic polypeptide
MNYSEIESKVREATNDDPWGPSGQLMGEIAKATFMYEQFPELMNMLWSRMLKDNKKNWRRVYKSLLLLAYLIRNGSERVVTSAREHIYDLRSLENYHFVDEHGKDQGINIRQKVKELVEFAQDDDRLREERKKAKKNKDKYVGVSSDSVGGFRYSERYDPEPKSKWDEEWDKNKSAFPFSDKLGELSDKIGSTIDDTISKFRRKDREDSPERCSDSDEEKKARRGRSPKGEFKDEEETVTTKHIHITQATETTTTRHKRTANPSKTIDLGAAAHYTGDKASPDQNASTHTPQSSVKTSVPSSKSSGDLVDLFDGTSQSTVAYSIQYSDMMYRFEVKE

SEQ ID NO: 7909 - protein, 355 aa, Artificial Sequence
  Synthetic polypeptide
MLNMWKVRELVDKATNVVMNYSEIESKVREATNDDPWGPSGQLMGEIAKATFMYEQFPELMNMLWSRMLKDNKKNWRRVYKSLLLLAYLIRNGSERVVTSAREHIYDLRSLENYHFVDEHGKDQGINIRQKVKELVEFAQDDDRLREERKKAKKNKDKYVGVSSDSVGGFRYSERYDPEPKSKWDEEWDKNKSAFPFSDKLGELSDKIGSTIDDTISKFRRKDREDSPERCSDSDEEKKARRGRSPKGEFKDEEETVTTKHIHITQATETTTTRHKRTANPSKTIDLGAAAHYTGDKASPDQNASTHTPQSSVKTSVPSSKSSGDLVDLFDGTSQSTVAYSIQYSDMMYRFEVKE

SEQ ID NO: 7910 - protein, 323 aa, Artificial Sequence
  Synthetic polypeptide
MNPDLDTGHNTSAPAHWGELKNANFTGPNQTSSNSTLPQLDITRAISVGLVLGAFILFAIVGNILVILSVACNRHLRTPTNYFIVNLAMADLLLSFTVLPFSAALEVLGYWVLGRIFCDIWAAVDVLCCTASILSLCAISIDRYIGVRYSLQYPTLVTRRKAILALLSVWVLSTVISIGPLLGWKEPAPNDDKECGVTEEPFYALFSSLGSFYIPLAVILVMYCRVYIVAKRTTKNLEAGVMKEMSNSKELTLRIHSKNFHEDTLSSTKAKGHNPRSSIAVKLFKFSREKKAAKTLGIVVGMFILCWLPFFIALPLELFTSTP

SEQ ID NO: 7911 - protein, 4 aa, Artificial Sequence
  Synthetic polypeptide
EDRT

SEQ ID NO: 7912 - protein, 523 aa, Artificial Sequence
  Synthetic polypeptide
MAAVAAEAAATAASPGEGGAGEAEPEMEPIPGSEAGTDPLPVTATEASVPDGETDGQQSAPQADEPPLPPPPPPPGELARSPEAVGPELEAEEKLSVRVAESAAAAPQGGPELPPSPASPPEQPPAPEEREEPPLPQPVAPALVPPAGGDSTVSQLIPGSEVRVTLDHIIEDALVVSFRFGEKLFSGVLMDLSKRFGPHGIPVTVFPKREYKDKPEAMPLQSNTFQEGTEVKCEANGAVPDDPSPVPHPELSLAESLWTSKPPPLFHEGAPYPPPLFIRDTYNQSIPQPPPRKIKRPKRKMYREEPTSIMNAIKLRPRQVLCDKCKNSVVAEKKEIRKGSSATDSSKYEDKKRRNESVTTVNKKLKTDHKVDGKNQNESQKRNAVVKVSNIAHSRGRVVKVSAQANTSKAQLSTKKVLQSKNMDHAKAREVLKIAKEKAQKKQNETSTSKNAHSKVHFTRRYQNPSSGSLPPRVRLKPQRYRNEENDSSLKTGLEKMRSGKMAPKPQSRCTSTRSADYEGLLK

SEQ ID NO: 7913 - protein, 68 aa, Artificial Sequence
  Synthetic polypeptide
VHFTRRYQNPSSGSLPPRVRLKPQRYRNEENDSSLKTGLEKMRSGKMAPKPQSRCTSTRSADYEGLLK

SEQ ID NO: 7914 - protein, 161 aa, Artificial Sequence
  Synthetic polypeptide
MKTVTMMMVVEMQALTQVLRAVLSACTWVSRKGDLQRMKQTHKGKPPSSMAFTGKFEMESEKNYDEFMKLLGISSDVIEKARNFKIVTEVQQDGQDFTWSQHYSGGHTMTNKFTVGKESNIQTMGGKTFKLSSPPLIEKCKLSHHNLCFVSTAQNPLQHTA

SEQ ID NO: 7915 - protein, 112 aa, Artificial Sequence
  Synthetic polypeptide
MAFTGKFEMESEKNYDEFMKLLGISSDVIEKARNFKIVTEVQQDGQDFTWSQHYSGGHTMTNKFTVGKESNIQTMGGKTFKLSSPPLIEKCKLSHHNLCFVSTAQNPLQHTA

SEQ ID NO: 7916 - protein, 80 aa, Artificial Sequence
  Synthetic polypeptide
MSAPFEERSGVVPCGTPWGQWYQTLEEVFIEVQVPPGTRAQDIQCGLQSRHVALSVGGREILKSLEYSLVCNKFILYVSY

SEQ ID NO: 7917 - protein, 624 aa, Artificial Sequence
  Synthetic polypeptide
MDNFFTEGTRVWLRENGQHFPSTVNSCAEGIVVFRTDYGQVFTYKQSTITHQKVTAMHPTNEEGVDDMASLTELHGGSIMYNLFQRYKRNQIYTYIGSILASVNPYQPIAGLYEPATMEQYSRRHLGELPPHIFAIANECYRCLWKRHDNQCILISGESGAGKTESTKLILKFLSVISQQSLELSLKEKTSCVERAILESSPIMEAFGNAKTVYNNNSSRFGKFVQLNICQKGNIQGGRIVDYLLEKNRVVRQNPGERNYHIFYALLAGLEHEEREEFYLSTPENYHYLNQSGCVEDKTISDQESFREVITAMDVMQFSKEEVREVSRLLAGILHLGNIEFITAGGAQVSFKTALGRSAELLGLDPTQLTDALTQRSMFLRGEEILTPLNVQQAVDSRDSLAMALYACCFEWVIKKINSRIKGNEDFKSIGILDIFGFENFEVNHFEQFNINYANEKLQEYFNKHIFSLEQLEYSREGLVWEDIDWIDNGECLDLIEKKLGLLALINEESHFPQATDSTLLEKLHSQHANNHFYVKPRVAVNNFGVKHYAGEVQYDVRGILEKNRDTFRDDLLNLLRESRFDFIYDLFEHVSSRNNQDTLKCGSKHRRPTVSSQFKAGRGGSRL

SEQ ID NO: 7918 - protein, 635 aa, Artificial Sequence
  Synthetic polypeptide
MTSLPRLRLNTRDQAIQLGTRVWLRENGQHFPSTVNSCAEGIVVFRTDYGQVFTYKQSTITHQKVTAMHPTNEEGVDDMASLTELHGGSIMYNLFQRYKRNQIYTYIGSILASVNPYQPIAGLYEPATMEQYSRRHLGELPPHIFAIANECYRCLWKRHDNQCILISGESGAGKTESTKLILKFLSVISQQSLELSLKEKTSCVERAILESSPIMEAFGNAKTVYNNNSSRFGKFVQLNICQKGNIQGGRIVDYLLEKNRVVRQNPGERNYHIFYALLAGLEHEEREEFYLSTPENYHYLNQSGCVEDKTISDQESFREVITAMDVMQFSKEEVREVSRLLAGILHLGNIEFITAGGAQVSFKTALGRSAELLGLDPTQLTDALTQRSMFLRGEEILTPLNVQQAVDSRDSLAMALYACCFEWVIKKINSRIKGNEDFKSIGILDIFGFENFEVNHFEQFNINYANEKLQEYFNKHIFSLEQLEYSREGLVWEDIDWIDNGECLDLIEKKLGLLALINEESHFPQATDSTLLEKLHSQHANNHFYVKPRVAVNNFGVKHYAGEVQYDVRGILEKNRDTFRDDLLNLLRESRFDFIYDLFEHVSSRNNQDTLKCGSKHRRPTVSSQFKAGRGGSRL

SEQ ID NO: 7919 - protein, 841 aa, Artificial Sequence [sequence omitted]

SEQ ID NO: 7920 - protein, 9 aa, Artificial Sequence
  Synthetic polypeptide
QVHQTAHLC

SEQ ID NO: 7921 - protein, 15 aa, Artificial Sequence
  Synthetic polypeptide
QKGYYLWGKGKARSH

SEQ ID NO: 7922 - protein, 167 aa, Artificial Sequence
  Synthetic polypeptide
FAILIIQLSNLSALLQQQDQKVNIRVAVLPCSESTTCLFRTRPLDASDTLVFNEVFWVSMSYPALHQKTLRVDVCTTDRSHLEECLGGAQISLAEVCRSGERSTRWYNLLSYKYLKKQSRELKPVGVMAPASGPASTDAVSALLEQTAVELEKRQEGRSSTQTLEDS

SEQ ID NO: 7923 - protein, 282 aa, Artificial Sequence
  Synthetic polypeptide
MDVLVSECSARLLQQEEEIKSLTAEIDRLKNCGCLGASPNLEQLQEENLKLKYRLNILRKSLQAERNKPTKNMINIISRLQEVFGHAIKAAYPDLENPPLLVTPSQQAKFGDYQCNSAMGISQMLKTKEQKVNPREIAENITKHLPDNECIEKVEIAGPGFINVHLRKDFVSEQLTSLLVNGVQLPALGENKKVIVDFSSPNIAKEMHVGHLRSTIIGESISRLFEFAGYDVLRLNHVGDWGTQFGMLIAHLQDKFPDYLTVSPPIGDLQVFYKVRCGGSCP

SEQ ID NO: 7924 - protein, 76 aa, Artificial Sequence
  Synthetic polypeptide
MHVGHLRSTIIGESISRLFEFAGYDVLRLNHVGDWGTQFGMLIAHLQDKFPDYLTVSPPIGDLQVFYKVRCGGSCP

SEQ ID NO: 7925 - protein, 272 aa, Artificial Sequence
  Synthetic polypeptide
MKIKDAKKPSFPWFGMDIGGTLVKLSYFEPIDITAEEEQEEVESLKSIRKYLTSNVAYGSTGIRDVHLELKDLTLFGRRGNLHFIRFPTQDLPTFIQMGRDKNFSTLQTVLCATGGGAYKFEKDFRTIGNLHLHKLDELDCLVKGLLYIDSVSFNGQAECYYFANASEPERCQKMPFNLDDPYPLLVVNIGSGVSILAVHSKDNYKRVTGTSLGGGTFLGLCSLLTGCESFEEALEMASKGDSTQADKLVRDIYGGDYERFGLPGWAVASSA

SEQ ID NO: 7926 - protein, 56 aa, Artificial Sequence
  Synthetic polypeptide
MDNFFTEGTRVWLRENGQHFPSTVNSCAEGIVVFRTDYGQKCLSLPAMILRSHVEL

SEQ ID NO: 7927 - protein, 67 aa, Artificial Sequence
  Synthetic polypeptide
MTSLPRLRLNTRDQAIQLGTRVWLRENGQHFPSTVNSCAEGIVVFRTDYGQKCLSLPAMILRSHVEL

SEQ ID NO: 7928 - protein, 75 aa, Artificial Sequence
  Synthetic polypeptide
MDNFFTEGTRVWLRENGQHFPSTVNSCAEGIVVFRTDYGQKFLLPPAMILRPPKPCGTVSPIKPHFLPSCENGLI

SEQ ID NO: 7929 - protein, 86 aa, Artificial Sequence
  Synthetic polypeptide
MTSLPRLRLNTRDQAIQLGTRVWLRENGQHFPSTVNSCAEGIVVFRTDYGQKFLLPPAMILRPPKPCGTVSPIKPHFLPSCENGLI

SEQ ID NO: 7930 - protein, 90 aa, Artificial Sequence
  Synthetic polypeptide
MDNFFTEGTRVWLRENGQHFPSTVNSCAEGIVVFRTDYGQGFPLLLLPHLPPPRKKFLLPPAMILRPPKPCGTVSPIKPHFLPSCENGLI

SEQ ID NO: 7931 - protein, 101 aa, Artificial Sequence
  Synthetic polypeptide
MTSLPRLRLNTRDQAIQLGTRVWLRENGQHFPSTVNSCAEGIVVFRTDYGQGFPLLLLPHLPPPRKKFLLPPAMILRPPKPCGTVSPIKPHFLPSCENGLI

SEQ ID NO: 7932 - protein, 497 aa, Artificial Sequence
  Synthetic polypeptide
MAQQNMKVRPVLLKRNSLESVEFVKQPHHRRSKSQQVRFKEDGTTKNPTGLAEVDVQTPEDPAVMGKTQATRHHLPPTYSLSFPRSQKAGGFRNIAIQTSPSLRKHFPVFKRKRLTASKSLVEMPTASQSAIQVNGNLSEQDIVSSDLAYLRLAQHLEDGPRRVKVSHAFLPRVPKVQSNGPVSICLEAGTWRSLEKATAAIQVPDDIYHSPSWEARESALSPDRSAEVSNSIHPLDDTRPGDGRRVTPLDSEKSTSCLNATSVASHTPGTEELKPELLLPKDNSDDKDLGSLSSQSKETCVPSSPRTHSSPSQGSHSQPAHPGRASDCPSSSNNHQNLVSLKTNSASKSAPGCQEQTANNPTESDTLEFPNCPGSNHLPSSLSRSETKLQSNREISDINQIHLARGELCDLQGRLQSVEESLHSNQEKIKVLLNVIQDLEKARALTEGRNFYRTGQDLNNCSTCQNTACIIYRPESNLIVGQETDSRVGPAHTLEE

SEQ ID NO: 7933 - protein, 28 aa, Artificial Sequence
  Synthetic polypeptide
MGAVMGTFSSLQTKQRRPSKGKMSPAPP

SEQ ID NO: 7934 - protein, 157 aa, Artificial Sequence
  Synthetic polypeptide
MSGCSKRCKLGFVKFAQTIFKLITGTLSKDKIEDELEMTMVCHRPEGLEQLEAQTNFTKRELQVLYRGFKNECPSGVVNEDTFKQIYAQFFPHGDASTYAHYLFNAFDTTQTGSVKFEDFVTALSILLRGTVHEKLRWTFNLYDINKDGYINKEICS

SEQ ID NO: 7935 - protein, 148 aa, Artificial Sequence
  Synthetic polypeptide
MGAVMGTFSSLQTKQRRPSKDKIEDELEMTMVCHRPEGLEQLEAQTNFTKRELQVLYRGFKNECPSGVVNEDTFKQIYAQFFPHGDASTYAHYLFNAFDTTQTGSVKFEDFVTALSILLRGTVHEKLRWTFNLYDINKDGYINKEICS

SEQ ID NO: 7936 - protein, 120 aa, Artificial Sequence
  Synthetic polypeptide
MTMVCHRPEGLEQLEAQTNFTKRELQVLYRGFKNECPSGVVNEDTFKQIYAQFFPHGDASTYAHYLFNAFDTTQTGSVKFEDFVTALSILLRGTVHEKLRWTFNLYDINKDGYINKEICS

SEQ ID NO: 7937 - protein, 159 aa, Artificial Sequence
  Synthetic polypeptide
MGAVMGTFSSLQTKQRRPSKDIAWWYYQYQRDKIEDELEMTMVCHRPEGLEQLEAQTNFTKRELQVLYRGFKNECPSGVVNEDTFKQIYAQFFPHGDASTYAHYLFNAFDTTQTGSVKFEDFVTALSILLRGTVHEKLRWTFNLYDINKDGYINKEICS

SEQ ID NO: 7938 - protein, 173 aa, Artificial Sequence
  Synthetic polypeptide
MGAVMGTFSSLQTKQRRPSKDKIEDELEMTMVCHRPEGLEQLEAQTNFTKRELQVLYRGFKNECPSGVVNEDTFKQIYAQFFPHGALPCLEGSPCVEFLPPSPALLFCLVDASTYAHYLFNAFDTTQTGSVKFEDFVTALSILLRGTVHEKLRWTFNLYDINKDGYINKEICS

SEQ ID NO: 7939 - protein, 584 aa, Artificial Sequence
  Synthetic polypeptide
MALHFQSLAELEVLCTHLYIGTDLTQRIEAEKALLELIDSPECLSKCQLLLEQGTTSYAQLLAATCLSKLVSRVSPLPVEQRMDIRNYILNYVASQPKLAPFVIQALIQVIAKITKLGWFEVQKDQFVFREIIADVKKFLQGTVEHCIIGVIILSELTQEMNLVDYSRPSAKHRKIATSFRDTSLKDVLVLACSLLKEVFAKPLNLQDQCQQNLVMQVLKLVLNCLNFDFIGSSADESADDLCTVQIPTTWRTIFLEPETLDLFFNLYHSLPPLLSQLALSCLVQFASTRRSLFNSPERAKYLGNLIKGVKRILENPQGLSDPGNYHEFCRFLARLKTNYQLGELVMVKEYPEVIRLIANFTITSLQHWEFAPNSVHYLLTLWQRMVASVPFVKSTEPHLLDTYAPEITKAFITSRLDSVAIVVRDHLDDPLDDTATVFQQLEQLCTVSRCEYEKTCALLVQLFDQNAQNYQKLLHPYSGVTVDITIQEGRLAWLVYLVGTVVGGRLTYTSTDEHDAMDGELSCRVFQLISLMDTGLPRCCNEKIELAILWFLDQFRKTYVGDQLQRTSKFQVCLYQQHENGLI

SEQ ID NO: 7940 - protein, 19 aa, Artificial Sequence
  Synthetic polypeptide
WRCTSRVWLNWKCYVLIST

SEQ ID NO: 7941 - protein, 2 aa, Artificial Sequence
  Synthetic polypeptide
YL

SEQ ID NO: 7942 - protein, 576 aa, Artificial Sequence
  Synthetic polypeptide
MALHFQSLAELEVLCTHLYIGTDLTQRIEAEKALLELIDSPECLSKCQLLLEQGTTSYAQLLAATCLSKLVSRVSPLPVEQRMDIRNYILNYVASQPKLAPFVIQALIQVIAKITKLGWFEVQKDQFVFREIIADVKKFLQGTVEHCIIGVIILSELTQEMNLVDYSRPSAKHRKIATSFRDTSLKDVLVLACSLLKEVFAKPLNLQDQCQQNLVMQVLKLVLNCLNFDFIGSSADESADDLCTVQIPTTWRTIFLEPETLDLFFNLYHSLPPLLSQLALSCLVQFASTRRSLFNSPERAKYLGNLIKGVKRILENPQGLSDPGNYHEFCRFLARLKTNYQLGELVMVKEYPEVIRLIANFTITSLQHWEFAPNSVHYLLTLWQRMVASVPFVKSTEPHLLDTYAPEITKAFITSRLDSVAIVVRDHLDDPLDDTATVFQQLEQLCTVSRCEYEKTCALLVQLFDQNAQNYQKLLHPYSGVTVDITIQEGRLAWLVYLVGTVVGGRLTYTSTDEHDAMDGELSCRVFQLISLMDTGLPRCCNEKIELAILWFLDQFRKTYVGDQLQRTSKKKIANP

SEQ ID NO: 7943 - protein, 19 aa, Artificial Sequence
  Synthetic polypeptide
WRCTSRVWLNWKCYVLIST

SEQ ID NO: 7944 - protein, 2 aa, Artificial Sequence
  Synthetic polypeptide
YL

SEQ ID NO: 7945 - protein, 814 aa, Artificial Sequence
  Synthetic polypeptide
MALHFQSLAELEVLCTHLYIGTDLTQRIEAEKALLELIDSPECLSKCQLLLEQGTTSYAQLLAATCLSKLVSRVSPLPVEQRMDIRNYILNYVASQPKLAPFVIQALIQVIAKITKLGWFEVQKDQFVFREIIADVKKFLQGTVEHCIIGVIILSELTQEMNLVDYSRPSAKHRKIATSFRDTSLKDVLVLACSLLKEVFAKPLNLQDQCQQNLVMQVLKLVLNCLNFDFIGSSADESADDLCTVQIPTTWRTIFLEPETLDLFFNLYHSLPPLLSQLALSCLVQFASTRRSLFNSPERAKYLGNLIKGVKRILENPQGLSDPGNYHEFCRFLARLKTNYQLGELVMVKEYPEVIRLIANFTITSLQHWEFAPNSVHYLLTLWQRMVASVPFVKSTEPHLLDTYAPEITKAFITSRLDSVAIVVRDHLDDPLDDTATVFQQLEQLCTVSRCEYEKTCALLVQLFDQNAQNYQKLLHPYSGVTVDITIQEGRLAWLVYLVGTVVGGRLTYTSTDEHDAMDGELSCRVFQLISLMDTGLPRCCNEKIELAILWFLDQFRKTYVGDQLQRTSKVYARMSEVLGITDDNHVLETFMTKIVTNLKYWGRYEPVISRTLQFLNDLSVGYILLKKLVKIDAVKFMLKNHTSEHFPFLGISDNHSLSDFRCRTTFYTALTRLLMVDLGEDEDEFENFMLPLTVAFETVLQIFNNNFKQEDVKRMLIGLARDLRGIAFALNTKTSYTMLFDWMYPTYLPLLQNAVERWYGEPTCTTPILKLMAELMQNRSQRLNFDVSSPNGILLFREASKMVCTYDTVFFIN

SEQ ID NO: 7946 - protein, 178 aa, Artificial Sequence
  Synthetic polypeptide
MEDSMDMDMSPLRPQNYLFGCELKADKDYHFKVDNDENEHQLSLRTVSLGAGAKDELHIVEAEAMNYEGSPIKVTLATLKMSVQPTVSLGGFEITPPVVLRLKCGSGPVHISGQHLVAVEEDAESEDEEEEDVKLLSISGKRSAPGGGSKVPQKKVKLAADEDDDDDDEEDDDEDSHL

SEQ ID NO: 7947 - protein, 114 aa, Artificial Sequence
  Synthetic polypeptide
MNYEGSPIKVTLATLKMSVQPTVSLGGFEITPPVVLRLKCGSGPVHISGQHLVAVEEDAESEDEEEEDVKLLSISGKRSAPGGGSKVPQKKVKLAADEDDDDDDEEDDDEDSHL

SEQ ID NO: 7948 - protein, 261 aa, Artificial Sequence
  Synthetic polypeptide
MEDSMDMDMSPLRPQNYLFGCELKADKDYHFKVDNDENEHQLSLRTVSLGAGAKDELHIVEAEAMNYEGSPIKVTLATLKMSVQPTVSLGGFEITPPVVLRLKCGSGPVHISGQHLVAVEEDAESEDEEEEDVKLLSISGKRSAPGGGSKVPQKKVKLAADEDDDDDDEEDDDEDDDDDDFDDEEAEEKAPVKKSIRDTPAKNAQKSNQNGKDSKPSSTPRSKMCLASPLPSAMIVNFLWPPSHASYTAYSTVSQLNLFSS

SEQ ID NO: 7949 - protein, 53 aa, Artificial Sequence
  Synthetic polypeptide
MAFANFRRILRLSTFEKRKSREYEHVRRDLDPNEVWEIVGELGDGAFGKVYKM

SEQ ID NO: 7950 - protein, 122 aa, Artificial Sequence
  Synthetic polypeptide
MGGCVGAQHDSSGSLNENSEGTGVALGRNQPLKKEKPKWKSDYPMTDGQLRSKRDEFWDTAPAFEGRKEIWDALKAAAHAFESNDHELAQAIIDGANITLPHGTVAHACDPNTLGGQGEQIT

SEQ ID NO: 7951 - protein, 24 aa, Artificial Sequence
  Synthetic polypeptide
MGGCVGAQHDSSGSLNENSEGTGG

SEQ ID NO: 7952 - protein, 70 aa, Artificial Sequence
  Synthetic polypeptide
MGGCVGAQHDSSGSLNENSEGTGVAAKRIEYLGKQPTREVKDLYNKNYKTLLKEIRGHKQMLMERKNQYC

SEQ ID NO: 7953 - protein, 78 aa, Artificial Sequence
  Synthetic polypeptide
MGGCVGAQHDSSGSLNENSEGTGGAFPAFARHFFLLPCEQGRVCCPFHRDCKFPEASPALRNCESIRLLSFINYLVSG

SEQ ID NO: 7954 - protein, 220 aa, Artificial Sequence
  Synthetic polypeptide
MPFDFRRFDIYRKVPKDLTQPTYTGAIISICCCLFILFLFLSELTGFITTEVVNELYVDDPDKDSGGKIDVSLNISLPNLHCELVGLDIQDEMGRHEVGHIDNSMKIPLNNGAGCRFEGQFSINKVPGNFHVSTHSATAQPQNPDMTHVIHKLSFGDTLQVQNIHGAFNALGGADRLTSNPLASHDYILKIVPTVYEDKSGKQRYSYQYTVANKTATPSG

SEQ ID NO: 7955 - protein, 46 aa, Artificial Sequence
  Synthetic polypeptide
MAYHGLTVPLIVMSVFWGFVGFLVPWFIPKGPNRGLGNSETLSLQK

SEQ ID NO: 7956 - protein, 429 aa, Artificial Sequence
  Synthetic polypeptide
MPQPSVSGMDPPFGDAFRSHTFSEQTLMSTDLLANSSDPDFMYELDREMNYQQNPRDNFLSLEDCKDIENLESFTDVLDNEGALTSNWEQWDTYCEDLTKYTKLTSCDIWGTKEVDYLGLDDFSSPYQDEEVISKTPTLAQLNSEDSQSVSDSLYYPDSLFSVKQNPLPSSFPGKKITSRAAAPVCSSKTLQAEVPLSDCVQKASKPTSSTQIMVKTNMYHNEKVNFHVECKDYVKKAKVKINPVQQSRPLLSQIHTDAAKENTCYCGAVAKRQEKKGMEPLQGHATPALPFKETQELLLSPLPQEGPGSLAAGESSSLSASTSVSDSSQKKEEHNYSLFVSDNLGEQPTKCSPEEDEEDEEDVDDEDHDEGFGSEHELSENEEEEEEEEDYEDDKDDDISDTFSEPGPGAVAHVSNPSTLGGRGGRIT

SEQ ID NO: 7957 - protein, 98 aa, Artificial Sequence
  Synthetic polypeptide
MADGGGGGGTGAVGGGGTSQASAGAATGATGASGGGGPINPASLPPGDPQLIALIVEQLKSRGLFDSFRRDCLADVDTKAYRWKGLAFSQMRLWTVDF

SEQ ID NO: 7958 - protein, 72 aa, Artificial Sequence
  Synthetic polypeptide
TGATGASGGGGPINPASLPPGDPQLIALIVEQLKSRGLFDSFRRDCLADVDTKAYRWKGLAFSQMRLWTVDF

SEQ ID NO: 7959 - protein, 25 aa, Artificial Sequence
  Synthetic polypeptide
MAPASASGEDLRKLPTMAEFKNKQG

SEQ ID NO: 7960 - protein, 30 aa, Artificial Sequence
  Synthetic polypeptide
MAPASASGEDLRKLPTMAEVNGEQFKNKQG

SEQ ID NO: 7961 - protein, 189 aa, Artificial Sequence
  Synthetic polypeptide
MEDFIVISDDSGSESSGGARPGRSRRPRRALSRTSGALPRRTVNKGQKLEPIPHRRLRMVTNTIEENFPLGTVQFLMDFVSPQHYPPREIVAHIIQKILLSGSETVDVLKEAYMLLMKIQQLHPANAKTVEWDWKLLTYVMEEECSMVPRLECSGVISAHYNLHLPAACLGLPKCRDCSLCPAATPSGK

SEQ ID NO: 7962 - protein, 604 aa, Artificial Sequence
  Synthetic polypeptide
MAPASASGEDLRKLPTMAEVNGEQDFIDLTRETRPRTKDRSGLYVIDLTRAEGENRPIATLDLTLEPVTPSQKEPTSLQTCASLSGKAVMEGHVDRSSQPTARRIINSDPVDLDLVEENTFVGPPPATSISGGSVYPTEPNCSSATFTGNLSFLASLQLSSDVSSLSPTSNNSRSSSSSSNQKAPLPCPQQDVSRPPQALPCPLRPLPCPPRASPCPPRASSCPPRALSCPSQTMQCQLPALTHPPQEVPCPRQNIPGPPQDSLGLPQDVPGLPQSILHPQDVAYLQDMPRSPGDVPQSPSDVSPSPDAPQSPGGMPHLPGDVLHSPGDMPHSSGDVTHSPRDIPHLPGDRPDFTQNDVQNRDMPMDISALSSPSCSPSPQSETPLEKVPWLSVMETPARKEISLSEPAKPGSAHVQSRTPQGGLYNRPCLHRLKYFLRPPVHHLFFQTLIPDKDTRENKGQKLEPIPHRRLRMVTNTIEENFPLGTVQFLMDFVSPQHYPPREIVAHIIQKILLSGSETVDVLKEAYMLLMKIQQLHPANAKTVEWDWKLLTYVMEEECSMVPRLECSGVISAHYNLHLPAACLGLPKCRDCSLCPAATPSGK

SEQ ID NO: 7963 - protein, 623 aa, Artificial Sequence
  Synthetic polypeptide
MEDFIVISDDSGSESSGGARPGRSRRPRRALSRTSGALPRRTVDFIDLTRETRPRTKDRSGLYVIDLTRAEGENRPIATLDLTLEPVTPSQKEPTSLQTCASLSGKAVMEGHVDRSSQPTARRIINSDPVDLDLVEENTFVGPPPATSISGGSVYPTEPNCSSATFTGNLSFLASLQLSSDVSSLSPTSNNSRSSSSSSNQKAPLPCPQQDVSRPPQALPCPLRPLPCPPRASPCPPRASSCPPRALSCPSQTMQCQLPALTHPPQEVPCPRQNIPGPPQDSLGLPQDVPGLPQSILHPQDVAYLQDMPRSPGDVPQSPSDVSPSPDAPQSPGGMPHLPGDVLHSPGDMPHSSGDVTHSPRDIPHLPGDRPDFTQNDVQNRDMPMDISALSSPSCSPSPQSETPLEKVPWLSVMETPARKEISLSEPAKPGSAHVQSRTPQGGLYNRPCLHRLKYFLRPPVHHLFFQTLIPDKDTRENKGQKLEPIPHRRLRMVTNTIEENFPLGTVQFLMDFVSPQHYPPREIVAHIIQKILLSGSETVDVLKEAYMLLMKIQQLHPANAKTVEWDWKLLTYVMEEECSMVPRLECSGVISAHYNLHLPAACLGLPKCRDCSLCPAATPSGK

SEQ ID NO: 7964 - protein, 222 aa, Artificial Sequence
  Synthetic polypeptide
MEDFIVISDDSGSESSGGARPGRSRRPRRALSRTSGALPRRTVNKGQKLEPIPHRRLRMVTNTIEENFPLGTVQFLMDFVSPQHYPPREIVAHIIQKILLSGSETVDVLKEAYMLLMKIQQLHPANAKTVEWDWKLLTYVMEEEAGVQWRDLGSLQPTPPSRLPWPPKVPRLQPLPGRHPVWEVRSVSAWPPIVWDVRSPSAWLPSLESEERLRPAAIPSRK

SEQ ID NO: 7965 - protein, 637 aa, Artificial Sequence
  Synthetic polypeptide
MAPASASGEDLRKLPTMAEVNGEQDFIDLTRETRPRTKDRSGLYVIDLTRAEGENRPIATLDLTLEPVTPSQKEPTSLQTCASLSGKAVMEGHVDRSSQPTARRIINSDPVDLDLVEENTFVGPPPATSISGGSVYPTEPNCSSATFTGNLSFLASLQLSSDVSSLSPTSNNSRSSSSSSNQKAPLPCPQQDVSRPPQALPCPLRPLPCPPRASPCPPRASSCPPRALSCPSQTMQCQLPALTHPPQEVPCPRQNIPGPPQDSLGLPQDVPGLPQSILHPQDVAYLQDMPRSPGDVPQSPSDVSPSPDAPQSPGGMPHLPGDVLHSPGDMPHSSGDVTHSPRDIPHLPGDRPDFTQNDVQNRDMPMDISALSSPSCSPSPQSETPLEKVPWLSVMETPARKEISLSEPAKPGSAHVQSRTPQGGLYNRPCLHRLKYFLRPPVHHLFFQTLIPDKDTRENKGQKLEPIPHRRLRMVTNTIEENFPLGTVQFLMDFVSPQHYPPREIVAHIIQKILLSGSETVDVLKEAYMLLMKIQQLHPANAKTVEWDWKLLTYVMEEEAGVQWRDLGSLQPTPPSRLPWPPKVPRLQPLPGRHPVWEVRSVSAWPPIVWDVRSPSAWLPSLESEERLRPAAIPSRK

SEQ ID NO: 7966 - protein, 656 aa, Artificial Sequence
  Synthetic polypeptide
MEDFIVISDDSGSESSGGARPGRSRRPRRALSRTSGALPRRTVDFIDLTRETRPRTKDRSGLYVIDLTRAEGENRPIATLDLTLEPVTPSQKEPTSLQTCASLSGKAVMEGHVDRSSQPTARRIINSDPVDLDLVEENTFVGPPPATSISGGSVYPTEPNCSSATFTGNLSFLASLQLSSDVSSLSPTSNNSRSSSSSSNQKAPLPCPQQDVSRPPQALPCPLRPLPCPPRASPCPPRASSCPPRALSCPSQTMQCQLPALTHPPQEVPCPRQNIPGPPQDSLGLPQDVPGLPQSILHPQDVAYLQDMPRSPGDVPQSPSDVSPSPDAPQSPGGMPHLPGDVLHSPGDMPHSSGDVTHSPRDIPHLPGDRPDFTQNDVQNRDMPMDISALSSPSCSPSPQSETPLEKVPWLSVMETPARKEISLSEPAKPGSAHVQSRTPQGGLYNRPCLHRLKYFLRPPVHHLFFQTLIPDKDTRENKGQKLEPIPHRRLRMVTNTIEENFPLGTVQFLMDFVSPQHYPPREIVAHIIQKILLSGSETVDVLKEAYMLLMKIQQLHPANAKTVEWDWKLLTYVMEEEAGVQWRDLGSLQPTPPSRLPWPPKVPRLQPLPGRHPVWEVRSVSAWPPIVWDVRSPSAWLPSLESEERLRPAAIPSRK

SEQ ID NO: 7967 - protein, 192 aa, Artificial Sequence
  Synthetic polypeptide
MEDFIVISDDSGSESSGGARPGRSRRPRRALSRTSGALPRRTVNKGQKLEPIPHRRLRMVTNTIEENFPLGTVQFLMDFVSPQHYPPREIVAHIIQKILLSGSETVDVLKEAYMLLMKIQQLHPANAKTVEWDWKLLTYVMEEEPPALASQSAEIAASARPPPRLGSEERLCLAPHRLGREEPLCLAAQSGK

SEQ ID NO: 7968 - protein, 607 aa, Artificial Sequence
  Synthetic polypeptide
MAPASASGEDLRKLPTMAEVNGEQDFIDLTRETRPRTKDRSGLYVIDLTRAEGENRPIATLDLTLEPVTPSQKEPTSLQTCASLSGKAVMEGHVDRSSQPTARRIINSDPVDLDLVEENTFVGPPPATSISGGSVYPTEPNCSSATFTGNLSFLASLQLSSDVSSLSPTSNNSRSSSSSSNQKAPLPCPQQDVSRPPQALPCPLRPLPCPPRASPCPPRASSCPPRALSCPSQTMQCQLPALTHPPQEVPCPRQNIPGPPQDSLGLPQDVPGLPQSILHPQDVAYLQDMPRSPGDVPQSPSDVSPSPDAPQSPGGMPHLPGDVLHSPGDMPHSSGDVTHSPRDIPHLPGDRPDFTQNDVQNRDMPMDISALSSPSCSPSPQSETPLEKVPWLSVMETPARKEISLSEPAKPGSAHVQSRTPQGGLYNRPCLHRLKYFLRPPVHHLFFQTLIPDKDTRENKGQKLEPIPHRRLRMVTNTIEENFPLGTVQFLMDFVSPQHYPPREIVAHIIQKILLSGSETVDVLKEAYMLLMKIQQLHPANAKTVEWDWKLLTYVMEEEPPALASQSAEIAASARPPPRLGSEERLCLAPHRLGREEPLCLAAQSGK

SEQ ID NO: 7969 - protein, 626 aa, Artificial Sequence
  Synthetic polypeptide
MEDFIVISDDSGSESSGGARPGRSRRPRRALSRTSGALPRRTVDFIDLTRETRPRTKDRSGLYVIDLTRAEGENRPIATLDLTLEPVTPSQKEPTSLQTCASLSGKAVMEGHVDRSSQPTARRIINSDPVDLDLVEENTFVGPPPATSISGGSVYPTEPNCSSATFTGNLSFLASLQLSSDVSSLSPTSNNSRSSSSSSNQKAPLPCPQQDVSRPPQALPCPLRPLPCPPRASPCPPRASSCPPRALSCPSQTMQCQLPALTHPPQEVPCPRQNIPGPPQDSLGLPQDVPGLPQSILHPQDVAYLQDMPRSPGDVPQSPSDVSPSPDAPQSPGGMPHLPGDVLHSPGDMPHSSGDVTHSPRDIPHLPGDRPDFTQNDVQNRDMPMDISALSSPSCSPSPQSETPLEKVPWLSVMETPARKEISLSEPAKPGSAHVQSRTPQGGLYNRPCLHRLKYFLRPPVHHLFFQTLIPDKDTRENKGQKLEPIPHRRLRMVTNTIEENFPLGTVQFLMDFVSPQHYPPREIVAHIIQKILLSGSETVDVLKEAYMLLMKIQQLHPANAKTVEWDWKLLTYVMEEEPPALASQSAEIAASARPPPRLGSEERLCLAPHRLGREEPLCLAAQSGK

SEQ ID NO: 7970 - protein, 156 aa, Artificial Sequence
  Synthetic polypeptide
MPKAKGKTRRQKFGYSVNRKRLNRNARRKAAPRIECSHIRHAWDHAKSVRQNLAEMGLAVDPNRAVPLRKRKVKAMEVDIEERPKELVRKPYVLNDLEAEASLPEKKGNTLSRDLIDYVRYMVENHGEDYKRTIKAFTICNLRLGLLEMVSEKKCP

SEQ ID NO: 7971 - protein, 29 aa, Artificial Sequence
  Synthetic polypeptide
MAAPEERDLTQEQTEKLLQFQARSGGSRL

SEQ ID NO: 7972 - protein, 167 aa, Artificial Sequence
  Synthetic polypeptide
MEYPAPATVQAADGGAAGPYSSSELLEGQEPDGVRFDRERARRLWEAVSGAQPVGREEALSKRLTNPFLVASTLALHQNREMIDPDKFCSLCHATFNDPVMAQQHYVGKKHRKQETKLKLMARYGRLADPAVTDFPGTWMKLETIILSKLSQGQKTKHCIFSLTGGN

SEQ ID NO: 7973 - protein, 265 aa, Artificial Sequence
  Synthetic polypeptide
MEYPAPATVQAADGGAAGPYSSSELLEGQEPDGVRFDRERARRLWEAVSGAQPVGREEVEHMIQKNQCLFTNTQCKVCCALLISESQKLAHYQSKKHANKVKRYLAIHGMETLKGETKKLDSDQKSSRSKDKNQCCPICNMTFSSPVVAQSHYLGKTHAKNLKLKQQSTKVEALHQNREMIDPDKFCSLCHATFNDPVMAQQHYVGKKHRKQETKLKLMARYGRLADPAVTDFPGTWMKLETIILSKLSQGQKTKHCIFSLTGGN

SEQ ID NO: 7974 - protein, 233 aa, Artificial Sequence
  Synthetic polypeptide
MEYPAPATVQAADGGAAGPYSSSELLEGQEPDGVRFDRERARRLWEAVSGAQPVGREEVEHMIQKNQCLFTNTQCKVCCALLISESQKLAHYQSSRSKDKNQCCPICNMTFSSPVVAQSHYLGKTHAKNLKLKQQSTKVEALHQNREMIDPDKFCSLCHATFNDPVMAQQHYVGKKHRKQETKLKLMARYGRLADPAVTDFPGTWMKLETIILSKLSQGQKTKHCIFSLTGGN

SEQ ID NO: 7975 - protein, 290 aa, Artificial Sequence
  Synthetic polypeptide
MEYPAPATVQAADGGAAGPYSSSELLEGQEPDGVRFDRERARRLWEAVSGAQPVGREEAQFFPHSRTVIPILVLSETYSLCHPVEHMIQKNQCLFTNTQCKVCCALLISESQKLAHYQSKKHANKVKRYLAIHGMETLKGETKKLDSDQKSSRSKDKNQCCPICNMTFSSPVVAQSHYLGKTHAKNLKLKQQSTKVEALHQNREMIDPDKFCSLCHATFNDPVMAQQHYVGKKHRKQETKLKLMARYGRLADPAVTDFPGTWMKLETIILSKLSQGQKTKHCIFSLTGGN

SEQ ID NO: 7976 - protein, 281 aa, Artificial Sequence
  Synthetic polypeptide
MEYPAPATVQAADGGAAGPYSSSELLEGQEPDGVRFDRERARRLWEAVSGAQPVGREEVEHMIQKNQCLFTNTQCKVCCALLISESQKLAHYQSKKHANKVKRYLAIHGMETLKGETKKLDSDQKSSRSKDKNQCCPICNMTFSSPVVAQSHYLGKTHAKNLKLKQQSTKVEALSKRLTNPFLVASTLALHQNREMIDPDKFCSLCHATFNDPVMAQQHYVGKKHRKQETKLKLMARYGRLADPAVTDFPGTWMKLETIILSKLSQGQKTKHCIFSLTGGN

SEQ ID NO: 7977 - protein, 130 aa, Artificial Sequence
  Synthetic polypeptide
MEPLASNIQVLLQAAEFLERREREAEHGYASLCPHRSPGPIHRRKKRPPQAPGAQDSGRSVHNELEKRRRAQLKRCLERLKQQMPLGADCARYTTLSLLRRARMHIQAHLLLKTHQWPLTGQSLCSPSFL

SEQ ID NO: 7978 - protein, 47 aa, Artificial Sequence
  Synthetic polypeptide
MPLGADCARYTTLSLLRRARMHIQAHLLLKTHQWPLTGQSLCSPSFL

SEQ ID NO: 7979 - protein, 120 aa, Artificial Sequence
  Synthetic polypeptide
MEPLASNIQVLLQAAEFLERREREAEHGYASLCPHRSPGPIHRRKKRPPQAPGAQDSGRRAQLKRCLERLKQQMPLGADCARYTTLSLLRRARMHIQAHLLLKTHQWPLTGQSLCSPSFL

SEQ ID NO: 7980 - protein, 115 aa, Artificial Sequence
  Synthetic polypeptide
MEPLASNIQVLLQAAEFLERREREAEHGYASLCPHRSPGPIHRRKKRPPQAPGAQDSGRSVHNELEKRRRAQLKRCLERLKQQMPLGADCARYTTLSLLRRARMHIQAVFYFALE

SEQ ID NO: 7981 - protein, 32 aa, Artificial Sequence
  Synthetic polypeptide
MPLGADCARYTTLSLLRRARMHIQAVFYFALE

SEQ ID NO: 7982 - protein, 105 aa, Artificial Sequence
  Synthetic polypeptide
MEPLASNIQVLLQAAEFLERREREAEHGYASLCPHRSPGPIHRRKKRPPQAPGAQDSGRRAQLKRCLERLKQQMPLGADCARYTTLSLLRRARMHIQAVFYFALE

SEQ ID NO: 7983 - protein, 171 aa, Artificial Sequence
  Synthetic polypeptide
RREARPRACGSGREEGSRPCLTGVCLQRARTDEVPAGGSRSEAEDEDDEDYVPYVPLRQRRQLLLQKLLQRRRKGAAEEEQQDSGSEPRGDEDDIPLGPQSNVSLLDQHQHLKEKAEARKESAKEKQLKEEEKILESVAEGRALMSVKEMAKGITYDDPIKTSLSFIICNL

SEQ ID NO: 7984 - protein, 153 aa, Artificial Sequence
  Synthetic polypeptide
MEESEPERKRARTDEVPAGGSRSEAEDEDDEDYVPYVPLRQRRQLLLQKLLQRRRKGAAEEEQQDSGSEPRGDEDDIPLGPQSNVSLLDQHQHLKEKAEARKESAKEKQLKEEEKILESVAEGRALMSVKEMAKGITYDDPIKTSLSFIICNL

SEQ ID NO: 7985 - protein, 66 aa, Artificial Sequence
  Synthetic polypeptide
MDQHQHLKEKAEARKESAKEKQLKEEEKILESVAEGRALMSVKEMAKGITYDDPIKTSLSFIICNL

SEQ ID NO: 7986 - protein, 285 aa, Artificial Sequence
  Synthetic polypeptide
MFPSRRKAAQLPWEDGRSGLLSGGLPRKCSVFHLFVACLSLGFFSLLWLQLSCSGDVARAVRGQGQETSGPPRACPPEPPPEHWEEDASWGPHRLAVLVPFRERFEELLVFVPHMRRFLSRKKIRHHIYVLNQVDHFRFNRAALINVGFLESSNSTDYIAMHDVDLLPLNEELDYGFPEAGPFHVASPELHPLYHYKTYVGGILLLSKQHYRLCNGMSNRFWGWGREDDEFYRRIKGAGLQLFRPSGITTGYKTFRHLHDPAWRKRDQKRIAAQKQPGFCLCHFY

SEQ ID NO: 7987 - protein, 142 aa, Artificial Sequence
  Synthetic polypeptide
MAADQRPKADTLALRQRLISSSCRLFFPEDPVKIVRAQGQYMYDEQGAEYIDCISNVAHVGHCHPLVVQAAHEQNQVLNTNSRYLHDNIVDYAQRLSETLPEQLCVFYFLNSGTLIFPTFLMVGHKTHSRDGPTPYPARRNA

SEQ ID NO: 7988 - protein, 74 aa, Artificial Sequence
  Synthetic polypeptide
QAAHEQNQVLNTNSRYLHDNIVDYAQRLSETLPEQLCVFYFLNSGTLIFPTFLMVGHKTHSRDGPTPYPARRNA

SEQ ID NO: 7989 - protein, 156 aa, Artificial Sequence
  Synthetic polypeptide
MAADQRPKADTLALRQRLISHLFSGSGRLTRTHAEMSKEATEAENAFRNNPKFQRLVTPSASCFATTCGVERQVGHCHPLVVQAAHEQNQVLNTNSRYLHDNIVDYAQRLSETLPEQLCVFYFLNSGTLIFPTFLMVGHKTHSRDGPTPYPARRNA

SEQ ID NO: 7990 - protein, 127 aa, Artificial Sequence
  Synthetic polypeptide
MAAGQREARPQVSLTFEDVAVLFTWDEWRKLAPSQRNLYRDVMLENYRNLVSLGLSFTKPKVISLLQQGEDPWEVEKDSSGVSSLGWAWWLTPVIPALWEAKTRGLLEPRKELETSLSNNNNKISQA

SEQ ID NO: 7991 - protein, 148 aa, Artificial Sequence
  Synthetic polypeptide
MARRLLPAHVQESVTFRDVAVFFSQDEWLHLDSAQRALYREVMLENYSILVSLGILFSKPKVISQLEQGEDPWMVESGVPQGAHLGEDTCQCYLQNIPDTPTSFRLLSPHASVSHHHLHPGRVQRPHCLFCSCPCSLSPRPHYSLFFI

SEQ ID NO: 7992 - protein, 97 aa, Artificial Sequence
  Synthetic polypeptide
MARRLLPAHVQSWMNRSGFAIPGVRDVQGCGRVLQPGRVVAPGLCPESLVPGGDAGELQHPGLTGDSLFQAKGHLPVRARRRPLDGGEWSSPRRTSR

SEQ ID NO: 7993 - protein, 573 aa, Artificial Sequence
  Synthetic polypeptide
MDPPAGAARRLLCPALLLLLLLLPPPLLPPPPPPANARLAAAADPPGGPLGHGAERILAVPVRTDAQGRLVSHVVSAATSRAGVRARRAAPVRTPSFPGGNEEEPGSHLFYNVTVFGRDLHLRLRPNARLVAPGATMEWQGEKGTTRVEPLLGSCLYVGDVAGLAEASSVALSNCDGLAGLIRMEEEEFFIEPLEKGLAAQEAEQGRVHVVYRRPPTSPPLGGPQALDTGASLDSLDSLSRALGVLEEHANSSRRRARRHAADDDYNIEVLLGVDDSVVQFHGKEHVQKYLLTLMNIVNEIYHDESLGAHINVVLVRIILLSYGKSMSLIEIGNPSQSLENVCRWAYLQQKPDTGHDEYHDHAIFLTRQDFGPSGMQGYAPVTGMCHPVRSCTLNHEDGFSSAFVVAHETGHVLGMEHDGQGNRCGDEVRLGSIMAPLVQAAFHRFHWSRCSQQELSRYLHSYDCLLDDPFAHDWPALPQLPGLHYSMNEQCRFDFGLGYMMCTAFRTFDPCKQLWCSHPDNPYFCKTKKGPPLDGTMCAPGKEAEVAVSQDRVAALQSGSHSKTLSQKIKIK

SEQ ID NO: 7994 - protein, 348 aa, Artificial Sequence
  Synthetic polypeptide
MADREGGCAAGRGRELEPELEPGPGPGSALEPGEEFEIVDRSQLPGPGDLRSATRPRAAEGWSAPILTLARRATGNLSASCGSALRAAAGLGGGDSGDGTARAASKCQMMEERANLMHMMKLSIKVLLQSALSLGRSLDADHAPLQQFFVVMEHCLKHGLKVKKSFIGQNKSFFGPLELVEKLCPEASDIATSVRNLPELKTAVGRGRAWLYLALMQKKLADYLKVLIDNKHLLSEFYEPEALMMEEEGMVIVGLLVGLNVLDANLCLKGEDLDSQVGVIDFSLYLKDVQDLDGGKEHERITDVLDQKNYVEELNRHLRQAWWCVPVIPVTREAEAEESLGPGRRRLQ

SEQ ID NO: 7995 - protein, 16 aa, Artificial Sequence
  Synthetic polypeptide
GAGRRGQRGRHGARSF

SEQ ID NO: 7996 - protein, 240 aa, Artificial Sequence
  Synthetic polypeptide
MMEERANLMHMMKLSIKVLLQSALSLGRSLDADHAPLQQFFVVMEHCLKHGLKVKKSFIGQNKSFFGPLELVEKLCPEASDIATSVRNLPELKTAVGRGRAWLYLALMQKKLADYLKVLIDNKHLLSEFYEPEALMMEEEGMVIVGLLVGLNVLDANLCLKGEDLDSQVGVIDFSLYLKDVQDLDGGKEHERITDVLDQKNYVEELNRHLRQAWWCVPVIPVTREAEAEESLGPGRRRLQ

SEQ ID NO: 7997 - protein, 3 aa, Artificial Sequence
  Synthetic polypeptide
AGS

SEQ ID NO: 7998 - protein, 325 aa, Artificial Sequence
  Synthetic polypeptide
MADREGGCAAGRGRELEPELEPGPGPGSALEPGEEFEIVDRSQLPGPGDLRSATRPRAAEGWSAPILTLARRATGNLSASCGSALRAAAGLGGGDSGDGTARAASKCQMMEERANLMHMMKLSIKVLLQSALSLGRSLDADHAPLQQFFVVMEHCLKHGLKVKKSFIGQNKSFFGPLELVEKLCPEASDIATSVRNLPELKTAVGRGRAWLYLALMQKKLADYLKVLIDNKHLLSEFYEPEALMMEEEGMVIVGLLVGLNVLDANLCLKGEDLDSQVGVIDFSLYLKDVQDLDGGKEHERITDVLDQKNYVEELNRHLRRGGACL

SEQ ID NO: 7999 - protein, 16 aa, Artificial Sequence
  Synthetic polypeptide
GAGRRGQRGRHGARSF

SEQ ID NO: 8000 - protein, 217 aa, Artificial Sequence
  Synthetic polypeptide
MMEERANLMHMMKLSIKVLLQSALSLGRSLDADHAPLQQFFVVMEHCLKHGLKVKKSFIGQNKSFFGPLELVEKLCPEASDIATSVRNLPELKTAVGRGRAWLYLALMQKKLADYLKVLIDNKHLLSEFYEPEALMMEEEGMVIVGLLVGLNVLDANLCLKGEDLDSQVGVIDFSLYLKDVQDLDGGKEHERITDVLDQKNYVEELNRHLRRGGACL

SEQ ID NO: 8001 - protein, 3 aa, Artificial Sequence
  Synthetic polypeptide
AGS

SEQ ID NO: 8002 - protein, 217 aa, Artificial Sequence
  Synthetic polypeptide
MAMSYVKDDIFRIYIKEKKECRRDHRPPCAQEAPRNMVHPNVICDGCNGPVVGTRYKCSVCPDYDLCSVCEGKGLHRGHTKLAFPSPFGHLSEGFSHSRWLRKVKHGHFGWPGWEMGPPGNWSPRPPRAGEARPGPTAESASGPSEDPSVNFLKNVGESVAAALSPLGIEVDIDVEHGGKRSRLTPVSPESSSTEEKSSSQPSSCCSDPSKPDGNDA

SEQ ID NO: 8003 - protein, 301 aa, Artificial Sequence
  Synthetic polypeptide
MASLTVKAYLLGKEDAAREIRRFSFCCSPEPEAEAEAAAGPGPCERLLSRVAALFPALRPGGFQAHYRDEDGDLVAFSSDEELTMAMSYVKDDIFRIYIKEKKECRRDHRPPCAQEAPRNMVHPNVICDGCNGPVVGTRYKCSVCPDYDLCSVCEGKGLHRGHTKLAFPSPFGHLSEGFSHSRWLRKVKHGHFGWPGWEMGPPGNWSPRPPRAGEARPGPTAESASGPSEDPSVNFLKNVGESVAAALSPLGIEVDIDVEHGGKRSRLTPVSPESSSTEEKSSSQPSSCCSDPSKPDGNDA

SEQ ID NO: 8004 - protein, 426 aa, Artificial Sequence
  Synthetic polypeptide
MWLSPEEVLVANALWVTERANPFFVLQRRRGHGRGGGLTGLLVGTLDVVLDSSARVAPYRILHQTQDSQVYWTVACGSSRKEITKHWEWLENNLLQTLSIFDSEEDITTFVKGKIHGIIAEENKNLQPQGDEDPGKFKEAELKMRKQFGMPEGEKLVNYYSCSYWKGRVPRQGWLYLTVNHLCFYSFLLGKEVSLVVQWVDITRLEKNATLLFPESIRVDTRDQELFFSMFLNIGETFKLMEQLANLAMRQLLDSEGFLEDKALPRPIRPHRNISALKRDLDARAKNECYRATFRLPRDERLDGHTSCTLWTPFNKLHIPGQMFISNNYICFASKEEDACHLIIPLREVTIVEKADSSSVLPSPLSISTKSKMTFLFANLKDRDFLVQRISDFLQKTPSKQPGSIGSRKASVVDPSTEPYRCLTYY

SEQ ID NO: 8005 - protein, 72 aa, Artificial Sequence
  Synthetic polypeptide
MAAAMTFCRLLNRCGEAARSLPLGARCFGVRVSPTGEKVTHTGQVYDDKDYRRIRFVGRQKELTLEQHRCEL

SEQ ID NO: 8006 - protein, 77 aa, Artificial Sequence
  Synthetic polypeptide
MAAAMTFCRLLNRCGEAARSLPLGARCFGVRVSPTGEKVTHTGQVYDDKDYRRIRFVGRQKETAGPTLPSSSSACST

SEQ ID NO: 8007 - protein, 65 aa, Artificial Sequence
  Synthetic polypeptide
MAAAMTFCRLLNRCGEAARSLPLGARCFGVRVSPTGEKVTHTGQVYDDKDYRRIRFVGRQKEISV

SEQ ID NO: 8008 - protein, 333 aa, Artificial Sequence
  Synthetic polypeptide
MVDLSVSPDSLKPVSLTSSLVFLMHLLLLQPGEPSSEVKVLGPEYPILALVGEEVEFPCHLWPQLDAQQMEIRWFRSQTFNVVHLYQEQQELPGRQMPAFRNRTKLVKDDIAYGSVVLQLHSIIPSDKGTYGCRFHSDNFSGEALWELEVAGLGSDPHLSLEGFKEGGIQLRLRSSGWYPKPKVQWRDHQGQCLPPEFEAIVWDAQDLFSLETSVVVRAGALSNVSVSIQNLLLSQKKELVVQIADVFVPGASAWKSAFVATLPLLLVLAALALGVLRKQRRSREKLRKQAEKRQEKLTAELGPGPVAHTCNPSTLGGRGGWITRSGDRDQPG

SEQ ID NO: 8009 - protein, 317 aa, Artificial Sequence
  Synthetic polypeptide
MVDLSVSPDSLKPVSLTSSLVFLMHLLLLQPGEPSSEVKVLGPEYPILALVGEEVEFPCHLWPQLDAQQMEIRWFRSQTFNVVHLYQEQQELPGRQMPAFRNRTKLVKDDIAYGSVVLQLHSIIPSDKGTYGCRFHSDNFSGEALWELEVAGLGSDPHLSLEGFKEGGIQLRLRSSGWYPKPKVQWRDHQGQCLPPEFEAIVWDAQDLFSLETSVVVRAGALSNVSVSIQNLLLSQKKELVVQIADVFVPGASAWKSAFVATLPLLLVLAALALGVLRKQRRSREKLRKQAEKRQEKLTAELEKLQTELARRGGMCL

SEQ ID NO: 8010 - protein, 234 aa, Artificial Sequence
  Synthetic polypeptide
MKITSTSCICPVLVCLCFVQRCYGTAHHSSIKVMRNQTKHIEGETEVHHRPKRGWVWNQFFVLEEHMGPDPQYVGKLHSNSDKGDGSVKYILTGEGAGTIFIIDDTTGDIHSTKSLDREQKTHYVLHAQAIDRRTNKPLEPESEFIIKVQDINDNAPKFTDGPYIVTVPEMSDMGTSVLQVTATDADDPTYGNSARVVYSILQGQPYFSVDPKTGSQGPRMEGQAEAMSEEHKL

SEQ ID NO: 8011 - protein, 180 aa, Artificial Sequence
  Synthetic polypeptide
WVWNQFFVLEEHMGPDPQYVGKLHSNSDKGDGSVKYILTGEGAGTIFIIDDTTGDIHSTKSLDREQKTHYVLHAQAIDRRTNKPLEPESEFIIKVQDINDNAPKFTDGPYIVTVPEMSDMGTSVLQVTATDADDPTYGNSARVVYSILQGQPYFSVDPKTGSQGPRMEGQAEAMSEEHKL

SEQ ID NO: 8012 - protein, 257 aa, Artificial Sequence
  Synthetic polypeptide
MSGVRGLSRLLSARRLALAKAWPTVLQTGTRGFHFTVDGNKRASAKVSDSISAQYPVVDHEFDAVVVGAGGAGLRAAFGLSEAGFNTACVTKLFPTRSHTVAAQGGINAALGNMEEDNWRWHFYDTVKGSDWLGDQDAIHYMTEQAPAAVVELENYGMPFSRTEDGKIYQRAFGGQSLKFGKGGQAHRCCCVADRTGHSLLHTLYGRSLRYDTSYFVEYFALDLLMENGECRGVIALCIEDGSIHRIRAKNTVVATG

SEQ ID NO: 8013 - protein, 209 aa, Artificial Sequence
  Synthetic polypeptide
MSGVRGLSRLLSARRLALAKAWPTVLQTGTRGFHFTVDGNKRASAKVSDSISAQYPVVDHEFDAVVVGAGGAGLRAAFGLSEAGFNTACVTKLFPTRSHTVAAQLENYGMPFSRTEDGKIYQRAFGGQSLKFGKGGQAHRCCCVADRTGHSLLHTLYGRSLRYDTSYFVEYFALDLLMENGECRGVIALCIEDGSIHRIRAKNTVVATG

SEQ ID NO: 8014 - protein, 116 aa, Artificial Sequence
  Synthetic polypeptide
MPEPPTPSVGSCAARASRMSAAPCSRAPSPIDHPRAEECGRAARDWQAAPPAAPVRDPLGEASWAPESGEDMENLYVQLKLQSVGTCFNREELPSVLQIFRGKTLRVYGGKIQKLD

SEQ ID NO: 8015 - protein, 20 aa, Artificial Sequence
  Synthetic polypeptide
PTASGQTRSWTWLSLVGHVP

SEQ ID NO: 8016 - protein, 531 aa, Artificial Sequence
  Synthetic polypeptide
MSGVRGLSRLLSARRLALAKAWPTVLQTGTRGFHFTVDGNKRASAKVSDSISAQYPVVDHEFDAVVVGAGGAGLRAAFGLSEAGFNTACVTKLFPTRSHTVAAQGGINAALGNMEEDNWRWHFYDTVKGSDWLGDQDAIHYMTEQAPAAVVELENYGMPFSRTEDGKIYQRAFGGQSLKFGKGGQAHRCCCVADRTGHSLLHTLYGRSLRYDTSYFVEYFALDLLMENGECRGVIALCIEDGSIHRIRAKNTVVATGGYGRTYFSCTSAHTSTGDGTAMITRAGLPCQDLEFVQFHPTGIYGAGCLITEGCRGEGGILINSQGERFMERYAPVAKDLASRDVVSRSMTLEIREGRGCGPEKDHVYLQLHHLPPEQLATRLPGISETAMIFAGVDVTKEPIPVLPTVHYNMGGIPTNYKGQVLRHVNGQDQIVPGLYACGEAACASVHGANRLGANSLLDLVVFGRACALSIEESCRPGDKVPPIKPNAGEESVMNLDKLRFADGSIRTSELRLSMQKRRWVRVSMTELVSA

SEQ ID NO: 8017 - protein, 483 aa, Artificial Sequence
  Synthetic polypeptide
MSGVRGLSRLLSARRLALAKAWPTVLQTGTRGFHFTVDGNKRASAKVSDSISAQYPVVDHEFDAVVVGAGGAGLRAAFGLSEAGFNTACVTKLFPTRSHTVAAQLENYGMPFSRTEDGKIYQRAFGGQSLKFGKGGQAHRCCCVADRTGHSLLHTLYGRSLRYDTSYFVEYFALDLLMENGECRGVIALCIEDGSIHRIRAKNTVVATGGYGRTYFSCTSAHTSTGDGTAMITRAGLPCQDLEFVQFHPTGIYGAGCLITEGCRGEGGILINSQGERFMERYAPVAKDLASRDVVSRSMTLEIREGRGCGPEKDHVYLQLHHLPPEQLATRLPGISETAMIFAGVDVTKEPIPVLPTVHYNMGGIPTNYKGQVLRHVNGQDQIVPGLYACGEAACASVHGANRLGANSLLDLVVFGRACALSIEESCRPGDKVPPIKPNAGEESVMNLDKLRFADGSIRTSELRLSMQKRRWVRVSMTELVSA

SEQ ID NO: 8018 - protein, 523 aa, Artificial Sequence
  Synthetic polypeptide
MSGVRGLSRLLSARRLALAKAWPTVLQTGTRGFHFTVDGNKRASAKVSDSISAQYPVVDHEFDAVVVGAGGAGLRAAFGLSEAGFNTACVTKLFPTRSHTVAAQGGINAALGNMEEDNWRWHFYDTVKGSDWLGDQDAIHYMTEQAPAAVVELENYGMPFSRTEDGKIYQRAFGGQSLKFGKGGQAHRCCCVADRTGHSLLHTLYGRSLRYDTSYFVEYFALDLLMENGECRGVIALCIEDGSIHRIRAKNTVVATGGYGRTYFSCTSAHTSTGDGTAMITRAGLPCQDLEFVQFHPTGIYGAGCLITEGCRGEGGILINSQGERFMERYAPVAKDLASRDVVSRSMTLEIREGRGCGPEKDHVYLQLHHLPPEQLATRLPGISETAMIFAGVDVTKEPIPVLPTVHYNMGGIPTNYKGQVLRHVNGQDQIVPGLYACGEAACASVHGANRLGANSLLDLVVFGRACALSIEESCRPGDKVPPIKPNAGEESVMNLDKLRFADGSIRTSELRLSMQKRRSWSH

SEQ ID NO: 8019 - protein, 475 aa, Artificial Sequence
  Synthetic polypeptide
MSGVRGLSRLLSARRLALAKAWPTVLQTGTRGFHFTVDGNKRASAKVSDSISAQYPVVDHEFDAVVVGAGGAGLRAAFGLSEAGFNTACVTKLFPTRSHTVAAQLENYGMPFSRTEDGKIYQRAFGGQSLKFGKGGQAHRCCCVADRTGHSLLHTLYGRSLRYDTSYFVEYFALDLLMENGECRGVIALCIEDGSIHRIRAKNTVVATGGYGRTYFSCTSAHTSTGDGTAMITRAGLPCQDLEFVQFHPTGIYGAGCLITEGCRGEGGILINSQGERFMERYAPVAKDLASRDVVSRSMTLEIREGRGCGPEKDHVYLQLHHLPPEQLATRLPGISETAMIFAGVDVTKEPIPVLPTVHYNMGGIPTNYKGQVLRHVNGQDQIVPGLYACGEAACASVHGANRLGANSLLDLVVFGRACALSIEESCRPGDKVPPIKPNAGEESVMNLDKLRFADGSIRTSELRLSMQKRRSWSH

SEQ ID NO: 8020 - protein, 20 aa, Artificial Sequence
  Synthetic polypeptide
PTASGQTRSWTWLSLVGHVP

SEQ ID NO: 8021 - protein, 20 aa, Artificial Sequence
  Synthetic polypeptide
PTASGQTRSWTWLSLVGHVP

SEQ ID NO: 8022 - protein, 525 aa, Artificial Sequence
  Synthetic polypeptide
MSGVRGLSRLLSARRLALAKAWPTVLQTGTRGFHFTVDGNKRASAKVSDSISAQYPVVDHEFDAVVVGAGGAGLRAAFGLSEAGFNTACVTKLFPTRSHTVAAQGGINAALGNMEEDNWRWHFYDTVKGSDWLGDQDAIHYMTEQAPAAVVELENYGMPFSRTEDGKIYQRAFGGQSLKFGKGGQAHRCCCVADRTGHSLLHTLYGRSLRYDTSYFVEYFALDLLMENGECRGVIALCIEDGSIHRIRAKNTVVATGGYGRTYFSCTSAHTSTGDGTAMITRAGLPCQDLEFVQFHPTGIYGAGCLITEGCRGEGGILINSQGERFMERYAPVAKDLASRDVVSRSMTLEIREGRGCGPEKDHVYLQLHHLPPEQLATRLPGISETAMIFAGVDVTKEPIPVLPTVHYNMGGIPTNYKGQVLRHVNGQDQIVPGLYACGEAACASVHGANRLGANSLLDLVVFGRACALSIEESCRPGDKVPPIKPNAGEESVMNLDKLRFADGSIRTSELRLSMQKIQQYPERS

SEQ ID NO: 8023 - protein, 477 aa, Artificial Sequence
  Synthetic polypeptide
MSGVRGLSRLLSARRLALAKAWPTVLQTGTRGFHFTVDGNKRASAKVSDSISAQYPVVDHEFDAVVVGAGGAGLRAAFGLSEAGFNTACVTKLFPTRSHTVAAQLENYGMPFSRTEDGKIYQRAFGGQSLKFGKGGQAHRCCCVADRTGHSLLHTLYGRSLRYDTSYFVEYFALDLLMENGECRGVIALCIEDGSIHRIRAKNTVVATGGYGRTYFSCTSAHTSTGDGTAMITRAGLPCQDLEFVQFHPTGIYGAGCLITEGCRGEGGILINSQGERFMERYAPVAKDLASRDVVSRSMTLEIREGRGCGPEKDHVYLQLHHLPPEQLATRLPGISETAMIFAGVDVTKEPIPVLPTVHYNMGGIPTNYKGQVLRHVNGQDQIVPGLYACGEAACASVHGANRLGANSLLDLVVFGRACALSIEESCRPGDKVPPIKPNAGEESVMNLDKLRFADGSIRTSELRLSMQKIQQYPERS

SEQ ID NO: 8024 - protein, 527 aa, Artificial Sequence
  Synthetic polypeptide
MSGVRGLSRLLSARRLALAKAWPTVLQTGTRGFHFTVDGNKRASAKVSDSISAQYPVVDHEFDAVVVGAGGAGLRAAFGLSEAGFNTACVTKLFPTRSHTVAAQGGINAALGNMEEDNWRWHFYDTVKGSDWLGDQDAIHYMTEQAPAAVVELENYGMPFSRTEDGKIYQRAFGGQSLKFGKGGQAHRCCCVADRTGHSLLHTLYGRSLRYDTSYFVEYFALDLLMENGECRGVIALCIEDGSIHRIRAKNTVVATGGYGRTYFSCTSAHTSTGDGTAMITRAGLPCQDLEFVQFHPTGIYGAGCLITEGCRGEGGILINSQGERFMERYAPVAKDLASRDVVSRSMTLEIREGRGCGPEKDHVYLQLHHLPPEQLATRLPGISETAMIFAGVDVTKEPIPVLPTVHYNMGGIPTNYKGQVLRHVNGQDQIVPGLYACGEAACASVHGANRLGANSLLDLVVFGRACALSIEESCRPGDKVPPIKPNAGEESVMNLDKLRFADGSIRTSELRLSMQKDGTIKTPETL

SEQ ID NO: 8025 - protein, 479 aa, Artificial Sequence
  Synthetic polypeptide
MSGVRGLSRLLSARRLALAKAWPTVLQTGTRGFHFTVDGNKRASAKVSDSISAQYPVVDHEFDAVVVGAGGAGLRAAFGLSEAGFNTACVTKLFPTRSHTVAAQLENYGMPFSRTEDGKIYQRAFGGQSLKFGKGGQAHRCCCVADRTGHSLLHTLYGRSLRYDTSYFVEYFALDLLMENGECRGVIALCIEDGSIHRIRAKNTVVATGGYGRTYFSCTSAHTSTGDGTAMITRAGLPCQDLEFVQFHPTGIYGAGCLITEGCRGEGGILINSQGERFMERYAPVAKDLASRDVVSRSMTLEIREGRGCGPEKDHVYLQLHHLPPEQLATRLPGISETAMIFAGVDVTKEPIPVLPTVHYNMGGIPTNYKGQVLRHVNGQDQIVPGLYACGEAACASVHGANRLGANSLLDLVVFGRACALSIEESCRPGDKVPPIKPNAGEESVMNLDKLRFADGSIRTSELRLSMQKDGTIKTPETL

SEQ ID NO: 8026 - protein, 20 aa, Artificial Sequence
  Synthetic polypeptide
PTASGQTRSWTWLSLVGHVP

SEQ ID NO: 8027 - protein, 45 aa, Artificial Sequence
  Synthetic polypeptide
MWNQFFLLEEYTGSDYQYVGKGTFGNIWRHFWLSHLGKTLLAPSR

SEQ ID NO: 8028 - protein, 100 aa, Artificial Sequence
  Synthetic polypeptide
MRTYRYFLLLFWVGQPYPTLSTPLSKRTSGFPAKKRALELSGNSKNELNRSKRSWMWNQFFLLEEYTGSDYQYVGKGTFGNIWRHFWLSHLGKTLLAPSR

SEQ ID NO: 8029 - protein, 880 aa, Artificial Sequence
  Synthetic polypeptide
MMQGNTCHRMSFHPGRGCPRGRGGHGARPSAPSFRPQNLRLLHPQQPPVQYQYEPPSAPSTTFSNSPAPNFLPPRPDFVPFPPPMPPSAQGPLPPCPIRPPFPNHQMRHPFPVPPCFPPMPPPMPCPNNPPVPGAPPGQGTFPFMMPPPSMPHPPPPPVMPQQVNYQYPPGYSHHNFPPPSFNSFQNNPSSFLPSANNSSSPHFRHLPPYPLPKAPSERRSPERLKHYDDHRHRDHSHGRGERHRSLDRRERGRSPDRRRQDSRYRSDYDRGRTPSRHRSYERSRERERERHRHRDNRRSPSLERSYKKEYKRSGRSYGLSVVPEPAGCTPELPGEIIKNTDSWAPPLEIVNHRSPSREKKRARWEEEKDRWSDNQSSGKDKNYTSIKEKEPEETMPDKNEEEEEELLKPVWIRCTHSENYYSSDPMDQVGDSTVVGTSRLRDLYDKFEEELGSRQEKAKAARPPWEPPKTKLDEDLESSSESECESDEDSTCSSSSDSEVFDVIAEIKRKKAHPDRLHDELWYNDPGQMNDGPLCKCSAKARRTGIRHSIYPGEEAIKPCRPMTNNAGRLFHYRITVSPPTNFLTDRPTVIEYDDHEYIFEGFSMFAHAPLTNIPLCKVIRFNIDYTIHFIEEMMPENFCVKGLELFSLFLFRDILELYDWNLKGPLFEDSPPCCPRFHFMPRFVRFLPDGGKEVLSMHQILLYLLRCSKALVPEEEIANMLQWEELEWQKYAEECKGMIVTNPGTKPSSVRIDQLDREQFNPDVITFPIIVHFGIRPAQLSYAGDPQYQKLWKSYVKLRHLLANSPKVKQTDKQKLAQREEALQKIRQKNTMRREVTVELSSQGFWKTGIRSDVCQSGHLEWDGRLPCIIKLSDSLAQ

SEQ ID NO: 8030 - protein, 843 aa, Artificial Sequence
  Synthetic polypeptide
MMQGNTCHRMSFHPGRGCPRGRGGHGARPSAPSFRPQNLRLLHPQQPPVQYQYEPPSAPSTTFSNSPAPNFLPPRPDFVPFPPPMPPSAQGPLPPCPIRPPFPNHQMRHPFPVPPCFPPMPPPMPCPNNPPVPGAPPGQGTFPFMMPPPSMPHPPPPPVMPQQVNYQYPPGYSHHNFPPPSFNSFQNNPSSFLPSANNSSSPHFRHLPPYPLPKAPSERRSPERLKHYDDHRHRDHSHGRGERHRSLDRRERGRSPDRRRQDSRYRSDYDRGRTPSRHRSYERSRERERERHRHRDNRRSPSLERSYKKEYKRSGSRSPSREKKRARWEEEKDRWSDNQSSGKDKNYTSIKEKEPEETMPDKNEEEEEELLKPVWIRCTHSENYYSSDPMDQVGDSTVVGTSRLRDLYDKFEEELGSRQEKAKAARPPWEPPKTKLDEDLESSSESECESDEDSTCSSSSDSEVFDVIAEIKRKKAHPDRLHDELWYNDPGQMNDGPLCKCSAKARRTGIRHSIYPGEEAIKPCRPMTNNAGRLFHYRITVSPPTNFLTDRPTVIEYDDHEYIFEGFSMFAHAPLTNIPLCKVIRFNIDYTIHFIEEMMPENFCVKGLELFSLFLFRDILELYDWNLKGPLFEDSPPCCPRFHFMPRFVRFLPDGGKEVLSMHQILLYLLRCSKALVPEEEIANMLQWEELEWQKYAEECKGMIVTNPGTKPSSVRIDQLDREQFNPDVITFPIIVHFGIRPAQLSYAGDPQYQKLWKSYVKLRHLLANSPKVKQTDKQKLAQREEALQKIRQKNTMRREVTVELSSQGFWKTGIRSDVCQSGHLEWDGRLPCIIKLSDSLAQ

SEQ ID NO: 8031 - protein, 834 aa, Artificial Sequence
  Synthetic polypeptide
MPITQDNAVLHLPLLYQWLQNSLQEGGDGPEQRLCQAAIQKLQEYIQLNFAVDESTVPPDHSPPEMEICTVYLTKELGDTETVGLSFGNIPVFGDYGEKRRGGKKRKTHQGPVLDVGCIWVTELRKNSPAGKSGKVRLRDEILSLNGQLMVGVDVSGASYLAEQCWNGGFIYLIMLRRFKHKAHSTYNGNSSNSSEPGETPTLELGDRTAKKGKRTRKFGVISRPPANKAPEESKGSAGCEVSSDPSTELENGPDPELGNGHVFQLENGPDSLKEVAGPHLERSEVDRGTEHRIPKTDAPLTTSNDKRRFSKGGKTDFQSSDCLAREEVGRIWKMELLKESDGLGIQVSGGRGSKRSPHAIVVTQVKEGGAAHRDGRLSLGDELLVINGHLLVGLSHEEAVAILRSATGMVQLVVASKENSAEDLLRLTSKSLPDLTSSVEDVSSWTDNEDQEADGEEDEGTSSSVQRAMPGTDEPQDVCGAEESKGNLESPKQGSNKIKLKSRLSGGVHRLESVEEYNELMVRNGDPRIRMLEVSRDGRKHSLPQLLDSSSASQEYHIVKKSTRSLSTTQVESPWRLIRPSVISIIGLYKEKGKGLGFSIAGGRDCIRGQMGIFVKTIFPNGSAAEDGRLKEGDEILDVNGIPIKGLTFQEAIHTFKQIRSGLFVLTVRTKLVSPSLTPCSTPTHMSRSASPNFNTSGGASAGGSDEGSSSSLGRKTPGPKDRIVMEVTLNKEPRVGLGIGACCLALENSPPGIYIHSLAPGSVAKMESNLSRGDQILEVNSVNVRHAALSKVHAILSKCPPGPVRLVIGRHPNPKNLQALDWTISMTLSVSR

SEQ ID NO: 8032 - protein, 267 aa, Artificial Sequence
  Synthetic polypeptide
MLGKGVVGGGGGTKAPKPSFVSYVRPEEIHTNEKEVTEKEVTLHLLPGEQLLCEASTVLKYVQEDSCQHGVYGRLVCTDFKIAFLGDDESALDNDETQFKNKVIGENDITLHCVDQIYGVFDEKKKTLFGQLKKYPEKLIIHCKDLRVFQFCLRYTKEEEVKRIVSGIIHHTQAPKLLKRLFLFSYATAAQNNTVTDPKNHTVMFDTLKDWCWELERTKGNMKYKAVSVNEGYKVCESSVKLKDAVFAHCYVLSVTRWLASKRSSIN

SEQ ID NO: 8033 - protein, 661 aa, Artificial Sequence
  Synthetic polypeptide
MFEEKASSPSGKMGGEEKPIGAGEEKQKEGGKKKNKEGSGDGGRAELNPWPEYIYTRLEMYNILKAEHDSILAEKAEKDSKPIKVTLPDGKQVDAESWKTTPYQIACGISQGLADNTVIAKVNNVVWDLDRPLEEDCTLELLKFEDEEAQAVYWHSSAHIMGEAMERVYGGCLCYGPPIENGFYYDMYLEEGGVSSNDFSSLEALCKKIIKEKQAFERLEVKKETLLAMFKYNKFKCRILNEKVNTPTTTVYRCGPLIDLCRGPHVRHTGKIKALKIHKNSSTYWEGKADMETLQRIYGISFPDPKMLKEWEKFQEEAKNRDHRKIGRDQELYFFHELSPGSCFFLPKGAYIYNALIEFIRSEYRKRGFQEVVTPNIFNSRLWMTSGHWQHYSENMFSFEVEKELFALKPMNCPGHCLMFDHRPRSWRELPLRLADFGVLHRNELSGALTGLTRVRRFQQDDAHIFCAMEQIEDEIKGCLDFLRTVYSVFGFSFKLNLSTRPEKFLGDIEVWDQAEKQLENSLNEFGEKWELNSGDGAFYGPKIDIQIKDAIGRYHQCATIQLDFQLPIRFNLTYVSHDGDDKKRPVIVHRAILGSVERMIAILTENYGGKWPFWLSPRQVMVVPVGPTCDEYAQKTPGSSAFGLLDLYPWFARGLLAFGH

SEQ ID NO: 8034 - protein, 557 aa, Artificial Sequence
  Synthetic polypeptide
MEVELSQGLADNTVIAKVNNVVWDLDRPLEEDCTLELLKFEDEEAQAVYWHSSAHIMGEAMERVYGGCLCYGPPIENGFYYDMYLEEGGVSSNDFSSLEALCKKIIKEKQAFERLEVKKETLLAMFKYNKFKCRILNEKVNTPTTTVYRCGPLIDLCRGPHVRHTGKIKALKIHKNSSTYWEGKADMETLQRIYGISFPDPKMLKEWEKFQEEAKNRDHRKIGRDQELYFFHELSPGSCFFLPKGAYIYNALIEFIRSEYRKRGFQEVVTPNIFNSRLWMTSGHWQHYSENMFSFEVEKELFALKPMNCPGHCLMFDHRPRSWRELPLRLADFGVLHRNELSGALTGLTRVRRFQQDDAHIFCAMEQIEDEIKGCLDFLRTVYSVFGFSFKLNLSTRPEKFLGDIEVWDQAEKQLENSLNEFGEKWELNSGDGAFYGPKIDIQIKDAIGRYHQCATIQLDFQLPIRFNLTYVSHDGDDKKRPVIVHRAILGSVERMIAILTENYGGKWPFWLSPRQVMVVPVGPTCDEYAQKTPGSSAFGLLDLYPWFARGLLAFGH

SEQ ID NO: 8035 - protein, 694 aa, Artificial Sequence
  Synthetic polypeptide
MFEEKASSPSGKMGGEEKPIGAGEEKQKEGGKKKNKEGSGDGGRAELNPWPEYIYTRLEMYNILKAEHDSILAEKAEKDSKPIKVTLPDGKQVDAESWKTTPYQIACGISHTASCKNLSSLASLLASVAIPSSGMPWPPLFFLQGLADNTVIAKVNNVVWDLDRPLEEDCTLELLKFEDEEAQAVYWHSSAHIMGEAMERVYGGCLCYGPPIENGFYYDMYLEEGGVSSNDFSSLEALCKKIIKEKQAFERLEVKKETLLAMFKYNKFKCRILNEKVNTPTTTVYRCGPLIDLCRGPHVRHTGKIKALKIHKNSSTYWEGKADMETLQRIYGISFPDPKMLKEWEKFQEEAKNRDHRKIGRDQELYFFHELSPGSCFFLPKGAYIYNALIEFIRSEYRKRGFQEVVTPNIFNSRLWMTSGHWQHYSENMFSFEVEKELFALKPMNCPGHCLMFDHRPRSWRELPLRLADFGVLHRNELSGALTGLTRVRRFQQDDAHIFCAMEQIEDEIKGCLDFLRTVYSVFGFSFKLNLSTRPEKFLGDIEVWDQAEKQLENSLNEFGEKWELNSGDGAFYGPKIDIQIKDAIGRYHQCATIQLDFQLPIRFNLTYVSHDGDDKKRPVIVHRAILGSVERMIAILTENYGGKWPFWLSPRQVMVVPVGPTCDEYAQKTPGSSAFGLLDLYPWFARGLLAFGH

SEQ ID NO: 8036 - protein, 540 aa, Artificial Sequence
  Synthetic polypeptide
MIPFWQKRQKKIASQLKSLCLMVNRLMRNLGKLHHIKLPVELAMERVYGGCLCYGPPIENGFYYDMYLEEGGVSSNDFSSLEALCKKIIKEKQAFERLEVKKETLLAMFKYNKFKCRILNEKVNTPTTTVYRCGPLIDLCRGPHVRHTGKIKALKIHKNSSTYWEGKADMETLQRIYGISFPDPKMLKEWEKFQEEAKNRDHRKIGRDQELYFFHELSPGSCFFLPKGAYIYNALIEFIRSEYRKRGFQEVVTPNIFNSRLWMTSGHWQHYSENMFSFEVEKELFALKPMNCPGHCLMFDHRPRSWRELPLRLADFGVLHRNELSGALTGLTRVRRFQQDDAHIFCAMEQIEDEIKGCLDFLRTVYSVFGFSFKLNLSTRPEKFLGDIEVWDQAEKQLENSLNEFGEKWELNSGDGAFYGPKIDIQIKDAIGRYHQCATIQLDFQLPIRFNLTYVSHDGDDKKRPVIVHRAILGSVERMIAILTENYGGKWPFWLSPRQVMVVPVGPTCDEYAQKTPGSSAFGLLDLYPWFARGLLAFGH

SEQ ID NO: 8037 - protein, 728 aa, Artificial Sequence
  Synthetic polypeptide
MPCAQRSWLANLSVVAQLLNFGALCYGRQPQPGPVRFPDRRQEHFIKGLPEYHVVGPVRVDASGHFLSYGLHYPITSSRRKRDLDGSEDWVYYRISHEEKDLFFNLTVNQGFLSNSYIMEKRYGNLSHVKMMASSAPLCHLSGTVLQQGTRVGTAALSACHGLTGFFQLPHGDFFIEPVKKHPLVEGGYHPHIVYRRQKVPETKEPTCGLKDSVNISQKQELWREKWERHNLPSRSLSRRSISKERWVETLVVADTKMIEYHGSENVESYILTIMNMVTGLFHNPSIGNAIHIVVVRLILLEEEEQGLKIVHHAEKTLSSFCKWQKSINPKSDLNPVHHDVAVLLTRKDICAGFNRPCETLGLSHLSGMCQPHRSCNINEDSGLPLAFTIAHELGHSFGIQHDGKENDCEPVGRHPYIMSRQLQYDPTPLTWSKCSEEYITRFLDRGWGFCLDDIPKKKGLKSKVIAPGVIYDVHHQCQLQYGPNATFCQEVENVCQTLWCSVKGFCRSKLDAAADGTQCGEKKWCMAGKCITVGKKPESIPGGWGRWSPWSHCSRTCGAGVQSAERLCNNPEPKFGGKYCTGERKRYRLCNVHPCRSEAPTFRQMQCSEFDTVPYKNELYHWFPIFNPAHPCELYCRPIDGQFSEKMLDAVIDGTPCFEGGNSRNVCINGICKMVGCDYEIDSNATEDRCGVCLGDGSSCQTVRKMFKQKEGSGVSTLWKRTLTETS

SEQ ID NO: 8038 - protein, 182 aa, Artificial Sequence
  Synthetic polypeptide
MPCAQRSWLANLSVVAQLLNFGALCYGRQPQPGPVRFPDRRQEHFIKGLPEYHVVGPVRVDASGHFLSYGLHYPITSSRRKRDLDGSEDWVYYRISHEEKDLFFNLTVNQGFLSNSYIMEKRYGNLSHVKMMASSAPLCHLSGTVLQQGTRVGTAALSACHGLVMTKRCVKEASLLDRIFSF

SEQ ID NO: 8039 - protein, 217 aa, Artificial Sequence
  Synthetic polypeptide
MGSNSGQAGRHIYKSLADDGPFDSVEPPKRPTSRLIMHSMAMFGREFCYAVEAAYVTPVLLSVGLPSSLYSIVWFLSPILGFLLQPVVGSASDHCRSRWGRRRPYILTLGVMMLVGMALYLNGATVVAALIANPRRKLVWAISVTMIGVVLFDFAADFIDGPIKAYLFDVCSHQDKEKGLHYHALFTEHQSQLSRPVVLFSDESSVPGSVCCIVGAQ

SEQ ID NO: 8040 - protein, 47 aa, Artificial Sequence
  Synthetic polypeptide
MPRTMIPPGECTYAGRKRRRPLQKQTHCRCSISQDASTSPRGTWGPG

SEQ ID NO: 8041 - protein, 43 aa, Artificial Sequence
  Synthetic polypeptide
MIPPGECTYAGRKRRRPLQKQTHCRCSISQDASTSPRGTWGPG

SEQ ID NO: 8042 - protein, 22 aa, Artificial Sequence
  Synthetic polypeptide
MKSLKAKFRKSDTLPNSKEIKI

SEQ ID NO: 8043 - protein, 461 aa, Artificial Sequence
  Synthetic polypeptide
MKCHYEALGVRRDASEEELKKAYRKLALKWHPDKNLDNAAEAAEQFKLIQAAYDVLSDPQERAWYDNHREALLKGGFDGEYQDDSLDLLRYFTVTCYSGYGDDEKGFYTVYRNVFEMIAKEELESVLEEEVDDFPTFGDSQSDYDTVVHPFYAYWQSFCTQKNFAWKEEYDTRQASNRWEKRAMEKENKKIRDKARKEKNELVRQLVAFIRKRDKRVQAHRKLVEEQNAEKARKAEEMRRQQKLKQAKLVEQYREQSWMTMANLEKELQEMEARYEKEFGDGSDENEMEEHELKDEEDGKDSDEAEDAELYDDLYCPACDKSFKTEKAMKNHEKSKKHREMVALLKQQLEEEEENFSRPQIDENPLDDNSEEEMEDAPKQKLSKKQKKKKQKPAQNYDDNFNVNGPGEGVKVDPEDTNLNQDSAKELEDSPQENVSVTEIIKPCDDPKSEAKRYTHTYVYR

SEQ ID NO: 8044 - protein, 474 aa, Artificial Sequence
  Synthetic polypeptide
MKCHYEALGVRRDASEEELKKAYRKLALKWHPDKNLDNAAEAAEQFKLIQAAYDVLSDPQERAWYDNHREALLKGGFDGEYQDDSLDLLRYFTVTCYSGYGDDEKGFYTVYRNVFEMIAKEELESVLEEEVDDFPTFGDSQSDYDTVVHPFYAYWQSFCTQKNFAWKEEYDTRQASNRWEKRAMEKENKKIRDKARKEKNELVRQLVAFIRKRDKRVQAHRKLVEEQNAEKARKAEEMRRQQKLKQAKLVEQYREQSWMTMANLEKELQEMEARYEKEFGDGSDENEMEEHELKDEEDGKDSDEAEDAELYDDLYCPACDKSFKTEKAMKNHEKSKKHREMVALLKQQLEEEEENFSRPQIDENPLDDNSEEEMEDAPKQKVKYLTFRFIFALRLSKKQKKKKQKPAQNYDDNFNVNGPGEGVKVDPEDTNLNQDSAKELEDSPQENVSVTEIIKPCDDPKSEAKRYTHTYVYR

SEQ ID NO: 8045 - protein, 506 aa, Artificial Sequence
  Synthetic polypeptide
MKCHYEALGVRRDASEEELKKAYRKLALKWHPDKNLDNAAEAAEQFKLIQAAYDVLSDPQERAWYDNHREALLKGGFDGEYQDDSLDLLRYFTVTCYSGYGDDEKGFYTVYRNVFEMIAKEELESVLEEEVDDFPTFGDSQSDYDTVVHPFYAYWQSFCTQKNFAWKEEYDTRQASNRWEKRAMEKENKKIRDKARKEKNELVRQLVAFIRKRDKRVQAHRKLVEEQNAEKARKAEEMRRQQKLKQAKLVEQYREQSWMTMANLEKELQEMEARYEKEFGDGSDENEMEEHELKDEEDGKDSDEAEDAELYDDLYCPACDKSFKTEKAMKNHEKSKKHREMVALLKQQLEEEEENFSRPQIDENPLDDNSEEEMEDAPKQKLSKKQKKKKQKPAQDVPGKDSYLPAAHFQMAWGKKCVLGERRDGESEHKCAKMLLENRQNYDDNFNVNGPGEGVKVDPEDTNLNQDSAKELEDSPQENVSVTEIIKPCDDPKSEAKRYTHTYVYR

SEQ ID NO: 8046 - protein, 122 aa, Artificial Sequence
  Synthetic polypeptide
MPRTMIPPGECTYAGRKRRRPLQKQRPAVGAEKSNPSKRHRDRLNAELDHLASLLPFPPDIISKLDKLSVLRLSVSYLRVKSFFQVKRQRREIHGRNCQKKRNQNLKVWKILSLSTLQKMRR

SEQ ID NO: 8047 - protein, 118 aa, Artificial Sequence
  Synthetic polypeptide
MIPPGECTYAGRKRRRPLQKQRPAVGAEKSNPSKRHRDRLNAELDHLASLLPFPPDIISKLDKLSVLRLSVSYLRVKSFFQVKRQRREIHGRNCQKKRNQNLKVWKILSLSTLQKMRR

SEQ ID NO: 8048 - protein, 80 aa, Artificial Sequence
  Synthetic polypeptide
MAGQRVLLLVGFLLPGVLLSEAAKILTISTVGGSHYLLMDRVSQILQDHGHNVTMLNHKRGPFMPVNPKPKEQSWRHHTT

SEQ ID NO: 8049 - protein, 118 aa, Artificial Sequence
  Synthetic polypeptide
MHRKHLQEIPDLSSNVATSFTWGWDSSKTSELLSGMGVSALEKEEPDSENIPQELLSNLGHPESPPRKRLKSKGSDKDFVIVRRPKLNRENFPVLPGITSQINYLKSELQNLLLGDPN

SEQ ID NO: 8050 - protein, 62 aa, Artificial Sequence
  Synthetic polypeptide
SNLGHPESPPRKRLKSKGSDKDFVIVRRPKLNRENFPVLPGITSQINYLKSELQNLLLGDPN

SEQ ID NO: 8051 - protein, 34 aa, Artificial Sequence
  Synthetic polypeptide
MLLAASKVLDRLKPVIGVNTDPERIVHCGVGQPP

SEQ ID NO: 8052 - protein, 197 aa, Artificial Sequence
  Synthetic polypeptide
MTCYRGFLLGSCCRVAGGRAAALRGPGAGGPAARPRLGGDGGGRRHLGQGQPRELAGCGSRADGGFRPSRVVVVAKTTRYEFEQQRYRYAELSEEDLKQLLALKGSSYSGLLERHHIHTKNVEHIIDSLRNEGIEVRLVKRREYDEETVRWADAVIAAGGDGTMLLAASKVLDRLKPVIGVNTDPERIVHCGVGQPP

SEQ ID NO: 8053 - protein, 3142 aa, Artificial Sequence
  Synthetic polypeptide
MEIRLEILTSTGIKQKKPWPRVSWLGKEKEAVFLLDDKFINEINLLSGKIKKKIPSLQPFLKDVIVLTTSSNDAWLAGVLTTGELFLWNKDQDCLKTIPITEKPKEMIKATVASSLRLYLYVSGNGKRIVLITPSGCIFLWEYLELKNILSSKSLSLAGRWSQVIPEEAVLLPSTEDKEAVVNAVFIKNELFGDCCLCSFTFYSGECLKLTFLAIRWHENVFTSVRSLPYHVHWAQQDCHLCSLIPKCESVKSRGALISAFSRDGLTLAVTLNQKDPKATQVLFINTLNFVTLCGSLKGCSNKSPVVPATLIRSYWVGDISWTHDSLFLACMLKRGSLVLLTCQGELLTLITFGCSIEFGPAEFIPLHPLITYRPQQFTFQDSNNSVDSSASDSDPMRQRFSIKAHSRLPYLVISDGYMVTTLRFLDSLSPSVHMRSLLLDSTQRLEKIYQSVILSKPKGKGLNLRSLNSLRSSLLEHQGNESSADFTVPKFLQAEETINENAADFQDFEAEETNEGRHFPDNLCPFWNKRDDVLCSSMKEGRLEFASMFDTIHAKDDSEETDRTITELHSIQKSLLAAWTIGISKTVTEKNLMLNYIVVCITHFFYILQFIKCPFPKLDLVLSKSSRHNAWILCIFQLFHQCLSIHYWDIRYKQDVGHLIKLTSNTVKLLLTQQQKGQLFSEKLLACFYLLKMVADNLNGVYILQPEVISASADGSKITAQDSLVVPIFQMFQDSGFQKNWSWNSFFKIHPQVVNPVQQPGHRLLILWRILYKKTLWYQAQLNRRVPEADSQLTEKMTHEASTVKSLLCHLQANLQSTGDCLNQTLELKSINGEECFLLGSYEKSVQLWKKALQEIEEKGGRRTYFLQIRYYLSLLYCHLYSYNLNDAQGLCDQLAREILRWSQLPVKENKDFSGAAKSHFECGMVGGVHPEAAVRVVQSMARFMAAYFTNQQLCILPPHHVNVLPPLHIKTEQSFRLIPLQHSKVASVVRDQNLSNVWTVEYALELLFIGGLVPEAVWLAYKLGDWKTSVSIGVAFQLFCKRDSNFMRSKKKSLNLPLRMTPAQIFQEKLQCVLGQPASLEAKNEMGSKYKQFTDPIEEEDANLLFGSVQEVLKASVMADADILSETFQLLIDSAKDFSKRLWGLVPFGLYLPAPPLYCPQPAILSEEDGDDLLLKAEKNNRQKVSGILQRVLLLFRAAQCSFPVAQWYILQLRWARKVMQKIRMKGSLPSLSPFPQSLLNYCKGGIAFFRPGAAGDHKLDEVSIRAIGCFRELCALCWMLHVRDKLSYSCRQYQKARENVKGEKDLEVEFDSCMIEHCLSAVEWAYRMLPFSRFFNMEELIQDIILSLIGELPPIRKVAEIFVKAFPYPEDVRVPLRDKYHSLHQRLRHCVVKGPQTEEMMSVVMHSIQKVRVKALKRVQRNIGSFEVNIWEPIEEEKPDEAPGVDRYSLGTSLSRSTLTELGDSVVHSDADTFSEALSVEEKSRINIYQRNAPNHMELTSIHKPTDKRKMCNQKENPTKKEDHEKLSQNTLPVIGVWEFERDDDEYIKFLDLFLSYILERDLPYSRDADIPFLTSFSGKLREHELNSLLFDVHTTLKRHQSKTKSQNVFRAGSCFVVAPESYESEKSSSLNDEYGMHLENQKLSSSVLVNQGIKPFLQYPSNEVNKNEGMSGLFGLKQRSIYKIQDDTREKCLIQRSSNHIFWTPKSIKTRRCIFKAIQCNDINPQEDLPLALNTFGSIGRLLEWMIRWSNRRLLCDSGITESSSEYSPVIRVKTSTAAILTSLWLLEQPYFATYKAKNAIIKMVENRDTGCQIGPNIERESKSDAGGSVAVATPGGTEERNGQNKSCQNILNRMPTEAKNPDIKEINDDIISITHNTKKEFIDIDENLLEVEAFTEEEMDMHISDYEEDIEESVGGFRSPSLAICMMTLPQQLEEEFTEEVQCQREEPLETIMEEKSTEQKGMIEAFSHPGHTTPQSMQVDTSSEISSAQISTYKEKSSSVPLLISNGVNVASQPPAPTPQKTQRNEFTAQLPDCSESVRQMLQDEMFKLVQLQQINFMSLMQIVGSSFANLPDTQQLVQQSQSVHLGESQESNLRGCGDVEDSNKNLKERFFIKPQSMGENAREPRKNSPHCHEGTIPSGQNSTGNVQNVPHGSIPLCQLNGQPRKKGPIPSSQNLPSTSFYPAPAGNTHLYLLSTPSVVQKAPRLIPHAKTFSPGDGFPLLQFKSKQEFQPLFLHTGSIPQVPFRPLPQPREAWGLSDSFQPALPQRAAQTTPASHLNVSQYNTEARKKEVEQKTWAETVITEIPNHVNLDQYVGQENLTPQQDSSVFIKPEKLFDVKPGTLEISPHHSFGLPLLYLPLKPPNMFPSTSRASITVPSTPIQPIAEERKYPRLSLLHSHLSPENRCKKTQLIPLENLIAFKQSQQKLTHNLFEQGDAGHLQLLKVKIEPPEVRQGKDSKKRQRRRAEKELQEKRCEKLRRKPNVTFRPENSIINNDDSEIIKKPKEQQEHCGSHPLDDFDVPFEMLQDDNTSAGLHFMASVKKKAIGSQDASTNTDPEHEPLTAPQLLVPDVYLNLKLSSEMSEKPWSPSIPHTVTNLELPVREEPSNDNVIKQQSDHLAVPSSAELHYMAASVTNAVPPHNFKSQGLPKPEFRFKGQSTKSDSAEDYLLWKRLQGVSAACPAPSSAAHQLEHLSAKLQKIDEQLLAIQNIAENIEQDFPKPEMLDLHCDKIGPVDHIEFSSGPEFKKTLASKTISISEEVRFLTHMDEEDQSDKKETSEPEFSITENYSGQKTCVFPTADSAVSLSSSSDQNTTSPGMNSSDELCESVSVHPLQMTGLTDIADIIDDLIIKDGVSSEELGLTEQAMGTSRIQHYSGRHSQRTDKERREIQAWMKRKRKERMAKYLNELAEKRGQEHDPFCPRSNPLYMTSREIRLRQKMKHEKDRLLLSEHYSRRISQAYGLMNELLSESVQLPTLPQKPLPNKPSPTQSSSCQHCPSPRGENQHGHSFLINRPGKVKYMSKPSYIHKRKSFGQPQGSPWPHGTATFTIQKKAGGAKAAVRKATQSPVTFQKGSNAPCHSLQHTKKHGSAGLAPQTKQVCVEYEREETVVSPWTIPSEIHKILHESHNSLLQEHG

SEQ ID NO: 8054 - protein, 2040 aa, Artificial Sequence
  Synthetic polypeptide
MADADILSETFQLLIDSAKDFSKRLWGLVPFGLYLPAPPLYCPQPAILSEEDGDDLLLKAEKNNRQKVSGILQRVLLLFRAAQCSFPVAQWYILQLRWARKVMQKIRMKGSLPSLSPFPQSLLNYCKGGIAFFRPGAAGDHKLDEVSIRAIGCFRELCALCWMLHVRDKLSYSCRQYQKARENVKGEKDLEVEFDSCMIEHCLSAVEWAYRMLPFSRFFNMEELIQDIILSLIGELPPIRKVAEIFVKAFPYPEDVRVPLRDKYHSLHQRLRHCVVKGPQTEEMMSVVMHSIQKVRVKALKRVQRNIGSFEVNIWEPIEEEKPDEAPGVDRYSLGTSLSRSTLTELGDSVVHSDADTFSEALSVEEKSRINIYQRNAPNHMELTSIHKPTDKRKMCNQKENPTKKEDHEKLSQNTLPVIGVWEFERDDDEYIKFLDLFLSYILERDLPYSRDADIPFLTSFSGKLREHELNSLLFDVHTTLKRHQSKTKSQNVFRAGSCFVVAPESYESEKSSSLNDEYGMHLENQKLSSSVLVNQGIKPFLQYPSNEVNKNEGMSGLFGLKQRSIYKIQDDTREKCLIQRSSNHIFWTPKSIKTRRCIFKAIQCNDINPQEDLPLALNTFGSIGRLLEWMIRWSNRRLLCDSGITESSSEYSPVIRVKTSTAAILTSLWLLEQPYFATYKAKNAIIKMVENRDTGCQIGPNIERESKSDAGGSVAVATPGGTEERNGQNKSCQNILKMPTEAKNPDIKEINDDIISITHNTKKEFIDIDENLLEVEAFTEEEMDMHISDYEEDIEESVGGFRSPSLAICMMTLPQQLEEEFTEEVQCQREEPLETIMEEKSTEQKGMIEAFSHPGHTTPQSMQVDTSSEISSAQISTYKEKSSSVPLLISNGVNVASQPPAPTPQKTQRNEFTAQLPDCSESVRQMLQDEMFKLVQLQQINFMSLMQIVGSSFANLPDTQQLVQQSQSVHLGESQESNLRGCGDVEDSNKNLKERFFIKPQSMGENAREPRKNSPHCHEGTIPSGQNSTGNVQNVPHGSIPLCQLNGQPRKKGPIPSSQNLPSTSFYPAPAGNTHLYLLSTPSVVQKAPRLIPHAKTFSPGDGFPLLQFKSKQEFQPLFLHTGSIPQVPFRPLPQPREAWGLSDSFQPALPQRAAQTTPASHLNVSQYNTEARKKEVEQKTWAETVITEIPNHVNLDQYVGQENLTPQQDSSVFIKPEKLFDVKPGTLEISPHHSFGLPLLYLPLKPPNMFPSTSRASITVPSTPIQPIAEERKYPRLSLLHSHLSPENRCKKTQLIPLENLIAFKQSQQKLTHNLFEQGDAGHLQLLKVKIEPPEVRQGKDSKKRQRRRAEKELQEKRCEKLRRKPNVTFRPENSIINNDDSEIIKKPKEQQEHCGSHPLDDFDVPFEMLQDDNTSAGLHFMASVKKKAIGSQDASTNTDPEHEPLTAPQLLVPDVYLNLKLSSEMSEKPWSPSIPHTVTNLVGHTYINVIDIEANDLLQELPVREEPSNDNVIKQQSDHLAVPSSAELHYMAASVTNAVPPHNFKSQGLPKPEFRFKGQSTKSDSAEDYLLWKRLQGVSAACPAPSSAAHQLEHLSAKLQKIDEQLLAIQNIAENIEQDFPKPEMLDLHCDKIGPVDHIEFSSGPEFKKTLASKTISISEEVRFLTHMDEEDQSDKKETSEPEFSITENYSGQKTCVFPTADSAVSLSSSSDQNTTSPGMNSSDELCESVSVHPLQMTGLTDIADIIDDLIIKDGVSSEELGLTEQAMGTSRIQHYSGRHSQRTDKERREIQAWMKRKRKERMAKYLNELAEKRGQEHDPFCPRSNPLYMTSREIRLRQKMKHEKDRLLLSEHYSRRISQAYGLMNELLSESVQLPTLPQKPLPNKPSPTQSSSCQHCPSPRGENQHGHSFLINRPGKVKYMSKPSYIHKRKSFGQPQGSPWPHGTATFTIQKKAGGAKAAVRKATQSPVTFQKGSNAPCHSLQHTKKHGSAGLAPQTKQVCVEYEREETVVSPWTIPSEIHKILHESHNSLLQEHG

SEQ ID NO: 8055 - protein, 2208 aa, Artificial Sequence
  Synthetic polypeptide
QQLCILPPHHVNVLPPLHIKTEQSFRLIPLQHSKVASVVRDQNLSNVWTVEYALELLFIGGLVPEAVWLAYKLGDWKTSVSIGVAFQLFCKRDSNFMRSKKKSLNLPLRMTPAQIFQEKLQCVLGQPASLEAKNEMGSKYKQFTDPIEEEDANLLFGSVQEVLKASVMADADILSETFQLLIDSAKDFSKRLWGLVPFGLYLPAPPLYCPQPAILSEEDGDDLLLKAEKNNRQKVSGILQRVLLLFRAAQCSFPVAQWYILQLRWARKVMQKIRMKGSLPSLSPFPQSLLNYCKGGIAFFRPGAAGDHKLDEVSIRAIGCFRELCALCWMLHVRDKLSYSCRQYQKARENVKGEKDLEVEFDSCMIEHCLSAVEWAYRMLPFSRFFNMEELIQDIILSLIGELPPIRKVAEIFVKAFPYPEDVRVPLRDKYHSLHQRLRHCVVKGPQTEEMMSVVMHSIQKVRVKALKRVQRNIGSFEVNIWEPIEEEKPDEAPGVDRYSLGTSLSRSTLTELGDSVVHSDADTFSEALSVEEKSRINIYQRNAPNHMELTSIHKPTDKRKMCNQKENPTKKEDHEKLSQNTLPVIGVWEFERDDDEYIKFLDLFLSYILERDLPYSRDADIPFLTSFSGKLREHELNSLLFDVHTTLKRHQSKTKSQNVFRAGSCFVVAPESYESEKSSSLNDEYGMHLENQKLSSSVLVNQGIKPFLQYPSNEVNKNEGMSGLFGLKQRSIYKIQDDTREKCLIQRSSNHIFWTPKSIKTRRCIFKAIQCNDINPQEDLPLALNTFGSIGRLLEWMIRWSNRRLLCDSGITESSSEYSPVIRVKTSTAAILTSLWLLEQPYFATYKAKNAIIKMVENRDTGCQIGPNIERESKSDAGGSVAVATPGGTEERNGQNKSCQNILNRMPTEAKNPDIKEINDDIISITHNTKKEFIDIDENLLEVEAFTEEEMDMHISDYEEDIEESVGGFRSPSLAICMMTLPQQLEEEFTEEVQCQREEPLETIMEEKSTEQKGMIEAFSHPGHTTPQSMQVDTSSEISSAQISTYKEKSSSVPLLISNGVNVASQPPAPTPQKTQRNEFTAQLPDCSESVRQMLQDEMFKLVQLQQINFMSLMQIVGSSFANLPDTQQLVQQSQSVHLGESQESNLRGCGDVEDSNKNLKERFFIKPQSMGENAREPRKNSPHCHEGTIPSGQNSTGNVQNVPHGSIPLCQLNGQPRKKGPIPSSQNLPSTSFYPAPAGNTHLYLLSTPSVVQKAPRLIPHAKTFSPGDGFPLLQFKSKQEFQPLFLHTGSIPQVPFRPLPQPREAWGLSDSFQPALPQRAAQTTPASHLNVSQYNTEARKKEVEQKTWAETVITEIPNHVNLDQYVGQENLTPQQDSSVFIKPEKLFDVKPGTLEISPHHSFGLPLLYLPLKPPNMFPSTSRASITVPSTPIQPIAEERKYPRLSLLHSHLSPENRCKKTQLIPLENLIAFKQSQQKLTHNLFEQGDAGHLQLLKVKIEPPEVRQGKDSKKRQRRRAEKELQEKRCEKLRRKPNVTFRPENSIINNDDSEIIKKPKEQQEHCGSHPLDDFDVPFEMLQDDNTSAGLHFMASVKKKAIGSQDASTNTDPEHEPLTAPQLLVPDVYLNLKLSSEMSEKPWSPSIPHTVTNLVGHTYINVIDIEANDLLQELPVREEPSNDNVIKQQSDHLAVPSSAELHYMAASVTNAVPPHNFKSQGLPKPEFRFKGQSTKSDSAEDYLLWKRLQGVSAACPAPSSAAHQLEHLSAKLQKIDEQLLAIQNIAENIEQDFPKPEMLDLHCDKIGPVDHIEFSSGPEFKKTLASKTISISEEVRFLTHMDEEDQSDKKETSEPEFSITENYSGQKTCVFPTADSAVSLSSSSDQNTTSPGMNSSDELCESVSVHPLQMTGLTDIADIIDDLIIKDGVSSEELGLTEQAMGTSRIQHYSGRHSQRTDKERREIQAWMKRKRKERMAKYLNELAEKRGQEHDPFCPRSNPLYMTSREIRLRQKMKHEKDRLLLSEHYSRRISQAYGLMNELLSESVQLPTLPQKPLPNKPSPTQSSSCQHCPSPRGENQHGHSFLINRPGKVKYMSKPSYIHKRKSFGQPQGSPWPHGTATFTIQKKAGGAKAAVRKATQSPVTFQKGSNAPCHSLQHTKKHGSAGLAPQTKQVCVEYEREETVVSPWTIPSEIHKILHESHNSLLQEHG

SEQ ID NO: 8056 - protein, 1122 aa, Artificial Sequence
  Synthetic polypeptide
MEIRLEILTSTGIKQKKPWPRVSWLGKEKEAVFLLDDKFINEINLLSGKIKKKIPSLQPFLKDVIVLTTSSNDAWLAGVLTTGELFLWNKDQDCLKTIPITEKPKEMIKATVASSLRLYLYVSGNGKRIVLITPSGCIFLWEYLELKNILSSKSLSLAGRWSQVIPEEAVLLPSTEDKEAVVNAVFIKNELFGDCCLCSFTFYSGECLKLTFLAIRWHENVFTSVRSLPYHVHWAQQDCHLCSLIPKCESVKSRGALISAFSRDGLTLAVTLNQKDPKATQVLFINTLNFVTLCGSLKGCSNKSPVVPATLIRSYWVGDISWTHDSLFLACMLKRGSLVLLTCQGELLTLITFGCSIEFGPAEFIPLHPLITYRPQQFTFQDSNNSVDSSASDSDPMRQRFSIKAHSRLPYLVISDGYMVTTLRFLDSLSPSVHMRSLLLDSTQRLEKIYQSVILSKPKGKGLNLRSLNSLRSSLLEHQGNESSADFTVPKFLQAEETINENAADFQDFEAEETNEGRHFPDNLCPFWNKRDDVLCSSMKEGRLEFASMFDTIHAKDDSEETDRTITELHSIQKSLLAAWTIGISKTVTEKNLMLNYIVVCITHFFYILQFIKCPFPKLDLVLSKSSRHNAWILCIFQLFHQCLSIHYWDIRYKQDVGHLIKLTSNTVKLLLTQQQKGQLFSEKLLACFYLLKMVADNLNGVYILQPEVISASADGSKITAQDSLVVPIFQMFQDSGFQKNWSWNSFFKIHPQVVNPVQQPGHRLLILWRILYKKTLWYQAQLNRRVPEADSQLTEKMTHEASTVKSLLCHLQANLQSTGDCLNQTLELKSINGEECFLLGSYEKSVQLWKKALQEIEEKGGRRTYFLQIRYYLSLLYCHLYSYNLNDAQGLCDQLAREILRWSQLPVKENKDFSGAAKSHFECGMVGGVHPEAAVRVVQSMARFMAAYFTNQQLCILPPHHVNVLPPLHIKTEQSFRLIPLQHSKVASVVRDQNLSNVWTVEYALELLFIGGLVPEAVWLAYKLGDWKTSVSIGVAFQLFCKRDSNFMRSKKKSLNLPLRMTPAQIFQEKLQCVLGQPASLEAKNEMGSKYKQFTAKIWKHLKCPSTGEWISKFKYIFKME

SEQ ID NO: 8057 - protein, 127 aa, Artificial Sequence
  Synthetic polypeptide
QQLCILPPHHVNVLPPLHIKTEAVWLAYKLGDWKTSVSIGVAFQLFCKRDSNFMRSKKKSLNLPLRMTPAQIFQEKLQCVLGQPASLEAKNEMGSKYKQFTAKIWKHLKCPSTGEWISKFKYIFKME

SEQ ID NO: 8058 - protein, 170 aa, Artificial Sequence
  Synthetic polypeptide
QQLCILPPHHVNVLPPLHIKTEQSFRLIPLQHSKVASVVRDQNLSNVWTVEYALELLFIGGLVPEAVWLAYKLGDWKTSVSIGVAFQLFCKRDSNFMRSKKKSLNLPLRMTPAQIFQEKLQCVLGQPASLEAKNEMGSKYKQFTAKIWKHLKCPSTGEWISKFKYIFKME

SEQ ID NO: 8059 - protein, 250 aa, Artificial Sequence
  Synthetic polypeptide
MERSGPSEVTGSDASGPDPQLAVTMGFTGFGKKARTFDLEAMFEQTRRTAVERSRKTLEAREKEEEMNREKELRRQNEDIEPTSSRSNVVRDCSKSSSRDTSSSESEQSSDSSDDELIGPPLPPKMVGKPVNFMEEDILGPLPPPLNEEEEEAEEEEEEEEEEENPVHKIPDSHEITLKHGTKTVSALGLDPSGARLVTGGYDYDVKFWDFAGMDASFKAFRSLQPCEWLGAVAHTCNSRTLESRGRRIT

SEQ ID NO: 8060 - protein, 256 aa, Artificial Sequence
  Synthetic polypeptide
MERSGPSEVTGSDASGPDPQLAVTMGFTGFGKKARTFDLEAMFEQTRRTAVERSRKTLEAREKEEEMNREKELRRQNEDIEPTSSRSNVVRDCSKSSSRDTSSSESEQSSDSSDDELIGPPLPPKMVGKPVNFMEEDILGPLPPPLNEEEEEAEEEEEEEEEEENPVHKIPDSHEITLKHGTKTVSALGLDPSGARLVTGGYDYDVKFWDFAGMDASFKAFRSLQPCECSTSKSLSTMIKWASSLGCKAGSTYANQ

SEQ ID NO: 8061 - protein, 122 aa, Artificial Sequence
  Synthetic polypeptide
MPRTMIPPGECTYAGRKRRRPLQKQRPAVGAEKSNPSKRHRDRLNAELDHLASLLPFPPDIISKLDKLSVLRLSVSYLRVKSFFQVVQEQSSRQPAAGAPSPGDSCPLAGSAVLEGRLLLEK

SEQ ID NO: 8062 - protein, 118 aa, Artificial Sequence
  Synthetic polypeptide
MIPPGECTYAGRKRRRPLQKQRPAVGAEKSNPSKRHRDRLNAELDHLASLLPFPPDIISKLDKLSVLRLSVSYLRVKSFFQVVQEQSSRQPAAGAPSPGDSCPLAGSAVLEGRLLLEK

SEQ ID NO: 8063 - protein, 308 aa, Artificial Sequence
  Synthetic polypeptide
MSTPGVNSSASLSPDRLNSPVTIPAVMFIFGVVGNLVAIVVLCKSRKEQKETTFYTLVCGLAVTDLLGTLLVSPVTIATYMKGQWPGGQPLCEYSTFILLFFSLSGLSIICAMSVERYLAINHAYFYSHYVDKRLAGLTLFAVYASNVLFCALPNMGLGSSRLQYPDTWCFIDWTTNVTAHAAYSYMYAGFSSFLILATVLCNVLVCGALLRMHRQFMRRTSLGTEQHHAAAAASVASRGHPAASPALPRLSDFRRRRSFRRIAGAEIQMVILLIATSLVVLICSIPLVFPKLQMKNLYHSATYRVAI

SEQ ID NO: 8064 - protein, 109 aa, Artificial Sequence
  Synthetic polypeptide
MASFGWKRKIGEKVSKVTSQQFEAEAADEKDVVDNDEGNWLHAIKRRKEILLEGCAEKSKQLKDEGASLAENKRCFRFCFLLIVSCHRHVRSAFHPPAMILRPPSHVEL

SEQ ID NO: 8065 - protein, 60 aa, Artificial Sequence
  Synthetic polypeptide
MRRLSSWRKMATAEKQKHDGRVKIGHYILGDTLGVGTFGKVKAQWKRPVKLFPCKKAVIN

SEQ ID NO: 8066 - protein, 51 aa, Artificial Sequence
  Synthetic polypeptide
MATAEKQKHDGRVKIGHYILGDTLGVGTFGKVKAQWKRPVKLFPCKKAVIN

SEQ ID NO: 8067 - protein, 305 aa, Artificial Sequence
  Synthetic polypeptide
MAGSEPRSGTNSPPPPFSDWGRLEAAILSGWKTFWQSVSKERVARTTSREEVDEAASTLTRLPIDVQLYILSFLSPHDLCQLGSTNHYWNETVRDPILWRYFLLRDLPSWSSVDWKSLPDLEILKKPISEVTDGAFFDYMAVYRMCCPYTRRASKSSRPMYGAVTSFLHSLIIQNEPRFAMFGPGLEELNTSLVLSLMSSEELCPTAGLPQRQIDGIGSGVNFQLNNQHKFNILILYSTTRKERDRAREEHTSAVNKMFSRHNEGDDQQGSRYSVIPQIQKVCEVVDGFIYVANAEAHKSAHVKG

SEQ ID NO: 8068 - protein, 101 aa, Artificial Sequence
  Synthetic polypeptide
MEAEETMECLQEFPEHHKMILDRLNEQREQDRFTDITLIVDGHHFKAHKAVLAACSKFFYKFFQEFTQEPLVEIEGKAVLKFIWNHRKSWTSQINLEKEQS

SEQ ID NO: 8069 - protein, 78 aa, Artificial Sequence
  Synthetic polypeptide
MEAEETMECLQEFPEHHKMILDRLNEQREQDRFTDITLIVDGHHFKAHKAVLAACSKFFYKFFQEFTQEPLVEIEELQ

SEQ ID NO: 8070 - protein, 91 aa, Artificial Sequence
  Synthetic polypeptide
MEAEETMECLQEFPEHHKMILDRLNEQREQDRFTDITLIVDGHHFKAHKAVLAACSKFFYKFFQEFTQEPLVEIEALFTVATRGNKYSSTD

SEQ ID NO: 8071 - protein, 567 aa, Artificial Sequence
  Synthetic polypeptide
MKPRARGWRGLAALWMLLAQVAEQAPACAMGPAAAAPGSPSVPRPPPPAERPGWMEKGEYDLVSAYEVDHRGDYVSHEIMHHQRRRRAVPVSEVESLHLRLKGSRHDFHMDLRTSSSLVAPGFIVQTLGKTGTKSVQTLPPEDFCFYQGSLRSHRNSSVALSTCQGLSGMIRTEEADYFLRPLPSHLSWKLGRAAQGSSPSHVLYKRSTEPHAPGASEVLVTSRTWELAHQPLHSSDLRLGLPQKQHFCGRRKKYMPQPPKEDLFILPDEYKSCLRHKRSLLRSHRNEELNVETLVVVDKKMMQNHGHENITTYVLTILNMVSALFKDGTIGGNINIAIVGLILLEDEQPGLVISHHADHTLSSFCQWQSGLMGKDGTRHDHAILLTGLDICSWKNEPCDTLGFAPISGMCSKYRSCTINEDTGLGLAFTIAHESGHNFGMIHDGEGNMCKKSEGNIMSPTLAGRNGVFSWSPCSRQYLHKFLSTAQAICLADQPKPVKEYKYPEKLPGELYDANTQCKWQFGEKAKLCMLDFKKDICKALWCHRIGRKCETKFMPAAEGTICGHDM

SEQ ID NO: 8072 - protein, 40 aa, Artificial Sequence
  Synthetic polypeptide
MGPERTGAAPLPLLLVLALSQDCLWAHSLHRSLSPASLPF

SEQ ID NO: 8073 - protein, 116 aa, Artificial Sequence
  Synthetic polypeptide
MAAVSMSVVLRQTLWRRRAVAVAALSVSRVPTRSLRTSTWRLAQDQTQDTQLITVDEKLPREDACSGFAVKSKSSLRPPQPCFLYSLPNCEPIKPLFFIKYPVSGITLQQCENRLI

SEQ ID NO: 8074 - protein, 112 aa, Artificial Sequence
  Synthetic polypeptide
SMSVVLRQTLWRRRAVAVAALSVSRVPTRSLRTSTWRLAQDQTQDTQLITVDEKLPREDACSGFAVKSKSSLRPPQPCFLYSLPNCEPIKPLFFIKYPVSGITLQQCENRLI

SEQ ID NO: 8075 - protein, 158 aa, Artificial Sequence
  Synthetic polypeptide
MAAVSMSVVLRQTLWRRRAVAVAALSVSRVPTRSLRTSTWRLAQDQTQDTQLITVDEKLDITTLTGVPEEHIKTRKVRIFVPARNNMQSGVNNTKKWKMEFDTRERWENPLMGWASTADPLSNMVLTFSTKEDAVSFAEKNDYGNAVRQKANLSNFLI

SEQ ID NO: 8076 - protein, 2155 aa, Artificial Sequence
  Synthetic polypeptide
MMPGETHSAAPGTAADLSRCQGCASLQQNLNEYVEALITLKQKIINTDNLLTEYQKKCDELQFARRENSNLHHQVEEMLQKISPLQKCQEELGSLKAELEEKKSSLKLYQDTHQEYARVKEECLKSDAQKKKLEAKVKKLQEAAVKQTQDFKQLRNEKKILEKEFKKTQERLDEFSKQKNEKELRHIGTQISSDSYGSIDKRKVKLLLKELWLCVNTTHRLPGEGSRCVPEKPAKAITSSRVPGEDGTLPPTQGSPLRTSNVQTCLTKLSMEIKEDFLCQNVEKQSSSGTNCSSDHVFNENGNLEVLVQSHRDGGSTEFVDHDHFFDEDLQAAIDFFKLPPPLLSPVPSPPPMSSPHPGSLPSSFAPETYFGEYTDSSDNDSVQLRNSAECVSEDDTTESQNYFGSLRKNKGSGTWEEKPKSHEAIQALNTWEVNKVTTSGLETFTATLRESSATHSLVGEKHWTTASRSMSDRKRDILHETKTQMEVREMDKSVQTEKTIHKLTRGLCIERLSASPAQEKEAAPGKSELCSSPLGKRPLNELMESEGKTVLSKMMGSPKSEFTKWTRINEITSEPDRITVSGHFHRLSRELEKEKEDTQGFTLGESPESEDDDSGDGMDVAGLDIETSFSSSSTLVALSVGSNPQSSSGLDCGNDTDITTKVFSTEPHHSEHKLQTKTLNTLHLQSEPPECSIGGNNLENSLCALSPELGASNFNDQKSSGIEYTKVVKGLTKIHSLPRSVFMKATKDGQCESQDPRIELTLNKPDFTSLIGSQAALIKSGLGFVKSTSWHHSDLLRKGGEESLRAKSEHEQKTSHQLQKAMPFLQNRGPTPKPDLLRENNNPVEFKTTASVLPNQVSVITKQTRPEKVQSAKLEHLRPHRVEPTLVTENSGNKTGMSTVAKCDGERDDTTQNITEVAAVKSISPEVSASRRKLDFNSPGGSSPVENSDCSTNSRLSFSPENILIQNQDIVREAAVQGDGQKQRQPQATDLDSSGTHGSEMLPATEVTVSGGFSVEETSCGDTGRSGGEALAVANDSTSTPQNANGLWKLKSTTPGGALPECFGTTDTTFSSAFCRKHGETQDTSQSSLPGTLHCYTGIREGGDDTEVESEAFSCSEGSEQQDAPDDSQKNLGDTDAAVAEVRPSLEVGYLTSALQDFNISTFSELDRLSTSEVVMFLESCQLGDYSSGDSVSECSSKGTLSKEMNKELKASEIGEKYRKQPCEEETLGTCEEWIESEEDDYSLKNTSQLTQCSLETLSEVLTKIRQELQTNSEDCNGKDTGSLLLLNVNNNMTTENLKEKSPFRETTGSSSHASEPTPQAAALDTEGSSPISGMPQNENPQSRPEARSDAGRQTDGGEEDLPEPVEPSALCSDSVMEPSIEQSSNCEAETTFQCQIATVTSEVINVLINKDQNLVIEKGDNWTIISGVAVLPHVDQVTLCDIPGDIPISQDQGELEAGCIPVTSAEKSPEASHTGPAFQEAPCGNNLSCPQEDVSSSGQSTNFDKSRLRNRPVKPSIWISSQIYDQNFETQIVASDHTYYNSKLEPSGKNKNRSKISNKDQSNKPVKTSASSRVETHQSEVAQSFSGEKANTKTQRSQTQTILANADTSTPTDCSPDTLSKIRQEVGPPLPPLLAPLIATPPRTSQPLSPLISSSSPSSPASPVGQVSPFRETPVPPAMSPWPEDPRRASPPDPSPSPSAASASERVVPSPLQFCAATPKHALPVPGRLPPCASGHAAVGGPQENSVKILDTMYPELSARARTLNILKGNIQLTRGPPADCKNLPGPASAMIGFKTITSAATAFVKTGSSSGGDCNQDKSRDLGTQQDSSGKRTLSTSTLRSAKRLRLDTGSPEPETRGVTAEGIHKNLPGNLPPAEVATTNEERSCSSPAVSAVSQLPLSPKETVESHDKAIANALKKIAEFSFDLLPVIRSHVYVGNISKKPVMRDQEKEVVYEFSTTKKHLAECLLHSILSELKIQKISMDHNYIHALCRVYVGICRQLGDLERARLFCYSLLKEDFPESEKLTLFIANMWHDIFLSQSVINKAMQLVARQRAKGEVLNCLRAFLNWEKNAPVDVGFMVSKLLLTIQLCPKTEFQPSEKFGEDLSDNTWEYIFAIDLLCCHQKWIWTHDNIIRNDSGGAEGGLGWLVAYP

SEQ ID NO: 8077 - protein, 2139 aa, Artificial Sequence
  Synthetic polypeptide
MMPGETHSAAPGTAADLSRCQGCASLQQNLNEYVEALITLKQKIINTDNLLTEYQKKCDELQFARRENSNLHHQVEEMLQKISPLQKCQEELGSLKAELEEKKSSLKLYQDTHQEYARVKEECLKSDAQKKKLEAKVKKLQEAAVKQTQDFKQLRNEKKILEKEFKKTQERLDEFSKQKNEKELRHIGTQISSDSYGSIDKRKVKLLLKELWLCVNTTHRLPGEGSRCVPEKPAKAITSSRVPGEDGTLPPTQGSPLRTSNVQTCLTKLSMEIKEDFLCQNVEKQSSSGTNCSSDHVFNENGNLEVLVQSHRDGGSTEFVDHDHFFDEDLQAAIDFFKLPPPLLSPVPSPPPMSSPHPGSLPSSFAPETYFGEYTDSSDNDSVQLRNSAECVSEDDTTESQNYFGSLRKNKGSGTWEEKPKSHEAIQALNTWEVNKVTTSGLETFTATLRESSATHSLVGEKHWTTASRSMSDRKRDILHETKTQMEVREMDKSVQTEKTIHKLTRGLCIERLSASPAQEKEAAPGKSELCSSPLGKRPLNELMESEGKTVLSKMMGSPKSEFTKWTRINEITSEPDRITVSGHFHRLSRELEKEKEDTQGFTLGESPESEDDDSGDGMDVAGLDIETSFSSSSTLVALSVGSNPQSSSGLDCGNDTDITTKVFSTEPHHSEHKLQTKTLNTLHLQSEPPECSIGGNNLENSLCALSPELGASNFNDQKSSGIEYTKVVKGLTKIHSLPRSVFMKATKDGQCESQDPRIELTLNKPDFTSLIGSQAALIKSGLGFVKSTSWHHSDLLRKGGEESLRAKSEHEQKTSHQLQKAMPFLQNRGPTPKPDLLRENNNPVEFKTTASVLPNQVSVITKQTRPEKVQSAKLEHLRPHRVEPTLVTENSGNKTGMSTVAKCDGERDDTTQNITEVAAVKSISPEVSASRRKLDFNSPGGSSPVENSDCSTNSRLSFSPENILIQNQDIVREAAVQGDGQKQRQPQATDLDSSGTHGSEMLPATEVTVSGGFSVEETSCGDTGRSGGEALAVANDSTSTPQNANGLWKLKSTTPGGALPECFGTTDTTFSSAFCRKHGETQDTSQSSLPGTLHCYTGIREGGDDTEVESEAFSCSEGSEQQDAPDDSQKNLGDTDAAVAEVRPSLEVGYLTSALQDFNISTFSELDRLSTSEVVMFLESCQLGDYSSGDSVSECSSKGTLSKEMNKELKASEIGEKYRKQPCEEETLGTCEEWIESEEDDYSLKNTSQLTQCSLETLSEVLTKIRQELQTNSEDCNGKDTGSLLLLNVNNNMTTENLKEKSPFRETTGSSSHASEPTPQAAALDTEGSSPISGMPQNENPQSRPEARSDAGRQTDGGEEDLPEPVEPSALCSDSVMEPSIEQSSNCEAETTFQCQIATVTSEVINVLINKDQNLVIEKGDNWTIISGVAVLPHVDQVTLCDIPGDIPISQDQGELEAGCIPVTSAEKSPEASHTGPAFQEAPCGNNLSCPQEDVSSSGQSTNFDKSRLRNRPVKPSIWISSQIYDQNFETQIVASDHTYYNSKLEPSGKNKNRSKISNKDQSNKPVKTSASSRVETHQSEVAQSFSGEKANTKTQRSQTQTILANADTSTPTDCSPDTLSKIRQEVGPPLPPLLAPLIATPPRTSQPLSPLISSSSPSSPASPVGQVSPFRETPVPPAMSPWPEDPRRASPPDPSPSPSAASASERVVPSPLQFCAATPKHALPVPGRLPPCASGHAAVGGPQENSVKILDTMYPELSARARTLNILKGNIQLTRGPPADCKNLPGPASAMIGFKTITSAATAFVKTGSSSGGDCNQDKSRDLGTQQDSSGKRTLSTSTLRSAKRLRLDTGSPEPETRGVTAEGIHKNLPGNLPPAEVATTNEERSCSSPAVSAVSQLPLSPKETVESHDKAIANALKKIAEFSFDLLPVIRSHVYVGNISKKPVMRDQEKEVVYEFSTTKKHLAECLLHSILSELKIQKISMDHNYIHALCRVYVGICRQLGDLERARLFCYSLLKEDFPESEKLTLFIANMWHDIFLSQSVINKAMQLVARQRAKGEVLNCLRAFLNWEKNAPVDVGFMVSKLLLTIQLCPKTEFQPSEKFGEDLSDNTWEYIFAIDLLCCHQKWIWTHDNIIRS

SEQ ID NO: 8078 - protein, 78 aa, Artificial Sequence
  Synthetic polypeptide
MANMNSDSRHLGTSEVDHERDPGPMNIQFEPSDLRSKSAEIAASARPPPRLGSEERLCLAAHRLGCEEPLCLAAQSGK

SEQ ID NO: 8079 - protein, 77 aa, Artificial Sequence
  Synthetic polypeptide
MANMNSDSRHLGTSEVDHERDPGPMNIQFEPSDLRSKRLECSGVISARYNLHLPAACLGLPKCRDCSLCPAATPSGK

SEQ ID NO: 8080 - protein, 483 aa, Artificial Sequence
  Synthetic polypeptide
MEHRIVGPGPYRATRLWNETVELFRAKMPLRKHRCRFKSYEHCFTAAEAVDWLHELLRCSQNFGPEVTRKQTVQLLKKFLKNHVIEDIKGKWGEEDFEDNRHLYRFPPSSPLKPYPKKPPNQKDVIKFPEWNDLPPGTSQENIPVRPVVMNSEMWYKRHSIAIGEVPACRLVHRRQLTEANVEEIWKSMTLSYLQKILGLDSLEEVLDVKLVNSKFIIHNVYSVSKQGVVILDDKSKELPHWVLSAMKCLANWPNCSDLKQPMYLGFEKDVFKTIADYYGHLKEPLLTFHLFDAFVSVLGLLQKEKVAVEAFQICCLLLPPENRRKLQLLMRMMARICLNKEMPPLCDGFGTRTLMVQTFSRCILCSKDEVDLDELLAARLVTFLMDNYQEILKVPLALQTSIEERVAHLRRVQIKYPGADMDITLSAPSFCRQISPEEFEYQRSYGSQEPLAALLEEVITDAKLSNKEKKKKLKQQNQLKMD

SEQ ID NO: 8081 - protein, 421 aa, Artificial Sequence
  Synthetic polypeptide
MEHRIVGPGPYRATRLWNETVELFRAKMPLRKHRCRFKSYEHCFTAAEAVDWLHELLRCSQNFGPEVTRKQTVQLLKKFLKNHVIEDIKGKWGEEDFEDNRHLYRFPPSSPLKPYPKKPPNQKDVIKFPEWNDLPPGTSQENIPVRPVVMNSEMWYKRHSIAIGEVPACRLVHRRQLTEANVEEIWKSMTLSYLQKILGLDSLEEVLDVKLVNSKFIIHNVYSVSKQGVVILDDKSKELPHWVLSAMKCLANWPNCSDLKQPMYLGFEKDVFKTIADYYGHLKEPLLTFHLFDAFVSVLGLLQKEKVAVEAFQICCLLLPPENRRKLQLLMRMMARICLNKEMPPLCDGFGTRTLMVQTFSRCILCSKDEVDLDELLAARLVTFLMDNYQEILKVPLALQTSIEERVAHLRRVQQNQLKMD

SEQ ID NO: 8082 - protein, 394 aa, Artificial Sequence
  Synthetic polypeptide
MPLRKHRCRFKSYEHCFTAAEAVDWLHELLRCSQNFGPEVTRKQTVQLLKKFLKNHVIEDIKGKWGEEDFEDNRHLYRFPPSSPLKPYPKKPPNQKDVIKFPEWNDLPPGTSQENIPVRPVVMNSEMWYKRHSIAIGEVPACRLVHRRQLTEANVEEIWKSMTLSYLQKILGLDSLEEVLDVKLVNSKFIIHNVYSVSKQGVVILDDKSKELPHWVLSAMKCLANWPNCSDLKQPMYLGFEKDVFKTIADYYGHLKEPLLTFHLFDAFVSVLGLLQKEKVAVEAFQICCLLLPPENRRKLQLLMRMMARICLNKEMPPLCDGFGTRTLMVQTFSRCILCSKDEVDLDELLAARLVTFLMDNYQEILKVPLALQTSIEERVAHLRRVQQNQLKMD

SEQ ID NO: 8083 - protein, 330 aa, Artificial Sequence
  Synthetic polypeptide
MEHRIVGPGPYRATRLWNETVELFRAKMPLRKHRCRFKSYEHCFTAAEAVDWLHELLRCSQNFGPEVTRKQTVQLLKKFLKNHVIEDIKGKWGEEDFEDNRHLYRFPPSSPLKPYPKKPPNQKDVIKFPEWNDLPPGTSQENIPVRPVVMNSEMWYKRHSIAIGEVPACRLVHRRQLTEANVEEIWKSMTLSYLQKILGLDSLEEVLDVKLVNSKFIIHNVYSVSKQGVVILDDKSKELPHWVLSAMKCLANWPNCSDLKQPMYLGFEKDVFKTIADYYGHLKEPLLTFHLFDAFVSVLGTWMKLETIILSKLSQEQKTKHHIFSLISGS

SEQ ID NO: 8084 - protein, 303 aa, Artificial Sequence
  Synthetic polypeptide
MPLRKHRCRFKSYEHCFTAAEAVDWLHELLRCSQNFGPEVTRKQTVQLLKKFLKNHVIEDIKGKWGEEDFEDNRHLYRFPPSSPLKPYPKKPPNQKDVIKFPEWNDLPPGTSQENIPVRPVVMNSEMWYKRHSIAIGEVPACRLVHRRQLTEANVEEIWKSMTLSYLQKILGLDSLEEVLDVKLVNSKFIIHNVYSVSKQGVVILDDKSKELPHWVLSAMKCLANWPNCSDLKQPMYLGFEKDVFKTIADYYGHLKEPLLTFHLFDAFVSVLGTWMKLETIILSKLSQEQKTKHHIFSLISGS

SEQ ID NO: 8085 - protein, 330 aa, Artificial Sequence
  Synthetic polypeptide
MEHRIVGPGPYRATRLWNETVELFRAKMPLRKHRCRFKSYEHCFTAAEAVDWLHELLRCSQNFGPEVTRKQTVQLLKKFLKNHVIEDIKGKWGEEDFEDNRHLYRFPPSSPLKPYPKKPPNQKDVIKFPEWNDLPPGTSQENIPVRPVVMNSEMWYKRHSIAIGEVPACRLVHRRQLTEANVEEIWKSMTLSYLQKILGLDSLEEVLDVKLVNSKFIIHNVYSVSKQGVVILDDKSKELPHWVLSAMKCLANWPNCSDLKQPMYLGFEKDVFKTIADYYGHLKEPLLTFHLFDAFVSVLALKMWNQPTCPGTDEEIKKMQCVYTVECSSP

SEQ ID NO: 8086 - protein, 303 aa, Artificial Sequence
  Synthetic polypeptide
MPLRKHRCRFKSYEHCFTAAEAVDWLHELLRCSQNFGPEVTRKQTVQLLKKFLKNHVIEDIKGKWGEEDFEDNRHLYRFPPSSPLKPYPKKPPNQKDVIKFPEWNDLPPGTSQENIPVRPVVMNSEMWYKRHSIAIGEVPACRLVHRRQLTEANVEEIWKSMTLSYLQKILGLDSLEEVLDVKLVNSKFIIHNVYSVSKQGVVILDDKSKELPHWVLSAMKCLANWPNCSDLKQPMYLGFEKDVFKTIADYYGHLKEPLLTFHLFDAFVSVLALKMWNQPTCPGTDEEIKKMQCVYTVECSSP

SEQ ID NO: 8087 - protein, 301 aa, Artificial Sequence
  Synthetic polypeptide
MEHRIVGPGPYRATRLWNETVELFRAKMPLRKHRCRFKSYEHCFTAAEAVDWLHELLRCSQNFGPEVTRKQTVQLLKKFLKNHVIEDIKGKWGEEDFEDNRHLYRFPPSSPLKPYPKKPPNQKDVIKFPEWNDLPPGTSQENIPVRPVVMNSEMWYKRHSIAIGEVPACRLVHRRQLTEANVEEIWKSMTLSYLQKILGLDSLEEVLDVKLVNSKFIIHNVYSVSKQGVVILDDKSKELPHWVLSAMKCLANWPNCSDLKQPMYLGFEKDVFKTIADYYGHLKEPLLTFHLFDAFVSVLGC

SEQ ID NO: 8088 - protein, 274 aa, Artificial Sequence
  Synthetic polypeptide
MPLRKHRCRFKSYEHCFTAAEAVDWLHELLRCSQNFGPEVTRKQTVQLLKKFLKNHVIEDIKGKWGEEDFEDNRHLYRFPPSSPLKPYPKKPPNQKDVIKFPEWNDLPPGTSQENIPVRPVVMNSEMWYKRHSIAIGEVPACRLVHRRQLTEANVEEIWKSMTLSYLQKILGLDSLEEVLDVKLVNSKFIIHNVYSVSKQGVVILDDKSKELPHWVLSAMKCLANWPNCSDLKQPMYLGFEKDVFKTIADYYGHLKEPLLTFHLFDAFVSVLGC

SEQ ID NO: 8089 - protein, 65 aa, Artificial Sequence
  Synthetic polypeptide
MEHRIVGPGPYRATRLLPEASPETEQMLAPCFLYTLQNRKLIKPLSFINYPVSGISLQQRKNGLT

SEQ ID NO: 8090 - protein, 86 aa, Artificial Sequence
  Synthetic polypeptide
MLGFLSARQTGLEDPLRLRRAESTRRVLGLELNKDRDVERIHGGGINTLDIEPVEGRYHSLGINQRMKSFNQNDKRDSNLRIDGEQ

SEQ ID NO: 8091 - protein, 57 aa, Artificial Sequence
  Synthetic polypeptide
MLGFLSARQTGLEDPLRLRRAESTRRVLGLELNKDRDVERIHGGGINTLDIEPVEGR

SEQ ID NO: 8092 - protein, 62 aa, Artificial Sequence
  Synthetic polypeptide
MLGFLSARQTGLEDPLRLRRAESTRRVLGLELNKDRDVERIHGGGINTLDIEPVEGRYNKRY

SEQ ID NO: 8093 - protein, 44 aa, Artificial Sequence
  Synthetic polypeptide
MGWSQDLFRALWRSLSREVKEHVGTDQFGNKYYYIPQYKNWRVK

SEQ ID NO: 8094 - protein, 18 aa, Artificial Sequence
  Synthetic polypeptide
NSGTNTTTSRSTRTGELK

SEQ ID NO: 8095 - protein, 46 aa, Artificial Sequence
  Synthetic polypeptide
MGWSQDLFRALWRSLSREVKEHVGTDQFGNKYYYIPQYKNWRGKKI

SEQ ID NO: 8096 - protein, 37 aa, Artificial Sequence
  Synthetic polypeptide
NSGTNTTTSRSTRTGEGKKYNTKMLYSITKIQGYKHA

SEQ ID NO: 8097 - protein, 50 aa, Artificial Sequence
  Synthetic polypeptide
MGWSQDLFRALWRSLSREVKEHVGTDQFGNKYYYIPQYKNWRDYGQSLNL

SEQ ID NO: 8098 - protein, 21 aa, Artificial Sequence
  Synthetic polypeptide
NSGTNTTTSRSTRTGEIMAKV

SEQ ID NO: 8099 - protein, 58 aa, Artificial Sequence
  Synthetic polypeptide
MGWSQDLFRALWRSLSREVKEHVGTDQFGNKYYYIPQYKNWRGEVAAWAAIAWSVIAS

SEQ ID NO: 8100 - protein, 23 aa, Artificial Sequence
  Synthetic polypeptide
MATANFGKIQIGIYVEIKRSDVT

SEQ ID NO: 8101 - protein, 125 aa, Artificial Sequence
  Synthetic polypeptide
MATANFGKIQIGIYVEIKRSDGRIHQAMVTSLNEDNESVTVEWIENGDTKGKEIDLESIFSLNPDLVPDEEIEPSPETPPPPASSAKVNKIVKNRRTVASIKNDPPSRDNRGAVTQACNLHTLGG

SEQ ID NO: 8102 - protein, 105 aa, Artificial Sequence
  Synthetic polypeptide
MGRIHQAMVTSLNEDNESVTVEWIENGDTKGKEIDLESIFSLNPDLVPDEEIEPSPETPPPPASSAKVNKIVKNRRTVASIKNDPPSRDNRGAVTQACNLHTLGG

SEQ ID NO: 8103 - protein, 98 aa, Artificial Sequence
  Synthetic polypeptide
MVTSLNEDNESVTVEWIENGDTKGKEIDLESIFSLNPDLVPDEEIEPSPETPPPPASSAKVNKIVKNRRTVASIKNDPPSRDNRGAVTQACNLHTLGG

SEQ ID NO: 8104 - protein, 764 aa, Artificial Sequence
  Synthetic polypeptide
MDLNSASTVVLQVLTQATSQDTAVLKPAEEQLKQWETQPGFYSVLLNIFTNHTLDINVRWLAVLYFKHGIDRYWRRVAPHALSEEEKTTLRAGLITNFNEPINQIATQIAVLIAKVARLDCPRQWPELIPTLIESVKVQDDLRQHRALLTFYHVTKTLASKRLAADRKLFYDLASGIYNFACSLWNHHTDTFLQEVSSGNEAAILSSLERTLLSLKVLRKLTVNGFVEPHKNMEVMGFLHGIFERLKQFLECSRSIGTDNVCRDRLEKTIILFTKVLLDFLDQHPFSFTPLIQRSLEFSVSYVFTEVGEGVTFERFIVQCMNLIKMIVKNYAYKPSKNFEDSSPETLEAHKIKMAFFTYPTLTEICRRLVSHYFLLTEEELTMWEEDPEGFTVEETGGDSWKYSLRPCTEVLFIDIFHEYNQTLTPVLLEMMQTLQGPTNVEDMNALLIKDAVYNAVGLAAYELFDSVDFDQWFKNQLLPELQVIHNRYKPLRRRVIWLIGQWISVKFKSDLRPMLYEAICNLLQDQDLVVRIETATTLKLTVDDFEFRTDQFLPYLETMFTLLFQLLQQVTECDTKMHVLHVLSCVIERVNMQIRPYVGCLVQYLPLLWKQSEEHNMLRCAILTTLIHLVQGLGADSKNLYPFLLPVIQLSTDVSQPPHVYLLEDGLELWLVTLENSPCITPELLRIFQNMSPLLELSSENLRTCFKIINGYIFLSSTEFLQTYAVGLCQSFCELLKEITTEGQVQVLKGLLPLRSALLPAAL

SEQ ID NO: 8105 - protein, 804 aa, Artificial Sequence
  Synthetic polypeptide
MVQPIIHLGYVVYSLLYLGYKPVQHVTALNTVSSCHKMVSMDLNSASTVVLQVLTQATSQDTAVLKPAEEQLKQWETQPGFYSVLLNIFTNHTLDINVRWLAVLYFKHGIDRYWRRVAPHALSEEEKTTLRAGLITNFNEPINQIATQIAVLIAKVARLDCPRQWPELIPTLIESVKVQDDLRQHRALLTFYHVTKTLASKRLAADRKLFYDLASGIYNFACSLWNHHTDTFLQEVSSGNEAAILSSLERTLLSLKVLRKLTVNGFVEPHKNMEVMGFLHGIFERLKQFLECSRSIGTDNVCRDRLEKTIILFTKVLLDFLDQHPFSFTPLIQRSLEFSVSYVFTEVGEGVTFERFIVQCMNLIKMIVKNYAYKPSKNFEDSSPETLEAHKIKMAFFTYPTLTEICRRLVSHYFLLTEEELTMWEEDPEGFTVEETGGDSWKYSLRPCTEVLFIDIFHEYNQTLTPVLLEMMQTLQGPTNVEDMNALLIKDAVYNAVGLAAYELFDSVDFDQWFKNQLLPELQVIHNRYKPLRRRVIWLIGQWISVKFKSDLRPMLYEAICNLLQDQDLVVRIETATTLKLTVDDFEFRTDQFLPYLETMFTLLFQLLQQVTECDTKMHVLHVLSCVIERVNMQIRPYVGCLVQYLPLLWKQSEEHNMLRCAILTTLIHLVQGLGADSKNLYPFLLPVIQLSTDVSQPPHVYLLEDGLELWLVTLENSPCITPELLRIFQNMSPLLELSSENLRTCFKIINGYIFLSSTEFLQTYAVGLCQSFCELLKEITTEGQVQVLKGLLPLRSALLPAAL

SEQ ID NO: 8106 - protein, 778 aa, Artificial Sequence
  Synthetic polypeptide
MDLNSASTVVLQVLTQATSQDTAVLKPAEEQLKQWETQPGFYSVLLNIFTNHTLDINVRWLAVLYFKHGIDRYWRRVAPHALSEEEKTTLRAGLITNFNEPINQIATQIAVLIAKVARLDCPRQWPELIPTLIESVKVQDDLRQHRALLTFYHVTKTLASKRLAADRKLFYDLASGIYNFACSLWNHHTDTFLQEVSSGNEAAILSSLERTLLSLKVLRKLTVNGFVEPHKNMEVMGFLHGIFERLKQFLECSRSIGTDNVCRDRLEKTIILFTKVLLDFLDQHPFSFTPLIQRSLEFSVSYVFTEVGEGVTFERFIVQCMNLIKMIVKNYAYKPSKNFEDSSPETLEAHKIKMAFFTYPTLTEICRRLVSHYFLLTEEELTMWEEDPEGFTVEETGGDSWKYSLRPCTEVLFIDIFHEYNQTLTPVLLEMMQTLQGPTNVEDMNALLIKDAVYNAVGLAAYELFDSVDFDQWFKNQLLPELQVIHNRYKPLRRRVIWLIGQWISVKFKSDLRPMLYEAICNLLQDQDLVVRIETATTLKLTVDDFEFRTDQFLPYLETMFTLLFQLLQQVTECDTKMHVLHVLSCVIERVNMQIRPYVGCLVQYLPLLWKQSEEHNMLRCAILTTLIHLVQGLGADSKNLYPFLLPVIQLSTDVSQPPHVYLLEDGLELWLVTLENSPCITPELLRIFQNMSPLLELSSENLRTCFKIINGYIFLSSTEFLQTYAVGLCQSFCELLKEITTEGQVQVLKVPWLRPVIPALWEAEVGGSPEVGSLRPA

SEQ ID NO: 8107 - protein, 818 aa, Artificial Sequence
  Synthetic polypeptide
MVQPIIHLGYVVYSLLYLGYKPVQHVTALNTVSSCHKMVSMDLNSASTVVLQVLTQATSQDTAVLKPAEEQLKQWETQPGFYSVLLNIFTNHTLDINVRWLAVLYFKHGIDRYWRRVAPHALSEEEKTTLRAGLITNFNEPINQIATQIAVLIAKVARLDCPRQWPELIPTLIESVKVQDDLRQHRALLTFYHVTKTLASKRLAADRKLFYDLASGIYNFACSLWNHHTDTFLQEVSSGNEAAILSSLERTLLSLKVLRKLTVNGFVEPHKNMEVMGFLHGIFERLKQFLECSRSIGTDNVCRDRLEKTIILFTKVLLDFLDQHPFSFTPLIQRSLEFSVSYVFTEVGEGVTFERFIVQCMNLIKMIVKNYAYKPSKNFEDSSPETLEAHKIKMAFFTYPTLTEICRRLVSHYFLLTEEELTMWEEDPEGFTVEETGGDSWKYSLRPCTEVLFIDIFHEYNQTLTPVLLEMMQTLQGPTNVEDMNALLIKDAVYNAVGLAAYELFDSVDFDQWFKNQLLPELQVIHNRYKPLRRRVIWLIGQWISVKFKSDLRPMLYEAICNLLQDQDLVVRIETATTLKLTVDDFEFRTDQFLPYLETMFTLLFQLLQQVTECDTKMHVLHVLSCVIERVNMQIRPYVGCLVQYLPLLWKQSEEHNMLRCAILTTLIHLVQGLGADSKNLYPFLLPVIQLSTDVSQPPHVYLLEDGLELWLVTLENSPCITPELLRIFQNMSPLLELSSENLRTCFKIINGYIFLSSTEFLQTYAVGLCQSFCELLKEITTEGQVQVLKVPWLRPVIPALWEAEVGGSPEVGSLRPA

SEQ ID NO: 8108 - protein, 351 aa, Artificial Sequence
  Synthetic polypeptide
MSNIYIQEPPTNGKVLLKTTAGDIDIELWSKEAPKACRNFIQLCLEAYYDNTIFHRVVPGFIVQGGDPTGTGSGGESIYGAPFKDEFHSRLRFNRRGLVAMANAGSHDNGSQFFFTLGRADELNNKHTIFGKVTGDTVYNMLRLSEVDIDDDERPHNPHKIKSCEVLFNPFDDIIPREIKRLKKEKPEEEVKKLKPKGTKNFSLLSFGEEAEEEEEEVNRVSQSMKGKSKSSHDLLKDDPHLSSVPVVESEKGDAPDLVDDGEDESAEHDEYIDGDEKNLMRERIAKKLKKDTSANVKSAGEGEVEKKSVSRRKINSRWIKDLNVRPKTIKTLEENLDNPIHDRHGQGLHD

SEQ ID NO: 8109 - protein, 333 aa, Artificial Sequence
  Synthetic polypeptide
MSNIYIQEPPTNGKVLLKTTAGDIDIELWSKEAPKACRNFIQLCLEAYYDNTIFHRVVPGFIVQGGDPTGTGSGGESIYGAPFKDEFHSRLRFNRRGLVAMANAGSHDNGSQFFFTLGRADELNNKHTIFGKVTGDTVYNMLRLSEVDIDDDERPHNPHKIKSCEVLFNPFDDIIPREIKRLKKEKPEEEVKKLKPKGTKNFSLLSFGEEAEEEEEEVNRVSQSMKGKSKSSHDLLKDDPHLSSVPVVESEKGDAPDLVDDGEDESAEHDEYIDGDEKNLMRERIAKKLKKDTSANVKSAGEGEVEKKSVSRRKLLCLTLEPSLQPGPTADLK

SEQ ID NO: 8110 - protein, 507 aa, Artificial Sequence
  Synthetic polypeptide
MEILWKTLTWILSLIMASSEFHSDHRLSYSSQEEFLTYLEHYQLTIPIRVDQNGAFLSFTVKNDKHSRRRRSMDPIDPQQAVSKLFFKLSAYGKHFHLNLTLNTDFVSKHFTVEYWGKDGPQWKHDFLDNCHYTGYLQDQRSTTKVALSNCVGLHGVIATEDEEYFIEPLKNTTEDSKHFSYENGHPHVIYKKSALQQRHLYDHSHCGVSDFTRSGKPWWLNDTSTVSYSLPINNTHIHHRQKRSVSIERFVETLVVADKMMVGYHGRKDIEHYILSVMNIVAKLYRDSSLGNVVNIIVARLIVLTEDQPNLEINHHADKSLDSFCKWQKSILSHQSDGNTIPENGIAHHDNAVLITRYDICTYKNKPCGTLGLASVAGMCEPERSCSINEDIGLGSAFTIAHEIGHNFGMNHDGIGNSCGTKGHEAAKLMAAHITANTNPFSWSACSRDYITSFLDSGRGTCLDNEPPKRDFLYPAVAPGQVYDADEQCRFQYGATSRQCKYGVFR

SEQ ID NO: 8111 - protein, 435 aa, Artificial Sequence
  Synthetic polypeptide
MEILWKTLTWILSLIMASSEFHSDHRLSYSSQEEFLTYLEHYQLTIPIRVDQNGAFLSFTVKNDKHSRRRRSMDPIDPQQAVSKLFFKLSAYGKHFHLNLTLNTDFVSKHFTVEYWGKDGPQWKHDFLDNCHYTGYLQDQRSTTKVALSNCVGLHGVIATEDEEYFIEPLKNTTEDSKHFSYENGHPHVIYKKSALQQRHLYDHSHCGVSDFTRSGKPWWLNDTSTVSYSLPINNTHIHHRQKRSVSIERFVETLVVADKMMVGYHGRKDIEHYILSVMNIVAKLYRDSSLGNVVNIIVARLIVLTEDQPNLEINHHADKSLDSFCKWQKSILSHQSDGNTIPENGIAHHDNAVLITRYDICTYKNKPCGTLGLASVAGMCEPERSCSINEDIGLGSAFTIAHEIGHKDMDEAGNHHPQQTIGRTKNQTLPCSHS

SEQ ID NO: 8112 - protein, 593 aa, Artificial Sequence
  Synthetic polypeptide
MEILWKTLTWILSLIMASSEFHSDHRLSYSSQEEFLTYLEHYQLTIPIRVDQNGAFLSFTVKNDKHSRRRRSMDPIDPQQAVSKLFFKLSAYGKHFHLNLTLNTDFVSKHFTVEYWGKDGPQWKHDFLDNCHYTGYLQDQRSTTKVALSNCVGLHGVIATEDEEYFIEPLKNTTEDSKHFSYENGHPHVIYKKSALQQRHLYDHSHCGVSDFTRSGKPWWLNDTSTVSYSLPINNTHIHHRQKRSVSIERFVETLVVADKMMVGYHGRKDIEHYILSVMNIVAKLYRDSSLGNVVNIIVARLIVLTEDQPNLEINHHADKSLDSFCKWQKSILSHQSDGNTIPENGIAHHDNAVLITRKRSNPPNSFYEASIIVIPKPGKYTTKKENFRPISLMNINAKILNKILANGIQQHIKKLIHHDQVGFIPGMQGLFNIRKSINVIHHINRTKDKNHMIISIDAEKAFDKIQHPFMLKTLNKLRIDGTYLKIIRAIYDKPTANIILNGQKLEAFPWKTGARQGCPLSPLLFNIVLEALARAIRQEKEIKGIQLGKEEVKLSLFADDMIVYLENPIVSAQNLLKLISNFSKVSGYKINV

SEQ ID NO: 8113 - protein, 224 aa, Artificial Sequence
  Synthetic polypeptide
MNQEDLDPDSTTDVGDVTNTEEELIRECEEMWKDMEECQNKLSLIGTETLTDSNAQLSLLIMQVKCLTAELSQWQKKTPETIPLTEDVLITLGKEEFQKLRQDLEMVLSTKESKNEKLKEDLEREQRWLDEQQQIMESLNVLHSELKNKVETFSESRIFNELKTKMLNIKEYKEKLLSTLGEFLEDHFPLPDRSVKKKKKNIQESSVNLITLHEMLEEMYMRSS

SEQ ID NO: 8114 - protein, 194 aa, Artificial Sequence
  Synthetic polypeptide
MWKDMEECQNKLSLIGTETLTDSNAQLSLLIMQVKCLTAELSQWQKKTPETIPLTEDVLITLGKEEFQKLRQDLEMVLSTKESKNEKLKEDLEREQRWLDEQQQIMESLNVLHSELKNKVETFSESRIFNELKTKMLNIKEYKEKLLSTLGEFLEDHFPLPDRSVKKKKKNIQESSVNLITLHEMLEEMYMRSS

SEQ ID NO: 8115 - protein, 161 aa, Artificial Sequence
  Synthetic polypeptide
MWKDMEECQNKLSLIGTETLTDSNAQLSLLIMQVKCLTAELSQWQKKTPETIPLTEDVLITLGKEEFQKLRQDLEMVLSTKESKNEKLKEDLERIFNELKTKMLNIKEYKEKLLSTLGEFLEDHFPLPDRSVKKKKKNIQESSVNLITLHEMLEEMYMRSS

SEQ ID NO: 8116 - protein, 233 aa, Artificial Sequence
  Synthetic polypeptide
MNQEDLDPDSTTDVGDVTNTEEELIRECEEMWKDMEECQNKLSLIGTETLTDSNAQLSLLIMQVKCLTAELSQWQKKTPETIPLTEDVLITLGKEEFQKLRQDLEMVLSTKESKNEKLKEDLEREQRWLDEQQQIMESLNVLHSELKNKVETFSESRIFNELKTKMLNIKEYKEKLLSTLGEFLEDHFPLPDRSVKKKKKNIQESSVNLITLHEMLEIMYDFRRCICVQVDKR

SEQ ID NO: 8117 - protein, 203 aa, Artificial Sequence
  Synthetic polypeptide
MWKDMEECQNKLSLIGTETLTDSNAQLSLLIMQVKCLTAELSQWQKKTPETIPLTEDVLITLGKEEFQKLRQDLEMVLSTKESKNEKLKEDLEREQRWLDEQQQIMESLNVLHSELKNKVETFSESRIFNELKTKMLNIKEYKEKLLSTLGEFLEDHFPLPDRSVKKKKKNIQESSVNLITLHEMLEIMYDFRRCICVQVDKR

SEQ ID NO: 8118 - protein, 170 aa, Artificial Sequence
  Synthetic polypeptide
MWKDMEECQNKLSLIGTETLTDSNAQLSLLIMQVKCLTAELSQWQKKTPETIPLTEDVLITLGKEEFQKLRQDLEMVLSTKESKNEKLKEDLERIFNELKTKMLNIKEYKEKLLSTLGEFLEDHFPLPDRSVKKKKKNIQESSVNLITLHEMLEIMYDFRRCICVQVDKR

SEQ ID NO: 8119 - protein, 246 aa, Artificial Sequence
  Synthetic polypeptide
MNQEDLDPDSTTDVGDVTNTEEELIRECEEMWKDMEECQNKLSLIGTETLTDSNAQLSLLIMQVKCLTAELSQWQKKTPETIPLTEDVLITLGKEEFQKLRQDLEMVLSTKESKNEKLKEDLEREQRWLDEQQQIMESLNVLHSELKNKVETFSESRIFNELKTKMLNIKEYKEKLLSTLGEFLEDHFPLPDRSVKKKKKNIQESSVNLITLHEMLEPAPVASWGAPCEQLKKEEKTRAWFTDGSA

SEQ ID NO: 8120 - protein, 216 aa, Artificial Sequence
  Synthetic polypeptide
MWKDMEECQNKLSLIGTETLTDSNAQLSLLIMQVKCLTAELSQWQKKTPETIPLTEDVLITLGKEEFQKLRQDLEMVLSTKESKNEKLKEDLEREQRWLDEQQQIMESLNVLHSELKNKVETFSESRIFNELKTKMLNIKEYKEKLLSTLGEFLEDHFPLPDRSVKKKKKNIQESSVNLITLHEMLEPAPVASWGAPCEQLKKEEKTRAWFTDGSA

SEQ ID NO: 8121 - protein, 183 aa, Artificial Sequence
  Synthetic polypeptide
MWKDMEECQNKLSLIGTETLTDSNAQLSLLIMQVKCLTAELSQWQKKTPETIPLTEDVLITLGKEEFQKLRQDLEMVLSTKESKNEKLKEDLERIFNELKTKMLNIKEYKEKLLSTLGEFLEDHFPLPDRSVKKKKKNIQESSVNLITLHEMLEPAPVASWGAPCEQLKKEEKTRAWFTDGSA

SEQ ID NO: 8122 - protein, 223 aa, Artificial Sequence
  Synthetic polypeptide
MNQEDLDPDSTTDVGDVTNTEEELIRECEEMWKDMEECQNKLSLIGTETLTDSNAQLSLLIMQVKCLTAELSQWQKKTPETIPLTEDVLITLGKEEFQKLRQDLEMVLSTKESKNEKLKEDLEREQRWLDEQQQIMESLNVLHSELKNKVETFSESRIFNELKTKMLNIKEYKEKLLSTLGEFLEDHFPLPDRSVKKKKKNIQESSVNLITLHEMLEDITPVH

SEQ ID NO: 8123 - protein, 193 aa, Artificial Sequence
  Synthetic polypeptide
MWKDMEECQNKLSLIGTETLTDSNAQLSLLIMQVKCLTAELSQWQKKTPETIPLTEDVLITLGKEEFQKLRQDLEMVLSTKESKNEKLKEDLEREQRWLDEQQQIMESLNVLHSELKNKVETFSESRIFNELKTKMLNIKEYKEKLLSTLGEFLEDHFPLPDRSVKKKKKNIQESSVNLITLHEMLEDITPVH

SEQ ID NO: 8124 - protein, 160 aa, Artificial Sequence
  Synthetic polypeptide
MWKDMEECQNKLSLIGTETLTDSNAQLSLLIMQVKCLTAELSQWQKKTPETIPLTEDVLITLGKEEFQKLRQDLEMVLSTKESKNEKLKEDLERIFNELKTKMLNIKEYKEKLLSTLGEFLEDHFPLPDRSVKKKKKNIQESSVNLITLHEMLEDITPVH

SEQ ID NO: 8125 - protein, 223 aa, Artificial Sequence [sequence omitted]

SEQ ID NO: 8126 - protein, 193 aa, Artificial Sequence
  Synthetic polypeptide
MWKDMEECQNKLSLIGTETLTDSNAQLSLLIMQVKCLTAELSQWQKKTPETIPLTEDVLITLGKEEFQKLRQDLEMVLSTKESKNEKLKEDLEREQRWLDEQQQIMESLNVLHSELKNKVETFSESRIFNELKTKMLNIKEYKEKLLSTLGEFLEDHFPLPDRSVKKKKKNIQESSVNLITLHEMLEGNIVPL

SEQ ID NO: 8127 - protein, 160 aa, Artificial Sequence
  Synthetic polypeptide
MWKDMEECQNKLSLIGTETLTDSNAQLSLLIMQVKCLTAELSQWQKKTPETIPLTEDVLITLGKEEFQKLRQDLEMVLSTKESKNEKLKEDLERIFNELKTKMLNIKEYKEKLLSTLGEFLEDHFPLPDRSVKKKKKNIQESSVNLITLHEMLEGNIVPL

SEQ ID NO: 8128 - protein, 205 aa, Artificial Sequence
  Synthetic polypeptide
MNQEDLDPDSTTDVGDVTNTEEELIRECEEMWKDMEECQNKLSLIGTETLTDSNAQLSLLIMQVKCLTAELSQWQKKTPETIPLTEDVLITLGKEEFQKLRQDLEMVLSTKESKNEKLKEDLEREQRWLDEQQQIMESLNVLHSELKNKVETFSESRIFNELKTKMLNIKEYKEKLLSTLGEFLEDHFPLPDRSVKKKKGNIVPL

SEQ ID NO: 8129 - protein, 175 aa, Artificial Sequence
  Synthetic polypeptide
MWKDMEECQNKLSLIGTETLTDSNAQLSLLIMQVKCLTAELSQWQKKTPETIPLTEDVLITLGKEEFQKLRQDLEMVLSTKESKNEKLKEDLEREQRWLDEQQQIMESLNVLHSELKNKVETFSESRIFNELKTKMLNIKEYKEKLLSTLGEFLEDHFPLPDRSVKKKKGNIVPL

SEQ ID NO: 8130 - protein, 142 aa, Artificial Sequence
  Synthetic polypeptide
MWKDMEECQNKLSLIGTETLTDSNAQLSLLIMQVKCLTAELSQWQKKTPETIPLTEDVLITLGKEEFQKLRQDLEMVLSTKESKNEKLKEDLERIFNELKTKMLNIKEYKEKLLSTLGEFLEDHFPLPDRSVKKKKGNIVPL

SEQ ID NO: 8131 - protein, 16 aa, Artificial Sequence
  Synthetic polypeptide
SHNIRKRRVPKAETRS

SEQ ID NO: 8132 - protein, 114 aa, Artificial Sequence
  Synthetic polypeptide
MNQEDLDPDSTTDVGDVTNTEEELIRECEEMWKDMEECQNKLSLIGTETLTDSNAQLSLLIMQVKCLTAELSQWQKKTPERTKKPPQLKSYYLRNTLRKAIAVISPLMVWAKVH

SEQ ID NO: 8133 - protein, 84 aa, Artificial Sequence
  Synthetic polypeptide
MWKDMEECQNKLSLIGTETLTDSNAQLSLLIMQVKCLTAELSQWQKKTPERTKKPPQLKSYYLRNTLRKAIAVISPLMVWAKVH

SEQ ID NO: 8134 - protein, 116 aa, Artificial Sequence
  Synthetic polypeptide
MTLFQEDLDPDSTTDVGDVTNTEEELIRECEEMWKDMEECQNKLSLIGTETLTDSNAQLSLLIMQVKCLTAELSQWQKKTPERTKKPPQLKSYYLRNTLRKAIAVISPLMVWAKVH

SEQ ID NO: 8135 - protein, 121 aa, Artificial Sequence
  Synthetic polypeptide
MNQEDLDPDSTTDVGDVTNTEEELIRECEEMWKDMEECQNKLSLIGTETLTDSNAQLSLLIMQVKCLTAELSQWQKKTPETLMVMYKEFNVLMSVDATSVLPPRDQEATSTEVLLFKKYTS

SEQ ID NO: 8136 - protein, 91 aa, Artificial Sequence
  Synthetic polypeptide
MWKDMEECQNKLSLIGTETLTDSNAQLSLLIMQVKCLTAELSQWQKKTPETLMVMYKEFNVLMSVDATSVLPPRDQEATSTEVLLFKKYTS

SEQ ID NO: 8137 - protein, 123 aa, Artificial Sequence
  Synthetic polypeptide
MTLFQEDLDPDSTTDVGDVTNTEEELIRECEEMWKDMEECQNKLSLIGTETLTDSNAQLSLLIMQVKCLTAELSQWQKKTPETLMVMYKEFNVLMSVDATSVLPPRDQEATSTEVLLFKKYTS

SEQ ID NO: 8138 - protein, 123 aa, Artificial Sequence
  Synthetic polypeptide
MATLVVNKLGAGVDSGRQGSRGTAVVKVLECGVCEDVFSLQGDKVPRLLLCGHTVCHDCLTRLPLHGRAIRCPFDRQVTDLGQVRWLIPVIQNFARLRWVDHLKSGVQGQPGQNGETPFLLKM

SEQ ID NO: 8139 - protein, 130 aa, Artificial Sequence
  Synthetic polypeptide
MEVNPPKQEHLLALKVMRLTKPTLFTNIPVTCEEKDLPGDLFNQLMRDDPSTVNGAEVLMLGEMLTLPQNFGNIFLGETFSSYISVHNDSNQVVKDILVKQGAVANACNPSTLGGRGGRITRSGDQDHPG

SEQ ID NO: 8140 - protein, 526 aa, Artificial Sequence
  Synthetic polypeptide
MIARCLLAVRSLRRVGGSRILLRMTLGREVMSPLQAMSSYTVAGRNVLRWDLSPEQIKTRTEELIVQTKQVYDAVGMLGIEEVTYENCLQALADVEVKYIVERTMLDFPQHVSSDKEVRAASTEADKRLSRFDIEMSMRGDIFERIVHLQETCDLGKIKPEARRYLEKSIKMGKRNGLHLPEQVQNEIKSMKKRMSELCIDFNKNLNEDDTFLVFSKAELGALPDDFIDSLEKTDDDKYKITLKYPHYFPVMKKCCIPETRRRMEMAFNTRCKEENTIILQQLLPLRTKVAKLLGYSTHADFVLEMNTAKSTSRVTAFLDDLSQKLKPLGEAEREFILNLKKKECKDRGFEYDGKINAWDLYYYMTQTEELKYSIDQEFLKEYFPIEVVTEGLLNTYQELLGLSFEQMTDAHVWNKSVTLYTVKDKATGEVLGQFYLDLYPREGKYNHAACFGLQPGCLLPDGSRMMAVAALVVNFSQPVAGRPSLLRHDEVRTYFHEFGHVMHQICAQKMGTTAILCTSLDDWEN

SEQ ID NO: 8141 - protein, 422 aa, Artificial Sequence
  Synthetic polypeptide
MLDFPQHVSSDKEVRAASTEADKRLSRFDIEMSMRGDIFERIVHLQETCDLGKIKPEARRYLEKSIKMGKRNGLHLPEQVQNEIKSMKKRMSELCIDFNKNLNEDDTFLVFSKAELGALPDDFIDSLEKTDDDKYKITLKYPHYFPVMKKCCIPETRRRMEMAFNTRCKEENTIILQQLLPLRTKVAKLLGYSTHADFVLEMNTAKSTSRVTAFLDDLSQKLKPLGEAEREFILNLKKKECKDRGFEYDGKINAWDLYYYMTQTEELKYSIDQEFLKEYFPIEVVTEGLLNTYQELLGLSFEQMTDAHVWNKSVTLYTVKDKATGEVLGQFYLDLYPREGKYNHAACFGLQPGCLLPDGSRMMAVAALVVNFSQPVAGRPSLLRHDEVRTYFHEFGHVMHQICAQKMGTTAILCTSLDDWEN

SEQ ID NO: 8142 - protein, 125 aa, Artificial Sequence
  Synthetic polypeptide
GLSFEQMTDAHVWNKSVTLYTVKDKATGEVLGQFYLDLYPREGKYNHAACFGLQPGCLLPDGSRMMAVAALVVNFSQPVAGRPSLLRHDEVRTYFHEFGHVMHQICAQKMGTTAILCTSLDDWEN

SEQ ID NO: 8143 - protein, 60 aa, Artificial Sequence
  Synthetic polypeptide
MAFDVSCFFWVVLFSAGCKVITSWDQMCIERACSPSAFCHDCKRLKSSPEAKQMPALCFL

SEQ ID NO: 8144 - protein, 193 aa, Artificial Sequence
  Synthetic polypeptide
MATATGVAEERLLAALAYLQCAVGCAVFARNRQTNSVYGRHALPSHRLRVPARAAWVVQELPSLALPLYQYASESAPRLRSAPNCILLAMFLVHYGHRCLIYPFLMRGGKPMPLLACTMAIMFCTCNGYLQSRYLSHCAVYADDWVTDPRFLIGFGLWLTGMLINIHSDHILRNLRKPGDTGYKIPRGTHPIP

SEQ ID NO: 8145 - protein, 137 aa, Artificial Sequence
  Synthetic polypeptide
MATATGVAEERLLAALAYLQCAVGCAVFARNRQTNSVYGRHALPSHRLRVPARAAWVVQELPSLALPLYQYASESAPRLRSAPNCILLAMFLVHYGHRFWLVVNGHVDKHPFRSYPKESQKTRRYWIQNTKGYAPYT

SEQ ID NO: 8146 - protein, 146 aa, Artificial Sequence
  Synthetic polypeptide
MEHAAQPWRWQRRRGWRRSACWPRSPTCSAPWAARSSRAIVRRTQCTAATRCPATGSECRRGPPGWCRSCPRWPCRSTSTPASPPRVSAARPTASSWPCSSSTTGIGFGLWLTGMLINIHSDHILRNLRKPGDTGYKIPRGTHPIP

SEQ ID NO: 8147 - protein, 425 aa, Artificial Sequence
  Synthetic polypeptide
MSPCPEEAAMRREVVKRIETVVKDLWPTADVQIFGSFSTGLYLPTSDIDLVVFGKWERPPLQLLEQALRKHNVAEPCSIKVLDKATVPIIKLTDQETEVKVDISFNMETGVRAAEFIKNYMKKYSLLPYLILVLKQFLLQRDLNEVFTGGISSYSLILMAISFLQLHPRIDARRADENLGMLLVEFFELYGRNFNYLKTGIRIKEGGAYIAKEEIMKAMTSGYRPSMLCIEDPLLPGNDVGRSSYGAMQVKQVFDYAYIVLSHAVSPLARSYPNRDAESTLGRIIKVTQEVIDYRRWIKEKWGSKAHPSPGMDSRIKIKERIATCNGEQTQNREPESPYGQRLTLSLSSPQLLSSGSSASSVSSLSGSDVDSDTPPCTTPSVYQFSLQAPAPLMAGLPTALPMPSGKPQPTTSRTLIMTTNNQHY

SEQ ID NO: 8148 - protein, 480 aa, Artificial Sequence
  Synthetic polypeptide
MSPCPEEAAMRREVVKRIETVVKDLWPTADVQIFGSFSTGLYLPTSDIDLVVFGKWERPPLQLLEQALRKHNVAEPCSIKVLDKATVPIIKLTDQETEVKVDISFNMETGVRAAEFIKNYMKKYSLLPYLILVLKQFLLQRDLNEVFTGGISSYSLILMAISFLQLHPRIDARRADENLGMLLVEFFELYGRNFNYLKTGIRIKEGGAYIAKEEIMKAMTSGYRPSMLCIEDPLLPGNDVGRSSYGAMQVKQVFDYAYIVLSHAVSPLARSYPNRDAESTLGRIIKVTQEVIDYRRWIKEKWGSKAHPSPGMDSRIKIKERIATCNGEQTQNREPESPYGQRLTLSLSSPQLLSSGSSASSVSSLSGSDVDSDTPPCTTPSVYQFSLQAPAPLMAGLPTALPMPSGKPQPTTSRTLIMTTNNQTRFTIPPPTLGVAPVPCRQAGVEGTASLKAVHHMSSPAIPSASPNPLSSPHLYHKHY

SEQ ID NO: 8149 - protein, 186 aa, Artificial Sequence
  Synthetic polypeptide
MEEKYGGDVLAGPGGGGGLGPVDVPSARLTKYIVLLCFTKFLKAVGLFESYDLLKAVHIVQFIFILKLGTAFFMVLFQKPFSSGKTITKHQWIKIFKHAVAGCIISLLWFFGLTLCGPLRTLLLFEHSDIVVISLLSVLFTSSGGGPAKTRGAAFFIIAVICLLLFDNDDLMAKMAEHPWCGGVCQ

SEQ ID NO: 8150 - protein, 1 aa, Artificial Sequence
  Synthetic polypeptide
H

SEQ ID NO: 8151 - protein, 674 aa, Artificial Sequence
  Synthetic polypeptide
MEEKYGGDVLAGPGGGGGLGPVDVPSARLTKYIVLLCFTKFLKAVGLFESYDLLKAVHIVQFIFILKLGTAFFMVLFQKPFSSGKTITKHQWIKIFKHAVAGCIISLLWFFGLTLCGPLRTLLLFEHSDIVVISLLSVLFTSSGGGPAKTRGAAFFIIAVICLLLFDNDDLMAKMAEHPEGHHDSALTHMLYTAIAFLGVADHKGGVLLLVLALCCKVGFHTASRKLSVDVGGAKRLQALSHLVSVLLLCPWVIVLSVTTESKVESWFSLIMPFATVIFFVMILDFYVDSICSVKMEVSKCARYGSFPIFISALLFGNFWTHPITDQLRAMNKAAHQESTEHVLSGGVVVSAIFFILSANILSSPSKRGQKGTLIGYSPEGTPLYNFMGDAFQHSSQSIPRFIKESLKQILEESDSRQIFYFLCLNLLFTFVELFYGVLTNSLGLISDGFHMLFDCSALVMGLFAALMSRWKATRIFSYGYGRIEILSGFINGLFLIVIAFFVFMESVARLIDPPELDTHMLTPVSVGGLIVNLIGICAFSHAHSHAHGASQGSCHSSDHSHSHHMHGHSDHGHGHSHGSAGGGMNANMRGVFLHVLADTLGSIGVIVSTVLIEQFGWFIADPLCSLFIAILIFLSVVPLIKDACQVLLLRLPPEYEKELHIALEKARRGGSHL

SEQ ID NO: 8152 - protein, 83 aa, Artificial Sequence
  Synthetic polypeptide
MEEQPQMQDADEPADSGGEGRAGGPPQVAGAQAACSEDRMTLLLRLRAQTKQQLLEYKSMVDAKAKTRRSLEAKSLRLAWETK

SEQ ID NO: 8153 - protein, 21 aa, Artificial Sequence
  Synthetic polypeptide
RGPHDPAPQAESTDKTTTLRI

SEQ ID NO: 8154 - protein, 21 aa, Artificial Sequence
  Synthetic polypeptide
RGPHDPAPQAESTDKTTTLRI

SEQ ID NO: 8155 - protein, 103 aa, Artificial Sequence
  Synthetic polypeptide
MEEQPQMQDADEPADSGGEGRAGGPPQVAGAQAACSEDRMTLLLRLRAQTKQQLLEYKSMVDARPGTVTHACNPSTLRSQGGWITRGREFETSLTNMEKPHLY

SEQ ID NO: 8156 - protein, 88 aa, Artificial Sequence
  Synthetic polypeptide
MEEQPQMQDADEPADSGGEGRAGGPPQVAGAQAACSEDRMTLLLRLRAQTKQQLLEYKSMVDASEEKTPEQIMQEKQIEAARHGDSCL

SEQ ID NO: 8157 - protein, 21 aa, Artificial Sequence
  Synthetic polypeptide
RGPHDPAPQAESTDKTTTLRI

SEQ ID NO: 8158 - protein, 12 aa, Artificial Sequence
  Synthetic polypeptide
METDLECSDSRL

SEQ ID NO: 8159 - protein, 105 aa, Artificial Sequence
  Synthetic polypeptide
MALDVKSRAKRYEKLDFLGEGQFATVYKARDKNTNQIVAIKKIKLGHRSEAKDGINRTALREIKLLQELSHPNIIGLLDAFGHKSNISLVFDFMETDLECSDSRL

SEQ ID NO: 8160 - protein, 170 aa, Artificial Sequence
  Synthetic polypeptide
MNQVTDWVDPSFDDFLECSGVSTITATSLGVNNSSHRRKNGPSTLESSRFPARKRGNLSSLEQIYGLENSKEYLSENEPWVDKYKPETQHELAVHKKKIEEVETWLKAQVLERQPKQGGSILLITGPPGCGKTTTLKILSKEHGIQVQEWINPVLPDFQKDDFKGMFNTA

SEQ ID NO: 8161 - protein, 181 aa, Artificial Sequence
  Synthetic polypeptide
MSKTFLRPKVSSTKVTDWVDPSFDDFLECSGVSTITATSLGVNNSSHRRKNGPSTLESSRFPARKRGNLSSLEQIYGLENSKEYLSENEPWVDKYKPETQHELAVHKKKIEEVETWLKAQVLERQPKQGGSILLITGPPGCGKTTTLKILSKEHGIQVQEWINPVLPDFQKDDFKGMFNTA

SEQ ID NO: 8162 - protein, 5 aa, Artificial Sequence
  Synthetic polypeptide
MFNTA

SEQ ID NO: 8163 - protein, 84 aa, Artificial Sequence
  Synthetic polypeptide
MNQHELAVHKKKIEEVETWLKAQVLERQPKQGGSILLITGPPGCGKTTTLKILSKEHGIQVQEWINPVLPDFQKDDFKGMFNTA

SEQ ID NO: 8164 - protein, 349 aa, Artificial Sequence
  Synthetic polypeptide
MDEEPERTKRWEGGYERTWEILKEDESGSLKATIEDILFKAKRKRVFEHHGQVRLGMMRHLYVVVDGSRTMEDQDLKPNRLTCTLKLLEYFVEEYFDQNPISQIGIIVTKSKRAEKLTELSGNPRKHITSLKEAVDMTCHGEPSLYNSLSMAMQTLKHMPGHTSREVLIIFSSLTTCDPSNIYDLIKTLKAAKIRVSVIGLSAEVRVCTVLARETGGTYHVILDESHYKELLTHHLSPPPASSSSECSLIRMGFPQHTIASLSDQDAKPSFSMAHLDGNTEPGLTLGGYFCPQCRAKYCELPVECKICGLTLVSAPHLARSYHHLFPLDAFQEIPLEEYNGERLKNGLG

SEQ ID NO: 8165 - protein, 292 aa, Artificial Sequence
  Synthetic polypeptide
MRHLYVVVDGSRTMEDQDLKPNRLTCTLKLLEYFVEEYFDQNPISQIGIIVTKSKRAEKLTELSGNPRKHITSLKEAVDMTCHGEPSLYNSLSMAMQTLKHMPGHTSREVLIIFSSLTTCDPSNIYDLIKTLKAAKIRVSVIGLSAEVRVCTVLARETGGTYHVILDESHYKELLTHHLSPPPASSSSECSLIRMGFPQHTIASLSDQDAKPSFSMAHLDGNTEPGLTLGGYFCPQCRAKYCELPVECKICGLTLVSAPHLARSYHHLFPLDAFQEIPLEEYNGERLKNGLG

SEQ ID NO: 8166 - protein, 7 aa, Artificial Sequence
  Synthetic polypeptide
MARLWLE

SEQ ID NO: 8167 - protein, 5 aa, Artificial Sequence
  Synthetic polypeptide
MSRFS

SEQ ID NO: 8168 - protein, 347 aa, Artificial Sequence
  Synthetic polypeptide
MAMSSGGSGGGVPEQEDSVLFRRGTGQSDDSDIWDDTALIKAYDKAVASFKHALKNGDICETSGKPKTTPKRKPAKKNKSQKKNTAASLQQWKVGDKCSAIWSEDGCIYPATIASIDFKRETCVVVYTGYGNREEQNLSDLLSPICEVANNIEQNAQENENESQVSTDESENSRSPGNKSDNIKPKSAPWNSFLPPPPPMPGPRLGPGKPGLKFNGPPPPPPPPPPHLLSCWLPPFPSGPPIIPPPPPICPDSLDDADALGSMLISWYMSGYHTGYYMSFPGNSDEVFQQNERVNQEEDDIRSRRYNRGDNLQDACEERSLDPRMIIGQVVHNPAGQKTSRETHSRR

SEQ ID NO: 8169 - protein, 280 aa, Artificial Sequence
  Synthetic polypeptide
MAMSSGGSGGGVPEQEDSVLFRRGTGQSDDSDIWDDTALIKAYDKAVASFKHALKNGDICETSGKPKTTPKRKPAKKNKSQKKNTAASLQQNENESQVSTDESENSRSPGNKSDNIKPKSAPWNSFLPPPPPMPGPRLGPGKPGLKFNGPPPPPPPPPPHLLSCWLPPFPSGPPIIPPPPPICPDSLDDADALGSMLISWYMSGYHTGYYMSFPGNSDEVFQQNERVNQEEDDIRSRRYNRGDNLQDACEERSLDPRMIIGQVVHNPAGQKTSRETHSRR

SEQ ID NO: 8170 - protein, 315 aa, Artificial Sequence
  Synthetic polypeptide
MAMSSGGSGGGVPEQEDSVLFRRGTGQSDDSDIWDDTALIKAYDKAVASFKHALKNGDICETSGKPKTTPKRKPAKKNKSQKKNTAASLQQWKVGDKCSAIWSEDGCIYPATIASIDFKRETCVVVYTGYGNREEQNLSDLLSPICEVANNIEQNAQENENESQVSTDESENSRSPGNKSDNIKPKSAPWNSFLPPPPPMPGPRLGPGKIIPPPPPICPDSLDDADALGSMLISWYMSGYHTGYYMSFPGNSDEVFQQNERVNQEEDDIRSRRYNRGDNLQDACEERSLDPRMIIGQVVHNPAGQKTSRETHSRR

SEQ ID NO: 8171 - protein, 7 aa, Artificial Sequence
  Synthetic polypeptide
MARLWLE

SEQ ID NO: 8172 - protein, 317 aa, Artificial Sequence
  Synthetic polypeptide
MAMSSGGSGGGVPEQEDSVLFRRGTGQSDDSDIWDDTALIKAYDKAVASFKHALKNGDICETSGKPKTTPKRKPAKKNKSQKKNTAASLQQWKVGDKCSAIWSEDGCIYPATIASIDFKRETCVVVYTGYGNREEQNLSDLLSPICEVANNIEQNAQENENESQVSTDESENSRSPGNKSDNIKPKSAPWNSFLPPPPPMPGPRLGPGKIIPPPPPICPDSLDDADALGSMLISWYMSGYHTGYYMSFPGNSDEVFQQNERVNQEEDDIRSRRYNRGDNLQDACEERSLDPRMIIGQVVHNPAGQKTSRETHFKMKM

SEQ ID NO: 8173 - protein, 349 aa, Artificial Sequence
  Synthetic polypeptide
MAMSSGGSGGGVPEQEDSVLFRRGTGQSDDSDIWDDTALIKAYDKAVASFKHALKNGDICETSGKPKTTPKRKPAKKNKSQKKNTAASLQQWKVGDKCSAIWSEDGCIYPATIASIDFKRETCVVVYTGYGNREEQNLSDLLSPICEVANNIEQNAQENENESQVSTDESENSRSPGNKSDNIKPKSAPWNSFLPPPPPMPGPRLGPGKPGLKFNGPPPPPPPPPPHLLSCWLPPFPSGPPIIPPPPPICPDSLDDADALGSMLISWYMSGYHTGYYMSFPGNSDEVFQQNERVNQEEDDIRSRRYNRGDNLQDACEERSLDPRMIIGQVVHNPAGQKTSRETHFKMKM

SEQ ID NO: 8174 - protein, 282 aa, Artificial Sequence
  Synthetic polypeptide
MAMSSGGSGGGVPEQEDSVLFRRGTGQSDDSDIWDDTALIKAYDKAVASFKHALKNGDICETSGKPKTTPKRKPAKKNKSQKKNTAASLQQNENESQVSTDESENSRSPGNKSDNIKPKSAPWNSFLPPPPPMPGPRLGPGKPGLKFNGPPPPPPPPPPHLLSCWLPPFPSGPPIIPPPPPICPDSLDDADALGSMLISWYMSGYHTGYYMSFPGNSDEVFQQNERVNQEEDDIRSRRYNRGDNLQDACEERSLDPRMIIGQVVHNPAGQKTSRETHFKMKM

SEQ ID NO: 8175 - protein, 283 aa, Artificial Sequence
  Synthetic polypeptide
MAMSSGGSGGGVPEQEDSVLFRRGTGQSDDSDIWDDTALIKAYDKAVASFKHALKNGDICETSGKPKTTPKRKPAKKNKSQKKNTAASLQQWKVGDKCSAIWSEDGCIYPATIASIDFKRETCVVVYTGYGNREEQNLSDLLSPICEVANNIEQNAQENENESQVSTDESENSRSPGNKSDNIKPKSAPWNSFLPPPPPMPGPRLGPGKPGLKFNGPPPPPPPPPPHLLSCWLPPFPSGPPIIPPPPPICPDSLDDADALGSMLISWYMSGYHTGYYMGSVEV

SEQ ID NO: 8176 - protein, 216 aa, Artificial Sequence
  Synthetic polypeptide
MAMSSGGSGGGVPEQEDSVLFRRGTGQSDDSDIWDDTALIKAYDKAVASFKHALKNGDICETSGKPKTTPKRKPAKKNKSQKKNTAASLQQNENESQVSTDESENSRSPGNKSDNIKPKSAPWNSFLPPPPPMPGPRLGPGKPGLKFNGPPPPPPPPPPHLLSCWLPPFPSGPPIIPPPPPICPDSLDDADALGSMLISWYMSGYHTGYYMGSVEV

SEQ ID NO: 8177 - protein, 251 aa, Artificial Sequence
  Synthetic polypeptide
MAMSSGGSGGGVPEQEDSVLFRRGTGQSDDSDIWDDTALIKAYDKAVASFKHALKNGDICETSGKPKTTPKRKPAKKNKSQKKNTAASLQQWKVGDKCSAIWSEDGCIYPATIASIDFKRETCVVVYTGYGNREEQNLSDLLSPICEVANNIEQNAQENENESQVSTDESENSRSPGNKSDNIKPKSAPWNSFLPPPPPMPGPRLGPGKIIPPPPPICPDSLDDADALGSMLISWYMSGYHTGYYMGSVEV

SEQ ID NO: 8178 - protein, 317 aa, Artificial Sequence; identical to SEQ ID NO: 8172
  Synthetic polypeptide

SEQ ID NO: 8179 - protein, 349 aa, Artificial Sequence; identical to SEQ ID NO: 8173
  Synthetic polypeptide

SEQ ID NO: 8180 - protein, 282 aa, Artificial Sequence; identical to SEQ ID NO: 8174
  Synthetic polypeptide

SEQ ID NO: 8181 - protein, 104 aa, Artificial Sequence
  Synthetic polypeptide
MPLHIGDFVWDSKVHSLQSSLNIFSLLPTKGRTEHLFFSHILSFHWPAFSSIRLELWINLSRAWWCVPMVPATREAEARNCLNLGGGGCSEPRSLHCTAAWATE

SEQ ID NO: 8182 - protein, 806 aa, Artificial Sequence
  Synthetic polypeptide
MFRRARLSVKPNVRPGVGARGSTASNPQRGRESPRPPDPATDSASKPAEPTDVPTVDFGGAEPQEKAPRSSTEKTGGDNDVEESSRSSSTVSQRRKRISSTSSLVKSSVSVPSESHPLSTINQEAPQPTATSTKEKQPCSDRYRIYKAQKLREMLKEELRKEKKQWKNKYAINESQRPPDRSKMTMRDFIYYLPDNNPMTSSLEQEKKTEKPSTPVQTREQEGKSTPNAEDNEMEEETDDGPLLVPRVKVAEDGSIILDEESLTVEVLRTKGPCVVEENDPIFERGSTTTYSSFRKNYYSKPWSNKETDMFFLAISMVGTDFSMIGQLFPHRARIEIKNKFKREEKTNGWRIDKAFQEKRPFDFDFFAHLLQKVLAEEEKRKQKSVKNHSLKEKKSTKPRKNVKVKKVACEGVNNDPDESMSSRISDTERSQKDAQTVEEESLTLSREDAEQVALEVDLNQKKRRRKKQDGANELGVNNLLENATVQAGPSKGEKHKNKCQAIRPELKEGECSKEQMLSCTQNIDGIVGFASTEKVEKRTDPILSLSNQQDATSVATESSESSTSDLPSFEVGIRALCEVNNAEGSCIEERNVDLKNNSLEIDQTENVKPMLRGRFQRPKPNLSRAGKKSVLSQGKTESESKNSHSKTSVEKNHVEKDKMNTLDILRMETTERENPEAETVSVLGEKNCLQEGSQLKALRPVQVRGRLQKPKPNAGKAAERKEILISQEEIGANVEKNENESCADRDTPQHMEDQSRKDFEEEDVILQPEKNDSFQNVQPDEPKVLNECLRLGMVTHTYNPSTLGG

SEQ ID NO: 8183 - protein, 386 aa, Artificial Sequence
  Synthetic polypeptide
MVRDSMAAAFRPSNRVLLQALQILVYPGVGGSGSVSCRCPLGAKRYLLTDNVVKLKEFQQKKVAVACNLSGTKETYFRNLKKKLTQNKLILKGELITLLHLCESRDHVELAKNVIYRYHAENKNFTLGEYKFGPLFVRLCYELDLEESAVELMKDQHLRGFFSDSTSFNILMDMLFIKGKYKSALQVLIEMKNQDVKFTKDTYVLAFAICYKLNSPESFKICTTLREEALLKGEILSRRASCFAVALALNQNEMAKAVSIFSQIMNPESIACINLNIIIHIQSNMLENLIKTLKNAAEGNLSKFVKRHVFSEEVKSASLPANLVGEALRKWALSSEEMLLQRIQIGTLQILSPFDSILPLLGVYSKNILANIKKLYVQGYLLQSNF

SEQ ID NO: 8184 - protein, 277 aa, Artificial Sequence
  Synthetic polypeptide
MVRDSMAAAFRPSNRVLLQALQILVYPGVGGSGSVSCRCPLGAKRYLLTDNVVKLKEFQQKKVAVACNLSGTKGALQVLIEMKNQDVKFTKDTYVLAFAICYKLNSPESFKICTTLREEALLKGEILSRRASCFAVALALNQNEMAKAVSIFSQIMNPESIACINLNIIIHIQSNMLENLIKTLKNAAEGNLSKFVKRHVFSEEVKSASLPANLVGEALRKWALSSEEMLLQRIQIGTLQILSPFDSILPLLGVYSKNILANIKKLYVQGYLLQSNF

SEQ ID NO: 8185 - protein, 215 aa, Artificial Sequence
  Synthetic polypeptide
MDMLFIKGKYKSALQVLIEMKNQDVKFTKDTYVLAFAICYKLNSPESFKICTTLREEALLKGEILSRRASCFAVALALNQNEMAKAVSIFSQIMNPESIACINLNIIIHIQSNMLENLIKTLKNAAEGNLSKFVKRHVFSEEVKSASLPANLVGEALRKWALSSEEMLLQRIQIGTLQILSPFDSILPLLGVYSKNILANIKKLYVQGYLLQSNF

SEQ ID NO: 8186 - protein, 214 aa, Artificial Sequence
  Synthetic polypeptide
MWNWLKMSFTGALQVLIEMKNQDVKFTKDTYVLAFAICYKLNSPESFKICTTLREEALLKGEILSRRASCFAVALALNQNEMAKAVSIFSQIMNPESIACINLNIIIHIQSNMLENLIKTLKNAAEGNLSKFVKRHVFSEEVKSASLPANLVGEALRKWALSSEEMLLQRIQIGTLQILSPFDSILPLLGVYSKNILANIKKLYVQGYLLQSNF

SEQ ID NO: 8187 - protein, 1397 aa, Artificial Sequence
  Synthetic polypeptide
MELSCSEAPLYGQMMIYAKFDKNVYLPEDAEFYFTYDGSHQRHVMIAERIEDNVLQSSVPGHGLQETVTVSVCLCSEGYSPVTMGSGSVTYVDNMACRLARLLVTQANRLTACSHQTLLTPFALTAGALPALDEELVLALTHLELPLEWTVLGSSSLEVSSHRESLLHLAMRWGLAKLSQFFLCLPGGVQALALPNEEGATPLDLALREGHSKLVEDVTNFQGRWSPSFSRVQLSEEASLHYIHSSETLTLTLNHTAEHLLEADIKLFRKYFWDRAFLVKAFEPEARPEERTAMPSSGAETEEEIKNSVSSRSAAEKEDIKRVKSLVVQHNEHEDQHSLDLDRSFDILKKSKPPSTLLAAGRLSDMLNGGDEVYANCMVIDQVGDLDISYINIEGITATTSPESRGCTLWPQSSKHTLPTETSPSVYPLSENVEGTAHTEAQQSFMSPSSSCASNLNLSFGWHGFEKEQSHLKKRSSSLDALDADSEGEGHSEPSHICYTPGSQSSSRTGIPSGDELDSFETNTEPDFNISRAESLPLSSNLQSKESLLSGVRSRSYSCSSPKISLGKTRLVRELTVCSSSEEQRAYSLSEPPRENRIQEEEWDKYIIPAKSESEKYKVSRTFSFLMNRMTSPRNKSKTKSKDAKDKEKLNRHQFAPGTFSGVLQCLVCDKTLLGKESLQCSNCNANVHKGCKDAAPACTKKFQEKYNKNKPQTILGNSSFRDIPQPGLSLHPSSSVPVGLPTGRRETVGQVHPLSRSVPGTTLESFRRSATSLESESDHNSCRSRSHSDELLQSMGSSPSTESFIMEDVVDSSLWSDLSSDAQEFEAESWSLVVDPSFCNRQEKDVIKRQDVIFELMQTEMHHIQTLFIMSEIFRKGMKEELQLDHSTVDKIFPCLDELLEIHRHFFYSMKERRQESCAGSDRNFVIDRIGDILVQQFSEENASKMKKIYGEFCCHHKEAVNLFKELQQNKKFQNFIKLRNSNLLARRRGIPECILLVTQRITKYPVLVERILQYTKERTEEHKDLRKALCLIKDMIATVDLKVNEYEKNQKWLEILNKIENKTYTKLKNGHVFRKQALMSEERTLLYDGLVYWKTATGRFKDILALLLTDVLLFLQEKDQKYIFAAVDQKPSVISLQKLIAREVANEERGMFLISASSAGPEMYEIHTNSKEERNNWMRRIQQAVESCPEEKGGRTSESDEDKRKAEARVAKIQQCQEILTNQDQQICAYLEEKLHIYAELGELSGFEDVHLEPHLLIKPDPGEPPQAASLLAAALKEAESLQVAVKASQMGAVSQSCEDSCGDSVLADTLSSHDVPGSPTASLVTGGREGRGCSDVDPGIQGVVTDLAVSDAGEKVECRNFPGSSQSEIIQAIQNLTRLLYSLQVPDVKKVGDH

SEQ ID NO: 8188 - protein, 1353 aa, Artificial Sequence
  Synthetic polypeptide
MELSCSEAPLYGQMMIYAKFDKNVYLPEDAEFYFTYDGSHQRHVMIAERIEDNVLQSSVPGHGLQETVTVSVCLCSEGYSPVTMGSGSVTYVDNMACRLARLLVTQANRLTACSHQTLLTPFALTAGALPALDEELVLALTHLELPLEWTVLGSSSLEVSSHRESLLHLAMRWGLAKLSQFFLCLPGGVQALALPNEEGATPLDLALREGHSKLVEDVTNFQGRWSPSFSRVQLSEEASLHYIHSSETLTLTLNHTAEHLLEADIKLFRKYFWDRAFLVKAFEPEARPEERTAMPSSGAETEEEIKNSVSSRSAAEKEDIKRVKSLVVQHNEHEDQHSLDLDRSFDILKKSKPPSTLLAAGRLSDMLNGGDEVYANCMVIDQVGDLDISYINIEGITATTSPESRGCTLWPQSSKHTLPTETSPSVYPLSENVEGTAHTEAQQSFMSPSSSCASNLNLSFGWHGFEKEQSHLKKRSSSLDALDADSEGEGHSEPSHICYTPGSQSSSRTGIPSGDELDSFETNTEPDFNISRAESLPLSSNLQSKESLLSGVRSRSYSCSSPKISLGKTRLVRELTVCSSSEEQRAYSLSEPPRENRIQEEEWDKYIIPAKSESEKYKVSRTFSFLMNRMTSPRNKSKTKSKDAKDKEKLNRHQFAPGTFSGVLQCLVCDKTLLGKESLQCSNCNANVHKGCKDAAPACTKKFQEKYNKNKPQTILGNSSFRDIPQPGLSLHPSSSVPVGLPTGRRETVGQVHPLSRSVPGTTLESFRRSATSLESESDHNSCRSRSHSDELLQSMGSSPSTESFIMEDVVDSSLWSDLSSDAQEFEAESWSLVVDPSFCNRQEKDVIKRQDVIFELMQTEMHHIQTLFIMSEIFRKGMKEELQLDHSTVDKIFPCLDELLEIHRHFFYSMKERRQESCAGSDRNFVIDRIGDILVQQFSEENASKMKKIYGEFCCHHKEAVNLFKELQQNKKFQNFIKLRNSNLLARRRGIPECILLVTQRITKYPVLVERILQYTKERTEEHKDLRKALCLIKDMIATVDLKVNEYEKNQKWLEILNKIENKTYTKLKNGHVFRKQALMSEERTLLYDGLVYWKTATGRFKDILALLLTDVLLFLQEKDQKYIFAAVDQKPSVISLQKLIAREVANEERGMFLISASSAGPEMYEIHTNSKEERNNWMRRIQQAVESCPEEKGGRTSESDEDKRKAEARVAKIQQCQEILTNQDQQICAYLEEKLHIYAELGELSGFEDVHLEPHLLIKPDPGEPPQAASLLAAALKEALVTGGREGRGCSDVDPGIQGVVTDLAVSDAGEKVECRNFPGSSQSEIIQAIQNLTRLLYSLQVPDVKKVGDH

SEQ ID NO: 8189 - protein, 1084 aa, Artificial Sequence
  Synthetic polypeptide
MDSDSDSPFNYSWPSFPKMKIRRRTSKQDRSFDILKKSKPPSTLLAAGRLSDMLNGGDEVYANCMVIDQVGDLDISYINIEGITATTSPESRGCTLWPQSSKHTLPTETSPSVYPLSENVEGTAHTEAQQSFMSPSSSCASNLNLSFGWHGFEKEQSHLKKRSSSLDALDADSEGEGHSEPSHICYTPGSQSSSRTGIPSGDELDSFETNTEPDFNISRAESLPLSSNLQSKESLLSGVRSRSYSCSSPKISLGKTRLVRELTVCSSSEEQRAYSLSEPPRENRIQEEEWDKYIIPAKSESEKYKVSRTFSFLMNRMTSPRNKSKTKSKDAKDKEKLNRHQFAPGTFSGVLQCLVCDKTLLGKESLQCSNCNANVHKGCKDAAPACTKKFQEKYNKNKPQTILGNSSFRDIPQPGLSLHPSSSVPVGLPTGRRETVGQVHPLSRSVPGTTLESFRRSATSLESESDHNSCRSRSHSDELLQSMGSSPSTESFIMEDVVDSSLWSDLSSDAQEFEAESWSLVVDPSFCNRQEKDVIKRQDVIFELMQTEMHHIQTLFIMSEIFRKGMKEELQLDHSTVDKIFPCLDELLEIHRHFFYSMKERRQESCAGSDRNFVIDRIGDILVQQFSEENASKMKKIYGEFCCHHKEAVNLFKELQQNKKFQNFIKLRNSNLLARRRGIPECILLVTQRITKYPVLVERILQYTKERTEEHKDLRKALCLIKDMIATVDLKVNEYEKNQKWLEILNKIENKTYTKLKNGHVFRKQALMSEERTLLYDGLVYWKTATGRFKDILALLLTDVLLFLQEKDQKYIFAAVDQKPSVISLQKLIAREVANEERGMFLISASSAGPEMYEIHTNSKEERNNWMRRIQQAVESCPEEKGGRTSESDEDKRKAEARVAKIQQCQEILTNQDQQICAYLEEKLHIYAELGELSGFEDVHLEPHLLIKPDPGEPPQAASLLAAALKEAESLQVAVKASQMGAVSQSCEDSCGDSVLADTLSSHDVPGSPTASLVTGGREGRGCSDVDPGIQGVVTDLAVSDAGEKVECRNFPGSSQSEIIQAIQNLTRLLYSLQVPDVKKVGDH

SEQ ID NO: 8190 - protein, 317 aa, Artificial Sequence
  Synthetic polypeptide
MIATVDLKVNEYEKNQKWLEILNKIENKTYTKLKNGHVFRKQALMSEERTLLYDGLVYWKTATGRFKDILALLLTDVLLFLQEKDQKYIFAAVDQKPSVISLQKLIAREVANEERGMFLISASSAGPEMYEIHTNSKEERNNWMRRIQQAVESCPEEKGGRTSESDEDKRKAEARVAKIQQCQEILTNQDQQICAYLEEKLHIYAELGELSGFEDVHLEPHLLIKPDPGEPPQAASLLAAALKEALVTGGREGRGCSDVDPGIQGVVTDLAVSDAGEKVECRNFPGSSQSEIIQAIQNLTRLLYSLQVPDVKKVGDH

SEQ ID NO: 8191 - protein, 164 aa, Artificial Sequence
  Synthetic polypeptide
MWQEAMRRRRYLRDRSEEAAGGGDGLPRSRDWLYESYYCMSQQHPLIVFLLLIVMGSCLALLAVFFALGLEVEDHVAFLITVPTALAIFFAIFILVCIESVFKKLLRLFSLVIWICLVAMGYLFMCFGGTVSPWDQQRGWNWRFNDISRAQKDEYHMFSLLCGS

SEQ ID NO: 8192 - protein, 208 aa, Artificial Sequence
  Synthetic polypeptide
MDSTKEKCDSYKDDLLLRMGLNDNKAGMEGLDKEKINKIIMEATKGSRFYGNELKKEKQVNQRIENMMQQKAQITSQQLRKAQLQVDRFAMELEQSRNLSNTIVHIDMDAFYAAVEMRDNPELKDKPIAVGSMSMLMGFSNCRKTSLGLPLILHYGELCNYFIIYYNVIIIGIKCTINVTCLNHLKTITPPVRGKIVFHETSLWCQKG

SEQ ID NO: 8193 - protein, 142 aa, Artificial Sequence
  Synthetic polypeptide
MMQQKAQITSQQLRKAQLQVDRFAMELEQSRNLSNTIVHIDMDAFYAAVEMRDNPELKDKPIAVGSMSMLMGFSNCRKTSLGLPLILHYGELCNYFIIYYNVIIIGIKCTINVTCLNHLKTITPPVRGKIVFHETSLWCQKG

SEQ ID NO: 8194 - protein, 118 aa, Artificial Sequence
  Synthetic polypeptide
MELEQSRNLSNTIVHIDMDAFYAAVEMRDNPELKDKPIAVGSMSMLMGFSNCRKTSLGLPLILHYGELCNYFIIYYNVIIIGIKCTINVTCLNHLKTITPPVRGKIVFHETSLWCQKG

SEQ ID NO: 8195 - protein, 241 aa, Artificial Sequence
  Synthetic polypeptide
MWQEAMRRRRYLRDRSEEAAGGGDGLPRSRDWLYESYYCMSQQHPLIVFLLLIVMGSCLALLAVFFALGLEVEDHVAFLITVPTALAIFFAIFILVCIESVFKKLLRLFSLVIWICLVAMGYLFMCFGGTVSPWDQVSFFLFIIFVVYTMLPFNMRDAIIASVLTSSSHTIVLSVCLSATPGGKEHLVWQRQLGHRHTQKEDHVKTPEEDGHLQSKERGPRRNQLCLHHDCGLLALKTVRK

SEQ ID NO: 8196 - protein, 57 aa, Artificial Sequence
  Synthetic polypeptide
MRSPSAAWLLGAAILLAASLSCSGTIQGRVQWLMPVIPALWEAQVGRSLEIRSSRPA

SEQ ID NO: 8197 - protein, 150 aa, Artificial Sequence
  Synthetic polypeptide
MCHVIVTCRSMLWTLLSIVVAFAELIAFMSADWLIGKARSRGGVEPAGPGGGSPEPYHPTLGIYARCIRNPGVQHFQRDTLCGPYAESFGEIASGFWQATAIFLAVGIFILCMVALVSVFTMCVQSIMKKSIFNVCGLLQGIAGLEFDSV

SEQ ID NO: 8198 - protein, 307 aa, Artificial Sequence
  Synthetic polypeptide
MGPRGAASLPRGPGPRRLLLPVVLPLLLLLLLAPPGSGAGASRPPHLVFLLADDLGWNDVGFHGSRIRTPHLDALAAGGVLLDNYYTQPLCTPSRSQLLTGRYQIRTGLQHQIIWPCQPSCVPLDEKLLPQLLKEAGYTTHMVGKWHLGMYRKECLPTRRGFDTYFGYLLGSEDYYSHERCTLIDALNVTRCALDFRDGEEVATGYKNMYSTNIFTKRAIALITNHPPEKPLFLYLALQSVHEPLQVPEEYLKPYDFIQDKNRHHYAGMVSLMDEAVGNVTAALKSSGLWNNTVFIFSTAGCGGSLL

SEQ ID NO: 8199 - protein, 411 aa, Artificial Sequence
  Synthetic polypeptide
MFPNSILGRPPFTPNHQQHNNFFTLSPTVYSHQQLIDAQFNFQNADLSRAVSLQQLTYGNVSPIQTSASPLFRGRKRLSDEKNLPLDGKRQRFHSPHQEPTVVNQIVPLSGERRYSMPPLFHTHYVPDIVRCVPPFREIAFLEPREITLPEAKDKLSQQILELFETCQQQISDLKKKELCRTQLQREIQLLFPQSRLFLVGSSLNGFGTRSSDGDLCLVVKEEPCFFQVNQKTEARHILTLVHKHFCTRLSGYIERPQLIRAKVPIVKFRDKVSCVEFDLNVNNIVGIRNTFLLRTYAYLENRVRPLVLVIKKWASHHQINDASRGTLSSYSLVLMVLHYLQKPGQRGETLSLLKYKKLAGCGGAHLSSQLVGWLRHENHLNSGGGGCSEPKSCHCTPAWVTERDPVSKKK

SEQ ID NO: 8200 - protein, 407 aa, Artificial Sequence
  Synthetic polypeptide
MFPNSILGRPPFTPNHQQHNNFFTLSPTVYSHQQLIDAQFNFQNADLSRAVSLQQLTYGNVSPIQTSASPLFRGRKRLSDEKNLPLDGKRQRFHSPHQEPTVVNQIVPLSGERRYSMPPLFHTHYVPDIVRCVPPFREIAFLEPREITLPEAKDKLSQQILELFETCQQQISDLKKKELCRTQLQREIQLLFPQSRLFLVGSSLNGFGTRSSDGDLCLVVKEEPVNQKTEARHILTLVHKHFCTRLSGYIERPQLIRAKVPIVKFRDKVSCVEFDLNVNNIVGIRNTFLLRTYAYLENRVRPLVLVIKKWASHHQINDASRGTLSSYSLVLMVLHYLQKPGQRGETLSLLKYKKLAGCGGAHLSSQLVGWLRHENHLNSGGGGCSEPKSCHCTPAWVTERDPVSKKK

SEQ ID NO: 8201 - protein, 426 aa, Artificial Sequence
  Synthetic polypeptide
MFPNSILGRPPFTPNHQQHNNFFTLSPTVYSHQQLIDAQFNFQNADLSRAVSLQQLTYGNVSPIQTSASPLFRGRKRLSDEKNLPLDGKRQRFHSPHQEPTVVNQIVPLSGERRYSMPPLFHTHYVPDIVRCVPPFREIAFLEPREITLPEAKDKLSQQILELFETCQQQISDLKKKELCRTQLQREIQLLFPQSRLFLVGSSLNGFGTRSSDGDLCLVVKEEPCFFQVNQKTEARHILTLVHKHFCTRLSGYIERPQLIRAKVPIVKFRDKVSCVEFDLNVNNIVGIRNTFLLRTYAYLENRVRPLVLVIKKWASHHQINDASRGTLSSYSLVLMVLHYLQTLPEPILPSLQKIYPVLQEVFQKKTLLYEMTAPCMILSPKIFQWDMMWRWKTVIVMIPILCGPKLMCMFVPLFLTKKFKRKKKI

SEQ ID NO: 8202 - protein, 422 aa, Artificial Sequence
  Synthetic polypeptide
MFPNSILGRPPFTPNHQQHNNFFTLSPTVYSHQQLIDAQFNFQNADLSRAVSLQQLTYGNVSPIQTSASPLFRGRKRLSDEKNLPLDGKRQRFHSPHQEPTVVNQIVPLSGERRYSMPPLFHTHYVPDIVRCVPPFREIAFLEPREITLPEAKDKLSQQILELFETCQQQISDLKKKELCRTQLQREIQLLFPQSRLFLVGSSLNGFGTRSSDGDLCLVVKEEPVNQKTEARHILTLVHKHFCTRLSGYIERPQLIRAKVPIVKFRDKVSCVEFDLNVNNIVGIRNTFLLRTYAYLENRVRPLVLVIKKWASHHQINDASRGTLSSYSLVLMVLHYLQTLPEPILPSLQKIYPVLQEVFQKKTLLYEMTAPCMILSPKIFQWDMMWRWKTVIVMIPILCGPKLMCMFVPLFLTKKFKRKKKI

SEQ ID NO: 8203 - protein, 383 aa, Artificial Sequence
  Synthetic polypeptide
MFPNSILGRPPFTPNHQQHNNFFTLSPTVYSHQQLIDAQFNFQNADLSRAVSLQQLTYGNVSPIQTSASPLFRGRKRLSDEKNLPLDGKRQRFHSPHQEPTVVNQIVPLSGERRYSMPPLFHTHYVPDIVRCVPPFREIAFLEPREITLPEAKDKLSQQILELFETCQQQISDLKKKELCRTQLQREIQLLFPQSRLFLVGSSLNGFGTRSSDGDLCLVVKEEPCFFQVNQKTEARHILTLVHKHFCTRLSGYIERPQLIRAKVPIVKFRDKVSCVEFDLNVNNIVGIRNTFLLRTYAYPLPEPILPSLQKIYPVLQEVFQKKTLLYEMTAPCMILSPKIFQWDMMWRWKTVIVMIPILCGPKLMCMFVPLFLTKKFKRKKKI

SEQ ID NO: 8204 - protein, 424 aa, Artificial Sequence
  Synthetic polypeptide
MSAQCCAGQLACCCGSAGCSLCCDCCPRIRQSLSTRFMYALYFILVVVLCCIMMSTTVAHKMKEHIPFFEDMCKGIKAGDTCEKLVGYSAVYRVCFGMACFFFIFCLLTLKINNSKSCRAHIHNGFWFFKLLLLGAMCSGAFFIPDQDTFLNAWRYVGAVGGFLFIGIQLLLLVEFAHKWNKNWTAGTASNKLWYASLALVTLIMYSIATGGLVLMAVFYTQKDSCMENKILLGVNGGLCLLISLVAISPWVQNRQPHSGLLQSGVISCYVTYLTFSALSSKPAEVVLDEHGKNVTICVPDFGQDLYRDENLVTILGTSLLIGCILYSCLTSTTRSSSDALQGRYAAPELEIARCCFCFSPGGEDTEEQQPGKEGPRVIYDEKKGTVYIYSYFHFVFFLASLYVMMTVTNWFKEATQHIQVGPM

SEQ ID NO: 8205 - protein, 422 aa, Artificial Sequence
  Synthetic polypeptide
MSAQCCAGQLACCCGSAGCSLCCDCCPRIRQSLSTRFMYALYFILVVVLCCIMMSTTVAHKMKEHIPFFEDMCKGIKAGDTCEKLVGYSAVYRVCFGMACFFFIFCLLTLKINNSKSCRAHIHNGFWFFKLLLLGAMCSGAFFIPDQDTFLNAWRYVGAVGGFLFIGIQLLLLVEFAHKWNKNWTAGTASNKLWYASLALVTLIMYSIATGGLVLMAVFYTQKDSCMENKILLGVNGGLCLLISLVAISPWVQNRQPHSGLLQSGVISCYVTYLTFSALSSKPAEVDEHGKNVTICVPDFGQDLYRDENLVTILGTSLLIGCILYSCLTSTTRSSSDALQGRYAAPELEIARCCFCFSPGGEDTEEQQPGKEGPRVIYDEKKGTVYIYSYFHFVFFLASLYVMMTVTNWFKEATQHIQVGPM

SEQ ID NO: 8206 - protein, 413 aa, Artificial Sequence
  Synthetic polypeptide
MSAQCCAGQLACCCGSAGCSLCCDCCPRIRQSLSTRFMYALYFILVVVLCCIMMSTTVAHKMKEHIPFFEDMCKGIKAGDTCEKLVGYSAVYRVCFGMACFFFIFCLLTLKINNSKSCRAHIHNGFWFFKLLLLGAMCSGAFFIPDQDTFLNAWRYVGAVGGFLFIGIQLLLLVEFAHKWNKNWTAGTASNKLWYASLALVTLIMYSIATGGLVLMAVFYTQKDSCMENKILLGVNGGLCLLISLVAISPWVQNRQPHSGLLQSGVISCYVTYLTFSALSSKPAEVVLDEHGKNVTICVPDFGQDLYRDENLVTILGTSLLIGCILYSCLTSTTRSSSDALQGRYAAPELEIARCCFCFSPGGEDTEEQQPGKEGPRVIYDEKKGTVYIYSYFHFVFFLASLYVMMTVTNWFK

SEQ ID NO: 8207 - protein, 411 aa, Artificial Sequence
  Synthetic polypeptide
MSAQCCAGQLACCCGSAGCSLCCDCCPRIRQSLSTRFMYALYFILVVVLCCIMMSTTVAHKMKEHIPFFEDMCKGIKAGDTCEKLVGYSAVYRVCFGMACFFFIFCLLTLKINNSKSCRAHIHNGFWFFKLLLLGAMCSGAFFIPDQDTFLNAWRYVGAVGGFLFIGIQLLLLVEFAHKWNKNWTAGTASNKLWYASLALVTLIMYSIATGGLVLMAVFYTQKDSCMENKILLGVNGGLCLLISLVAISPWVQNRQPHSGLLQSGVISCYVTYLTFSALSSKPAEVDEHGKNVTICVPDFGQDLYRDENLVTILGTSLLIGCILYSCLTSTTRSSSDALQGRYAAPELEIARCCFCFSPGGEDTEEQQPGKEGPRVIYDEKKGTVYIYSYFHFVFFLASLYVMMTVTNWFK

SEQ ID NO: 8208 - protein, 1497 aa, Artificial Sequence
  Synthetic polypeptide
MDSYFKAAVSDLDKLLDDFEQNPDEQDYLQDVQNAYDSNHCSVSSELASSQRTSLLPKDQECVNSCASSETSYGTNESSLNEKTLKGLTSIQNEKNVTGLDLLSSVDGGTSDEIQPLYMGRCSKPICDLISDMGNLVHATNSEEDIKKLLPDDFKSNADSLIGLDLSSVSDTPCVSSTDHDSDTVREQQNDISSELQNREIGGIKELGIKVDTTLSDSYNYSGTENLKDKKIFNQLESIVDFNMSSALTRQSSKMFHAKDKLQHKSQPCGLLKDVGLVKEEVDVAVITAAECLKEEGKTSALTCSLPKNEDLCLNDSNSRDENFKLPDFSFQEDKTVIKQSAQEDSKSLDLKDNDVIQDSSSALHVSSKDVPSSLSCLPASGSMCGSLIESKARGDFLPQHEHKDNIQDAVTIHEEIQNSVVLGGEPFKENDLLKQEKCKSILLQSLIEGMEDRKIDPDQTVIRAESLDGGDTSSTVVESQEGLSGTHVPESSDCCEGFINTFSSNDMDGQDLDYFNIDEGAKSGPLISDAELDAFLTEQYLQTTNIKSFEENVNDSKSQMNQIDMKGLDDGNINNIYFNAEAGAIGESHGINIICEIVDKQNTIENGLSLGEKSTIPVQQGLPTSKSEITNQLSVSDINSQSVGGARPKQLFSLPSRTRSSKDLNKPDVPDTIESEPSTADTVVPITCAIDSTADPQVSFNSNYIDIESNSEGGSSFVTANEDSVPENTCKEGLVLGQKQPTWVPDSEAPNCMNCQVKFTFTKRRHHCRACGKVFCGVCCNRKCKLQYLEKEARVCVVCYETISKAQAFERMMSPTGSNLKSNHSDECTTVQPPQENQTSSIPSPATLPVSALKQPGVEGLCSKEQKRVWFADGILPNGEVADTTKLSSGSKRCSEDFSPLSPDVPMTVNTVDHSHSTTVEKPNNETGDITRNEIIQSPISQVPSVEKLSMNTGNEGLPTSGSFTLDDDVFAETEEPSSPTGVLVNSNLPIASISDYRLLCDINKYVCNKISLLPNDEDSLPPLLVASGEKGSVPVVEEHPSHEQIILLLEGESFHPVTFVLNANLLVNVKFIFYSSDKYWYFSTNGLHGLGQAEIIILLLCLPNEDTIPKDIFRLFITIYKDALKGKYIENLDNITFTESFLSSKDHGGFLFITPTFQKLDDLSLPSNPFLCGILIQKLEIPWAKVFPMRLMLRLGAEYKAYPAPLTSIRGRKPLFGEIGHTIMNLLVDLRNYQYTLHNIDQLLIHMEMGKSCIKIPRKKYSDVMKVLNSSNEHVISIGASFSTEADSHLVCIQNDGIYETQANSATGHPRKVTGASFVVFNGALKTSSGFLAKSSIVEDGLMVQITPETMNGLRLALREQKDFKITCGKVDAVDLREYVDICWVDAEEKGNKGVISSVDGISLQGFPSEKIKLEADFETDEKIVKCTEVFYFLKDQDLSILSTSYQFAKEIAMACSAALCPHLKTLKSNGMNKIGLRVSIDTDMYSKRASGKMQ

SEQ ID NO: 8209 - protein, 1498 aa, Artificial Sequence
  Synthetic polypeptide
MDSYFKAAVSDLDKLLDDFEQNPDEQDYLQDVQNAYDSNHCSVSSELASSQRTSLLPKDQECVNSCASSETSYGTNESSLNEKTLKGLTSIQNEKNVTGLDLLSSVDGGTSDEIQPLYMGRCSKPICDLISDMGNLVHATNSEEDIKKLLPDDFKSNADSLIGLDLSSVSDTPCVSSTDHDSDTVREQQNDISSELQNREIGGIKELGIKVDTTLSDSYNYSGTENLKDKKIFNQLESIVDFNMSSALTRQSSKMFHAKDKLQHKSQPCGLLKDVGLVKEEVDVAVITAAECLKEEGKTSALTCSLPKNEDLCLNDSNSRDENFKLPDFSFQEDKTVIKQSAQEDSKSLDLKDNDVIQDSSSALHVSSKDVPSSLSCLPASGSMCGSLIESKARGDFLPQHEHKDNIQDAVTIHEEIQNSVVLGGEPFKENDLLKQEKCKSILLQSLIEGMEDRKIDPDQTVIRAESLDGGDTSSTVVESQEGLSGTHVPESSDCCEGFINTFSSNDMDGQDLDYFNIDEGAKSGPLISDAELDAFLTEQYLQTTNIKSFEENVNDSKSQMNQIDMKGLDDGNINNIYFNAEAGAIGESHGINIICEIVDKQNTIENGLSLGEKSTIPVQQGLPTSKSEITNQLSVSDINSQSVGGARPKQLFSLPSRTRSSKDLNKPDVPDTIESEPSTADTVVPITCAIDSTADPQVSFNSNYIDIESNSEGGSSFVTANEDSVPENTCKEGLVLGQKQPTWVPDSEAPNCMNCQVKFTFTKRRHHCRACGKVFCGVCCNRKCKLQYLEKEARVCVVCYETISKAQAFERMMSPTGSNLKSNHSDECTTVQPPQENQTSSIPSPATLPVSALKQPGVEGLCSKEQKRVWFADGILPNGEVADTTKLSSGSKRCSEDFSPLSPDVPMTVNTVDHSHSTTVEKPNNETGDITRNEIIQSPISQVPSVEKLSMNTGNEGLPTSGSFTLDDDVFAETEEPSSPTGVLVNSNLPIASISDYRLLCDINKYVCNKISLLPNDEDSLPPLLVASGEKGSVPVVEEHPSHEQIILLLEGESFHPVTFVLNANLLVNVKFIFYSSDKYWYFSTNGLHGLGQAEIIILLLCLPNEDTIPKDIFRLFITIYKDALKGKYIENLDNITFTESFLSSKDHGGFLFITPTFQKLDDLSLPSNPFLCGILIQKLEIPWAKVFPMRLMLRLGAEYKAYPAPLTSIRGRKPLFGEIGHTIMNLLVDLRNYQYTLHNIDQLLIHMEMGKSCIKIPRKKYSDVMKVLNSSNEHVISIGASFSTEADSHLVCIQNDGIYETQANSATGHPRKVTGASFVVFNGALKTSSGFLAKSSIVEDGLMVQITPETMNGLRLALREQKDFKITCGKVDAVDLREYVDICWVDAEEKGNKGVISSVDGISLQGFPSEKIKLEADFETDEKIVKCTEVFYFLKDQDLSILSTSYQFAKEIAMACSAALCPHLKTLKSNGMNKIGLRVSIDTDMQSLFRAHTQRK

SEQ ID NO: 8210 - protein, 11 aa, Artificial Sequence
  Synthetic polypeptide
MAASAGGPESL

SEQ ID NO: 8211 - protein, 10 aa, Artificial Sequence
  Synthetic polypeptide
MAASAGGPET

SEQ ID NO: 8212 - protein, 52 aa, Artificial Sequence
  Synthetic polypeptide
MAASAGGPAIPFPGTYPKEMKSPLCKDICTPMFIAALFTVAKVWKQQVFVDR

SEQ ID NO: 8213 - protein, 54 aa, Artificial Sequence
  Synthetic polypeptide
MAASAGGPGSWSENILEYFLRNSQITAEDGAEITWYHAANHKAQTNEALKKVWP

SEQ ID NO: 8214 - protein, 850 aa, Artificial Sequence
  Synthetic polypeptide
MSRRKPASGGLAASSSAPARQAVLSRFFQSTGSLKSTSSSTGAADQVDPGAAAAAAAAAAAAPPAPPAPAFPPQLPPHIATEIDRRKKRPLENDGPVKKKVKKVQQKEGGSDLGMSGNSEPKKCLRTRNVSKSLEKLKEFCCDSALPQSRVQTESLQERFAVLPKCTDFDDISLLHAKNAVSSEDSKRQINQKDTTLFDLSQFGSSNTSHENLQKTASKSANKRSKSIYTPLELQYIEMKQQHKDAVLCVECGYKYRFFGEDAEIAARELNIYCHLDHNFMTASIPTHRLFVHVRRLVAKGYKVGVVKQTETAALKAIGDNRSSLFSRKLTALYTKSTLIGEDVNPLIKLDDAVNVDEIMTDTSTSYLLCISENKENVRDKKKGNIFIGIVGVQPATGEVVFDSFQDSASRSELETRMSSLQPVELLLPSALSEQTEALIHRATSVSVQDDRIRVERMDNIYFEYSHAFQAVTEFYAKDTVDIKGSQIISGIVNLEKPVICSLAAIIKYLKEFNLEKMLSKPENFKQLSSKMEFMTINGTTLRNLEILQNQTDMKTKGSLLWVLDHTKTSFGRRKLKKWVTQPLLKLREINARLDAVSEVLHSESSVFGQIENHLRKLPDIERGLCSIYHKKCSTQEFFLIVKTLYHLKSEFQAIIPAVNSHIQSDLLRTVILEIPELLSPVEHYLKILNEQAAKVGDKTELFKDLSDFPLIKKRKDEIQGVIDEIRMHLQEIRKILKNPSAQYVTVSGQEFMIEIKNSAVSCIPTDWVKVGSTKAVSRFHSPFIVENYRHLNQLREQLVLDCSAEWLDFLEKFSEHYHSLCKAVHHLATVDCIFSLAKVAKQGDYCSLK

SEQ ID NO: 8215 - protein, 44 aa, Artificial Sequence
  Synthetic polypeptide
MYGKGKSNSSAVPSDSQARENSLKAETLPVFTPVSLALKKVSSL

SEQ ID NO: 8216 - protein, 39 aa, Artificial Sequence
  Synthetic polypeptide
MEEDEFIGEKTFQRYCAEFIKHSQQIGDSWEWRPSKNCS

SEQ ID NO: 8217 - protein, 54 aa, Artificial Sequence
  Synthetic polypeptide
MRLWKARVLKLVLKTAKDSRLGLNSKWLSLKLGDAGNPRSLAIRDCLQRSQIET

SEQ ID NO: 8218 - protein, 388 aa, Artificial Sequence
  Synthetic polypeptide
MDTRSGSQCSVTPEAILNNEKLVLPPRISRVNGWSLPLHYFQVVTWAVFVGLSSATFGIFIPFLPHAWKYIAYVVTGGIFSFHLVVHLIASCIDPADSNVRLMKNYSQPMPLFDRSKHAHVIQNQFCHLCKVTVNKKTKHCISCNKCVSGFDHHCKWINNCVGSRNYWFFFSTVASATAGMLCLIAILLYVLVQYLVNPGVLRTDPRYEDVKNMNTWLLFLPLFPVQVQTLIVVIIGMLVLLLDFLGLVHLGQLLIFHIYLKAKKMTTFEYLINNRKEESSKHQAVRKDPYVQMDKGVLQQGAGALGSSAQGVKAKSSLLIHKHLCHFCTSVNQDGDSTAREGDEDPCPSALGAKARNSRLICRRLCQFSTRVHPDGGSMAQILTQEQ

SEQ ID NO: 8219 - protein, 122 aa, Artificial Sequence
  Synthetic polypeptide
MKRSVAVWLLVGLSLGVPQFGKGDICDPNPCENGGICLPGLADGSFSCECPDGFTDPNCSSVVEVASDEEEPTSAGPCTPNPCHNGGTCEISEAYRGDTFIGYVCKCPRGFNGIHCQHIHQT

SEQ ID NO: 8220 - protein, 112 aa, Artificial Sequence
  Synthetic polypeptide
MKRSVAVWLLVGLSLGVPQFGKGDICDPNPCENGGICLPGLADGSFSCECPDGFTDPNCSSVVEVGPCTPNPCHNGGTCEISEAYRGDTFIGYVCKCPRGFNGIHCQHIHQT

SEQ ID NO: 8221 - protein, 181 aa, Artificial Sequence
  Synthetic polypeptide
MMAAEAGSEEGGPVTAGAGGGGAAAGSSAYPAVCRVKIPAALPVAAAPYPGLVETGVAGTLGGGAALGSEFLGAGSVAGALGGAGLTGGGTAAGVAGAAAGVAGAAVAGPSGDMALTKLPTSLLAETLGPGGGFPPLPPPPYLPPLGAGLGTVDEGDSLDGPEYEEEEVAIPLTAPPTNHD

SEQ ID NO: 8222 - protein, 461 aa, Artificial Sequence
  Synthetic polypeptide
MMAAEAGSEEGGPVTAGAGGGGAAAGSSAYPAVCRVKIPAALPVAAAPYPGLVETGVAGTLGGGAALGSEFLGAGSVAGALGGAGLTGGGTAAGVAGAAAGVAGAAVAGPSGDMALTKLPTSLLAETLGPGGGFPPLPPPPYLPPLGAGLGTVDEGDSLDGPEYEEEEVAIPLTAPPTNQWYHGKLDRTIAEERLRQAGKSGSYLIRESDRRPGSFVLSFLSQMNVVNHFRIIAMCGDYYIGGRRFSSLSDLIGYYSHVSCLLKGEKLLYPVAPPEPVEDRRRVRAILPYTKVPDTDEISFLKGDMFIVHNELEDGWMWVTNLRTDEQGLIVEDLVEEVGREEDPHEGKIWFHGKISKQEAYNLLMTVGQVCSFLVRPSDNTPGDYSLYFRTNENIQRFKICPTPNNQFMMGGRYYNSIGDIIDHYRKEQIVEGYYLKEPVPMQADRGEEAPEEKLEATRD

SEQ ID NO: 8223 - protein, 284 aa, Artificial Sequence
  Synthetic polypeptide
MKGWYHGKLDRTIAEERLRQAGKSGSYLIRESDRRPGSFVLSFLSQMNVVNHFRIIAMCGDYYIGGRRFSSLSDLIGYYSHVSCLLKGEKLLYPVAPPEPVEDRRRVRAILPYTKVPDTDEISFLKGDMFIVHNELEDGWMWVTNLRTDEQGLIVEDLVEEVGREEDPHEGKIWFHGKISKQEAYNLLMTVGQVCSFLVRPSDNTPGDYSLYFRTNENIQRFKICPTPNNQFMMGGRYYNSIGDIIDHYRKEQIVEGYYLKEPVPMQADRGEEAPEEKLEATRD

SEQ ID NO: 8224 - protein, 294 aa, Artificial Sequence
  Synthetic polypeptide
MRTGYSSVPSKLRWYHGKLDRTIAEERLRQAGKSGSYLIRESDRRPGSFVLSFLSQMNVVNHFRIIAMCGDYYIGGRRFSSLSDLIGYYSHVSCLLKGEKLLYPVAPPEPVEDRRRVRAILPYTKVPDTDEISFLKGDMFIVHNELEDGWMWVTNLRTDEQGLIVEDLVEEVGREEDPHEGKIWFHGKISKQEAYNLLMTVGQVCSFLVRPSDNTPGDYSLYFRTNENIQRFKICPTPNNQFMMGGRYYNSIGDIIDHYRKEQIVEGYYLKEPVPMQADRGEEAPEEKLEATRD

SEQ ID NO: 8225 - protein, 295 aa, Artificial Sequence
  Synthetic polypeptide
MCLVKSWFLSIRSRWYHGKLDRTIAEERLRQAGKSGSYLIRESDRRPGSFVLSFLSQMNVVNHFRIIAMCGDYYIGGRRFSSLSDLIGYYSHVSCLLKGEKLLYPVAPPEPVEDRRRVRAILPYTKVPDTDEISFLKGDMFIVHNELEDGWMWVTNLRTDEQGLIVEDLVEEVGREEDPHEGKIWFHGKISKQEAYNLLMTVGQVCSFLVRPSDNTPGDYSLYFRTNENIQRFKICPTPNNQFMMGGRYYNSIGDIIDHYRKEQIVEGYYLKEPVPMQADRGEEAPEEKLEATRD

SEQ ID NO: 8226 - protein, 991 aa, Artificial Sequence
  Synthetic polypeptide
MMAAEAGSEEGGPVTAGAGGGGAAAGSSAYPAVCRVKIPAALPVAAAPYPGLVETGVAGTLGGGAALGSEFLGAGSVAGALGGAGLTGGGTAAGVAGAAAGVAGAAVAGPSGDMALTKLPTSLLAETLGPGGGFPPLPPPPYLPPLGAGLGTVDEGDSLDGPEYEEEEVAIPLTAPPTNQWYHGKLDRTIAEERLRQAGKSGSYLIRESDRRPGSFVLSFLSQMNVVNHFRIIAMCGDYYIGGRRFSSLSDLIGYYSHVSCLLKGEKLLYPVAPPEPVEDRRRVRAILPYTKVPDTDEISFLKGDMFIVHNELEDGWMWVTNLRTDEQGLIVEDLVEEVGREEDPHEGKIWFHGKISKQEAYNLLMTVGQVCSFLVRPSDNTPGDYSLYFRTNENIQRFKICPTPNNQFMMGGRYYNSIGDIIDHYRKEQIVEGYYLKEPVPMQDQEQVLNDTVDGKEIYNTIRRKTKDAFYKNIVKKGYLLKKGKGKRWKNLYFILEGSDAQLIYFESEKRATKPKGLIDLSVCSVYVVHDSLFGRPNCFQIVVQHFSEEHYIFYFAGETPEQAEDWMKGLQAFCNLRKSSPGTSNKRLRQVSSLVLHIEEAHKLPVKHFTNPYCNIYLNSVQVAKTHAREGQNPVWSEEFVFDDLPPDINRFEITLSNKTKKSKDPDILFMRCQLSRLQKGHATDEWFLLSSHIPLKGIEPGSLRVRARYSMEKIMPEEEYSEFKELILQKELHVVYALSHVCGQDRTLLASILLRIFLHEKLESLLLCTLNDREISMEDEATTLFRATTLASTLMEQYMKATATQFVHHALKDSILKIMESKQSCELSPSKLEKNEDVNTNLTHLLNILSELVEKIFMASEILPPTLRYIYGCLQKSVQHKWPTNTTMRTRVVSGFVFLRLICPAILNPRMFNIISDSPSPIAARTLILVAKSVQNLANLVEFGAKEPYMEGVNPFIKSNKHRMIMFLDELGPGQQERNSVSKKTKKK

SEQ ID NO: 8227 - protein, 814 aa, Artificial Sequence
  Synthetic polypeptide
MKGWYHGKLDRTIAEERLRQAGKSGSYLIRESDRRPGSFVLSFLSQMNVVNHFRIIAMCGDYYIGGRRFSSLSDLIGYYSHVSCLLKGEKLLYPVAPPEPVEDRRRVRAILPYTKVPDTDEISFLKGDMFIVHNELEDGWMWVTNLRTDEQGLIVEDLVEEVGREEDPHEGKIWFHGKISKQEAYNLLMTVGQVCSFLVRPSDNTPGDYSLYFRTNENIQRFKICPTPNNQFMMGGRYYNSIGDIIDHYRKEQIVEGYYLKEPVPMQDQEQVLNDTVDGKEIYNTIRRKTKDAFYKNIVKKGYLLKKGKGKRWKNLYFILEGSDAQLIYFESEKRATKPKGLIDLSVCSVYVVHDSLFGRPNCFQIVVQHFSEEHYIFYFAGETPEQAEDWMKGLQAFCNLRKSSPGTSNKRLRQVSSLVLHIEEAHKLPVKHFTNPYCNIYLNSVQVAKTHAREGQNPVWSEEFVFDDLPPDINRFEITLSNKTKKSKDPDILFMRCQLSRLQKGHATDEWFLLSSHIPLKGIEPGSLRVRARYSMEKIMPEEEYSEFKELILQKELHVVYALSHVCGQDRTLLASILLRIFLHEKLESLLLCTLNDREISMEDEATTLFRATTLASTLMEQYMKATATQFVHHALKDSILKIMESKQSCELSPSKLEKNEDVNTNLTHLLNILSELVEKIFMASEILPPTLRYIYGCLQKSVQHKWPTNTTMRTRVVSGFVFLRLICPAILNPRMFNIISDSPSPIAARTLILVAKSVQNLANLVEFGAKEPYMEGVNPFIKSNKHRMIMFLDELGPGQQERNSVSKKTKKK

SEQ ID NO: 8228 - protein, 824 aa, Artificial Sequence
  Synthetic polypeptide
MRTGYSSVPSKLRWYHGKLDRTIAEERLRQAGKSGSYLIRESDRRPGSFVLSFLSQMNVVNHFRIIAMCGDYYIGGRRFSSLSDLIGYYSHVSCLLKGEKLLYPVAPPEPVEDRRRVRAILPYTKVPDTDEISFLKGDMFIVHNELEDGWMWVTNLRTDEQGLIVEDLVEEVGREEDPHEGKIWFHGKISKQEAYNLLMTVGQVCSFLVRPSDNTPGDYSLYFRTNENIQRFKICPTPNNQFMMGGRYYNSIGDIIDHYRKEQIVEGYYLKEPVPMQDQEQVLNDTVDGKEIYNTIRRKTKDAFYKNIVKKGYLLKKGKGKRWKNLYFILEGSDAQLIYFESEKRATKPKGLIDLSVCSVYVVHDSLFGRPNCFQIVVQHFSEEHYIFYFAGETPEQAEDWMKGLQAFCNLRKSSPGTSNKRLRQVSSLVLHIEEAHKLPVKHFTNPYCNIYLNSVQVAKTHAREGQNPVWSEEFVFDDLPPDINRFEITLSNKTKKSKDPDILFMRCQLSRLQKGHATDEWFLLSSHIPLKGIEPGSLRVRARYSMEKIMPEEEYSEFKELILQKELHVVYALSHVCGQDRTLLASILLRIFLHEKLESLLLCTLNDREISMEDEATTLFRATTLASTLMEQYMKATATQFVHHALKDSILKIMESKQSCELSPSKLEKNEDVNTNLTHLLNILSELVEKIFMASEILPPTLRYIYGCLQKSVQHKWPTNTTMRTRVVSGFVFLRLICPAILNPRMFNIISDSPSPIAARTLILVAKSVQNLANLVEFGAKEPYMEGVNPFIKSNKHRMIMFLDELGPGQQERNSVSKKTKKK

SEQ ID NO: 8229 - protein, 825 aa, Artificial Sequence
  Synthetic polypeptide
MCLVKSWFLSIRSRWYHGKLDRTIAEERLRQAGKSGSYLIRESDRRPGSFVLSFLSQMNVVNHFRIIAMCGDYYIGGRRFSSLSDLIGYYSHVSCLLKGEKLLYPVAPPEPVEDRRRVRAILPYTKVPDTDEISFLKGDMFIVHNELEDGWMWVTNLRTDEQGLIVEDLVEEVGREEDPHEGKIWFHGKISKQEAYNLLMTVGQVCSFLVRPSDNTPGDYSLYFRTNENIQRFKICPTPNNQFMMGGRYYNSIGDIIDHYRKEQIVEGYYLKEPVPMQDQEQVLNDTVDGKEIYNTIRRKTKDAFYKNIVKKGYLLKKGKGKRWKNLYFILEGSDAQLIYFESEKRATKPKGLIDLSVCSVYVVHDSLFGRPNCFQIVVQHFSEEHYIFYFAGETPEQAEDWMKGLQAFCNLRKSSPGTSNKRLRQVSSLVLHIEEAHKLPVKHFTNPYCNIYLNSVQVAKTHAREGQNPVWSEEFVFDDLPPDINRFEITLSNKTKKSKDPDILFMRCQLSRLQKGHATDEWFLLSSHIPLKGIEPGSLRVRARYSMEKIMPEEEYSEFKELILQKELHVVYALSHVCGQDRTLLASILLRIFLHEKLESLLLCTLNDREISMEDEATTLFRATTLASTLMEQYMKATATQFVHHALKDSILKIMESKQSCELSPSKLEKNEDVNTNLTHLLNILSELVEKIFMASEILPPTLRYIYGCLQKSVQHKWPTNTTMRTRVVSGFVFLRLICPAILNPRMFNIISDSPSPIAARTLILVAKSVQNLANLVEFGAKEPYMEGVNPFIKSNKHRMIMFLDELGPGQQERNSVSKKTKKK

SEQ ID NO: 8230 - protein, 2 aa, Artificial Sequence
  Synthetic polypeptide
ML

SEQ ID NO: 8231 - protein, 373 aa, Artificial Sequence
  Synthetic polypeptide
MSISLSSLILLPIWINMAQIQQGGPDEKEKTTALKDLLSRIDLDELMKKDEPPLDFPDTLEGFEYAFNEKGQLRHIKTGEPFVFNYREDLHRWNQKRYEALGEIITKYVYELLEKDCNLKKVSIPVDATESEPKSFIFMSEDALTNPQKLMVLIHGSGVVRAGQWARRLIINEDLDSGTQIPFIKRAVAEGYGVIVLNPNENYIEVEKPKIHVQSSSDSSDEPAEKRERKDKVSKETKKRRDFYEKYRNPQREKEMMQLYIRENGSPEEHAIYVWDHFIAQAAAENVFFVAHSYGGLAFVELMIQREADVKNKVTAVALTDSVHNVWHQEAGKTIREWMRENCCNWVSSSEPLDTSVESMLPDCPRVSAACSL

SEQ ID NO: 8232 - protein, 263 aa, Artificial Sequence
  Synthetic polypeptide
MKKDEPPLDFPDTLEGFEYAFNEKGQLRHIKTGEPFVFNYREDLHRWNQKRYEALGEIITKYVYELLEKDCNLKKVSIPEGYGVIVLNPNENYIEVEKPKIHVQSSSDSSDEPAEKRERKDKVSKETKKRRDFYEKYRNPQREKEMMQLYIRENGSPEEHAIYVWDHFIAQAAAENVFFVAHSYGGLAFVELMIQREADVKNKVTAVALTDSVHNVWHQEAGKTIREWMRENCCNWVSSSEPLDTSVESMLPDCPRVSAACSL

SEQ ID NO: 8233 - protein, 226 aa, Artificial Sequence
  Synthetic polypeptide
MNRLLIFLIPWKDLNMLLMKIITKYVYELLEKDCNLKKVSIPEGYGVIVLNPNENYIEVEKPKIHVQSSSDSSDEPAEKRERKDKVSKETKKRRDFYEKYRNPQREKEMMQLYIRENGSPEEHAIYVWDHFIAQAAAENVFFVAHSYGGLAFVELMIQREADVKNKVTAVALTDSVHNVWHQEAGKTIREWMRENCCNWVSSSEPLDTSVESMLPDCPRVSAACSL

SEQ ID NO: 8234 - protein, 327 aa, Artificial Sequence
  Synthetic polypeptide
MKKDEPPLDFPDTLEGFEYAFNEKGQLRHIKTGEPFVFNYREDLHRWNQKRYEALGEIITKYVYELLEKDCNLKKVSIPVDATESEPKSFIFMSEDALTNPQKLMVLIHGSGVVRAGQWARRLIINEDLDSGTQIPFIKRAVAEGYGVIVLNPNENYIEVEKPKIHVQSSSDSSDEPAEKRERKDKVSKETKKRRDFYEKYRNPQREKEMMQLYIRENGSPEEHAIYVWDHFIAQAAAENVFFVAHSYGGLAFVELMIQREADVKNKVTAVALTDSVHNVWHQEAGKTIREWMRENCCNWVSSSEPLDTSVESMLPDCPRVSAACSL

SEQ ID NO: 8235 - protein, 290 aa, Artificial Sequence
  Synthetic polypeptide
MNRLLIFLIPWKDLNMLLMKIITKYVYELLEKDCNLKKVSIPVDATESEPKSFIFMSEDALTNPQKLMVLIHGSGVVRAGQWARRLIINEDLDSGTQIPFIKRAVAEGYGVIVLNPNENYIEVEKPKIHVQSSSDSSDEPAEKRERKDKVSKETKKRRDFYEKYRNPQREKEMMQLYIRENGSPEEHAIYVWDHFIAQAAAENVFFVAHSYGGLAFVELMIQREADVKNKVTAVALTDSVHNVWHQEAGKTIREWMRENCCNWVSSSEPLDTSVESMLPDCPRVSAACSL

SEQ ID NO: 8236 - protein, 267 aa, Artificial Sequence
  Synthetic polypeptide
MSISLSSLILLPIWINMAQIQQGGPDEKEKTTALKDLLSRIDLDELMKKDEPPLDFPDTLEGFEYAFNEKGQLRHIKTGEPFVFNYREDLHRWNQKRYEALGEIITKYVYELLEKDCNLKKVSIPVDATESEPKSFIFMSEDALTNPQKLMVLIHGSGVVRAGQWARRLIINEDLDSGTQIPFIKRAVAEGYGVIVLNPNENYIEVEKPKIHVQSSSDSSDEPAEKRERKDKVSKETKKRRDFYEKYRNPQREKEMMQLYIRHYSLQ

SEQ ID NO: 8237 - protein, 157 aa, Artificial Sequence
  Synthetic polypeptide
MKKDEPPLDFPDTLEGFEYAFNEKGQLRHIKTGEPFVFNYREDLHRWNQKRYEALGEIITKYVYELLEKDCNLKKVSIPEGYGVIVLNPNENYIEVEKPKIHVQSSSDSSDEPAEKRERKDKVSKETKKRRDFYEKYRNPQREKEMMQLYIRHYSLQ

SEQ ID NO: 8238 - protein, 120 aa, Artificial Sequence
  Synthetic polypeptide
MNRLLIFLIPWKDLNMLLMKIITKYVYELLEKDCNLKKVSIPEGYGVIVLNPNENYIEVEKPKIHVQSSSDSSDEPAEKRERKDKVSKETKKRRDFYEKYRNPQREKEMMQLYIRHYSLQ

SEQ ID NO: 8239 - protein, 221 aa, Artificial Sequence
  Synthetic polypeptide
MKKDEPPLDFPDTLEGFEYAFNEKGQLRHIKTGEPFVFNYREDLHRWNQKRYEALGEIITKYVYELLEKDCNLKKVSIPVDATESEPKSFIFMSEDALTNPQKLMVLIHGSGVVRAGQWARRLIINEDLDSGTQIPFIKRAVAEGYGVIVLNPNENYIEVEKPKIHVQSSSDSSDEPAEKRERKDKVSKETKKRRDFYEKYRNPQREKEMMQLYIRHYSLQ

SEQ ID NO: 8240 - protein, 184 aa, Artificial Sequence
  Synthetic polypeptide
MNRLLIFLIPWKDLNMLLMKIITKYVYELLEKDCNLKKVSIPVDATESEPKSFIFMSEDALTNPQKLMVLIHGSGVVRAGQWARRLIINEDLDSGTQIPFIKRAVAEGYGVIVLNPNENYIEVEKPKIHVQSSSDSSDEPAEKRERKDKVSKETKKRRDFYEKYRNPQREKEMMQLYIRHYSLQ

SEQ ID NO: 8241 - protein, 1269 aa, Artificial Sequence
  Synthetic polypeptide
MSSKEVKTALKSARDAIRNKEYKEALKHCKTVLKQEKNNYNAWVFIGVAAAELEQPDQAQSAYKKAAELEPDQLLAWQGLANLYEKYNHINAKDDLPGVYQKLLDLYESVDKQKWCDVCKKLVDLYYQEKKHLEVARTWHKLIKTRQEQGAENEELHQLWRKLTQFLAESTEDQNNETQQLLFTAFENALGLSDKIPSEDHQVLYRHFIQSLSKFPHESARLKKACEGMINIYPTVQYPLEVLCLHLIESGNLTDEGQQYCCRLVEMDSKSGPGLIGLGIKALQDKKYEDAVRNLTEGLKESPVCTSGWYHLAEAQVKMHRPKEAVLSCSQALKIVDNLGASGNSLYQRNLCLHLKAEALIKLSDYDSSEEAIRTLDQISDADNIPGLLVLKSLAYRNKGSFDEAAKIMEDLLSSYPDLAEVHALEALIHFTKKDYLQAEKCFQRALEKDTEVAEYHYQLGLTYWFMGEETRKDKTKALTHFLKAARLDTYMGKVFCYLGHYYRDVVGDKNRARGCYRKAFELDDTDAESGAAAVDLSVELEDMEMALAILTTVTQKASAGTAKWAWLRRGLYYLKAGQHSQAVADLQAALRADPKDFNCWESLGEAYLSRGGYTTALKSFTKASELNPESIYSVFKVAAIQQILGKYKEAVAQYQMIIKKKEDYVPALKGLGECHLMMAKAALVDYLDGKAVDYIEKALEYFTCALQHRADVSCLWKLAGDACTCLYAVAPSKVNVHVLGVLLGQKEGKQVLKKNELLHLGGRCYGRALKLMSTSNTWCDLGINYYRQAQHLAETGSNMNDLKELLEKSLHCLKKAVRLDSNNHLYWNALGVVACYSGIGNYALAQHCFIKSIQSEQINAVAWTNLGVLYLTNENIEQAHEAFKMAQSLDPSYLMCWIGQALIAEAVGSYDTMDLFRHTTELNMHTEGALGYAYWVCTTLQDKSNRETELYQYNILQMNAIPAAQVILNKYVERIQNYAPAFTMLGYLNEHLQLKKEAANAYQRAILLLQTAEDQDTYNVAIRNYGRLLCSTGEYDKAIQAFKSTPLEVLEDIIGFALALFMKGLYKESSKAYERALSIVESEQDKAHILTALAITEYKQGKTDVAKTLLFKCSILKEPTTESLQALCALGLAMQDATLSKAALNELLKHIKHKDSNYQRCLLTSAIYALQGRSVAVQKQISKAVHSNPGDPALWSLLSRVVAQYAQRNAKGGVVAGNVAHILDSNHGKKALLYTAVNQLAMGSSSAEDEKNTALKTIQKAALLSPGC

SEQ ID NO: 8242 - protein, 912 aa, Artificial Sequence
  Synthetic polypeptide
MSSKEVKTALKSARDAIRNKEYKEALKHCKTVLKQEKNNYNAWVFIGVAAAELEQPDQAQSAYKKAAELEPDQLLAWQGLANLYEKYNHINAKDDLPGVYQKLLDLYESVDKQKWCDVCKKLVDLYYQEKKHLEVARTWHKLIKTRQEQGAENEELHQLWRKLTQFLAESTEDQNNETQQLLFTAFENALGLSDKIPSEDHQVLYRHFIQSLSKFPHESARLKKACEGMINIYPTVQYPLEVLCLHLIESGNLTDEGQQYCCRLVEMDSKSGPGLIGLGIKALQDKKYEDAVRNLTEGLKESPVCTSGWYHLAEAQVKMHRPKEAVLSCSQALKIVDNLGASGNSLYQRNLCLHLKAEALIKLSDYDSSEEAIRTLDQISDADNIPGLLVLKSLAYRNKGSFDEAAKIMEDLLSSYPDLAEVHALEALIHFTKKDYLQAEKCFQRALEKDTEVAEYHYQLGLTYWFMGEETRKDKTKALTHFLKAARLDTYMGKVFCYLGHYYRDVVGDKNRARGCYRKAFELDDTDAESGAAAVDLSVELEDMEMALAILTTVTQKASAGTAKWAWLRRGLYYLKAGQHSQAVADLQAALRADPKDFNCWESLGEAYLSRGGYTTALKSFTKASELNPESIYSVFKVAAIQQILGKYKEAVAQYQMIIKKKEDYVPALKGLGECHLMMAKAALVDYLDGKAVDYIEKALEYFTCALQHRADVSCLWKLAGDACTCLYAVAPSKVNVHVLGVLLGQKEGKQVLKKNELLHLGGRCYGRALKLMSTSNTWCDLGINYYRQAQHLAETGSNMNDLKELLEKSLHCLKKAVRLDSNNHLYWNALGVVACYSGIGNYALAQHCFIKSIQSEQINAVAWTNLGVLYLTNENIEQAHEAFKMAQSLDPSYLMCWIGQHITFLDFNFLT

SEQ ID NO: 8243 - protein, 250 aa, Artificial Sequence
  Synthetic polypeptide
MLLLWVSVVAALALAVLAPGAGEQRRRAAKAPNVVLVVSDSFDGRLTFHPGSQVVKLPFINFMKTRGTSFLNAYTNSPICCPSRAAMWSGLFTHLTESWNNFKGLDPNYTTWMDVMERHGYRTQKFGKLDYTSGHHSISNRVEAWTRDVAFLLRQEGRPMVNLIRNRTKVRVMERDWQNTDKAVNWLRKEAINYTEPFVIYLGLNLPHPYPSPSSGENFGSSTFHTSLYWLEKPLHSKRNYQHNEQPQSL

SEQ ID NO: 8244 - protein, 545 aa, Artificial Sequence
  Synthetic polypeptide
MSIHIVALGNEGDTFHQDNRPSGLIRTYLGRSPLVSGDESSLLLNAASTVARPVFTEYQASAFGNVKLVVHDCPVWDIFDSDWYTSRNLIGGADIIVIKYNVNDKFSFHEVKDNYIPVIKRALNSVPVIIAAVGTRQNEELPCTCPLCTSDRGSCVSTTEGIQLAKELGATYLELHSLDDFYIGKYFGGVLEYFMIQALNQKTSEKMKKRKMSNSFHGIRPPQLEQPEKMPVLKAEASHYNSDLNNLLFCCQCVDVVFYNPNLKKVVEAHKIVLCAVSHVFMLLFNVKSPTDIQDSSIIRTTQDLFAINRDTAFPGASHESSGNPPLRVIVKDALFCSCLSDILRFIYSGAFQWEELEEDIRKKLKDSGDVSNVIEKVKCILKTPGKINCLRNCKTYQARKPLWFYNTSLKFFLNKPMLADVVFEIQGTTVPAHRAILVARCEVMAAMFNGNYMEAKSVLIPVYGVSKETFLSFLEYLYTDSCCPAGIFQAMCLLICAEMYQVSRLQHICELFIITQLQSMPSRELASMNLDIVDLLKKAKGRNI

SEQ ID NO: 8245 - protein, 176 aa, Artificial Sequence
  Synthetic polypeptide
MPKRAVLFTDRQPIQFLKINCLRNCKTYQARKPLWFYNTSLKFFLNKPMLADVVFEIQGTTVPAHRAILVARCEVMAAMFNGNYMEAKSVLIPVYGVSKETFLSFLEYLYTDSCCPAGIFQAMCLLICAEMYQVSRLQHICELFIITQLQSMPSRELASMNLDIVDLLKKAKGRNI

SEQ ID NO: 8246 - protein, 25 aa, Artificial Sequence
  Synthetic polypeptide
MPMLSSKFKVRQCQPTGPSWWPVVK

SEQ ID NO: 8247 - protein, 12 aa, Artificial Sequence
  Synthetic polypeptide
RDVPSVQTAAHL

SEQ ID NO: 8248 - protein, 25 aa, Artificial Sequence
  Synthetic polypeptide
MPMLSSKFKVRQCQPTGPSWWPVVK

SEQ ID NO: 8249 - protein, 12 aa, Artificial Sequence
  Synthetic polypeptide
RDVPSVQTAAHL

SEQ ID NO: 8250 - protein, 8 aa, Artificial Sequence
  Synthetic polypeptide
LPHLQSKA

SEQ ID NO: 8251 - protein, 6 aa, Artificial Sequence
  Synthetic polypeptide
HLQSKA

SEQ ID NO: 8252 - protein, 582 aa, Artificial Sequence
  Synthetic polypeptide
MSIHIVALGNEGDTFHQDNRPSGLIRTYLGRSPLVSGDESSLLLNAASTVARPVFTEYQASAFGNVKLVVHDCPVWDIFDSDWYTSRNLIGGADIIVIKYNVNDKFSFHEVKDNYIPVIKRALNSVPVIIAAVGTRQNEELPCTCPLCTSDRGSCVSTTEGIQLAKELGATYLELHSLDDFYIGKYFGGVLEYFMIQALNQKTSEKMKKRKMSNSFHGIRPPQLEQPEKMPVLKAEASHYNSDLNNLLFCCQCVDVVFYNPNLKKVVEAHKIVLCAVSHVFMLLFNVKSPTDIQDSSIIRTTQDLFAINRDTAFPGASHESSGNPPLRVIVKDALFCSCLSDILRFIYSGAFQWEELEEDIRKKLKDSGDVSNVIEKVKCILKTPGKINCLRNCKTYQARKPLWFYNTSLKFFLNKPMLADVVFEIQGTTVPAHRAILVARCEVMAAMFNGNYMEAKSVLIPVYGVSKETFLSFLEYLYTDSCCPAGIFQAMCLLICAEMYQVSRLQHICELFIITQLQSMPSRELASMNLDIVDLLKKAKFHHSDCLSTWLLHFIATNYLIFSQKPEFQDLSDLATPGPSS

SEQ ID NO: 8253 - protein, 213 aa, Artificial Sequence
  Synthetic polypeptide
MPKRAVLFTDRQPIQFLKINCLRNCKTYQARKPLWFYNTSLKFFLNKPMLADVVFEIQGTTVPAHRAILVARCEVMAAMFNGNYMEAKSVLIPVYGVSKETFLSFLEYLYTDSCCPAGIFQAMCLLICAEMYQVSRLQHICELFIITQLQSMPSRELASMNLDIVDLLKKAKFHHSDCLSTWLLHFIATNYLIFSQKPEFQDLSDLATPGPSS

SEQ ID NO: 8254 - protein, 18 aa, Artificial Sequence
  Synthetic polypeptide
MASGRADFTHSHLSEMGS

SEQ ID NO: 8255 - protein, 1 aa, Artificial Sequence
  Synthetic polypeptide
M

SEQ ID NO: 8256 - protein, 743 aa, Artificial Sequence
  Synthetic polypeptide
MERAMEQLNRLTRSLRRARTVELPEDNETAVYTLMPMVMADQHRSVSELLSNSKFDVNYAFGRVKRSLLHIAANCGSVECLVLLLKKGANPNYQDISGCTPLHLAARNGQKKCMSKLLEYSADVNICNNEGLTAIHWLAVNGRTELLHDLVQHVSDVDVEDAMGQTALHVACQNGHKTTVQCLLDSGADINRPNVSGATPLYFACSHGQRDTAQILLLRGAKYLPDKNGVTPLDLCVQGGYGETCEVLIQYHPRLFQTIIQMTQNEDLRENMLRQVLEHLSQQSESQYLKILTSLAEVATTNGHKLLSLSSNYDAQMKSLLRIVRMFCHVFRIGPSSPSNGIDMGYNGNKTPRSQVFKPLELLWHSLDEWLVLIATELMKNKRDSTEITSILLKQKGQDQDAASIPPFEPPGPGSYENLSTGTRESKPDALAGRQEASADCQDVISMTANRLSAVIQAFYMCCSCQMPPGMTSPRFIEFVCKHDEVLKCFVNRNPKIIFDHFHFLLECPELMSRFMHIIKAQPFKDRCEWFYEHLHSGQPDSDMVHRPVNENDILLVHRDSIFRSSCEVVSKANCAKLKQGIAVRFHGEEGMGQGVVREWFDILSNEIVNPDYALFTQSADGTTFQPNSNSYVNPDHLNYFRFAGQILGLALNHRQLVNIYFTRSFYKHILGIPVNYQDVASIDPEYAKNLQWILDNDISDLGLELTFSVETDVFGAMEEVPLKPGGGSILVTQNNKKDTDYS

SEQ ID NO: 8257 - protein, 6 aa, Artificial Sequence
  Synthetic polypeptide
HKSTAF

SEQ ID NO: 8258 - protein, 243 aa, Artificial Sequence
  Synthetic polypeptide
MLSLQYPDVYRDETAVQDYHGHKICDPYAWLEDPDSEQTKAFVEAQNKITVPFLEQCPIRGLYKERMTELYDYPKYSCHFKKGKRYFYFYNTGLQNQRVLYVQDSLEGEARVFLDPNILSDDGTVALRGYAFSEDGEYFAYGLSASGSDWVTIKFMKVDGAKELPDVLERVKFSCMAWTHDGKGMFYNSYPQQDGKSDGTETSTNLHQKLYYHVLGTDQSEDILCAEFPDEPKWMGGAELIQT

SEQ ID NO: 8259 - protein, 125 aa, Artificial Sequence
  Synthetic polypeptide
MQDTGSVVPLHWFGFGYAALVASGGIIGYVKAGSVPSLAAGLLFGSLAGLGAYQLSQDPRNVWVFLATSGTLAGIMGMRFYHSGKFMPAGLIAGASRAWWCTPVITATWDTESGKSLEPGRRRLQ

SEQ ID NO: 8260 - protein, 13 aa, Artificial Sequence
  Synthetic polypeptide
MEKPLFPFSPSKP

SEQ ID NO: 8261 - protein, 77 aa, Artificial Sequence
  Synthetic polypeptide
MEKPLFPLVPLHWFGFGYTALVVSGGIVGYVKTGSVPSLAAGLLFGSLAGLGAYQLYQDPRNVWGFLGGPHPISGRS

SEQ ID NO: 8262 - protein, 55 aa, Artificial Sequence
  Synthetic polypeptide
VSGGIVGYVKTGSVPSLAAGLLFGSLAGLGAYQLYQDPRNVWGFLGGPHPISGRS

SEQ ID NO: 8263 - protein, 54 aa, Artificial Sequence
  Synthetic polypeptide
QSSRPGCLPAVSGSKERLGFPRWATSNQWKVLRAKTEVPQRRRKCFKTSASIPA

SEQ ID NO: 8264 - protein, 101 aa, Artificial Sequence
  Synthetic polypeptide
MEKPLFPLVPLHWFGFGYTALVVSGGIVGYVKTGSVPSLAAGLLFGSLAGLGAYQLYQDPRNVWGFLAATSVTFVGVMGMRSYYYGKFMPVGLIAGARPCT

SEQ ID NO: 8265 - protein, 67 aa, Artificial Sequence
  Synthetic polypeptide
MEKPLFPLVPLHWFGFGYTALVVSGGIVGYVKTAATSVTFVGVMGMRSYYYGKFMPVGLIAGARPCT

SEQ ID NO: 8266 - protein, 56 aa, Artificial Sequence
  Synthetic polypeptide
MEKPLFPFRYICYFCWCYGNEILLLWKIHACRFNCRCQTLHLMDHLAPPKLINWLI

SEQ ID NO: 8267 - protein, 70 aa, Artificial Sequence
  Synthetic polypeptide
QSSRPGCLPAVSGSKERLGFPSRYICYFCWCYGNEILLLWKIHACRFNCRCQTLHLMDHLAPPKLINWLI

SEQ ID NO: 8268 - protein, 130 aa, Artificial Sequence
  Synthetic polypeptide
MEKPLFPLVPLHWFGFGYTALVVSGGIVGYVKTGSVPSLAAGLLFGSLAGLGAYQLYQDPRNVWGFLAATSVTFVGVMGMRSYYYGKFMPVGLIAGARWATSNQWKVLRAKTEVPQRRRKCFKTSASIPA

SEQ ID NO: 8269 - protein, 96 aa, Artificial Sequence
  Synthetic polypeptide
MEKPLFPLVPLHWFGFGYTALVVSGGIVGYVKTAATSVTFVGVMGMRSYYYGKFMPVGLIAGARWATSNQWKVLRAKTEVPQRRRKCFKTSASIPA

SEQ ID NO: 8270 - protein, 52 aa, Artificial Sequence
  Synthetic polypeptide
MEKPLFPFRYICYFCWCYGNEILLLWKIHACRFNCRCQVGHIQSVEGLKSKN

SEQ ID NO: 8271 - protein, 66 aa, Artificial Sequence
  Synthetic polypeptide
QSSRPGCLPAVSGSKERLGFPSRYICYFCWCYGNEILLLWKIHACRFNCRCQVGHIQSVEGLKSKN

SEQ ID NO: 8272 - protein, 106 aa, Artificial Sequence
  Synthetic polypeptide
MEKPLFPLVPLHWFGFGYTALVVSGGIVGYVKTAATSVTFVGVMGMRSYYYGKFMPVGLIAGARWSMALVAQAGVQWCDLSSLQPPPPRFKRFSCLTLLSSWDFRN

SEQ ID NO: 8273 - protein, 140 aa, Artificial Sequence
  Synthetic polypeptide
MEKPLFPLVPLHWFGFGYTALVVSGGIVGYVKTGSVPSLAAGLLFGSLAGLGAYQLYQDPRNVWGFLAATSVTFVGVMGMRSYYYGKFMPVGLIAGARWSMALVAQAGVQWCDLSSLQPPPPRFKRFSCLTLLSSWDFRN

SEQ ID NO: 8274 - protein, 629 aa, Artificial Sequence
  Synthetic polypeptide
MQAKNKDALQPIKEDRTGKAQDDAFWLQSLITDAFHDKGFQKIKEYFQQKESHFPQKYNRLLLYRLDRSINKELDKNEFQSVSLLLKCIQRFLVDGLKEDEPLLIRQGLIPKLVSWFERTTGILTSEGLASDTSLICVIEDFFDTALIISRSSSEGKIQMLDSFLLSLGFLVTEKTVNHLLQQEGLKTFNCILHAVPREERKKFPLSEGMCHLMKDLARTLLTVGDYDQQVAISEALCRLTIKKSRDELVHKWFDDEVIAEAFKEIKDREFETDSRRFLNHLNNRLGDQRRVYSFPCIAAFADEHEMRKPADEKLEKFWIDFNLGSQSVTFYIDNAENTLWDSVTLPKEAVMNFSITETEKIKIFIIYLKKPMIISYKEVMKIEIHFDLQFNISQVSIQALGEDKQMLPDQTKISSELFSKSDKEDRESPSGLERETEQAEESTNMVEFMSAEDDRCLITLHLNDQSEPPVIGEPASDSHLQPVPPFGVPDFPQQPKSHYRKHLFSESNQDSSTSELSWTSNQKKKSLKSYSSRKKTRTRSNLRILPVFPPSSGSGHEKDQAKLLSPSEKEIPEQNNTTSPKTSEQKFQDSFAFLTAEDSAQKTGTWMKLETIILSKLARMKNTTCSHS

SEQ ID NO: 8275 - protein, 56 aa, Artificial Sequence
  Synthetic polypeptide
MDSELMHSIVGSYHKPPERVFVPSFTQNEPSQNCHPANLEVTSPKILHSPNSQAIK

SEQ ID NO: 8276 - protein, 59 aa, Artificial Sequence
  Synthetic polypeptide
MKIMDSELMHSIVGSYHKPPERVFVPSFTQNEPSQNCHPANLEVTSPKILHSPNSQAIK

SEQ ID NO: 8277 - protein, 138 aa, Artificial Sequence
  Synthetic polypeptide
MDSELMHSIVGSYHKPPERVFVPSFTQNEPSQNCHPANLEVTSPKILHSPNSQALILALKTLQEKIHRLELERTQAEDNLNILSREAAQYKKALENETNERNLAHQELIKQKKEKQLEYTKRMVLNVEREKNMILEQQ

SEQ ID NO: 8278 - protein, 78 aa, Artificial Sequence
  Synthetic polypeptide
MDSELMHSIVGSYHKPPERVFVPSFTQNEPSQNCHPANLEVTSPKILHSPNSQEKQLEYTKRMVLNVEREKNMILEQQ

SEQ ID NO: 8279 - protein, 154 aa, Artificial Sequence
  Synthetic polypeptide
MDSELMHSIVGSYHKPPERVFVPSFTQNEPSQNCHPANLEVTSPKILHSPNSQALILALKTLQEKIHRLELERTQAEDNLNILSREAAQYKKALENETNERNLAHQELIKQKKDISIQLSSAQSRCTLLEKQLEYTKRMVLNVEREKNMILEQQ

SEQ ID NO: 8280 - protein, 16 aa, Artificial Sequence
  Synthetic polypeptide
MVLNVEREKNMILEQQ

SEQ ID NO: 8281 - protein, 157 aa, Artificial Sequence
  Synthetic polypeptide
MKIMDSELMHSIVGSYHKPPERVFVPSFTQNEPSQNCHPANLEVTSPKILHSPNSQALILALKTLQEKIHRLELERTQAEDNLNILSREAAQYKKALENETNERNLAHQELIKQKKDISIQLSSAQSRCTLLEKQLEYTKRMVLNVEREKNMILEQQ

SEQ ID NO: 8282 - protein, 153 aa, Artificial Sequence
  Synthetic polypeptide
MDSELMHSIVGSYHKPPERVFVPSFTQNEPSQNCHPANLEVTSPKILHSPNSQALILALKTLQEKIHRLELERTQAEDNLNILSREAAQYKKALENETNERNLAHQELIKQKKEKQLEYTKRMVLNVEREKNMILEQQVHSKENTKGHQTEGK

SEQ ID NO: 8283 - protein, 93 aa, Artificial Sequence
  Synthetic polypeptide
MDSELMHSIVGSYHKPPERVFVPSFTQNEPSQNCHPANLEVTSPKILHSPNSQEKQLEYTKRMVLNVEREKNMILEQQVHSKENTKGHQTEGK

SEQ ID NO: 8284 - protein, 169 aa, Artificial Sequence
  Synthetic polypeptide
MDSELMHSIVGSYHKPPERVFVPSFTQNEPSQNCHPANLEVTSPKILHSPNSQALILALKTLQEKIHRLELERTQAEDNLNILSREAAQYKKALENETNERNLAHQELIKQKKDISIQLSSAQSRCTLLEKQLEYTKRMVLNVEREKNMILEQQVHSKENTKGHQTEGK

SEQ ID NO: 8285 - protein, 31 aa, Artificial Sequence
  Synthetic polypeptide
MVLNVEREKNMILEQQVHSKENTKGHQTEGK

SEQ ID NO: 8286 - protein, 172 aa, Artificial Sequence
  Synthetic polypeptide
MKIMDSELMHSIVGSYHKPPERVFVPSFTQNEPSQNCHPANLEVTSPKILHSPNSQALILALKTLQEKIHRLELERTQAEDNLNILSREAAQYKKALENETNERNLAHQELIKQKKDISIQLSSAQSRCTLLEKQLEYTKRMVLNVEREKNMILEQQVHSKENTKGHQTEGK

SEQ ID NO: 8287 - protein, 120 aa, Artificial Sequence
  Synthetic polypeptide
MEHLKAFDDEINAFLDNMFGPRDSRVRGWFMLDSYLPTFFLTVMYLLSIWLGNKYMKNRPALSLRGILTLYNLGITLLSAYMLAELILSTWEGGYNLQCQDLTSAGEADIRLCLQKRPSL

SEQ ID NO: 8288 - protein, 38 aa, Artificial Sequence
  Synthetic polypeptide
MRPARHWETRFGARDFGGFQDCFFRDRRTCLLPFPPRS

SEQ ID NO: 8289 - protein, 119 aa, Artificial Sequence
  Synthetic polypeptide
DYVTVQLQNGEIWELSRCSRNKRENTSSLGYEYTGSKKEFPCVDGYIYDQNTWKSTAVTQWNLVCDRKWLAMLIQPLFMFGVLLGSVTFGYFSDSVIWTHCGTWGLEDLRQRCCCPTAC

SEQ ID NO: 8290 - protein, 202 aa, Artificial Sequence
  Synthetic polypeptide
MGSRHFEGIYDHVGHFGRFQRVLYFICAFQNISCGIHYLASVFMGVTPHHVCRPPGNVSQVVFHNHSNWSLEDTGALLSSGQKDYVTVQLQNGEIWELSRCSRNKRENTSSLGYEYTGSKKEFPCVDGYIYDQNTWKSTAVTQWNLVCDRKWLAMLIQPLFMFGVLLGSVTFGYFSDSVIWTHCGTWGLEDLRQRCCCPTAC

SEQ ID NO: 8291 - protein, 168 aa, Artificial Sequence
  Synthetic polypeptide
MRTLHAVSHPYSNSMRFQRVLYFICAFQNISCGIHYLASVFMGVTPHHVCRPPGNLQNGEIWELSRCSRNKRENTSSLGYEYTGSKKEFPCVDGYIYDQNTWKSTAVTQWNLVCDRKWLAMLIQPLFMFGVLLGSVTFGYFSDSVIWTHCGTWGLEDLRQRCCCPTAC

SEQ ID NO: 8292 - protein, 159 aa, Artificial Sequence
  Synthetic polypeptide
MGVTPHHVCRPPGNVSQVVFHNHSNWSLEDTGALLSSGQKDYVTVQLQNGEIWELSRCSRNKRENTSSLGYEYTGSKKEFPCVDGYIYDQNTWKSTAVTQWNLVCDRKWLAMLIQPLFMFGVLLGSVTFGYFSDSVIWTHCGTWGLEDLRQRCCCPTAC

SEQ ID NO: 8293 - protein, 84 aa, Artificial Sequence
  Synthetic polypeptide
MGSRHFEGIYDHVGHFGRFQRVLYFICAFQNISCGIHYLASVFMGVTPHHVCRPPGNCHLDSLWDLGIRGPETKMLLPYCLLTK

SEQ ID NO: 8294 - protein, 82 aa, Artificial Sequence
  Synthetic polypeptide
MRTLHAVSHPYSNSMRFQRVLYFICAFQNISCGIHYLASVFMGVTPHHVCRPPGNCHLDSLWDLGIRGPETKMLLPYCLLTK

SEQ ID NO: 8295 - protein, 32 aa, Artificial Sequence
  Synthetic polypeptide
MSAGPQAIVIWTHCGTWGLEDLRQRCCCPTAC

SEQ ID NO: 8296 - protein, 41 aa, Artificial Sequence
  Synthetic polypeptide
MGVTPHHVCRPPGNCHLDSLWDLGIRGPETKMLLPYCLLTK

SEQ ID NO: 8297 - protein, 2 aa, Artificial Sequence
  Synthetic polypeptide
KR

SEQ ID NO: 8298 - protein, 79 aa, Artificial Sequence
  Synthetic polypeptide
MDYDFKAKLAAERERVEDLFEYEGCKVGRGTYGHVYKARRKDGKDEKEYALKQIEGTGISMSACREIADHRKTLSHSTM

SEQ ID NO: 8299 - protein, 19 aa, Artificial Sequence
  Synthetic polypeptide
MSACREIADHRKTLSHSTM

SEQ ID NO: 8300 - protein, 71 aa, Artificial Sequence
  Synthetic polypeptide
MDYDFKAKLAAERERVEDLFEYEGCKVGRGTYGHVYKARRKDGKDEKEYALKQIEGTGISMSACREIAPSR

SEQ ID NO: 8301 - protein, 11 aa, Artificial Sequence
  Synthetic polypeptide
MSACREIAPSR

SEQ ID NO: 8302 - protein, 2 aa, Artificial Sequence
  Synthetic polypeptide
KR

SEQ ID NO: 8303 - protein, 109 aa, Artificial Sequence
  Synthetic polypeptide
MDYDFKAKLAAERERVEDLFEYEGCKVGRGTYGHVYKARRKDGKTNSPLSSQPTQCEDNEDEELYDDPLLLMNSKYILSVLWFPSHFLFCSLLYCKNTVYNKNNIQNIC

SEQ ID NO: 8304 - protein, 2 aa, Artificial Sequence
  Synthetic polypeptide
HG

SEQ ID NO: 8305 - protein, 322 aa, Artificial Sequence
  Synthetic polypeptide
MVLSQEEPDSARGTSEAQPLGPAPTGAAPPPGPGPSDSPEAAVEKVEVELAGPATAEPHEPPEPPEGGWGWLVMLAAMWCNGSVFGIQNACGVLFVSMLETFGSKDDDKMVFKTAWVGSLSMGMIFFCCPIVSVFTDLFGCRKTAVVGAAVGFVGLMSSSFVSSIEPLYLTYGIIFACGCSFAYQPSLVILGHYFKKRLGLVNGIVTAGSSVFTILLPLLLRVLIDSVGLFYTLRVLCIFMFVLFLAGFTYRPLATSTKDKESGGSGSSLFSRKKFSPPKKIFNFAIFKVTAYAVWAVGIPLALFGYFVPYVHLTGVGASRL

SEQ ID NO: 8306 - protein, 376 aa, Artificial Sequence
  Synthetic polypeptide
MVLSQEEPDSARGTSEAQPLGPAPTGAAPPPGPGPSDSPEAAVEKVEVELAGPATAEPHEPPEPPEGGWGWLVMLAAMWCNGSVFGIQNACGVLFVSMLETFGSKDDDKMVFKTAWVGSLSMGMIFFCCPIVSVFTDLFGCRKTAVVGAAVGFVGLMSSSFVSSIEPLYLTYGIIFACGCSFAYQPSLVILGHYFKKRLGLVNGIVTAGSSVFTILLPLLLRVLIDSVGLFYTLRVLCIFMFVLFLAGFTYRPLATSTKDKESGGSGSSLFSRKKFSPPKKIFNFAIFKVTAYAVWAVGIPLALFGYFVPYVHLMKHVNERFQDEKNKEVVLMCIGVTSGVGRLLFGRIADYVPGVKKVYLQRKKKGRKNKERKKK

SEQ ID NO: 8307 - protein, 62 aa, Artificial Sequence
  Synthetic polypeptide
MKHVNERFQDEKNKEVVLMCIGVTSGVGRLLFGRIADYVPGVKKVYLQRKKKGRKNKERKKK

SEQ ID NO: 8308 - protein, 446 aa, Artificial Sequence
  Synthetic polypeptide
MVLSQEEPDSARGTSEAQPLGPAPTGAAPPPGPGPSDSPEAAVEKVEVELAGPATAEPHEPPEPPEGGWGWLVMLAAMWCNGSVFGIQNACGVLFVSMLETFGSKDDDKMVFKTAWVGSLSMGMIFFCCPIVSVFTDLFGCRKTAVVGAAVGFVGLMSSSFVSSIEPLYLTYGIIFACGCSFAYQPSLVILGHYFKKRLGLVNGIVTAGSSVFTILLPLLLRVLIDSVGLFYTLRVLCIFMFVLFLAGFTYRPLATSTKDKESGGSGSSLFSRKKFSPPKKIFNFAIFKVTAYAVWAVGIPLALFGYFVPYVHLMKHVNERFQDEKNKEVVLMCIGVTSGVGRLLFGRIADYVPGVKKVYLQVLSFFFIGLMSMMIPLCSIFGALIAVCLIMGLFDGCFISIMAPIAFELVGAQDVSQAIGFLLGFMSIPMTVGPPIAEKEERKKE

SEQ ID NO: 8309 - protein, 132 aa, Artificial Sequence
  Synthetic polypeptide
MKHVNERFQDEKNKEVVLMCIGVTSGVGRLLFGRIADYVPGVKKVYLQVLSFFFIGLMSMMIPLCSIFGALIAVCLIMGLFDGCFISIMAPIAFELVGAQDVSQAIGFLLGFMSIPMTVGPPIAEKEERKKE

SEQ ID NO: 8310 - protein, 97 aa, Artificial Sequence
  Synthetic polypeptide
MKAEGGDHSMINLSVQQVLSLWAHGTVLRNLTEMWYWIFLWALFSSLFVHGAAGVLMFVMLQRHRQGRVISVIAVSIGFLASVTGAMITSDNTEGVV

SEQ ID NO: 8311 - protein, 446 aa, Artificial Sequence
  Synthetic polypeptide
MAQHFSLAACDVVGFDLDHTLCRYNLPESAPLIYNSFAQFLVKEKGYDKELLNVTPEDWDFCCKGLALDLEDGNFLKLANNGTVLRASHGTKMMTPEVLAEAYGKKEWKHFLSDTGMACRSGKYYFYDNYFDLPGALLCARVVDYLTKLNNGQKTFDFWKDIVAAIQHNYKMSAFKENCGIYFPEIKRDPGRYLHSCPESVKKWLRQLKNAGKILLLITSSHSDYCRLLCEYILGNDFTDLFDIVITNALKPGFFSHLPSQRPFRTLENDEEQEALPSLDKPGWYSQGNAVHLYELLKKMTGKPEPKVVYFGDSMHSDIFPARHYSNWETVLILEELRGDEGTRSQRPEESEPLEKKGKYEGPKAKPLNTSSKKWGSFFIDSVLGLENTEDSLVYTWSCKRISTYSTIAIPSIEAIAGTIKNNSCQKTGDARRMYISIWCKYMNKK

SEQ ID NO: 8312 - protein, 147 aa, Artificial Sequence
  Synthetic polypeptide
MSAGGPCPAAAGGGPGGASCSVGAPGGVSMFRWLEVLEKEFDKAFVDVDLLLGEIDPDQADITYEGRQKMTSLSSCFAQLCHKAQSVSQINHKLEIPCQQEGSRLLEIWPLDLGLLCLHNCKKYIPFLYKLPSFWYSVIRNRKWTKT

SEQ ID NO: 8313 - protein, 1064 aa, Artificial Sequence
  Synthetic polypeptide
MAHFSSEDQAMLQAMLRRLFQSVKEKITGAPSLECAEEILLHLEETDENFHNYEFVKYLRQHIGNTLGSMIEEEMEKCTSDRNQGEECGYDTVVQQVTKRTQESKEYKEMMHYLKNIMIAVVESMINKFEEDETRNQERQKKIQKEKSHSYRTDNCSDSDSSLNQSYKFCQGKLQLILDQLDPGQPKEVRYEALQTLCSAPPSDVLNCENWTTLCEKLTVSLSDPDPVFSDRILKFCAQTFLLSPLHMTKEIYTSLAKYLESYFLSRENHIPTLSAGVDITNPNMTRLLKKVRLLNEYQKEAPSFWIRHPEKYMEEIVESTLSLLTVKHNQSHVVSQKILDPIYFFALVDTKAVWFKKWMHAHYSRTTVLRLLETKYKSLVTTAIQQCVQYFEMCKTRKADETLGHSKHCRNKQKTFYYLGQELQYIYFIHSLCLLGRLLIYKQGRKLFPIKLKNKKGLVSLIDLLVLFTQLIYYSPSCPKMTSAAHSENYSPASMVTEVLWILSDQKECAVECLYNNIVIETLLQPIHNLMKGNEASPNCSETALIHIAGILARIASVEEGLILLLYGANMNSSEESPTGAHIIAQFSKKLLDEDISIFSGSEMLPVVKGAFISVCRHIYSTCEGLQVLITYNLHESIAKAWKKTSLLSERIPTPVEGSDSVSSVSQESQNIMAWEDNLLDDLLHFAATPKGLLLLQRTGAINECVTFIFNRYAKKLQVSRHKKFGYGVLVTRVASTAAGGIALKKSGFINELITELWSNLEYGRDDVRVTHPRTTPVDPIDRSCQKSFLALVNLLSYPAIYELVRNQDLPNKTEYSLREVPTCVIDIIDRLIILNSEAKIRSLFNYEQSHIFGLRLLSVICCDLDTLLLLEAQYQVSEMLLNAQEENILEISESHRDFIIDGLSVERNHVLVRINLVGGPLERILPPRLLEKSDNPYPWPMFSSYPLPNCYLSDITRNAGIKQDNDLDKLLLCLKISDKQTEWIENCQRQFCKMMKAKPDIISGEALIELLEKFVLHLTESPSECYFPSVEYTDGCFPLHDIHMIMPDSPVKFQLECNLSYS

SEQ ID NO: 8314 - protein, 1023 aa, Artificial Sequence
  Synthetic polypeptide
MAHFSSEDQAMLQAMLRRLFQSVKEKITGAPSLECAEEILLHLEETDENFHNYEFVKYLRQHIGNTLGSMIEEEMEKCTSDRNQGEECGYDTVVQQVTKRTQESKEYKEMMHYLKNIMIAVVESMINKFEEDETRNQERQKKIQKEKSHSYRTDNCSDSDSSLNQSYKFCQGKLQLILDQLDPGQPKEVRYEALQTLCSAPPSDVLNCENWTTLCEKLTVSLSDPDPVFSDRILKFCAQTFLLSPLHMTKEIYTSLAKYLESYFLSRENHIPTLSAGVDITNPNMTRLLKKVRLLNEYQKEAPSFWIRHPEKYMEEIVESTLSLLTVKHNQSHVVSQKILDPIYFFALVDTKAVWFKKWMHAHYSRTTVLRLLETKYKSLVTTAIQQCVQYFEMCKTRKADETLGHSKHCRNKQKTFYYLGQELQYIYFIHSLCLLGRLLIYKQGRKLFPIKLKNKKGLVSLIDLLVLFTQLIYYSPSCPKMTSAAHSENYSPASMVTEVLWILSDQKECAVECLYNNIVIETLLQPIHNLMKGNEASPNCSETALIHIAGILARIASVEEGLILLLYGANMNSSEESPTGAHIIAQFSKKLLDEDISIFSGSEMLPVVKGAFISVCRHIYSTCEGLQVLITYNLHESIAKAWKKTSLLSERIPTPVEGSDSVSSVSQESQNIMAWEDNLLDDLLHFAATPKGLLLLQRTGAINECVTFIFNRYAKKLQVSRHKKFGYGVLVTRVASTAAGGIALKKSGFINELITELWSNLEYGRDDVRVTHPRTTPVDPIDRSCQKSFLALVNLLSYPAIYELVRNQDLPNKTEYSLREVPTCVIDIIDRLIILNSEAKIRSLFNYEQSHIFGLRDFIIDGLSVERNHVLVRINLVGGPLERILPPRLLEKSDNPYPWPMFSSYPLPNCYLSDITRNAGIKQDNDLDKLLLCLKISDKQTEWIENCQRQFCKMMKAKPDIISGEALIELLEKFVLHLTESPSECYFPSVEYTDGCFPLHDIHMIMPDSPVKFQLECNLSYS

SEQ ID NO: 8315 - protein, 115 aa, Artificial Sequence
  Synthetic polypeptide
MGYCSGRCTLIFICGMQLVCVLERQIFDFLGYQWAPILANFVHIIIVILGLFGTIQYRPRYITGILSFPKHQESLSLKFTCLTEVSSSKRNAIVLKPLRRNLIKQPGKINHWRGD

SEQ ID NO: 8316 - protein, 100 aa, Artificial Sequence
  Synthetic polypeptide
MKIVCVLERQIFDFLGYQWAPILANFVHIIIVILGLFGTIQYRPRYITGILSFPKHQESLSLKFTCLTEVSSSKRNAIVLKPLRRNLIKQPGKINHWRGD

SEQ ID NO: 8317 - protein, 6 aa, Artificial Sequence
  Synthetic polypeptide
MCPSWC

SEQ ID NO: 8318 - protein, 138 aa, Artificial Sequence
  Synthetic polypeptide
MEAQAQGLLETEPLQGTDEDAVASADFSSMLSEEEKEELKAELVQLEDEITTLRQVLSAKERHLVEIKQKLGMNLMNELKQNFSKSWHDMQTTTAYKKTHETLSHAGQKATAAFSNVGTAISKKFGDMRNKTYFIWCL

SEQ ID NO: 8319 - protein, 109 aa, Artificial Sequence
  Synthetic polypeptide
MLSEEEKEELKAELVQLEDEITTLRQVLSAKERHLVEIKQKLGMNLMNELKQNFSKSWHDMQTTTAYKKTHETLSHAGQKATAAFSNVGTAISKKFGDMRNKTYFIWCL

SEQ ID NO: 8320 - protein, 156 aa, Artificial Sequence
  Synthetic polypeptide
MEAQAQGLLETEPLQGTDEDAVASADFSSMLSEEEKEELKAELVQLEDEITTLRQVLSAKERHLVEIKQKLGMNLMNELKQNFSKSWHDMQTTTAYKKTHETLSHAGQKATAAFSNVGTAISKKFGDMRSHSIGYSIRHSISMPAMRNKTYFIWCL

SEQ ID NO: 8321 - protein, 151 aa, Artificial Sequence
  Synthetic polypeptide
MEAQAQGLLETEPLQGTDEDAVASADFSSMLSEEEKEELKAELVQLEDEITTLRQVLSAKERHLVEIKQKLGMNLMNELKQNFSKSWHDMQTTTAYKKTHETLSHAGQKATAAFSNVGTAISKKFGDMSYSIRHSISMPAMRNKTYFIWCL

SEQ ID NO: 8322 - protein, 122 aa, Artificial Sequence
  Synthetic polypeptide
MLSEEEKEELKAELVQLEDEITTLRQVLSAKERHLVEIKQKLGMNLMNELKQNFSKSWHDMQTTTAYKKTHETLSHAGQKATAAFSNVGTAISKKFGDMSYSIRHSISMPAMRNKTYFIWCL

SEQ ID NO: 8323 - protein, 289 aa, Artificial Sequence
  Synthetic polypeptide
MALSCTLNRYLLLMAQEHLEFRLPEIKSLLLLFGGQFASSQETYGKSPFWILSIPSEDIARNLMKRTVCAKSIFELWGHGQSPEELYSSLKNYPVEKMVPFLHSDSTYKIKIHTFNKTLTQEEKIKRIDALEFLPFEGKVNLKKPQHVFSVLEDYGLDPNCIPENPHNIYFGRWIADGQRELIESYSVKKRHFIGNTSMDAGLSFIMANHGKVKENDIVFDPFVGTGGLLIACAHFGAYVYGTDIDYNTVHGLGQSLHFLFLLSLLNMKVMRMKTFMMIHFHFMNSKSI

SEQ ID NO: 8324 - protein, 6 aa, Artificial Sequence
  Synthetic polypeptide
FVIHYG

SEQ ID NO: 8325 - protein, 19 aa, Artificial Sequence
  Synthetic polypeptide
MFNLGIYSFSWLQGPCMCW

SEQ ID NO: 8326 - protein, 212 aa, Artificial Sequence
  Synthetic polypeptide
MDTTAAAALPAFVALLLLSPWPLLGSAQGQFSAGGCTFDDGPGACDYHQDLYDDFEWVHVSAQEPHYLPPEMPQGSYMIVDSSDHDPGEKARLQLPTMKENDTHCIDFSYLLYSQKGLNPGTLNILVRVNKGPLANPIWNVTGFTGRDWLRAELAVSTFWPNEYQQQVTILEAESSLHQTTKPASALILDFAASRTVRNKFVLNYPVSGILL

SEQ ID NO: 8327 - skipped

SEQ ID NO: 8328 - protein, 186 aa, Artificial Sequence
  Synthetic polypeptide
MDTTAAAALPAFVALLLLSPWPLLGSAQGQFSAGGCTFDDGPGACDYHQDLYDDFEWVHVSAQEPHYLPPEMPQGSYMIVDSSDHDPGEKARLQLPTMKENDTHCIDFSYLLYSQKGLNPGTLNILVRVNKGPLANPIWNVTGFTGRDWLRAELAVSTFWPNEYQDAATSHHLGSREQPSPDNQTC

SEQ ID NO: 8329 - skipped

SEQ ID NO: 8330 - protein, 91 aa, Artificial Sequence
  Synthetic polypeptide
MDTTAAAALPAFVALLLLSPWPLLGSAQGQFSAGGCTFDDGPGACDYHQDLYDDFEWVHVSAQEPHYLPPEMPQGCFPAQALFACCHPCKT

SEQ ID NO: 8331 - protein, 34 aa, Artificial Sequence
  Synthetic polypeptide
VHVSAQEPHYLPPEMPQGCFPAQALFACCHPCKT

SEQ ID NO: 8332 - protein, 99 aa, Artificial Sequence
  Synthetic polypeptide
MDTTAAAALPAFVALLLLSPWPLLGSAQGQFSAVSVLVVGNFCCCCSAAVCHSIRHLSRTQNPGQDHEGRLKRNEDRRPEGGYPEIKESPQEKPALLVS

SEQ ID NO: 8333 - protein, 2494 aa, Artificial Sequence
  Synthetic polypeptide
MPGAAGVLLLLLLSGGLGGVQAQRPQQQRQSQAHQQRGLFPAVLNLASNALITTNATCGEKGPEMYCKLVEHVPGQPVRNPQCRICNQNSSNPNQRHPITNAIDGKNTWWQSPSIKNGIEYHYVTITLDLQQVFQIAYVIVKAANSPRPGNWILERSLDDVEYKPWQYHAVTDTECLTLYNIYPRTGPPSYAKDDEVICTSFYSKIHPLENGEIHISLINGRPSADDPSPELLEFTSARYIRLRFQRIRTLNADLMMFAHKDPREIDPIVTRRYYYSVKDISVGGMCICYGHARACPLDPATNKSRCECEHNTCGDSCDQCCPGFHQKPWRAGTFLTKTECEACNCHGKAEECYYDENVARRNLSLNIRGKYIGGGVCINCTQNTAGINCETCTDGFFRPKGVSPNYPRPCQPCHCDPIGSLNEVCVKDEKHARRGLAPGSCHCKTGFGGVSCDRCARGYTGYPDCKACNCSGLGSKNEDPCFGPCICKENVEGGDCSRCKSGFFNLQEDNWKGCDECFCSGVSNRCQSSYWTYGKIQDMSGWYLTDLPGRIRVAPQQDDLDSPQQISISNAEARQALPHSYYWSAPAPYLGNKLPAVGGQLTFTISYDLEEEEEDTERVLQLMIILEGNDLSISTAQDEVYLHPSEEHTNVLLLKEESFTIHGTHFPVRRKEFMTVLANLKRVLLQITYSFGMDAIFRLSSVNLESAVSYPTDGSIAAAVEVCQCPPGYTGSSCESCWPRHRRVNGTIFGGICEPCQCFGHAESCDDVTGECLNCKDHTGGPYCDKCLPGFYGEPTKGTSEDCQPCACPLNIPSNNFSPTCHLDRSLGLICDGCPVGYTGPRCERCAEGYFGQPSVPGGSCQPCQCNDNLDFSIPGSCDSLSGSCLICKPGTTGRYCELCADGYFGDAVDAKNCQPCRCNAGGSFSEVCHSQTGQCECRANVQGQRCDKCKAGTFGLQSARGCVPCNCNSFGSKSFDCEESGQCWCQPGVTGKKCDRCAHGYFNFQEGGCTACECSHLGNNCDPKTGRCICPPNTIGEKCSKCAPNTWGHSITTGCKACNCSTVGSLDFQCNVNTGQCNCHPKFSGAKCTECSRGHWNYPRCNLCDCFLPGTDATTCDSETKKCSCSDQTGQCTCKVNVEGIHCDRCRPGKFGLDAKNPLGCSSCYCFGTTTQCSEAKGLIRTWVTLKAEQTILPLVDEALQHTTTKGIVFQHPEIVAHMDLMREDLHLEPFYWKLPEQFEGKKLMAYGGKLKYAIYFEAREETGFSTYNPQVIIRGGTPTHARIIVRHMAAPLIGQLTRHEIEMTEKEWKYYGDDPRVHRTVTREDFLDILYDIHYILIKATYGNFMRQSRISEISMEVAEQGRGTTMTPPADLIEKCDCPLGYSGLSCEACLPGFYRLRSQPGGRTPGPTLGTCVPCQCNGHSSLCDPETSICQNCQHHTAGDFCERCALGYYGIVKGLPNDCQQCACPLISSSNNFSPSCVAEGLDDYRCTACPRGYEGQYCERCAPGYTGSPGNPGGSCQECECDPYGSLPVPCDPVTGFCTCRPGATGRKCDGCKHWHAREGWECVFCGDECTGLLLGDLARLEQMVMSINLTGPLPAPYKMLYGLENMTQELKHLLSPQRAPERLIQLAEGNLNTLVTEMNELLTRATKVTADGEQTGQDAERTNTRAKSLGEFIKELARDAEAVNEKAIKLNETLGTRDEAFERNLEGLQKEIDQMIKELRRKNLETQKEIAEDELVAAEALLKKVKKLFGESRGENEEMEKDLREKLADYKNKVDDAWDLLREATDKIREANRLFAVNQKNMTALEKKKEAVESGKRQIENTLKEGNDILDEANRLADEINSIIDYVEDIQTKLPPMSEELNDKIDDLSQEIKDRKLAEKVSQAESHAAQLNDSSAVLDGILDEAKNISFNATAAFKAYSNIKDYIDEAEKVAKEAKDLAHEATKLATGPRGLLKEDAKGCLQKSFRILNEAKKLANDVKENEDHLNGLKTRIENADARNGDLLRTLNDTLGKLSAIPNDTAAKLQAVKDKARQANDTAKDVLAQITELHQNLDGLKKNYNKLADSVAKTNAVVKDPSKNKIIADADATVKNLEQEADRLIDKLKPIKELEDNLKKNISEIKELINQARKQANSIKVSVSSGGDCIRTYKPEIKKGSYNNIVVNVKTAVADNLLFYLGSAKFIDFLAIEMRKGKVSFLWDVGSGVGRVEYPDLTIDDSYWYRIVASRTGRNGTISVRALDGPKASIVPSTHHSTSPPGYTILDVDANAMLFVGGLTGKLKKADAVRVITFTGCMGETYFDNKPIGLWNFREKEGDCKGCTVSPQVEDSEGTIQFDGEGYALVSRPIRWYPNISTVMFKFRTFSSSALLMYLATRDLRDFMSVELTDGHIKVSYDLGSGMASVVSNQNHNDGKWKSFTLSRIQKQATGMDLEVIILSDITQKQKIQYHMFSLTRREAKQWIHEDVKMETIDTGDSKRGEGGEGVKI

SEQ ID NO: 8334 - protein, 120 aa, Artificial Sequence
  Synthetic polypeptide
MALQVRVAPSKVVLQKFLLCVILFYTVYYVSLSMGCVMFEVHELNVLAPFDFKTNPSWLNINYKVLLVSTEVTYFVCGLFFVPVVEEWVWDYAISVTILHVAITSTGAVAHACNPSTLGG

SEQ ID NO: 8335 - protein, 64 aa, Artificial Sequence
  Synthetic polypeptide
MERPEAGGINSNECENVSRKKKMSEEFEANTMDSLVDMPFATVDIQDDCGNAVAHACVLNTLGG

SEQ ID NO: 8336 - protein, 63 aa, Artificial Sequence
  Synthetic polypeptide
MERPEAGINSNECENVSRKKKMSEEFEANTMDSLVDMPFATVDIQDDCGNAVAHACVLNTLGG

SEQ ID NO: 8337 - protein, 42 aa, Artificial Sequence
  Synthetic polypeptide
MSEEFEANTMDSLVDMPFATVDIQDDCGNAVAHACVLNTLGG

SEQ ID NO: 8338 - protein, 231 aa, Artificial Sequence
  Synthetic polypeptide
MCCWPLLLLWGLLPGTAAGGSGRTYPHRTLLDSEGKYWLGWSQRGSQIAFRLQVRTAGYVGFGFSPTGAMASADIVVGGVAHGRPYLQDYFTNANRELKKDAQQDYHLEYAMENSTHTIIEFTRELHTCDINDKSITDSTVRVIWAYHHEDAGEAGPKYHDSNRGTKSLRLLNPEKTSVLSTALPYFDLVNQDVPIPNKDTTYWCQMFKIPVFQEKHHVIKGLYHLASQEG

SEQ ID NO: 8339 - protein, 163 aa, Artificial Sequence
  Synthetic polypeptide
MNSFLSVFRYPDFSFPYFPQDYFTNANRELKKDAQQDYHLEYAMENSTHTIIEFTRELHTCDINDKSITDSTVRVIWAYHHEDAGEAGPKYHDSNRGTKSLRLLNPEKTSVLSTALPYFDLVNQDVPIPNKDTTYWCQMFKIPVFQEKHHVIKGLYHLASQEG

SEQ ID NO: 8340 - protein, 122 aa, Artificial Sequence
  Synthetic polypeptide
MVNKDMNGFPVKKCSAFQFFKKRVRRWIKSPMVSVDKHQSPSLKYTGSSMVHIPPGEPDFESSLCQTCLGEHAFQRGVLPQENESCSWETQSGCEVREPCNHANILTKPDPRTFWTNDDPGP

SEQ ID NO: 8341 - protein, 91 aa, Artificial Sequence
  Synthetic polypeptide
MVSVDKHQSPSLKYTGSSMVHIPPGEPDFESSLCQTCLGEHAFQRGVLPQENESCSWETQSGCEVREPCNHANILTKPDPRTFWTNDDPGP

SEQ ID NO: 8342 - protein, 746 aa, Artificial Sequence
  Synthetic polypeptide
MARRPRHSIYSSDEDDEDFEMCDHDYDGLLPKSGKRHLGKTRWTREEDEKLKKLVEQNGTDDWKVIANYLPNRTDVQCQHRWQKVLNPELIKGPWTKEEDQRVIELVQKYGPKRWSVIAKHLKGRIGKQCRERWHNHLNPEVKKTSWTEEEDRIIYQAHKRLGNRWAEIAKLLPGRTDNAIKNHWNSTMRRKVEQEGYLQESSKASQPAVATSFQKNSHLMGFAQAPPTAQLPATGQPTVNNDYSYYHISEAQNVSSHVPYPVALHVNIVNVPQPAAAAIQRHYNDEDPEKEKRIKELELLLMSTENELKGQQVLPTQNHTCSYPGWHSTTIADHTRPHGDSAPVSCLGEHHSTPSLPADPGSLPEESASPARCMIVHQGTILDNVKNLLEFAETLQFIDSDSSSWCDLSSFEFFEEADFSPSQHHTGKALQLQQREGNGTKPAGEPSPRVNKRMLSESSLDPPKVLPPARHSTIPLVILRKKRGQASPLATGDCSSFIFADVSSSTPKRSPVKSLPFSPSQFLNTSSNHENSDLEMPSLTSTPLIGHKLTVTTPFHRDQTVKTQKENTVFRTPAIKRSILESSPRTPTPFKHALAAQEIKYGPLKMLPQTPSHLVEDLQDVIKQESDESGIVAEFQENGPPLLKKIKQEVESPTDKSGNFFCSHHWEGDSLNTQLFTQTSPVADAPNILTSSVLMAPASEDEDNVLKAFTVPKNRSLASPLQLLGRLRQEDRLNPGGRGCSEPRS

SEQ ID NO: 8343 - protein, 711 aa, Artificial Sequence
  Synthetic polypeptide
MARRPRHSIYSSDEDDEDFEMCDHDYDGLLPKSGKRHLGKTRWTREEDEKLKKLVEQNGTDDWKVIANYLPNRTDVQCQHRWQKVLNPELIKGPWTKEEDQRVIELVQKYGPKRWSVIAKHLKGRIGKQCRERWHNHLNPEVKKTSWTEEEDRIIYQAHKRLGNRWAEIAKLLPGRTDNAIKNHWNSTMRRKVEQEGYLQESSKASQPAVATSFQKNSHLMGFAQAPPTAQLPATGQPTVNNDYSYYHISEAQNVSSHVPYPVALHVNIVNVPQPAAAAIQRHYNDEDPEKEKRIKELELLLMSTENELKGQQVLPTQNHTCSYPGWHSTTIADHTRPHGDSAPVSCLGEHHSTPSLPADPGSLPEESASPARCMIVHQGTILDNVKNLLEFAETLQFIDSFLNTSSNHENSDLEMPSLTSTPLIGHKLTVTTPFHRDQTVKTQKENTVFRTPAIKRSILESSPRTPTPFKHALAAQEIKYGPLKMLPQTPSHLVEDLQDVIKQESDESGIVAEFQENGPPLLKKIKQEVESPTDKSGNFFCSHHWEGDSLNTQLFTQTSPVADAPTGVQWHDFGSLQPLPPGFKRFSCLSLPRSWDYRHPPPRPANFEFLVETGFLHVGQAGLELLTSGDLPASASQSARITGVSHRARPDNILTSSVLMAPASEDEDNVLKAFTVPKNRSLASPLQLLGRLRQEDRLNPGGRGCSEPRS

SEQ ID NO: 8344 - protein, 622 aa, Artificial Sequence
  Synthetic polypeptide
MARRPRHSIYSSDEDDEDFEMCDHDYDGLLPKSGKRHLGKTRWTREEDEKLKKLVEQNGTDDWKVIANYLPNRTDVQCQHRWQKVLNPELIKGPWTKEEDQRVIELVQKYGPKRWSVIAKHLKGRIGKQCRERWHNHLNPEVKKTSWTEEEDRIIYQAHKRLGNRWAEIAKLLPGRTDNAIKNHWNSTMRRKVEQEGYLQESSKASQPAVATSFQKNSHLMGFAQAPPTAQLPATGQPTVNNDYSYYHISEAQNVSSHVPYPVALHVNIVNVPQPAAAAIQRHYNDEDPEKEKRIKELELLLMSTENELKGQQTQNHTCSYPGWHSTTIADHTRPHGDSAPVSCLGEHHSTPSLPADPGSLPEESASPARCMIVHQGTILDNVKNLLEFAETLQFIDSFLNTSSNHENSDLEMPSLTSTPLIGHKLTVTTPFHRDQTVKTQKENTVFRTPAIKRSILESSPRTPTPFKHALAAQEIKYGPLKMLPQTPSHLVEDLQDVIKQESDESGIVAEFQENGPPLLKKIKQEVESPTDKSGNFFCSHHWEGDSLNTQLFTQTSPVADAPNILTSSVLMAPASEDEDNVLKAFTVPKNRSLASPLQLLGRLRQEDRLNPGGRGCSEPRS

SEQ ID NO: 8345 - protein, 625 aa, Artificial Sequence
  Synthetic polypeptide
MARRPRHSIYSSDEDDEDFEMCDHDYDGLLPKSGKRHLGKTRWTREEDEKLKKLVEQNGTDDWKVIANYLPNRTDVQCQHRWQKVLNPELIKGPWTKEEDQRVIELVQKYGPKRWSVIAKHLKGRIGKQCRERWHNHLNPEVKKTSWTEEEDRIIYQAHKRLGNRWAEIAKLLPGRTDNAIKNHWNSTMRRKVEQEGYLQESSKASQPAVATSFQKNSHLMGFAQAPPTAQLPATGQPTVNNDYSYYHISEAQNVSSHVPYPVALHVNIVNVPQPAAAAIQRHYNDEDPEKEKRIKELELLLMSTENELKGQQVLPTQNHTCSYPGWHSTTIADHTRPHGDSAPVSCLGEHHSTPSLPADPGSLPEESASPARCMIVHQGTILDNVKNLLEFAETLQFIDSFLNTSSNHENSDLEMPSLTSTPLIGHKLTVTTPFHRDQTVKTQKENTVFRTPAIKRSILESSPRTPTPFKHALAAQEIKYGPLKMLPQTPSHLVEDLQDVIKQESDESGIVAEFQENGPPLLKKIKQEVESPTDKSGNFFCSHHWEGDSLNTQLFTQTSPVADAPNILTSSVLMAPASEDEDNVLKAFTVPKNRSLASPLQLLGRLRQEDRLNPGGRGCSEPRS

SEQ ID NO: 8346 - protein, 540 aa, Artificial Sequence
  Synthetic polypeptide
MARRPRHSIYSSDEDDEDFEMCDHDYDGLLPKSGKRHLGKTRWTREEDEKLKKLVEQNGTDDWKVIANYLPNRTDVQCQHRWQKVLNPELIKGPWTKEEDQRVIELVQKYGPKRWSVIAKHLKGRIGKQCRERWHNHLNPEVKKTSWTEEEDRIIYQAHKRLGNRWAEIAKLLPGRTDNAIKNHWNSTMRRKVEQEGYLQESSKASQPAVATSFQKNSHLMGFAQAPPTAQLPATGQPTVNNDYSYYHISEAQNVSSHVPYPVALHVNIVNVPQPAAAAIQRHYNDEDPEKEKRIKELELLLMSTENELKGQQVLPFLNTSSNHENSDLEMPSLTSTPLIGHKLTVTTPFHRDQTVKTQKENTVFRTPAIKRSILESSPRTPTPFKHALAAQEIKYGPLKMLPQTPSHLVEDLQDVIKQESDESGIVAEFQENGPPLLKKIKQEVESPTDKSGNFFCSHHWEGDSLNTQLFTQTSPVADAPNILTSSVLMAPASEDEDNVLKAFTVPKNRSLASPLQLLGRLRQEDRLNPGGRGCSEPRS

SEQ ID NO: 8347 - protein, 743 aa, Artificial Sequence
  Synthetic polypeptide
MARRPRHSIYSSDEDDEDFEMCDHDYDGLLPKSGKRHLGKTRWTREEDEKLKKLVEQNGTDDWKVIANYLPNRTDVQCQHRWQKVLNPELIKGPWTKEEDQRVIELVQKYGPKRWSVIAKHLKGRIGKQCRERWHNHLNPEVKKTSWTEEEDRIIYQAHKRLGNRWAEIAKLLPGRTDNAIKNHWNSTMRRKVEQEGYLQESSKASQPAVATSFQKNSHLMGFAQAPPTAQLPATGQPTVNNDYSYYHISEAQNVSSHVPYPVALHVNIVNVPQPAAAAIQRHYNDEDPEKEKRIKELELLLMSTENELKGQQTQNHTCSYPGWHSTTIADHTRPHGDSAPVSCLGEHHSTPSLPADPGSLPEESASPARCMIVHQGTILDNVKNLLEFAETLQFIDSDSSSWCDLSSFEFFEEADFSPSQHHTGKALQLQQREGNGTKPAGEPSPRVNKRMLSESSLDPPKVLPPARHSTIPLVILRKKRGQASPLATGDCSSFIFADVSSSTPKRSPVKSLPFSPSQFLNTSSNHENSDLEMPSLTSTPLIGHKLTVTTPFHRDQTVKTQKENTVFRTPAIKRSILESSPRTPTPFKHALAAQEIKYGPLKMLPQTPSHLVEDLQDVIKQESDESGIVAEFQENGPPLLKKIKQEVESPTDKSGNFFCSHHWEGDSLNTQLFTQTSPVADAPNILTSSVLMAPASEDEDNVLKAFTVPKNRSLASPLQLLGRLRQEDRLNPGGRGCSEPRS

SEQ ID NO: 8348 - protein, 590 aa, Artificial Sequence
  Synthetic polypeptide
MARRPRHSIYSSDEDDEDFEMCDHDYDGLLPKSGKRHLGKTRWTREEDEKLKKLVEQNGTDDWKVIANYLPNRTDVQCQHRWQKVLNPELIKGPWTKEEDQRVIELVQKYGPKRWSVIAKHLKGRIGKQCRERWHNHLNPEVKKTSWTEEEDRIIYQAHKRLGNRWAEIAKLLPGRTDNAIKNHWNSTMRRKVEQEGYLQESSKASQPAVATSFQKNSHLMGFAQAPPTAQLPATGQPTVNNDYSYYHISEAQNVSSHVPYPVALHVNIVNVPQPAAAAIQTQNHTCSYPGWHSTTIADHTRPHGDSAPVSCLGEHHSTPSLPADPGSLPEESASPARCMIVHQGTILDNVKNLLEFAETLQFIDSFLNTSSNHENSDLEMPSLTSTPLIGHKLTVTTPFHRDQTVKTQKENTVFRTPAIKRSILESSPRTPTPFKHALAAQEIKYGPLKMLPQTPSHLVEDLQDVIKQESDESGIVAEFQENGPPLLKKIKQEVESPTDKSGNFFCSHHWEGDSLNTQLFTQTSPVADAPNILTSSVLMAPASEDEDNVLKAFTVPKNRSLASPLQLLGRLRQEDRLNPGGRGCSEPRS

SEQ ID NO: 8349 - protein, 588 aa, Artificial Sequence
  Synthetic polypeptide
MARRPRHSIYSSDEDDEDFEMCDHDYDGLLPKSGKRHLGKTRWTREEDEKLKKLVEQNGTDDWKVIANYLPNRTDVQCQHRWQKVLNPELIKGPWTKEEDQRVIELVQKYGPKRWSVIAKHLKGRIGKQCRERWHNHLNPEVKKTSWTEEEDRIIYQAHKRLGNRWAEIAKLLPGRTDNAIKNHWNSTMRRKVEQEGYLQESSKASQPAVATSFQKNSHLMGFAQAPPTAQLPATGQPTVNNDYSYYHISEAQNVSSHVPYPVALHVNIVNVPQPAAAAIQRHYNDEDPEKEKRIKELELLLMSTENELKGQQVLPTQNHTCSYPGWHSTTIADHTRPHGDSAPVSCLGEHHSTPSLPADPGSLPEESASPARCMIVHQGTILDNVKNLLEFAETLQFIDSFLNTSSNHENSDLEMPSLTSTPLIGHKLTVTTPFHRDQTVKTQKENTVFRTPAIKRSILESSPRTPTPFKHALAAQEIKYGPLKMLPQTPSHLVEDLQDVIKQESDESGIVAEFQENGPPLLKKIKQENILTSSVLMAPASEDEDNVLKAFTVPKNRSLASPLQLLGRLRQEDRLNPGGRGCSEPRS

SEQ ID NO: 8350 - protein, 730 aa, Artificial Sequence
  Synthetic polypeptide
MARRPRHSIYSSDEDDEDFEMCDHDYDGLLPKSGKRHLGKTRWTREEDEKLKKLVEQNGTDDWKVIANYLPNRTDVQCQHRWQKVLNPELIKGPWTKEEDQRVIELVQKYGPKRWSVIAKHLKGRIGKQCRERWHNHLNPEVKKTSWTEEEDRIIYQAHKRLGNRWAEIAKLLPGRTDNAIKNHWNSTMRRKVEQEGYLQESSKASQPAVATSFQKNSHLMGFAQAPPTAQLPATGQPTVNNDYSYYHISEAQNVSSHVPYPVALHVNIVNVPQPAAAAIQRHYNDEDPEKEKRIKELELLLMSTENELKGQQVLPTQNHTCSYPGWHSTTIADHTRPHGDSAPVSCLGEHHSTPSLPADPGSLPEESASPARCMIVHQGTILDNDSSSWCDLSSFEFFEEADFSPSQHHTGKALQLQQREGNGTKPAGEPSPRVNKRMLSESSLDPPKVLPPARHSTIPLVILRKKRGQASPLATGDCSSFIFADVSSSTPKRSPVKSLPFSPSQFLNTSSNHENSDLEMPSLTSTPLIGHKLTVTTPFHRDQTVKTQKENTVFRTPAIKRSILESSPRTPTPFKHALAAQEIKYGPLKMLPQTPSHLVEDLQDVIKQESDESGIVAEFQENGPPLLKKIKQEVESPTDKSGNFFCSHHWEGDSLNTQLFTQTSPVADAPNILTSSVLMAPASEDEDNVLKAFTVPKNRSLASPLQLLGRLRQEDRLNPGGRGCSEPRS

SEQ ID NO: 8351 - protein, 1177 aa, Artificial Sequence
  Synthetic polypeptide
MPTAESEAKVKTKVRFEELLKTHSDLMREKKKLKKKLVRSEENISPDTIRSNLHYMKETTSDDPDTIRSNLPHIKETTSDDVSAANTNNLKKSTRVTKNKLRNTQLATENPNGDASVEEDKQGKPNKKVIKTVPQLTTQDLKPETPENKVDSTHQKTHTKPQPGVDHQKSEKANEGREETDLEEDEELMQAYQCHVTEEMAKEIKRKIRKKLKEQLTYFPSDTLFHDDKLSSEKRKKKKEVPVFSKAETSTLTISGDTVEGEQKKESSVRSVSSDSHQDDEISSMEQSTEDSMQDDTKPKPKKTKKKTKAVADNNEDVDGDGVHEITSRDSPVYPKCLLDDDLVLGVYIHRTDRLKSDFMISHPMVKIHVVDEHTGQYVKKDDSGRPVSSYYEKENVDYILPIMTQPYDFKQLKSRLPEWEEQIVFNENFPYLLRGSDESPKVILFFEILDFLSVDEIKNNSEVQNQECGFRKIAWAFLKLLGANGNANINSKLRLQLYYPPTKPRSPLSVVEAFEWWSKCPRNHYPSTLYVTVRGLKVPDCIKPSYRSMMALQEEKGKPVHCERHHESSSVDTEPGLEESKEVIKWKRLPGQACRIPNKHLFSLNAGERGCFCLDFSHNGRILAAACASRDGYPIILYEIPSGRFMRELCGHLNIIYDLSWSKDDHYILTSSSDGTARIWKNEINNTNTFRVLPHPSFVYTAKFHPAVRELVVTGCYDSMIRIWKVEMREDSAILVRQFDVHKSFINSLCFDTEGHHMYSGDCTGVIVVWNTYVKINDLEHSVHHWTINKEIKETEFKGIPISYLEIHPNGKRLLIHTKDSTLRIMDLRILVARKFVGAANYREKIHSTLTPCGTFLFAGSEDGIVYVWNPETGEQVAMYSDLPFKSPIRDISYHPFENMVAFCAFGQNEPILLYIYDFHVAQQEAEMFKRYNGTFPLPGIHQSQDALCTCPKLPHQGSFQIDEFVHTESSSTKMQLVKQRLETVTEVIRSCAAKVNKNLSFTSPPAVSSQQSKLKQSNMLTAQEILHQFGFTQTGIISIERKPCNHQVDTAPTVVALYDYTANRSDELTIHRGDIIRVFFKDNEDWWYGSIGKGQEGYFPANHVASETLYQELPPEIKERSPPLSPEEKTKIEKSPAPQKVGDNTGGQRSWMLLSILECRGQLPSTKNSLAKNVN

SEQ ID NO: 8352 - protein, 531 aa, Artificial Sequence
  Synthetic polypeptide
MRELCGHLNIIYDLSWSKDDHYILTSSSDGTARIWKNEINNTNTFRVLPHPSFVYTAKFHPAVRELVVTGCYDSMIRIWKVEMREDSAILVRQFDVHKSFINSLCFDTEGHHMYSGDCTGVIVVWNTYVKINDLEHSVHHWTINKEIKETEFKGIPISYLEIHPNGKRLLIHTKDSTLRIMDLRILVARKFVGAANYREKIHSTLTPCGTFLFAGSEDGIVYVWNPETGEQVAMYSDLPFKSPIRDISYHPFENMVAFCAFGQNEPILLYIYDFHVAQQEAEMFKRYNGTFPLPGIHQSQDALCTCPKLPHQGSFQIDEFVHTESSSTKMQLVKQRLETVTEVIRSCAAKVNKNLSFTSPPAVSSQQSKLKQSNMLTAQEILHQFGFTQTGIISIERKPCNHQVDTAPTVVALYDYTANRSDELTIHRGDIIRVFFKDNEDWWYGSIGKGQEGYFPANHVASETLYQELPPEIKERSPPLSPEEKTKIEKSPAPQKVGDNTGGQRSWMLLSILECRGQLPSTKNSLAKNVN

SEQ ID NO: 8353 - protein, 12 aa, Artificial Sequence
  Synthetic polypeptide
LTKCRRTRMFLS

SEQ ID NO: 8354 - protein, 8 aa, Artificial Sequence
  Synthetic polypeptide
HLLSLDPH

SEQ ID NO: 8355 - protein, 1082 aa, Artificial Sequence
  Synthetic polypeptide
MPTAESEAKVKTKVRFEELLKTHSDLMREKKKLKKKLVRSEENISPDTIRSNLHYMKETTSDDPDTIRSNLPHIKETTSDDVSAANTNNLKKSTRVTKNKLRNTQLATENPNGDASVEEDKQGKPNKKVIKTVPQLTTQDLKPETPENKVDSTHQKTHTKPQPGVDHQKSEKANEGREETDLEEDEELMQAYQCHVTEEMAKEIKRKIRKKLKEQLTYFPSDTLFHDDKLSSEKRKKKKEVPVFSKAETSTLTISGDTVEGEQKKESSVRSVSSDSHQDDEISSMEQSTEDSMQDDTKPKPKKTKKKTKAVADNNEDVDGDGVHEITSRDSPVYPKCLLDDDLVLGVYIHRTDRLKSDFMISHPMVKIHVVDEHTGQYVKKDDSGRPVSSYYEKENVDYILPIMTQPYDFKQLKSRLPEWEEQIVFNENFPYLLRGSDESPKVILFFEILDFLSVDEIKNNSEVQNQECGFRKIAWAFLKLLGANGNANINSKLRLQLYYPPTKPRSPLSVVEAFEWWSKCPRNHYPSTLYVTVRGLKVPDCIKPSYRSMMALQEEKGKPVHCERHHESSSVDTEPGLEESKEVIKWKRLPGQACRIPNKHLFSLNAGERGCFCLDFSHNGRILAAACASRDGYPIILYEIPSGRFMRELCGHLNIIYDLSWSKDDHYILTSSSDGTARIWKNEINNTNTFRVLPHPSFVYTAKFHPAVRELVVTGCYDSMIRIWKVEMREDSAILVRQFDVHKSFINSLCFDTEGHHMYSGDCTGVIVVWNTYVKINDLEHSVHHWTINKEIKETEFKGIPISYLEIHPNGKRLLIHTKDSTLRIMDLRILVARKFVGAANYREKIHSTLTPCGTFLFAGSEDGIVYVWNPETGEQVAMYSDLPFKSPIRDISYHPFENMVAFCAFGQNEPILLYIYDFHVAQQEAEMFKRYNGTFPLPGIHQSQDALCTCPKLPHQGSFQIDEFVHTESSSTKMQLVKQRLETVTEVIRSCAAKVNKNLSFTSPPAVSSQQSKLKQSNMLTAQEILHQFGFTQTGIISIERKPCNHQVDTAPTEVKVAVSRDCTTALQPGIRARLHLKNK

SEQ ID NO: 8356 - protein, 436 aa, Artificial Sequence
  Synthetic polypeptide
MRELCGHLNIIYDLSWSKDDHYILTSSSDGTARIWKNEINNTNTFRVLPHPSFVYTAKFHPAVRELVVTGCYDSMIRIWKVEMREDSAILVRQFDVHKSFINSLCFDTEGHHMYSGDCTGVIVVWNTYVKINDLEHSVHHWTINKEIKETEFKGIPISYLEIHPNGKRLLIHTKDSTLRIMDLRILVARKFVGAANYREKIHSTLTPCGTFLFAGSEDGIVYVWNPETGEQVAMYSDLPFKSPIRDISYHPFENMVAFCAFGQNEPILLYIYDFHVAQQEAEMFKRYNGTFPLPGIHQSQDALCTCPKLPHQGSFQIDEFVHTESSSTKMQLVKQRLETVTEVIRSCAAKVNKNLSFTSPPAVSSQQSKLKQSNMLTAQEILHQFGFTQTGIISIERKPCNHQVDTAPTEVKVAVSRDCTTALQPGIRARLHLKNK

SEQ ID NO: 8357 - protein, 12 aa, Artificial Sequence
  Synthetic polypeptide
LTKCRRTRMFLS

SEQ ID NO: 8358 - protein, 8 aa, Artificial Sequence
  Synthetic polypeptide
HLLSLDPH

SEQ ID NO: 8359 - protein, 952 aa, Artificial Sequence
  Synthetic polypeptide
MPTAESEAKVKTKVRFEELLKTHSDLMREKKKLKKKLVRSEENISPDTIRSNLHYMKETTSDDPDTIRSNLPHIKETTSDDVSAANTNNLKKSTRVTKNKLRNTQLATENPNGDASVEEDKQGKPNKKVIKTVPQLTTQDLKPETPENKVDSTHQKTHTKPQPGVDHQKSEKANEGREETDLEEDEELMQAYQCHVTEEMAKEIKRKIRKKLKEQLTYFPSDTLFHDDKLSSEKRKKKKEVPVFSKAETSTLTISGDTVEGEQKKESSVRSVSSDSHQDDEISSMEQSTEDSMQDDTKPKPKKTKKKTKAVADNNEDVDGDGVHEITSRDSPVYPKCLLDDDLVLGVYIHRTDRLKSDFMISHPMVKIHVVDEHTGQYVKKDDSGRPVSSYYEKENVDYILPIMTQPYDFKQLKSRLPEWEEQIVFNENFPYLLRGSDESPKVILFFEILDFLSVDEIKNNSEVQNQECGFRKIAWAFLKLLGANGNANINSKLRLQLYYPPTKPRSPLSVVEAFEWWSKCPRNHYPSTLYVTVRGLKVPDCIKPSYRSMMALQEEKGKPVHCERHHESSSVDTEPGLEESKEVIKWKRLPGQACRIPNKHLFSLNAGERGCFCLDFSHNGRILAAACASRDGYPIILYEIPSGRFMRELCGHLNIIYDLSWSKDDHYILTSSSDGTARIWKNEINNTNTFRVLPHPSFVYTAKFHPAVRELVVTGCYDSMIRIWKVEMREDSAILVRQFDVHKSFINSLCFDTEGHHMYSGDCTGVIVVWNTYVKINDLEHSVHHWTINKEIKETEFKGIPISYLEIHPNGKRLLIHTKDSTLRIMDLRILVARKFVGAANYREKIHSTLTPCGTFLFAGSEDGIVYVWNPETGEQVAMYSDLPFKSPIRDISYHPFENMVAFCAFGQNEPILLYIYDFHGTWMRLEIIILSKLSQGQKTKHHMFSLIDGN

SEQ ID NO: 8360 - protein, 306 aa, Artificial Sequence
  Synthetic polypeptide
MRELCGHLNIIYDLSWSKDDHYILTSSSDGTARIWKNEINNTNTFRVLPHPSFVYTAKFHPAVRELVVTGCYDSMIRIWKVEMREDSAILVRQFDVHKSFINSLCFDTEGHHMYSGDCTGVIVVWNTYVKINDLEHSVHHWTINKEIKETEFKGIPISYLEIHPNGKRLLIHTKDSTLRIMDLRILVARKFVGAANYREKIHSTLTPCGTFLFAGSEDGIVYVWNPETGEQVAMYSDLPFKSPIRDISYHPFENMVAFCAFGQNEPILLYIYDFHGTWMRLEIIILSKLSQGQKTKHHMFSLIDGN

SEQ ID NO: 8361 - protein, 12 aa, Artificial Sequence
  Synthetic polypeptide
LTKCRRTRMFLS

SEQ ID NO: 8362 - protein, 8 aa, Artificial Sequence
  Synthetic polypeptide
HLLSLDPH

SEQ ID NO: 8363 - protein, 281 aa, Artificial Sequence
  Synthetic polypeptide
MRPLQIVPSRLISQLYCGLKPPASTRNQICLKMARPSSSMADFRKFFAKAKHIVIISGAGVSAESGVPTFRGAGGYWRKWQAQDLATPLAFAHNPSRVWEFYHYRREVMGSKEPNAGHRAIAECETRLGKQGRRVVVITQNIDELHRKAGTKNLLEIHGSLFKTRCTSCGVVAENYKSPICPALSGKGCEEAGCGGLLRPHVVWFGENLDPAILEEVDRELAHCDLCLVVGTSSVVYPAAMFAPQVAARGVPVAEFNTETTPATNRFRWIVCESNLNKAVR

SEQ ID NO: 8364 - protein, 299 aa, Artificial Sequence
  Synthetic polypeptide
MRPLQIVPSRLISQLYCGLKPPASTRNQICLKMARPSSSMADFRKFFAKAKHIVIISGAGVSAESGVPTFRGAGGYWRKWQAQDLATPLAFAHNPSRVWEFYHYRREVMGSKEPNAGHRAIAECETRLGKQGRRVVVITQNIDELHRKAGTKNLLEIHGSLFKTRCTSCGVVAENYKSPICPALSGKGAPEPGTQDASIPVEKLPRCEEAGCGGLLRPHVVWFGENLDPAILEEVDRELAHCDLCLVVGTSSVVYPAAMFAPQVAARGVPVAEFNTETTPATNRFRWIVCESNLNKAVR

SEQ ID NO: 8365 - protein, 191 aa, Artificial Sequence
  Synthetic polypeptide
MGSKEPNAGHRAIAECETRLGKQGRRVVVITQNIDELHRKAGTKNLLEIHGSLFKTRCTSCGVVAENYKSPICPALSGKGAPEPGTQDASIPVEKLPRCEEAGCGGLLRPHVVWFGENLDPAILEEVDRELAHCDLCLVVGTSSVVYPAAMFAPQVAARGVPVAEFNTETTPATNRFRWIVCESNLNKAVR

SEQ ID NO: 8366 - protein, 302 aa, Artificial Sequence
  Synthetic polypeptide
MSAVCGGAARMLRTPGRHGYAAEFSPYLPGRLACATAQHYGIAGCGTLLILDPDEAGLRLFRSFDWNDGLFDVTWSENNEHVLITCSGDGSLQLWDTAKAAGPLQVYKEHAQEVYSVDWSQTRGEQLVVSGSWDQTVKLWDPTVGKSLCTFRGHESIIYSTIWSPHIPGCFASASGDQTLRIWDVKAAGVRIVIPAHQAEILSCDWCKYNENLLVTGAVDCSLRGWDLRNVRQPVFELLGHTYAIRRVKFSPFHASVLASCSYDFTVRFWNFSKPDSLLETVEHHTEFTCGLDFSLQSPTQM

SEQ ID NO: 8367 - protein, 164 aa, Artificial Sequence
  Synthetic polypeptide
MIRCGLACERCRWILPLLLLSAIAFDIIALAGRGWLQSSDHGQTSSLWWKCSQEGGGSGSYEEGCQSLMEYAWGRAAAAMLFCGFIILVICFILSFFALCGPQMLVFLRVIGGLLALAEKTLTCQNEHGKEGFQVPSERQSSTHSLREWESVSMASNRKVSIEI

SEQ ID NO: 8368 - protein, 266 aa, Artificial Sequence
  Synthetic polypeptide
MAALAPLPPLPAQFKSIQHHLRTAQEHDKRDPVVAYYCRLYAMQTGMKIDSKTPECRKFLSKLMDQLEALKKQLGDNEAITQEIVGCAHLENYALKMFLYADNEDRAGRFHKNMIKSFYTASLLIDVITVFGELTDENVKHRKYARWKATYIHNCLKNGETPQAGPVGIEEDNDIEENEDAGAASLPTQPTQPSSSSTYDPSNMPSGNYTGIQIPPGAHAPANTPAEVPHSTGVASNTIQPTPQTIPAIDPALFNTISQDAVKKMK

SEQ ID NO: 8369 - protein, 208 aa, Artificial Sequence
  Synthetic polypeptide
MTSETLWWLITLKKQLGDNEAITQEIVGCAHLENYALKMFLYADNEDRAGRFHKNMIKSFYTASLLIDVITVFGELTDENVKHRKYARWKATYIHNCLKNGETPQAGPVGIEEDNDIEENEDAGAASLPTQPTQPSSSSTYDPSNMPSGNYTGIQIPPGAHAPANTPAEVPHSTGVASNTIQPTPQTIPAIDPALFNTISQDAVKKMK

SEQ ID NO: 8370 - protein, 42 aa, Artificial Sequence
  Synthetic polypeptide
MEAKAAPKPAASGACSVSAEETEKWMEEAMHMLPEALTGSRC

SEQ ID NO: 8371 - protein, 44 aa, Artificial Sequence
  Synthetic polypeptide
MEAKAAPKPAASGACSVSAEETEKWMEEAMHMWKLPEALTGSRC

SEQ ID NO: 8372 - protein, 176 aa, Artificial Sequence
  Synthetic polypeptide
MAGGGAGDPGLGAAAAPAPETREHLFKVLVIGELGVGKTSIIKRYVHQLFSQHYRATIGVDFALKVLNWDSRTLVRLQLWDIAGQERFGNMTRVYYKEAVGAFVVFDISRSSTFEAVLKWKSDLDSKVHLPNGSPIPAVLLANKCDQNKDSSQSPSQVDQFCKEHGFAGWFETSAK

SEQ ID NO: 8373 - protein, 311 aa, Artificial Sequence
  Synthetic polypeptide
MRKFNIRKVLDGLTAGSSSASQQQQQQHPPGNREPEIQETLQSEHFQLCKTVRHGFPYQPSALAFDPVQKILAVGTQTGALRLFGRPGVECYCQHDSGAAVIQLQFLINEGALVSALADDTLHLWNLRQKRPAILHSLKFCRERVTFCHLPFQSKWLYVGTERGNIHIVNVESFTLSGYVIMWNKAIELSSKSHPGPVVHISDNPMDEGKLLIGFESGTVVLWDLKSKKADYRYTYDEAIHSVAWHHEGKQFICSHSDGTLTIWNVRSPAKPVQTITPHGKQLKDGKKPEPCKPILKVEFKTTRSGSRRTN

SEQ ID NO: 8374 - protein, 310 aa, Artificial Sequence
  Synthetic polypeptide
MRKFNIRKVLDGLTAGSSSASQQQQQQHPPGNREPEIQETLQSEHFQLCKTVRHGFPYQPSALAFDPVQKILAVGTQTGALRLFGRPGVECYCQHDSGAAVIQLQFLINEGALVSALADDTLHLWNLRQKRPAILHSLKFCRERVTFCHLPFQSKWLYVGTERGNIHIVNVESFTLSGYVIMWNKAIELSSKSHPGPVVHISDNPMDEGKLLIGFESGTVVLWDLKSKKADYRYTYDEAIHSVAWHHEGKQFICSHSDGTLTIWNVRSPAKPVQTITPHGKQLKDGKKPEPCKPILKVEFKTTRSGRRTN

SEQ ID NO: 8375 - protein, 319 aa, Artificial Sequence
  Synthetic polypeptide
MRKFNIRKVLDGLTAGSSSASQQQQQQHPPGNREPEIQETLQSEHFQLCKTVRHGFPYQPSALAFDPVQKILAVGTQTGALRLFGRPGVECYCQHDSGAAVIQLQFLINEGALVSALADDTLHLWNLRQKRPAILHSLKFCRERVTFCHLPFQSKWLYVGTERGNIHIVNVESFTLSGYVIMWNKAIELSSKSHPGPVVHISDNPMDEGKLLIGFESGTVVLWDLKSKKADYRYTYDEAIHSVAWHHEGKQFICSHSDGTLTIWNVRSPAKPVQTITPHGKQLKDGKKPEPCKPILKVEFKTTRSGSGALLKRYPKMWK

SEQ ID NO: 8376 - protein, 718 aa, Artificial Sequence
  Synthetic polypeptide
MRKFNIRKVLDGLTAGSSSASQQQQQQHPPGNREPEIQETLQSEHFQLCKTVRHGFPYQPSALAFDPVQKILAVGTQTGALRLFGRPGVECYCQHDSGAAVIQLQFLINEGALVSALADDTLHLWNLRQKRPAILHSLKFCRERVTFCHLPFQSKWLYVGTERGNIHIVNVESFTLSGYVIMWNKAIELSSKSHPGPVVHISDNPMDEGKLLIGFESGTVVLWDLKSKKADYRYTYDEAIHSVAWHHEGKQFICSHSDGTLTIWNVRSPAKPVQTITPHGKQLKDGKKPEPCKPILKVEFKTTRSGEPFIILSGGLSYDTVGRRPCLTVMHGKSTAVLEMDYSIVDFLTLCETPYPNDFQEPYAVVVLLEKDLVLIDLAQNGYPIFENPYPLSIHESPVTCCEYFADCPVDLIPALYSVGARQKRQGYSKKEWPINGGNWGLGAQSYPEIIITGHADGSVKFWDASAITLQVLYKLKTSKVFEKSRNKDDRPNTDIVDEDPYAIQIISWCPESRMLCIAGVSAHVIIYRFSKQEVITEVIPMLEVRLLYEINDVETPEGEQPPPLPTPVGGSNPQPIPPQSHPSTSSSSSDGLRDNVPCLKVKNSPLKQSPGYQTELVIQLVWVGGEPPQQITSLAVNSSYGLVVFGNCNGIAMVDYLQKAVLLNLGTIELYGSNDPYRREPRSPRKSRQPSGVCDTRKDISLKLSVLIYKMKVVTPS

SEQ ID NO: 8377 - protein, 389 aa, Artificial Sequence
  Synthetic polypeptide
MHGKSTAVLEMDYSIVDFLTLCETPYPNDFQEPYAVVVLLEKDLVLIDLAQNGYPIFENPYPLSIHESPVTCCEYFADCPVDLIPALYSVGARQKRQGYSKKEWPINGGNWGLGAQSYPEIIITGHADGSVKFWDASAITLQVLYKLKTSKVFEKSRNKDDRPNTDIVDEDPYAIQIISWCPESRMLCIAGVSAHVIIYRFSKQEVITEVIPMLEVRLLYEINDVETPEGEQPPPLPTPVGGSNPQPIPPQSHPSTSSSSSDGLRDNVPCLKVKNSPLKQSPGYQTELVIQLVWVGGEPPQQITSLAVNSSYGLVVFGNCNGIAMVDYLQKAVLLNLGTIELYGSNDPYRREPRSPRKSRQPSGVCDTRKDISLKLSVLIYKMKVVTPS

SEQ ID NO: 8378 - protein, 10 aa, Artificial Sequence
  Synthetic polypeptide
ESSAAQPGHY

SEQ ID NO: 8379 - protein, 50 aa, Artificial Sequence
  Synthetic polypeptide
IELYGSNDPYRREPRSPRKSRQPSGVCDTRKDISLKLSVLIYKMKVVTPS

SEQ ID NO: 8380 - protein, 316 aa, Artificial Sequence
  Synthetic polypeptide
MKKKQQHPGGGADPWPHGAPMGGAPPGLGSWKRRVPLLPFLRFSLRDYGFCMATLLVFCLGSLLYQLSGGPPRFLLDLRQYLGNSTYLDDHGPPPSKVLPFPSQVVYNRVGKCGSRTVVLLLRILSEKHGFNLVTSDIHNKTRLTKNEQMELIKNISTAEQPYLFTRHVHFLNFSRFGGDQPVYINIIRDPVNRFLSNYFFRRFGDWRGEQNHMIRTPSMRQEERYLDINECILENYPECSNPRLFYIIPYFCGQHPRCREPGEWALERAKLNVNENFLLVGILEELEDVLLLLERFLPHYFKGVLSIYKDPGERD

SEQ ID NO: 8381 - protein, 39 aa, Artificial Sequence
  Synthetic polypeptide
MAQGSHQIDFQVLHDLRQKFPEVPEVVVSRCMLQKYWKN

SEQ ID NO: 8382 - protein, 122 aa, Artificial Sequence
  Synthetic polypeptide
MPGARSGGSGGDGSNSGSYSGDASGAVTVWEVVSLLGKLLGTVVALKVVLYLLRVCLAMAWKSGGASHSELIHNLRRFLKLVNGISVSMITSTPIPKSSQSGIYYLPNITHYPSSFLCPCCY

SEQ ID NO: 8383 - protein, 64 aa, Artificial Sequence
  Synthetic polypeptide
MAWKSGGASHSELIHNLRRFLKLVNGISVSMITSTPIPKSSQSGIYYLPNITHYPSSFLCPCCY

SEQ ID NO: 8384 - protein, 16 aa, Artificial Sequence
  Synthetic polypeptide
GRWSHSWENCWAPSSR

SEQ ID NO: 8385 - protein, 453 aa, Artificial Sequence
  Synthetic polypeptide
MASVAQESAGSQRRLPPRHGALRGLLLLCLWLPSGRAALPPAAPLSELHAQLSGVEQLLEEFRRQLQQERPQEELELELRAGGGPQEDCPGPGSGGYSAMPDAIIRTKDSLAAGASFLRAPAAVRGWRQCVAACCSEPRCSVAVVELPRRPAPPAAVLGCYLFNCTARGRNVCKFALHSGYSSYSLSRAPDGAALATARASPRQEKDAPPLSKAGQDVVLHLPTDGVVLDGRESTDDHAIVQYEWALLQGDPSVDMKVPQSGTLKLSHLQEGTYTFQLTVTDTAGQRSSDNVSVTVLRAAYSTGGCLHTCSRYHFFCDDGCCIDITLACDGVQQCPDGSDEDFCQNLGLDRKMVTHTAASPALPRTTGPSEDAGGDSLVEKSQKATAPNKPPALSNTEKRNHSAFWGPESQIIPVMPDSSSSGKNRKEESYIFESKGDGGGGEHPAPETGKEH

SEQ ID NO: 8386 - protein, 198 aa, Artificial Sequence
  Synthetic polypeptide
MKVPQSGTLKLSHLQEGTYTFQLTVTDTAGQRSSDNVSVTVLRAAYSTGGCLHTCSRYHFFCDDGCCIDITLACDGVQQCPDGSDEDFCQNLGLDRKMVTHTAASPALPRTTGPSEDAGGDSLVEKSQKATAPNKPPALSNTEKRNHSAFWGPESQIIPVMPDSSSSGKNRKEESYIFESKGDGGGGEHPAPETGKEH

SEQ ID NO: 8387 - protein, 291 aa, Artificial Sequence
  Synthetic polypeptide
MGTRLPLVLRQLRRPPQPPGPPRRLRVPCRASSGGGGGGGGGREGLLGQRRPQDGQARSSCSPGGRTPAARDSIVREVIQNSKEVLSLLQEKNPAFKPVLAIIQAGDDNLMQEINQNLAEEAGLNITHICLPPDSSEAEIIDEILKINEDTRVHGLALQISENLFSNKVLNALKPEKDVDGVTDINLGKLVRGDAHECFVSPVAKAVIELLEKSGVNLDGKKILVVGAHGSLEAALQCLFQRKGSMTMSIQWKTRQLQSKHFGRLRQADHLRLGFQDQPDQHGETPSLLKI

SEQ ID NO: 8388 - protein, 45 aa, Artificial Sequence
  Synthetic polypeptide
VAGRACLDSGGRRMARPGAAAAPAAERPRRGTPSSEKSFRIQKKF

SEQ ID NO: 8389 - protein, 136 aa, Artificial Sequence
  Synthetic polypeptide
LALQISENLFSNKVLNALKPEKDVDGVTDINLGKLVRGDAHECFVSPVAKAVIELLEKSGVNLDGKKILVVGAHGSLEAALQCLFQRKGSMTMSIQWKTRQLQSKHFGRLRQADHLRLGFQDQPDQHGETPSLLKI

SEQ ID NO: 8390 - protein, 136 aa, Artificial Sequence
  Synthetic polypeptide
ALQISENLFSNKVLNALKPEKDVDGVTDINLGKLVRGDAHECFVSPVAKAVIELLEKSVGVNLDGKKILVVGAHGSLEAALQCLFQRKGSMTMSIQWKTRQLQSKHFGRLRQADHLRLGFQDQPDQHGETPSLLKI

SEQ ID NO: 8391 - protein, 577 aa, Artificial Sequence
  Synthetic polypeptide
MGTRLPLVLRQLRRPPQPPGPPRRLRVPCRASSGGGGGGGGGREGLLGQRRPQDGQARSSCSPGGRTPAARDSIVREVIQNSKEVLSLLQEKNPAFKPVLAIIQAGDDNLMQEINQNLAEEAGLNITHICLPPDSSEAEIIDEILKINEDTRVHGLALQISENLFSNKVLNALKPEKDVDGVTDINLGKLVRGDAHECFVSPVAKAVIELLEKSGVNLDGKKILVVGAHGSLEAALQCLFQRKGSMTMSIQWKTRQLQSKLHEADIVVLGSPKPEEIPLTWIQPGTTVLNCSHDFLSGKVGCGSPRIHFGGLIEEDDVILLAAALRIQNMVSSGRRWLREQQHRRWRLHCLKLQPLSPVPSDIEISRGQTPKAVDVLAKEIGLLADEIEIYGKSKAKVRLSVLERLKDQADGKYVLVAGITPTPLGEGKSTVTIGLVQALTAHLNVNSFACLRQPSQGPTFGVKGGAAGGGYAQVIPMEEFNLHLTGDIHAITAANNLLAAAIDTRILHENTQTDKALYNRLVPLVNGVREFSEIQLARLKKLGINKTDPSTLTEEEVSKFARLDIDPSTITWQRGR

SEQ ID NO: 8392 - protein, 711 aa, Artificial Sequence
  Synthetic polypeptide
MGTRLPLVLRQLRRPPQPPGPPRRLRVPCRASSGGGGGGGGGREGLLGQRRPQDGQARSSCSPGGRTPAARDSIVREVIQNSKEVLSLLQEKNPAFKPVLAIIQAGDDNLMQEINQNLAEEAGLNITHICLPPDSSEAEIIDEILKINEDTRVHGLALQISENLFSNKVLNALKPEKDVDGVTDINLGKLVRGDAHECFVSPVAKAVIELLEKSGVNLDGKKILVVGAHGSLEAALQCLFQRKGSMTMSIQWKTRQLQSKLHEADIVVLGSPKPEEIPLTWIQPGTTVLNCSHDFLSGKVGCGSPRIHFGGLIEEDDVILLAAALRIQNMVSSGRRWLREQQHRRWRLHCLKLQPLSPVPSDIEISRGQTPKAVDVLAKEIGLLADEIEIYGKSKAKVRLSVLERLKDQADGKYVLVAGITPTPLGEGKSTVTIGLVQALTAHLNVNSFACLRQPSQGPTFGVKGGAAGGGYAQVIPMEEFNLHLTGDIHAITAANNLLAAAIDTRILHENTQTDKALYNRLVPLVNGVREFSEIQLARLKKLGINKTDPSTLTEEEVSKFARLDIDPSTITWQRVLDTNDRFLRKITIGQGNTEKGHYRQAQFDIAVASEIMAVLALTDSLADMKARLGRMVVASDKSGQPVTADDLGVTGALTVLMKDAIKPNLMQTLEGTPVFVHAGPFANIAHGNSSVLADKIALKLVGEEGFVGLF

SEQ ID NO: 8393 - protein, 714 aa, Artificial Sequence
  Synthetic polypeptide
MGTRLPLVLRQLRRPPQPPGPPRRLRVPCRASSGGGGGGGGGREGLLGQRRPQDGQARSSCSPGGRTPAARDSIVREVIQNSKEVLSLLQEKNPAFKPVLAIIQAGDDNLMQEINQNLAEEAGLNITHICLPPDSSEAEIIDEILKINEDTRVHGLALQISENLFSNKVLNALKPEKDVDGVTDINLGKLVRGDAHECFVSPVAKAVIELLEKSGVNLDGKKILVVGAHGSLEAALQCLFQRKGSMTMSIQWKTRQLQSKLHEADIVVLGSPKPEEIPLTWIQPGTTVLNCSHDFLSGKVGCGSPRIHFGGLIEEDDVILLAAALRIQNMVSSGRRWLREQQHRRWRLHCLKLQPLSPVPSDIEISRGQTPKAVDVLAKEIGLLADEIEIYGKSKAKVRLSVLERLKDQADGKYVLVAGITPTPLGEGKSTVTIGLVQALTAHLNVNSFACLRQPSQGPTFGVKGGAAGGGYAQVIPMEEFNLHLTGDIHAITAANNLLAAAIDTRILHENTQTDKALYNRLVPLVNGVREFSEIQLARLKKLGINKTDPSTLTEEEVSKFARLDIDPSTITWQRVLDTNDRFLRKITIGQGNTEKGHYRQAQFDIAVASEIMAVLALTDSLADMKARLGRMVVASDKSGQPVTADDLGVTGALTVLMKDAIKPNLMQTLEGTPVFVHAGPFANIAHGNSSVLADKIALKLVGEEGFVGMKCSD

SEQ ID NO: 8394 - protein, 794 aa, Artificial Sequence
  Synthetic polypeptide
MGNSDSQYTLQGSKNHSNTITGAKQIPCSLKIRGIHAKEEKSLHGWGHGSNGAGYKSRSLARSCLSHFKSNQPYASRLGGPTCKVSRGVAYSTHRTNAPGKDFQGISAAFSTENGFHSVGHELADNHITSRDCNGHLLNCYGRNESIASTPPGEDRKSPRVLIKTLGKLDGCLRVEFHNGGNPSKVPAEDCSEPVQLLRYSPTLASETSPVPEARRGSSADSLPSHRPSPTDSRLRSSKGSSLSSESSWYDSPWGNAGELSEAEGSFLAPGMPDPSLHASFPPGDAKKPFNQSSSLSSLRELYKDANLGSLSPSGIRLSDEYMGTHASLSNRVSFASDIDVPSRVAHGDPIQYSSFTLPCRKPKAFVEDTAKKDSLKARMRRISDWTGSLSRKKRKLQEPRSKEGSDYFDSRSDGLNTDVQGSSQASAFLWSGGSTQILSQRSESTHAIGSDPLRQNIYENFMRELEMSRTNTENIETSTETAESSSESLSSLEQLDLLFEKEQGVVRKAGWLFFKPLVTVQKERKLELVARRKWKQYWVTLKGCTLLFYETYGKNSMDQSSAPRCALFAEDSIVQSVPEHPKKENVFCLSNSFGDVYLFQATSQTDLENWVTAVHSACASLFAKKHGKEDTLRLLKNQTKNLLQKIDMDSKMKKMAELQLSVVSDPKNRKAIENQIQQWEQNLEKFHMDLFRMRCYLASLQGGELPNPKSLLAAASRPSKLALGRLGILSVSSFHALVCSRDDSALRKRTLSLTQRGRNKKGIFSSLKGLDTLARKGKEKRPSITQEVMMVPS

SEQ ID NO: 8395 - protein, 146 aa, Artificial Sequence
  Synthetic polypeptide
MDSKMKKMAELQLSVVSDPKNRKAIENQIQQWEQNLEKFHMDLFRMRCYLASLQGGELPNPKSLLAAASRPSKLALGRLGILSVSSFHALVCSRDDSALRKRTLSLTQRGRNKKGIFSSLKGLDTLARKGKEKRPSITQEVMMVPS

SEQ ID NO: 8396 - protein, 106 aa, Artificial Sequence
  Synthetic polypeptide
MDLFRMRCYLASLQGGELPNPKSLLAAASRPSKLALGRLGILSVSSFHALVCSRDDSALRKRTLSLTQRGRNKKGIFSSLKGLDTLARKGKEKRPSITQEVMMVPS

SEQ ID NO: 8397 - protein, 167 aa, Artificial Sequence
  Synthetic polypeptide
MPPGGGGPMKDCEYSQISTHSSSPMESPHKKKKIAARRKWEVFPGRNKFFCNGRIMMARQTGVFYLTLVLILVTSGLFFAFDCPYLAVKITPAIPAVAGILFFFVMGTLLRTSFSDPGVLPRATPDEAADLERQIGALCFHLDNGIPRPCLTHRSIMRNGCINLKKL

SEQ ID NO: 8398 - protein, 43 aa, Artificial Sequence
  Synthetic polypeptide
MSVPGGENHPCHPCSRWHPVLLCDGDPAPHQLQRPRSPPTSHA

SEQ ID NO: 8399 - protein, 122 aa, Artificial Sequence
  Synthetic polypeptide
MATKARVMYDFAAEPGNNELTVNEGEIITITNPDVGGGWLEGRNIKGERGLVPTDYVEILPSDGKDQFSCGNSVADQAFLDSLSASTAQASSSAASNNHQPGTVAHACNPTSTLGGRGGRIT

SEQ ID NO: 8400 - protein, 22 aa, Artificial Sequence
  Synthetic polypeptide
MVNVLKGVLIEWYMLENSISNC

SEQ ID NO: 8401 - protein, 52 aa, Artificial Sequence
  Synthetic polypeptide
MNAAVPPEQAHSCGWGTEGCPCLRSTAIRQTFFPGGDQFQMQIIAGHHGVCL

SEQ ID NO: 8402 - protein, 45 aa, Artificial Sequence
  Synthetic polypeptide
MKNEEHCPGSFFLCKIRECVLNYRFQLQHPGFQHYLQSSGRRDSS

SEQ ID NO: 8403 - protein, 76 aa, Artificial Sequence
  Synthetic polypeptide
MLPILVSKFLASSDPPVSVPEMLGLQNRWRGMKNEEHCPGSFFLCKIRECVLNYRFQLQHPGFQHYLQSSGRRDSS

SEQ ID NO: 8404 - protein, 122 aa, Artificial Sequence
  Synthetic polypeptide
MNAAVPPEQAHSCGWGTEGCPCLRSTAIRQTFFPGGDQFQRDGGLAMLPILVSKFLASSDPPVSVPEMLGLQNRWRGMKNEEHCPGSFFLCKIRECVLNYRFQLQHPGFQHYLQSSGRRDSS

SEQ ID NO: 8405 - protein, 301 aa, Artificial Sequence
  Synthetic polypeptide
MKLRSSHNASKTLNANNMETLIECQSEGDIKEHPLLASCESEDSICQLIEVKKRKKVLSWPFLMRRLSPASDFSGALETDLKASLFDQPLSIICGDSDTLPRPIQDILTILCLKGPSTEGIFRRAANEKARKELKEELNSGDAVDLERLPVHLLAVVFKDFLRSIPRKLLSSDLFEEWMGALEMQDEEDRIEALKQVADKLPRPNLLLLKHLVYVLHLISKNSEVNRMDSSNLAICIGPNMLTLENDQSLSFEAQKDLNNKVKTLVEFLIDNCFEIFGENIPVHSSITSDDSLEHTDSSGS

SEQ ID NO: 8406 - protein, 123 aa, Artificial Sequence
  Synthetic polypeptide
MGALEMQDEEDRIEALKQVADKLPRPNLLLLKHLVYVLHLISKNSEVNRMDSSNLAICIGPNMLTLENDQSLSFEAQKDLNNKVKTLVEFLIDNCFEIFGENIPVHSSITSDDSLEHTDSSGS

SEQ ID NO: 8407 - protein, 434 aa, Artificial Sequence
  Synthetic polypeptide
MLCYVTRPDAVLMEVEVEAKANGEDCLNQVCRRLGIIEVDYFGLQFTGSKGESLWLNLRNRISQQMDGLAPYRLKLRVKFFVEPHLILQEQTRHIFFLHIKEALLAGHLLCSPEQAVELSALLAQTKFGDYNQNTAKYNYEELCAKELSSATLNSIVAKHKELEGTSQASAEYQVLQIVSAMENYGIEWHSVRDSEGQKLLIGVGPEGISICKDDFSPINRIAYPVVQMATQSGKNVYLTVTKESGNSIVLLFKMISTRAASGLYRAITETHAFYRCDTVTSAVMMQYSRDLKGHLASLFLNENINLGKKYVFDIKRTSKEVYDHARRALYNAGVVDLVSRNNQSPSHSPLKSSESSMNCSSCEGLSCQQTRVLQEKLRKLKEAMLCMVCCEEEINSTFCPCGHTVCCESCAAQLQFQLLGGREARGLLKTRSS

SEQ ID NO: 8408 - protein, 253 aa, Artificial Sequence
  Synthetic polypeptide
MENYGIEWHSVRDSEGQKLLIGVGPEGISICKDDFSPINRIAYPVVQMATQSGKNVYLTVTKESGNSIVLLFKMISTRAASGLYRAITETHAFYRCDTVTSAVMMQYSRDLKGHLASLFLNENINLGKKYVFDIKRTSKEVYDHARRALYNAGVVDLVSRNNQSPSHSPLKSSESSMNCSSCEGLSCQQTRVLQEKLRKLKEAMLCMVCCEEEINSTFCPCGHTVCCESCAAQLQFQLLGGREARGLLKTRSS

SEQ ID NO: 8409 - protein, 419 aa, Artificial Sequence
  Synthetic polypeptide
MRIEERKSQHLTGLTDEKVKAYLSLHPQVLDEFVSESVSAETVEKWLKRKNNKSEDESAPKEVSRYQDTNMQGVVYELNSYIEQRLDTGGDNQLLLYELSSIIKIATKADGFALYFLGECNNSLCIFTPPGIKEGKPRLIPAGPITQGTTVSAYVAKSRKTLLVEDILGDERFPRGTGLESGTRIQSVLCLPIVTAIGDLIGILELYRHWGKEAFCLSHQEVATANLAWASVAIHQVQVCRGLAKQTELNDFLLDVSKTYFDNIVAIDSLLEHIMIYAKNLVNADRCALFQVDHKNKELYSDLFDIGEEKEGKPVFKKTKEIRFSIEKGIAGQVARTGEVLNIPDAYADPRFNREVDLYTGYTTRNILCMPIVSRGSVIGVVQMVNKISGSAFSKTDENNFKMFAVFCALALHCANGHG

SEQ ID NO: 8410 - protein, 429 aa, Artificial Sequence
  Synthetic polypeptide
MEDGPSNNASCFRRLTECFLSPSLTDEKVKAYLSLHPQVLDEFVSESVSAETVEKWLKRKNNKSEDESAPKEVSRYQDTNMQGVVYELNSYIEQRLDTGGDNQLLLYELSSIIKIATKADGFALYFLGECNNSLCIFTPPGIKEGKPRLIPAGPITQGTTVSAYVAKSRKTLLVEDILGDERFPRGTGLESGTRIQSVLCLPIVTAIGDLIGILELYRHWGKEAFCLSHQEVATANLAWASVAIHQVQVCRGLAKQTELNDFLLDVSKTYFDNIVAIDSLLEHIMIYAKNLVNADRCALFQVDHKNKELYSDLFDIGEEKEGKPVFKKTKEIRFSIEKGIAGQVARTGEVLNIPDAYADPRFNREVDLYTGYTTRNILCMPIVSRGSVIGVVQMVNKISGSAFSKTDENNFKMFAVFCALALHCANGHG

SEQ ID NO: 8411 - protein, 395 aa, Artificial Sequence
  Synthetic polypeptide
MAATAAAVVAEEDTELRDLLVQTLENSGVLNRIKAELRAAVFLALEEQEKVENKTPLVNESLKKFLNTKDGRLVASLVAEFLQFFNLDFTLAVFQPETSTLQGLEGRENLARDLGIIEAEGTVGGPLLLEVIRRCQQKEKGPTTGEGALDLSDVHSPPKSPEGKTSAQTTPSKIPRYKGQGKKKTSGQKAGDKKANDEANQSDTSVSLSEPKSKSSLHLLSHETKIGSFLSNRTLDGKDKAGLCPDEDDMEGDSFFDDPIPKPEKTYGLRKEPRKQAGSLASLSDAPPLKSGLSSLAGAPSLKDSESKRGNTVLKDLKLISDKIGSLGLGTGEDDDYVDDFNSTSHRSEKSEISIGEEIEEDLSVEIDDINTSDKGRPYENRRERRDGGFVKTEA

SEQ ID NO: 8412 - protein, 375 aa, Artificial Sequence
  Synthetic polypeptide
MAATAAAVVAEEDTELRDLLVQTLENSGVLNRIKAELRAAVFLALEEQEKVENKTPLVNESLKKFLNTKDGRLVASLVAEFLQFFNLDFTLAVFQPETSTLQGLEGRENLARDLGIIEAEGTVGGPLLLEVIRRCQQKEKGPTTGEGALDLSDVHSPPKSPEGKTSAQTTPSKKANDEANQSDTSVSLSEPKSKSSLHLLSHETKIGSFLSNRTLDGKDKAGLCPDEDDMEGDSFFDDPIPKPEKTYGLRKEPRKQAGSLASLSDAPPLKSGLSSLAGAPSLKDSESKRGNTVLKDLKLISDKIGSLGLGTGEDDDYVDDFNSTSHRSEKSEISIGEEIEEDLSVEIDDINTSDKGRPYENRRERRDGGFVKTEA

SEQ ID NO: 8413 - protein, 844 aa, Artificial Sequence
  Synthetic polypeptide
MENPQDIFSSNGGCLSDIVIEKYLVESKESVSHVQLACSMQDCAFPLDGTELCIWNTKDPSHQLLILRGHHQPITAMAFGNKVNPLLICSASLDYVIMWNLDECREKVLQGLVPRGTVMGSLLGKVLCLQLSLDDHVVAVCAGNKIFMLDIEQRFSVTYIERPDVNNRHKVPPPTFLHTFSQTQAVRAELQGHLGPVTAVEFCPWRAGTLISASEDRGFKVWDHCTGSLIYSSSVLSAYPLLSLFIDAESRQLVTGCADGQLWIFSLMDGHHYRRVARVDLRKKTETFSTRRVKSGLCSQPEESQLPSTSALGKGEQVEVTFPVLRLAPCDLSLIPNSACGCLSSENTRCVWIGSSVGLFVFNLANLEVEAALYYKDFQSLSILLAGSCALRNRTADQKVLCLLASLFGGKIAVLEINPAALVRAQQCPSMGQSLSVPASSCVLPTSPLYLGIAKEKSTKAASEQRRAARNVMKDQRLVFHSKVRSSGYASAPHVTMFSPKTNIKSEGKGSSRSRSSCAREAYPVECAVPTKPGPQVAAAPTCTRVCCIQYSGDGQWLACGLANHLLLVFDASLTGTPAVFSGHDGAVNAVCWSQDRRWLLSAARDGTLRMWSARGAELALLLGKDMFSKPIQSAQFYYIDAFILLSSGPEFQLLRYHIDTCKDEIKRYKQKSKSKLICRLSTTGAVDMTSLSAVNDFYSHIVLAAGRNRTVEVFDLNAGCSAAVIAEAHSRPVHQICQNKGSSFTTQQPQAYNLFLTTAIGDGMRLWDLRTLRCERHFEGHPTRGYPCGIAFSPCGRFAACGAEDRHAYVYEMGSSTFSHRLAGHTDTVTGVAFNPSAPQGHG

SEQ ID NO: 8414 - protein, 717 aa, Artificial Sequence
  Synthetic polypeptide
MENPQDIFSSNGGCLSDIVIEKYLVESKESVSHVQLACSMQDCAFPLDGTELCIWNTKDPSHQLLILRGHHQPITAMAFGNKVNPLLICSASLDYVIMWNLDECREKVLQAYPLLSLFIDAESRQLVTGCADGQLWIFSLMDGHHYRRVARVDLRKKTETFSTRRVKSGLCSQPEESQLPSTSALGKGEQVEVTFPVLRLAPCDLSLIPNSACGCLSSENTRCVWIGSSVGLFVFNLANLEVEAALYYKDFQSLSILLAGSCALRNRTADQKVLCLLASLFGGKIAVLEINPAALVRAQQCPSMGQSLSVPASSCVLPTSPLYLGIAKEKSTKAASEQRRAARNVMKDQRLVFHSKVRSSGYASAPHVTMFSPKTNIKSEGKGSSRSRSSCAREAYPVECAVPTKPGPQVAAAPTCTRVCCIQYSGDGQWLACGLANHLLLVFDASLTGTPAVFSGHDGAVNAVCWSQDRRWLLSAARDGTLRMWSARGAELALLLGKDMFSKPIQSAQFYYIDAFILLSSGPEFQLLRYHIDTCKDEIKRYKQKSKSKLICRLSTTGAVDMTSLSAVNDFYSHIVLAAGRNRTVEVFDLNAGCSAAVIAEAHSRPVHQICQNKGSSFTTQQPQAYNLFLTTAIGDGMRLWDLRTLRCERHFEGHPTRGYPCGIAFSPCGRFAACGAEDRHAYVYEMGSSTFSHRLAGHTDTVTGVAFNPSAPQGHG

SEQ ID NO: 8415 - protein, 831 aa, Artificial Sequence
  Synthetic polypeptide
MENPQDIFSSNGGCLSDIVIEKYLVESKESVSHVQLACSMQDCAFPLDGTELCIWNTKDPSHQLLILRGHHQPITAMAFGNKVNPLLICSASLDYVIMWNLDECREKVLQGLVPRGTVMGSLLGKVLCLQLSLDDHVVAVCAGNKIFMLDIEQRFSVTYIERPDVNNRHKVPPPTFLHTFSQTQAVRAELQGHLGPVTAVEFCPWRAGTLISASEDRGFKVWDHCTGSLIYSSSVLSAYPLLSLFIDAESRQLVTGCADGQLWIFSLMDGHHYRRVARVDLRKKTETFSTRRVKSGLCSQPEESQLPSTSALGKGEQVEVTFPVLRLAPCDLSLIPNSACGCLSSENTRCVWIGSSVGLFVFNLANLEVEAALYYKDFQSLSILLAGSCALRNRTADQKVLCLLASLFGGKIAVLEINPAALVRAQQCPSMGQSLSVPASSCVLPTSPLYLGIAKEKSTKAASEQRRAARNVMKDQRLVFHSKVRSSGYASAPHVTMFSPKTNIKSEGKGSSRSRSSCAREAYPVECAVPTKPGPQVAAAPTCTRVCCIQYSGDGQWLACGLANHLLLVFDASLTGTPAVFSGHDGAVNAVCWSQDRRWLLSAARDGTLRMWSARGAELALLLGKDMFSKPIQSAQFYYIDAFILLSSGPEFQLLRYHIDTCKDEIKRYKQKSKSKLICRLSTTGAVDMTSLSAVNDFYSHIVLAAGRNRTVEVFDLNAGCSAAVIAEAHSRPVHQICQNKGSSFTTQQPQAYNLFLTTAIGDGMRLWDLRTLRCERHFEGHPTRGYPCGIAFSPCGRFAACGAEDRHTTVRTNWNSGLRNALKTAQLHGN

SEQ ID NO: 8416 - protein, 704 aa, Artificial Sequence
  Synthetic polypeptide
MENPQDIFSSNGGCLSDIVIEKYLVESKESVSHVQLACSMQDCAFPLDGTELCIWNTKDPSHQLLILRGHHQPITAMAFGNKVNPLLICSASLDYVIMWNLDECREKVLQAYPLLSLFIDAESRQLVTGCADGQLWIFSLMDGHHYRRVARVDLRKKTETFSTRRVKSGLCSQPEESQLPSTSALGKGEQVEVTFPVLRLAPCDLSLIPNSACGCLSSENTRCVWIGSSVGLFVFNLANLEVEAALYYKDFQSLSILLAGSCALRNRTADQKVLCLLASLFGGKIAVLEINPAALVRAQQCPSMGQSLSVPASSCVLPTSPLYLGIAKEKSTKAASEQRRAARNVMKDQRLVFHSKVRSSGYASAPHVTMFSPKTNIKSEGKGSSRSRSSCAREAYPVECAVPTKPGPQVAAAPTCTRVCCIQYSGDGQWLACGLANHLLLVFDASLTGTPAVFSGHDGAVNAVCWSQDRRWLLSAARDGTLRMWSARGAELALLLGKDMFSKPIQSAQFYYIDAFILLSSGPEFQLLRYHIDTCKDEIKRYKQKSKSKLICRLSTTGAVDMTSLSAVNDFYSHIVLAAGRNRTVEVFDLNAGCSAAVIAEAHSRPVHQICQNKGSSFTTQQPQAYNLFLTTAIGDGMRLWDLRTLRCERHFEGHPTRGYPCGIAFSPCGRFAACGAEDRHTTVRTNWNSGLRNALKTAQLHGN

SEQ ID NO: 8417 - protein, 748 aa, Artificial Sequence
  Synthetic polypeptide
MENPQDIFSSNGGCLSDIVIEKYLVESKESVSHVQLACSMQDCAFPLDGTELCIWNTKDPSHQLLILRGHHQPITAMAFGNKVNPLLICSASLDYVIMWNLDECREKVLQGLVPRGTVMGSLLGKVLCLQLSLDDHVVAVCAGNKIFMLDIEQRFSVTYIERPDVNNRHKVPPPTFLHTFSQTQAVRAELQGHLGPVTAVEFCPWRAGTLISASEDRGFKVWDHCTGSLIYSSSVLSAYPLLSLFIDAESRQLVTGCADGQLWIFSLMDGHHYRRVARVDLRKKTETFSTRRVKSGLCSQPEESQLPSTSALGKGEQVEVTFPVLRLAPCDLSLIPNSACGCLSSENTRCVWIGSSVGLFVFNLANLEVEAALYYKDFQSLSILLAGSCALRNRTADQKVLCLLASLFGGKIAVLEINPAALVRAQQCPSMGQSLSVPASSCVLPTSPLYLGIAKEKSTKAASEQRRAARNVMKDQRLVFHSKVRSSGYASAPHVTMFSPKTNIKSEGKGSSRSRSSCAREAYPVECAVPTKPGPQVAAAPTCTRVCCIQYSGDGQWLACGLANHLLLVFDASLTGTPAVFSGHDGAVNAVCWSQDRRWLLSAARDGTLRMWSARGAELALLLGKDMFSKPIQSAQFYYIDAFILLSSGPEFQLLRYHIDTCKDEIKRYKQKSKSKLICRLSTTGAVDMTSLSAVNDFYSHIVLAAGRNRTVEVFDLNAGCSAAVIAEAHSRPVHQICQNKSFTLSVD

SEQ ID NO: 8418 - protein, 621 aa, Artificial Sequence
  Synthetic polypeptide
MENPQDIFSSNGGCLSDIVIEKYLVESKESVSHVQLACSMQDCAFPLDGTELCIWNTKDPSHQLLILRGHHQPITAMAFGNKVNPLLICSASLDYVIMWNLDECREKVLQAYPLLSLFIDAESRQLVTGCADGQLWIFSLMDGHHYRRVARVDLRKKTETFSTRRVKSGLCSQPEESQLPSTSALGKGEQVEVTFPVLRLAPCDLSLIPNSACGCLSSENTRCVWIGSSVGLFVFNLANLEVEAALYYKDFQSLSILLAGSCALRNRTADQKVLCLLASLFGGKIAVLEINPAALVRAQQCPSMGQSLSVPASSCVLPTSPLYLGIAKEKSTKAASEQRRAARNVMKDQRLVFHSKVRSSGYASAPHVTMFSPKTNIKSEGKGSSRSRSSCAREAYPVECAVPTKPGPQVAAAPTCTRVCCIQYSGDGQWLACGLANHLLLVFDASLTGTPAVFSGHDGAVNAVCWSQDRRWLLSAARDGTLRMWSARGAELALLLGKDMFSKPIQSAQFYYIDAFILLSSGPEFQLLRYHIDTCKDEIKRYKQKSKSKLICRLSTTGAVDMTSLSAVNDFYSHIVLAAGRNRTVEVFDLNAGCSAAVIAEAHSRPVHQICQNKSFTLSVD

SEQ ID NO: 8419 - protein, 758 aa, Artificial Sequence
  Synthetic polypeptide
MENPQDIFSSNGGCLSDIVIEKYLVESKESVSHVQLACSMQDCAFPLDGTELCIWNTKDPSHQLLILRGHHQPITAMAFGNKVNPLLICSASLDYVIMWNLDECREKVLQGLVPRGTVMGSLLGKVLCLQLSLDDHVVAVCAGNKIFMLDIEQRFSVTYIERPDVNNRHKVPPPTFLHTFSQTQAVRAELQGHLGPVTAVEFCPWRAGTLISASEDRGFKVWDHCTGSLIYSSSVLSAYPLLSLFIDAESRQLVTGCADGQLWIFSLMDGHHYRRVARVDLRKKTETFSTRRVKSGLCSQPEESQLPSTSALGKGEQVEVTFPVLRLAPCDLSLIPNSACGCLSSENTRCVWIGSSVGLFVFNLANLEVEAALYYKDFQSLSILLAGSCALRNRTADQKVLCLLASLFGGKIAVLEINPAALVRAQQCPSMGQSLSVPASSCVLPTSPLYLGIAKEKSTKAASEQRRAARNVMKDQRLVFHSKVRSSGYASAPHVTMFSPKTNIKSEGKGSSRSRSSCAREAYPVECAVPTKPGPQVAAAPTCTRVCCIQYSGDGQWLACGLANHLLLVFDASLTGTPAVFSGHDGAVNAVCWSQDRRWLLSAARDGTLRMWSARGAELALLLGKDMFSKPIQSAQFYYIDAFILLSSGPEFQLLRYHIDTCKDEIKRYKQKSKSKLICRLSTTGAVDMTSLSAVNDFYSHIVLAAGRNRTVEVFDLNAGCSAAVIAEAHSRPVHQICQNKVFRETQPIVNQKMFTFT

SEQ ID NO: 8420 - protein, 631 aa, Artificial Sequence
  Synthetic polypeptide
MENPQDIFSSNGGCLSDIVIEKYLVESKESVSHVQLACSMQDCAFPLDGTELCIWNTKDPSHQLLILRGHHQPITAMAFGNKVNPLLICSASLDYVIMWNLDECREKVLQAYPLLSLFIDAESRQLVTGCADGQLWIFSLMDGHHYRRVARVDLRKKTETFSTRRVKSGLCSQPEESQLPSTSALGKGEQVEVTFPVLRLAPCDLSLIPNSACGCLSSENTRCVWIGSSVGLFVFNLANLEVEAALYYKDFQSLSILLAGSCALRNRTADQKVLCLLASLFGGKIAVLEINPAALVRAQQCPSMGQSLSVPASSCVLPTSPLYLGIAKEKSTKAASEQRRAARNVMKDQRLVFHSKVRSSGYASAPHVTMFSPKTNIKSEGKGSSRSRSSCAREAYPVECAVPTKPGPQVAAAPTCTRVCCIQYSGDGQWLACGLANHLLLVFDASLTGTPAVFSGHDGAVNAVCWSQDRRWLLSAARDGTLRMWSARGAELALLLGKDMFSKPIQSAQFYYIDAFILLSSGPEFQLLRYHIDTCKDEIKRYKQKSKSKLICRLSTTGAVDMTSLSAVNDFYSHIVLAAGRNRTVEVFDLNAGCSAAVIAEAHSRPVHQICQNKVFRETQPIVNQKMFTFT

SEQ ID NO: 8421 - protein, 229 aa, Artificial Sequence
  Synthetic polypeptide
MDQNNSLPPYAQGLASPQGAMTPGIPIFSPMMPYGTGLTPQPIQNTNSLSILEEQQRQQQQQQQQQQQQQQQQQQQQQQQQQQQQQQQQQQQQQQAVAAAAVQQSTSQQATQGTSGQAPQLFHSQTLTTAPLPGTTPLYPSPMTPMTPITPATPASESSGIVPQLQNIVSTVNLGCKLDLKTIALRARNAEYNPKRFAAVIMRIREPRTTALIFSSGKMVCTGAKSQAW

SEQ ID NO: 8422 - protein, 209 aa, Artificial Sequence
  Synthetic polypeptide
MTPGIPIFSPMMPYGTGLTPQPIQNTNSLSILEEQQRQQQQQQQQQQQQQQQQQQQQQQQQQQQQQQQQQQQQQQAVAAAAVQQSTSQQATQGTSGQAPQLFHSQTLTTAPLPGTTPLYPSPMTPMTPITPATPASESSGIVPQLQNIVSTVNLGCKLDLKTIALRARNAEYNPKRFAAVIMRIREPRTTALIFSSGKMVCTGAKSQAW

SEQ ID NO: 8423 - protein, 415 aa, Artificial Sequence
  Synthetic polypeptide
MANMQGLVERLERAVSRLESLSAESHRPPGNCGEVNGVIAGVAPSVEAFDKLMDSMVAEFLKNSRILAGDVETHAEMVHSAFQAQRAFLLMASQYQQPHENDVAALLKPISEKIQEIQTFRERNRGSNMFNHLSAVSESIPALGWIAVSPKPGPYVKEMNDAATFYTNRVLKDYKHSDLRHVDWVKSYLNIWSELQAYIKEHHTTGLTWSKTGPVASTVSAFSVLSSGPGLPPPPPPLPPPGPPPLFENEGKKEESSPSRSALFAQLNQGEAITKGLRHVTDDQKTYKNPSLRAQGGQTQSPTKSHTPSPTSPKSYPSQKHAPVLELEGKKWRVEYQEDRNDLVISETELKQVAYIFKCEKSTIQIKGKVNSIIIDNCKKLGLVFDNVVGIVEVINSQDIQIQKTSYEAERQAMD

SEQ ID NO: 8424 - protein, 303 aa, Artificial Sequence
  Synthetic polypeptide
MANMQGLVERLERAVSRLESLSAESHRPPGNCGEVNGVIAGVAPSVEAFDKLMDSMVAEFLKNSRILAGDVETHAEMVHSAFQAQRAFLLMASQYQQPHEGPVASTVSAFSVLSSGPGLPPPPPPLPPPGPPPLFENEGKKEESSPSRSALFAQLNQGEAITKGLRHVTDDQKTYKNPSLRAQGGQTQSPTKSHTPSPTSPKSYPSQKHAPVLELEGKKWRVEYQEDRNDLVISETELKQVAYIFKCEKSTIQIKGKVNSIIIDNCKKLGLVFDNVVGIVEVINSQDIQIQKTSYEAERQAMD

SEQ ID NO: 8425 - protein, 389 aa, Artificial Sequence
  Synthetic polypeptide
MANMQGLVERLERAVSRLESLSAESHRPPGNCGEVNGVIAGVAPSVEAFDKLMDSMVAEFLKNSRILAGDVETHNDVAALLKPISEKIQEIQTFRERNRGSNMFNHLSAVSESIPALGWIAVSPKPGPYVKEMNDAATFYTNRVLKDYKHSDLRHVDWVKSYLNIWSELQAYIKEHHTTGLTWSKTGPVASTVSAFSVLSSGPGLPPPPPPLPPPGPPPLFENEGKKEESSPSRSALFAQLNQGEAITKGLRHVTDDQKTYKNPSLRAQGGQTQSPTKSHTPSPTSPKSYPSQKHAPVLELEGKKWRVEYQEDRNDLVISETELKQVAYIFKCEKSTIQIKGKVNSIIIDNCKKLGLVFDNVVGIVEVINSQDIQIQKTSYEAERQAMD

SEQ ID NO: 8426 - protein, 155 aa, Artificial Sequence
  Synthetic polypeptide
MANMQGLVERLERAVSRLESLSAESHRPPGNCGEVNGVIAGVAPSVEAFDKLMDSMVAEFLKNSRILAGDVETHEYQEDRNDLVISETELKQVAYIFKCEKSTIQIKGKVNSIIIDNCKKLGLVFDNVVGIVEVINSQDIQIQKTSYEAERQAMD

SEQ ID NO: 8427 - protein, 351 aa, Artificial Sequence
  Synthetic polypeptide
MANMQGLVERLERAVSRLESLSAESHRPPGNCGEVNGVIAGVAPSVEAFDKLMDSMVAEFLKNSRILAGDVETHAEMVHSAFQAQRAFLLMASQYQQPHENDVAALLKPISEKIQEIQTFRERNRGSNMFNHLSAVSESIPALGWIAVGPVASTVSAFSVLSSGPGLPPPPPPLPPPGPPPLFENEGKKEESSPSRSALFAQLNQGEAITKGLRHVTDDQKTYKNPSLRAQGGQTQSPTKSHTPSPTSPKSYPSQKHAPVLELEGKKWRVEYQEDRNDLVISETELKQVAYIFKCEKSTIQIKGKVNSIIIDNCKKLGLVFDNVVGIVEVINSQDIQIQKTSYEAERQAMD

SEQ ID NO: 8428 - protein, 678 aa, Artificial Sequence
  Synthetic polypeptide
MSDTKVKVAVRVRPMNRRELELNTKCVVEMEGNQTVLHPPPSNTKQGERKPPKVFAFDYCFWSMDESNTTKYAGQEVVFKCLGEGILEKAFQGYNACIFAYGQTGSGKSFSMMGHAEQLGLIPRLCCALFKRISLEQNESQTFKVEVSYMEIYNEKVRDLLDPKGSRQSLKVREHKVLGPYVDGLSQLAVTSFEDIESLMSEGNKSRTVAATNMNEESSRSHAVFNIIITQTLYDLQSGNSGEKVSKVSLVDLAGSERVSKTGAAGERLKEGSNINKSLTTLGLVISSLADQAAGKGKSKFVPYRDSVLTWLLKDNLGGNSQTSMIATISPAADNYEETLSTLRYADRAKRIVNHAVVNEDPNAKVIRELREEVEKLREQLSQAEAMKAPELKEKLEESEKLIKELTVTWEEKLRKTEEIAQERQRQLESMGISLEMSGIKVGDDKCYLVNLNADPALNELLVYYLKDHTRVGADTSQDIQLFGIGIQPQHCEIDIASDGDVTLTPKENARSCVNGTLVCSTTQLWHGDRILWGNNHFFRINLPKRKRRDWLKDFEKETGPPEHDLDAASEASSEPDYNYEFAQMEVIMKTLNSNDPVQNVVQVLEKQYLEEKRSALEEQRLMYERELEQLRQQLSPDRQPQSSGPDRLAYSSQTAQQKVTQWAEESAIHNRKDMEST

SEQ ID NO: 8429 - protein, 678 aa, Artificial Sequence
  Synthetic polypeptide
MSDTKVKVAVRVRPMNRRELELNTKCVVEMEGNQTVLHPPPSNTKQGERRPSQVFAFDYCFWSMDESNTTKYAGQEVVFKCLGEGILEKAFQGYNACIFAYGQTGSGKSFSMMGHAEQLGLIPRLCCALFKRISLEQNESQTFKVEVSYMEIYNEKVRDLLDPKGSRQSLKVREHKVLGPYVDGLSQLAVTSFEDIESLMSEGNKSRTVAATNMNEESSRSHAVFNIIITQTLYDLQSGNSGEKVSKVSLVDLAGSERVSKTGAAGERLKEGSNINKSLTTLGLVISSLADQAAGKGKSKFVPYRDSVLTWLLKDNLGGNSQTSMIATISPAADNYEETLSTLRYADRAKRIVNHAVVNEDPNAKVIRELREEVEKLREQLSQAEAMKAPELKEKLEESEKLIKELTVTWEEKLRKTEEIAQERQRQLESMGISLEMSGIKVGDDKCYLVNLNADPALNELLVYYLKDHTRVGADTSQDIQLFGIGIQPQHCEIDIASDGDVTLTPKENARSCVNGTLVCSTTQLWHGDRILWGNNHFFRINLPKRKRRDWLKDFEKETGPPEHDLDAASEASSEPDYNYEFAQMEVIMKTLNSNDPVQNVVQVLEKQYLEEKRSALEEQRLMYERELEQLRQQLSPDRQPQSSGPDRLAYSSQTAQQKVTQWAEESAIHNRKDMEST

SEQ ID NO: 8430 - protein, 3 aa, Artificial Sequence
  Synthetic polypeptide
NNT

SEQ ID NO: 8431 - protein, 51 aa, Artificial Sequence
  Synthetic polypeptide
MSDTKVKVAVRVRPMNRRELELNTKCVVEMEGNQTVLHPPPSNTKQGESQV

SEQ ID NO: 8432 - protein, 24 aa, Artificial Sequence
  Synthetic polypeptide
MPLQQQALHCPCHIIDAQYMSFEL

SEQ ID NO: 8433 - protein, 79 aa, Artificial Sequence
  Synthetic polypeptide
MPSASCDTLLDDIEDIVSQEDSKPQDRHFVRKDVVPKVRRRNTQKYLQEEENSPPSDSTLGDKVGGSLEPRSSRSAWTV

SEQ ID NO: 8434 - protein, 65 aa, Artificial Sequence
  Synthetic polypeptide
MLSRRYEGEIPKNICKRKKTVHQVTALWETRWEDHLSPGVQDQPGQYSGPLSLQKIRKINRCVGA

SEQ ID NO: 8435 - protein, 182 aa, Artificial Sequence
  Synthetic polypeptide
MPSASCDTLLDDIEDIVSQEDSKPQDRHFVRKDVVPKVRRRNTQKYLQEEENSPPSDSTIPGIQKIWIRTWGCSHNNSDGEYMAGQLAAYGYKITENASDADLWLLNSCTVKNPAEDHFRNSIKSCPEQALFFPAVIHLRCDLLLLTVRHDCEVSPATWNCKSNKPLSFVNCPVLGMSLSAV

SEQ ID NO: 8436 - protein, 112 aa, Artificial Sequence
  Synthetic polypeptide
MLSRRYEGEIPKNICKRKKTVHQVTENASDADLWLLNSCTVKNPAEDHFRNSIKSCPEQALFFPAVIHLRCDLLLLTVRHDCEVSPATWNCKSNKPLSFVNCPVLGMSLSAV

SEQ ID NO: 8437 - protein, 252 aa, Artificial Sequence
  Synthetic polypeptide
MPSASCDTLLDDIEDIVSQEDSKPQDRHFVRKDVVPKVRRRNTQKYLQEEENSPPSDSTIPGIQKIWIRTWGCSHNNSDGEYMAGQLAAYGYKITENASDADLWLLNSCTVKNPAEDHFRNSIKKAQEENKKIVLAGCVPQAQPRQDYLKGLSIIGVQQIDRVVEVVEETIKGHSVRLLGQKKDNGRRLGGARLDLPKIRKNPLIEIISINTGCLNACTYCKTKHARGNLASYPIDELVDRAKQSFQAWVTK

SEQ ID NO: 8438 - protein, 182 aa, Artificial Sequence
  Synthetic polypeptide
MLSRRYEGEIPKNICKRKKTVHQVTENASDADLWLLNSCTVKNPAEDHFRNSIKKAQEENKKIVLAGCVPQAQPRQDYLKGLSIIGVQQIDRVVEVVEETIKGHSVRLLGQKKDNGRRLGGARLDLPKIRKNPLIEIISINTGCLNACTYCKTKHARGNLASYPIDELVDRAKQSFQAWVTK

SEQ ID NO: 8439 - protein, 101 aa, Artificial Sequence
  Synthetic polypeptide
MCKMDGSYLAEFLLEKGYEVHGIVRRSSSFNTGRIEHLYKNPQAHIEGNMKLHYGDLTDSTCLVKIINEVKPTEIYNLGAQSHVKDKGALRAETLSFATTV

SEQ ID NO: 8440 - protein, 131 aa, Artificial Sequence
  Synthetic polypeptide
MAHAPARCPSARGSGDGEMGKPRNVALITGITGQDGSYLAEFLLEKGYEVHGIVRRSSSFNTGRIEHLYKNPQAHIEGNMKLHYGDLTDSTCLVKIINEVKPTEIYNLGAQSHVKDKGALRAETLSFATTV

SEQ ID NO: 8441 - protein, 115 aa, Artificial Sequence
  Synthetic polypeptide
MECLRSLPCLLPRAMRLPRRTLCALALDVTSVGPPVAACGRRANLIGRSRAAQLCGPDRLRVAGEVHRFRTSDVSQATLASVAPVFTVRNQDRKLNPGLIFPIKGKKDFKKTLNS

SEQ ID NO: 8442 - protein, 30 aa, Artificial Sequence
  Synthetic polypeptide
AERRSFAGPTGSAWQVKCTGLEPLTSLKPL

SEQ ID NO: 8443 - protein, 974 aa, Artificial Sequence
  Synthetic polypeptide
MRVSHTFPVVDCTAACCDLSSCDLAWWFEGRCYLVSCPHKENCEPKKMGPIRSYLTFVLRPVQRPAQLLDYGDMMLNRGSPSGIWGDSPEDIRKDLTFLGKDWGLEEMSEYSDDYRELEKDLLQPSGKQEPRGSAEYTDWGLLPGSEGAFNSSVGDSPAVPAETQQDPELHYLNESASTPAPKLPERSVLLPLPTTPSSGEVLEKEKASQLQEQSSNSSGKEVLMPSHSLPPASLELSSVTVEKSPVLTVTPGSTEHSIPTPPTSAAPSESTPSELPISPTTAPRTVKELTVSAGDNLIITLPDNEVELKAFVAPAPPVETTYNYEWNLISHPTDYQGEIKQGHKQTLNLSQLSVGLYVFKVTVSSENAFGEGFVNVTVKPARRVNLPPVAVVSPQLQELTLPLTSALIDGSQSTDDTEIVSYHWEEINGPFIEEKTSVDSPVLRLSNLDPGNYSFRLTVTDSDGATNSTTAALIVNNAVDYPPVANAGPNHTITLPQNSITLNGNQSSDDHQIVLYEWSLGPGSEGKHVVMQGVQTPYLHLSAMQEGDYTFQLKVTDSSRQQSTAVVTVIVQPENNRPPVAVAGPDKELIFPVESATLDGSSSSDDHGIVFYHWEHVRGPSAVEMENIDKAIATVTGLQVGTYHFRLTVKDQQGLSSTSTLTVAVKKENNSPPRARAGGRHVLVLPNNSITLDGSRSTDDQRIVSYLWIRDGQSPAAGDVIDGSDHSVALQLTNLVEGVYTFHLRVTDSQGASDTDTATVEVQPDPRKSGLVELTLQVGVGQLTEQRKDTLVRQLAVLLNVLDSDIKVQKIRAHSDLSTVIVFYVQSRPPFKVLKAAEVARNLHMRLSKEKADFLLFKVLRVDTAGCLLKCSGHGHCDPLTKRCICSHLWMENLIQRYIWDGESNCEWSIFYVTVLAFTLIVLTGGFTWLCICCCKRQKRTKIRKKTKYTILDNMDEQERMELRPKYERKKFA

SEQ ID NO: 8444 - protein, 1010 aa, Artificial Sequence
  Synthetic polypeptide
MTRLGWPSPCCARKQCSEGRTYSNAVISPNLETTRIMRVSHTFPVVDCTAACCDLSSCDLAWWFEGRCYLVSCPHKENCEPKKMGPIRSYLTFVLRPVQRPAQLLDYGDMMLNRGSPSGIWGDSPEDIRKDLTFLGKDWGLEEMSEYSDDYRELEKDLLQPSGKQEPRGSAEYTDWGLLPGSEGAFNSSVGDSPAVPAETQQDPELHYLNESASTPAPKLPERSVLLPLPTTPSSGEVLEKEKASQLQEQSSNSSGKEVLMPSHSLPPASLELSSVTVEKSPVLTVTPGSTEHSIPTPPTSAAPSESTPSELPISPTTAPRTVKELTVSAGDNLIITLPDNEVELKAFVAPAPPVETTYNYEWNLISHPTDYQGEIKQGHKQTLNLSQLSVGLYVFKVTVSSENAFGEGFVNVTVKPARRVNLPPVAVVSPQLQELTLPLTSALIDGSQSTDDTEIVSYHWEEINGPFIEEKTSVDSPVLRLSNLDPGNYSFRLTVTDSDGATNSTTAALIVNNAVDYPPVANAGPNHTITLPQNSITLNGNQSSDDHQIVLYEWSLGPGSEGKHVVMQGVQTPYLHLSAMQEGDYTFQLKVTDSSRQQSTAVVTVIVQPENNRPPVAVAGPDKELIFPVESATLDGSSSSDDHGIVFYHWEHVRGPSAVEMENIDKAIATVTGLQVGTYHFRLTVKDQQGLSSTSTLTVAVKKENNSPPRARAGGRHVLVLPNNSITLDGSRSTDDQRIVSYLWIRDGQSPAAGDVIDGSDHSVALQLTNLVEGVYTFHLRVTDSQGASDTDTATVEVQPDPRKSGLVELTLQVGVGQLTEQRKDTLVRQLAVLLNVLDSDIKVQKIRAHSDLSTVIVFYVQSRPPFKVLKAAEVARNLHMRLSKEKADFLLFKVLRVDTAGCLLKCSGHGHCDPLTKRCICSHLWMENLIQRYIWDGESNCEWSIFYVTVLAFTLIVLTGGFTWLCICCCKRQKRTKIRKKTKYTILDNMDEQERMELRPKYERKKFA

SEQ ID NO: 8445 - protein, 1019 aa, Artificial Sequence
  Synthetic polypeptide
MAPPTGVLSSLLLLVTIAGCARKQCSEGRTYSNAVISPNLETTRIMRVSHTFPVVDCTAACCDLSSCDLAWWFEGRCYLVSCPHKENCEPKKMGPIRSYLTFVLRPVQRPAQLLDYGDMMLNRGSPSGIWGDSPEDIRKDLTFLGKDWGLEEMSEYSDDYRELEKDLLQPSGKQEPRGSAEYTDWGLLPGSEGAFNSSVGDSPAVPAETQQDPELHYLNESASTPAPKLPERSVLLPLPTTPSSGEVLEKEKASQLQEQSSNSSGKEVLMPSHSLPPASLELSSVTVEKSPVLTVTPGSTEHSIPTPPTSAAPSESTPSELPISPTTAPRTVKELTVSAGDNLIITLPDNEVELKAFVAPAPPVETTYNYEWNLISHPTDYQGEIKQGHKQTLNLSQLSVGLYVFKVTVSSENAFGEGFVNVTVKPARRVNLPPVAVVSPQLQELTLPLTSALIDGSQSTDDTEIVSYHWEEINGPFIEEKTSVDSPVLRLSNLDPGNYSFRLTVTDSDGATNSTTAALIVNNAVDYPPVANAGPNHTITLPQNSITLNGNQSSDDHQIVLYEWSLGPGSEGKHVVMQGVQTPYLHLSAMQEGDYTFQLKVTDSSRQQSTAVVTVIVQPENNRPPVAVAGPDKELIFPVESATLDGSSSSDDHGIVFYHWEHVRGPSAVEMENIDKAIATVTGLQVGTYHFRLTVKDQQGLSSTSTLTVAVKKENNSPPRARAGGRHVLVLPNNSITLDGSRSTDDQRIVSYLWIRDGQSPAAGDVIDGSDHSVALQLTNLVEGVYTFHLRVTDSQGASDTDTATVEVQPDPRKSGLVELTLQVGVGQLTEQRKDTLVRQLAVLLNVLDSDIKVQKIRAHSDLSTVIVFYVQSRPPFKVLKAAEVARNLHMRLSKEKADFLLFKVLRVDTAGCLLKCSGHGHCDPLTKRCICSHLWMENLIQRYIWDGESNCEWSIFYVTVLAFTLIVLTGGFTWLCICCCKRQKRTKIRKKTKYTILDNMDEQERMELRPKYERKKFA

SEQ ID NO: 8446 - protein, 303 aa, Artificial Sequence
  Synthetic polypeptide
MASTTSTKKMMEEATCSICLSLMTNPVSINCGHSYCHLCITDFFKNPSQKQLRQETFCCPQCRAPFHMDSLRPNKQLGSLIEALKETDQEMSCEEHGEQFHLFCEDEGQLICWRCERAPQHKGHTTALVEDVCQGYKEKLQKAVTKLKQLEDRCTEQKLSTAMRITKWKEKVQIQRQKIRSDFKNLQCFLHEEEKSYLWRLEKEEQQTLSRLRDYEAGLGLKSNELKSHILELEEKCQGSAQKLLQNVNDTLSRSWAVKLETSEAVSLELHTMCNVSKLYFDVKKMLRSHQAHFVPGISEKEL

SEQ ID NO: 8447 - protein, 266 aa, Artificial Sequence
  Synthetic polypeptide
MKMASFLAFLLLNFRVCLLLLQLLMPHSAQFSVLGPSGPILAMVGEDADLPCHLFPTMSAETMELKWVSSSLRQVVNVYADGKEVEDRQSAPYRGRTSILRDGITAGKAALRIHNVTASDSGKYLCYFQDGDFYEKALVELKVAALGSDLHVDVKGYKDGGIHLECRSTGWYPQPQIQWSNNKGENIPTVEAPVVADGVGLYAVAASVIMRGSSGEGVSCTIRSSLLGLEKTASISIAALIMTAQGWKLCRCSLLENFHAMDTTQL

SEQ ID NO: 8448 - protein, 214 aa, Artificial Sequence
  Synthetic polypeptide
MKMASFLAFLLLNFRVCLLLLQLLMPHSAQFSVLGPSGPILAMVGEDADLPCHLFPTMSAETMELKWVSSSLRQVVNVYADGKEVEDRQSAPYRGRTSILRDGITAGKAALRIHNVTASDSGKYLCYFQDGDFYEKALVELKVADGVGLYAVAASVIMRGSSGEGVSCTIRSSLLGLEKTASISIAALIMTAQGWKLCRCSLLENFHAMDTTQL

SEQ ID NO: 8449 - protein, 157 aa, Artificial Sequence
  Synthetic polypeptide
MESAAALHFSRPASLLLLLLSLCALVSAQFIVVGPTDPILATVGENTTLRCHLSPEKNAEDMEVRWFRSQFSPAVFVYKGGRERTEEQMEEYRGRTTFVSKDISRGSVALVIHNITAQENGTYRCYFQEGRSYDEAILHLVVADFRPSRYYSRASGS

SEQ ID NO: 8450 - protein, 96 aa, Artificial Sequence
  Synthetic polypeptide
MEVRWFRSQFSPAVFVYKGGRERTEEQMEEYRGRTTFVSKDISRGSVALVIHNITAQENGTYRCYFQEGRSYDEAILHLVVADFRPSRYYSRASGS

SEQ ID NO: 8451 - protein, 337 aa, Artificial Sequence
  Synthetic polypeptide
MESAAALHFSRPASLLLLLLSLCALVSAQFIVVGPTDPILATVGENTTLRCHLSPEKNAEDMEVRWFRSQFSPAVFVYKGGRERTEEQMEEYRGRTTFVSKDISRGSVALVIHNITAQENGTYRCYFQEGRSYDEAILHLVVAGLGSKPLISMRGHEDGGIRLECISRGWYPKPLTVWRDPYGGVAPALKEVSMPDADGLFMVTTAVIIRDKSVRNMSCSINNTLLGQKKESVIFIPESFMPSVSPCAVALPIIVVILMIPIAVCIYWINKLQKEKKILSGEKEFERETREIALKELEKERVQKEEELQVKEKLQEELRWRRTFLHAGVNLIGLRNT

SEQ ID NO: 8452 - protein, 276 aa, Artificial Sequence
  Synthetic polypeptide
MEVRWFRSQFSPAVFVYKGGRERTEEQMEEYRGRTTFVSKDISRGSVALVIHNITAQENGTYRCYFQEGRSYDEAILHLVVAGLGSKPLISMRGHEDGGIRLECISRGWYPKPLTVWRDPYGGVAPALKEVSMPDADGLFMVTTAVIIRDKSVRNMSCSINNTLLGQKKESVIFIPESFMPSVSPCAVALPIIVVILMIPIAVCIYWINKLQKEKKILSGEKEFERETREIALKELEKERVQKEEELQVKEKLQEELRWRRTFLHAGVNLIGLRNT

SEQ ID NO: 8453 - protein, 6 aa, Artificial Sequence
  Synthetic polypeptide
LSLWLF

SEQ ID NO: 8454 - protein, 90 aa, Artificial Sequence
  Synthetic polypeptide
MEAEESEKAATEQEPLEGTEQTLDAEEEQEESEEAACGSKKRVVPGIVYLGHIPPRFRPLHVRNLLSAYGEVGRVFFQAEVMFAEKSWKQ

SEQ ID NO: 8455 - protein, 215 aa, Artificial Sequence
  Synthetic polypeptide
MYEALPGPAPENEDGLVKVKEEDPTWEQVCNSQEGSSHTQEICRLRFRHFCYQEAHGPQEALAQLRELCHQWLRPEMHTKEQIMELLVLEQFLTILPKELQPCVKTYPLESGEEAVTVLENLETGSGDTGQQASVYIQGQDMHPMVAEYQGVSLECQSLQLLPGITTLKCEPPQRPQGNPQEVSGPVPHGSAHLQEKNPRDKAVVPVFNPVRSQY

SEQ ID NO: 8456 - protein, 272 aa, Artificial Sequence
  Synthetic polypeptide
METLSNASGTFAIRLLKILCQDNPSHNVFCSPVSISSALAMVLLGAKGNTATQMAQALSLNTEEDIHRAFQSLLTEVNKAGTQYLLRTANRLFGEKTCQFLSTFKESCLQFYHAELKELSFIRAAEESRKHINTWVSKKTEGKIEELLPGSSIDAETRLVLVNAIYFKGKWNEPFDETYTREMPFKINQEEQRPVQMMYQEATFKLAHVGEVRAQLLELPYARKELSLLVLLPDDGVELSTFTFTFCHQWKQPESSPEADAGAMPFVQPAEL

SEQ ID NO: 8457 - protein, 339 aa, Artificial Sequence
  Synthetic polypeptide
MAVMAPRTLLLLLSGALALTQTWAGSHSMRYFFTSVSRPGRGEPRFIAVGYVDDTQFVRFDSDAASQRMEPRAPWIEQEGPEYWDQETRNVKAQSQTDRVDLGTLRGYYNQSEAGSHTIQIMYGCDVGSDGRFLRGYRQDAYDGKDYIALNEDLRSWTAADMAAQITKRKWEAAHEAEQLRAYLDGTCVEWLRRYLENGKETLQRTDPPKTHMTHHPISDHEATLRCWALGFYPAEITLTWQRDGEDQTQDTELVETRPAGDGTFQKWAAVVVPSGEEQRYTCHVQHEGLPKPLTLRWELSSQPTIPIVGIIAGLVLLGAVITGAVVAAVMWRRKSSEA

SEQ ID NO: 8458 - protein, 350 aa, Artificial Sequence
  Synthetic polypeptide
MAVMAPRTLLLLLSGALALTQTWAGSHSMRYFFTSVSRPGRGEPRFIAVGYVDDTQFVRFDSDAASQRMEPRAPWIEQEGPEYWDQETRNVKAQSQTDRVDLGTLRGYYNQSEAGSHTIQIMYGCDVGSDGRFLRGYRQDAYDGKDYIALNEDLRSWTAADMAAQITKRKWEAAHEAEQLRAYLDGTCVEWLRRYLENGKETLQRTDPPKTHMTHHPISDHEATLRCWALGFYPAEITLTWQRDGEDQTQDTELVETRPAGDGTFQKWAAVVVPSGEEQRYTCHVQHEGLPKPLTLRWELSSQPTIPIVGIIAGLVLLGAVITGAVVAAVMWRRKSSDRKGGSYTQAAKA

SEQ ID NO: 8459 - protein, 356 aa, Artificial Sequence
  Synthetic polypeptide
MAVMAPRTLLLLLSGALALTQTWAGSHSMRYFFTSVSRPGRGEPRFIAVGYVDDTQFVRFDSDAASQRMEPRAPWIEQEGPEYWDQETRNVKAQSQTDRVDLGTLRGYYNQSEAGSHTIQIMYGCDVGSDGRFLRGYRQDAYDGKDYIALNEDLRSWTAADMAAQITKRKWEAAHEAEQLRAYLDGTCVEWLRRYLENGKETLQRTDPPKTHMTHHPISDHEATLRCWALGFYPAEITLTWQRDGEDQTQDTELVETRPAGDGTFQKWAAVVVPSGEEQRYTCHVQHEGLPKPLTLRWELSSQPTIPIVGIIAGLVLLGAVITGAVVAAVMWRRKSSGGEGVKDRKGGSYTQAAKA

SEQ ID NO: 8460 - protein, 376 aa, Artificial Sequence
  Synthetic polypeptide
MAVMAPRTLLLLLSGALALTQTWAGSHSMRYFFTSVSRPGRGEPRFIAVGYVDDTQFVRFDSDAASQRMEPRAPWIEQEGPEYWDQETRNVKAQSQTDRVDLGTLRGYYNQSEAGSHTIQIMYGCDVGSDGRFLRGYRQDAYDGKDYIALNEDLRSWTAADMAAQITKRKWEAAHEAEQLRAYLDGTCVEWLRRYLENGKETLQRTDPPKTHMTHHPISDHEATLRCWALGFYPAEITLTWQRDGEDQTQDTELVETRPAGDGTFQKWAAVVVPSGEEQRYTCHVQHEGLPKPLTLRWELSSQPTIPIVGIIAGLVLLGAVITGAVVAAVMWRRKSSDRKGGSYTQAASSDSAQGSDVSLTACKEVQLHSLPVSVA

SEQ ID NO: 8461 - protein, 382 aa, Artificial Sequence
  Synthetic polypeptide
MAVMAPRTLLLLLSGALALTQTWAGSHSMRYFFTSVSRPGRGEPRFIAVGYVDDTQFVRFDSDAASQRMEPRAPWIEQEGPEYWDQETRNVKAQSQTDRVDLGTLRGYYNQSEAGSHTIQIMYGCDVGSDGRFLRGYRQDAYDGKDYIALNEDLRSWTAADMAAQITKRKWEAAHEAEQLRAYLDGTCVEWLRRYLENGKETLQRTDPPKTHMTHHPISDHEATLRCWALGFYPAEITLTWQRDGEDQTQDTELVETRPAGDGTFQKWAAVVVPSGEEQRYTCHVQHEGLPKPLTLRWELSSQPTIPIVGIIAGLVLLGAVITGAVVAAVMWRRKSSGGEGVKDRKGGSYTQAASSDSAQGSDVSLTACKEVQLHSLPVSVA

SEQ ID NO: 8462 - protein, 371 aa, Artificial Sequence
  Synthetic polypeptide
MPRKKPFSVKQKKKQLQDKRERKRGLQDGLRSSSNSRSGSRERREEQTDTSDGESVTHHIRRLNQQPSQGLGPRGYDPNRYRLHFERDSREEVERRKRAAREQVLQPVSAELLELDIREVYQPGSVLDFPRRPPWSYEMSKEQLMSQEERSFQDYLGKIHGAYSSEKLSYFEHNLETWRQLWRVLEMSDIVLLITDIRHPVVNFPPALYEYVTGELGLALVLVLNKVDLAPPALVVAWKHYFHQHYPQLHVVLFTSFPRDPRTPQDPSSVLKKSRRRGRGWTRALGPEQLLRACEAITVGKVDLSSWREKIARDVAGATWGNGSGEEEEEEDGPAVLVEQQTDSAMEPTGPTQERYKDGVVTIGCVVYSYK

SEQ ID NO: 8463 - protein, 87 aa, Artificial Sequence
  Synthetic polypeptide
MLPCFQLLRIGGGRGGDLYTFHPPAGAGCTYRLGHRADLCDVALRPQQEPGLISGIHAELHAEPRGDDWRVSLEDHSSQARCGGVHL

SEQ ID NO: 8464 - protein, 98 aa, Artificial Sequence
  Synthetic polypeptide
MLPCFQLLRIGGGRGGDLYTFHPPAGAGCTYRLGHRADLCDVALRPQQEPGLISGIHAELHAEPRGDDWRVSLEDHSSQATQEAEAAESLEPGRRRLQ

SEQ ID NO: 8465 - protein, 373 aa, Artificial Sequence
  Synthetic polypeptide
MRVMAPRALLLLLSGGLALTETWACSHSMRYFDTAVSRPGRGEPRFISVGYVDDTQFVRFDSDAASPRGEPRAPWVEQEGPEYWDRETQKYKRQAQADRVSLRNLRGYYNQSEDGSHTLQRMSGCDLGPDGRLLRGYDQSAYDGKDYIALNEDLRSWTAADTAAQITQRKLEAARAAEQLRAYLEGTCVEWLRRYLENGKETLQRAEPPKTHVTHHPLSDHEATLRCWALGFYPAEITLTWQRDGEDQTQDTELVETRPAGDGTFQKWAAVVVPSGQEQRYTCHMQHEGLQEPLTLSWEPSSQPTIPIMGIVAGLAVLVVLAVLGAVVTAMMCRRKSSGGKGGSCSQAAYSNCALSFFVSLPSLLVPSLEGTQ

SEQ ID NO: 8466 - protein, 379 aa, Artificial Sequence
  Synthetic polypeptide
MRVMAPRALLLLLSGGLALTETWACSHSMRYFDTAVSRPGRGEPRFISVGYVDDTQFVRFDSDAASPRGEPRAPWVEQEGPEYWDRETQKYKRQAQADRVSLRNLRGYYNQSEDGSHTLQRMSGCDLGPDGRLLRGYDQSAYDGKDYIALNEDLRSWTAADTAAQITQRKLEAARAAEQLRAYLEGTCVEWLRRYLENGKETLQRAEPPKTHVTHHPLSDHEATLRCWALGFYPAEITLTWQRDGEDQTQDTELVETRPAGDGTFQKWAAVVVPSGQEQRYTCHMQHEGLQEPLTLSWEPSSQPTIPIMGIVAGLAVLVVLAVLGAVVTAMMCRRKSSGHFLPTGGKGGSCSQAAYSNCALSFFVSLPSLLVPSLEGTQ

SEQ ID NO: 8467 - protein, 136 aa, Artificial Sequence
  Synthetic polypeptide
MLVMAPRTVLLLLSAALALTETWAGSHSMRYFYTSVSRPGRGEPRFISVGYVDDTQFVRFDSDAASPREEPRAPWIEQEGPEYWDRNTQIYKAQAQTDRESLRNLRGYYNQSEAVAHTCNPSTLGGCGGWITRSGV

SEQ ID NO: 8468 - protein, 147 aa, Artificial Sequence
  Synthetic polypeptide
MASAGRSEGTAGGGAGPEEPRREEGRAGLSPSSPPGSHSMRYFYTSVSRPGRGEPRFISVGYVDDTQFVRFDSDAASPREEPRAPWIEQEGPEYWDRNTQIYKAQAQTDRESLRNLRGYYNQSEAVAHTCNPSTLGGCGGWITRSGV

SEQ ID NO: 8469 - protein, 221 aa, Artificial Sequence
  Synthetic polypeptide
MAKLLSCVLGPRLYKIYRERDSERAPASVPETPTAVTAPHSSSWDTYYQPRALEKHADSILALASVFWSISYYSSPFAFFYLYRKGYLSLSKVVPFSHYAGTLLLLLAGVACLRGIGRWTNPQYRQFITILEATHRNQSSENKRQLANYNFDFRSWPVDFHWEEPSSRKESRGGPSRRGVALLRPEPLHRGTADTLLNRVKKLPCQITSVCTCDEPALQGC

SEQ ID NO: 8470 - protein, 188 aa, Artificial Sequence
  Synthetic polypeptide
MPPPALFLSSLYPRLEFQNDFYRSCIRRSSPQPPPNLAWRPESLYSGELAGGGYLSLSKVVPFSHYAGTLLLLLAGVACLRGIGRWTNPQYRQFITILEATHRNQSSENKRQLANYNFDFRSWPVDFHWEEPSSRKESRGGPSRRGVALLRPEPLHRGTADTLLNRVKKLPCQITSVCTCDEPALQGC

SEQ ID NO: 8471 - protein, 127 aa, Artificial Sequence
  Synthetic polypeptide
MLGHCCYFWQVWPASEALAAGPTPSTGSSSPSWKQHIGTSLQKTRGSLPTTTLTSGAGQSTSTGKNPAAGRSLEGALPAGVWPCFAQSPCTGGQQTPSSTGLRSCLVRSPVSAPVMNLPCKVAEEIK

SEQ ID NO: 8472 - protein, 128 aa, Artificial Sequence
  Synthetic polypeptide
MSWKKALRIPGDLRVATVTLMLAMLSSLLAEGRDSPEDFVFQFKGMCYFTNGTERVRLVTRYIYNREEYARFDSDVGVYRAVTPQGRPDAEYWNSQKEVLEGTRAELDTVCRHNYEVAFRGILQRRDL

SEQ ID NO: 8473 - protein, 37 aa, Artificial Sequence
  Synthetic polypeptide
MRPEDRMFHIRAVILRALSLAFLLSLRGAGAIKGSLP

SEQ ID NO: 8474 - protein, 45 aa, Artificial Sequence
  Synthetic polypeptide
MAAAATMAAAARELVLRAGTSDMEEEEGPLVRKIEPIVYIVVRIR

SEQ ID NO: 8475 - protein, 473 aa, Artificial Sequence
  Synthetic polypeptide
MKSLSLLLAVALGLATAVSAGPAVIECWFVEDASGKGLAKRPGALLLRQGPGEPPPRPDLDPELYLSVHDPAGALQAAFRRYPRGAPAPHCEMSRFVPLPASAKWASGLTPAQNCPRALDGAWLMVSISSPVLSLSSLLRPQPEPQQEPVLITMATVVLTVLTHTPAPRVRLGQDALLDLSFAYMPPTSEAASSLAPGPPPFGLEWRRQHLGKGHLLLAATPGLNGQMPAAQEGAVAFAAWDDDEPWGPWTGNGTFWLPTVQPFQEGTYLATIHLPYLQGQVTLELAVYKPPKVSLMPATLARAAPGEAPPELLCLVSHFYPSGGLEVEWELRGGPGGRSQKAEGQRWLSALRHHSDGSVSLSGHLQPPPVTTEQHGARYACRIHHPSLPASGRSAEVTLEVAGLSGPSLEDSVGLFLSAFLLLGLFKALGWAAVYLSTCKDSKKPDVTAPVIPATRETGAGESLEPGRQRLQ

SEQ ID NO: 8476 - protein, 491 aa, Artificial Sequence
  Synthetic polypeptide
MKSLSLLLAVALGLATAVSAGPAVIECWFVEDASGKGLAKRPGALLLRQGPGEPPPRPDLDPELYLSVHDPAGALQAAFRRYPRGAPAPHCEMSRFVPLPASAKWASGLTPAQNCPRALDGAWLMVSISSPVLSLSSLLRPQPEPQQEPVLITMATVEMGFHHVGQAALELLTSVVLTVLTHTPAPRVRLGQDALLDLSFAYMPPTSEAASSLAPGPPPFGLEWRRQHLGKGHLLLAATPGLNGQMPAAQEGAVAFAAWDDDEPWGPWTGNGTFWLPTVQPFQEGTYLATIHLPYLQGQVTLELAVYKPPKVSLMPATLARAAPGEAPPELLCLVSHFYPSGGLEVEWELRGGPGGRSQKAEGQRWLSALRHHSDGSVSLSGHLQPPPVTTEQHGARYACRIHHPSLPASGRSAEVTLEVAGLSGPSLEDSVGLFLSAFLLLGLFKALGWAAVYLSTCKDSKKPDVTAPVIPATRETGAGESLEPGRQRLQ

SEQ ID NO: 8477 - protein, 386 aa, Artificial Sequence
  Synthetic polypeptide
MKSLSLLLAVALGLATAVSAGPAVIECWFVEDASGKGLAKRPGALLLRQGPGEPPPRPDLDPELYLSVHVVLTVLTHTPAPRVRLGQDALLDLSFAYMPPTSEAASSLAPGPPPFGLEWRRQHLGKGHLLLAATPGLNGQMPAAQEGAVAFAAWDDDEPWGPWTGNGTFWLPTVQPFQEGTYLATIHLPYLQGQVTLELAVYKPPKVSLMPATLARAAPGEAPPELLCLVSHFYPSGGLEVEWELRGGPGGRSQKAEGQRWLSALRHHSDGSVSLSGHLQPPPVTTEQHGARYACRIHHPSLPASGRSAEVTLEVAGLSGPSLEDSVGLFLSAFLLLGLFKALGWAAVYLSTCKDSKKPDVTAPVIPATRETGAGESLEPGRQRLQ

SEQ ID NO: 8478 - protein, 109 aa, Artificial Sequence
  Synthetic polypeptide
MSEMSSFLHIGDIVSLYAEGSVNGFISTLGLVDDRCVVEPAAGDLDNPPKKFRDCLFKVCPMNRYSAQKQYWKAKQTKQDKEKIADVVLLQKLQHFGRPRQEDCLRPGV

SEQ ID NO: 8479 - protein, 148 aa, Artificial Sequence
  Synthetic polypeptide
MSEMSSFLHIGDIVSLYAEGSVNGFISTLGLVDDRCVVEPAAGDLDNPPKKFRDCLFKVCPMNRYSAQKQYWKAKQTKQDKEKIADVVLLQKLQHAAQMEQKQNDTENKKVHGDVVKYGSVIQHGGHQHGVWSHVVWIQILALPLLMV

SEQ ID NO: 8480 - protein, 2373 aa, Artificial Sequence
  Synthetic polypeptide
MSEMSSFLHIGDIVSLYAEGSVNGFISTLGLVDDRCVVEPAAGDLDNPPKKFRDCLFKVCPMNRYSAQKQYWKAKQTKQDKEKIADVVLLQKLQHAAQMEQKQNDTENKKVHGDVVKYGSVIQLLHMKSNKYLTVNKRLPALLEKNAMRVTLDATGNEGSWLFIQPFWKLRSNGDNVVVGDKVILNPVNAGQPLHASNYELSDNAGCKEVNSVNCNTSWKINLFMQFRDHLEEVLKGGDVVRLFHAEQEKFLTCDEYKGKLQVFLRTTLRQSATSATSSNALWEVEVVHHDPCRGGAGHWNGLYRFKHLATGNYLAAEENPSYKGDASDPKAAGMGAQGRTGRRNAGEKIKYCLVAVPHGNDIASLFELDPTTLQKTDSFVPRNSYVRLRHLCTNTWIQSTNVPIDIEEERPIRLMLGTCPTKEDKEAFAIVSVPVSEIRDLDFANDASSMLASAVEKLNEGFISQNDRRFVIQLLEDLVFFVSDVPNNGQNVLDIMVTKPNRERQKLMREQNILKQVFGILKAPFREKGGEGPLVRLEELSDQKNAPYQHMFRLCYRVLRHSQEDYRKNQEHIAKQFGMMQSQIGYDILAEDTITALLHNNRKLLEKHITKTEVETFVSLVRKNREPRFLDYLSDLCVSNHIAIPVTQELICKCVLDPKNSDILIRTELRPVKEMAQSHEYLSIEYSEEEVWLTWTDKNNEHHEKSVRQLAQEARAGNAHDENVLSYYRYQLKLFARMCLDRQYLAIDEISQQLGVDLIFLCMADEMLPFDLRASFCHLMLHVHVDRDPQELVTPVKFARLWTEIPTAITIKDYDSNLNASRDDKKNKFANTMEFVEDYLNNVVSEAVPFANEEKNKLTFEVVSLAHNLIYFGFYSFSELLRLTRTLLGIIDCVQGPPAMLQAYEDPGGKNVRRSIQGVGHMMSTMVLSRKQSVFSAPSLSAGASAAEPLDRSKFEENEDIVVMETKLKILEILQFILNVRLDYRISYLLSVFKKEFVEVFPMQDSGADGTAPAFDSTTANMNLDRIGEQAEAMFGVGKTSSMLEVDDEGGRMFLRVLIHLTMHDYAPLVSGALQLLFKHFSQRQEAMHTFKQVQLLISAQDVENYKVIKSELDRLRTMVEKSELWVDKKGSGKGEEVEAGAAKDKKERPTDEEGFLHPPGEKSSENYQIVKGILERLNKMCGVGEQMRKKQQRLLKNMDAHKVMLDLLQIPYDKGDAKMMEILRYTHQFLQKFCAGNPGNQALLHKHLHLFLTPGLLEAETMQHIFLNNYQLCSEISEPVLQHFVHLLATHGRHVQYLDFLHTVIKAEGKYVKKCQDMIMTELTNAGDDVVVFYNDKASLAHLLDMMKAARDGVEDHSPLMYHISLVDLLAACAEGKNVYTEIKCTSLLPLEDVVSVVTHEDCITEVKMAYVNFVNHCYVDTEVEMKEIYTSNHIWTLFENFTLDMARVCSKREKRVADPTLEKYVLSVVLDTINAFFSSPFSENSTSLQTHQTIVVQLLQSTTRLLECPWLQQQHKGSVEACIRTLAMVAKGRAILLPMDLDAHISSMLSSGASCAAAAQRNASSYKATTRAFPRVTPTANQWDYKNIIEKLQDIITALEERLKPLVQAELSVLVDVLHWPELLFLEGSEAYQRCESGGFLSKLIQHTKDLMESEEKLCIKVLRTLQQMLLKKTKYGDRGNQLRKMLLQNYLQNRKSTSRGDLPDPIGTGLDPDWSAIAATQCRLDKEGATKLVCDLITSTKNEKIFQESIGLAIHLLDGGNTEIQKSFHNLMMSDKKSERFFKVLHDRMKRAQQETKSTVAVNMNDLGSQPHEDREPVDPTTKGRVASFSIPGSSSRYSLGPSLRRGHEVSERVQSSEMGTSVLIMQPILRFLQLLCENHNRDLQNFLRCQNNKTNYNLVCETLQFLDIMCGSTTGGLGLLGLYINEDNVGLVIQTLETLTEYCQGPCHENQTCIVTHESNGIDIITALILNDISPLCKYRMDLVLQLKDNASKLLLALMESRHDSENAERILISLRPQELVDVIKKAYLQEEERENSEVSPREVGHNIYILALQLSRHNKQLQHLLKPVKRIQEEEAEGISSMLSLNNKQLSQMLKSSAPAQEEEEDPLAYYENHTSQIEIVRQDRSMEQIVFPVPGICQFLTEETKHRLFTTTEQDEQGSKVSDFFDQSSFLHNEMEWQRKLRSMPLIYWFSRRMTLWGSISFNLAVFINIIIAFFYPYMEGASTGVLDSPLISLLFWILICFSIAALFTKRYSIRPLIVALILRSIYYLGIGPTLNILGALNLTNKIVFVVSFVGNRGTFIRGYKAMVMDMEFLYHVGYILTSVLGLFAHELFYSILWWFKPGLWSWTRALHLSWATTSCVTGQVS

SEQ ID NO: 8481 - protein, 37 aa, Artificial Sequence
  Synthetic polypeptide
IIDVVQDHYVDWEQDMERYPYVGILHVRDSLIPPQSR

SEQ ID NO: 8482 - protein, 454 aa, Artificial Sequence
  Synthetic polypeptide
MAGLSDLELRRELQALGFQPGPITDTTRDVYRNKLRRLRGEARLRDEERLREEARPRGEERLREEARLREDAPLRARPAAASPRAEPWLSQPASGSAYATPGAYGDIRPSAASWVGSRGLAYPARPAQLRRRASVRGSSEEDEDARTPDRATQGPGLAARRWWAASPAPARLPSSLLGPDPRPGLRATRAGPAGAARARPEVGRRLERWLSRLLLWASLGLLLVFLGILWVKMGKPSAPQEAEDNMKLLPVDCERKTDEFCQAKQKAALLELLHELYNFLAIQAGNFECGNPENLKSKCIPVMEAQEYIANVTSSSSAKFEAALTWILSSNKDVGIWLKGEDQSELVTTVDKVVCLESAHPRMGVGCRLSRALLTAVTNVLIFFWCLAFLWGLLILLKYRWRKLEEEEQAMYEMVKKIIDVVQDHYVDWEQDMERYPYVGILHVRDSLIPPQSR

SEQ ID NO: 8483 - protein, 152 aa, Artificial Sequence
  Synthetic polypeptide
MEAQEYIANVTSSSSAKFEAALTWILSSNKDVGIWLKGEDQSELVTTVDKVVCLESAHPRMGVGCRLSRALLTAVTNVLIFFWCLAFLWGLLILLKYRWRKLEEEEQAMYEMVKKIIDVVQDHYVDWEQDMERYPYVGILHVRDSLIPPQSR

SEQ ID NO: 8484 - protein, 59 aa, Artificial Sequence
  Synthetic polypeptide
GLPGICPPPHGCWLPPEPGLAHCCHQRAHLLLVLGFFVGAPNSPKISVAKVRRGGTSHV

SEQ ID NO: 8485 - protein, 138 aa, Artificial Sequence
  Synthetic polypeptide
MLMPKKNRIAIYELLFKEGVMVAKKDVHMPKHPELADKNVPNLHVMKAMQSLKSRGYVKEQFAWRHFYWYLTNEGIQYLRDYLHLPPEIVPATLRRSRPETGRPRPKGLEGERPARLTRGEADRDTYRRSAVPPWATE

SEQ ID NO: 8486 - protein, 115 aa, Artificial Sequence
  Synthetic polypeptide
MLMPKKNRIAIYELLFKEGVMVAKKDVHMPKHPELADKNVPNLHVMKAMQSLKSRGYVKEQFAWRHFYWYLTNEGIQYLRDYLHLPPEIVPATLRRSRPETGRPRPKGGQGRKTT

SEQ ID NO: 8487 - protein, 301 aa, Artificial Sequence
  Synthetic polypeptide
MALRKELLKSIWYAFTALDVEKSGKVSKSQLKVLSHNLYTVLHIPHDPVALEEHFRDDDDGPVSSQGYMPYLNKYILDKVEEGAFVKEHFDELCWTLTAKKNYRADSNGNSMLSNQDAFRLWCLFNFLSEDKYPLIMVPDEVEYLLKKVLSSMSLEVSLGELEELLAQEAQVAQTTGGLSVWQFLELFNSGRCLRGVGRDTLSMAIHEVYQELIQDVLKQGYLWKRGHLRRNWAERWFQLQPSCLCYFGSEECKEKRGIIPLDAHCCVEAQWLMPVIPALWEAEAGGSPEVGSLRPAWPTW

SEQ ID NO: 8488 - protein, 289 aa, Artificial Sequence
  Synthetic polypeptide
MALRKELLKSIWYAFTALDVEKSGKVSKSQLKVLSHNLYTVLHIPHDPVALEEHFRDDDDGPVSSQGYMPYLNKYILDKVEEGAFVKEHFDELCWTLTAKKNYRADSNGNSMLSNQDAFRLWCLFNFLSEDKYPLIMVPDEVEYLLKKVLSSMSLEVSLGELEELLAQEAQVAQTTGGLSVWQFLELFNSGRCLRGVGRDTLSMAIHEVYQELIQDVLKQGYLWKRGHLRRNWAERWFQLQPSCLCYFGSEECKEKRGIIPLDAHCCVEVLLWKGARIYAEVQASSLTD

SEQ ID NO: 8489 - protein, 6 aa, Artificial Sequence
  Synthetic polypeptide
MHQRGL

SEQ ID NO: 8490 - protein, 88 aa, Artificial Sequence
  Synthetic polypeptide
MHQRVLGGAQAGVQWRGPGSLQPPPPSRLPWPPKVLRLQPLPGRHPVWEVRSVSAWPPIVWDVGSPSAWLPSLGGEERLRPAAIPSRR

SEQ ID NO: 8491 - protein, 46 aa, Artificial Sequence
  Synthetic polypeptide
MTTDEGAKNNEESPTATVAEQGEDITSKKDRGVLKNNFQSCKFHSW

SEQ ID NO: 8492 - protein, 64 aa, Artificial Sequence
  Synthetic polypeptide
MTTDEGAKNNEESPTATVAEQGEDITSKKDRGVLKAFMFTHCSLADSSRTTSSPASSIHGKCSV

SEQ ID NO: 8493 - protein, 597 aa, Artificial Sequence
  Synthetic polypeptide
MERKVLALQARKKRTKAKKDKAQRKSETQHRGSAPHSESDLPEQEEEILGSDDDEQEDPNDYCKGGYHLVKIGDLFNGRYHVIRKLGWGHFSTVWLSWDIQGKKFVAMKVVKSAEHYTETALDEIRLLKSVRNSDPNDPNREMVVQLLDDFKISGVNGTHICMVFEVLGHHLLKWIIKSNYQGLPLPCVKKIIQQVLQGLDYLHTKCRIIHTDIKPENILLSVNEQYIRRLAAEATEWQRSGAPPPSGSAVSTAPQPKPADKMSKNKKKKLKKKQKRQAELLEKRMQEIEEMEKESGPGQKRPNKQEESESPVERPLKENPPNKMTQEKLEESSTIGQDQTLMERDTEGGAAEINCNGVIEVINYTQNSNNETLRHKEDLHNANDCDVQNLNQESSFLSSQNGDSSTSQETDSCTPITSEVSDTMVCQSSSTVGQSFSEQHISQLQESIRAEIPCEDEQEQEHNGPLDNKGKSTAGNFLVNPLEPKNAEKLKVKIADLGNACWVHKHFTEDIQTRQYRSLEVLIGSGYNTPADIWSTACMAFELATGDYLFEPHSGEEYTRDEDTKISWTWWYAPVIPATQEAETQESLEPRKWRLQ

SEQ ID NO: 8494 - protein, 613 aa, Artificial Sequence
  Synthetic polypeptide
KGERWSGLRHEGQWSPGRGPVLALQARKKRTKAKKDKAQRKSETQHRGSAPHSESDLPEQEEEILGSDDDEQEDPNDYCKGGYHLVKIGDLFNGRYHVIRKLGWGHFSTVWLSWDIQGKKFVAMKVVKSAEHYTETALDEIRLLKSVRNSDPNDPNREMVVQLLDDFKISGVNGTHICMVFEVLGHHLLKWIIKSNYQGLPLPCVKKIIQQVLQGLDYLHTKCRIIHTDIKPENILLSVNEQYIRRLAAEATEWQRSGAPPPSGSAVSTAPQPKPADKMSKNKKKKLKKKQKRQAELLEKRMQEIEEMEKESGPGQKRPNKQEESESPVERPLKENPPNKMTQEKLEESSTIGQDQTLMERDTEGGAAEINCNGVIEVINYTQNSNNETLRHKEDLHNANDCDVQNLNQESSFLSSQNGDSSTSQETDSCTPITSEVSDTMVCQSSSTVGQSFSEQHISQLQESIRAEIPCEDEQEQEHNGPLDNKGKSTAGNFLVNPLEPKNAEKLKVKIADLGNACWVHKHFTEDIQTRQYRSLEVLIGSGYNTPADIWSTACMAFELATGDYLFEPHSGEEYTRDEDTKISWTWWYAPVIPATQEAETQESLEPRKWRLQ

SEQ ID NO: 8495 - protein, 581 aa, Artificial Sequence
  Synthetic polypeptide
MGIFVSFLRSETQHRGSAPHSESDLPEQEEEILGSDDDEQEDPNDYCKGGYHLVKIGDLFNGRYHVIRKLGWGHFSTVWLSWDIQGKKFVAMKVVKSAEHYTETALDEIRLLKSVRNSDPNDPNREMVVQLLDDFKISGVNGTHICMVFEVLGHHLLKWIIKSNYQGLPLPCVKKIIQQVLQGLDYLHTKCRIIHTDIKPENILLSVNEQYIRRLAAEATEWQRSGAPPPSGSAVSTAPQPKPADKMSKNKKKKLKKKQKRQAELLEKRMQEIEEMEKESGPGQKRPNKQEESESPVERPLKENPPNKMTQEKLEESSTIGQDQTLMERDTEGGAAEINCNGVIEVINYTQNSNNETLRHKEDLHNANDCDVQNLNQESSFLSSQNGDSSTSQETDSCTPITSEVSDTMVCQSSSTVGQSFSEQHISQLQESIRAEIPCEDEQEQEHNGPLDNKGKSTAGNFLVNPLEPKNAEKLKVKIADLGNACWVHKHFTEDIQTRQYRSLEVLIGSGYNTPADIWSTACMAFELATGDYLFEPHSGEEYTRDEDTKISWTWWYAPVIPATQEAETQESLEPRKWRLQ

SEQ ID NO: 8496 - protein, 489 aa, Artificial Sequence
  Synthetic polypeptide
MKVVKSAEHYTETALDEIRLLKSVRNSDPNDPNREMVVQLLDDFKISGVNGTHICMVFEVLGHHLLKWIIKSNYQGLPLPCVKKIIQQVLQGLDYLHTKCRIIHTDIKPENILLSVNEQYIRRLAAEATEWQRSGAPPPSGSAVSTAPQPKPADKMSKNKKKKLKKKQKRQAELLEKRMQEIEEMEKESGPGQKRPNKQEESESPVERPLKENPPNKMTQEKLEESSTIGQDQTLMERDTEGGAAEINCNGVIEVINYTQNSNNETLRHKEDLHNANDCDVQNLNQESSFLSSQNGDSSTSQETDSCTPITSEVSDTMVCQSSSTVGQSFSEQHISQLQESIRAEIPCEDEQEQEHNGPLDNKGKSTAGNFLVNPLEPKNAEKLKVKIADLGNACWHKHFTEDIQTRQYRSLEVLIGSGYNTPADIWSTACMAFELATGDYLFEPHSGEEYTRDEDTKISWTWWYAPVIPATQEAETQESLEPRKWRLQ

SEQ ID NO: 8497 - protein, 48 aa, Artificial Sequence
  Synthetic polypeptide
MKKKKYVNSGTVTLLSFAVESECTFLDYIKGGVSVSSSVHKENGIGKC

SEQ ID NO: 8498 - protein, 340 aa, Artificial Sequence
  Synthetic polypeptide
MEQPEDMASLSEFDSLAGSIPATKVEITVSCRNLLDKDMFSKSDPLCVMYTQGMENKQWREFGRTEVIDNTLNPDFVRKFIVDYFFEEKQNLRFDLYDVDSKSPDLSKHDFLGQAFCTLGEIVGSPGSRLEKPLTIGAFSLNSRTGKPMPAVSNGGVPGKKCGTIILSAEELSNCRDVATMQFCANKLDKKDFFGKSDPFLVFYRSNEDGTFTICHKTEVMKNTLNPVWQTFSIPVRALCNGDYDRTIKVEVYDWDRDGSHDFIGEFTTSYRELARGQSQFNIYEVVNPKKKMKKKKYVNSGTVTLLSFAVESECTFLDYIKGGVSVSSSVHKENGIGKC

SEQ ID NO: 8499 - protein, 25 aa, Artificial Sequence
  Synthetic polypeptide
MKKKKYVNSGTGISFLLCTQRERNR

SEQ ID NO: 8500 - protein, 317 aa, Artificial Sequence
  Synthetic polypeptide
MEQPEDMASLSEFDSLAGSIPATKVEITVSCRNLLDKDMFSKSDPLCVMYTQGMENKQWREFGRTEVIDNTLNPDFVRKFIVDYFFEEKQNLRFDLYDVDSKSPDLSKHDFLGQAFCTLGEIVGSPGSRLEKPLTIGAFSLNSRTGKPMPAVSNGGVPGKKCGTIILSAEELSNCRDVATMQFCANKLDKKDFFGKSDPFLVFYRSNEDGTFTICHKTEVMKNTLNPVWQTFSIPVRALCNGDYDRTIKVEVYDWDRDGSHDFIGEFTTSYRELARGQSQFNIYEVVNPKKKMKKKKYVNSGTGISFLLCTQRERNR

SEQ ID NO: 8501 - protein, 61 aa, Artificial Sequence
  Synthetic polypeptide
MSLPIAKKYMSENKGVPLHGGDEDRPFPGWVWWFTTIILAIWEAEAKGLVEPRSSRPAWAT

SEQ ID NO: 8502 - protein, 167 aa, Artificial Sequence
  Synthetic polypeptide
MDLAANEISIYDKLSETVDLVRQTGHQCGMSEKAIEKFIRQLLEKNEPQRPPPQYPLLIVVYKVLATLGLILLTAYFVIQPFSPLAPEPVLSGAHTWRSLIHHIRLMSLPIAKKYMSENKGVPLHGGDEDRPFPGWVWWFTTIILAIWEAEAKGLVEPRSSRPAWAT

SEQ ID NO: 8503 - protein, 174 aa, Artificial Sequence
  Synthetic polypeptide
MDFILEDMDLAANEISIYDKLSETVDLVRQTGHQCGMSEKAIEKFIRQLLEKNEPQRPPPQYPLLIVVYKVLATLGLILLTAYFVIQPFSPLAPEPVLSGAHTWRSLIHHIRLMSLPIAKKYMSENKGVPLHGGDEDRPFPGWVWWFTTIILAIWEAEAKGLVEPRSSRPAWAT

SEQ ID NO: 8504 - protein, 48 aa, Artificial Sequence
  Synthetic polypeptide
MSLPIAKKYMSENKGVPLHGGDEDRPFPGMVADTYNSSTLGGQGGWIA

SEQ ID NO: 8505 - protein, 154 aa, Artificial Sequence
  Synthetic polypeptide
MDLAANEISIYDKLSETVDLVRQTGHQCGMSEKAIEKFIRQLLEKNEPQRPPPQYPLLIVVYKVLATLGLILLTAYFVIQPFSPLAPEPVLSGAHTWRSLIHHIRLMSLPIAKKYMSENKGVPLHGGDEDRPFPGMVADTYNSSTLGGQGGWIA

SEQ ID NO: 8506 - protein, 161 aa, Artificial Sequence
  Synthetic polypeptide
MDFILEDMDLAANEISIYDKLSETVDLVRQTGHQCGMSEKAIEKFIRQLLEKNEPQRPPPQYPLLIVVYKVLATLGLILLTAYFVIQPFSPLAPEPVLSGAHTWRSLIHHIRLMSLPIAKKYMSENKGVPLHGGDEDRPFPGMVADTYNSSTLGGQGGWIA

SEQ ID NO: 8507 - protein, 5 aa, Artificial Sequence
  Synthetic polypeptide
CKADG

SEQ ID NO: 8508 - protein, 225 aa, Artificial Sequence
  Synthetic polypeptide
MASAVFEGTSLVNMFVRGCWVNGIRRLIVSRRGDEEEFFEIRTEWSDRSVLYLHRSLADLGRLWQRLRDAFPEDRSELAQGPLRQGLVAIKEAHDIETRLNEVEKLLKTIISMPCKYSRSEVVLTFFERSPLDQVLKNDNVHKIQPSFQSPVKISGVHLSRVGSLNSCSWIPPMHLGAGVGPELSQSATPPGVFLLDAEATEKEAAQRMNPGEGARGRRVPAMWR

SEQ ID NO: 8509 - protein, 864 aa, Artificial Sequence
  Synthetic polypeptide
MEVTCLLLLALIPFHCRGQGVYAPAQAQIVHAGQACVVKEDNISERVYTIREGDTLMLQCLVTGHPRPQVRWTKTAGSASDKFQETSVFNETLRIERIARTQGGRYYCKAENGVGVPAIKSIRVDVQYLDEPMLTVHQTVSDVRGNFYQEKTVFLRCTVNSNPPARFIWKRGSDTLSHSQDNGVDIYEPLYTQGETKVLKLKNLRPQDYASYTCQVSVRNVCGIPDKAITFRLTNTTAPPALKLSVNETLVVNPGENVTVQCLLTGGDPLPQLQWSHGPGPLPLGALAQGGTLSIPSVQARDSGYYNCTATNNVGNPAKKTVNLLVRSMKNATFQITPDVIKESENIQLGQDLKLSCHVDAVPQEKVTYQWFKNGKPARMSKRLLVTRNDPELPAVTSSLELIDLHFSDYGTYLCMASFPGAPVPDLSVEVNISSETVPPTISVPKGRAVVTVREGSPAELQCEVRGKPRPPVLWSRVDKEAALLPSGLPLEETPDGKLRLERVSRDMSGTYRCQTARYNGFNVRPREAQVQLNVQSPCFPPEVEPSSQDVRQALGRPVLLRCSLLRGSPQRIASAVWRFKGQLLPPPPVVPAAAEAPDHAELRLDAVTRDSSGSYECSVSNDVGSAACLFQVSAKAYSPEFYFDTPNPTRSHKLSKNYSYVLQWTQREPDAVDPVLNYRLSIRQLNQHNAVVKAIPVRRVEKGQLLEYILTDLRVPHSYEVRLTPYTTFGAGDMASRIIHYTELLALRTLSSDNTCHFEDEKICGYTQDLTDNFDWTRQNALTQNPKRSPNTGPPTDISGTPEGYYMFIETSRPRELGDRARLVSPLYNASAKFYCVSFFYHMYGKHIARAKLHFKKKKGKRK

SEQ ID NO: 8510 - protein, 860 aa, Artificial Sequence
  Synthetic polypeptide
MEVTCLLLLALIPFHCRGQGVYAPAQAQIVHAGQACVVKEDNISERVYTIREGDTLMLQCLVTGHPRPQVRWTKTAGSASDKFQETSVFNETLRIERIARTQGGRYYCKAENGVGVPAIKSIRVDVQYLDEPMLTVHQTVSDVRGNFYQEKTVFLRCTVNSNPPARFIWKRGSDTLSHSQDNGVDIYEPLYTQGETKVLKLKNLRPQDYASYTCQVSVRNVCGIPDKAITFRLTNTTAPPALKLSVNETLVVNPGENVTVQCLLTGGDPLPQLQWSHGPGPLPLGALAQGGTLSIPSVQARDSGYYNCTATNNVGNPAKKTVNLLVRSMKNATFQITPDVIKESENIQLGQDLKLSCHVDAVPQEKVTYQWFKNGKPARMSKRLLVTRNDPELPAVTSSLELIDLHFSDYGTYLCMASFPGAPVPDLSVEVNISSETVPPTISVPKGRAVVTVREGSPAELQCEVRGKPRPPVLWSRVDKEAALLPSGLPLEETPDGKLRLERVSRDMSGTYRCQTARYNGFNVRPREAQVQLNVQFPPEVEPSSQDVRQALGRPVLLRCSLLRGSPQRIASAVWRFKGQLLPPPPVVPAAAEAPDHAELRLDAVTRDSSGSYECSVSNDVGSAACLFQVSAKAYSPEFYFDTPNPTRSHKLSKNYSYVLQWTQREPDAVDPVLNYRLSIRQLNQHNAVVKAIPVRRVEKGQLLEYILTDLRVPHSYEVRLTPYTTFGAGDMASRIIHYTEPINSPNLSDNTCHFEDEKICGYTQDLTDNFDWTRQNALTQNPKRSPNTGPPTDISGTPEGYYMFIETSRPRELGDRARLVSPLYNASAKFYCVSFFYHMYGKHIARAKLHFKKKKGKRK

SEQ ID NO: 8511 - skipped

SEQ ID NO: 8512 - protein, 100 aa, Artificial Sequence
  Synthetic polypeptide
MEQRLAEFRAARKRAGLAAQPPAASQGAQTPGEKAEAAATLKAAPGWLKRFLVWKPRPASARAQPGLVQMKEYRNSRIFAQWNTLQPSNFRTSPHFQQRG

SEQ ID NO: 8513 - protein, 8 aa, Artificial Sequence
  Synthetic polypeptide
MGVTWAVE

SEQ ID NO: 8514 - protein, 195 aa, Artificial Sequence
  Synthetic polypeptide
MADAAATAGAGGSGTRSGSKQSTNPADNYHLARRRTLQVVVSSLLTEAGFESAEKASVETLTEMLQSYISEIGRSAKSYCEHTARTQPTLSDIVVTLVEMGFNVDTLPAYAKRSQRMVITAPPVTNQPVTPKALTAGQNRPHPPHIPSHFPEFPDPHTYIKTPHFRRPRQEDHLSLGVQDQPGQQSKTLSHLKNK

SEQ ID NO: 8515 - protein, 132 aa, Artificial Sequence
  Synthetic polypeptide
MLQSYISEIGRSAKSYCEHTARTQPTLSDIVVTLVEMGFNVDTLPAYAKRSQRMVITAPPVTNQPVTPKALTAGQNRPHPPHIPSHFPEFPDPHTYIKTPHFRRPRQEDHLSLGVQDQPGQQSKTLSHLKNK

SEQ ID NO: 8516 - protein, 326 aa, Artificial Sequence
  Synthetic polypeptide
MALAVLRVLEPFPTETPPLAVLLPPGGPWPAAELGLVLALRPAGESPAGPALLVAALEGPDAGTEEQGPGPPQLLVSRALLRLLALGSGAWVRARAVRRPPALGWALLGTSLGPGLGPRVGPLLVRRGETLPVPGPRVLETRPALQGLLGPGTRLAVTELRGRARLCPESGDSSRPPPPPVVSSFAVSGTVRRLQGVLGGTGDSLGVSRSCLRGLGLFQGEWVWVAQARESSNTSQPHLARVQVLEPRWDLSDRLGPGSGPLGEPLADGLALVPATLAFNLGCDPLEMGELRIQPHLLKSYPPFPQEPSKDDTFITKPFMISQPRI

SEQ ID NO: 8517 - protein, 42 aa, Artificial Sequence
  Synthetic polypeptide
MALCALTRALRSLNLAPPTVAAPAPSLFPAAQGEILQTRYLR

SEQ ID NO: 8518 - protein, 503 aa, Artificial Sequence
  Synthetic polypeptide
MSGLVLGQRDEPAGHRLSQEEILGSTRLVSQGLEALRSEHQAVLQSLSQTIECLQQGGHEEGLVHEKARQLRRSMENIELGLSEAQVMLALASHLSTVESEKQKLRAQVRRLCQENQWLRDELAGTQQRLQRSEQAVAQLEEEKKHLEFLGQLRQYDEDGHTSEEKEGDATKDSLDDLFPNEEEEDPSNGLSRGQGATAAQQGGYEIPARLRTLHNLVIQYAAQGRYEVAVPLCKQALEDLERTSGRGHPDVATMLNILALVYRDQNKYKEAAHLLNDALSIRESTLGPDHPAVAATLNNLAVLYGKRGKYKEAEPLCQRALEIREKVLGTNHPDVAKQLNNLALLCQNQGKYEAVERYYQRALAIYEGQLGPDNPNVARTKNNLASCYLKQGKYAEAETLYKEILTRAHVQEFGSVDDDHKPIWMHAEEREEMSKSRHHEGGTPYAEYGGWYKACKVSSPTVNTTLRNLGALYRRQGKLEAAETLEECALRSRRQWLMVKKI

SEQ ID NO: 8519 - protein, 426 aa, Artificial Sequence
  Synthetic polypeptide
MSGLVLGQRDEPAGHRLSQEEILGSTRLVSQGLEALRSEHQAVLQSLSQTIECLQQGGHEEGLVHEKARQLRRSMENIELGLSEAQEEKEGDATKDSLDDLFPNEEEEDPSNGLSRGQGATAAQQGGYEIPARLRTLHNLVIQYAAQGRYEVAVPLCKQALEDLERTSGRGHPDVATMLNILALVYRDQNKYKEAAHLLNDALSIRESTLGPDHPAVAATLNNLAVLYGKRGKYKEAEPLCQRALEIREKVLGTNHPDVAKQLNNLALLCQNQGKYEAVERYYQRALAIYEGQLGPDNPNVARTKNNLASCYLKQGKYAEAETLYKEILTRAHVQEFGSVDDDHKPIWMHAEEREEMSKSRHHEGGTPYAEYGGWYKACKVSSPTVNTTLRNLGALYRRQGKLEAAETLEECALRSRRQWLMVKKI

SEQ ID NO: 8520 - protein, 521 aa, Artificial Sequence
  Synthetic polypeptide
MEVTGFGVTRPGKVPQARMSGLVLGQRDEPAGHRLSQEEILGSTRLVSQGLEALRSEHQAVLQSLSQTIECLQQGGHEEGLVHEKARQLRRSMENIELGLSEAQVMLALASHLSTVESEKQKLRAQVRRLCQENQWLRDELAGTQQRLQRSEQAVAQLEEEKKHLEFLGQLRQYDEDGHTSEEKEGDATKDSLDDLFPNEEEEDPSNGLSRGQGATAAQQGGYEIPARLRTLHNLVIQYAAQGRYEVAVPLCKQALEDLERTSGRGHPDVATMLNILALVYRDQNKYKEAAHLLNDALSIRESTLGPDHPAVAATLNNLAVLYGKRGKYKEAEPLCQRALEIREKVLGTNHPDVAKQLNNLALLCQNQGKYEAVERYYQRALAIYEGQLGPDNPNVARTKNNLASCYLKQGKYAEAETLYKEILTRAHVQEFGSVDDDHKPIWMHAEEREEMSKSRHHEGGTPYAEYGGWYKACKVSSPTVNTTLRNLGALYRRQGKLEAAETLEECALRSRRQWLMVKKI

SEQ ID NO: 8521 - protein, 584 aa, Artificial Sequence
  Synthetic polypeptide
MSGLVLGQRDEPAGHRLSQEEILGSTRLVSQGLEALRSEHQAVLQSLSQTIECLQQGGHEEGLVHEKARQLRRSMENIELGLSEAQVMLALASHLSTVESEKQKLRAQVRRLCQENQWLRDELAGTQQRLQRSEQAVAQLEEEKKHLEFLGQLRQYDEDGHTSEEKEGDATKDSLDDLFPNEEEEDPSNGLSRGQGATAAQQGGYEIPARLRTLHNLVIQYAAQGRYEVAVPLCKQALEDLERTSGRGHPDVATMLNILALVYRDQNKYKEAAHLLNDALSIRESTLGPDHPAVAATLNNLAVLYGKRGKYKEAEPLCQRALEIREKVLGTNHPDVAKQLNNLALLCQNQGKYEAVERYYQRALAIYEGQLGPDNPNVARTKNNLASCYLKQGKYAEAETLYKEILTRAHVQEFGSVDDDHKPIWMHAEEREEMSKSRHHEGGTPYAEYGGWYKACKVSSPTVNTTLRNLGALYRRQGKLEAAETLEECALRSRRQGTDPISQTKVAELLGESDGRRTSQEGPGDSVKFEGGEDASVAVEWSGDGSGTLQRSGSLGKIRDVLRRSSELLVRKLQGTEPRPSRCL

SEQ ID NO: 8522 - protein, 507 aa, Artificial Sequence
  Synthetic polypeptide
MSGLVLGQRDEPAGHRLSQEEILGSTRLVSQGLEALRSEHQAVLQSLSQTIECLQQGGHEEGLVHEKARQLRRSMENIELGLSEAQEEKEGDATKDSLDDLFPNEEEEDPSNGLSRGQGATAAQQGGYEIPARLRTLHNLVIQYAAQGRYEVAVPLCKQALEDLERTSGRGHPDVATMLNILALVYRDQNKYKEAAHLLNDALSIRESTLGPDHPAVAATLNNLAVLYGKRGKYKEAEPLCQRALEIREKVLGTNHPDVAKQLNNLALLCQNQGKYEAVERYYQRALAIYEGQLGPDNPNVARTKNNLASCYLKQGKYAEAETLYKEILTRAHVQEFGSVDDDHKPIWMHAEEREEMSKSRHHEGGTPYAEYGGWYKACKVSSPTVNTTLRNLGALYRRQGKLEAAETLEECALRSRRQGTDPISQTKVAELLGESDGRRTSQEGPGDSVKFEGGEDASVAVEWSGDGSGTLQRSGSLGKIRDVLRRSSELLVRKLQGTEPRPSRCL

SEQ ID NO: 8523 - protein, 602 aa, Artificial Sequence
  Synthetic polypeptide
MEVTGFGVTRPGKVPQARMSGLVLGQRDEPAGHRLSQEEILGSTRLVSQGLEALRSEHQAVLQSLSQTIECLQQGGHEEGLVHEKARQLRRSMENIELGLSEAQVMLALASHLSTVESEKQKLRAQVRRLCQENQWLRDELAGTQQRLQRSEQAVAQLEEEKKHLEFLGQLRQYDEDGHTSEEKEGDATKDSLDDLFPNEEEEDPSNGLSRGQGATAAQQGGYEIPARLRTLHNLVIQYAAQGRYEVAVPLCKQALEDLERTSGRGHPDVATMLNILALVYRDQNKYKEAAHLLNDALSIRESTLGPDHPAVAATLNNLAVLYGKRGKYKEAEPLCQRALEIREKVLGTNHPDVAKQLNNLALLCQNQGKYEAVERYYQRALAIYEGQLGPDNPNVARTKNNLASCYLKQGKYAEAETLYKEILTRAHVQEFGSVDDDHKPIWMHAEEREEMSKSRHHEGGTPYAEYGGWYKACKVSSPTVNTTLRNLGALYRRQGKLEAAETLEECALRSRRQGTDPISQTKVAELLGESDGRRTSQEGPGDSVKFEGGEDASVAVEWSGDGSGTLQRSGSLGKIRDVLRRSSELLVRKLQGTEPRPSRCL

SEQ ID NO: 8524 - protein, 782 aa, Artificial Sequence
  Synthetic polypeptide
MERLLAQLCGSSAAWPLPLWEGDTTGHCFTQLVLSALPHALLAVLSACYLGTPRSPDYILPCSPGWRLRLAASFLLSVFPLLDLLPVALPPGAGPGPIGLEVLAGCVAAVAWISHSLALWVLAHSPHGHSRGPLALALVALLPAPALVLTVLWHCQRGTLLPPLLPGPMARLCLLILQLAALLAYALGWAAPGGPREPWAQEPLLPEDQEPEVAEDGESWLSRFSYAWLAPLLARGACGELRQPQDICRLPHRLQPTYLARVFQAHWQEGARLWRALYGAFGRCYLALGLLKLVGTMLGFSGPLLLSLLVGFLEEGQEPLSHGLLYALGLAGGAVLGAVLQNQYGYEVYKVTLQARGAVLNILYCKALQLGPSRPPTGEALNLLGTDSERLLNFAGSFHEAWGLPLQLAITLYLLYQQVGVAFVGGLILALLLVPVNKVIATRIMASNQEMLQHKDARVKLVTELLSGIRVIKFCGWEQALGARVEACRARELGRLRVIKYLDAACVYLWAALPVVISIVIFITYVLMGHQLTATKVFTALALVRMLILPLNNFPWVINGLLEAKVSLDRIQLFLDLPNHNPQAYYSPDPPAEPSTVLELHGALFSWDPVGTSLETFISHLEVKKGMLVGIVGKVGCGKSSLLAAIAGELHRLRGHVAVRGLSKGFGLATQEPWIQFATIRDNILFGKTFDAQLYKEVLEACALNDDLSILPAGDQTEVGEKGVTLSGGQRARIALARAVYQLLGRLRQENRLNPRGRGCSEPRSHHCTPAWVMRMKPCLQK

SEQ ID NO: 8525 - protein, 754 aa, Artificial Sequence
  Synthetic polypeptide
MCLLVFPLVPRSPDYILPCSPGWRLRLAASFLLSVFPLLDLLPVALPPGAGPGPIGLEVLAGCVAAVAWISHSLALWVLAHSPHGHSRGPLALALVALLPAPALVLTVLWHCQRGTLLPPLLPGPMARLCLLILQLAALLAYALGWAAPGGPREPWAQEPLLPEDQEPEVAEDGESWLSRFSYAWLAPLLARGACGELRQPQDICRLPHRLQPTYLARVFQAHWQEGARLWRALYGAFGRCYLALGLLKLVGTMLGFSGPLLLSLLVGFLEEGQEPLSHGLLYALGLAGGAVLGAVLQNQYGYEVYKVTLQARGAVLNILYCKALQLGPSRPPTGEALNLLGTDSERLLNFAGSFHEAWGLPLQLAITLYLLYQQVGVAFVGGLILALLLVPVNKVIATRIMASNQEMLQHKDARVKLVTELLSGIRVIKFCGWEQALGARVEACRARELGRLRVIKYLDAACVYLWAALPVVISIVIFITYVLMGHQLTATKVFTALALVRMLILPLNNFPWVINGLLEAKVSLDRIQLFLDLPNHNPQAYYSPDCGRLGAQIKWLLCSDPPAEPSTVLELHGALFSWDPVGTSLETFISHLEVKKGMLVGIVGKVGCGKSSLLAAIAGELHRLRGHVAVRGLSKGFGLATQEPWIQFATIRDNILFGKTFDAQLYKEVLEACALNDDLSILPAGDQTEVGEKGVTLSGGQRARIALARAVYQLLGRLRQENRLNPRGRGCSEPRSHHCTPAWVMRMKPCLQK

SEQ ID NO: 8526 - protein, 423 aa, Artificial Sequence
  Synthetic polypeptide
MATGQDRVVALVDMDCFFVQVEQRQNPHLRNKPCAVVQYKSWKGGGIIAVSYEARAFGVTRSMWADDAKKLCPDLLLAQVRESRGKANLTKYREASVEVMEIMSRFAVIERASIDEAYVDLTSAVQERLQKLQGQPISADLLPSTYIEGLPQGPTTAEETVQKEGMRKQGLFQWLDSLQIDNLTSPDLQLTVGAVIVEEMRAAIERETGFQCSAGISHNKVLAKLACGLNKPNRQTLVSHGSVPQLFSQMPIRKIRSLGGKLGASVIEILGIEYMGELTQFTESQLQSHFGEKNGSWLYAMCRGIEHDPVKPRQLPKTIGCSKNFPGKTALATREQVQWWLLQLAQELEERLTKDRNDNDRVATQLVVSIRVQGDKRLSSLRRCCALTRYDAHKMSHDAFTVIKNCNTSGIQTEWAGRGGSRL

SEQ ID NO: 8527 - protein, 361 aa, Artificial Sequence
  Synthetic polypeptide
MWADDAKKLCPDLLLAQVRESRGKANLTKYREASVEVMEIMSRFAVIERASIDEAYVDLTSAVQERLQKLQGQPISADLLPSTYIEGLPQGPTTAEETVQKEGMRKQGLFQWLDSLQIDNLTSPDLQLTVGAVIVEEMRAAIERETGFQCSAGISHNKVLAKLACGLNKPNRQTLVSHGSVPQLFSQMPIRKIRSLGGKLGASVIEILGIEYMGELTQFTESQLQSHFGEKNGSWLYAMCRGIEHDPVKPRQLPKTIGCSKNFPGKTALATREQVQWWLLQLAQELEERLTKDRNDNDRVATQLVVSIRVQGDKRLSSLRRCCALTRYDAHKMSHDAFTVIKNCNTSGIQTEWAGRGGSRL

SEQ ID NO: 8528 - protein, 86 aa, Artificial Sequence
  Synthetic polypeptide
MARVPLGRSLTLSPRLEHNGMTSAHHNFRLPGSRDSPASASQVAEIIGSEPLEHGARAWLVLRCLQHLGQGLARSRCTVSSECWSE

SEQ ID NO: 8529 - protein, 267 aa, Artificial Sequence
  Synthetic polypeptide
MNNTAASPMSTATSSSGRSTGKSISFATELQSMMYSLGDARRPLHETAVLVEDVVHTQLINLLQQAAEVSQLRGARVITPEDLLFLMRKDKKKLRRLLKYMFIRDYKSKIVKGIDEDDLLEDKLSGSNNANKRQKIAQDFLNSIDQTGELLAMFEDDEIDEVKQERMERAERQTRIMDSAQYAEFCESRQLSFSKKASKFRDWLDCSSMEIKPNVVAMEILAYLAYETVAQLVDLALLVRQDMVTKAGDPFSHAISATFIQYHNSAE

SEQ ID NO: 8530 - protein, 278 aa, Artificial Sequence
  Synthetic polypeptide
MVVFGTTFFNFDSFIGKTDSIEIIGKSVFPYCYHNILPLLNDSGRYSLGDARRPLHETAVLVEDVVHTQLINLLQQAAEVSQLRGARVITPEDLLFLMRKDKKKLRRLLKYMFIRDYKSKIVKGIDEDDLLEDKLSGSNNANKRQKIAQDFLNSIDQTGELLAMFEDDEIDEVKQERMERAERQTRIMDSAQYAEFCESRQLSFSKKASKFRDWLDCSSMEIKPNVVAMEILAYLAYETVAQLVDLALLVRQDMVTKAGDPFSHAISATFIQYHNSAE

SEQ ID NO: 8531 - protein, 50 aa, Artificial Sequence
  Synthetic polypeptide
MEILAYLAYETVAQLVDLALLVRQDMVTKAGDPFSHAISATFIQYHNSAE

SEQ ID NO: 8532 - protein, 22 aa, Artificial Sequence
  Synthetic polypeptide
MDISIQSNAVLPLAETQSWSHP

SEQ ID NO: 8533 - protein, 199 aa, Artificial Sequence
  Synthetic polypeptide
MKVGVLWLISFFTFTDGHGGFLGKNDGIKTKKELIVNKKKHLGPVEEYQLLLQVTYRDSKEKRDLRNFLKLLKPPLLWSHGLIRIIRAKATTDCNSLNGVLQCTCEDSYTWFPPSCLDPQNCYLHTAGALPSCECHLNNLSQSVNFCERTKIWGTFKINERFTNDLLNSSSAIYSKYANGIEIQQCCPSTCRDPILEPS

SEQ ID NO: 8534 - protein, 153 aa, Artificial Sequence
  Synthetic polypeptide
EYQLLLQVTYRDSKEKRDLRNFLKLLKPPLLWSHGLIRIIRAKATTDCNSLNGVLQCTCEDSYTWFPPSCLDPQNCYLHTAGALPSCECHLNNLSQSVNFCERTKIWGTFKINERFTNDLLNSSSAIYSKYANGIEIQQCCPSTCRDPILEPS

SEQ ID NO: 8535 - protein, 6 aa, Artificial Sequence
  Synthetic polypeptide
MVTWAN

SEQ ID NO: 8536 - protein, 501 aa, Artificial Sequence
  Synthetic polypeptide
MTFQASHRSAWGKSRKKNWQYEGPTQKLFLKRNNVSAPDGPSDPSISVSSEQSGAQQPPALQVERIVDKRKNKKGKTEYLVRWKGYDSEDDTWEPEQHLVNCEEYIHDFNRRHTEKQKESTLTRTNRTSPNNARKQISRSTNSNFSKTSPKALVIGKDHESKNSQLFAASQKFRKNTAPSLSSRKNMDLAKSGIKILVPKSPVKSRTAVDGFQSESPEKLDPVEQGQEDTVAPEVAAEKPVGALLGPGAERARMGSRPRIHPLVPQVPGPVTAAMATGLAVNGKGTSPFMDALTANGTTNIQTSVTGVTASKRKFIDDRRDQPFDKRLRFSVRQTESAYRYRDIVVRKQDGFTHILLSTKSSENNSLNPEVMREVQSALSTAAADDSKLVLLSAVGSVFCCGLDFIYFIRRLTDDRKRESTKMAEAIRNFVNTFIQFKKPIIVAVNGPAIGLGASILPLCDVVWANEKAWFQTPYTTFGQSPDGCSTVMFPKIMGGASWEK

SEQ ID NO: 8537 - protein, 447 aa, Artificial Sequence
  Synthetic polypeptide
MASEELYEVERIVDKRKNKKGKTEYLVRWKGYDSEDDTWEPEQHLVNCEEYIHDFNRRHTEKQKESTLTRTNRTSPNNARKQISRSTNSNFSKTSPKALVIGKDHESKNSQLFAASQKFRKNTAPSLSSRKNMDLAKSGIKILVPKSPVKSRTAVDGFQSESPEKLDPVEQGQEDTVAPEVAAEKPVGALLGPGAERARMGSRPRIHPLVPQVPGPVTAAMATGLAVNGKGTSPFMDALTANGTTNIQTSVTGVTASKRKFIDDRRDQPFDKRLRFSVRQTESAYRYRDIVVRKQDGFTHILLSTKSSENNSLNPEVMREVQSALSTAAADDSKLVLLSAVGSVFCCGLDFIYFIRRLTDDRKRESTKMAEAIRNFVNTFIQFKKPIIVAVNGPAIGLGASILPLCDVVWANEKAWFQTPYTTFGQSPDGCSTVMFPKIMGGASWEK

SEQ ID NO: 8538 - protein, 315 aa, Artificial Sequence
  Synthetic polypeptide
MDLAKSGIKILVPKSPVKSRTAVDGFQSESPEKLDPVEQGQEDTVAPEVAAEKPVGALLGPGAERARMGSRPRIHPLVPQVPGPVTAAMATGLAVNGKGTSPFMDALTANGTTNIQTSVTGVTASKRKFIDDRRDQPFDKRLRFSVRQTESAYRYRDIVVRKQDGFTHILLSTKSSENNSLNPEVMREVQSALSTAAADDSKLVLLSAVGSVFCCGLDFIYFIRRLTDDRKRESTKMAEAIRNFVNTFIQFKKPIIVAVNGPAIGLGASILPLCDVVWANEKAWFQTPYTTFGQSPDGCSTVMFPKIMGGASWEK

SEQ ID NO: 8539 - protein, 144 aa, Artificial Sequence
  Synthetic polypeptide
MSGKANASKKNAQQLKRNPKRKKDNEEVVLSENKVRNTVKKNKNHLKDLSSEGQTKHTNLKHGKTAASKRKTWQPLSKSTRDHLQTMMESVIMTILSNSIKEKEEIQYHLNFLKKRPALKELLKEALNMERKNRYQPLQKHAKL

SEQ ID NO: 8540 - protein, 144 aa, Artificial Sequence
  Synthetic polypeptide
MSGKANASKKNAQQLKRNPKRKKDNEEVVLSENKVRNTVKKNKNHLKDLSSEGQTKHTNLKHGKTAASKRKTWQPLSKSTRDHLQTMMESVIMTILSNSIKEKEEIQYHLNFLKKRPALKELLKEALNMEKNNWYKPLQNHTKL

SEQ ID NO: 8541 - protein, 76 aa, Artificial Sequence
  Synthetic polypeptide
MRFTFPLMAIVLEIAMIVLFGLFVEYETDQTVLEQLNITKPTDMGIFFELYPRSLTRSDGFIKGSSPAPALSPATM

SEQ ID NO: 8542 - protein, 298 aa, Artificial Sequence
  Synthetic polypeptide
MATLRRLREAPRHLLVCEKSNFGNHKSRHRHLVQTHYYNYRVSFLIPECGILSEELKNLVMNTGPYYFVKNLPLHELITPEFISTFIKKGSCYALTYNTHIDEDNTVALLPNGKLILSLDKDTYEETGLQGHPSQFSGRKIMKFIVSIDLMELSLNLDSKKYERISWSFKEKKPLKFDFLLAWHKTGSEESTMMSYFSKYQIQEHQPKVALSTLRDLQCPVLQSSELEGTPEVSCRALELFDWLGAVFSNVDLNNEPNNFISTYCCPEPSTVVAKAYLCTITGFILPEKICLLLEHLW

SEQ ID NO: 8543 - protein, 275 aa, Artificial Sequence
  Synthetic polypeptide
MATLRRLREAPRHLLVCEKSNFGNHKSRHRHLVQTHYYNYRVSFLIPECGILSEELKNLVMNTGPYYFVKNLPLHELITPEFISTFIKKGKLILSLDKDTYEETGLQGHPSQFSGRKIMKFIVSIDLMELSLNLDSKKYERISWSFKEKKPLKFDFLLAWHKTGSEESTMMSYFSKYQIQEHQPKVALSTLRDLQCPVLQSSELEGTPEVSCRALELFDWLGAVFSNVDLNNEPNNFISTYCCPEPSTVVAKAYLCTITGFILPEKICLLLEHLW

SEQ ID NO: 8544 - protein, 238 aa, Artificial Sequence
  Synthetic polypeptide
MNTGPYYFVKNLPLHELITPEFISTFIKKGSCYALTYNTHIDEDNTVALLPNGKLILSLDKDTYEETGLQGHPSQFSGRKIMKFIVSIDLMELSLNLDSKKYERISWSFKEKKPLKFDFLLAWHKTGSEESTMMSYFSKYQIQEHQPKVALSTLRDLQCPVLQSSELEGTPEVSCRALELFDWLGAVFSNVDLNNEPNNFISTYCCPEPSTVVAKAYLCTITGFILPEKICLLLEHLW

SEQ ID NO: 8545 - protein, 459 aa, Artificial Sequence
  Synthetic polypeptide
MVSNPVHGLPFLPGTSFKDSTKTAFHRSQTLSYRNGYAIVRRPTVGIGGDRLQFNQLSQAELDELASKAPVLTYGQPKQAPPADFIPAHVAFDKKVLKFDAYFQEDVPMSTEEQYRIRQVNIYYYLEDDSMSVIEPVVENSGILQGKLIKRQRLAKNDRGDHYHWKDLNRGINITIYGKTFRVVDCDQFTQVFLESQGIELNPPEKMALDPYTELRKQPLRKYVTPSDFDQLKQFLTFDKQVLRFYAIWDDTDSMYGECRTYIIHYYLMDDTVEIREVHERNDGRDPFPLLMNRQRVPKVLVENAKNFPQCVLEISDQEVLEWYTAKDFIVGKSLTILGRTFFIYDCDPFTRRYYKEKFGITDLPRIDVSKREPPPVKQELPPYNGFGLVEDSAQNCFALIPKAPKKDVIKMLVNDNKVLRYLAVLACLLIPEDPPVRTNIGIYLGPVKGRSSWETLCA

SEQ ID NO: 8546 - protein, 368 aa, Artificial Sequence
  Synthetic polypeptide
MSWPVLKFDAYFQEDVPMSTEEQYRIRQVNIYYYLEDDSMSVIEPVVENSGILQGKLIKRQRLAKNDRGDHYHWKDLNRGINITIYGKTFRVVDCDQFTQVFLESQGIELNPPEKMALDPYTELRKQPLRKYVTPSDFDQLKQFLTFDKQVLRFYAIWDDTDSMYGECRTYIIHYYLMDDTVEIREVHERNDGRDPFPLLMNRQRVPKVLVENAKNFPQCVLEISDQEVLEWYTAKDFIVGKSLTILGRTFFIYDCDPFTRRYYKEKFGITDLPRIDVSKREPPPVKQELPPYNGFGLVEDSAQNCFALIPKAPKKDVIKMLVNDNKVLRYLAVLACLLIPEDPPVRTNIGIYLGPVKGRSSWETLCA

SEQ ID NO: 8547 - protein, 440 aa, Artificial Sequence
  Synthetic polypeptide
MLKTAFHRSQTLSYRNGYAIVRRPTVGIGGDRLQFNQLSQAELDELASKAPVLTYGQPKQAPPADFIPAHVAFDKKVLKFDAYFQEDVPMSTEEQYRIRQVNIYYYLEDDSMSVIEPVVENSGILQGKLIKRQRLAKNDRGDHYHWKDLNRGINITIYGKTFRVVDCDQFTQVFLESQGIELNPPEKMALDPYTELRKQPLRKYVTPSDFDQLKQFLTFDKQVLRFYAIWDDTDSMYGECRTYIIHYYLMDDTVEIREVHERNDGRDPFPLLMNRQRVPKVLVENAKNFPQCVLEISDQEVLEWYTAKDFIVGKSLTILGRTFFIYDCDPFTRRYYKEKFGITDLPRIDVSKREPPPVKQELPPYNGFGLVEDSAQNCFALIPKAPKKDVIKMLVNDNKVLRYLAVLACLLIPEDPPVRTNIGIYLGPVKGRSSWETLCA

SEQ ID NO: 8548 - protein, 166 aa, Artificial Sequence
  Synthetic polypeptide
MAFRRRTKSYPLFSQEFVIHNHADIGFCLVLCVLIGLMFEVTAKTAFLFILPQYNISVPTADSETVHYHYGPKDLVTILFYIFITIILHAVVQEYILDKISKRLHLSKVKHSKFNESGQLVVFHFTSVIWCFYVVVTSFHRQVLPALPPKHIETVCCFLPAPPTLV

SEQ ID NO: 8549 - protein, 412 aa, Artificial Sequence
  Synthetic polypeptide
MVGSALRRGAHAYVYLVSKASHISRGHQHQAWGSRPPAAECATQRAPGSVVELLGKSYPQDDHSNLTRKVLTRVGRNLHNQQHHPLWLIKERVKEHFYKQYVGRFGTPLFSVYDNLSPVVTTWQNFDSLLIPADHPSRKKGDNYYLNRTHMLRAHTSAHQWDLLHAGLDAFLVVGDVYRRDQIDSQHYPIFHQLEAVRLFSKHELFAGIKDGESLQLFEQSSRSAHKQETHTMEAVKLVEFDLKQTLTRLMAHLFGDELEIRWVDCYFPFTHPSFEMEINFHGEWLEVLGCGVMEQQLVNSAGAQDRIGWAFGLGLERLAMILYDIPDIRLFWCEDERFLKQFCVSNINQKVKFQPLSKYPAVINDISFWLPSENYAENDFYDLVRTIGGDLVEKVDLIDKFVHPKYKVIRD

SEQ ID NO: 8550 - protein, 110 aa, Artificial Sequence
  Synthetic polypeptide
MQKIVQTDEITNTQAFRKGKRKRTETMDSENANSDMDKGQRDPYSGNAFLPGESSSEDEEPLAELSKEELCAKIKSLKEKLTNTRKENSRLRQSLVMLQAGCALNHIVRN

SEQ ID NO: 8551 - protein, 51 aa, Artificial Sequence
  Synthetic polypeptide
MGDPGSEIIESVPPAGPEASESTTDENEDDIQFVSFTHEYEQIFKFKMKAY

SEQ ID NO: 8552 - protein, 96 aa, Artificial Sequence
  Synthetic polypeptide
MGDPGSEIIESVPPAGPEASESTTDENEDDIQFVSVLFGFQQDASNLTIAWLGPNPVPEIKKMALQDPQPWTMWLPQMTQADTGPRRNAEEDKSED

SEQ ID NO: 8553 - protein, 94 aa, Artificial Sequence
  Synthetic polypeptide
MGDPGSEIIESVPPAGPEASESTTDENEDDIQFVSEGPSRPVLEYIDLVCGDDENPSAYYSDARWLSLVIPALWEAEAVGSLEARSSRPAWPAR

SEQ ID NO: 8554 - protein, 78 aa, Artificial Sequence
  Synthetic polypeptide
MGDPGSEIIESVPPAGPEASESTTDENEDDIQFVSEGPSRPVLEYIDLVCGDDENPSAYYSDFTHEYEQIFKFKMKAY

SEQ ID NO: 8555 - protein, 52 aa, Artificial Sequence
  Synthetic polypeptide
MKGFTATLFLWTLIFPSCSGGGGGKAWPTHVVCSDSGLEVLYQSCGRRVKTM

SEQ ID NO: 8556 - protein, 159 aa, Artificial Sequence
  Synthetic polypeptide
MATSGAASAELVIGWCIFGLLLLAILAFCWIYVRKYQSRRESEVVSTITAIFSLAIALITSALLPVDIFLVSYMKNQNGTFKDWANANVSRQIEDTVLYGYYTLYSVILFCVFFWIPFVYFYYEEKDDDDTSKCTALWLTPVIPALWEAEAGGSPEVRS

SEQ ID NO: 8557 - protein, 86 aa, Artificial Sequence
  Synthetic polypeptide
MKNQNGTFKDWANANVSRQIEDTVLYGYYTLYSVILFCVFFWIPFVYFYYEEKDDDDTSKCTALWLTPVIPALWEAEAGGSPEVRS

SEQ ID NO: 8558 - protein, 38 aa, Artificial Sequence
  Synthetic polypeptide
MRLTGPWKLWLWMSIFLLPASTSVTVRDKTALFFYSSQ

SEQ ID NO: 8559 - protein, 44 aa, Artificial Sequence
  Synthetic polypeptide
MRLTGPWKLWLWMSIFLLPASTSVTVRDKTVNLAAAHSLGPHHL

SEQ ID NO: 8560 - protein, 412 aa, Artificial Sequence
  Synthetic polypeptide
MRLTGPWKLWLWMSIFLLPASTSVTVRDKTEESCPILRIEGHQLTYDNINKLEVSGFDLGDSFSLRRAFCESDKTCFKLGSALLIRDTIKIFPKGLPEEYSVAAMFRVRRNAKKERWFLWQVLNQQNIPQISIVVDGGKKVVEFMFQATEGDVLNYIFRNRELRPLFDRQWHKLGISIQSQVISLYMDCNLIARRQTDEKDTVDFHGRTVIATRASDGKPVDIELHQLKIYCSANLIAQETCCEISDTKCPEQDGFGNIASSWVTAHASKMSSYLPAKQELKDQCQCIPNKGEAGLPGAPGSPGQKGHKGEPGENGLHGAPGFPGQKGEQGFEGSKGETGEKGEQGEKGDPALAGLNGENGLKGDLGPHGPPGPKGEKGDTGPPGPPALPQGSPTPGKRTSTSSQPVRNRTT

SEQ ID NO: 8561 - protein, 411 aa, Artificial Sequence
  Synthetic polypeptide
MRLTGPWKLWLWMSIFLLPASTSVTVRDKTEESCPILRIEGHQLTYDNINKLEVSGFDLGDSFSLRRAFCESDKTCFKLGSALLIRDTIKIFPKGLPEEYSVAAMFRVRRNAKKERWFLWQVLNQQNIPQISIVVDGGKKVVEFMFQATEGDVLNYIFRNRELRPLFDRQWHKLGISIQSQVISLYMDCNLIARRQTDEKDTVDFHGRTVIATRASDGKPVDIELHQLKIYCSANLIAQETCCEISDTKCPEQDGFGNIASSWVTAHASKMSSYLPAKQELKDQCQCIPNKGEAGLPGAPGSPGQKGHKGEPGENGLHGAPGFPGQKGEQGFEGSKGETGEKGEQGEKGDPALAGLNGENGLKGDLGPHGPPGPKGEKGDTGPPGPPALPGSPTPGKRTSTSSQPVRNRTT

SEQ ID NO: 8562 - protein, 421 aa, Artificial Sequence
  Synthetic polypeptide
MRLTGPWKLWLWMSIFLLPASTSVTVRDKTEESCPILRIEGHQLTYDNINKLEVSGFDLGDSFSLRRAFCESDKTCFKLGSALLIRDTIKIFPKGLPEEYSVAAMFRVRRNAKKERWFLWQVLNQQNIPQISIVVDGGKKVVEFMFQATEGDVLNYIFRNRELRPLFDRQWHKLGISIQSQVISLYMDCNLIARRQTDEKDTVDFHGRTVIATRASDGKPVDIELHQLKIYCSANLIAQETCCEISDTKCPEQDGFGNIASSWVTAHASKMSSYLPAKQELKDQCQCIPNKGEAGLPGAPGSPGQKGHKGEPGENGLHGAPGFPGQKGEQGFEGSKGETGEKGEQGEKGDPALAGLNGENGLKGDLGPHGPPGPKGEKGDTGPPGPPALPKGPSSCRKTSSGLSLIPHYGECIIISLYITV

SEQ ID NO: 8563 - protein, 437 aa, Artificial Sequence
  Synthetic polypeptide
MRLTGPWKLWLWMSIFLLPASTSVTVRDKTEESCPILRIEGHQLTYDNINKLEVSGFDLGDSFSLRRAFCESDKTCFKLGSALLIRDTIKIFPKGLPEEYSVAAMFRVRRNAKKERWFLWQVLNQQNIPQISIVVDGGKKVVEFMFQATEGDVLNYIFRNRELRPLFDRQWHKLGISIQSQVISLYMDCNLIARRQTDEKDTVDFHGRTVIATRASDGKPVDIELHQLKIYCSANLIAQETCCEISDTKCPEQDGFGNIASSWVTAHASKMSSYLPAKQELKDQCQCIPNKGEAGLPGAPGSPGQKGHKGEPGENGLHGAPGFPGQKGEQGFEGSKGETGEKGEQGEKGDPALAGLNGENGLKGDLGPHGPPGPKGEKGDTGPPGPPALPACPTRAPEGSTKHGKEQLVTATAKTCQIVKTIKSRKKLHQLTSKITS

SEQ ID NO: 8564 - protein, 108 aa, Artificial Sequence
  Synthetic polypeptide
MTPSRLPWLLSWVSATAWRAARSPLLCHSLRKTSSSQGGKSELVKQSLKKPKLPEGRFDAPEDSHLEKEPLERHSKKRPSVSQEESPHENQPCYHPDFSLPASRAVRK

SEQ ID NO: 8565 - protein, 77 aa, Artificial Sequence
  Synthetic polypeptide
MTPSRLPWLLSWVSATAWRAARSPLLCHSLRKTSSSQGGKSELVKQSLKKPKLPEGRFDAPEDSHLEKEPLETQAKT

SEQ ID NO: 8566 - protein, 104 aa, Artificial Sequence
  Synthetic polypeptide
MATRSCREKAQKLNEQHQLILSKLLREEDNKYCADCEAKGPRWASWNIGVFICIRCAGIHRNLGVHISRVKSVNLDQWTAEQIQGAVAHTCNPSTLGGPGGQII

SEQ ID NO: 8567 - protein, 238 aa, Artificial Sequence
  Synthetic polypeptide
MGNLLGGVSFREPTTVEDCDSTWQTDSEPEPEEPGPGGGSEGPGQESEQPAQPPEQAGGRPGASPAPDEDAEAAGAEQGGDSTEATAKPKRSFYAARDLYKYRHQYPNFKDIRYQNDLSNLRFYKNKIPFKPDGVYIEEVLSKWKGDYEKLEHNHTYIQWLFPLREQGLNFYAKELTTYEIEEFKKTKEAIRRFLLAYKMMLEFFGIKLTDKTGNVARAVNWQERFQHLNEEASTQFE

SEQ ID NO: 8568 - protein, 794 aa, Artificial Sequence
  Synthetic polypeptide
MNKDYQKFWSSPSDPVHFEVDTSHEKVESMSESDTMNVSNLSQGVMLSHSPICMETTGTTCDLPQNEIKNFERENEYESTLCEDAYGTLDNLLNDNNIENYSTNALIQPVDTISISSLRQFETVCKFHWVEAFDDEMTEKPEFQSQVYNYAKDNNIKQDSFKEENPMETSVSANTDQLGNEYFRQPPPRSPPLIHCSGEMLKFTEKSLAKSIAKESALNPSQPPSFLCKTAVPSKEIQNYGEIPEMSVSYEKEVTAEGVERPEIVSTWSSAGISWRSEACRENCEMPDWEQSAESLQPVQEDMALNEVLQKLKHTNRKQEVRIQELQCSNLYLEKRVKELQMKITKQQVFIDVINKLKENVEELIEDKYKIILEKNDTKKTLQNLEEVLANTQKHLQESRNDKEMLQLQFKKIKANYVCLQERYMTEMQQKNKSVSQYLEMDKTLSKKEEEVERLQQLKKELEKATASALDLLKREKEAQEQEFLSLQEEFQKLEKENLEERQKLKSRLEKLLTQVRNLQFMSENERTKNIKLQQQINEVKNENAKLKQQVARSEEQNYVPKFETAQLKDQLEEVLKSDITKDTKTTHSNLLPDCSPCEERLNPADIKRASQLASKMHSLLALMVGLLTCQDIINSDAEHFKESEKLLKHKDRITTFRELIAKEKAFQDHAIKVIDCDSDEAKSIRDVPTLLGAKLDKYHSLNEELDFLITKLGHLLESKENHCNRLIEENDKYQRHLGNLIKKVTSYEEIIECADQRLAISHSQIAHLEERNKHLEDLIRKPREKARKPRSKI

SEQ ID NO: 8569 - protein, 816 aa, Artificial Sequence
  Synthetic polypeptide
MNKDYQKFWSSPSDPVHFEVDTSHEKVESMSESDTMNVSNLSQGVMLSHSPICMETTGTTCDLPQNEIKNFERENEYESTLCEDAYGTLDNLLNDNNIENYSTNALIQPVDTISISSLRQFETVCKFHWVEAFDDEMTEKPEFQSQVYNYAKDNNIKQDSFKEENPMETSVSANTDQLGNEYFRQPPPRSPPLIHCSGEMLKFTEKSLAKSIAKESALNPSQPPSFLCKTAVPSKEIQNYGEIPEMSVSYEKEVTAEGVERPEIVSTWSSAGISWRSEACRENCEMPDWEQSAESLQPVQEDMALNEVLQKLKHTNRKQEVRIQELQCSNLYLEKRVKELQMKITKQQVFIDVINKLKENVEELIEDKYKIILEKNDTKKTLQNLEEVLANTQKHLQESRNDKEMLQLQFKKIKANYVCLQERYMTEMQQKNKSVSQYLEMDKTLSKKEEEVERLQQLKKELEKATASALDLLKREKEAQEQEFLSLQEEFQKLEKENLEERQKLKSRLEKLLTQVRNLQFMSENERTKNIKLQQQINEVKNENAKLKQQVARSEEQNYVPKFETAQLKDQLEEVLKSDITKDTKTTHSNLLPDCSPCEERLNPADIKRASQLASKMHSLLALMVGLLTCQDIINSDAEHFKESEKVSDIMLQKLKSLHLKKKTLDKELLKHKDRITTFRELIAKEKAFQDHAIKVIDCDSDEAKSIRDVPTLLGAKLDKYHSLNEELDFLITKLGHLLESKENHCNRLIEENDKYQRHLGNLIKKVTSYEEIIECADQRLAISHSQIAHLEERNKHLEDLIRKPREKARKPRSKI

SEQ ID NO: 8570 - protein, 618 aa, Artificial Sequence
  Synthetic polypeptide
MTEKPEFQSQVYNYAKDNNIKQDSFKEENPMETSVSANTDQLGNEYFRQPPPRSPPLIHCSGEMLKFTEKSLAKSIAKESALNPSQPPSFLCKTAVPSKEIQNYGEIPEMSVSYEKEVTAEGVERPEIVSTWSSAGISWRSEACRENCEMPDWEQSAESLQPVQEDMALNEVLQKLKHTNRKQEVRIQELQCSNLYLEKRVKELQMKITKQQVFIDVINKLKENVEELIEDKYKIILEKNDTKKTLQNLEEVLANTQKHLQESRNDKEMLQLQFKKIKANYVCLQERYMTEMQQKNKSVSQYLEMDKTLSKKEEEVERLQQLKKELEKATASALDLLKREKEAQEQEFLSLQEEFQKLEKENLEERQKLKSRLEKLLTQVRNLQFMSENERTKNIKLQQQINEVKNENAKLKQQVARSEEQNYVPKFETAQLKDQLEEVLKSDITKDTKTTHSNLLPDCSPCEERLNPADIKRASQLASKMHSLLALMVGLLTCQDIINSDAEHFKESEKVSDIMLQKLKSLHLKKKTLDKEVIDCDSDEAKSIRDVPTLLGAKLDKYHSLNEELDFLVTSYEEIIECADQRLAISHSQIAHLEERNKHLEDLIRKPREKARKPRSKI

SEQ ID NO: 8571 - protein, 754 aa, Artificial Sequence
  Synthetic polypeptide
MNKDYQKFWSSPSDPVHFEVDTSHEKVESMSESDTMNVSNLSQGVMLSHSPICMETTGTTCDLPQNEIKNFERENEYESTLCEDAYGTLDNLLNDNNIENYSTNALIQPVDTISISSLRQFETVCKFHWVEAFDDEMTEKPEFQSQVYNYAKDNNIKQDSFKEENPMETSVSANTDQLGNEYFRQPPPRSPPLIHCSGEMLKFTEKSLAKSIAKESALNPSQPPSFLCKTAVPSKEIQNYGEIPEMSVSYEKEVTAEGVERPEIVSTWSSAGISWRSEACRENCEMPDWEQSAESLQPVQEDMALNEVLQKLKHTNRKQEVRIQELQCSNLYLEKRVKELQMKITKQQVFIDVINKLKENVEELIEDKYKIILEKNDTKKTLQNLEEVLANTQKHLQESRNDKEMLQLQFKKIKANYVCLQERYMTEMQQKNKSVSQYLEMDKTLSKKEEEVERLQQLKKELEKATASALDLLKREKEAQEQEFLSLQEEFQKLEKENLEERQKLKSRLEKLLTQVRNLQFMSENERTKNIKLQQQINEVKNENAKLKQQVARSEEQNYVPKFETAQLKDQLEEVLKSDITKDTKTTHSNLLPDCSPCEERLNPADIKRASQLASKMHSLLALMVGLLTCQDIINSDAEHFKESEKVSDIMLQKLKSLHLKKKTLDKEVIDCDSDEAKSIRDVPTLLGAKLDKYHSLNEELDFLVTSYEEIIECADQRLAISHSQIAHLEERNKHLEDLIRKPREKARKPRSKI

SEQ ID NO: 8572 - protein, 781 aa, Artificial Sequence
  Synthetic polypeptide
MNKDYQKFWSSPSDPVHFEVDTSHEKVESMSESDTMNVSNLSQGVMLSHSPICMETTGTTCDLPQNEIKNFERENEYESTLCEDAYGTLDNLLNDNNIENYSTNALIQPVDTISISSLRQFETVCKFHWVEAFDDEMTEKPEFQSQVYNYAKDNNIKQDSFKEENPMETSVSANTDQLGNEYFRQPPPRSPPLIHCSGEMLKFTEKSLAKSIAKESALNPSQPPSFLCKTAVPSKEIQNYGEIPEMSVSYEKEVTAEGVERPEIVSTWSSAGISWRSEACRENCEMPDWEQSAESLQPVQEDMALNEVLQKLKHTNRKQEVRIQELQCSNLYLEKRVKELQMKITKQQVFIDVINKLKENVEELIEDKYKIILEKNDTKKTLQNLEEVLANTQKHLQESRNDKEMLQLQFKKIKANYVCLQERYMTEMQQKNKSVSQYLEMDKTLSKKEEEVERLQQLKKELEKATASALDLLKREKEAQEQEFLSLQEEFQKLEKENLEERQKLKSRLEKLLTQVRNLQFMSENERTKNIKLQQQINEVKNENAKLKQQVARSEEQNYVPKFETAQLKDQLEEVLKSDITKDTKTTHSNLLPDCSPCEERLNPADIKRASQLASKMHSLLALMVGLLTCQDIINSDAEHFKESEKVSDIMLQKLKSLHLKKKTLDKELLKHKDRITTFRELIAKEKAFQDHAIKVIDCDSDEAKSIRDVPTLLGAKLDKYHSLNEELDFLVTSYEEIIECADQRLAISHSQIAHLEERNKHLEDLIRKPREKARKPRSKI

SEQ ID NO: 8573 - protein, 359 aa, Artificial Sequence
  Synthetic polypeptide
MPRHHAGGEEGGAAGLWVKSGAAAAAAGGGRLGSGMKDVESGRGRVLLNSAAARGDGLLLLGTRAATLGGGGGGLRESRRGKQGARMSLLGKPLSYTSSQSCRRNVKYRRVQNYLYNVLERPRGWAFIYHAFVFLLVFGCLILSVFSTIPEHTKLASSCLLILEFVMIVVFGLEFIIRIWSAGCCCRYRGWQGRLRFARKPFCVIDTIVLIASIAVVSAKTQGNIFATSALRSLRFLQILRMVRMDRRGGTWKLLGSVVYAHSKELITAWYIGFLVLIFSSFLVYLVEKDANKEFSTYADALWWGTITLTTIGYGDKTPLTWLGRLLSAGFALLGISFFALPANGGRIIEPREILCGPM

SEQ ID NO: 8574 - protein, 359 aa, Artificial Sequence
  Synthetic polypeptide
MPRHHAGGEEGGAAGLWVKSGAAAAAAGGGRLGSGMKDVESGRGRVLLNSAAARGDGLLLLGTRAATLGGGGGGLRESRRGKQGARMSLLGKPLSYTSSQSCRRNVKYRRVQNYLYNVLERPRGWAFIYHAFVFLPVFGCLILSVFSTIPEHTKLASSCLLILEFVMIVVFGLEFIIRIWSAGCCCRYRGWQGRLRFARKPFCVIDTIVLIASIAVVSAKTQGNIFATSALRSLRFLQILRMVRMDRRGGTWKLLGSVVYAHSKELITAWYIGFLVLIFSSFLVYLVEKDANKEFSTYADALWWGTITLTTIGYGDKTPLTWLGRLLSAGFALLGISFFALPANGGRIIEPREILCGPM

SEQ ID NO: 8575 - protein, 550 aa, Artificial Sequence
  Synthetic polypeptide
MPRHHAGGEEGGAAGLWVKSGAAAAAAGGGRLGSGMKDVESGRGRVLLNSAAARGDGLLLLGTRAATLGGGGGGLRESRRGKQGARMSLLGKPLSYTSSQSCRRNVKYRRVQNYLYNVLERPRGWAFIYHAFVFLLVFGCLILSVFSTIPEHTKLASSCLLILEFVMIVVFGLEFIIRIWSAGCCCRYRGWQGRLRFARKPFCVIDTIVLIASIAVVSAKTQGNIFATSALRSLRFLQILRMVRMDRRGGTWKLLGSVVYAHSKELITAWYIGFLVLIFSSFLVYLVEKDANKEFSTYADALWWGTITLTTIGYGDKTPLTWLGRLLSAGFALLGISFFALPAGILGSGFALKVQEQHRQKHFEKRRNPAANLIQCVWRSYAADEKSVSIATWKPHLKALHTCSPTKKEQGEASSSKFCSNKQKLFRMYTSRKQSQKLSFKERVRMASPRGQSIKSRQASVGDRRSPSTDITAEGSPTKVQKSWSFNDRTRFRPSLRLKSSQPKPVIDADTALGTDDVYDEKGCQCDVSVEDLTPPLKTVIRAISSARMD

SEQ ID NO: 8576 - protein, 531 aa, Artificial Sequence
  Synthetic polypeptide
MPRHHAGGEEGGAAGLWVKSGAAAAAAGGGRLGSGMKDVESGRGRVLLNSAAARGDGLLLLGTRAATLGGGGGGLRESRRGKQGARMSLLGKPLSYTSSQSCRRNVKYRRVQNYLYNVLERPRGWAFIYHAFVFLPVFGCLILSVFSTIPEHTKLASSCLLILEFVMIVVFGLEFIIRIWSAGCCCRYRGWQGRLRFARKPFCVIDTIVLIASIAVVSAKTQGNIFATSALRSLRFLQILRMVRMDRRGGTWKLLGSVVYAHSKELITAWYIGFLVLIFSSFLVYLVEKDANKEFSTYADALWWGTITLTTIGYGDKTPLTWLGRLLSAGFALLGISFFALPAGILGSGFALKVQEQHRQKHFEKRRNPAANLIQCVWRSYAADEKSVSIATWKPHLKALHTCSPTKKEQGEASSSQKLSFKERVRMASPRGQSIKSRQASVGDRRSPSTDITAEGSPTKVQKSWSFNDRTRFRPSLRLKSSQPKPVIDADTALGTDDVYDEKGCQCDVSVEDLTPPLKTVIRAISSARMD

SEQ ID NO: 8577 - protein, 531 aa, Artificial Sequence
  Synthetic polypeptide
MPRHHAGGEEGGAAGLWVKSGAAAAAAGGGRLGSGMKDVESGRGRVLLNSAAARGDGLLLLGTRAATLGGGGGGLRESRRGKQGARMSLLGKPLSYTSSQSCRRNVKYRRVQNYLYNVLERPRGWAFIYHAFVFLLVFGCLILSVFSTIPEHTKLASSCLLILEFVMIVVFGLEFIIRIWSAGCCCRYRGWQGRLRFARKPFCVIDTIVLIASIAVVSAKTQGNIFATSALRSLRFLQILRMVRMDRRGGTWKLLGSVVYAHSKELITAWYIGFLVLIFSSFLVYLVEKDANKEFSTYADALWWGTITLTTIGYGDKTPLTWLGRLLSAGFALLGISFFALPAGILGSGFALKVQEQHRQKHFEKRRNPAANLIQCVWRSYAADEKSVSIATWKPHLKALHTCSPTKKEQGEASSSQKLSFKERVRMASPRGQSIKSRQASVGDRRSPSTDITAEGSPTKVQKSWSFNDRTRFRPSLRLKSSQPKPVIDADTALGTDDVYDEKGCQCDVSVEDLTPPLKTVIRAISSARMD

SEQ ID NO: 8578 - protein, 532 aa, Artificial Sequence
  Synthetic polypeptide
MPRHHAGGEEGGAAGLWVKSGAAAAAAGGGRLGSGMKDVESGRGRVLLNSAAARGDGLLLLGTRAATLGGGGGGLRESRRGKQGARMSLLGKPLSYTSSQSCRRNVKYRRVQNYLYNVLERPRGWAFIYHAFVFLLVFGCLILSVFSTIPEHTKLASSCLLILEFVMIVVFGLEFIIRIWSAGCCCRYRGWQGRLRFARKPFCVIDTIVLIASIAVVSAKTQGNIFATSALRSLRFLQILRMVRMDRRGGTWKLLGSVVYAHSKELITAWYIGFLVLIFSSFLVYLVEKDANKEFSTYADALWWGTITLTTIGYGDKTPLTWLGRLLSAGFALLGISFFALPAGILGSGFALKVQEQHRQKHFEKRRNPAANLIQCVWRSYAADEKSVSIATWKPHLKALHTCSPTKQNQQGESQSCQKLSFKERVRMASPRGQSIKSRQASVGDRRSPSTDITAEGSPTKVQKSWSFNDRTRFRPSLRLKSSQPKPVIDADTALGTDDVYDEKGCQCDVSVEDLTPPLKTVIRAISSARMD

SEQ ID NO: 8579 - protein, 541 aa, Artificial Sequence
  Synthetic polypeptide
MPRHHAGGEEGGAAGLWVKSGAAAAAAGGGRLGSGMKDVESGRGRVLLNSAAARGDGLLLLGTRAATLGGGGGGLRESRRGKQGARMSLLGKPLSYTSSQSCRRNVKYRRVQNYLYNVLERPRGWAFIYHAFVFLLVFGCLILSVFSTIPEHTKLASSCLLILEFVMIVVFGLEFIIRIWSAGCCCRYRGWQGRLRFARKPFCVIDTIVLIASIAVVSAKTQGNIFATSALRSLRFLQILRMVRMDRRGGTWKLLGSVVYAHSKELITAWYIGFLVLIFSSFLVYLVEKDANKEFSTYADALWWGTITLTTIGYGDKTPLTWLGRLLSAGFALLGISFFALPAGILGSGFALKVQEQHRQKHFEKRRNPAANLIQCVWRSYAADEKSVSIATWKPHLKALHTCSPTNKFCSNKQKLFRMYTSRKQSQKLSFKERVRMASPRGQSIKSRQASVGDRRSPSTDITAEGSPTKVQKSWSFNDRTRFRPSLRLKSSQPKPVIDADTALGTDDVYDEKGCQCDVSVEDLTPPLKTVIRAISSARMD

SEQ ID NO: 8580 - protein, 522 aa, Artificial Sequence
  Synthetic polypeptide
MPRHHAGGEEGGAAGLWVKSGAAAAAAGGGRLGSGMKDVESGRGRVLLNSAAARGDGLLLLGTRAATLGGGGGGLRESRRGKQGARMSLLGKPLSYTSSQSCRRNVKYRRVQNYLYNVLERPRGWAFIYHAFVFLLVFGCLILSVFSTIPEHTKLASSCLLILEFVMIVVFGLEFIIRIWSAGCCCRYRGWQGRLRFARKPFCVIDTIVLIASIAVVSAKTQGNIFATSALRSLRFLQILRMVRMDRRGGTWKLLGSVVYAHSKELITAWYIGFLVLIFSSFLVYLVEKDANKEFSTYADALWWGTITLTTIGYGDKTPLTWLGRLLSAGFALLGISFFALPAGILGSGFALKVQEQHRQKHFEKRRNPAANLIQCVWRSYAADEKSVSIATWKPHLKALHTCSPTNQKLSFKERVRMASPRGQSIKSRQASVGDRRSPSTDITAEGSPTKVQKSWSFNDRTRFRPSLRLKSSQPKPVIDADTALGTDDVYDEKGCQCDVSVEDLTPPLKTVIRAISSARMD

SEQ ID NO: 8581 - protein, 549 aa, Artificial Sequence
  Synthetic polypeptide
MPRHHAGGEEGGAAGLWVKSGAAAAAAGGGRLGSGMKDVESGRGRVLLNSAAARGDGLLLLGTRAATLGGGGGGLRESRRGKQGARMSLLGKPLSYTSSQSCRRNVKYRRVQNYLYNVLERPRGWAFIYHAFVFLLVFGCLILSVFSTIPEHTKLASSCLLILEFVMIVVFGLEFIIRIWSAGCCCRYRGWQGRLRFARKPFCVIDTIVLIASIAVVSAKTQGNIFATSALRSLRFLQILRMVRMDRRGGTWKLLGSVVYAHSKELITAWYIGFLVLIFSSFLVYLVEKDANKEFSTYADALWWGTITLTTIGYGDKTPLTWLGRLLSAGFALLGISFFALPAGILGSGFALKVQEQHRQKHFEKRRNPAANLIQCVWRSYAADEKSVSIATWKPHLKALHTCSPTKKEQGEASSSKFCSNKQKLFRMYTSRKQSQKLSFKERVRMASPRGQSIKSRQASVGDRRSPSTDITAEGSPTKVQKSWSFNDRTRFRPSLRLKSSQPKPVIDADTALGTDDVYDEKGCQCDVSVEDLTPPLKTVIRAISARMD

SEQ ID NO: 8582 - protein, 530 aa, Artificial Sequence
  Synthetic polypeptide
MPRHHAGGEEGGAAGLWVKSGAAAAAAGGGRLGSGMKDVESGRGRVLLNSAAARGDGLLLLGTRAATLGGGGGGLRESRRGKQGARMSLLGKPLSYTSSQSCRRNVKYRRVQNYLYNVLERPRGWAFIYHAFVFLPVFGCLILSVFSTIPEHTKLASSCLLILEFVMIVVFGLEFIIRIWSAGCCCRYRGWQGRLRFARKPFCVIDTIVLIASIAVVSAKTQGNIFATSALRSLRFLQILRMVRMDRRGGTWKLLGSVVYAHSKELITAWYIGFLVLIFSSFLVYLVEKDANKEFSTYADALWWGTITLTTIGYGDKTPLTWLGRLLSAGFALLGISFFALPAGILGSGFALKVQEQHRQKHFEKRRNPAANLIQCVWRSYAADEKSVSIATWKPHLKALHTCSPTKKEQGEASSSQKLSFKERVRMASPRGQSIKSRQASVGDRRSPSTDITAEGSPTKVQKSWSFNDRTRFRPSLRLKSSQPKPVIDADTALGTDDVYDEKGCQCDVSVEDLTPPLKTVIRAISARMD

SEQ ID NO: 8583 - protein, 530 aa, Artificial Sequence
  Synthetic polypeptide
MPRHHAGGEEGGAAGLWVKSGAAAAAAGGGRLGSGMKDVESGRGRVLLNSAAARGDGLLLLGTRAATLGGGGGGLRESRRGKQGARMSLLGKPLSYTSSQSCRRNVKYRRVQNYLYNVLERPRGWAFIYHAFVFLLVFGCLILSVFSTIPEHTKLASSCLLILEFVMIVVFGLEFIIRIWSAGCCCRYRGWQGRLRFARKPFCVIDTIVLIASIAVVSAKTQGNIFATSALRSLRFLQILRMVRMDRRGGTWKLLGSVVYAHSKELITAWYIGFLVLIFSSFLVYLVEKDANKEFSTYADALWWGTITLTTIGYGDKTPLTWLGRLLSAGFALLGISFFALPAGILGSGFALKVQEQHRQKHFEKRRNPAANLIQCVWRSYAADEKSVSIATWKPHLKALHTCSPTKKEQGEASSSQKLSFKERVRMASPRGQSIKSRQASVGDRRSPSTDITAEGSPTKVQKSWSFNDRTRFRPSLRLKSSQPKPVIDADTALGTDDVYDEKGCQCDVSVEDLTPPLKTVIRAISARMD

SEQ ID NO: 8584 - protein, 531 aa, Artificial Sequence
  Synthetic polypeptide
MPRHHAGGEEGGAAGLWVKSGAAAAAAGGGRLGSGMKDVESGRGRVLLNSAAARGDGLLLLGTRAATLGGGGGGLRESRRGKQGARMSLLGKPLSYTSSQSCRRNVKYRRVQNYLYNVLERPRGWAFIYHAFVFLLVFGCLILSVFSTIPEHTKLASSCLLILEFVMIVVFGLEFIIRIWSAGCCCRYRGWQGRLRFARKPFCVIDTIVLIASIAVVSAKTQGNIFATSALRSLRFLQILRMVRMDRRGGTWKLLGSVVYAHSKELITAWYIGFLVLIFSSFLVYLVEKDANKEFSTYADALWWGTITLTTIGYGDKTPLTWLGRLLSAGFALLGISFFALPAGILGSGFALKVQEQHRQKHFEKRRNPAANLIQCVWRSYAADEKSVSIATWKPHLKALHTCSPTKQNQQGESQSCQKLSFKERVRMASPRGQSIKSRQASVGDRRSPSTDITAEGSPTKVQKSWSFNDRTRFRPSLRLKSSQPKPVIDADTALGTDDVYDEKGCQCDVSVEDLTPPLKTVIRAISARMD

SEQ ID NO: 8585 - protein, 540 aa, Artificial Sequence
  Synthetic polypeptide
MPRHHAGGEEGGAAGLWVKSGAAAAAAGGGRLGSGMKDVESGRGRVLLNSAAARGDGLLLLGTRAATLGGGGGGLRESRRGKQGARMSLLGKPLSYTSSQSCRRNVKYRRVQNYLYNVLERPRGWAFIYHAFVFLLVFGCLILSVFSTIPEHTKLASSCLLILEFVMIVVFGLEFIIRIWSAGCCCRYRGWQGRLRFARKPFCVIDTIVLIASIAVVSAKTQGNIFATSALRSLRFLQILRMVRMDRRGGTWKLLGSVVYAHSKELITAWYIGFLVLIFSSFLVYLVEKDANKEFSTYADALWWGTITLTTIGYGDKTPLTWLGRLLSAGFALLGISFFALPAGILGSGFALKVQEQHRQKHFEKRRNPAANLIQCVWRSYAADEKSVSIATWKPHLKALHTCSPTNKFCSNKQKLFRMYTSRKQSQKLSFKERVRMASPRGQSIKSRQASVGDRRSPSTDITAEGSPTKVQKSWSFNDRTRFRPSLRLKSSQPKPVIDADTALGTDDVYDEKGCQCDVSVEDLTPPLKTVIRAISARMD

SEQ ID NO: 8586 - protein, 521 aa, Artificial Sequence
  Synthetic polypeptide
MPRHHAGGEEGGAAGLWVKSGAAAAAAGGGRLGSGMKDVESGRGRVLLNSAAARGDGLLLLGTRAATLGGGGGGLRESRRGKQGARMSLLGKPLSYTSSQSCRRNVKYRRVQNYLYNVLERPRGWAFIYHAFVFLLVFGCLILSVFSTIPEHTKLASSCLLILEFVMIVVFGLEFIIRIWSAGCCCRYRGWQGRLRFARKPFCVIDTIVLIASIAVVSAKTQGNIFATSALRSLRFLQILRMVRMDRRGGTWKLLGSVVYAHSKELITAWYIGFLVLIFSSFLVYLVEKDANKEFSTYADALWWGTITLTTIGYGDKTPLTWLGRLLSAGFALLGISFFALPAGILGSGFALKVQEQHRQKHFEKRRNPAANLIQCVWRSYAADEKSVSIATWKPHLKALHTCSPTNQKLSFKERVRMASPRGQSIKSRQASVGDRRSPSTDITAEGSPTKVQKSWSFNDRTRFRPSLRLKSSQPKPVIDADTALGTDDVYDEKGCQCDVSVEDLTPPLKTVIRAISARMD

SEQ ID NO: 8587 - protein, 382 aa, Artificial Sequence
  Synthetic polypeptide
MQPWHGKAMQRASEAGATAPKASARNARGAPMDPTESPAAPEAALPKAGKFGPARKSGSRQKKSAPDTQERPPVRATGARAKKAPQRAQDTQPSDATSAPGAEGLEPPAAREPALSRAGSCRQRGARCSTKPRPPPGPWDVPSPGLPVSAPILVRRDAAPGASKLRAVLEKLKLSRDDISTAAGMVKGVVDHLLLRLKCDSAFRGVGLLNTGSYYEHVKISAPNEFDVMFKLEVPRIQLEEYSNTRAYYFVKFKRNPKENPLSQFLEGEILSASKMLSKFRKIIKEEINDIKDTDVIMKRKRGGSPAVTLLISEKISVDITLALESKSSWPASTQEGLRIQNWLSAKVRKQLRLKPFYLVPKHAKEGNGFQALQKAEEGELL

SEQ ID NO: 8588 - protein, 112 aa, Artificial Sequence
  Synthetic polypeptide
MGKEKTHINIVVIGHVDSGKSTTTGHLIYKCGGIDKRTIEKFEKEAAEMGKGSFKYAWVLDKLKAERERGITIDISLWKFETSKYYVTIIDAPGHRDFIKNMITGTSQADCA

SEQ ID NO: 8589 - protein, 921 aa, Artificial Sequence
  Synthetic polypeptide
MQGPPLLTAAHLLCVCTAALAVAPGPRFLVTAPGIIRPGGNVTIGVELLEHCPSQVTVKAELLKTASNLTVSVLEAEGVFEKGSFKTLTLPSDPKSNLIQQWLSQQSDLGVISKTFQLSSHPILGDWSIQVQVNDQTYYQSFQVSEYVLPKFEVTLQTPLYCSMNSKHLNGTITAKYTYGKPVKGDVTLTFLPLSFWGKKKNITKTFKINGSANFSFNDEEMKNVMDSSNGLSEYLDLSSPGPVEILTTVTESVTGISRNVSTNVFFKQHDYIIEFFDYTTVLKPSLNFTATVKVTRADGNQLTLEERRNNVVITVTQRNYTEYWSGSNSGNQKMEAVQKINYTVPQSGTFKIEFPILEDSSELQLKAYFLGSKSSMAVHSLFKSPSKTYIQLKTRDENIKVGSPFELVVSGNKRLKELSYMVVSRGQLVAVGKQNSTMFSLTPENSWTPKACVIVYYIEDDGEIISDVLKIPVQLVFKNKIKLYWSKVKAEPSEKVSLRISVTQPDSIVGIVAVDKSVNLMNASNDITMENVVHELELYNTGYYLGMFMNSFAVFQECGLWVLTDANLTKDYIDGVYDNAEYAERFMEENEGHIVDIHDFSLGSSPHVRKHFPETWIWLDTNMGYRIYQEFEVTVPDSITSWVATGFVISEDLGLGLTTTPVELQAFQPFFIFLNLPYSVIRGEEFALEITIFNYLKDATEVKVIIEKSDKFDILMTSNEINATGHQQTLLVPSEDGATVLFPIRPTHLGEIPITVTALSPTASDAVTQMILVKAEGIEKSYSQSILLDLTDNRLQSTLKTLSFSFPPNTVTGSERVQITAIGDVLGPSINGLASLIRMPYGCGEQNMINFAPNIYILDYLTKKKQLTDNLKEKALSFMRQGYQRELLYQREDGSFSAFGNYDPSGSTCHPITGYIPKGL

SEQ ID NO: 8590 - protein, 998 aa, Artificial Sequence
  Synthetic polypeptide
MQGPPLLTAAHLLCVCTAALAVAPGPRFLVTAPGIIRPGGNVTIGVELLEHCPSQVTVKAELLKTASNLTVSVLEAEGVFEKGSFKTLTLPSLPLNSADEIYELRVTGRTQDEILFSNSTRLSFETKRISVFIQTDKALYKPKQEVKFRIVTLFSDFKPYKTSLNILIKDPKSNLIQQWLSQQSDLGVISKTFQLSSHPILGDWSIQVQVNDQTYYQSFQVSEYVLPKFEVTLQTPLYCSMNSKHLNGTITAKYTYGKPVKGDVTLTFLPLSFWGKKKNITKTFKINGSANFSFNDEEMKNVMDSSNGLSEYLDLSSPGPVEILTTVTESVTGISRNVSTNVFFKQHDYIIEFFDYTTVLKPSLNFTATVKVTRADGNQLTLEERRNNVVITVTQRNYTEYWSGSNSGNQKMEAVQKINYTVPQSGTFKIEFPILEDSSELQLKAYFLGSKSSMAVHSLFKSPSKTYIQLKTRDENIKVGSPFELVVSGNKRLKELSYMVVSRGQLVAVGKQNSTMFSLTPENSWTPKACVIVYYIEDDGEIISDVLKIPVQLVFKNKIKLYWSKVKAEPSEKVSLRISVTQPDSIVGIVAVDKSVNLMNASNDITMENVVHELELYNTGYYLGMFMNSFAVFQECGLWVLTDANLTKDYIDGVYDNAEYAERFMEENEGHIVDIHDFSLGSSPHVRKHFPETWIWLDTNMGYRIYQEFEVTVPDSITSWVATGFVISEDLGLGLTTTPVELQAFQPFFIFLNLPYSVIRGEEFALEITIFNYLKDATEVKVIIEKSDKFDILMTSNEINATGHQQTLLVPSEDGATVLFPIRPTHLGEIPITVTALSPTASDAVTQMILVKAEGIEKSYSQSILLDLTDNRLQSTLKTLSFSFPPNTVTGSERVQITAIGDVLGPSINGLASLIRMPYGCGEQNMINFAPNIYILDYLTKKKQLTDNLKEKALSFMRQGYQRELLYQREDGSFSAFGNYDPSGSTCHPITGYIPKGL

SEQ ID NO: 8591 - protein, 1341 aa, Artificial Sequence
  Synthetic polypeptide
MQGPPLLTAAHLLCVCTAALAVAPGPRFLVTAPGIIRPGGNVTIGVELLEHCPSQVTVKAELLKTASNLTVSVLEAEGVFEKGSFKTLTLPSDPKSNLIQQWLSQQSDLGVISKTFQLSSHPILGDWSIQVQVNDQTYYQSFQVSEYVLPKFEVTLQTPLYCSMNSKHLNGTITAKYTYGKPVKGDVTLTFLPLSFWGKKKNITKTFKINGSANFSFNDEEMKNVMDSSNGLSEYLDLSSPGPVEILTTVTESVTGISRNVSTNVFFKQHDYIIEFFDYTTVLKPSLNFTATVKVTRADGNQLTLEERRNNVVITVTQRNYTEYWSGSNSGNQKMEAVQKINYTVPQSGTFKIEFPILEDSSELQLKAYFLGSKSSMAVHSLFKSPSKTYIQLKTRDENIKVGSPFELVVSGNKRLKELSYMVVSRGQLVAVGKQNSTMFSLTPENSWTPKACVIVYYIEDDGEIISDVLKIPVQLVFKNKIKLYWSKVKAEPSEKVSLRISVTQPDSIVGIVAVDKSVNLMNASNDITMENVVHELELYNTGYYLGMFMNSFAVFQECGLWVLTDANLTKDYIDGVYDNAEYAERFMEENEGHIVDIHDFSLGSSPHVRKHFPETWIWLDTNMGYRIYQEFEVTVPDSITSWVATGFVISEDLGLGLTTTPVELQAFQPFFIFLNLPYSVIRGEEFALEITIFNYLKDATEVKVIIEKSDKFDILMTSNEINATGHQQTLLVPSEDGATVLFPIRPTHLGEIPITVTALSPTASDAVTQMILVKAEGIEKSYSQSILLDLTDNRLQSTLKTLSFSFPPNTVTGSERVQITAIGDVLGPSINGLASLIRMPYGCGEQNMINFAPNIYILDYLTKKKQLTDNLKEKALSFMRQGYQRELLYQREDGSFSAFGNYDPSGSTWLSAFVLRCFLEADPYIDIDQNVLHRTYTWLKGHQKSNGEFWDPGRVIHSELQGGNKSPVTLTAYIVTSLLGYRKYQPNIDVQESIHFLESEFSRGISDNYTLALITYALSSVGSPKAKEALNMLTWRAEQEGGMQFWVSSESKLSDSWQPRSLDIEVAAYALLSHFLQFQTSEGIPIMRWLSRQRNSLGGFASTQDTTVALKALSEFAALMNTERTNIQVTVTGPSSPSPVKFLIDTHNRLLLQTAELAVVQPTAVNISANGFGFAICQLNVVYNVKASGSSRRRRSIQNQEAFDLDVAVKENKDDLNHVDLNVCTSFSGPGRSGMALMEVNLLSGFMVPSEAISLSETVKKVEYDHGKLNLYLDSVNETQFCVNIPAVRNFKVSNTQDASVSIVDYYEPTTWMQLKVIILSELMKKQKTKYHMFSLISGS

SEQ ID NO: 8592 - protein, 1401 aa, Artificial Sequence
  Synthetic polypeptide
MQGPPLLTAAHLLCVCTAALAVAPGPRFLVTAPGIIRPGGNVTIGVELLEHCPSQVTVKAELLKTASNLTVSVLEAEGVFEKGSFKTLTLPSLPLNSADEIYELRVTGRTQDEILFSNSTRLSFETKRISVFIQTDKALYKPKQEVKFRIVTLFSDFKPYKTSLNILIKDPKSNLIQQWLSQQSDLGVISKTFQLSSHPILGDWSIQVQVNDQTYYQSFQVSEYVLPKFEVTLQTPLYCSMNSKHLNGTITAKYTYGKPVKGDVTLTFLPLSFWGKKKNITKTFKINGSANFSFNDEEMKNVMDSSNGLSEYLDLSSPGPVEILTTVTESVTGISRNVSTNVFFKQHDYIIEFFDYTTVLKPSLNFTATVKVTRADGNQLTLEERRNNVVITVTQRNYTEYWSGSNSGNQKMEAVQKINYTVPQSGTFKIEFPILEDSSELQLKAYFLGSKSSMAVHSLFKSPSKTYIQLKTRDENIKVGSPFELVVSGNKRLKELSYMVVSRGQLVAVGKQNSTMFSLTPENSWTPKACVIVYYIEDDGEIISDVLKIPVQLVFKNKIKLYWSKVKAEPSEKVSLRISVTQPDSIVGIVAVDKSVNLMNASNDITMENVVHELELYNTGYYLGMFMNSFAVFQECGLWVLTDANLTKDYIDGVYDNAEYAERFMEENEGHIVDIHDFSLGSSPHVRKHFPETWIWLDTNMGYRIYQEFEVTVPDSITSWVATGFVISEDLGLGLTTTPVELQAFQPFFIFLNLPYSVIRGEEFALEITIFNYLKDATEVKVIIEKSDKFDILMTSNEINATGHQQTLLVPSEDGATVLFPIRPTHLGEIPITVTALSPTASDAVTQMILVKAEGIEKSYSQSILLDLTDNRLQSTLKTLSFSFPPNTVTGSERVQITAIGDVLGPSINGLASLIRMPYGCGEQNMINFAPNIYILDYLTKKKQLTDNLKEKALSFMRQGYQRELLYQREDGSFSAFGNYDPSGSTWLSAFVLRCFLEADPYIDIDQNVLHRTYTWLKGHQKSNGEFWDPGRVIHSELQGGNKSPVTLTAYIVTSLLGYRKYQPNIDVQESIHFLESEFSRGISDNYTLALITYALSSVGSPKAKEALNMLTWRAEQEGGMQFWVSSESKLSDSWQPRSLDIEVAAYALLSHFLQFQTSEGIPIMRWLSRQRNSLGGFASTQDTTVALKALSEFAALMNTERTNIQVTVTGPSSPSPLAVVQPTAVNISANGFGFAICQLNVVYNVKASGSSRRRRSIQNQEAFDLDVAVKENKDDLNHVDLNVCTSFSGPGRSGMALMEVNLLSGFMVPSEAISLSETVKKVEYDHGKLNLYLDSVNETQFCVNIPAVRNFKVSNTQDASVSIVDYYEPTTWMQLKVIILSELMKKQKTKYHMFSLISGS

SEQ ID NO: 8593 - protein, 1418 aa, Artificial Sequence
  Synthetic polypeptide
MQGPPLLTAAHLLCVCTAALAVAPGPRFLVTAPGIIRPGGNVTIGVELLEHCPSQVTVKAELLKTASNLTVSVLEAEGVFEKGSFKTLTLPSLPLNSADEIYELRVTGRTQDEILFSNSTRLSFETKRISVFIQTDKALYKPKQEVKFRIVTLFSDFKPYKTSLNILIKDPKSNLIQQWLSQQSDLGVISKTFQLSSHPILGDWSIQVQVNDQTYYQSFQVSEYVLPKFEVTLQTPLYCSMNSKHLNGTITAKYTYGKPVKGDVTLTFLPLSFWGKKKNITKTFKINGSANFSFNDEEMKNVMDSSNGLSEYLDLSSPGPVEILTTVTESVTGISRNVSTNVFFKQHDYIIEFFDYTTVLKPSLNFTATVKVTRADGNQLTLEERRNNVVITVTQRNYTEYWSGSNSGNQKMEAVQKINYTVPQSGTFKIEFPILEDSSELQLKAYFLGSKSSMAVHSLFKSPSKTYIQLKTRDENIKVGSPFELVVSGNKRLKELSYMVVSRGQLVAVGKQNSTMFSLTPENSWTPKACVIVYYIEDDGEIISDVLKIPVQLVFKNKIKLYWSKVKAEPSEKVSLRISVTQPDSIVGIVAVDKSVNLMNASNDITMENVVHELELYNTGYYLGMFMNSFAVFQECGLWVLTDANLTKDYIDGVYDNAEYAERFMEENEGHIVDIHDFSLGSSPHVRKHFPETWIWLDTNMGYRIYQEFEVTVPDSITSWVATGFVISEDLGLGLTTTPVELQAFQPFFIFLNLPYSVIRGEEFALEITIFNYLKDATEVKVIIEKSDKFDILMTSNEINATGHQQTLLVPSEDGATVLFPIRPTHLGEIPITVTALSPTASDAVTQMILVKAEGIEKSYSQSILLDLTDNRLQSTLKTLSFSFPPNTVTGSERVQITAIGDVLGPSINGLASLIRMPYGCGEQNMINFAPNIYILDYLTKKKQLTDNLKEKALSFMRQGYQRELLYQREDGSFSAFGNYDPSGSTWLSAFVLRCFLEADPYIDIDQNVLHRTYTWLKGHQKSNGEFWDPGRVIHSELQGGNKSPVTLTAYIVTSLLGYRKYQPNIDVQESIHFLESEFSRGISDNYTLALITYALSSVGSPKAKEALNMLTWRAEQEGGMQFWVSSESKLSDSWQPRSLDIEVAAYALLSHFLQFQTSEGIPIMRWLSRQRNSLGGFASTQDTTVALKALSEFAALMNTERTNIQVTVTGPSSPSPVKFLIDTHNRLLLQTAELAVVQPTAVNISANGFGFAICQLNVVYNVKASGSSRRRRSIQNQEAFDLDVAVKENKDDLNHVDLNVCTSFSGPGRSGMALMEVNLLSGFMVPSEAISLSETVKKVEYDHGKLNLYLDSVNETQFCVNIPAVRNFKVSNTQDASVSIVDYYEPTTWMQLKVIILSELMKKQKTKYHMFSLISGS

SEQ ID NO: 8594 - protein, 352 aa, Artificial Sequence
  Synthetic polypeptide
MEGEPPPVEERRRLQEELNEFVESGCRTLEEVTASLGWDLDSLDPGEEEAAEDEVVICPYDSNHHMPKSSLAKHMASCRLRKMGYTKEEEDEMYNPEFFYENVKIPSITLNKDSQFQIIKQARTAVGKDSDCYNQRIYSSLPVEVPLNHKRFVCDLTQADRLALYDFVVEETKKKRSDSQIIENDSDLFVDLAAKINQDNSRKSPKSYLEILAEVRDYKRRRQSYRAKNVHITKKSYTEVIRDVINVHMEELSNHWQEEQEKAEDDAEKNEERRSASVDSRQSGGSYLDAECSRHRRDRSRSPHKRKRNKDKDKNCESRRRKESQVWWFAPEIQLLGRLRQESLESGRRRLQ

SEQ ID NO: 8595 - protein, 720 aa, Artificial Sequence
  Synthetic polypeptide
MAAGKSGGSAGEITFLEALARSESKRDGGFKNNWSFDHEEESEGDTDKDGTNLLSVDEDEDSETSKGKKLNRRSEIVANSSGEFILKTYVRRNKSESFKTLKGNPIGLNMLSNNKKLSENTQNTSLCSGTVVHGRRFHHAHAQIPVVKTAAQRKEYPPHVQKVEINPVRLSRLQGVERIMKKTEESESQVEPEIKRKVQQKRHCSTYQPTPPLSPASKKCLTHLEDLQRNCRQAITLNESTGPLLRTSIHQNSGGQKSQNTGLTTKKFYGNNVEKVPIDIIVNCDDSKHTYLQTNGKVILPGAKIPKITNLKERKTSLSDLNDPIILSSDDDDDNDRTNRRESISPQPADSACSSPAPSTGKVEAALNENTCRAERELRSIPEDSELNTVTLPRKARMKDQFGNSIINTPLKRRKVFSQEPPDALALSCQSSFDSVILNCRSIRVGTLFRLLIEPVIFCLDFIKIQLDEPDHDPVEIILNTSDLTKCEWCNVRKLPVVFLQAIPAVYQKLSIQLQMNKEDKVWNDCKGVNKLTNLEEQYIILIFQNGLDPPANMVFESIINEIGIKNNISNFFAKIPFEEANGRLVACTRTYEESIKGSCGQKENKIKTVSFESKIQLRSKQEFQFFDEEEETGENHTIFIGPVEKLIVYPPPPAKGGISVTNEDLHCLNEGEFLNDVIIDFYLNTWDAKASRPPEPRSSRSAWTTWRNPMFTPTKKKQS

SEQ ID NO: 8596 - protein, 727 aa, Artificial Sequence
  Synthetic polypeptide
MAAGKSGGSAGEITFLEALARSESKRDGGFKNNWSFDHEEESEGDTDKDGTNLLSVDEDEDSETSKGKKLNRRSEIVANSSGEFILKTYVRRNKSESFKTLKGNPIGLNMLSNNKKLSENTQNTSLCSGTVVHGRRFHHAHAQIPVVKTAAQRLLSNQILKEYPPHVQKVEINPVRLSRLQGVERIMKKTEESESQVEPEIKRKVQQKRHCSTYQPTPPLSPASKKCLTHLEDLQRNCRQAITLNESTGPLLRTSIHQNSGGQKSQNTGLTTKKFYGNNVEKVPIDIIVNCDDSKHTYLQTNGKVILPGAKIPKITNLKERKTSLSDLNDPIILSSDDDDDNDRTNRRESISPQPADSACSSPAPSTGKVEAALNENTCRAERELRSIPEDSELNTVTLPRKARMKDQFGNSIINTPLKRRKVFSQEPPDALALSCQSSFDSVILNCRSIRVGTLFRLLIEPVIFCLDFIKIQLDEPDHDPVEIILNTSDLTKCEWCNVRKLPVVFLQAIPAVYQKLSIQLQMNKEDKVWNDCKGVNKLTNLEEQYIILIFQNGLDPPANMVFESIINEIGIKNNISNFFAKIPFEEANGRLVACTRTYEESIKGSCGQKENKIKTVSFESKIQLRSKQEFQFFDEEEETGENHTIFIGPVEKLIVYPPPPAKGGISVTNEDLHCLNEGEFLNDVIIDFYLNTWDAKASRPPEPRSSRSAWTTWRNPMFTPTKKKQS

SEQ ID NO: 8597 - protein, 727 aa, Artificial Sequence
  Synthetic polypeptide
MAAGKSGGSAGEITFLEALARSESKRDGGFKNNWSFDHEEESEGDTDKDGTNLLSVDEDEDSETSKGKKLNRRSEIVANSSGEFILKTYVRRNKSESFKTLKGNPIGLNMLSNNKKLSENTQNTSLCSGTVVHGRRFHHAHAQIPVVKTAAQSSLDRKERKEYPPHVQKVEINPVRLSRLQGVERIMKKTEESESQVEPEIKRKVQQKRHCSTYQPTPPLSPASKKCLTHLEDLQRNCRQAITLNESTGPLLRTSIHQNSGGQKSQNTGLTTKKFYGNNVEKVPIDIIVNCDDSKHTYLQTNGKVILPGAKIPKITNLKERKTSLSDLNDPIILSSDDDDDNDRTNRRESISPQPADSACSSPAPSTGKVEAALNENTCRAERELRSIPEDSELNTVTLPRKARMKDQFGNSIINTPLKRRKVFSQEPPDALALSCQSSFDSVILNCRSIRVGTLFRLLIEPVIFCLDFIKIQLDEPDHDPVEIILNTSDLTKCEWCNVRKLPVVFLQAIPAVYQKLSIQLQMNKEDKVWNDCKGVNKLTNLEEQYIILIFQNGLDPPANMVFESIINEIGIKNNISNFFAKIPFEEANGRLVACTRTYEESIKGSCGQKENKIKTVSFESKIQLRSKQEFQFFDEEEETGENHTIFIGPVEKLIVYPPPPAKGGISVTNEDLHCLNEGEFLNDVIIDFYLNTWDAKASRPPEPRSSRSAWTTWRNPMFTPTKKKQS

SEQ ID NO: 8598 - protein, 617 aa, Artificial Sequence
  Synthetic polypeptide
MSNNKKLSENTQNTSLCSGTVVHGRRFHHAHAQIPVVKTAAQSSLDRKERKEYPPHVQKVEINPVRLSRLQGVERIMKKTEESESQVEPEIKRKVQQKRHCSTYQPTPPLSPASKKCLTHLEDLQRNCRQAITLNESTGPLLRTSIHQNSGGQKSQNTGLTTKKFYGNNVEKVPIDIIVNCDDSKHTYLQTNGKVILPGAKIPKITNLKERKTSLSDLNDPIILSSDDDDDNDRTNRRESISPQPADSACSSPAPSTGKVEAALNENTCRAERELRSIPEDSELNTVTLPRKARMKDQFGNSIINTPLKRRKVFSQEPPDALALSCQSSFDSVILNCRSIRVGTLFRLLIEPVIFCLDFIKIQLDEPDHDPVEIILNTSDLTKCEWCNVRKLPVVFLQAIPAVYQKLSIQLQMNKEDKVWNDCKGVNKLTNLEEQYIILIFQNGLDPPANMVFESIINEIGIKNNISNFFAKIPFEEANGRLVACTRTYEESIKGSCGQKENKIKTVSFESKIQLRSKQEFQFFDEEEETGENHTIFIGPVEKLIVYPPPPAKGGISVTNEDLHCLNEGEFLNDVIIDFYLNTWDAKASRPPEPRSSRSAWTTWRNPMFTPTKKKQS

SEQ ID NO: 8599 - protein, 9 aa, Artificial Sequence
  Synthetic polypeptide
YEAFQKTQS

SEQ ID NO: 8600 - protein, 323 aa, Artificial Sequence
  Synthetic polypeptide
MKDQFGNSIINTPLKRRKVFSQEPPDALALSCQSSFDSVILNCRSIRVGTLFRLLIEPVIFCLDFIKIQLDEPDHDPVEIILNTSDLTKCEWCNVRKLPVVFLQAIPAVYQKLSIQLQMNKEDKVWNDCKGVNKLTNLEEQYIILIFQNGLDPPANMVFESIINEIGIKNNISNFFAKIPFEEANGRLVACTRTYEESIKGSCGQKENKIKTVSFESKIQLRSKQEFQFFDEEEETGENHTIFIGPVEKLIVYPPPPAKGGISVTNEDLHCLNEGEFLNDVIIDFYLNTWDAKASRPPEPRSSRSAWTTWRNPMFTPTKKKQS

SEQ ID NO: 8601 - protein, 969 aa, Artificial Sequence
  Synthetic polypeptide
MAAGKSGGSAGEITFLEALARSESKRDGGFKNNWSFDHEEESEGDTDKDGTNLLSVDEDEDSETSKGKKLNRRSEIVANSSGEFILKTYVRRNKSESFKTLKGNPIGLNMLSNNKKLSENTQNTSLCSGTVVHGRRFHHAHAQIPVVKTAAQRKEYPPHVQKVEINPVRLSRLQGVERIMKKTEESESQVEPEIKRKVQQKRHCSTYQPTPPLSPASKKCLTHLEDLQRNCRQAITLNESTGPLLRTSIHQNSGGQKSQNTGLTTKKFYGNNVEKVPIDIIVNCDDSKHTYLQTNGKVILPGAKIPKITNLKERKTSLSDLNDPIILSSDDDDDNDRTNRRESISPQPADSACSSPAPSTGKVEAALNENTCRAERELRSIPEDSELNTVTLPRKARMKDQFGNSIINTPLKRRKVFSQEPPDALALSCQSSFDSVILNCRSIRVGTLFRLLIEPVIFCLDFIKIQLDEPDHDPVEIILNTSDLTKCEWCNVRKLPVVFLQAIPAVYQKLSIQLQMNKEDKVWNDCKGVNKLTNLEEQYIILIFQNGLDPPANMVFESIINEIGIKNNISNFFAKIPFEEANGRLVACTRTYEESIKGSCGQKENKIKTVSFESKIQLRSKQEFQFFDEEEETGENHTIFIGPVEKLIVYPPPPAKGGISVTNEDLHCLNEGEFLNDVIIDFYLKYLVLEKLKKEDADRIHIFSSFFYKRLNQRERRNHETTNLSIQQKRHGRVKTWTRHVDIFEKDFIFVPLNEAAHWFLAVVCFPGLEKPKYEPNPHYHENAVIQKCSTVEDSCISSSASEMESCSQNSSAKPVIKKMLNKKHCIAVIDSNPGQEESDPRYKRNICSVKYSVKKINHTASENEEFNKGESTSQKVADRTKSENGLQNESLSSTHHTDGLSKIRLNYSDESPEAGKMLEDELVDFSEDQDNQDDSSDDGFLADDNCSSEIGQWHLKPTICKHYSSSGG

SEQ ID NO: 8602 - protein, 976 aa, Artificial Sequence
  Synthetic polypeptide
MAAGKSGGSAGEITFLEALARSESKRDGGFKNNWSFDHEEESEGDTDKDGTNLLSVDEDEDSETSKGKKLNRRSEIVANSSGEFILKTYVRRNKSESFKTLKGNPIGLNMLSNNKKLSENTQNTSLCSGTVVHGRRFHHAHAQIPVVKTAAQRLLSNQILKEYPPHVQKVEINPVRLSRLQGVERIMKKTEESESQVEPEIKRKVQQKRHCSTYQPTPPLSPASKKCLTHLEDLQRNCRQAITLNESTGPLLRTSIHQNSGGQKSQNTGLTTKKFYGNNVEKVPIDIIVNCDDSKHTYLQTNGKVILPGAKIPKITNLKERKTSLSDLNDPIILSSDDDDDNDRTNRRESISPQPADSACSSPAPSTGKVEAALNENTCRAERELRSIPEDSELNTVTLPRKARMKDQFGNSIINTPLKRRKVFSQEPPDALALSCQSSFDSVILNCRSIRVGTLFRLLIEPVIFCLDFIKIQLDEPDHDPVEIILNTSDLTKCEWCNVRKLPVVFLQAIPAVYQKLSIQLQMNKEDKVWNDCKGVNKLTNLEEQYIILIFQNGLDPPANMVFESIINEIGIKNNISNFFAKIPFEEANGRLVACTRTYEESIKGSCGQKENKIKTVSFESKIQLRSKQEFQFFDEEEETGENHTIFIGPVEKLIVYPPPPAKGGISVTNEDLHCLNEGEFLNDVIIDFYLKYLVLEKLKKEDADRIHIFSSFFYKRLNQRERRNHETTNLSIQQKRHGRVKTWTRHVDIFEKDFIFVPLNEAAHWFLAVVCFPGLEKPKYEPNPHYHENAVIQKCSTVEDSCISSSASEMESCSQNSSAKPVIKKMLNKKHCIAVIDSNPGQEESDPRYKRNICSVKYSVKKINHTASENEEFNKGESTSQKVADRTKSENGLQNESLSSTHHTDGLSKIRLNYSDESPEAGKMLEDELVDFSEDQDNQDDSSDDGFLADDNCSSEIGQWHLKPTICKHYSSSGG

SEQ ID NO: 8603 - protein, 976 aa, Artificial Sequence
  Synthetic polypeptide
MAAGKSGGSAGEITFLEALARSESKRDGGFKNNWSFDHEEESEGDTDKDGTNLLSVDEDEDSETSKGKKLNRRSEIVANSSGEFILKTYVRRNKSESFKTLKGNPIGLNMLSNNKKLSENTQNTSLCSGTVVHGRRFHHAHAQIPVVKTAAQSSLDRKERKEYPPHVQKVEINPVRLSRLQGVERIMKKTEESESQVEPEIKRKVQQKRHCSTYQPTPPLSPASKKCLTHLEDLQRNCRQAITLNESTGPLLRTSIHQNSGGQKSQNTGLTTKKFYGNNVEKVPIDIIVNCDDSKHTYLQTNGKVILPGAKIPKITNLKERKTSLSDLNDPIILSSDDDDDNDRTNRRESISPQPADSACSSPAPSTGKVEAALNENTCRAERELRSIPEDSELNTVTLPRKARMKDQFGNSIINTPLKRRKVFSQEPPDALALSCQSSFDSVILNCRSIRVGTLFRLLIEPVIFCLDFIKIQLDEPDHDPVEIILNTSDLTKCEWCNVRKLPVVFLQAIPAVYQKLSIQLQMNKEDKVWNDCKGVNKLTNLEEQYIILIFQNGLDPPANMVFESIINEIGIKNNISNFFAKIPFEEANGRLVACTRTYEESIKGSCGQKENKIKTVSFESKIQLRSKQEFQFFDEEEETGENHTIFIGPVEKLIVYPPPPAKGGISVTNEDLHCLNEGEFLNDVIIDFYLKYLVLEKLKKEDADRIHIFSSFFYKRLNQRERRNHETTNLSIQQKRHGRVKTWTRHVDIFEKDFIFVPLNEAAHWFLAVVCFPGLEKPKYEPNPHYHENAVIQKCSTVEDSCISSSASEMESCSQNSSAKPVIKKMLNKKHCIAVIDSNPGQEESDPRYKRNICSVKYSVKKINHTASENEEFNKGESTSQKVADRTKSENGLQNESLSSTHHTDGLSKIRLNYSDESPEAGKMLEDELVDFSEDQDNQDDSSDDGFLADDNCSSEIGQWHLKPTICKHYSSSGG

SEQ ID NO: 8604 - protein, 47 aa, Artificial Sequence
  Synthetic polypeptide
MEDGKPVWAPHPTDGFQMGNIVDIGPDSLTIEPLNQKGKASCSGSCL

SEQ ID NO: 8605 - protein, 151 aa, Artificial Sequence
  Synthetic polypeptide
MSLQKTPPTRVFVELVPWADRSRENNLASGRETLPGLRHPLSSTQAQTATREVQVSGTSEVSAGPDRAQVVVRVSSTKEAAAEAKKSVCRRLDYITQSLQQQGVQAENITVTKDFRRVENAYHMEAEAWWHVPVVPATRGAEAGGSSEPRG

SEQ ID NO: 8606 - protein, 141 aa, Artificial Sequence
  Synthetic polypeptide
VFVELVPWADRSRENNLASGRETLPGLRHPLSSTQAQTATREVQVSGTSEVSAGPDRAQVVVRVSSTKEAAAEAKKSVCRRLDYITQSLQQQGVQAENITVTKDFRRVENAYHMEAEAWWHVPVVPATRGAEAGGSSEPRG

SEQ ID NO: 8607 - protein, 64 aa, Artificial Sequence
  Synthetic polypeptide
MNGKRPQHLHPLGSDNSEAENITVTKDFRRVENAYHMEAEAWWHVPVVPATRGAEAGGSSEPRG

SEQ ID NO: 8608 - protein, 135 aa, Artificial Sequence
  Synthetic polypeptide
MSLQKTPPTRVFVELVPWADRSRENNLASGRETLPGLRHPLSSTQAQTATREVQVSGTSEVSAGPDRAQVVVRVSSTKEAAAEAKKSVCRRLDYITQSLQQQGVQAENITVTKDFRRVENAYHMEAEKLLRRGGV

SEQ ID NO: 8609 - protein, 125 aa, Artificial Sequence
  Synthetic polypeptide
VFVELVPWADRSRENNLASGRETLPGLRHPLSSTQAQTATREVQVSGTSEVSAGPDRAQVVVRVSSTKEAAAEAKKSVCRRLDYITQSLQQQGVQAENITVTKDFRRVENAYHMEAEKLLRRGGV

SEQ ID NO: 8610 - protein, 48 aa, Artificial Sequence
  Synthetic polypeptide
MNGKRPQHLHPLGSDNSEAENITVTKDFRRVENAYHMEAEKLLRRGGV

SEQ ID NO: 8611 - protein, 188 aa, Artificial Sequence
  Synthetic polypeptide
MSLQKTPPTRVFVELVPWADRSRENNLASGRETLPGLRHPLSSTQAQTATREVQVSGTSEVSAGPDRAQVVVRVSSTKEAAAEAKKSVCRRLDYITQSLQQQGVQAENITVTKDFRRVENAYHMEAEVCITFTEFGKMQNICNFLVEKLDSSVVISPPQFYHTPGSVENLRSYSGVVACDCNLSYRGG

SEQ ID NO: 8612 - protein, 178 aa, Artificial Sequence
  Synthetic polypeptide
VFVELVPWADRSRENNLASGRETLPGLRHPLSSTQAQTATREVQVSGTSEVSAGPDRAQVVVRVSSTKEAAAEAKKSVCRRLDYITQSLQQQGVQAENITVTKDFRRVENAYHMEAEVCITFTEFGKMQNICNFLVEKLDSSVVISPPQFYHTPGSVENLRSYSGVVACDCNLSYRGG

SEQ ID NO: 8613 - protein, 101 aa, Artificial Sequence
  Synthetic polypeptide
MNGKRPQHLHPLGSDNSEAENITVTKDFRRVENAYHMEAEVCITFTEFGKMQNICNFLVEKLDSSVVISPPQFYHTPGSVENLRSYSGVVACDCNLSYRGG

SEQ ID NO: 8614 - protein, 217 aa, Artificial Sequence
  Synthetic polypeptide
MSCERKGLSELRSELYFLIARFLEDGPCQQAAQVLIREVAEKELLPRRTDWTGKEHPRTYQNLVKYYRHLAPDHLLQICHRLGPLLEQEIPQSVPGVQTLLGAGRQSLLRTNKSCKHVVWKGSALAALHCGRPPESPVNYGSPPSIADTLFSRKLNGKYRLERLVPTAVYQHMKMHKRILGHLSSVYCVTFDRTGRRIFTMPLRTFVILGRRSECQH

SEQ ID NO: 8615 - protein, 175 aa, Artificial Sequence
  Synthetic polypeptide
MSCERKGLSELRSELYFLIARFLEDGPCQQAAQVLIREVAEKELLPRRTDWTGKEHPRTYQNLVKYYRHLAPDHLLQICHRLGPLLEQEIPQSVPGVQTLLGAGRQSLLRTNKSCKHVVWKGSALAALHCGRPPESPVNYGSPPSIDCNLHEGKYHVFSFSLLFSSPYLAHIGAL

SEQ ID NO: 8616 - protein, 81 aa, Artificial Sequence
  Synthetic polypeptide
MVIRVFIASSSGFVAIKKKQQDVVRFLEANKIEFEEVDITMSEEQRQWMYKNVPPEKKPTQGNPLPPQIFNGDRYCGKMKQ

SEQ ID NO: 8617 - protein, 397 aa, Artificial Sequence
  Synthetic polypeptide
MAVVAAAAGWLLRLRAAGAEGHWRRLPGAGLARGFLHPAATVEDAAQRRQVAHFTFQPDPEPREYGQTQKMNLFQSVTSALDNSLAKDPTAVIFGEDVAFGGVFRCTVGLRDKYGKDRVFNTPLCEQGIVGFGIGIAVTGATAIAEIQFADYIFPAFDQIVNEAAKYRYRSGDLFNCGSLTIRSPWGCVGHGALYHSQSPEAFFAHCPGIKVVIPRSPFQAKGLLLSCIEDKNPCIFFEPKILYRAAAEEVPIEPYNIPLSQAEVIQEGSDVTLVAWGTQVHVIREVASMAKEKLGVSCEVIDLRTIIPWDVDTICKSVIKTGRLLISHEAPLTGGFASEISSTVQEVRDPEWRDRLELRQRNINCEDFMDIYRFSNNTFIISYAYLYFNLLILLSS

SEQ ID NO: 8618 - protein, 1853 aa, Artificial Sequence
  Synthetic polypeptide
MNTEELELLSDSKYRNYVAAIDKALKNFEYSSEWADLISALGKLNKVLQNNAKYQVVPKKLTIGKRLAQCLHPALPGGVHRKALETYEIIFKIIGPKRLAKDLFLYSSGLFPLLANAAMSVKPTLLSLYEIYYLPLGKTLKPGLQGLLTGILPGLEEGSEYYERTNMLLEKVAAAVDQSAFYSALWGSLLTSPAVRLPGITYVLAHLNRKLSMEDQLYIIGSDIELMVEAVSTSVQDSSVLVQRSTLDLILFCFPFHMSQATRPDMIRILSAALHVVLRRDMSLNRRLYAWLLGPRSTRHSNPEEHATYYFTTFSKELLVQAMVGILQVNGFGEENTLMQDLKPFRILISLLDKPELGPVILEDVLIEVFRTLYSQCKAELDLQTEPPFSKDHAQLSSKLRENKKTAELIKTANLLFNSFEPYYMWDYVARWFEECCRRTLHVRLQIGPGDSNDSSELQLTNFCLLVDFLLDIVSLETYIEIQTEHLPQLLLRMISALTSHLQTLHLSELTDSLRLCSKILSKVQPPLLSASTGGVLQFPSGQNNSVKEWEDKKVSSVSHENPTEVFEDGENPPSSRSSESGFTEFIQYQADRTDDIDRELSEGQGAAAIPIGSTSSETETASTVGSEETIIQTPSVVTQGTATRSRKTAQKTAMQCCLEYVQQFLTRLINLYIIQNNSFSQSLATEHQGDLGREQGETSKWDRNSQGDVKEKNISKQKTSKEYLSAFLAACQLFLECSSFPVYIAEGNHTSELRSEKLETDCEHVQPPQWLQTLMNACSQASDFSVQSVAISLVMDLVGLTQSVAMVTGENINSVEPAQPLSPNQGRVAVVIRPPLTQGNLRYIAEKTEFFKHVALTLWDQLGDGTPQHHQKSVELFYQLHNLVPSSSICEDVISQQLTHKDKKIRMEAHAKFAVLWHLTRDLHINKSSSFVRSFDRSLFIMLDSLNSLDGSTSSVGQAWLNQVLQRHDIARVLEPLLLLLLHPKTQRVSVQRVQAERYWNKSPCYPGEESDKHFMQNFACSNVSQVQLITSKGNGEKPLTMDEIENFSLTVNPLSDRLSLLSTSSETIPMVVSDFDLPDQQIEILQSSDSGCSQSSAGDNLSYEVDPETVNAQEDSQMPKESSPDDDVQQVVFDLICKVVSGLEVESASVTSQLEIEAMPPKCSDIDPDEETIKIEDDSIQQSQNALLSNESSQFLSVSAEGGHECVANGISRNSSSPCISGTTHTLHDSSVASIETKSRQRSHSSIQFSFKEKLSEKVSEKETIVKESGKQPGAKPKVKLARKKDDDKKKSSNEKLKQTSVFFSDGLDLENWYSCGEGDISEIESDMGSPGSRKSPNFNIHPLYQHVLLYLQLYDSSRTLYAFSAIKAILKTNPIAFVNAISTTSVNNAYTPQLSLLQNLLARHRISVMGKDFYSHIPVDSNHNFRSSMYIEILISLCLYYMRSHYPTHVKVTAQDLIGNRNMQMMSIEILTLLFTELAKVIESSAKGFPSFISDMLSKCKVQKVILHCLLSSIFSAQKWHSEKMAGKNLVAVEEGFSEDSLINFSEDEFDNGSTLQSQLLKVLQRLIVLEHRVMTIPEENETGFDFVVSDLEHISPHQPMTSLQYLHAQPITCQGMFLCAVIRALHQHCACKMHPQWIGLITSTLPYMGKVLQRVVVSVTLQLCRNLDNLIQQYKYETGLSDSRPLWMASIIPPDMILTLLEGITAIIHYCLLDPTTQYHQLLVSVDQKHLFEARSGILSILHMIMSSVTLLWSILHQADSSEKMTIAASASLTTINLGATKNLRQQILELLGPISMNHGVHFMAAIAFVWNERRQNKTTTRTKLCNVSTTTTTRKIAMSSLFLGYWKM

SEQ ID NO: 8619 - protein, 1872 aa, Artificial Sequence
  Synthetic polypeptide
MNTEELELLSDSKYRNYVAAIDKALKNFEYSSEWADLISALGKLNKVLQNNAKYQVVPKKLTIGKRLAQCLHPALPGGVHRKALETYEIIFKIIGPKRLAKDLFLYSSGLFPLLANAAMSVKPTLLSLYEIYYLPLGKTLKPGLQGLLTGILPGLEEGSEYYERTNMLLEKVAAAVDQSAFYSALWGSLLTSPAVRLPGITYVLAHLNRKLSMEDQLYIIGSDIELMVEAVSTSVQDSSVLVQRSTLDLILFCFPFHMSQATRPDMIRILSAALHVVLRRDMSLNRRLYAWLLGFDNNGAIIGPRSTRHSNPEEHATYYFTTFSKELLVQAMVGILQVNGFGEENTLMQDLKPFRILISLLDKPELGPVILEDVLIEVFRTLYSQCKAELDLQTEPPFSKDHAQLSSKLRENKKTAELIKTANLLFNSFEPYYMWDYVARWFEECCRRTLHVRLQIGPGDSNDSSELQLTNFCLLVDFLLDIVSLPTRSMRVLCQETYIEIQTEHLPQLLLRMISALTSHLQTLHLSELTDSLRLCSKILSKVQPPLLSASTGGVLQFPSGQNNSVKEWEDKKVSSVSHENPTEVFEDGENPPSSRSSESGFTEFIQYQADRTDDIDRELSEGQGAAAIPIGSTSSETETASTVGSEETIIQTPSVVTQGTATRSRKTAQKTAMQCCLEYVQQFLTRLINLYIIQNNSFSQSLATEHQGDLGREQGETSKWDRNSQGDVKEKNISKQKTSKEYLSAFLAACQLFLECSSFPVYIAEGNHTSELRSEKLETDCEHVQPPQWLQTLMNACSQASDFSVQSVAISLVMDLVGLTQSVAMVTGENINSVEPAQPLSPNQGRVAVVIRPPLTQGNLRYIAEKTEFFKHVALTLWDQLGDGTPQHHQKSVELFYQLHNLVPSSSICEDVISQQLTHKDKKIRMEAHAKFAVLWHLTRDLHINKSSSFVRSFDRSLFIMLDSLNSLDGSTSSVGQAWLNQVLQRHDIARVLEPLLLLLLHPKTQRVSVQRVQAERYWNKSPCYPGEESDKHFMQNFACSNVSQVQLITSKGNGEKPLTMDEIENFSLTVNPLSDRLSLLSTSSETIPMVVSDFDLPDQQIEILQSSDSGCSQSSAGDNLSYEVDPETVNAQEDSQMPKESSPDDDVQQVVFDLICKVVSGLEVESASVTSQLEIEAMPPKCSDIDPDEETIKIEDDSIQQSQNALLSNESSQFLSVSAEGGHECVANGISRNSSSPCISGTTHTLHDSSVASIETKSRQRSHSSIQFSFKEKLSEKVSEKETIVKESGKQPGAKPKVKLARKKDDDKKKSSNEKLKQTSVFFSDGLDLENWYSCGEGDISEIESDMGSPGSRKSPNFNIHPLYQHVLLYLQLYDSSRTLYAFSAIKAILKTNPIAFVNAISTTSVNNAYTPQLSLLQNLLARHRISVMGKDFYSHIPVDSNHNFRSSMYIEILISLCLYYMRSHYPTHVKVTAQDLIGNRNMQMMSIEILTLLFTELAKVIESSAKGFPSFISDMLSKCKVQKVILHCLLSSIFSAQKWHSEKMAGKNLVAVEEGFSEDSLINFSEDEFDNGSTLQSQLLKVLQRLIVLEHRVMTIPEENETGFDFVVSDLEHISPHQPMTSLQYLHAQPITCQGMFLCAVIRALHQHCACKMHPQWIGLITSTLPYMGKVLQRVVVSVTLQLCRNLDNLIQQYKYETGLSDSRPLWMASIIPPDMILTLLEGITAIIHYCLLDPTTQYHQLLVSVDQKHLFEARSGILSILHMIMSSVTLLWSILHQADSSEKMTIAASASLTTINLGATKNLRQQILELLGPISMNHGVHFMAAIAFVWNERRQNKTTTRTKLCNVSTTTTTRKIAMSSLFLGYWKM

SEQ ID NO: 8620 - protein, 1863 aa, Artificial Sequence
  Synthetic polypeptide
MNTEELELLSDSKYRNYVAAIDKALKNFEYSSEWADLISALGKLNKVLQNNAKYQVVPKKLTIGKRLAQCLHPALPGGVHRKALETYEIIFKIIGPKRLAKDLFLYSSGLFPLLANAAMSVKPTLLSLYEIYYLPLGKTLKPGLQGLLTGILPGLEEGSEYYERTNMLLEKVAAAVDQSAFYSALWGSLLTSPAVRLPGITYVLAHLNRKLSMEDQLYIIGSDIELMVEAVSTSVQDSSVLVQRSTLDLILFCFPFHMSQATRPDMIRILSAALHVVLRRDMSLNRRLYAWLLGPRSTRHSNPEEHATYYFTTFSKELLVQAMVGILQVNGFGEENTLMQDLKPFRILISLLDKPELGPVILEDVLIEVFRTLYSQCKAELDLQTEPPFSKDHAQLSSKLRENKKTAELIKTANLLFNSFEPYYMWDYVARWFEECCRRTLHVRLQIGPGDSNDSSELQLTNFCLLVDFLLDIVSLPTRSMRVLCQETYIEIQTEHLPQLLLRMISALTSHLQTLHLSELTDSLRLCSKILSKVQPPLLSASTGGVLQFPSGQNNSVKEWEDKKVSSVSHENPTEVFEDGENPPSSRSSESGFTEFIQYQADRTDDIDRELSEGQGAAAIPIGSTSSETETASTVGSEETIIQTPSVVTQGTATRSRKTAQKTAMQCCLEYVQQFLTRLINLYIIQNNSFSQSLATEHQGDLGREQGETSKWDRNSQGDVKEKNISKQKTSKEYLSAFLAACQLFLECSSFPVYIAEGNHTSELRSEKLETDCEHVQPPQWLQTLMNACSQASDFSVQSVAISLVMDLVGLTQSVAMVTGENINSVEPAQPLSPNQGRVAVVIRPPLTQGNLRYIAEKTEFFKHVALTLWDQLGDGTPQHHQKSVELFYQLHNLVPSSSICEDVISQQLTHKDKKIRMEAHAKFAVLWHLTRDLHINKSSSFVRSFDRSLFIMLDSLNSLDGSTSSVGQAWLNQVLQRHDIARVLEPLLLLLLHPKTQRVSVQRVQAERYWNKSPCYPGEESDKHFMQNFACSNVSQVQLITSKGNGEKPLTMDEIENFSLTVNPLSDRLSLLSTSSETIPMVVSDFDLPDQQIEILQSSDSGCSQSSAGDNLSYEVDPETVNAQEDSQMPKESSPDDDVQQVVFDLICKVVSGLEVESASVTSQLEIEAMPPKCSDIDPDEETIKIEDDSIQQSQNALLSNESSQFLSVSAEGGHECVANGISRNSSSPCISGTTHTLHDSSVASIETKSRQRSHSSIQFSFKEKLSEKVSEKETIVKESGKQPGAKPKVKLARKKDDDKKKSSNEKLKQTSVFFSDGLDLENWYSCGEGDISEIESDMGSPGSRKSPNFNIHPLYQHVLLYLQLYDSSRTLYAFSAIKAILKTNPIAFVNAISTTSVNNAYTPQLSLLQNLLARHRISVMGKDFYSHIPVDSNHNFRSSMYIEILISLCLYYMRSHYPTHVKVTAQDLIGNRNMQMMSIEILTLLFTELAKVIESSAKGFPSFISDMLSKCKVQKVILHCLLSSIFSAQKWHSEKMAGKNLVAVEEGFSEDSLINFSEDEFDNGSTLQSQLLKVLQRLIVLEHRVMTIPEENETGFDFVVSDLEHISPHQPMTSLQYLHAQPITCQGMFLCAVIRALHQHCACKMHPQWIGLITSTLPYMGKVLQRVVVSVTLQLCRNLDNLIQQYKYETGLSDSRPLWMASIIPPDMILTLLEGITAIIHYCLLDPTTQYHQLLVSVDQKHLFEARSGILSILHMIMSSVTLLWSILHQADSSEKMTIAASASLTTINLGATKNLRQQILELLGPISMNHGVHFMAAIAFVWNERRQNKTTTRTKLCNVSTTTTTRKIAMSSLFLGYWKM

SEQ ID NO: 8621 - protein, 2 aa, Artificial Sequence
  Synthetic polypeptide
WL

SEQ ID NO: 8622 - protein, 555 aa, Artificial Sequence
  Synthetic polypeptide
MDLGAITKYSALHAKPNGLILQYGTAGFRTKAEHLDHVMFRMGLLAVLRSKQTKSTIGVMVTASHNPEEDNGVKLVDPLGEMLAPSWEEHATCLANAEEQDMQRVLIDISEKEAVNLQQDAFVVIGRDTRPSSEKLSQSVIDGVTVLGGQFHDYGLLTTPQLHYMVYCRNTGGRYGKATIEGYYQKLSKAFVELTKQASCSGDEYRSLKVDCANGIGALKLREMEHYFSQGLSVQLFNDGSKGKLNHLCGADFVKSHQKPPQGMEIKSNERCCSFDGDADRIVYYYHDADGHFHLIDGDKIATLISSFLKELLVEIGESLNIGVVQTAYANGSSTRYLEEVMKVPVYCTKTGVKHLHHKAQEFDIGVYFEANGHGTALFSTAVEMKIKQSAEQLEDKKRKAAKMLENIIDLFNQAAGDAISDMLVIEAILALKGLTVQQWDALYTDLPNRQLKVQVADRRVISTTDAERQAVTPPGLQEAINDLVKKYKLSRAFVRPSGTEDVVRVYAEADSQESADHLAHEVSLAVFQLAGGIGERPQPDYGNDVRQKSNLAIF

SEQ ID NO: 8623 - protein, 474 aa, Artificial Sequence
  Synthetic polypeptide
MLAPSWEEHATCLANAEEQDMQRVLIDISEKEAVNLQQDAFVVIGRDTRPSSEKLSQSVIDGVTVLGGQFHDYGLLTTPQLHYMVYCRNTGGRYGKATIEGYYQKLSKAFVELTKQASCSGDEYRSLKVDCANGIGALKLREMEHYFSQGLSVQLFNDGSKGKLNHLCGADFVKSHQKPPQGMEIKSNERCCSFDGDADRIVYYYHDADGHFHLIDGDKIATLISSFLKELLVEIGESLNIGVVQTAYANGSSTRYLEEVMKVPVYCTKTGVKHLHHKAQEFDIGVYFEANGHGTALFSTAVEMKIKQSAEQLEDKKRKAAKMLENIIDLFNQAAGDAISDMLVIEAILALKGLTVQQWDALYTDLPNRQLKVQVADRRVISTTDAERQAVTPPGLQEAINDLVKKYKLSRAFVRPSGTEDVVRVYAEADSQESADHLAHEVSLAVFQLAGGIGERPQPDYGNDVRQKSNLAIF

SEQ ID NO: 8624 - protein, 583 aa, Artificial Sequence
  Synthetic polypeptide
MGGEWGQSAICPESAQEWTYQVGQHLVDMDLGAITKYSALHAKPNGLILQYGTAGFRTKAEHLDHVMFRMGLLAVLRSKQTKSTIGVMVTASHNPEEDNGVKLVDPLGEMLAPSWEEHATCLANAEEQDMQRVLIDISEKEAVNLQQDAFVVIGRDTRPSSEKLSQSVIDGVTVLGGQFHDYGLLTTPQLHYMVYCRNTGGRYGKATIEGYYQKLSKAFVELTKQASCSGDEYRSLKVDCANGIGALKLREMEHYFSQGLSVQLFNDGSKGKLNHLCGADFVKSHQKPPQGMEIKSNERCCSFDGDADRIVYYYHDADGHFHLIDGDKIATLISSFLKELLVEIGESLNIGVVQTAYANGSSTRYLEEVMKVPVYCTKTGVKHLHHKAQEFDIGVYFEANGHGTALFSTAVEMKIKQSAEQLEDKKRKAAKMLENIIDLFNQAAGDAISDMLVIEAILALKGLTVQQWDALYTDLPNRQLKVQVADRRVISTTDAERQAVTPPGLQEAINDLVKKYKLSRAFVRPSGTEDVVRVYAEADSQESADHLAHEVSLAVFQLAGGIGERPQPDYGNDVRQKSNLAIF

SEQ ID NO: 8625 - protein, 292 aa, Artificial Sequence
  Synthetic polypeptide
MEPEAPRRRHTHQRGYLLTRNPHLNKDLAFTLEERQQLNIHGLLPPSFNSQEIQVLRVVKNFEHLNSDFDRYLLLMDLQDRNEKLFYRVLTSDIEKFMPIVYTPTVGLACQQYSLVFRKPRGLFITIHDRGHIASVLNAWPEDVIKAIVVTDGERILGLGDLGCNGMGIPVGKLALYTACGGMNPQECLPVILDVGTENEELLKDPLYIGLRQRRVRGSEYDDFLDEFMEAVSSKDMDEARNHHSQQTIARSENQTPHVLTPKWELNNGSTWTQGGEYQTPGPVVGVELGEG

SEQ ID NO: 8626 - protein, 126 aa, Artificial Sequence
  Synthetic polypeptide
MGIPVGKLALYTACGGMNPQECLPVILDVGTENEELLKDPLYIGLRQRRVRGSEYDDFLDEFMEAVSSKDMDEARNHHSQQTIARSENQTPHVLTPKWELNNGSTWTQGGEYQTPGPVVGVELGEG

SEQ ID NO: 8627 - protein, 217 aa, Artificial Sequence
  Synthetic polypeptide
MDLQDRNEKLFYRVLTSDIEKFMPIVYTPTVGLACQQYSLVFRKPRGLFITIHDRGHIASVLNAWPEDVIKAIVVTDGERILGLGDLGCNGMGIPVGKLALYTACGGMNPQECLPVILDVGTENEELLKDPLYIGLRQRRVRGSEYDDFLDEFMEAVSSKDMDEARNHHSQQTIARSENQTPHVLTPKWELNNGSTWTQGGEYQTPGPVVGVELGEG

SEQ ID NO: 8628 - protein, 54 aa, Artificial Sequence
  Synthetic polypeptide
MEPEAPRRRHTHQRGYLLTRNPHLNKMWWCMRIVPATQEAKARGLLEPRNSRLQ

SEQ ID NO: 8629 - protein, 146 aa, Artificial Sequence
  Synthetic polypeptide
MDLTQQAKDIQNITVQETNKNNSESIECSKITMDLKFNNSRKYISITVPSKTQTMSPHIKSVDDVVVLGMNLSKFNKLTQFFICVAGVFVFYLIYGYLQELIFSVEGFKSCGWYLTLVQFAFYSIFGLIELQLIQDKRRRCSGSRL

SEQ ID NO: 8630 - protein, 212 aa, Artificial Sequence
  Synthetic polypeptide
MLRLAQTPRRLPSPFRVTYRPWGTRAFGAFPVFGTQISSPPENLDTAHLPHPEGAFEEWMRSGWKKRDLTQQAKDIQNITVQETNKNNSESIECSKITMDLKFNNSRKYISITVPSKTQTMSPHIKSVDDVVVLGMNLSKFNKLTQFFICVAGVFVFYLIYGYLQELIFSVEGFKSCGWYLTLVQFAFYSIFGLIELQLIQDKRRRCSGSRL

SEQ ID NO: 8631 - protein, 24 aa, Artificial Sequence
  Synthetic polypeptide
MIFSFAHKVCQYHHPFQKSYPSRR

SEQ ID NO: 8632 - protein, 154 aa, Artificial Sequence
  Synthetic polypeptide
MLNVPSQSFPAPRSQQRVASGGRSKVPLKQGRSLMDWIRLTKSGKDLTGLKGRLIEVTEEELKKHNKKDDCWICIRGFVYNVSPYMEYHPGGEDELMRAAGSDGTELFDQVHRWVNYESMLKECLVGRMAIKPAVLKECFSSRTPDKCLHIFKT

SEQ ID NO: 8633 - protein, 120 aa, Artificial Sequence
  Synthetic polypeptide
MDWIRLTKSGKDLTGLKGRLIEVTEEELKKHNKKDDCWICIRGFVYNVSPYMEYHPGGEDELMRAAGSDGTELFDQVHRWVNYESMLKECLVGRMAIKPAVLKECFSSRTPDKCLHIFKT

SEQ ID NO: 8634 - protein, 518 aa, Artificial Sequence
  Synthetic polypeptide
MLNVPSQSFPAPRSQQRVASGGRSKVPLKQGRSLMDWIRLTKSGKDLTGLKGRLIEVTEEELKKHNKKDDCWICIRGFVYNVSPYMEYHPGGEDELMRAAGSDGTELFDQVHRWVNYESMLKECLVGRMAIKPAVLKDYREEEKKVLNGMLPKSQVTDTLAKEGPSYPSYDWFQTDSLVTIAIYTKQKDINLDSIIVDHQNDSFRAETIIKDCLYLIHIGLSHEVQEDFSVRVVESVGKIEIVLQKKENTSWDFLGHPLKNHNSLIPRKDTGLYYRKCQLISKEDVTHDTRLFCLMLPPSTHLQVPIGQHVYLKLPITGTEIVKPYTPVSGSLLSEFKEPVLPNNKYIYFLIKIYPTGLFTPELDRLQIGDFVSVSSPEGNFKISKFQELEDLFLLAAGTGFTPMVKILNYALTDIPSLRKVKLMFFNKTEDDIIWRSQLEKLAFKDKRLDVEFVLSAPISEWNGKQGHISPALLSEFLKRNLDKSKVLVCICGPVPFTEQGVSLRYVFYQQRENGLI

SEQ ID NO: 8635 - protein, 233 aa, Artificial Sequence
  Synthetic polypeptide
MIITKAGRRMFPAMRVKISGLDPHQQYYIAMDIVPVDNKRYRYVYHSSKWMVAGNADSPVPPRVYIHPDSPASGETWMRQVISFDKLKLTNNELDDQGHIILHSMHKYQPRVHVIRKDCGDDLSPIKPVPSGEGVKAFSFPETVFTTVTAYQNQQITRLKIDRNPFAKGFRDSGRNRMGLEALVESYAFWRPSLRTLTFEDIPGIPKQVCVFQNQSCKTTNGSSIGAPDAVHD

SEQ ID NO: 8636 - protein, 391 aa, Artificial Sequence
  Synthetic polypeptide
MAEKRRGSPCSMLSLKAHAFSVEALIGAEKQQQLQKKRRKLGAEEAAGAVDDGGCSRGGGAGEKGSSEGDEGAALPPPAGATSGPARSGADLERGAAGGCEDGFQQGASPLASPGGSPKGSPARSLARPGTPLPSPQAPRVDLQGAELWKRFHEIGTEMIITKAGRRMFPAMRVKISGLDPHQQYYIAMDIVPVDNKRYRYVYHSSKWMVAGNADSPVPPRVYIHPDSPASGETWMRQVISFDKLKLTNNELDDQGHIILHSMHKYQPRVHVIRKDCGDDLSPIKPVPSGEGVKAFSFPETVFTTVTAYQNQQITRLKIDRNPFAKGFRDSGRNRMGLEALVESYAFWRPSLRTLTFEDIPGIPKQVCVFQNQSCKTTNGSSIGAPDAVHD

SEQ ID NO: 8637 - protein, 230 aa, Artificial Sequence
  Synthetic polypeptide
MIITKAGRRMFPAMRVKISGLDPHQQYYIAMDIVPVDNKRYRYVYHSSKWMVAGNADSPVPPRVYIHPDSPASGETWMRQVISFDKLKLTNNELDDQGHIILHSMHKYQPRVHVIRKDCGDDLSPIKPVPSGEGVKAFSFPETVFTTVTAYQNQQITRLKIDRNPFAKGFRDSGRNRMGLEALVESYAFWRPSLRTLTFEDIPGIPKQDGKHSPQGKNAPKMYSGELGPI

SEQ ID NO: 8638 - protein, 388 aa, Artificial Sequence
  Synthetic polypeptide
MAEKRRGSPCSMLSLKAHAFSVEALIGAEKQQQLQKKRRKLGAEEAAGAVDDGGCSRGGGAGEKGSSEGDEGAALPPPAGATSGPARSGADLERGAAGGCEDGFQQGASPLASPGGSPKGSPARSLARPGTPLPSPQAPRVDLQGAELWKRFHEIGTEMIITKAGRRMFPAMRVKISGLDPHQQYYIAMDIVPVDNKRYRYVYHSSKWMVAGNADSPVPPRVYIHPDSPASGETWMRQVISFDKLKLTNNELDDQGHIILHSMHKYQPRVHVIRKDCGDDLSPIKPVPSGEGVKAFSFPETVFTTVTAYQNQQITRLKIDRNPFAKGFRDSGRNRMGLEALVESYAFWRPSLRTLTFEDIPGIPKQDGKHSPQGKNAPKMYSGELGPI

SEQ ID NO: 8639 - protein, 22 aa, Artificial Sequence
  Synthetic polypeptide
LKIMQTVLKIQRESKIRIILWR

SEQ ID NO: 8640 - protein, 852 aa, Artificial Sequence
  Synthetic polypeptide
MVPWVRTMGQKLKQRLRLDVGREICRQYPLFCFLLLCLSAASLLLNRYIHILMIFWSFVAGVVTFYCSLGPDSLLPNIFFTIKYKPKQLGLQELFPQGHSCAVCGKVKCKRHRPSLLLENYQPWLDLKISSKVDASLSEVDIPSIITKKLLKAAMKHIEVIVKARQKVKNTEFLQQAALEEYGPELHVALRSRRDELHYLRKLTELLFPYILPPKATDCRSLTLLIREILSGSVFLPSLDFLADPDTVNHLLIIFIDDSPPEKATEPASPLVPFLQKFAEPRNKKPSVLKLELKQIREQQDLLFRFMNFLKQEGAVHVLQFCLTVEEFNDRILRPELSNDEMLSLHEELQKIYKTYCLDESIDKIRFDPFIVEEIQRIAEGPYIDVVKLQTMRCLFEAYEHVLSLLENVFTPMFCHSDEYFRQLLRGAESPTRNSKLNRNTQKRGESFGISRIGSKIKGVFKSTTMEGAMLPNYGVAEGEDDFIEEGIVVMEDDSPVEAVSTPNTPRNLAAWKISIPYVDFFEDPSSERKEKKERIPVFCIDVERNDRRAVGHEPEHWSVYRRYLEFYVLESKLTEFHGAFPDAQLPSKRIIGPKNYEFLKSKREEFQEYLQKLLQHPELSNSQLLADFLSPNGGETQFLDKILPDVNLGKIIKSVPGKLMKEKGQHLEPFIMNFINSCESPKPKPSRPELTILSPTSENNKKLFNDLFKNNANRAENTERKQNQNYFMEVMTVEGVYDYLMYVGRVVFQVPDWLHHLLMGTRILFKNTLEMYTDYYLQCKLEQLFQEHRLVSLITLLRDAIFCENTEPRSLQDKQKGAKQTFEEMMNYIPGEWINKLILLDNGILFSAIKE

SEQ ID NO: 8641 - protein, 905 aa, Artificial Sequence
  Synthetic polypeptide
MVPWVRTMGQKLKQRLRLDVGREICRQYPLFCFLLLCLSAASLLLNRYIHILMIFWSFVAGVVTFYCSLGPDSLLPNIFFTIKYKPKQLGLQELFPQGHSCAVCGKVKCKRHRPSLLLENYQPWLDLKISSKVDASLSEVLELVLENFVYPWYRDVTDDESFVDELRITLRFFASVLIRRIHKVDIPSIITKKLLKAAMKHIEVIVKARQKVKNTEFLQQAALEEYGPELHVALRSRRDELHYLRKLTELLFPYILPPKATDCRSLTLLIREILSGSVFLPSLDFLADPDTVNHLLIIFIDDSPPEKATEPASPLVPFLQKFAEPRNKKPSVLKLELKQIREQQDLLFRFMNFLKQEGAVHVLQFCLTVEEFNDRILRPELSNDEMLSLHEELQKIYKTYCLDESIDKIRFDPFIVEEIQRIAEGPYIDVVKLQTMRCLFEAYEHVLSLLENVFTPMFCHSDEYFRQLLRGAESPTRNSKLNRGSLSLDDFRNTQKRGESFGISRIGSKIKGVFKSTTMEGAMLPNYGVAEGEDDFIEEGIVVMEDDSPVEAVSTPNTPRNLAAWKISIPYVDFFEDPSSERKEKKERIPVFCIDVERNDRRAVGHEPEHWSVYRRYLEFYVLESKLTEFHGAFPDAQLPSKRIIGPKNYEFLKSKREEFQEYLQKLLQHPELSNSQLLADFLSPNGGETQFLDKILPDVNLGKIIKSVPGKLMKEKGQHLEPFIMNFINSCESPKPKPSRPELTILSPTSENNKKLFNDLFKNNANRAENTERKQNQNYFMEVMTVEGVYDYLMYVGRVVFQVPDWLHHLLMGTRILFKNTLEMYTDYYLQCKLEQLFQEHRLVSLITLLRDAIFCENTEPRSLQDKQKGAKQTFEEMMNYIPGEWINKLILLDNGILFSAIKE

SEQ ID NO: 8642 - protein, 624 aa, Artificial Sequence
  Synthetic polypeptide
MVPWVRTMGQKLKQRLRLDVGREICRQYPLFCFLLLCLSAASLLLNRYIHILMIFWSFVAGVVTFYCSLGPDSLLPNIFFTIKYKPKQLGLQELFPQGHSCAVCGKVKCKRHRPSLLLENYQPWLDLKISSKVDASLSEVLELVLENFVYPWYRDVTDDESFVDELRITLRFFASVLIRRIHKVDIPSIITKKLLKAAMKHIEVIVKARQKVKNTEFLQQAALEEYGPELHVALRSRRDELHYLRKLTELLFPYILPPKATDCRSLTLLIREILSGSVFLPSLDFLADPDTVNHLLIIFIDDSPPEKATEPASPLVPFLQKFAEPRNKKPSVLKLELKQIREQQDLLFRFMNFLKQEGAVHVLQFCLTVEEFNDRILRPELSNDEMLSLHEELQKIYKTYCLDESIDKIRFDPFIVEEIQRRKIIKSVPGKLMKEKGQHLEPFIMNFINSCESPKPKPSRPELTILSPTSENNKKLFNDLFKNNANRAENTERKQNQNYFMEVMTVEGVYDYLMYVGRVVFQVPDWLHHLLMGTRILFKNTLEMYTDYYLQCKLEQLFQEHRLVSLITLLRDAIFCENTEPRSLQDKQKGAKQTFEEMMNYIPGEWINKLILLDNGILFSAIKE

SEQ ID NO: 8643 - protein, 853 aa, Artificial Sequence
  Synthetic polypeptide
MIFWSFVAGVVTFYCSLGPDSLLPNIFFTIKYKPKQLGLQELFPQGHSCAVCGKVKCKRHRPSLLLENYQPWLDLKISSKVDASLSEVLELVLENFVYPWYRDVTDDESFVDELRITLRFFASVLIRRIHKVDIPSIITKKLLKAAMKHIEVIVKARQKVKNTEFLQQAALEEYGPELHVALRSRRDELHYLRKLTELLFPYILPPKATDCRSLTLLIREILSGSVFLPSLDFLADPDTVNHLLIIFIDDSPPEKATEPASPLVPFLQKFAEPRNKKPSVLKLELKQIREQQDLLFRFMNFLKQEGAVHVLQFCLTVEEFNDRILRPELSNDEMLSLHEELQKIYKTYCLDESIDKIRFDPFIVEEIQRIAEGPYIDVVKLQTMRCLFEAYEHVLSLLENVFTPMFCHSDEYFRQLLRGAESPTRNSKLNRGSLSLDDFRNTQKRGESFGISRIGSKIKGVFKSTTMEGAMLPNYGVAEGEDDFIEEGIVVMEDDSPVEAVSTPNTPRNLAAWKISIPYVDFFEDPSSERKEKKERIPVFCIDVERNDRRAVGHEPEHWSVYRRYLEFYVLESKLTEFHGAFPDAQLPSKRIIGPKNYEFLKSKREEFQEYLQKLLQHPELSNSQLLADFLSPNGGETQFLDKILPDVNLGKIIKSVPGKLMKEKGQHLEPFIMNFINSCESPKPKPSRPELTILSPTSENNKKLFNDLFKNNANRAENTERKQNQNYFMEVMTVEGVYDYLMYVGRVVFQVPDWLHHLLMGTRILFKNTLEMYTDYYLQCKLEQLFQEHRLVSLITLLRDAIFCENTEPRSLQDKQKGAKQTFEEMMNYIPGEWINKLILLDNGILFSAIKE

SEQ ID NO: 8644 - protein, 896 aa, Artificial Sequence
  Synthetic polypeptide
MVPWVRTMGQKLKQRLRLDVGREICRQYPLFCFLLLCLSAASLLLNRYIHILMIFWSFVAGVVTFYCSLGPDSLLPNIFFTIKYKPKQLGLQELFPQGHSCAVCGKVKCKRHRPSLLLENYQPWLDLKISSKVDASLSEVLELVLENFVYPWYRDVTDDESFVDELRITLRFFASVLIRRIHKVDIPSIITKKLLKAAMKHIEVIVKARQKVKNTEFLQQAALEEYGPELHVALRSRRDELHYLRKLTELLFPYILPPKATDCRSLTLLIREILSGSVFLPSLDFLADPDTVNHLLIIFIDDSPPEKATEPASPLVPFLQKFAEPRNKKPSVLKLELKQIREQQDLLFRFMNFLKQEGAVHVLQFCLTVEEFNDRILRPELSNDEMLSLHEELQKIYKTYCLDESIDKIRFDPFIVEEIQRIAEGPYIDVVKLQTMRCLFEAYEHVLSLLENVFTPMFCHSDEYFRQLLRGAESPTRNSKLNRNTQKRGESFGISRIGSKIKGVFKSTTMEGAMLPNYGVAEGEDDFIEEGIVVMEDDSPVEAVSTPNTPRNLAAWKISIPYVDFFEDPSSERKEKKERIPVFCIDVERNDRRAVGHEPEHWSVYRRYLEFYVLESKLTEFHGAFPDAQLPSKRIIGPKNYEFLKSKREEFQEYLQKLLQHPELSNSQLLADFLSPNGGETQFLDKILPDVNLGKIIKSVPGKLMKEKGQHLEPFIMNFINSCESPKPKPSRPELTILSPTSENNKKLFNDLFKNNANRAENTERKQNQNYFMEVMTVEGVYDYLMYVGRVVFQVPDWLHHLLMGTRILFKNTLEMYTDYYLQCKLEQLFQEHRLVSLITLLRDAIFCENTEPRSLQDKQKGAKQTFEEMMNYIPGEWINKLILLDNGILFSAIKE

SEQ ID NO: 8645 - protein, 823 aa, Artificial Sequence
  Synthetic polypeptide
MKMKTFVIIHFHLIQLGLQELFPQGHSCAVCGKVKCKRHRPSLLLENYQPWLDLKISSKVDASLSEVLELVLENFVYPWYRDVTDDESFVDELRITLRFFASVLIRRIHKVDIPSIITKKLLKAAMKHIEVIVKARQKVKNTEFLQQAALEEYGPELHVALRSRRDELHYLRKLTELLFPYILPPKATDCRSLTLLIREILSGSVFLPSLDFLADPDTVNHLLIIFIDDSPPEKATEPASPLVPFLQKFAEPRNKKPSVLKLELKQIREQQDLLFRFMNFLKQEGAVHVLQFCLTVEEFNDRILRPELSNDEMLSLHEELQKIYKTYCLDESIDKIRFDPFIVEEIQRIAEGPYIDVVKLQTMRCLFEAYEHVLSLLENVFTPMFCHSDEYFRQLLRGAESPTRNSKLNRNTQKRGESFGISRIGSKIKGVFKSTTMEGAMLPNYGVAEGEDDFIEEGIVVMEDDSPVEAVSTPNTPRNLAAWKISIPYVDFFEDPSSERKEKKERIPVFCIDVERNDRRAVGHEPEHWSVYRRYLEFYVLESKLTEFHGAFPDAQLPSKRIIGPKNYEFLKSKREEFQEYLQKLLQHPELSNSQLLADFLSPNGGETQFLDKILPDVNLGKIIKSVPGKLMKEKGQHLEPFIMNFINSCESPKPKPSRPELTILSPTSENNKKLFNDLFKNNANRAENTERKQNQNYFMEVMTVEGVYDYLMYVGRVVFQVPDWLHHLLMGTRILFKNTLEMYTDYYLQCKLEQLFQEHRLVSLITLLRDAIFCENTEPRSLQDKQKGAKQTFEEMMNYIPGEWINKLILLDNGILFSAIKE

SEQ ID NO: 8646 - protein, 215 aa, Artificial Sequence
  Synthetic polypeptide
DAQLPSKRIIGPKNYEFLKSKREEFQEYLQKLLQHPELSNSQLLADFLSPNGGETQFLDKILPDVNLGKIIKSVPGKLMKEKGQHLEPFIMNFINSCESPKPKPSRPELTILSPTSENNKKLFNDLFKNNANRAENTERKQNQNYFMEVMTVEGVYDYLMYVDAIFCENTEPRSLQDKQKGAKQTFEEMMNYIPGEWINKLILLDNGILFSAIKE

SEQ ID NO: 8647 - protein, 658 aa, Artificial Sequence
  Synthetic polypeptide
MVPWVRTMGQKLKQRLRLDVGREICRQYPLFCFLLLCLSAASLLLNRYIHILMIFWSFVAGVVTFYCSLGPDSLLPNIFFTIKYKPKQLGLQELFPQGHSCAVCGKVKCKRHRPSLLLENYQPWLDLKISSKVDASLSEVDIPSIITKKLLKAAMKHIEVIVKARQKVKNTEFLQQAALEEYGPELHVALRSRRDELHYLRKLTELLFPYILPPKATDCRSLTLLIREILSGSVFLPSLDFLADPDTVNHLLIIFIDDSPPEKATEPASPLVPFLQKFAEPRNKKPSVLKLELKQIREQQDLLFRFMNFLKQEGAVHVLQFCLTVEEFNDRILRPELSNDEMLSLHEELQKIYKTYCLDESIDKIRFDPFIVEEIQRIAEGPYIDVVKLQTMRCLFEAYEHVLSLLENVFTPMFCHSDEYFRQLLRGAESPTRNSKLNRNTQKRGESFGISRIGSKIKGVFKSTTMEGAMLPNYGVAEGEDDFIEEGIVVMEDDSPVEAVSTPNTPRNLAAWKISIPYVDFFEDPSSERKEKKERIPVFCIDVERNDRRAVGHEPEHWSVYRRYLEFYVLESKLTEFHGAFPDAQLPSKRIIGPKNYEFLKSKREEFQEYLQKLLQHPELSNSQLLADFLSPNGGETQFLDKILPDVNLAKISLLHQS

SEQ ID NO: 8648 - protein, 711 aa, Artificial Sequence
  Synthetic polypeptide
MVPWVRTMGQKLKQRLRLDVGREICRQYPLFCFLLLCLSAASLLLNRYIHILMIFWSFVAGVVTFYCSLGPDSLLPNIFFTIKYKPKQLGLQELFPQGHSCAVCGKVKCKRHRPSLLLENYQPWLDLKISSKVDASLSEVLELVLENFVYPWYRDVTDDESFVDELRITLRFFASVLIRRIHKVDIPSIITKKLLKAAMKHIEVIVKARQKVKNTEFLQQAALEEYGPELHVALRSRRDELHYLRKLTELLFPYILPPKATDCRSLTLLIREILSGSVFLPSLDFLADPDTVNHLLIIFIDDSPPEKATEPASPLVPFLQKFAEPRNKKPSVLKLELKQIREQQDLLFRFMNFLKQEGAVHVLQFCLTVEEFNDRILRPELSNDEMLSLHEELQKIYKTYCLDESIDKIRFDPFIVEEIQRIAEGPYIDVVKLQTMRCLFEAYEHVLSLLENVFTPMFCHSDEYFRQLLRGAESPTRNSKLNRGSLSLDDFRNTQKRGESFGISRIGSKIKGVFKSTTMEGAMLPNYGVAEGEDDFIEEGIVVMEDDSPVEAVSTPNTPRNLAAWKISIPYVDFFEDPSSERKEKKERIPVFCIDVERNDRRAVGHEPEHWSVYRRYLEFYVLESKLTEFHGAFPDAQLPSKRIIGPKNYEFLKSKREEFQEYLQKLLQHPELSNSQLLADFLSPNGGETQFLDKILPDVNLAKISLLHQS

SEQ ID NO: 8649 - protein, 659 aa, Artificial Sequence
  Synthetic polypeptide
MIFWSFVAGVVTFYCSLGPDSLLPNIFFTIKYKPKQLGLQELFPQGHSCAVCGKVKCKRHRPSLLLENYQPWLDLKISSKVDASLSEVLELVLENFVYPWYRDVTDDESFVDELRITLRFFASVLIRRIHKVDIPSIITKKLLKAAMKHIEVIVKARQKVKNTEFLQQAALEEYGPELHVALRSRRDELHYLRKLTELLFPYILPPKATDCRSLTLLIREILSGSVFLPSLDFLADPDTVNHLLIIFIDDSPPEKATEPASPLVPFLQKFAEPRNKKPSVLKLELKQIREQQDLLFRFMNFLKQEGAVHVLQFCLTVEEFNDRILRPELSNDEMLSLHEELQKIYKTYCLDESIDKIRFDPFIVEEIQRIAEGPYIDVVKLQTMRCLFEAYEHVLSLLENVFTPMFCHSDEYFRQLLRGAESPTRNSKLNRGSLSLDDFRNTQKRGESFGISRIGSKIKGVFKSTTMEGAMLPNYGVAEGEDDFIEEGIVVMEDDSPVEAVSTPNTPRNLAAWKISIPYVDFFEDPSSERKEKKERIPVFCIDVERNDRRAVGHEPEHWSVYRRYLEFYVLESKLTEFHGAFPDAQLPSKRIIGPKNYEFLKSKREEFQEYLQKLLQHPELSNSQLLADFLSPNGGETQFLDKILPDVNLAKISLLHQS

SEQ ID NO: 8650 - protein, 702 aa, Artificial Sequence
  Synthetic polypeptide
MVPWVRTMGQKLKQRLRLDVGREICRQYPLFCFLLLCLSAASLLLNRYIHILMIFWSFVAGVVTFYCSLGPDSLLPNIFFTIKYKPKQLGLQELFPQGHSCAVCGKVKCKRHRPSLLLENYQPWLDLKISSKVDASLSEVLELVLENFVYPWYRDVTDDESFVDELRITLRFFASVLIRRIHKVDIPSIITKKLLKAAMKHIEVIVKARQKVKNTEFLQQAALEEYGPELHVALRSRRDELHYLRKLTELLFPYILPPKATDCRSLTLLIREILSGSVFLPSLDFLADPDTVNHLLIIFIDDSPPEKATEPASPLVPFLQKFAEPRNKKPSVLKLELKQIREQQDLLFRFMNFLKQEGAVHVLQFCLTVEEFNDRILRPELSNDEMLSLHEELQKIYKTYCLDESIDKIRFDPFIVEEIQRIAEGPYIDVVKLQTMRCLFEAYEHVLSLLENVFTPMFCHSDEYFRQLLRGAESPTRNSKLNRNTQKRGESFGISRIGSKIKGVFKSTTMEGAMLPNYGVAEGEDDFIEEGIVVMEDDSPVEAVSTPNTPRNLAAWKISIPYVDFFEDPSSERKEKKERIPVFCIDVERNDRRAVGHEPEHWSVYRRYLEFYVLESKLTEFHGAFPDAQLPSKRIIGPKNYEFLKSKREEFQEYLQKLLQHPELSNSQLLADFLSPNGGETQFLDKILPDVNLAKISLLHQS

SEQ ID NO: 8651 - protein, 629 aa, Artificial Sequence
  Synthetic polypeptide
MKMKTFVIIHFHLIQLGLQELFPQGHSCAVCGKVKCKRHRPSLLLENYQPWLDLKISSKVDASLSEVLELVLENFVYPWYRDVTDDESFVDELRITLRFFASVLIRRIHKVDIPSIITKKLLKAAMKHIEVIVKARQKVKNTEFLQQAALEEYGPELHVALRSRRDELHYLRKLTELLFPYILPPKATDCRSLTLLIREILSGSVFLPSLDFLADPDTVNHLLIIFIDDSPPEKATEPASPLVPFLQKFAEPRNKKPSVLKLELKQIREQQDLLFRFMNFLKQEGAVHVLQFCLTVEEFNDRILRPELSNDEMLSLHEELQKIYKTYCLDESIDKIRFDPFIVEEIQRIAEGPYIDVVKLQTMRCLFEAYEHVLSLLENVFTPMFCHSDEYFRQLLRGAESPTRNSKLNRNTQKRGESFGISRIGSKIKGVFKSTTMEGAMLPNYGVAEGEDDFIEEGIVVMEDDSPVEAVSTPNTPRNLAAWKISIPYVDFFEDPSSERKEKKERIPVFCIDVERNDRRAVGHEPEHWSVYRRYLEFYVLESKLTEFHGAFPDAQLPSKRIIGPKNYEFLKSKREEFQEYLQKLLQHPELSNSQLLADFLSPNGGETQFLDKILPDVNLAKISLLHQS

SEQ ID NO: 8652 - protein, 76 aa, Artificial Sequence
  Synthetic polypeptide
DAQLPSKRIIGPKNYEFLKSKREEFQEYLQKLLQHPELSNSQLLADFLSPNGGETQFLDKILPDVNLAKISLLHQS

SEQ ID NO: 8653 - protein, 191 aa, Artificial Sequence
  Synthetic polypeptide
MVPWVRTMGQKLKQRLRLDVGREICRQYPLFCFLLLCLSAASLLLNRYIHILMIFWSFVAGVVTFYCSLGPDSLLPNIFFTIKYKPKQLGLQELFPQGHSCAVCGKVKCKRHRPSLLLENYQPWLDLKISSKVDASLSEVLELVLENFVYPWYRDVTDDESFVDELRITLRFFASVLIRRIHKAMHRGSCL

SEQ ID NO: 8654 - protein, 139 aa, Artificial Sequence
  Synthetic polypeptide
MIFWSFVAGVVTFYCSLGPDSLLPNIFFTIKYKPKQLGLQELFPQGHSCAVCGKVKCKRHRPSLLLENYQPWLDLKISSKVDASLSEVLELVLENFVYPWYRDVTDDESFVDELRITLRFFASVLIRRIHKAMHRGSCL

SEQ ID NO: 8655 - protein, 118 aa, Artificial Sequence
  Synthetic polypeptide
MKMKTFVIIHFHLIQLGLQELFPQGHSCAVCGKVKCKRHRPSLLLENYQPWLDLKISSKVDASLSEVLELVLENFVYPWYRDVTDDESFVDELRITLRFFASVLIRRIHKAMHRGSCL

SEQ ID NO: 8656 - protein, 190 aa, Artificial Sequence
  Synthetic polypeptide
MVPWVRTMGQKLKQRLRLDVGREICRQYPLFCFLLLCLSAASLLLNRYIHILMIFWSFVAGVVTFYCSLGPDSLLPNIFFTIKYKPKLGLQELFPQGHSCAVCGKVKCKRHRPSLLLENYQPWLDLKISSKVDASLSEVLELVLENFVYPWYRDVTDDESFVDELRITLRFFASVLIRRIHKAMHRGSCL

SEQ ID NO: 8657 - protein, 22 aa, Artificial Sequence
  Synthetic polypeptide
MACGFRRAIACQHQQSARNISV

SEQ ID NO: 8658 - protein, 478 aa, Artificial Sequence
  Synthetic polypeptide
MAHNKIPPRWLNCPRRGQPVAGRFLPLKTMLGPRYDSQVAEENRFHPSMLSNYLKSLKVKMGLLVDLTNTSRFYDRNDIEKEGIKYIKLQCKGHGECPTTENTETFIRLCERFNERNPPELIGVHCTHGFNRTGFLICAFLVEKMDWSIEAAVATFAQARPPGIYKGDYLKELFRRYGDIEEAPPPPLLPDWCFEDDEDEDEDEDGKKESEPGSSASFGKRRKERLKLGAIFLEGVTVKGVTQVTTQPKLGEVQQKCHQFCGWEGSGFPGAQPVSMDKQNIKLLDLKPYKVSWKADGTRYMMLIDGTNEVFMIDRDNSVFHVSNLEFPFRKDLRMHLSNTLLDGEMIIDRVNGQAVPRYLIYDIIKFNSQPVGDCDFNVRLQCIEREIISPRHEKMKTGLIDKTQEPFSVRNKPFFDICTSRKLLEGNFAKEVSHEMDGLIFQPTGDYWLFKVSNTVFSNSINGVPFVIKFPFKIYIF

SEQ ID NO: 8659 - protein, 118 aa, Artificial Sequence
  Synthetic polypeptide
MVKPGGICSATGYWKAAFCLTDVHKMPYFTRLILFLFCLMVLVESRKPKRKRWTGQVEMPKPSHLYKKNLDVTKIRKGKPQQLLRVDEHDFSMRPAFGEEEAHEAKVPRVLKSHNVAV

SEQ ID NO: 8660 - protein, 93 aa, Artificial Sequence
  Synthetic polypeptide
MPYFTRLILFLFCLMVLVESRKPKRKRWTGQVEMPKPSHLYKKNLDVTKIRKGKPQQLLRVDEHDFSMRPAFGEEEAHEAKVPRVLKSHNVAV

SEQ ID NO: 8661 - protein, 128 aa, Artificial Sequence
  Synthetic polypeptide
MSTASAASSSSSSSAGEMIEAPSQVLNFEEIDYKEIEVEEVQWFTPVIPALWKANPGRSPELRSSRPAWTRWQNPDSTKNTKISWVWWHKPVIPATLGWLRQENHFSQRGRGCSELRSRHCTPAWATE

SEQ ID NO: 8662 - protein, 254 aa, Artificial Sequence
  Synthetic polypeptide
MEREKFQQKALKQTKQKKSKSAEFLMVKEDREATEGTGNPAFNMSSPDLSACQTAEKKVIRHDMPDRTLAAHQQKFRLPASAEPKGNEYGRNYFDPLMDEEINPRQCATEVSREVCLMAKGEKAESGVDNTAGLSEKETQKNPRAPMDEADVKSAAHSSQGSIPKKIGPCSMDYDPNLLEEDDELHSQGDSLTDHSVKGKSTVWRIGEAEDYSQDISYLEELEEHRFSVWFDPILPAHQGKNLGYRKPSVLATK

SEQ ID NO: 8663 - protein, 4 aa, Artificial Sequence
  Synthetic polypeptide
IQVG

SEQ ID NO: 8664 - protein, 300 aa, Artificial Sequence
  Synthetic polypeptide
MENCSAASTFLTDSLELELGTEWCKPPYFSCAVDNRGGGKHFSGESYLCSGALKRLILNLDPLPTNFEEDTLEIFGIQWVTETALVNSSRELFHLFRQQLYNLETLLQSSCDFGKVSTLHCKADNIRQQCVLFLHYVKVFIFRYLKVQNAESHVPVHPYEALEAQLPSVLIDELHGLLLYIGHLSELPSVNIGAFVNQNQIKLFPPSWHLLHLHLDIHWLVLEILYMLGEKLKQVVYGHQFMNLASDNLTNISLFEEHCETLLCDLISLSLNRYDKVSAAVVLKWQSSVVVTETVLTTDS

SEQ ID NO: 8665 - protein, 226 aa, Artificial Sequence
  Synthetic polypeptide
FGIQWVTETALVNSSRELFHLFRQQLYNLETLLQSSCDFGKVSTLHCKADNIRQQCVLFLHYVKVFIFRYLKVQNAESHVPVHPYEALEAQLPSVLIDELHGLLLYIGHLSELPSVNIGAFVNQNQIKLFPPSWHLLHLHLDIHWLVLEILYMLGEKLKQVVYGHQFMNLASDNLTNISLFEEHCETLLCDLISLSLNRYDKVSAAVVLKWQSSVVVTETVLTTDS

SEQ ID NO: 8666 - protein, 408 aa, Artificial Sequence
  Synthetic polypeptide
MRSKKVVQNSRFFLPQTLSWAPRFKDFQQQDSQELLHYLLDAVRTEETKISTVKDPFIDISLPIIEERVSKPLLWGRMNKYRSLRETDHDRYSGNVTIENIHQPRAAKKHSSSKDKSQLIHDRKCIRKLSSGETVTYQKNENLEMNGDSLMFASLMNSESRLNESPTDDSEKEASHSESNVDADSEPSESESASKQTGLFRSSSGSGVQPDGPLYPLSAGKLLYTKETDSGDKEMAEAISELRLSSTVTGDQDFDRENQPLNISNNLCFLEGKHLRSYSPQNAFQTLSQSYITTSKECSIQSCLYQFTSMELLMGNNKLLCENCTKNKQKYQEETSFAEKKVEGVYTNARKQLLISAVPAVLILHLKRFHQAGLSLRKVNRHVDFPLMLDLAPFCSATCKARLSGLRL

SEQ ID NO: 8667 - protein, 728 aa, Artificial Sequence
  Synthetic polypeptide
MRVKDPTKALPEKAKRSKRPTVPHDEDSSDDIAVGLTCQHVSHAISVNHVKRAIAENLWSVCSECLKERRFYDGQLVLTSDIWLCLKCGFQGCGKNSESQHSLKHFKSSRTEPHCIIINLSTWIIWCYECDEKLSTHCNKKVLAQIVDFLQKHASKTQTSAFSRIMKLCEEKCETDEIQKGGKCRNLSVRGITNLGNTCFFNAVMQNLAQTYTLTDLMNEIKESSTKLKIFPSSDSQLDPLVVELSRPGPLTSALFLFLHSMKETEKGPLSPKVLFNQLCQKAPRFKDFQQQDSQELLHYLLDAVRTEETKRIQASILKAFNNPTTKTADDETRKKVKAYGKEGVKMNFIDRIFIGELTSTVMCEECANISTVKDPFIDISLPIIEERVSKPLLWGRMNKYRSLRETDHDRYSGNVTIENIHQPRAAKKHSSSKDKSQLIHDRKCIRKLSSGETVTYQKNENLEMNGDSLMFASLMNSESRLNESPTDDSEKEASHSESNVDADSEPSESESASKQTGLFRSSSGSGVQPDGPLYPLSAGKLLYTKETDSGDKEMAEAISELRLSSTVTGDQDFDRENQPLNISNNLCFLEGKHLRSYSPQNAFQTLSQSYITTSKECSIQSCLYQFTSMELLMGNNKLLCENCTKNKQKYQEETSFAEKKVEGVYTNARKQLLISAVPAVLILHLKRFHQAGLSLRKVNRHVDFPLMLDLAPFCSATCKARLSGLRL

SEQ ID NO: 8668 - protein, 21 aa, Artificial Sequence
  Synthetic polypeptide
MLDLAPFCSATCKARLSGLRL

SEQ ID NO: 8669 - protein, 680 aa, Artificial Sequence
  Synthetic polypeptide
MRVKDPTKALPEKAKRSKRPTVPHDEDSSDDIAVGLTCQHVSHAISVNHVKRAIAENLWSVCSECLKERRFYDGQLVLTSDIWLCLKCGFQGCGKNSESQHSLKHFKSSRTEPHCIIINLSTWIIWCYECDEKLSTHCNKKVLAQIVDFLQKHASKTQTSAFSRIMKLCEEKCETDEIQKGGKCRNLSVRGITNLGNTCFFNAVMQNLAQTYTLTDLMNEIKESSTKLKIFPSSDSQLDPLVVELSRPGPLTSALFLFLHSMKETEKGPLSPKVLFNQLCQKAPRFKDFQQQDSQELLHYLLDAVRTEETKRIQASILKAFNNPTTKTADDETRKKVKAYGKEGVKMNFIDRIFIGELTSTVMCEECANISTVKDPFIDISLPIIEERSQLIHDRKCIRKLSSGETVTYQKNENLEMNGDSLMFASLMNSESRLNESPTDDSEKEASHSESNVDADSEPSESESASKQTGLFRSSSGSGVQPDGPLYPLSAGKLLYTKETDSGDKEMAEAISELRLSSTVTGDQDFDRENQPLNISNNLCFLEGKHLRSYSPQNAFQTLSQSYITTSKECSIQSCLYQFTSMELLMGNNKLLCENCTKNKQKYQEETSFAEKKVEGVYTNARKQLLISAVPAVLILHLKRFHQAGLSLRKVNRHVDFPLMLDLAPFCSATCKARLSGLRL

SEQ ID NO: 8670 - protein, 143 aa, Artificial Sequence
  Synthetic polypeptide
MRSKKVVQNSRFFLPQTLSWAPRFKDFQQQDSQELLHYLLDAVRTEETKISTVKDPFIDISLPIIEERVSKPLLWGRMNKYRSLRETDHDRYSGNVTIENIHQPRAAKKHSSSKDKERGWSWRPLSLANSHRNRKPNTTSSHL

SEQ ID NO: 8671 - protein, 463 aa, Artificial Sequence
  Synthetic polypeptide
MRVKDPTKALPEKAKRSKRPTVPHDEDSSDDIAVGLTCQHVSHAISVNHVKRAIAENLWSVCSECLKERRFYDGQLVLTSDIWLCLKCGFQGCGKNSESQHSLKHFKSSRTEPHCIIINLSTWIIWCYECDEKLSTHCNKKVLAQIVDFLQKHASKTQTSAFSRIMKLCEEKCETDEIQKGGKCRNLSVRGITNLGNTCFFNAVMQNLAQTYTLTDLMNEIKESSTKLKIFPSSDSQLDPLVVELSRPGPLTSALFLFLHSMKETEKGPLSPKVLFNQLCQKAPRFKDFQQQDSQELLHYLLDAVRTEETKRIQASILKAFNNPTTKTADDETRKKVKAYGKEGVKMNFIDRIFIGELTSTVMCEECANISTVKDPFIDISLPIIEERVSKPLLWGRMNKYRSLRETDHDRYSGNVTIENIHQPRAAKKHSSSKDKERGWSWRPLSLANSHRNRKPNTTSSHL

SEQ ID NO: 8672 - protein, 161 aa, Artificial Sequence
  Synthetic polypeptide
LSRPGPLTSALFLFLHSMKETEKGPLSPKVLFNQLCQKAPRFKDFQQQDSQELLHYLLDAVRTEETKISTVKDPFIDISLPIIEERVSKPLLWGRMNKYRSLRETDHDRYSGNVTIENIHQPRAAKKHSSSKDKERGWSWRPLSLANSHRNRKPNTTSSHL

SEQ ID NO: 8673 - protein, 15 aa, Artificial Sequence
  Synthetic polypeptide
SNRTVRSFFIIFWMQ

SEQ ID NO: 8674 - protein, 267 aa, Artificial Sequence
  Synthetic polypeptide
MAGNFWQSSHYLQWILDKQDLLKERQKDLKFLSEEEYWKLQIFFTNVIQALGEHLKLRQQVIATATVYFKRFYARYSLKSIDPVLMAPTCVFLASKVEEFGVVSNTRLIAAATSVLKTRFSYAFPKEFPYRMNHILECEFYLLELMDCCLIVYHPYRPLLQYVQDMGQEDMLLPLAWRIVNDTYRTDLCLLYPPFMIALACLHVACVVQQKDARQWFAELSVDMEKILEIIRVILKLYEQWKNFDERKEMATILSKMPKPKPPPNRR

SEQ ID NO: 8675 - protein, 266 aa, Artificial Sequence
  Synthetic polypeptide
MAGNFWQSSHYLQWILDKQDLLKERQKDLKFLSEEEYWKLQIFFTNVIQALGEHLKLRQQVIATATVYFKRFYARYSLKSIDPVLMAPTCVFLASKVEEFGVVSNTRLIAAATSVLKTRFSYAFPKEFPYRMNHILECEFYLLELMDCCLIVYHPYRPLLQYVQDMGQEDMLLPLAWIVNDTYRTDLCLLYPPFMIALACLHVACVVQQKDARQWFAELSVDMEKILEIIRVILKLYEQWKNFDERKEMATILSKMPKPKPPPNRR

SEQ ID NO: 8676 - protein, 182 aa, Artificial Sequence
  Synthetic polypeptide
MAPTCVFLASKVEEFGVVSNTRLIAAATSVLKTRFSYAFPKEFPYRMNHILECEFYLLELMDCCLIVYHPYRPLLQYVQDMGQEDMLLPLAWRIVNDTYRTDLCLLYPPFMIALACLHVACVVQQKDARQWFAELSVDMEKILEIIRVILKLYEQWKNFDERKEMATILSKMPKPKPPPNRR

SEQ ID NO: 8677 - protein, 213 aa, Artificial Sequence
  Synthetic polypeptide
LKLRQQVIATATVYFKRFYARYSLKSIDPVLMAPTCVFLASKVEEFGVVSNTRLIAAATSVLKTRFSYAFPKEFPYRMNHILECEFYLLELMDCCLIVYHPYRPLLQYVQDMGQEDMLLPLAWRIVNDTYRTDLCLLYPPFMIALACLHVACVVQQKDARQWFAELSVDMEKILEIIRVILKLYEQWKNFDERKEMATILSKMPKPKPPPNRR

SEQ ID NO: 8678 - protein, 270 aa, Artificial Sequence
  Synthetic polypeptide
MELRVLLCWASLAAALEETLLNTKLETADLKWVTFPQVDGQWEELSGLDEEQHSVRTYEVCDVQRAPGQAHWLRTGWVPRRGAVHVYATLRFTMLECLSLPRAGRSCKETFTVFYYESDADTATALTPAWMENPYIKVDTVAAEHLTRKRPGAEATGKVNVKTLRLGPLSKAGFYLAFQDQGACMALLSLHLFYKKCAQLTVNLTRFPETVPRELVVPVAGSCVVDAVPAPGPSPSLYCREDGQWAEQPVTGCSCAPGFEAAEGNTKCRA

SEQ ID NO: 8679 - protein, 64 aa, Artificial Sequence
  Synthetic polypeptide
MGDSDDEYDRRRRDKFRRERSDYDRSRERDERRRGDDWNDRHLENELRTCYFSVSCWYLLPVMK

SEQ ID NO: 8680 - protein, 71 aa, Artificial Sequence
  Synthetic polypeptide
MAPSDRAMGDSDDEYDRRRRDKFRRERSDYDRSRERDERRRGDDWNDRHLENELRTCYFSVSCWYLLPVMK

SEQ ID NO: 8681 - protein, 241 aa, Artificial Sequence
  Synthetic polypeptide
MQMSPALTCLVLGLALVFGEGSAVHHPPSYVAHLASDFGVRVFQQVAQASKDRNVVFSPYGVASVLAMLQLTTGGETQQQIQAAMGFKIDDKGMAPALRHLYKELMGPWNKDEISTTDAIFVQRDLKLVQGFMPHFFRLFRSTVKQVDFSEVERARFIINDWVKTHTKGMISNLLGKGAVDQLTRLVLVNALYFNGQWKTPFPDSSTHRRLFHKSDGSTVSVPMMAQTNKFNYTRLGDMHL

SEQ ID NO: 8682 - protein, 226 aa, Artificial Sequence
  Synthetic polypeptide
MQMSPALTCLVLGLALVFGEGSAVHHPPSYVAQASKDRNVVFSPYGVASVLAMLQLTTGGETQQQIQAAMGFKIDDKGMAPALRHLYKELMGPWNKDEISTTDAIFVQRDLKLVQGFMPHFFRLFRSTVKQVDFSEVERARFIINDWVKTHTKGMISNLLGKGAVDQLTRLVLVNALYFNGQWKTPFPDSSTHRRLFHKSDGSTVSVPMMAQTNKFNYTRLGDMHL

SEQ ID NO: 8683 - protein, 154 aa, Artificial Sequence
  Synthetic polypeptide
MMRFMLLFSRQGKLRLQKWYLATSDKERKKMVRELMQVVLARKPKMCSFLEWRDLKVVYKRYASLYFCCAIEGQDNELITLELIHRYVELLDKYFGSVCELDIIFNFEKAYFILDEFLMGGDVQDTSKKSVLKAIEQADLLQEISFPVFYLATL

SEQ ID NO: 8684 - protein, 124 aa, Artificial Sequence
  Synthetic polypeptide
VRRGRGGGSEGRGLHLRGSSGAALGVNRPVFPLVLRGLPCLGGCGSCYYSAGRENCGCKNGTWPLRTRNGRRWCASSCRLSWLESPRCAASWSGGTSKLSIRDMPASTSAAPSRAKTMSSSHWS

SEQ ID NO: 8685 - protein, 6 aa, Artificial Sequence
  Synthetic polypeptide
PTSGAP

SEQ ID NO: 8686 - protein, 584 aa, Artificial Sequence
  Synthetic polypeptide
MTSSGPGPRFLLLLPLLLPPAASASDRPRGRDPVNPEKLLVITVATAETEGYLRFLRSAEFFNYTVRTLGLGEEWRGGDVARTVGGGQKVRWLKKEMEKYADREDMIIMFVDSYDVILAGSPTELLKKFVQSGSRLLFSAESFCWPEWGLAEQYPEVGTGKRFLNSGGFIGFATTIHQIVRQWKYKDDDDDQLFYTRLYLDPGLREKLSLNLDHKSRIFQNLNGALDEVVLKFDRNRVRIRNVAYDTLPIVVHGNGPTKLQLNYLGNYVPNGWTPEGGCGFCNQDRRTLPGGQPPPRVFLAVFVEQPTPFLPRFLQRLLLLDYPPDRVTLFLHNNEVFHEPHIADSWPQLQDHFSAVKLVGPEEALSPGEARDMAMDLCRQDPECEFYFSLDADAVLTNLQTLRILIEENRKVIAPMLSRHGKLWSNFWGALSPDEYYARSEDYVELVQRKRVGVWNVPYISQAYVIRGDTLRMELPQRDVFSGSDTDPDMAFCKSFRDKGIFLHLSNQHEFGRLLATSRYDTEHLHPDLWQIFDNPVDWKEQYIHENYSRALEGEGIVEQFQLLGSLRREDRLSPEGRGCSEL

SEQ ID NO: 8687 - protein, 57 aa, Artificial Sequence
  Synthetic polypeptide
MKLALLLPWACCCLCGSALATGFLYPFSAAALQQHGYPEPGAGSPGSGYASRRRRRL

SEQ ID NO: 8688 - protein, 47 aa, Artificial Sequence
  Synthetic polypeptide
MNAPPAFESFLLFEGEKNRAWWQMPVIPATQKAEAGESLEPGKWRLR

SEQ ID NO: 8689 - protein, 101 aa, Artificial Sequence
  Synthetic polypeptide
MNAPPAFESFLLFEGEKQLLKDPQVLFAGYKVPHPLEHKIIIRVQTTPDYSPQEAFTNAITDLISELSLLEERFRAGHGGSHLESQNFRRLRWEDHLSPGI

SEQ ID NO: 8690 - protein, 131 aa, Artificial Sequence
  Synthetic polypeptide
MNAPPAFESFLLFEGEKITINKDTKVPNACLFTINKEDHTLGNIIKSQLLKDPQVLFAGYKVPHPLEHKIIIRVQTTPDYSPQEAFTNAITDLISELSLLEERFRAGHGGSHLESQNFRRLRWEDHLSPGI

SEQ ID NO: 8691 - protein, 122 aa, Artificial Sequence
  Synthetic polypeptide
MNAPPAFESFLLFEGEKQLLKDPQVLFAGYKVPHPLEHKIIIRVQTTPDYSPQEAFTNAITDLISELSLLEERFRRAALPLHSLCLSCSNMARRACFPFAFCRDCQFPEASPATLPVQPAEL

SEQ ID NO: 8692 - protein, 152 aa, Artificial Sequence
  Synthetic polypeptide
MNAPPAFESFLLFEGEKITINKDTKVPNACLFTINKEDHTLGNIIKSQLLKDPQVLFAGYKVPHPLEHKIIIRVQTTPDYSPQEAFTNAITDLISELSLLEERFRRAALPLHSLCLSCSNMARRACFPFAFCRDCQFPEASPATLPVQPAEL

SEQ ID NO: 8693 - protein, 46 aa, Artificial Sequence
  Synthetic polypeptide
MNAPPAFESFLLFEGENRAWWQMPVIPATQKAEAGESLEPGKWRLR

SEQ ID NO: 8694 - protein, 46 aa, Artificial Sequence; identical to SEQ ID NO: 8693
  Synthetic polypeptide

SEQ ID NO: 8695 - protein, 131 aa, Artificial Sequence
  Synthetic polypeptide
MNAPPAFESFLLFEGEKITINKDTKVPKACLFTINKEDHTLGNIIKSQLLKDPQVLFAGYKVPHPLEHKIIIRVQTTPDYSPQEAFTNAITDLISELSLLEERFRAGHGGSHLESQNFRRLRWEDHLSPGI

SEQ ID NO: 8696 - protein, 152 aa, Artificial Sequence
  Synthetic polypeptide
MNAPPAFESFLLFEGEKITINKDTKVPKACLFTINKEDHTLGNIIKSQLLKDPQVLFAGYKVPHPLEHKIIIRVQTTPDYSPQEAFTNAITDLISELSLLEERFRRAALPLHSLCLSCSNMARRACFPFAFCRDCQFPEASPATLPVQPAEL

SEQ ID NO: 8697 - protein, 142 aa, Artificial Sequence
  Synthetic polypeptide
MNAPPAFESFLLFEGEKITINKDTKVPKACLFTINKEDHTLGNIIKSQLLKDPQVLFAGYKVPHPLEHKIIIRVQTTPDYSPQEAFTNAITDLINVPASPSPSAVIVSFLRPPQPRFLYSLQNCESIKPLFFINYPVSHSSL

SEQ ID NO: 8698 - protein, 35 aa, Artificial Sequence
  Synthetic polypeptide
MNAPPAFESFLLFEGEKITINKDTKTCLLPLRLLP

SEQ ID NO: 8699 - protein, 46 aa, Artificial Sequence
  Synthetic polypeptide
MNAPPAFESFLLFEGEKRACFPFAFCRDCQFPEASPATLPVQPAEL

SEQ ID NO: 8700 - protein, 46 aa, Artificial Sequence; identical to SEQ ID NO: 8693
  Synthetic polypeptide

SEQ ID NO: 8701 - protein, 46 aa, Artificial Sequence; identical to SEQ ID NO: 8693
  Synthetic polypeptide

SEQ ID NO: 8702 - protein, 177 aa, Artificial Sequence
  Synthetic polypeptide
MTPELMIKACSFYTGHLVKTHFCTWRDIARTNENVVLAEKMNRAVTCYNFRLQKSVFHHWHSYMEDQKEKLKNILLRIQQIIYCHKLTIILTKWRNTARHKSKKKEDELILKHELQLKKWKNRLILKRAAAEESNFPERSSSEVFLVDETLKCDISLLPERAILQLEEKNWSLPIKR

SEQ ID NO: 8703 - protein, 267 aa, Artificial Sequence
  Synthetic polypeptide
MASLRNANPRLKNYFKENYIPQVCEALLCGILVTCPEDPLRYLEGMIMVIIKSGLQNLLWDMCITPSMKPNIRRLSETYLEQLFELDDQLMTPELMIKACSFYTGHLVKTHFCTWRDIARTNENVVLAEKMNRAVTCYNFRLQKSVFHHWHSYMEDQKEKLKNILLRIQQIIYCHKLTIILTKWRNTARHKSKKKEDELILKHELQLKKWKNRLILKRAAAEESNFPERSSSEVFLVDETLKCDISLLPERAILQLEEKNWSLPIKR

SEQ ID NO: 8704 - protein, 97 aa, Artificial Sequence
  Synthetic polypeptide
MASLRNANPRLKNYFKENYIPQVCEALLCGILVTCPEDPLRYLEGMIMVIIKSGLQNLLWDMCITPSMKPNIRRLSETYLEQLFELDDQLVAALESL

SEQ ID NO: 8705 - protein, 60 aa, Artificial Sequence
  Synthetic polypeptide
MASLRNANPRLKNYFKENYIPQVCEALLCGILVTCPEDPLRYLEGMIMVIIKSGLQNLLW

SEQ ID NO: 8706 - protein, 343 aa, Artificial Sequence
  Synthetic polypeptide
MAAAAARVVLSSAARRRLWGFSESLLIRGAAGRSLYFGENRLRSTQAATQVVLNVPETRVTCLESGLRVASEDSGLSTCTVGLWIDAGSRYENEKNNGTAHFLEHMAFKGTKKRSQLDLELEIENMGAHLNAYTSREQTVYYAKAFSKDLPRAVEILADIIQNSTLGEAEIERERGVILREMQEVETNLQEVVFDYLHATAYQNTALGRTILGPTENIKSISRKDLVDYITTHYKGPRIVLAAAGGVSHDELLDLAKFHFGDSLCTHKGEIPALPPCKFTGSEIRVRDDKMPLAHLAIAVEAVGWAHPDTICLMVANTLIGNWDRSFGGGMGSGNQFSTDTEE

SEQ ID NO: 8707 - protein, 238 aa, Artificial Sequence
  Synthetic polypeptide
MAFKGTKKRSQLDLELEIENMGAHLNAYTSREQTVYYAKAFSKDLPRAVEILADIIQNSTLGEAEIERERGVILREMQEVETNLQEVVFDYLHATAYQNTALGRTILGPTENIKSISRKDLVDYITTHYKGPRIVLAAAGGVSHDELLDLAKFHFGDSLCTHKGEIPALPPCKFTGSEIRVRDDKMPLAHLAIAVEAVGWAHPDTICLMVANTLIGNWDRSFGGGMGSGNQFSTDTEE

SEQ ID NO: 8708 - protein, 115 aa, Artificial Sequence
  Synthetic polypeptide
RGPGGAHCGRIPAPAPSVPAGPDSRVRGRSCAQARAGRRARAVPRGAEGPGKEAEKGTEERGEAASAGGRPCGPAPACQALGGRTGPGLPLQMGPKAQELEVSEDEADVAPAAHV

SEQ ID NO: 8709 - protein, 195 aa, Artificial Sequence
  Synthetic polypeptide
MAKQKRKVPEVTEKKNKKLKKASAEGPLLGPEAAPSGEGAGSKGEAVLRPGLDAEPELSPEEQRVLERKLKKERKKEERQRLREAGLVAQHPPARRSGAELALDYLCRWAQKHKNWRFQKTRQTWLLLHMYDSDKVPDEHFSTLLAYLEGLQGRARELTVQKAEALMRELDEEGSDPPLPGRAQRIRQEGLWSSP

SEQ ID NO: 8710 - protein, 163 aa, Artificial Sequence
  Synthetic polypeptide
GPQDASTCFPLGEAVLRPGLDAEPELSPEEQRVLERKLKKERKKEERQRLREAGLVAQHPPARRSGAELALDYLCRWAQKHKNWRFQKTRQTWLLLHMYDSDKVPDEHFSTLLAYLEGLQGRARELTVQKAEALMRELDEEGSDPPLPGRAQRIRQEGLWSSP

SEQ ID NO: 8711 - protein, 278 aa, Artificial Sequence
  Synthetic polypeptide
MPHLENVVLCRESQVSILQSLFGERHHFSFPSIFIYGHTASGKTYVTQTLLKTLELPHVFVNCVECFTLRLLLEQILNKLNHLSSSEDGCSTEITCETFNDFVRLFKQVTTAENLKDQTVYIVLDKAEYLRDMEANLLPGFLRLQELADRNVTVLFLSEIVWEKFRPNTGCFEPFVLYFPDYSIGNLQKILSHDHPPEYSADFYAAYINILLGVFYTVCRDLKELRHLAVLNFPKYCEPVVKGEASERDTRKLWRNIEPHLKKAMQTVYLREISRKTG

SEQ ID NO: 8712 - protein, 146 aa, Artificial Sequence
  Synthetic polypeptide
MEANLLPGFLRLQELADRNVTVLFLSEIVWEKFRPNTGCFEPFVLYFPDYSIGNLQKILSHDHPPEYSADFYAAYINILLGVFYTVCRDLKELRHLAVLNFPKYCEPVVKGEASERDTRKLWRNIEPHLKKAMQTVYLREISRKTG

SEQ ID NO: 8713 - protein, 285 aa, Artificial Sequence
  Synthetic polypeptide
MPHLENVVLCRESQVSILQSLFGERHHFSFPSIFIYGHTASGKTYVTQTLLKTLELPHVFVNCVECFTLRLLLEQILNKLNHLSSSEDGCSTEITCETFNDFVRLFKQVTTAENLKDQTVYIVLDKAEYLRDMEANLLPGFLRLQELADRNVTVLFLSEIVWEKFRPNTGCFEPFVLYFPDYSIGNLQKILSHDHPPEYSADFYAAYINILLGVFYTVCRDLKELRHLAVLNFPKYCEPVVKGEASERDTRKLWRNIEPHLKKAMQTVYLREISSTLGGQGRTIA

SEQ ID NO: 8714 - protein, 153 aa, Artificial Sequence
  Synthetic polypeptide
MEANLLPGFLRLQELADRNVTVLFLSEIVWEKFRPNTGCFEPFVLYFPDYSIGNLQKILSHDHPPEYSADFYAAYINILLGVFYTVCRDLKELRHLAVLNFPKYCEPVVKGEASERDTRKLWRNIEPHLKKAMQTVYLREISSTLGGQGRTIA

SEQ ID NO: 8715 - protein, 174 aa, Artificial Sequence
  Synthetic polypeptide
MLPAGEIGASPAAPCCSESGDERKNLEEKSDINVTVLIGSKQVSEGTDNGDLPSYVSAFIEKEVGNDLKSLKKLDKLIEQRTVSKMQLEEQVLTISSEIPKRIRSALKNAEESKQFLNQFLEQETHLFSAINSHLLTAQPWMDDLGTMISQIEEIERHLAYLKWISQIEELRKK

SEQ ID NO: 8716 - protein, 143 aa, Artificial Sequence
  Synthetic polypeptide
MLPAGEIGASPAAPCCSESGDERKNLEEKKKEVGNDLKSLKKLDKLIEQRTVSKMQLEEQVLTISSEIPKRIRSALKNAEESKQFLNQFLEQETHLFSAINSHLLTAQPWMDDLGTMISQIEEIERHLAYLKWISQIEELRKK

SEQ ID NO: 8717 - protein, 365 aa, Artificial Sequence
  Synthetic polypeptide
MNPAAEAEFNILLATDSYKVTHYKQYPPNTSKVYSYFECREKKTENSKLRKVKYEETVFYGLQYILNKYLKGKVVTKEKIQEAKDVYKEHFQDDVFNEKGWNYILEKYDGHLPIEIKAVPEGFVIPRGNVLFTVENTDPECYWLTNWIETILVQSWYPITVATNSREQKKILAKYLLETSGNLDGLEYKLHDFGYRGVSSQETAGIGASAHLVNFKGTDTVAGLALIKKYYGTKDPVPGYSVPAAEHSTITAWGKDHEKDAFEHIVTQFSSVPVSVVSDSYDIYNACEKIWGEDLRHLIVSRSTQAPLIIRPDSGNPLDTVLKVLEILGKKFPVTENSKGYKLLPPYLRVIQGDGVDINTLQEDP

SEQ ID NO: 8718 - protein, 72 aa, Artificial Sequence
  Synthetic polypeptide
MTLQWAAVATFLYAEIGLILIFCLPFIPPQRWQKIFSFNVWGKIATFWNKAFLTIIILLIVLFLARCGDVHP

SEQ ID NO: 8719 - protein, 29 aa, Artificial Sequence
  Synthetic polypeptide
IATFWNKAFLTIIILLIVLFLARCGDVHP

SEQ ID NO: 8720 - protein, 78 aa, Artificial Sequence
  Synthetic polypeptide
MTLQWAAVATFLYAEIGLILIFCLPFIPPQRWQKIFSFNVWGKIATFWNKAFLTIIILLIVLFLGVVMCTHSPSYSGG

SEQ ID NO: 8721 - protein, 35 aa, Artificial Sequence
  Synthetic polypeptide
IATFWNKAFLTIIILLIVLFLGVVMCTHSPSYSGG

SEQ ID NO: 8722 - protein, 116 aa, Artificial Sequence
  Synthetic polypeptide
MTLQWAAVATFLYAEIGLILIFCLPFIPPQRWQKIFSFNVWGKIATFWNKAFLTIIILLIVLFLDAVREVRKYSSVHTIEKSSTSRPDAYEHTQMKLFRSQRNLYISGFSLFFWLS

SEQ ID NO: 8723 - protein, 22 aa, Artificial Sequence
  Synthetic polypeptide
MKLFRSQRNLYISGFSLFFWLS

SEQ ID NO: 8724 - protein, 73 aa, Artificial Sequence
  Synthetic polypeptide
IATFWNKAFLTIIILLIVLFLDAVREVRKYSSVHTIEKSSTSRPDAYEHTQMKLFRSQRNLYISGFSLFFWLS

SEQ ID NO: 8725 - skipped

SEQ ID NO: 8726 - protein, 251 aa, Artificial Sequence
  Synthetic polypeptide
MTLQWAAVATFLYAEIGLILIFCLPFIPPQRWQKIFSFNVWGKIATFWNKAFLTIIILLIVLFLDAVREVRKYSSVHTIEKSSTSRPDAYEHTQMKLFRSQRNLYISGFSLFFWLVLRRLVTLITQLAKELSNKGVLKTQAENTNKAAKKFMEENEKLKRILKSHGKDEECVLEAENKKLVEDQEKLKTELRKTSDALSKAQNDVMEMKMQSERLSKEYDQLLKEHSELQLHLCLYRSKGRYYHTEEEKAQ

SEQ ID NO: 8727 - protein, 157 aa, Artificial Sequence
  Synthetic polypeptide
MKLFRSQRNLYISGFSLFFWLVLRRLVTLITQLAKELSNKGVLKTQAENTNKAAKKFMEENEKLKRILKSHGKDEECVLEAENKKLVEDQEKLKTELRKTSDALSKAQNDVMEMKMQSERLSKEYDQLLKEHSELQLHLCLYRSKGRYYHTEEEKAQ

SEQ ID NO: 8728 - protein, 208 aa, Artificial Sequence
  Synthetic polypeptide
IATFWNKAFLTIIILLIVLFLDAVREVRKYSSVHTIEKSSTSRPDAYEHTQMKLFRSQRNLYISGFSLFFWLVLRRLVTLITQLAKELSNKGVLKTQAENTNKAAKKFMEENEKLKRILKSHGKDEECVLEAENKKLVEDQEKLKTELRKTSDALSKAQNDVMEMKMQSERLSKEYDQLLKEHSELQLHLCLYRSKGRYYHTEEEKAQ

SEQ ID NO: 8729 - skipped

SEQ ID NO: 8730 - protein, 249 aa, Artificial Sequence
  Synthetic polypeptide
MTLQWAAVATFLYAEIGLILIFCLPFIPPQRWQKIFSFNVWGKIATFWNKAFLTIIILLIVLFLDAVREVRKYSSVHTIEKSSTSRPDAYEHTQMKLFRSQRNLYISGFSLFFWLVLRRLVTLITQLAKELSNKGVLKTQAENTNKAAKKFMEENEKLKRILKSHGKDEECVLEAENKKLVEDQEKLKTELRKTSDALSKAQNDVMEMKMQSERLSKEYDQLLKEHSELQIMRSRPCKVEQQGAVSLTP

SEQ ID NO: 8731 - protein, 155 aa, Artificial Sequence
  Synthetic polypeptide
MKLFRSQRNLYISGFSLFFWLVLRRLVTLITQLAKELSNKGVLKTQAENTNKAAKKFMEENEKLKRILKSHGKDEECVLEAENKKLVEDQEKLKTELRKTSDALSKAQNDVMEMKMQSERLSKEYDQLLKEHSELQIMRSRPCKVEQQGAVSLTP

SEQ ID NO: 8732 - protein, 206 aa, Artificial Sequence
  Synthetic polypeptide
IATFWNKAFLTIIILLIVLFLDAVREVRKYSSVHTIEKSSTSRPDAYEHTQMKLFRSQRNLYISGFSLFFWLVLRRLVTLITQLAKELSNKGVLKTQAENTNKAAKKFMEENEKLKRILKSHGKDEECVLEAENKKLVEDQEKLKTELRKTSDALSKAQNDVMEMKMQSERLSKEYDQLLKEHSELQIMRSRPCKVEQQGAVSLTP

SEQ ID NO: 8733 - skipped

SEQ ID NO: 8734 - protein, 1674 aa, Artificial Sequence
  Synthetic polypeptide
MDCPLSAPTPPPPLVRFFRAPLPACVPPTLLPVLPAALCRARVRAQEPEFSYGCAEGSCYPATGDLLIGRAQKLSVTSTCGLHKPEPYCIVSHLQEDKKCFICNSQDPYHETLNPDSHLIENVVTTFAPNRLKIWWQSENGVENVTIQLDLEAEFHFTHLIMTFKTFRPAAMLIERSSDFGKTWGVYRYFAYDCEASFPGISTGPMKKVDDIICDSRYSDIEPSTEGEVIFRALDPAFKIEDPYSPRIQNLLKITNLRIKFVKLHTLGDNLLDSRMEIREKYYYAVYDMVVRGNCFCYGHASECAPVDGFNEEVEGMVHGHCMCRHNTKGLNCELCMDFYHDLPWRPAEGRNSNACKKCNCNEHSISCHFDMAVYLATGNVSGGVCDDCQHNTMGRNCEQCKPFYYQHPERDIRDPNFCERCTCDPAGSQNEGICDSYTDFSTGLIAGQCRCKLNVEGEHCDVCKEGFYDLSSEDPFGCKSCACNPLGTIPGGNPCDSETGHCYCKRLVTGQHCDQCLPEHWGLSNDLDGCRPCDCDLGGALNNSCFAESGQCSCRPHMIGRQCNEVEPGYYFATLDHYLYEAEEANLGPGVSIVERQYIQDRIPSWTGAGFVRVPEGAYLEFFIDNIPYSMEYDILIRYEPQLPDHWEKAVITVQRPGRIPTSSRCGNTIPDDDNQVVSLSPGSRYVVLPRPVCFEKGTNYTVRLELPQYTSSDSDVESPYTLIDSLVLMPYCKSLDIFTVGGSGDGVVTNSAWETFQRYRCLENSRSVVKTPMTDVCRNIIFSISALLHQTGLACECDPQGSLSSVCDPNGGQCQCRPNVVGRTCNRCAPGTFGFGPSGCKPCECHLQGSVNAFCNPVTGQCHCFQGVYARQCDRCLPGHWGFPSCQPCQCNGHADDCDPVTGECLNCQDYTMGHNCERCLAGYYGDPIIGSGDHCRPCPCPDGPDSGRQFARSCYQDPVTLQLACVCDPGYIGSRCDDCASGYFGNPSEVGGSCQPCQCHNNIDTTDPEACDKETGRCLKCLYHTEGEHCQFCRFGYYGDALQQDCRKCVCNYLGTVQEHCNGSDCQCDKATGQCLCLPNVIGQNCDRCAPNTWQLASGTGCDPCNCNAAHSFGPSCNEFTGQCQCMPGFGGRTCSECQELFWGDPDVECRACDCDPRGIETPQCDQSTGQCVCVEGVEGPRCDKCTRGYSGVFPDCTPCHQCFALWDVIIAELTNRTHRFLEKAKALKISGVIGPYRETVDSVERKVSEIKDILAQSPAAEPLKNIGNLFEEAEKLIKDVTEMMAQVEVKLSDTTSQSNSTAKELDSLQTEAESLDNTVKELAEQLEFIKNSDIRGALDSITKYFQMSLEAEERVNASTTEPNSTVEQSALMRDRVEDVMMERESQFKEKQEEQARLLDELAGKLQSLDLSAAAEMTCGTPPGASCSETECGGPNCRTDEGERKCGGPGCGGLVTVAHNAWQKAMDLDQDVLSALAEVEQLSKMVSEAKLRADEAKQSAEDILLKTNATKEKMDKSNEELRNLIKQIRNFLTQDSADLDSIEAVANEVLKMEMPSTPQQLQNLTEDIRERVESLSQVEVILQHSAADIARAEMLLEEAKRASKSATDVKVTADMVKEALEEAEKAQVAAEKAIKQADEDIQGTQNLLTSPGAAVCACSPSHLGGGGERIT

SEQ ID NO: 8735 - protein, 1650 aa, Artificial Sequence
  Synthetic polypeptide
MGLLQLLAFSFLALCRARVRAQEPEFSYGCAEGSCYPATGDLLIGRAQKLSVTSTCGLHKPEPYCIVSHLQEDKKCFICNSQDPYHETLNPDSHLIENVVTTFAPNRLKIWWQSENGVENVTIQLDLEAEFHFTHLIMTFKTFRPAAMLIERSSDFGKTWGVYRYFAYDCEASFPGISTGPMKKVDDIICDSRYSDIEPSTEGEVIFRALDPAFKIEDPYSPRIQNLLKITNLRIKFVKLHTLGDNLLDSRMEIREKYYYAVYDMVVRGNCFCYGHASECAPVDGFNEEVEGMVHGHCMCRHNTKGLNCELCMDFYHDLPWRPAEGRNSNACKKCNCNEHSISCHFDMAVYLATGNVSGGVCDDCQHNTMGRNCEQCKPFYYQHPERDIRDPNFCERCTCDPAGSQNEGICDSYTDFSTGLIAGQCRCKLNVEGEHCDVCKEGFYDLSSEDPFGCKSCACNPLGTIPGGNPCDSETGHCYCKRLVTGQHCDQCLPEHWGLSNDLDGCRPCDCDLGGALNNSCFAESGQCSCRPHMIGRQCNEVEPGYYFATLDHYLYEAEEANLGPGVSIVERQYIQDRIPSWTGAGFVRVPEGAYLEFFIDNIPYSMEYDILIRYEPQLPDHWEKAVITVQRPGRIPTSSRCGNTIPDDDNQVVSLSPGSRYVVLPRPVCFEKGTNYTVRLELPQYTSSDSDVESPYTLIDSLVLMPYCKSLDIFTVGGSGDGVVTNSAWETFQRYRCLENSRSVVKTPMTDVCRNIIFSISALLHQTGLACECDPQGSLSSVCDPNGGQCQCRPNVVGRTCNRCAPGTFGFGPSGCKPCECHLQGSVNAFCNPVTGQCHCFQGVYARQCDRCLPGHWGFPSCQPCQCNGHADDCDPVTGECLNCQDYTMGHNCERCLAGYYGDPIIGSGDHCRPCPCPDGPDSGRQFARSCYQDPVTLQLACVCDPGYIGSRCDDCASGYFGNPSEVGGSCQPCQCHNNIDTTDPEACDKETGRCLKCLYHTEGEHCQFCRFGYYGDALQQDCRKCVCNYLGTVQEHCNGSDCQCDKATGQCLCLPNVIGQNCDRCAPNTWQLASGTGCDPCNCNAAHSFGPSCNEFTGQCQCMPGFGGRTCSECQELFWGDPDVECRACDCDPRGIETPQCDQSTGQCVCVEGVEGPRCDKCTRGYSGVFPDCTPCHQCFALWDVIIAELTNRTHRFLEKAKALKISGVIGPYRETVDSVERKVSEIKDILAQSPAAEPLKNIGNLFEEAEKLIKDVTEMMAQVEVKLSDTTSQSNSTAKELDSLQTEAESLDNTVKELAEQLEFIKNSDIRGALDSITKYFQMSLEAEERVNASTTEPNSTVEQSALMRDRVEDVMMERESQFKEKQEEQARLLDELAGKLQSLDLSAAAEMTCGTPPGASCSETECGGPNCRTDEGERKCGGPGCGGLVTVAHNAWQKAMDLDQDVLSALAEVEQLSKMVSEAKLRADEAKQSAEDILLKTNATKEKMDKSNEELRNLIKQIRNFLTQDSADLDSIEAVANEVLKMEMPSTPQQLQNLTEDIRERVESLSQVEVILQHSAADIARAEMLLEEAKRASKSATDVKVTADMVKEALEEAEKAQVAAEKAIKQADEDIQGTQNLLTSPGAAVCACSPSHLGGGGERIT

SEQ ID NO: 8736 - protein, 191 aa, Artificial Sequence
  Synthetic polypeptide
MAQSQGWVKRYIKAFCKGFFVAVPVAVTFLDRVACVARVEGASMQPSLNPGGSQSSDVVLLNHWKVRNFEVHRGDIVSLVSPKNPEQKIIKRVIALEGDIVRTIGHKNRYVKVPRGHIWVEGDHHGHSFDSNSFGPHFCLLPPCEEGHVCFPFCYDCKFPHSNCESIKPLSFINYPVLGMSLLVISSMIME

SEQ ID NO: 8737 - protein, 173 aa, Artificial Sequence
  Synthetic polypeptide
MVGEDIEARRHFLNLCCQPRRVSLRLKKCISEVKDKAGSAQCHPLEQRAGIPSGEWRQLKERSPKNPEQKIIKRVIALEGDIVRTIGHKNRYVKVPRGHIWVEGDHHGHSFDSNSFGPHFCLLPPCEEGHVCFPFCYDCKFPHSNCESIKPLSFINYPVLGMSLLVISSMIME

SEQ ID NO: 8738 - protein, 140 aa, Artificial Sequence
  Synthetic polypeptide
MAQSQGWVKRYIKAFCKGFFVAVPVAVTFLDRVACVARVEGASMQPSLNPGGSQSSDVVLLNHWKVRNFEVHRGDIVSLVSPKNPEQKIIKRVIALEGDIVRTIGHKNRYVKVPRGHIWVEGDHHGHSFDSNSFGPNKPA

SEQ ID NO: 8739 - protein, 122 aa, Artificial Sequence
  Synthetic polypeptide
MVGEDIEARRHFLNLCCQPRRVSLRLKKCISEVKDKAGSAQCHPLEQRAGIPSGEWRQLKERSPKNPEQKIIKRVIALEGDIVRTIGHKNRYVKVPRGHIWVEGDHHGHSFDSNSFGPNKPA

SEQ ID NO: 8740 - protein, 142 aa, Artificial Sequence
  Synthetic polypeptide
MAQSQGWVKRYIKAFCKGFFVAVPVAVTFLDRVACVARVEGASMQPSLNPGGSQSSDVVLLNHWKVRNFEVHRGDIVSLVSPKNPEQKIIKRVIALEGDIVRTIGHKNRYVKVPRGHIWVEGDHHGHSFDSNSFGPHSGSHL

SEQ ID NO: 8741 - protein, 124 aa, Artificial Sequence
  Synthetic polypeptide
MVGEDIEARRHFLNLCCQPRRVSLRLKKCISEVKDKAGSAQCHPLEQRAGIPSGEWRQLKERSPKNPEQKIIKRVIALEGDIVRTIGHKNRYVKVPRGHIWVEGDHHGHSFDSNSFGPHSGSHL

SEQ ID NO: 8742 - protein, 107 aa, Artificial Sequence
  Synthetic polypeptide
MAQSQGWVKRYIKAFCKGFFVAVPVAVTFLDRVACVARVEGASMQPSLNPGGSQSSDVVLLNHWKVRNFEVHRGDIVSLVSPKNPEQKIIKRVIALEGDIVRWGPEI

SEQ ID NO: 8743 - protein, 89 aa, Artificial Sequence
  Synthetic polypeptide
MVGEDIEARRHFLNLCCQPRRVSLRLKKCISEVKDKAGSAQCHPLEQRAGIPSGEWRQLKERSPKNPEQKIIKRVIALEGDIVRWGPEI

SEQ ID NO: 8744 - protein, 83 aa, Artificial Sequence
  Synthetic polypeptide
MAQSQGWVKRYIKAFCKGFFVAVPVAVTFLDRVACVARVEGASMQPSLNPGGSQSSDVVLLNHWKVRNFEVHRGDIVSLVGNW

SEQ ID NO: 8745 - protein, 645 aa, Artificial Sequence
  Synthetic polypeptide
MIVQMTVILKLEMPQDSLILEKSQNWSSQKMDHILICCVCLGDNSEDADEIIQCDNCGITVHEGCYGVDGESDSIMSSASENSTEPWFCDACKCGVSPSCELCPNQDGIFKETDAGRWVHIVCALYVPGVAFGDIDKLRPVTLTEMNYSKYGAKECSFCEDPRFARTGVCISCDAGMCRAYFHVTCAQKEGLLSEAAAEEDIADPFFAYCKQHADRLDRKWKRKNYLALQSYCKMSLQEREKQLSPEAQARINARLQQYRAKAELARSTRPQAWVPREKLPRPLTSSASAIRKLMRKAELMGISTDIFPVDNSDTSSSVDGRRKHKQPALTADFVNYYFERNMRMIQIQENMAEQKNIKDKLENEQEKLHVEYNKLCESLEELQNLNGKLRSEGQGIWALLGRITGQKLNIPAILRAPKERKPSKKEGGTQKTSTLPAVLYSCGICKKNHDQHLLLLCDTCKLHYHLGCLDPPLTRMPRKTKNSYWQCSECDQAGSSDMEADMAMETLPDGTKRSRRQIKEPVKFVPQDVPPEPKKIPIRNTRTRGRKRSFVPEEEKHEERVPRERRQRQSVLQKKPKAEDLRTECATCKGTGDNENLVRCDECRLCYHFGCLDPPLKKSPKQTGYGWICQECDSSSSKLEQTKP

SEQ ID NO: 8746 - protein, 393 aa, Artificial Sequence
  Synthetic polypeptide
MCKSLRYCFSHCLYLAMTRLEEVNREVNMHSSVRYLGYLARINLLVAICLGLYVRWEKTANSLILVIFILGLFVLGIASILYYYFSMEAASLSLSNLWFGFLLGLLCFLDNSSFKNDVKEESTKYLLLTSIVLRILCSLVERISGYVRHRPTLLTTVEFLELVGFAIASTTMLVEKSLSVILLVVALAMLIIDLRMKSFLAIPNLVIFAVLLFFSSLETPKNPIAFACFFICLITDPFLDIYFSGLSVTERWKPFLYRGRICRRLSVVFAGMIELTFFILSAFKLRDTHLWYFVIPGFSIFGIFWMICHIIFLLTLWGFHTKLNDCHKVYFTHRTDYNSLDRIMASKGMRHFCLISEQLVFFSLLATAILGAVSWQVIKEDFNKWKNTPYFLG

SEQ ID NO: 8747 - protein, 33 aa, Artificial Sequence
  Synthetic polypeptide
FFSLLATAILGAVSWQVIKEDFNKWKNTPYFLG

SEQ ID NO: 8748 - protein, 45 aa, Artificial Sequence
  Synthetic polypeptide
MRHFCLISEQLVFFSLLATAILGAVSWQVIKEDFNKWKNTPYFLG

SEQ ID NO: 8749 - protein, 261 aa, Artificial Sequence
  Synthetic polypeptide
MADLEEQLSDEEKVRIAAKFIIHAPPGEFNEVFNDVRLLLNNDNLLREGAAHAFAQYNLDQFTPVKIEGYEDQVLITEHGDLGNGKFLDPKNRICFKFDHLRKEATDPRPCEVENAVESWRTSVETALRAYVKEHYPNGVCTVYGKKIDGQQTIIACIESHQFQAKNFWNGRWRSEWKFTITPSTTQVVGILKIQVHYYEDGNVQLVSHKDIQDSLTVSNEVQTAKEFIKIVEAAENEYQPAQCEDKRMKTYDDPLSLNEW

SEQ ID NO: 8750 - protein, 29 aa, Artificial Sequence
  Synthetic polypeptide
MAFSLFIFLDGCLSQYCLLRFRQRKIFVE

SEQ ID NO: 8751 - protein, 37 aa, Artificial Sequence
  Synthetic polypeptide
MQRSPLEKASVVSKLFFSSERLRVTQKNIFALNMKNA

SEQ ID NO: 8752 - protein, 75 aa, Artificial Sequence
  Synthetic polypeptide
MGLQARRWASGSRGAAGPRRGVLQLLPLPLPLPLLLLLLLRPGAGRAAAQGEAEAPTLYLWKTGKLQNTDERNCQ

SEQ ID NO: 8753 - protein, 155 aa, Artificial Sequence
  Synthetic polypeptide
MEFPDLGKHCSEKTCKQLDFLPVKCDACKQDFCKDHFPYAAHKCPFAFQKDVHVPVCPLCNTPIPVKKGQIPDVVVGDHIDRDCDSHPGKKKEKAGRYCCHLGSLQPPCLILLPQPAECLRLQARTATPDWFSFFFGGDGVSLCWPGWSPAPSRE

SEQ ID NO: 8754 - protein, 41 aa, Artificial Sequence
  Synthetic polypeptide
VMHVNKISVKIIFHTLHISVRLHSRRMFTSQYAHSVIPPSQ

SEQ ID NO: 8755 - protein, 689 aa, Artificial Sequence
  Synthetic polypeptide
MVCRPVFPCRRRFCPRPFLVGLVVAICLFYQTLTLRGSRKLTAAAPGAVPHTSTETQASRCKKGFSQDKQCFLLSGNAQETRKVKESMETHFGSHGRRAILYRPPFYSKTELQLHQHILTQHGYTVVIAEERLNAGLGPGLLEQGDLGSWDLLICLSSKKAEGTPCISKEVMCQLGLHQKANRLPEIQQPLCRKEGLCQIVRRFPELQLPVSPSVCLDQGMQLKPSTSSHLLKTVKPRVWKPGDWSREQLNETTVLAPHETIFRAEDLSVILKAYVLVTSLTPLRAFIHSTGTVWNPPKKKRFTVKLQTFFETFLRASSPQQAFDIMKEAIGKLLLAAEVFSETSTLGPKTFHRCRFCFQLLTFDIGYGSFMYPVVLQVHEHLNFQDYDNMDFEDQNTEEFLLNDTFNFLFPNESSLSIFSEIFQRLYRSDVFKGENYQKELNQCLSLEEINSIMTFIKELGSLGQFQLLFPSTTPGIQSLMHEFYDVANPVGNPGSVLTQYWSLLNVFEQFQFMNKKTQPHPLEWNSFTEDKNIEKPQVPFDAIENKKAAVPQIKNENKEIHCSDDENTPCHIKQIFTHPHLELNPDFHPKIKDYYCEVPFDVVTVTIGVETPKCLCKVHLYEQAGPSFASYPLGLGMNKISIFVVDESPAHGETLITYKLTIYREDRPSLPLFEAFTACGFVQHYSQ

SEQ ID NO: 8756 - protein, 469 aa, Artificial Sequence
  Synthetic polypeptide
MQLKPSTSSHLLKTVKPRVWKPGDWSREQLNETTVLAPHETIFRAEDLSVILKAYVLVTSLTPLRAFIHSTGTVWNPPKKKRFTVKLQTFFETFLRASSPQQAFDIMKEAIGKLLLAAEVFSETSTLGPKTFHRCRFCFQLLTFDIGYGSFMYPVVLQVHEHLNFQDYDNMDFEDQNTEEFLLNDTFNFLFPNESSLSIFSEIFQRLYRSDVFKGENYQKELNQCLSLEEINSIMTFIKELGSLGQFQLLFPSTTPGIQSLMHEFYDVANPVGNPGSVLTQYWSLLNVFEQFQFMNKKTQPHPLEWNSFTEDKNIEKPQVPFDAIENKKAAVPQIKNENKEIHCSDDENTPCHIKQIFTHPHLELNPDFHPKIKDYYCEVPFDVVTVTIGVETPKCLCKVHLYEQAGPSFASYPLGLGMNKISIFVVDESPAHGETLITYKLTIYREDRPSLPLFEAFTACGFVQHYSQ

SEQ ID NO: 8757 - protein, 689 aa, Artificial Sequence
  Synthetic polypeptide
MVCRPVFPCRRRFCPRPFLVGLVVAICLFYQTLTLRGSRKLTAAAPGAVPHTSTETQASRCKKGFSQDKQCFLLSGNAQETRKVKESMETHFGSHGRRAILYRPPFYSKTELQLHQHILTQHGYTVVIAEERLNAGLGPGLLEQGDLGSWDLLICLSSKKAEGTPCISKEVMCQLGLHQKANRLPEIQQPLCRKEGLCQIVRRFPELQLPVSPSVCLDQGMQLKPSTSSHLLKTVKPRVWKPGDWSREQLNETTVLAPHETIFRAEDLSVILKAYVLVTSLTPLRAFIHSTGTVWNPPKKKRFTVKLQTFFETFLRASSPQQAFDIMKEAIGKLLLAAEVFSETSTLGPKTFHRCRFCFQLLTFDIGYGSFMYPVVLQVHEHLNFQDYDNMDFEDQNTEEFLLNDTFNFLFPNESSLSIFSEIFQRLYRSDVFKGENYQKELNQCLSLEEINSIMTFIKELGSLGQFQLLFPSTTPGIQSLMHEFYDVANPVGNPGSVLTQYWSLLNVFEQFQFMNKKTQPHPLEWNSFTEDKNIEKPQVPFDAIENKKAAVPQIKNENKEIHCSDDENTPCHIKQIFTHPHLELNPDFHPKIKDYYCEVPFDVVTVTIGVETPKCLCKVHLYEQAGPSFASYPLGLGMNKISIFVVDESPAHGETLITYKLTIYREDRPSLPLFEAFTACGFVQRYSQ

SEQ ID NO: 8758 - protein, 469 aa, Artificial Sequence
  Synthetic polypeptide
MQLKPSTSSHLLKTVKPRVWKPGDWSREQLNETTVLAPHETIFRAEDLSVILKAYVLVTSLTPLRAFIHSTGTVWNPPKKKRFTVKLQTFFETFLRASSPQQAFDIMKEAIGKLLLAAEVFSETSTLGPKTFHRCRFCFQLLTFDIGYGSFMYPVVLQVHEHLNFQDYDNMDFEDQNTEEFLLNDTFNFLFPNESSLSIFSEIFQRLYRSDVFKGENYQKELNQCLSLEEINSIMTFIKELGSLGQFQLLFPSTTPGIQSLMHEFYDVANPVGNPGSVLTQYWSLLNVFEQFQFMNKKTQPHPLEWNSFTEDKNIEKPQVPFDAIENKKAAVPQIKNENKEIHCSDDENTPCHIKQIFTHPHLELNPDFHPKIKDYYCEVPFDVVTVTIGVETPKCLCKVHLYEQAGPSFASYPLGLGMNKISIFVVDESPAHGETLITYKLTIYREDRPSLPLFEAFTACGFVQRYSQ

SEQ ID NO: 8759 - protein, 47 aa, Artificial Sequence
  Synthetic polypeptide
MRVAGAAKLVVAVAVFLLTFYVISQVFEIKMDASLGNLFAGCGGLHL

SEQ ID NO: 8760 - protein, 17 aa, Artificial Sequence
  Synthetic polypeptide
MDASLGNLFAGCGGLHL

SEQ ID NO: 8761 - protein, 163 aa, Artificial Sequence
  Synthetic polypeptide
MLQVHRTGLGRLGVSLSKGLHHKAVLAVRREDVNAWERRAPLAPKHIKGITNLGYKVLIQPSNRRAIHDKDYVKAGGILQEDISEACLILGVKRPPEEKLMSRKTYAFFSHTIKAQEANMGLLDEILKQEIRLIDYEKMVDHRGVRVVAFGQWAGVAGLGPVA

SEQ ID NO: 8762 - protein, 164 aa, Artificial Sequence
  Synthetic polypeptide
MSSVQQQPPPPRRVTNVGSLLLTPQENESLFTFLGKKCVTMSSAVVQLYAADRNCMWSKKCSGVACLVKDNPQRSYFLRIFDIKDGKLLWEQELYNNFVYNSPRGYFHTFAGDTCQVALNFANEEEAKKFRKAVTDLLGRRQRKSEKRRDPPNERGSMAFIVFK

SEQ ID NO: 8763 - protein, 1436 aa, Artificial Sequence
  Synthetic polypeptide
MPGGACVLVIALMFLAWGEAQECSPGGHQFLRSPYRSVRFDSWHLQQSAVQDLICDHSLSPGWYRFLILDRPAEMPTKCVEMNHCGTQAPIWLSLRDSETLPSPGEIKQLTACATWQFLFSTTKDCCLFQIPVSVRNCGNFSVYLLQPTQGCMGYCAEAISDARLHPCGSDETETGGDCVRQLAASLPPPPAGRPEVLVELIESRLFCRCSFDVPATKNSVGFHIAWSRLSSQEVKEELTQETTVQAFSLLELDGINLRLGDRIFCSASVFFLENPHVQSVAIESQEFFAGFKLQPELSTISEDGKEYYLRIESTVPIICSEFSELDQECKISLKLKTIGQGREHLGLNLALSSCHVDLLQTSSCANGTCSHTFVYYTAVTDFSRDGDRVSNIVVQPIVNEDFLWNNYIPDSIQIKVKDVPTAYCYTFTDPHIITFDGRVYDNFKTGTFVLYKSMSRDFEVHVRQWDCRSLHYPVSCNCGFVAQEGGDIVTFDMCNGQLRESQPYLFIKSQDVTRNIKISESYLGRKVTIWFSSGAFIRADLGEWGMSLTIRAPSVDYRNTLGLCGTFDENPENDFHDKNGMQIDQNFNNYVAFINEWRILPGKSMSDTLPVSMTSPGKPSYCSCSLDTAAYPSSEDLDSVSRSEIALGCKDLNHVSLSSLIPELDVTSEYINSDTLVREINKHTSPEEYNLNLFLQEKKHINLTKLGLNVQKHPGNEKEDSLQYLANKKYTQGRGSHSQEMRYNRQNRWKRQNFHEFPPLFAFPSLSQTDLEELTYFFPEDHAEDVQQEFFPSWPTPSGLTEYSTLTLCQETLANSSIGRLCLAFLGKRLDSVIEMCVKDVLLKDDLSWAEAGVALLENECEKRIVEEGKYNTEEYGTSIEDILSVLKCPNLCSGNGQCMEWGCACSPSFSSYDCSDSYDKAPEITELGNAGFCDVQKYNCMMVRVFGKGFKELPSIKCEVTKLQYNSSEWMPGEPIYTQTVFHNSRAVDCQLPTDVQQFDTMDLVGGKPTGKWQLKVSNDGYKFSNPKITVIYDGACQVCGLYKNDSCTIKENVCIIDGLCYVEGDKNPTSPCLICRPKISRFTWSFLENNQPPVIQALQDKLQTFYGENFEYQFVAFDPEGSDIHFTLDSGPEGASVSSAGLFMWKTDLLTTQQITVRLNDDCDAETRVTIEVTVKSCDCLNGGSCVSDRNFSPGSGVYLCVCLPGFHGSLCEVDISGCQSNPCGLGSYISGFHSYSCDCPPELKVETQFVNQFTTQTVVLTRSDKSVNKEEDDKNAQGRKRHVKPTSGNAFTICKYPCGKSRECVAPNICKCKPGYIGSNCQTALCDPDCKNHGKCIKPNICQCLPGHGGATCDEEHCNPPCQHGGTCLAGNLCTCPYGFVGPRCETMVCNRHCENGGQCLTPDICQCKPGWYGPTCSTEQEHRHLGQTPPL

SEQ ID NO: 8764 - protein, 159 aa, Artificial Sequence
  Synthetic polypeptide
MMDGRLLEHPHAQFGGSLGGVVGFPYPLGHHHVYELAGHQLQSAAAAASVPFSIDGLLGGSCAAAASVVNPTPLLPAACGVGGDGQPFKLSDSGDPDKESPGCKRRRTRTNFTGWQLEELEKAFNESHYPDVFMREALALRLDLVESRVQNLQYNEGRR

SEQ ID NO: 8765 - protein, 234 aa, Artificial Sequence
  Synthetic polypeptide
MAGSYPEGAPAILADKRQQFGSRFLSDPARVFHHNAWDNVEWSEEQAAAAERKVQENSIQRVCQEKQVDYEINAHKYWNDFYKIHENGFFKDRHWLFTEFPELAPSQNQNHLKDWFLENKSEVCECRNNEDGPGLIMEEQHKCSSKSLEHKTQTPPVEENVTQKISDLEICADEFPGSSATYRILEVGCGVGNTVFPILQTNNDPGLFVYCCDFSSTAIELVQVSLFSKTQYCN

SEQ ID NO: 8766 - protein, 169 aa, Artificial Sequence
  Synthetic polypeptide
MPVDYEINAHKYWNDFYKIHENGFFKDRHWLFTEFPELAPSQNQNHLKDWFLENKSEVCECRNNEDGPGLIMEEQHKCSSKSLEHKTQTPPVEENVTQKISDLEICADEFPGSSATYRILEVGCGVGNTVFPILQTNNDPGLFVYCCDFSSTAIELVQVSLFSKTQYCN

SEQ ID NO: 8767 - protein, 25 aa, Artificial Sequence
  Synthetic polypeptide
LSHLPNTGGWLWCGKHSLSNFTNEQ

SEQ ID NO: 8768 - protein, 359 aa, Artificial Sequence
  Synthetic polypeptide
MAGSYPEGAPAILADKRQQFGSRFLSDPARVFHHNAWDNVEWSEEQAAAAERKVQENSIQRVCQEKQVDYEINAHKYWNDFYKIHENGFFKDRHWLFTEFPELAPSQNQNHLKDWFLENKSEVCECRNNEDGPGLIMEEQHKCSSKSLEHKTQTPPVEENVTQKISDLEICADEFPGSSATYRILEVGCGVGNTVFPILQTNNDPGLFVYCCDFSSTAIELVQTNSEYDPSRCFAFVHDLCDEEKSYPVPKGSLDIIILIFVLSAVVPDKMQKAINRLSRLLKPGGMVLLRDYGRYDMAQLRFKKGQCLSGNFYVRGDGTRVYFFTQEELDTLFTTAGLEKVQNLVDRRLQTRHGGSHL

SEQ ID NO: 8769 - protein, 294 aa, Artificial Sequence
  Synthetic polypeptide
MPVDYEINAHKYWNDFYKIHENGFFKDRHWLFTEFPELAPSQNQNHLKDWFLENKSEVCECRNNEDGPGLIMEEQHKCSSKSLEHKTQTPPVEENVTQKISDLEICADEFPGSSATYRILEVGCGVGNTVFPILQTNNDPGLFVYCCDFSSTAIELVQTNSEYDPSRCFAFVHDLCDEEKSYPVPKGSLDIIILIFVLSAVVPDKMQKAINRLSRLLKPGGMVLLRDYGRYDMAQLRFKKGQCLSGNFYVRGDGTRVYFFTQEELDTLFTTAGLEKVQNLVDRRLQTRHGGSHL

SEQ ID NO: 8770 - protein, 123 aa, Artificial Sequence
  Synthetic polypeptide
VHDLCDEEKSYPVPKGSLDIIILIFVLSAVVPDKMQKAINRLSRLLKPGGMVLLRDYGRYDMAQLRFKKGQCLSGNFYVRGDGTRVYFFTQEELDTLFTTAGLEKVQNLVDRRLQTRHGGSHL

SEQ ID NO: 8771 - protein, 41 aa, Artificial Sequence
  Synthetic polypeptide
MARRPRAPAASGEEFSFVSPLVKYLLFFFNMLFWALTPSPT

SEQ ID NO: 8772 - protein, 145 aa, Artificial Sequence
  Synthetic polypeptide
MSVQVVSAAAAAKVPEVELKDLSPSEAESQLGLSTAAVGAMAPPAGGGDPEAPAPAAERPPVPGPGSGPAAALSPAAGKVPQASAMKRSDPHHQHQRHRDGGEALVSPDGTVTEAPRTVKKIRRNYTAVAVPEELHLRSLNHIWT

SEQ ID NO: 8773 - protein, 157 aa, Artificial Sequence
  Synthetic polypeptide
MEEHGVTQTEHMATIEAHAVAQQVQQVHVATYTEHSMLSADEDSPSSPEDTSYDDSDILNSTAADEVTAHLAAAGPVGMAAAAAVATGKKRKRPHVFESNPSIRKRQQTRLLRKLRATLDEYTTRVGQQAIVLCISPSKPNPVFKVFGAAPLENVGW

SEQ ID NO: 8774 - protein, 72 aa, Artificial Sequence
  Synthetic polypeptide
MSAAQGWDRNRRRGGGAAGAGGGGSGAGGGSGGSGGRGTGQLNRFVQLSGRPHLPVFCSLTSASIVLLKCSY

SEQ ID NO: 8775 - protein, 334 aa, Artificial Sequence
  Synthetic polypeptide
MRWILFIGALIGSSICGQEKFFGDQVLRINVRNGDEISKLSQLVNSNNLKLNFWKSPSSFNRPVDVLVPSVSLQAFKSFLRSQGLEYAVTIEDLQIYHEMDNIAADFPDLARRVKIGHSFENRPMYVLKFSTGKGVRRPAVWLNAGIHSREWISQATAIWTARKIVSDYQRDPAITSILEKMDIFLLPVANPDGYVYTQTQNRLWRKTRSRNPGSSCIGADPNRNWNASFAGKGASDNPCSEVYHGPHANSEVEVKSVVDFIQKHGNFKGFIDLHSYSQLLMYPYGYSVKKAPDAEELDKVARLAAKALASVSGTEYQVGPTCTTVCQAWDSHL

SEQ ID NO: 8776 - protein, 367 aa, Artificial Sequence
  Synthetic polypeptide
MRWILFIGALIGSSICGQEKFFGDQVLRINVRNGDEISKLSQLVNSNNLKLNFWKSPSSFNRPVDVLVPSVSLQAFKSFLRSQGLEYAVTIEDLQALLDNEDDEMQHNEGQERSSNNFNYGAYHSLEAIYHEMDNIAADFPDLARRVKIGHSFENRPMYVLKFSTGKGVRRPAVWLNAGIHSREWISQATAIWTARKIVSDYQRDPAITSILEKMDIFLLPVANPDGYVYTQTQNRLWRKTRSRNPGSSCIGADPNRNWNASFAGKGASDNPCSEVYHGPHANSEVEVKSVVDFIQKHGNFKGFIDLHSYSQLLMYPYGYSVKKAPDAEELDKVARLAAKALASVSGTEYQVGPTCTTVCQAWDSHL

SEQ ID NO: 8777 - protein, 263 aa, Artificial Sequence
  Synthetic polypeptide
MQHNEGQERSSNNFNYGAYHSLEAIYHEMDNIAADFPDLARRVKIGHSFENRPMYVLKFSTGKGVRRPAVWLNAGIHSREWISQATAIWTARKIVSDYQRDPAITSILEKMDIFLLPVANPDGYVYTQTQNRLWRKTRSRNPGSSCIGADPNRNWNASFAGKGASDNPCSEVYHGPHANSEVEVKSVVDFIQKHGNFKGFIDLHSYSQLLMYPYGYSVKKAPDAEELDKVARLAAKALASVSGTEYQVGPTCTTVCQAWDSHL

SEQ ID NO: 8778 - protein, 114 aa, Artificial Sequence
  Synthetic polypeptide
MIKKFDKKDEESGSGSNPFQHLEKSAVLQEARIFNETPINPRRCLHILTKILYLLNQGEHFGTTEATEAFFAMTRLFQSNDQTLRRMCYLTIKEMATISEDVIIVTSRFFEVPS

SEQ ID NO: 8779 - protein, 125 aa, Artificial Sequence
  Synthetic polypeptide
MIKKFDKKDEESGSGSNPFQHLEKSAVLQEARIFNETPINPRRCLHILTKILYLLNQGEHFGTTEATEAFFAMTRLFQSNDQTLRRMCYLTIKEMATISEDVIIVTSRATSILLKLKQEQTLHLW

SEQ ID NO: 8780 - protein, 402 aa, Artificial Sequence
  Synthetic polypeptide
MAAEAAGGKYRSTVSKSKDPSGLLISVIRTLSTSDDVEDRENEKGRLEEAYEKCDRDLDELIVQHYTELTTAIRTYQSITERITNSRNKIKQVKENLLSCKMLLHCKRDELRKLWIEGIEHKHVLNLLDEIENIKQVPQKLEQCMASKHYLSATDMLVSAVESLEGPLLQVEGLSDLRLELHSKKMNLHLVLIDELHRHLYIKSTSRVVQRNKEKGKISSLVKDASVPLIDVTNLPTPRKFLDTSHYSTAGSSSVREINLQDIKEDLELDPEENSTLFMGILIKGLAKLKKIPETVKAIIERLEQELKQIVKRSTTQVADSGYQRGENVTVENQPRLLLELLELLFDKFNAVAAAHSVVLGYLQDTVVTPLTQQEDIKLYDMADVWVKIQDVLQAVCSGSFL

SEQ ID NO: 8781 - protein, 301 aa, Artificial Sequence
  Synthetic polypeptide
MLLHCKRDELRKLWIEGIEHKHVLNLLDEIENIKQVPQKLEQCMASKHYLSATDMLVSAVESLEGPLLQVEGLSDLRLELHSKKMNLHLVLIDELHRHLYIKSTSRVVQRNKEKGKISSLVKDASVPLIDVTNLPTPRKFLDTSHYSTAGSSSVREINLQDIKEDLELDPEENSTLFMGILIKGLAKLKKIPETVKAIIERLEQELKQIVKRSTTQVADSGYQRGENVTVENQPRLLLELLELLFDKFNAVAAAHSVVLGYLQDTVVTPLTQQEDIKLYDMADVWVKIQDVLQAVCSGSFL

SEQ ID NO: 8782 - protein, 443 aa, Artificial Sequence
  Synthetic polypeptide
MDDFERRRELRRQKREEMRLEAERIAYQRNDDDEEEAARERRRRARQERLRQKQEEESLGQVTDQVEVNAQNSVPDEEAKTTTTNTQVEGDDEAAFLERLARREERRQKRLQEALERQKEFDPTITDASLSLPSRRMQNDTAENETTEKEEKSESRQERYEIEETETVTKSYQKNDWRDAEENKKEDKEKEEEEEEKPKRGSIGENQIKDEKIKKDKEPKEEVKSFMDRKKGFTEVKSQNGEFMTHKLKHTENTFSRPGGRASVDTKEAEGAPQVEAGKRLEELRRRRGETESEEFEKLKQKQQEAALELEELKKKREERRKVLEEEEQRRKQEEADRKLREEEEKRRLKEEIERRRAEAAEKRQKMPEDGLSDDKKPFKCFTPKGSSLKIEERAEFLNKSVQKSSGVKSTHQAAIVSKIDSRLEQYTSAIEREAYGSSYSGS

SEQ ID NO: 8783 - protein, 469 aa, Artificial Sequence
  Synthetic polypeptide
MDDFERRRELRRQKREEMRLEAERIAYQRNDDDEEEAARERRRRARQERLRQKQEEESLGQVTDQVEVNAQNSVPDEEAKTTTTNTQVEGDDEAAFLERLARREERRQKRLQEALERQKEFDPTITDASLSLPSRRMQNDTAENETTEKEEKSESRQERYEIEETETVTKSYQKNDWRDAEENKKEDKEKEEEEEEKPKRGSIGENQGEEKGTKVQAKREKLQEDKPTFKKEEIKDEKIKKDKEPKEEVKSFMDRKKGFTEVKSQNGEFMTHKLKHTENTFSRPGGRASVDTKEAEGAPQVEAGKRLEELRRRRGETESEEFEKLKQKQQEAALELEELKKKREERRKVLEEEEQRRKQEEADRKLREEEEKRRLKEEIERRRAEAAEKRQKMPEDGLSDDKKPFKCFTPKGSSLKIEERAEFLNKSVQKSSGVKSTHQAAIVSKIDSRLEQYTSAIEREAYGSSYSGS

SEQ ID NO: 8784 - protein, 468 aa, Artificial Sequence
  Synthetic polypeptide
MDDFERRRELRRQKREEMRLEAERIAYQRNDDDEEEAARERRRRARQERLRQKQEEESLGQVTDQVEVNAQNSVPDEEAKTTTTNTQVEGDDEAAFLERLARREERRQKRLQEALERQKEFDPTITDASLSLPSRRMQNDTAENETTEKEEKSESRQERYEIEETETVTKSYQKNDWRDAEENKKEDKEKEEEEEEKPKRGSIGENQGEEKGTKVQAKREKLQEDKPTFKKEEIKDEKIKKDKEPKEEVKSFMDRKKGFTEVKSQNGEFMTHKLKHTENTFSRPGGRASVDTKEAEGAPQVEAGKRLEELRRRRGETESEEFEKLKQKQQEAALELEELKKKREERRKVLEEEEQRRKQEEADRKLREEEEKRRLKEEIERRRAEAAEKRQKMPEDGLSDDKKPFKCFTPKGSSLKIEERAEFLNKSVQKSGVKSTHQAAIVSKIDSRLEQYTSAIEREAYGSSYSGS

SEQ ID NO: 8785 - protein, 698 aa, Artificial Sequence
  Synthetic polypeptide
MDDFERRRELRRQKREEMRLEAERIAYQRNDDDEEEAARERRRRARQERLRQKQEEESLGQVTDQVEVNAQNSVPDEEAKTTTTNTQVEGDDEAAFLERLARREERRQKRLQEALERQKEFDPTITDASLSLPSRRMQNDTAENETTEKEEKSESRQERYEIEETETVTKSYQKNDWRDAEENKKEDKEKEEEEEEKPKRGSIGENQVEVMVEEKTTESQEETVVMSLKNGQISSEEPKQEEEREQGSDEISHHEKMEEEDKERAEAERARLEAEERERIKAEQDKKIADERARIEAEEKAAAQERERREAEERERMREEEKRAAEERQRIKEEEKRAAEERQRIKEEEKRAAEERQRIKEEEKRAAEERQRARAEEEEKAKVEEQKRNKQLEEKKHAMQETKIKGEKVEQKIEGKWVNEKKAQEDKLQTAVLKKQGEEKGTKVQAKREKLQEDKPTFKKEEIKDEKIKKDKEPKEEVKSFMDRKKGFTEVKSQNGEFMTHKLKHTENTFSRPGGRASVDTKEAEGAPQVEAGKRLEELRRRRGETESEEFEKLKQKQQEAALELEELKKKREERRKVLEEEEQRRKQEEADRKLREEEEKRRLKEEIERRRAEAAEKRQKMPEDGLSDDKKPFKCFTPKGSSLKIEERAEFLNKSVQKSSGVKSTHQAAIVSKIDSRLEQYTSAIEREAYGSSYSGS

SEQ ID NO: 8786 - protein, 463 aa, Artificial Sequence
  Synthetic polypeptide
MLGGSGSHGRRSLAALSQIAYQRNDDDEEEAARERRRRARQERLRQKQEEESLGQVTDQVEVNAQNSVPDEEAKTTTTNTQVEGDDEAAFLERLARREERRQKRLQEALERQKEFDPTITDASLSLPSRRMQNDTAENETTEKEEKSESRQERYEIEETETVTKSYQKNDWRDAEENKKEDKEKEEEEEEKPKRGSIGENQGEEKGTKVQAKREKLQEDKPTFKKEEIKDEKIKKDKEPKEEVKSFMDRKKGFTEVKSQNGEFMTHKLKHTENTFSRPGGRASVDTKEAEGAPQVEAGKRLEELRRRRGETESEEFEKLKQKQQEAALELEELKKKREERRKVLEEEEQRRKQEEADRKLREEEEKRRLKEEIERRRAEAAEKRQKMPEDGLSDDKKPFKCFTPKGSSLKIEERAEFLNKSVQKSSGVKSTHQAAIVSKIDSRLEQYTSAIEREAYGSSYSGS

SEQ ID NO: 8787 - protein, 437 aa, Artificial Sequence
  Synthetic polypeptide
MLGGSGSHGRRSLAALSQIAYQRNDDDEEEAARERRRRARQERLRQKQEEESLGQVTDQVEVNAQNSVPDEEAKTTTTNTQVEGDDEAAFLERLARREERRQKRLQEALERQKEFDPTITDASLSLPSRRMQNDTAENETTEKEEKSESRQERYEIEETETVTKSYQKNDWRDAEENKKEDKEKEEEEEEKPKRGSIGENQIKDEKIKKDKEPKEEVKSFMDRKKGFTEVKSQNGEFMTHKLKHTENTFSRPGGRASVDTKEAEGAPQVEAGKRLEELRRRRGETESEEFEKLKQKQQEAALELEELKKKREERRKVLEEEEQRRKQEEADRKLREEEEKRRLKEEIERRRAEAAEKRQKMPEDGLSDDKKPFKCFTPKGSSLKIEERAEFLNKSVQKSSGVKSTHQAAIVSKIDSRLEQYTSAIEREAYGSSYSGS

SEQ ID NO: 8788 - protein, 462 aa, Artificial Sequence
  Synthetic polypeptide
MLGGSGSHGRRSLAALSQIAYQRNDDDEEEAARERRRRARQERLRQKQEEESLGQVTDQVEVNAQNSVPDEEAKTTTTNTQVEGDDEAAFLERLARREERRQKRLQEALERQKEFDPTITDASLSLPSRRMQNDTAENETTEKEEKSESRQERYEIEETETVTKSYQKNDWRDAEENKKEDKEKEEEEEEKPKRGSIGENQGEEKGTKVQAKREKLQEDKPTFKKEEIKDEKIKKDKEPKEEVKSFMDRKKGFTEVKSQNGEFMTHKLKHTENTFSRPGGRASVDTKEAEGAPQVEAGKRLEELRRRRGETESEEFEKLKQKQQEAALELEELKKKREERRKVLEEEEQRRKQEEADRKLREEEEKRRLKEEIERRRAEAAEKRQKMPEDGLSDDKKPFKCFTPKGSSLKIEERAEFLNKSVQKSGVKSTHQAAIVSKIDSRLEQYTSAIEREAYGSSYSGS

SEQ ID NO: 8789 - protein, 448 aa, Artificial Sequence
  Synthetic polypeptide
MTSYMKVDRQWNAEILELILGTGQLSTGQIAYQRNDDDEEEAARERRRRARQERLRQKQEEESLGQVTDQVEVNAQNSVPDEEAKTTTTNTQVEGDDEAAFLERLARREERRQKRLQEALERQKEFDPTITDASLSLPSRRMQNDTAENETTEKEEKSESRQERYEIEETETVTKSYQKNDWRDAEENKKEDKEKEEEEEEKPKRGSIGENQIKDEKIKKDKEPKEEVKSFMDRKKGFTEVKSQNGEFMTHKLKHTENTFSRPGGRASVDTKEAEGAPQVEAGKRLEELRRRRGETESEEFEKLKQKQQEAALELEELKKKREERRKVLEEEEQRRKQEEADRKLREEEEKRRLKEEIERRRAEAAEKRQKMPEDGLSDDKKPFKCFTPKGSSLKIEERAEFLNKSVQKSSGVKSTHQAAIVSKIDSRLEQYTSAIEREAYGSSYSGS

SEQ ID NO: 8790 - protein, 37 aa, Artificial Sequence
  Synthetic polypeptide
MNEAEIVDVALGILIEMLWKLNEVICAWHLEHDLVSI

SEQ ID NO: 8791 - protein, 92 aa, Artificial Sequence
  Synthetic polypeptide
METLQSETKTRVLPSWLTAQVATKNVAPMKAPKRMRMAAVPVAAARLPATRTVYCMNEAEIVDVALGILIEMLWKLNEVICAWHLEHDLVSI

SEQ ID NO: 8792 - protein, 91 aa, Artificial Sequence
  Synthetic polypeptide
MADSPGGYKECGTNEGPQEDENGSSASGSSKVRQLWSEDSCESGKLPATRTVYCMNEAEIVDVALGILIEMLWKLNEVICAWHLEHDLVSI

SEQ ID NO: 8793 - protein, 1086 aa, Artificial Sequence
  Synthetic polypeptide
MATPLAVNSAASLWGPYKDIWHKVGNALWRRQPEAVHLLDKILKKHKPDFISLFKNPPKNVQQHEKVQKASTEGVAIQGQQGTRLLPEQLIKEAFILSDLFDIGELAAVELLLAGEHQQPHFPGLTRGLVAVLLYWDGKRCIANSLKALIQSRRGKTWTLELSPELASMTTRFTDELMEQGLTYKVLTLVSQIDVNNEFEKLQRERGLGSEKHRKEVSDLIKECRQSLAESLFAWACQSPLGKEDTLLLIGHLERVTVEANGSLDAVNLALLMALLYCFDISFIEQSTEERDDMIHQLPLLTEKQYIATIHSRLQDSQLWKLPGLQATVRLAWALALRGISQLPDVTALAEFTEADEAMAELAIADNVFLFLMESVVVSEYFYQEEFYIRRVHNLITDFLALMPMKVKQLRNRADEDARMIHMSMQMGNEPPISLRRDLEHLMLLIGELYKKNPFHLELALEYWCPTEPLQTPTIMGSYLGVAHQRPPQRQVVLSKFVRQMGDLLPPTIYIPYLKMLQGLANGPQCAHYCFSLLKVNGSSHVENIQGAGGSPVSWEHFFHSLMLYHEHLRKDLPSADSVQYRHLPSRGITQKEQDGLIAFLQLTSTIITWSENARLALCEHPQWTPVVVILGLLQCSIPPVLKAELLKTLAAFGKSPEIAASLWQSLEYTQILQTVRIPSQRQAIGIEVELNEIESRCEEYPLTRAFCQLISTLVESSFPSNLGAGLRPPGFDPYLQFLRDSVFLRFRTRAYRRAAEKWEVAEVVLEVFYKLLRDYEPQLEDFVDQFVELQGEEIIAYKPPGFSLMYHLLNESPMLELALSLLEEGVKQLDTYAPFPGKKHLEKAVQHCLALLNLTLQKENLFMDLLRESQLALIVCPLEQLLQGINPRTKKADNVVNIARYLYHGNTNPELAFESAKILCCISCNSNIQIKLVGDFTHDQSISQKLMAGFVECLDCEDAEEFVRLEEGSELEKKLVAIRHETRIHILNLLITSLECNPPNLALYLLGFELKKPVSTTNLQDPGVLGCPRTCLHAILNILEKGTEGRTGPVAVRESPQLAELCYQVKSPWAWHETSLTLSFSNCEM

SEQ ID NO: 8794 - skipped

SEQ ID NO: 8795 - protein, 2 aa, Artificial Sequence
  Synthetic polypeptide
MN

SEQ ID NO: 8796 - protein, 1606 aa, Artificial Sequence
  Synthetic polypeptide
MATPLAVNSAASLWGPYKDIWHKVGNALWRRQPEAVHLLDKILKKHKPDFISLFKNPPKNVQQHEKVQKASTEGVAIQGQQGTRLLPEQLIKEAFILSDLFDIGELAAVELLLAGEHQQPHFPGLTRGLVAVLLYWDGKRCIANSLKALIQSRRGKTWTLELSPELASMTTRFTDELMEQGLTYKVLTLVSQIDVNNEFEKLQRERGLGSEKHRKEVSDLIKECRQSLAESLFAWACQSPLGKEDTLLLIGHLERVTVEANGSLDAVNLALLMALLYCFDISFIEQSTEERDDMIHQLPLLTEKQYIATIHSRLQDSQLWKLPGLQATVRLAWALALRGISQLPDVTALAEFTEADEAMAELAIADNVFLFLMESVVVSEYFYQEEFYIRRVHNLITDFLALMPMKVKQLRNRADEDARMIHMSMQMGNEPPISLRRDLEHLMLLIGELYKKNPFHLELALEYWCPTEPLQTPTIMGSYLGVAHQRPPQRQVVLSKFVRQMGDLLPPTIYIPYLKMLQGLANGPQCAHYCFSLLKVNGSSHVENIQGAGGSPVSWEHFFHSLMLYHEHLRKDLPSADSVQYRHLPSRGITQKEQDGLIAFLQLTSTIITWSENARLALCEHPQWTPVVVILGLLQCSIPPVLKAELLKTLAAFGKSPEIAASLWQSLEYTQILQTVRIPSQRQAIGIEVELNEIESRCEEYPLTRAFCQLISTLVESSFPSNLGAGLRPPGFDPYLQFLRDSVFLRFRTRAYRRAAEKWEVAEVVLEVFYKLLRDYEPQLEDFVDQFVELQGEEIIAYKPPGFSLMYHLLNESPMLELALSLLEEGVKQLDTYAPFPGKKHLEKAVQHCLALLNLTLQKENLFMDLLRESQLALIVCPLEQLLQGINPRTKKADNVVNIARYLYHGNTNPELAFESAKILCCISCNSNIQIKLVGDFTHDQSISQKLMAGFVECLDCEDAEEFVRLEEGSELEKKLVAIRHETRIHILNLLITSLECNPPNLALYLLGFELKKPVSTTNLQDPGVLGCPRTCLHAILNILEKGTEGRTGPVAVRESPQLAELCYQVIYQLCACSDTSGPTMRYLRTSQDFLFSQLQYLPFSNKEYEISMLNQMSWLMKTASIELRVTSLNRQRSHTQRLLHLLLDDMPVKPYSDGEGGIEDENRSVSGFLHFDTATKVRRKILNILDSIDFSQEIPEPLQLDFFDRAQIEQVIANCEHKNLRGQTVCNVKLLHRVLVAEVNALQGMAAIGQRPLLMEEISTVLQYVVGRNKLLQCLHAKRHALESWRQLVEIILTACPQDLIQAEDRQLIIRDILQDVHDKILDDEAAQELMPVVAGAVFTLTAHLSQAVLTEQKETSVLGPAEAHYAFMLDSCFTSPPPEENPLVGFASIGDSSLYIILKKLLDFILKTGGGFQRVRTHLYGSLLYYLQIAQRPDEPDTLEAAKKTMWERLTAPEDVFSKLQRENIAIIESYGAALMEVVCRDACDGHEIGRMLALALLDRIVSVDKQQQWLLYLSNSGYLKVLVDSLVEDDRTLQSLLTPQPPLLKALYTYESKMAFLTRVAKIQQGALELLRSGVIVRLAQCQVYDMRPETDPQRLSFSNLKI

SEQ ID NO: 8797 - protein, 22 aa, Artificial Sequence
  Synthetic polypeptide
LTCMALCFITYRLPRDLMNQTP

SEQ ID NO: 8798 - protein, 1816 aa, Artificial Sequence
  Synthetic polypeptide
MATPLAVNSAASLWGPYKDIWHKVGNALWRRQPEAVHLLDKILKKHKPDFISLFKNPPKNVQQHEKVQKASTEGVAIQGQQGTRLLPEQLIKEAFILSDLFDIGELAAVELLLAGEHQQPHFPGLTRGLVAVLLYWDGKRCIANSLKALIQSRRGKTWTLELSPELASMTTRFTDELMEQGLTYKVLTLVSQIDVNNEFEKLQRERGLGSEKHRKEVSDLIKECRQSLAESLFAWACQSPLGKEDTLLLIGHLERVTVEANGSLDAVNLALLMALLYCFDISFIEQSTEERDDMIHQLPLLTEKQYIATIHSRLQDSQLWKLPGLQATVRLAWALALRGISQLPDVTALAEFTEADEAMAELAIADNVFLFLMESVVVSEYFYQEEFYIRRVHNLITDFLALMPMKVKQLRNRADEDARMIHMSMQMGNEPPISLRRDLEHLMLLIGELYKKNPFHLELALEYWCPTEPLQTPTIMGSYLGVAHQRPPQRQVVLSKFVRQMGDLLPPTIYIPYLKMLQGLANGPQCAHYCFSLLKVNGSSHVENIQGAGGSPVSWEHFFHSLMLYHEHLRKDLPSADSVQYRHLPSRGITQKEQDGLIAFLQLTSTIITWSENARLALCEHPQWTPVVVILGLLQCSIPPVLKAELLKTLAAFGKSPEIAASLWQSLEYTQILQTVRIPSQRQAIGIEVELNEIESRCEEYPLTRAFCQLISTLVESSFPSNLGAGLRPPGFDPYLQFLRDSVFLRFRTRAYRRAAEKWEVAEVVLEVFYKLLRDYEPQLEDFVDQFVELQGEEIIAYKPPGFSLMYHLLNESPMLELALSLLEEGVKQLDTYAPFPGKKHLEKAVQHCLALLNLTLQKENLFMDLLRESQLALIVCPLEQLLQGINPRTKKADNVVNIARYLYHGNTNPELAFESAKILCCISCNSNIQIKLVGDFTHDQSISQKLMAGFVECLDCEDAEEFVRLEEGSELEKKLVAIRHETRIHILNLLITSLECNPPNLALYLLGFELKKPVSTTNLQDPGVLGCPRTCLHAILNILEKGTEGRTGPVAVRESPQLAELCYQVIYQLCACSDTSGPTMRYLRTSQDFLFSQLQYLPFSNKEYEISMLNQMSWLMKTASIELRVTSLNRQRSHTQRLLHLLLDDMPVKPYSDGEGGIEDENRSVSGFLHFDTATKVRRKILNILDSIDFSQEIPEPLQLDFFDRAQIEQVIANCEHKNLRGQTVCNVKLLHRVLVAEVNALQGMAAIGQRPLLMEEISTVLQYVVGRNKLLQCLHAKRHALESWRQLVEIILTACPQDLIQAEDRQLIIRDILQDVHDKILDDEAAQELMPVVAGAVFTLTAHLSQAVLTEQKETSVLGPAEAHYAFMLDSCFTSPPPEENPLVGFASIGDSSLYIILKKLLDFILKTGGGFQRVRTHLYGSLLYYLQIAQRPDEPDTLEAAKKTMWERLTAPEDVFSKLQRENIAIIESYGAALMEVVCRDACDGHEIGRMLALALLDRIVSVDKQQQWLLYLSNSGYLKVLVDSLVEDDRTLQSLLTPQPPLLKALYTYESKMAFLTRVAKIQQGALELLRSGVIVRLAQCQVYDMRPETDPQSMFGMRDPPMFIPTPVDRYRQILLPALQLCQVILTSSMAQHLQAAGQVLQFLISHSDTIQAILRCQDVSAGSLQELALLTGIISKAALPGILSELDVDVNEGSLMELQGHIGRFQRQCLGLLSRFGGSDRLRQFKFQDDNVEGDKVSKKDEIELAMQQICANVMEYCQSLMLQSSPTFQHAVCLFTPSLSETVNRDGPRQATREAEAGESLETRRWRLQ

SEQ ID NO: 8799 - protein, 96 aa, Artificial Sequence
  Synthetic polypeptide
MCDKEFMWALKNGDLDEVKDYVAKGEDVNRTLEGGRKPLHYAADCGQLEILEFLLLKGADINAPDKHHITPLLSAVYEGHVSCVKLLLSKEPGILV

SEQ ID NO: 8800 - protein, 31 aa, Artificial Sequence
  Synthetic polypeptide
MCDKEFMWALKNGDLDEVKDYVAKRQGILHI

SEQ ID NO: 8801 - protein, 274 aa, Artificial Sequence
  Synthetic polypeptide
MEVAVEKAVAAAAAASAAASGGPSAAPSGENEAESRQGPDSERGGEAARLNLLDTCAVCHQNIQSRAPKLLPCLHSFCQRCLPAPQRYLMLPAPMLGSAETPPPVPAPGSPVSGSSPFATQVGVIRCPVCSQECAERHIIDNFFVKDTTEVPSSTVEKSNQVCTSCEDNAEANGFCVECVEWLCKTCIRAHQRVKFTKDHTVRQKEEVSPEAVGVTSQRPVFCPFHKKEQLKLYCETCDKLTCRDCQLLEHKEHSPRRMESTENGKEAILEDRM

SEQ ID NO: 8802 - protein, 177 aa, Artificial Sequence
  Synthetic polypeptide
MAEPTVCSFLTKVLCAHGGRMFLKDLRGHVELSEARLRDVLQRAGPERFLLQEVETQEGLGDAEAEAAAGAVGGGGTSAWRVVAVSSVRLCARYQRGECQACDQLHFCRRHMLGKCPNRDCWSTCTLSHDIHTPVNMQVLKSHGLFGLNENQLRILLLQNDPCLLPEPKNALVWIIN

SEQ ID NO: 8803 - protein, 32 aa, Artificial Sequence
  Synthetic polypeptide
MAPVYEGPLILRAHDLGGANPASLSGSLSSVR

SEQ ID NO: 8804 - protein, 14 aa, Artificial Sequence
  Synthetic polypeptide
MELRKLYGPLCGWG

SEQ ID NO: 8805 - protein, 82 aa, Artificial Sequence
  Synthetic polypeptide
MMEALGFLKLEVNGPMVTVALSVALLALLKWYSTSAFSRLEKLGLRHPKPSPFIGNLTFFRQGFWESQMELRKLYGPLCGWG

SEQ ID NO: 8806 - protein, 81 aa, Artificial Sequence
  Synthetic polypeptide
MEALGFLKLEVNGPMVTVALSVALLALLKWYSTSAFSRLEKLGLRHPKPSPFIGNLTFFRQGFWESQMELRKLYGPLCGWG

SEQ ID NO: 8807 - protein, 480 aa, Artificial Sequence
  Synthetic polypeptide
MAQAGVVGEVTQVLCAAGGALELPELRRRLRMGLSADALERLLRQRGRFVVAVRAGGAAAAPERVVLAASPLRLCRAHQGSKPGCVGLCAQLHLCRFMVYGACKFLRAGKNCRNSHSLTTEHNLSVLRTHGVDHLSYNELCQLLFQNDPWLLPEICQHYNKGDGPHGSCAFQKQCIKLHICQYFLQGECKFGTSCKRSHDFSNSENLEKLEKLGMSSDLVSRLPTIYRNAHDIKNKSSAPSRVPPLFVPQGTSERKDSSGSVSPNTLSQEEGDQICLYHIRKSCSFQDKCHRVHFHLPYRWQFLDRGKWEDLDNMELIEEAYCNPKIERILCSESASTFHSHCLNFNAMTYGATQARRLSTASSVTKPPHFILTTDWIWYWSDEFGSWQEYGRQGTVHPVTTVSSSDVEKAYLAYCTPGSDGQAATLKFQAGKHNYELDFKAFVQKNLVYGTTKKVCRRPKYVSPQDVTTMQTCSRGRGG

SEQ ID NO: 8808 - protein, 118 aa, Artificial Sequence
  Synthetic polypeptide
KLEKLGMSSDLVSRLPTIYRNAHDIKNKSSAPSRVPPLFVPQGTSERKDSSGSVSPNTLSQEEGDQICLYHIRKSCSFQAFVQKNLVYGTTKKVCRRPKYVSPQDVTTMQTCSRGRGG

SEQ ID NO: 8809 - protein, 17 aa, Artificial Sequence
  Synthetic polypeptide
DQPQVCLLPPLPHYLAH

SEQ ID NO: 8810 - protein, 711 aa, Artificial Sequence
  Synthetic polypeptide
MAALSGGGGGGAEPGQALFNGDMEPEAGAGAGAAASSAADPAIPEEVWNIKQMIKLTQEHIEALLDKFGGEHNPPSIYLEAYEEYTSKLDALQQREQQLLESLGNGTDFSVSSSASMDTVTSSSSSSLSVLPSSLSVFQNPTDVARSNPKSPQKPIVRVFLPNKQRTVVPARCGVTVRDSLKKALMMRGLIPECCAVYRIQDGEKKPIGWDTDISWLTGEELHVEVLENVPLTTHNFVRKTFFTLAFCDFCRKLLFQGFRCQTCGYKFHQRCSTEVPLMCVNYDQLDLLFVSKFFEHHPIPQEEASLAETALTSGSSPSAPASDSIGPQILTSPSPSKSIPIPQPFRPADEDHRNQFGQRDRSSSAPNVHINTIEPVNIDDLIRDQGFRGDGGSTTGLSATPPASLPGSLTNVKALQKSPGPQRERKSSSSSEDRNRMKTLGRRDSSDDWEIPDGQITVGQRIGSGSFGTVYKGKWHGDVAVKMLNVTAPTPQQLQAFKNEVGVLRKTRHVNILLFMGYSTKPQLAIVTQWCEGSSLYHHLHIIETKFEMIKLIDIARQTAQGMDYLHAKSIIHRDLKSNNIFLHEDLTVKIGDFGLATVKSRWSGSHQFEQLSGSILWMAPEVIRMQDKNPYSFQSDVYAFGIVLYELMTGQLPYSNINNRDQIIFMVGRGYLSPDLSKVRSNCPKAMKRLMAECLKKKRDERPLFPQVI

SEQ ID NO: 8811 - protein, 225 aa, Artificial Sequence
  Synthetic polypeptide
MAALSGGGGGGAEPGQALFNGDMEPEAGAGAGAAASSAADPAIPEEVWNIKQMIKLTQEHIEALLDKFGGEHNPPSIYLEAYEEYTSKLDALQQREQQLLESLGNGTDFSVSSSASMDTVTSSSSSSLSVLPSSLSVFQNPTDVARSNPKSPQKPIVRVFLPNKQRTVDYGRMEDLHRSTRNLSESDGYVHYLECDDGCMGIYVISKCIKLCTLNHCSLLYVSCT

SEQ ID NO: 8812 - protein, 210 aa, Artificial Sequence
  Synthetic polypeptide
QALFNGDMEPEAGAGAGAAASSAADPAIPEEVWNIKQMIKLTQEHIEALLDKFGGEHNPPSIYLEAYEEYTSKLDALQQREQQLLESLGNGTDFSVSSSASMDTVTSSSSSSLSVLPSSLSVFQNPTDVARSNPKSPQKPIVRVFLPNKQRTVDYGRMEDLHRSTRNLSESDGYVHYLECDDGCMGIYVISKCIKLCTLNHCSLLYVSCT

SEQ ID NO: 8813 - protein, 226 aa, Artificial Sequence
  Synthetic polypeptide
MTVFFKTLRNHWKKTTAGLCLLTWGGHWLYGKHCDNLLRRAACQEAQVFGNQLIPPNAQVKKATVFLNPAACKGKARTLFEKNAAPILHLSGMDVTIVKTDYEGQAKKLLELMENTDVIIVAGGDGTLQEVVTGVLRRTDEATFSKIPIGFIPLGETSSLSHTLFAESGNKVQHITDATLAIVKGETVPLDVLQIKTFILHPMDQGIISTFKFYYLINKLWTKGHQ

SEQ ID NO: 8814 - protein, 198 aa, Artificial Sequence
  Synthetic polypeptide
MENTDSDNLLRRAACQEAQVFGNQLIPPNAQVKKATVFLNPAACKGKARTLFEKNAAPILHLSGMDVTIVKTDYEGQAKKLLELMENTDVIIVAGGDGTLQEVVTGVLRRTDEATFSKIPIGFIPLGETSSLSHTLFAESGNKVQHITDATLAIVKGETVPLDVLQIKTFILHPMDQGIISTFKFYYLINKLWTKGHQ

SEQ ID NO: 8815 - protein, 223 aa, Artificial Sequence
  Synthetic polypeptide
MTVFFKTLRNHWKKTTAGLCLLTWGGHWLYGKHCDNLLRRAACQEAQVFGNQLIPPNAQVKKATVFLNPAACKGTLFEKNAAPILHLSGMDVTIVKTDYEGQAKKLLELMENTDVIIVAGGDGTLQEVVTGVLRRTDEATFSKIPIGFIPLGETSSLSHTLFAESGNKVQHITDATLAIVKGETVPLDVLQIKTFILHPMDQGIISTFKFYYLINKLWTKGHQ

SEQ ID NO: 8816 - protein, 1735 aa, Artificial Sequence
  Synthetic polypeptide
MARKLSVLEVLLIIFCLIVVTIDILLLLLVLEETSDTSFTPECPEIPQSERIDCTPDQEVTEDICRWQYKCCWSPVADANVPRCFFPWNWGYEASNGHTNTSTGFTAQLKRLPSPSLFGNDVATTLFTAEYQTSNRFHFKITDFNNIRYEVSHENINLVDGIADASNLSYYVEVTDKPFSIKIMRTSNRRVLLDTSIGPLQFAQQYLQLSFRLPSANVYGLGEHVHQQYRHNMTWKTWPIFTRDATPTEGMINLYGAHTFFLCLEDARGSSFGVFLMNSNAMEVTLQPAPAITYRTIGGILDFYVFLGNTPEQVVQEYLELVGRPFFPPYWSLGFQLSRRDYGGINKLKEVVSRNRLAEIPYDVQYSDIDYMDGKKDFTVDEVAYSGLPDFVKELHDNGQKYLIIMNPGISKNSNYEPYNNGSLKRVWILGSNGFAVGEGYPGPTVFPDYTNPVCTEWWTDQVAKFHDHLEFDGVWIEMNEVSSLLQASNNQCESNNLNFPPFLPRVLDHLLFARTLCMDTEFHGGLHYDIHSLYGHSMARTTNLALETIFMNNRSFILSRSTFAGSGKFAAHWLGDNAATWDDLRWSIPTILEFNLFGIPMVGANICGYNNNVTEELCRRWMQLGAFYPLPRNHNGPGFRDQDPAAFGVDSLLLKSSRHYLNIRYTLLPYLYTLFYHAHTRGETVARPLVHEFYQDSATWDVHEQFLWGPGLLITPVLYEGVDEVKAYIPDATWYDYETGVAISWRKQLVNMLLPGDKIGLHLRGGYIFPTQKPNTTTEASRRNSLGLIIALDYKREAKGELYWDDGVSKDAVTEKKYILYDFSVTSNHLQAKIINNNYMDTDNLMFTDITILGMDKQPANFIVLLNNVATSSPSVVYNASTKVVTITDLQGLVLGQEFSIRWNLPVSDLEKFNCYPDDPTASEESCRQRGCLWEDTSTPGVPTCYYDTIPNYVASDIQYLNTSITADLSLPMAPESAAAAASDSLSAKISFLHLKVIYHTATMLQVKIYDPTNKRYEVPVPLNTPPQPVGDPENRLYDVRIQNNPFGIQIQRKNSSTVIWDSQLPGFIFNDMFLSISTRLPSQYIYGFGETEHTTFRRNMNWNTWGMFAHDEPPAYKKNSYGVHPYYMALEEDGSAHGVLLLNSNAMDVTLQPTPALTYRTTGGILDFYIVLGPTPELVTQQYTELIGRPAMIPYWALGFHLSRYGYQNDAEISSLYDAMVAAQIPYDVQHVDIDYMNRKLDFTLSANFQNLSLLIEQMKKNGMRFILILDPAISGNETQYLPFIRGQENNVFIKWPDTNDIVWGKVWPDLPNVIVDGSLDHETQVKLYRAYVAFPDFFRNSTAAWWKKEIEELYANPREPEKSLKFDGLWIDMNEPSNFVDGSVRGCSNEMLNNPPYMPYLESRDKGLSSKTLCMESQQILPDSSPVEHYNVHNLYGWSQTRPTYEAVQEVTGQRGVIITRSTFPSSGRWGGHRLGNNTAAWDQLGKSIIGMMEFSLFGIPYTGADICGFFGDAEYEMCVRWMQLGAFYPFSRNHNNIGTRRQDPVAWNSTFEMLSRKVLETRYTLLPYLYTLMHKAHVEGSTVVRPLLHEFTDDRTTWDIDRQFMLGPAILISPVLETSTFEISAYFPRARWYDYSTGTSSTSTGQRKILKAPLDHINLHVRGGYILPWQEPAMNTHSSRQNFMGLIVALDDNGTAEGQVFWDDGQSIDTYENGNYFLANFIAAQWCLEHQ

SEQ ID NO: 8817 - protein, 340 aa, Artificial Sequence
  Synthetic polypeptide
MAAPSAGSWSTFQHKELMAADRGRRILGVCGMHPHHQETLKKNRVVLAKQLLLSELLEHLLEKDIITLEMRELIQAKVGSFSQNVELLNLLPKRGPQAFDAFCEALRETKQGHLEDMLLTTLSGLQHVLPPLSCDYDLSLPFPVCESCPLYKKLRLSTDTVEHSLDNKDGPVCLQVKPCTPEFYQTHFQLAYRLQSRPRGLALVLSNVHFTGEKELEFRSGGDVDHSTLVTLFKLLGYDVHVLCDQTAQEMQEKLQNFAQLPAHRVTDSCIVALLSHGVEGAIYGVDGKLLQLQEVFQLFDNANCPSLQNKPKMFFIQACRGGPGHCLMHGSTYKCSMNG

SEQ ID NO: 8818 - protein, 109 aa, Artificial Sequence
  Synthetic polypeptide
MEVPTAYMISPKEREKDSSDSILQDLTWTMCEKALNLQLETLLEAPSHQSSHQDTERHPLLWSFQGSWQLFYRKREKVPVSPLPSAMIVSFLRTLQQYGTVSQLNLFPL

SEQ ID NO: 8819 - protein, 67 aa, Artificial Sequence
  Synthetic polypeptide
MEVPTAYMISPKEREKASNLKLSSRPPATSHLIRTPKDTHYCGASKGLGNSFIGNERRCLFLLCLLP

SEQ ID NO: 8820 - protein, 35 aa, Artificial Sequence
  Synthetic polypeptide
MQAAPRAGCGAALLLWIVSSCLCRAWTAPSTSQKA

SEQ ID NO: 8821 - protein, 58 aa, Artificial Sequence
  Synthetic polypeptide
MAEPPRLPLTFEDVAIYFSEQEWQDLEAWQKELYKHVMRSNYETLVSLDSKQVQSESQ

SEQ ID NO: 8822 - protein, 21 aa, Artificial Sequence
  Synthetic polypeptide
MRSNYETLVSLDSKQVQSESQ

SEQ ID NO: 8823 - protein, 10 aa, Artificial Sequence
  Synthetic polypeptide
MAEPPRHYSQ

SEQ ID NO: 8824 - protein, 14 aa, Artificial Sequence
  Synthetic polypeptide
MAEPPRARRRGLRL

SEQ ID NO: 8825 - protein, 11 aa, Artificial Sequence
  Synthetic polypeptide
MAESAPARDTC

SEQ ID NO: 8826 - protein, 265 aa, Artificial Sequence
  Synthetic polypeptide
MDPPAEKPGEAGGLQITPQLLKSRTGEFSLESILLLKLRGLGLADLGCLGECLGLEWLDLSGNALTHLGPLASLRQLAVLNVSNNRLTGLEPLATCENLQSLNAAGNLLATPGQLQCLAGLPCLEYLRLRDPLARLSNPLCANPSYWAAVRELLPGLKVIDGERVIGRGSEFYQLCRDLDSSLRPSSSPGPRATEAQPWVEPGYWESWPSRSSSILEEACRQFQDTLQECWDLDRQASDSLAQAEQLIFQQTFRRQRGSFPLAPT

SEQ ID NO: 8827 - protein, 63 aa, Artificial Sequence
  Synthetic polypeptide
MDGRRVPAQPAAEVRPGQGRGATAGPRGAAPPAGRVTVRLASLQSEGAQCLFVQLLRVAVQLG

SEQ ID NO: 8828 - protein, 316 aa, Artificial Sequence
  Synthetic polypeptide
MGSAVMDTKKKKDVSSPGGSGGKKNASQKRRSLRVHIPDLSSFAMPLLDGDLEGSGKHSSRKVDSPFGPGSPSKGFFSRGPQPRPSSPMSAPVRPKTSPGSPKTVFPFSYQESPPRSPRRMSFSGIFRSSSKESSPNSNPATSPGGIRFFSRSRKTSGLSSSPSTPTQVTKQHTFPLESYKHEPERLENRIYASSSPPDTGQRFCPSSFQSPTRPPLASPTHYAPSKAAALAAALGPAEAGMLEKLEFEDEAVEDSESGVYMRFMRSHKCYDIVPTSSKLVVFDTTLQVRWLTPVIPTLWEAEVDGSLEVRSSRRA

SEQ ID NO: 8829 - protein, 75 aa, Artificial Sequence
  Synthetic polypeptide
MLEKLEFEDEAVEDSESGVYMRFMRSHKCYDIVPTSSKLVVFDTTLQVRWLTPVIPTLWEAEVDGSLEVRSSRRA

SEQ ID NO: 8830 - protein, 191 aa, Artificial Sequence
  Synthetic polypeptide
MKRFGSLRSNKKHKDQNRSTERRQSEPHGLFASGLSSSPSTPTQVTKQHTFPLESYKHEPERLENRIYASSSPPDTGQRFCPSSFQSPTRPPLASPTHYAPSKAAALAAALGPAEAGMLEKLEFEDEVEDSESGVYMRFMRSHKCYDIVPTSSKLVVFDTTLQVRWLTPVIPTLWEAEVDGSLEVRSSRRA

SEQ ID NO: 8831 - protein, 192 aa, Artificial Sequence
  Synthetic polypeptide
MKRFGSLRSNKKHKDQNRSTERRQSEPHGLFASGLSSSPSTPTQVTKQHTFPLESYKHEPERLENRIYASSSPPDTGQRFCPSSFQSPTRPPLASPTHYAPSKAAALAAALGPAEAGMLEKLEFEDEAVEDSESGVYMRFMRSHKCYDIVPTSSKLVVFDTTLQVRWLTPVIPTLWEAEVDGSLEVRSSRRA

SEQ ID NO: 8832 - protein, 272 aa, Artificial Sequence
  Synthetic polypeptide
MPLLDGDLEGSGKHSSRKVDSPFGPGSPSKGFFSRGPQPRPSSPMSAPVRPKTSPGSPKTVFPFSYQESPPRSPRRMSFSGIFRSSSKESSPNSNPATSPGGIRFFSRSRKTSGLSSSPSTPTQVTKQHTFPLESYKHEPERLENRIYASSSPPDTGQRFCPSSFQSPTRPPLASPTHYAPSKAAALAAALGPAEAGMLEKLEFEDEAVEDSESGVYMRFMRSHKCYDIVPTSSKLVVFDTTLQVRWLTPVIPTLWEAEVDGSLEVRSSRRA

SEQ ID NO: 8833 - protein, 256 aa, Artificial Sequence
  Synthetic polypeptide
MGSAVMDTKKKKDVSSPGGSGGKKNASQKRRSLRVHIPDLSSFAMPLLDGDLEGSGKHSSRKVDSPFGPGSPSKGFFSRGPQPRPSSPMSAPVRPKTSPGSPKTVFPFSYQESPPRSPRRMSFSGIFRSSSKESSPNSNPATSPGGIRFFSRSRKTSGLSSSPSTPTQVTKQHTFPLESYKHEPERLENRIYASSSPPDTGQRFCPSSFQSPTRPPLASPTHYAPSKAAALAAALGPAEAGMLEKLEFEDEGGSRL

SEQ ID NO: 8834 - protein, 15 aa, Artificial Sequence
  Synthetic polypeptide
MLEKLEFEDEGGSRL

SEQ ID NO: 8835 - protein, 132 aa, Artificial Sequence
  Synthetic polypeptide
MKRFGSLRSNKKHKDQNRSTERRQSEPHGLFASGLSSSPSTPTQVTKQHTFPLESYKHEPERLENRIYASSSPPDTGQRFCPSSFQSPTRPPLASPTHYAPSKAAALAAALGPAEAGMLEKLEFEDEGGSRL

SEQ ID NO: 8836 - protein, 212 aa, Artificial Sequence
  Synthetic polypeptide
MPLLDGDLEGSGKHSSRKVDSPFGPGSPSKGFFSRGPQPRPSSPMSAPVRPKTSPGSPKTVFPFSYQESPPRSPRRMSFSGIFRSSSKESSPNSNPATSPGGIRFFSRSRKTSGLSSSPSTPTQVTKQHTFPLESYKHEPERLENRIYASSSPPDTGQRFCPSSFQSPTRPPLASPTHYAPSKAAALAAALGPAEAGMLEKLEFEDEGGSRL

SEQ ID NO: 8837 - protein, 252 aa, Artificial Sequence
  Synthetic polypeptide
MGSAVMDTKKKKDVSSPGGSGGKKNASQKRRSLRVHIPDLSSFAMPLLDGDLEGSGKHSSRKVDSPFGPGSPSKGFFSRGPQPRPSSPMSAPVRPKTSPGSPKTVFPFSYQESPPRSPRRMSFSGIFRSSSKESSPNSNPATSPGGIRFFSRSRKTSGLSSSPSTPTQVTKQHTFPLESYKHEPERLENRIYASSSPPDTGQRFCPSSFQSPTRPPLASPTHYAPSKAAALAAALGPAEAGMLEKLEFEDEG

SEQ ID NO: 8838 - protein, 11 aa, Artificial Sequence
  Synthetic polypeptide
MLEKLEFEDEG

SEQ ID NO: 8839 - protein, 128 aa, Artificial Sequence
  Synthetic polypeptide
MKRFGSLRSNKKHKDQNRSTERRQSEPHGLFASGLSSSPSTPTQVTKQHTFPLESYKHEPERLENRIYASSSPPDTGQRFCPSSFQSPTRPPLASPTHYAPSKAAALAAALGPAEAGMLEKLEFEDEG

SEQ ID NO: 8840 - protein, 208 aa, Artificial Sequence
  Synthetic polypeptide
MPLLDGDLEGSGKHSSRKVDSPFGPGSPSKGFFSRGPQPRPSSPMSAPVRPKTSPGSPKTVFPFSYQESPPRSPRRMSFSGIFRSSSKESSPNSNPATSPGGIRFFSRSRKTSGLSSSPSTPTQVTKQHTFPLESYKHEPERLENRIYASSSPPDTGQRFCPSSFQSPTRPPLASPTHYAPSKAAALAAALGPAEAGMLEKLEFEDEG

SEQ ID NO: 8841 - protein, 25 aa, Artificial Sequence
  Synthetic polypeptide
MPQPESQKAAILGCGQGAGCGGSRL

SEQ ID NO: 8842 - protein, 100 aa, Artificial Sequence
  Synthetic polypeptide
MSSEEDKSVEQPQPPPPPPEEPGAPAPSPAAADKRPRGRPRKDGASPFQRARKKPRSRGKTAVEDEDSMDGLETTETETIVETGIRWGLGIYSPWIRWHH

SEQ ID NO: 8843 - protein, 324 aa, Artificial Sequence
  Synthetic polypeptide
MAGSLPPCVVDCGTGYTKLGYAGNTEPQFIIPSCIAIRESAKVVDQAQRRVLRGVDDLDFFIGDEAIDKPTYATKWPIRHGIIEDWDLMERFMEQVVFKYLRAEPEDHYFLMTEPPLNTPENREYLAEIMFESFNVPGLYIAVQAVLALAASWTSRQVGERTLTGIVIDSGDGVTHVIPVAEGYVIGSCIKHIPIAGRDITYFIQQLLREREVGIPPEQSLETAKAIKEKYCYICPDIVKEFAKYDVDPRKWIKQYTGINAINQKKFVIDVGYERFLGPEIFFHPEFANPDFMESISDVVDEVIQNCPIDVRRPLYKKFRIHDC

SEQ ID NO: 8844 - protein, 236 aa, Artificial Sequence
  Synthetic polypeptide
MERFMEQVVFKYLRAEPEDHYFLMTEPPLNTPENREYLAEIMFESFNVPGLYIAVQAVLALAASWTSRQVGERTLTGIVIDSGDGVTHVIPVAEGYVIGSCIKHIPIAGRDITYFIQQLLREREVGIPPEQSLETAKAIKEKYCYICPDIVKEFAKYDVDPRKWIKQYTGINAINQKKFVIDVGYERFLGPEIFFHPEFANPDFMESISDVVDEVIQNCPIDVRRPLYKKFRIHDC

SEQ ID NO: 8845 - protein, 347 aa, Artificial Sequence
  Synthetic polypeptide
MAGSLPPCVVDCGTGYTKLGYAGNTEPQFIIPSCIAIRESAKVVDQAQRRVLRGVDDLDFFIGDEAIDKPTYATKWPIRHGIIEDWDLMERFMEQVVFKYLRAEPEDHYFLMTEPPLNTPENREYLAEIMFESFNVPGLYIAVQAVLALAASWTSRQVGERTLTGIVIDSGDGVTHVIPVAEGYVIGSCIKHIPIAGRDITYFIQQLLREREVGIPPEQSLETAKAIKEKYCYICPDIVKEFAKYDVDPRKWIKQYTGINAINQKKFVIDVGYERFLGPEIFFHPEFANPDFMESISDVVDEVIQNCPIDVRRPLYKDSARLHPGEINSLVPHTKPVWWSLHTDTCD

SEQ ID NO: 8846 - protein, 259 aa, Artificial Sequence
  Synthetic polypeptide
MERFMEQVVFKYLRAEPEDHYFLMTEPPLNTPENREYLAEIMFESFNVPGLYIAVQAVLALAASWTSRQVGERTLTGIVIDSGDGVTHVIPVAEGYVIGSCIKHIPIAGRDITYFIQQLLREREVGIPPEQSLETAKAIKEKYCYICPDIVKEFAKYDVDPRKWIKQYTGINAINQKKFVIDVGYERFLGPEIFFHPEFANPDFMESISDVVDEVIQNCPIDVRRPLYKDSARLHPGEINSLVPHTKPVWWSLHTDTCD

SEQ ID NO: 8847 - protein, 323 aa, Artificial Sequence
  Synthetic polypeptide
MAGSLPPCVVDCGTGYTKLGYAGNTEPQFIIPSCIAIRESAKVVDQAQRRVLRGVDDLDFFIGDEAIDKPTYATKWPIRHGIIEDWDLMERFMEQVVFKYLRAEPEDHYFLMTEPPLNTPENREYLAEIMFESFNVPGLYIAVQAVLALAASWTSRQVGERTLTGIVIDSGDGVTHVIPVAEGYVIGSCIKHIPIAGRDITYFIQQLLREREVGIPPEQSLETAKAIKEKYCYICPDIVKEFAKYDVDPRKWIKQYTGINAINQKKFVIDVGYERFLGPEIFFHPEFANPDFMESISDVVDEVIQNCPIDVRRPLYKRTLTGT

SEQ ID NO: 8848 - protein, 235 aa, Artificial Sequence
  Synthetic polypeptide
MERFMEQVVFKYLRAEPEDHYFLMTEPPLNTPENREYLAEIMFESFNVPGLYIAVQAVLALAASWTSRQVGERTLTGIVIDSGDGVTHVIPVAEGYVIGSCIKHIPIAGRDITYFIQQLLREREVGIPPEQSLETAKAIKEKYCYICPDIVKEFAKYDVDPRKWIKQYTGINAINQKKFVIDVGYERFLGPEIFFHPEFANPDFMESISDVVDEVIQNCPIDVRRPLYKRTLTGT

SEQ ID NO: 8849 - protein, 256 aa, Artificial Sequence
  Synthetic polypeptide
MEHPLFGCLRSPHATAQGLHPFSQSSLALHGRSDHMSYPELSTSSSSCIIAGYPNEEGMFASQHHRGHHHHHHHHHHHHHQQQQHQALQTNWHLPQMSSPPSAARHSLCLQPDSGGPPELGSSPPVLCSNSSSLGSSTPTGAACAPGDYGRQALSPAEAEKRSGGKRKSDSSDSQEGNYKSEVNSKPRKERTAFTKEQIRELEAEFAHHNYLTRLRRYEIAVNLDLTERQPLPMDQSTCTSSPLRPIKASDPARLK

SEQ ID NO: 8850 - protein, 34 aa, Artificial Sequence
  Synthetic polypeptide
MEGQDEVSAREQHFHSQVRESTLSDGLLWDLVIM

SEQ ID NO: 8851 - protein, 32 aa, Artificial Sequence
  Synthetic polypeptide
GQDEVSAREQHFHSQVRESTLSDGLLWDLVIM

SEQ ID NO: 8852 - protein, 39 aa, Artificial Sequence
  Synthetic polypeptide
MKEDGRAGRGVGAGAALPQPSAGVHAFRRPIVGPCDHVS

SEQ ID NO: 8853 - protein, 145 aa, Artificial Sequence
  Synthetic polypeptide
MVDYYEVLGVQRHASPEDIKKAYRKLALKWHPDKNPENKEEAERKFKQVAEAYEVLSDAKKRDIYDKYGKEGLNGGGGGGSHFDSPFEFGFTFRNPDDVFREFFGGRDPFSFDFFGWARWLMPVIPALWEPEAGRSPEVGSSRPA

SEQ ID NO: 8854 - protein, 96 aa, Artificial Sequence
  Synthetic polypeptide
MPHPRILKRPKKRDIYDKYGKEGLNGGGGGGSHFDSPFEFGFTFRNPDDVFREFFGGRDPFSFDFFGWARWLMPVIPALWEPEAGRSPEVGSSRPA

SEQ ID NO: 8855 - protein, 554 aa, Artificial Sequence
  Synthetic polypeptide
MGPPLPLLLLLLLLLPPRVLPAAPSSVPRGRQLPGRLGCLLEEGLCGASEACVNGFTWQDDYTQYVMDQELADLPKTYLRRPEASSPARPSKHSVGSERRYSREGGAALANALRRHLPFLEALSQAPASDVLARTHTAQDRPPAEGDDRFSESILTYVAHTSALTYPPGSRTQLREDLLPRTLGQLQPDELSPKVDSGVDRHHLMAALSAYAAQRPPAPPGEGSLEPQYLLRAPSRMPRPLLAPAAPQKWPSPLGDSEDPSSTGDGARIHTLLKDLQRQPAEVRGLSGLELDGMAELMAGLMQGVDHGVARGSPGRAALGESGEQADGPKATLRGDSFPDDGVQDDDDRLYQEVHRLSATLGGLLQDHGSRLLPGALPFARPLDMERKKSEHPESSLSSEEETAGVENVKSQTYSKDLLGQQPHSEPGAAAFGELQNQMPGPSKEEQSLPAGAQEALSDGLQLEVQPSEEEARGYIVTDRDPLRPEEGRRLVEDVARLLQVPSSAFADVDIQTTQRVRKNLHDLYIRQKTNIQTLQRTHISKKQTVPSNNGLKT

SEQ ID NO: 8856 - protein, 575 aa, Artificial Sequence
  Synthetic polypeptide
MGPPLPLLLLLLLLLPPRVLPAAPSSVPRGRQLPGRLDGVFGRCQKVPAMDFYRYEVSPVALQRLRVALQKLSGTGFTWQDDYTQYVMDQELADLPKTYLRRPEASSPARPSKHSVGSERRYSREGGAALANALRRHLPFLEALSQAPASDVLARTHTAQDRPPAEGDDRFSESILTYVAHTSALTYPPGSRTQLREDLLPRTLGQLQPDELSPKVDSGVDRHHLMAALSAYAAQRPPAPPGEGSLEPQYLLRAPSRMPRPLLAPAAPQKWPSPLGDSEDPSSTGDGARIHTLLKDLQRQPAEVRGLSGLELDGMAELMAGLMQGVDHGVARGSPGRAALGESGEQADGPKATLRGDSFPDDGVQDDDDRLYQEVHRLSATLGGLLQDHGSRLLPGALPFARPLDMERKKSEHPESSLSSEEETAGVENVKSQTYSKDLLGQQPHSEPGAAAFGELQNQMPGPSKEEQSLPAGAQEALSDGLQLEVQPSEEEARGYIVTDRDPLRPEEGRRLVEDVARLLQVPSSAFADVDIQTTQRVRKNLHDLYIRQKTNIQTLQRTHISKKQTVPSNNGLKT

SEQ ID NO: 8857 - protein, 592 aa, Artificial Sequence
  Synthetic polypeptide
MGPPLPLLLLLLLLLPPRVLPAAPSSVPRGRQLPGRLGCLLEEGLCGASEACVNDGVFGRCQKVPAMDFYRYEVSPVALQRLRVALQKLSGTGFTWQDDYTQYVMDQELADLPKTYLRRPEASSPARPSKHSVGSERRYSREGGAALANALRRHLPFLEALSQAPASDVLARTHTAQDRPPAEGDDRFSESILTYVAHTSALTYPPGSRTQLREDLLPRTLGQLQPDELSPKVDSGVDRHHLMAALSAYAAQRPPAPPGEGSLEPQYLLRAPSRMPRPLLAPAAPQKWPSPLGDSEDPSSTGDGARIHTLLKDLQRQPAEVRGLSGLELDGMAELMAGLMQGVDHGVARGSPGRAALGESGEQADGPKATLRGDSFPDDGVQDDDDRLYQEVHRLSATLGGLLQDHGSRLLPGALPFARPLDMERKKSEHPESSLSSEEETAGVENVKSQTYSKDLLGQQPHSEPGAAAFGELQNQMPGPSKEEQSLPAGAQEALSDGLQLEVQPSEEEARGYIVTDRDPLRPEEGRRLVEDVARLLQVPSSAFADVDIQTTQRVRKNLHDLYIRQKTNIQTLQRTHISKKQTVPSNNGLKT

SEQ ID NO: 8858 - protein, 615 aa, Artificial Sequence
  Synthetic polypeptide
MAVESEYSLLRTEASFPTMKMFCVSHTLPRVEVMFVSGPQTRERTEPVDPRWQCLVQMWAGCLLEEGLCGASEACVNDGVFGRCQKVPAMDFYRYEVSPVALQRLRVALQKLSGTGFTWQDDYTQYVMDQELADLPKTYLRRPEASSPARPSKHSVGSERRYSREGGAALANALRRHLPFLEALSQAPASDVLARTHTAQDRPPAEGDDRFSESILTYVAHTSALTYPPGSRTQLREDLLPRTLGQLQPDELSPKVDSGVDRHHLMAALSAYAAQRPPAPPGEGSLEPQYLLRAPSRMPRPLLAPAAPQKWPSPLGDSEDPSSTGDGARIHTLLKDLQRQPAEVRGLSGLELDGMAELMAGLMQGVDHGVARGSPGRAALGESGEQADGPKATLRGDSFPDDGVQDDDDRLYQEVHRLSATLGGLLQDHGSRLLPGALPFARPLDMERKKSEHPESSLSSEEETAGVENVKSQTYSKDLLGQQPHSEPGAAAFGELQNQMPGPSKEEQSLPAGAQEALSDGLQLEVQPSEEEARGYIVTDRDPLRPEEGRRLVEDVARLLQVPSSAFADVDIQTTQRVRKNLHDLYIRQKTNIQTLQRTHISKKQTVPSNNGLKT

SEQ ID NO: 8859 - protein, 225 aa, Artificial Sequence
  Synthetic polypeptide
MEKRETFVQAVSKELVGEFLQFVQLDKEASDPFSLNELLDELSRKQKEELWQRLKNLLTDVLLESPVDGWQVVEAQGEDNMETEHGSKMRKSIEIIYAITSVILASVSVINESENYEALLECVIILNGILYALPESERKLQSSIQDLCVTWWEKGLPAKEDTGKTAFVMLLRRSLETKTGADVCRLWRIHQALYCFDYDLEESGEIKDMLLECFININYIKKEEN

SEQ ID NO: 8860 - protein, 16 aa, Artificial Sequence
  Synthetic polypeptide
IWRKVEKLKICYLSAS

SEQ ID NO: 8861 - protein, 17 aa, Artificial Sequence
  Synthetic polypeptide
MLLECFININYIKKEEN

SEQ ID NO: 8862 - protein, 67 aa, Artificial Sequence
  Synthetic polypeptide
MEKRETFVQAVSKELVGEFLQFVQLDPMSSPLESGLGLCCFDGRNIEEVAFRKFGSFYFLSEPVVVM

SEQ ID NO: 8863 - protein, 255 aa, Artificial Sequence
  Synthetic polypeptide
MTPPSRAEAGVRRSRVPSEGRWRGAEPPGISASTQPASAGRAARHCGAMSGARGEGPEAGAGGAGGRAAPENPGGVLSVELPGLLAQLARSFALLLPVYALGYLGLSFSWVLLALALLAWCRRSRGLKALRLCRALALLEDEERVVRLGVRACDLPAWVHFPDTERAEWLNKTVKHMWPFICQFIEKLFRETIEPAVRGANTHLSTFSFTKVDVGQQPLRINGVKVYTENVDKRQIILDLQISYKAEAAQGCVGR

SEQ ID NO: 8864 - protein, 225 aa, Artificial Sequence
  Synthetic polypeptide
SASTQPASAGRAARHCGAMSGARGEGPEAGAGGAGGRAAPENPGGVLSVELPGLLAQLARSFALLLPVYALGYLGLSFSWVLLALALLAWCRRSRGLKALRLCRALALLEDEERVVRLGVRACDLPAWVHFPDTERAEWLNKTVKHMWPFICQFIEKLFRETIEPAVRGANTHLSTFSFTKVDVGQQPLRINGVKVYTENVDKRQIILDLQISYKAEAAQGCVGR

SEQ ID NO: 8865 - protein, 492 aa, Artificial Sequence
  Synthetic polypeptide
MEPGKRRTKDDTWKADDLRKHLWAIQSGGSKEERKHREKKLRKESEMDLPEHKEPRCRDPDQDARSRDRVAEVHTAKESPRGERDRDRQRERRRDAKDREKEKLKEKHREAEKSHSRGKDREKEKDRRARKEELRQTVAHHNLLGQETRDRQLLERAERKGRSVSKVRSEEKDEDSERGDEDRERRYRERKLQYGDSKDNPLKYWLYKEEGERRHRKPREPDRDNKHREKSSTREKREKYSKEKSNSFSDKGEERHKEKRHKEGFHFDDERHQSNVDRKEKSAKDEPRKRESQNGEHRNRGASSKRDGTSSQHAENLVRNHGKDKDSRRKHGHEEGSSVWWKLDQRPGGEETVEIEKEETDLENARADAYTASCEDDFEDYEDDFEVCDGDDDESSNEPESREKLEELPLAQKKEIQEIQRAINAENERIGELSLKLFQKRGRTEFEKEPRTDTNSSPSRASVCGIFVDFASASHRQKSRTQALKQKQGIKK

SEQ ID NO: 8866 - protein, 269 aa, Artificial Sequence
  Synthetic polypeptide
DNKHREKSSTREKREKYSKEKSNSFSDKGEERHKEKRHKEGFHFDDERHQSNVDRKEKSAKDEPRKRESQNGEHRNRGASSKRDGTSSQHAENLVRNHGKDKDSRRKHGHEEGSSVWWKLDQRPGGEETVEIEKEETDLENARADAYTASCEDDFEDYEDDFEVCDGDDDESSNEPESREKLEELPLAQKKEIQEIQRAINAENERIGELSLKLFQKRGRTEFEKEPRTDTNSSPSRASVCGIFVDFASASHRQKSRTQALKQKQGIKK

SEQ ID NO: 8867 - protein, 367 aa, Artificial Sequence
  Synthetic polypeptide
MEAGPPGSARPAEPGPCLSGQRGADHTASASLQSVAGTEPGRHPQAVAAVLPAGGCGERMGVPTPKQFCPILERPLISYTLQALERVCWIKDIVVAVTGENMEVMKSIIQKYQHKRISLVEAGVTRHRSIFNGLKALAEDQINSKLSKPEVVIIHDAVRPFVEEGVLLKVVTAAKEHGCSDYDLEFGTECLQLALKYCCTKAKLVEGSPDLWKVTYKRDLYAAESIIKERISQEICVVMDTEEDNKHVGHLLEEVLKSELNHVKVTSEALGHAGRHLQQIILDQCYNFVCVNVTTSDFQETQKLLSMLEESSLCILYPVVVVSIPYSLKQNNTEIRPINNPTMTPVCSSERKSPVSVTFNQKIQSLI

SEQ ID NO: 8868 - protein, 417 aa, Artificial Sequence
  Synthetic polypeptide
MEAGPPGSARPAEPGPCLSGQRGADHTASASLQSVAGTEPGRHPQAVAAVLPAGGCGERMGVPTPKQFCPILERPLISYTLQALERVCWIKDIVVAVTGENMEVMKSIIQKYQHKRISLVEAGVTRHRSIFNGLKALAEDQINSKLSKPEVVIIHDAVRPFVEEGVLLKVVTAAKEHGAAGAIRPLVSTVVSPSADGCLDYSLERARHRASEMPQAFLFDVIYEAYQQCSDYDLEFGTECLQLALKYCCTKAKLVEGSPDLWKVTYKRDLYAAESIIKERISQEICVVMDTEEDNKHVGHLLEEVLKSELNHVKVTSEALGHAGRHLQQIILDQCYNFVCVNVTTSDFQETQKLLSMLEESSLCILYPVVVVSIPYSLKQNNTEIRPINNPTMTPVCSSERKSPVSVTFNQKIQSLI

SEQ ID NO: 8869 - protein, 153 aa, Artificial Sequence
  Synthetic polypeptide
MLTEASLSIWGWGSLGIVLFLITFGPFVIFYLTFYILCFVGGGLVVTLLFGKTNSEKYLEQCEHSFLPPTSPGVPKCLEEMKREARTIKIDRRLTGANIIDEPLQQVIQFSLRDYVQYWYYTLSDDESFLLEIRQTLQNALIQFATRIIVRIK

SEQ ID NO: 8870 - protein, 344 aa, Artificial Sequence
  Synthetic polypeptide
MMSSPAQPDLMWNLVPWVLFCGCCRIFPDGVAGREQLLAQQRMHSMISSVDVKSEVPVGLEPISPLDLRTDLRMMMPVVDPVVREKQLQQELLLIQQQQQIQKQLLIAEFQKQHENLTRQHQAQLQEHIKELLAIKQQQELLEKEQKLEQQRQEQEVERHRREQQLPPLRGKDRGRERAVASTEVKQKLQEFLLSKSATKDTPTNGKNHSVSRHPKLWYTAAHHTSLDQSSPPLSGTSPSYKYTLPGAQDAKDDFPLRKTESSVSSSSPGSGPSSPNNGPTGSVTENETSVLPPTPHAEQMVSQQRILIHEDSMNLLSLYTSPSLPNITLGLPAVPSQLNFLHC

SEQ ID NO: 8871 - protein, 346 aa, Artificial Sequence
  Synthetic polypeptide
MHSMISSVDVKSEVPVGLEPISPLDLRTDLRMMMPVVDPVVREKQLQQELLLIQQQQQIQKQLLIAEFQKQHENLTRQHQAQLQEHIKELLAIKQQQELLEKEQKLEQQRQEQEVERHRREQQLPPLRGKDRGRERAVASTEVKQKLQEFLLSKSATKDTPTNGKNHSVSRHPKLWYTAAHHTSLDQSSPPLSGTSPSYKYTLPGAQDAKDDFPLRKTASEPNLKVRSRLKQKVAERRSSPLLRRKDGNVVTSFKKRMFEVTESSVSSSSPGSGPSSPNNGPTGSVTENETSVLPPTPHAEQMVSQQRILIHEDSMNLLSLYTSPSLPNITLGLPAVPSQLNFLHC

SEQ ID NO: 8872 - protein, 302 aa, Artificial Sequence
  Synthetic polypeptide
MHSMISSVDVKSEVPVGLEPISPLDLRTDLRMMMPVVDPVVREKQLQQELLLIQQQQQIQKQLLIAEFQKQHENLTRQHQAQLQEHIKELLAIKQQQELLEKEQKLEQQRQEQEVERHRREQQLPPLRGKDRGRERAVASTEVKQKLQEFLLSKSATKDTPTNGKNHSVSRHPKLWYTAAHHTSLDQSSPPLSGTSPSYKYTLPGAQDAKDDFPLRKTESSVSSSSPGSGPSSPNNGPTGSVTENETSVLPPTPHAEQMVSQQRILIHEDSMNLLSLYTSPSLPNITLGLPAVPSQLNFLHC

SEQ ID NO: 8873 - protein, 333 aa, Artificial Sequence
  Synthetic polypeptide
MLQTIYESDSCFSSDGVAGREQLLAQQRMHSMISSVDVKSEVPVGLEPISPLDLRTDLRMMMPVVDPVVREKQLQQELLLIQQQQQIQKQLLIAEFQKQHENLTRQHQAQLQEHIKLQQELLAIKQQQELLEKEQKLEQQRQEQEVERHRREQQLPPLRGKDRGRERAVASTEVKQKLQEFLLSKSATKDTPTNGKNHSVSRHPKLWYTAAHHTSLDQSSPPLSGTSPSYKYTLPGAQDAKDDFPLRKTESSVSSSSPGSGPSSPNNGPTGSVTENETSVLPPTPHAEQMVSQQRILIHEDSMNLLSLYTSPSLPNITLGLPAVPSQLNFLHC

SEQ ID NO: 8874 - protein, 305 aa, Artificial Sequence
  Synthetic polypeptide
MHSMISSVDVKSEVPVGLEPISPLDLRTDLRMMMPVVDPVVREKQLQQELLLIQQQQQIQKQLLIAEFQKQHENLTRQHQAQLQEHIKLQQELLAIKQQQELLEKEQKLEQQRQEQEVERHRREQQLPPLRGKDRGRERAVASTEVKQKLQEFLLSKSATKDTPTNGKNHSVSRHPKLWYTAAHHTSLDQSSPPLSGTSPSYKYTLPGAQDAKDDFPLRKTESSVSSSSPGSGPSSPNNGPTGSVTENETSVLPPTPHAEQMVSQQRILIHEDSMNLLSLYTSPSLPNITLGLPAVPSQLNFLHC

SEQ ID NO: 8875 - protein, 349 aa, Artificial Sequence
  Synthetic polypeptide
MHSMISSVDVKSEVPVGLEPISPLDLRTDLRMMMPVVDPVVREKQLQQELLLIQQQQQIQKQLLIAEFQKQHENLTRQHQAQLQEHIKLQQELLAIKQQQELLEKEQKLEQQRQEQEVERHRREQQLPPLRGKDRGRERAVASTEVKQKLQEFLLSKSATKDTPTNGKNHSVSRHPKLWYTAAHHTSLDQSSPPLSGTSPSYKYTLPGAQDAKDDFPLRKTASEPNLKVRSRLKQKVAERRSSPLLRRKDGNVVTSFKKRMFEVTESSVSSSSPGSGPSSPNNGPTGSVTENETSVLPPTPHAEQMVSQQRILIHEDSMNLLSLYTSPSLPNITLGLPAVPSQLNFLHC

SEQ ID NO: 8876 - protein, 318 aa, Artificial Sequence
  Synthetic polypeptide
MMMPVVDPVVREKQLQQELLLIQQQQQIQKQLLIAEFQKQHENLTRQHQAQLQEHIKLQQELLAIKQQQELLEKEQKLEQQRQEQEVERHRREQQLPPLRGKDRGRERAVASTEVKQKLQEFLLSKSATKDTPTNGKNHSVSRHPKLWYTAAHHTSLDQSSPPLSGTSPSYKYTLPGAQDAKDDFPLRKTASEPNLKVRSRLKQKVAERRSSPLLRRKDGNVVTSFKKRMFEVTESSVSSSSPGSGPSSPNNGPTGSVTENETSVLPPTPHAEQMVSQQRILIHEDSMNLLSLYTSPSLPNITLGLPAVPSQLNFLHC

SEQ ID NO: 8877 - protein, 269 aa, Artificial Sequence
  Synthetic polypeptide
MMMPVVDPVVREKQLQQELLLIQQQQQIQKQLLIAEFQKQHENLTRQHQAQLQEHIKELLAIKQQQELLEKEQKLEQQRQEQEVERHRREQQLPPLRGKDRGRERAVASTEVKQKLQEFLLSKSATKDTPTNGKNHSVSRHPKLWAAHHTSLDQSSPPLSGTSPSYKYTLPGAQDAKDDFPLRKTESSVSSSSPGSGPSSPNNGPTGSVTENETSVLPPTPHAEQMVSQQRILIHEDSMNLLSLYTSPSLPNITLGLPAVPSQLNFLHC

SEQ ID NO: 8878 - protein, 520 aa, Artificial Sequence
  Synthetic polypeptide
MENSERAEEMQENYQRNGTAEEQPKLRKEAVGSIEIFRFADGLDITLMILGILASLVNGACLPLMPLVLGEMSDNLISGCLVQTNTTNYQNCTQSQEKLNEDMTLLTLYYVGIGVAALIFGYIQISLWIITAARQTKRIRKQFFHSVLAQDIGWFDSCDIGELNTRMTDDIDKISDGIGDKIALLFQNMSTFSIGLAVGLVKGWKLTLVTLSTSPLIMASAAACSRMVISLTSKELSAYSKAGAVAEEVLSSIRTVIAFRAQEKELQRYTQNLKDAKDFGIKRTIASKVSLGAVYFFMNGTYGLAFWYGTSLILNGEPGYTIGTVLAVFFSVIHSSYCIGAAVPHFETFAIARGAAFHIFQVIDKKPSIDNFSTAGYKPESIEGTVEFKNVSFNYPSRPSIKILKGLNLRIKSGETVALVGLNGSGKSTVVQLLQRLYDPDDGFIMVDENDIRALNVRHYRDHIGVVSQEPVLFGTTISNNIKYGRDDVTDEEMERAAREANAYDFIMEFPNGSQKIGHS

SEQ ID NO: 8879 - protein, 75 aa, Artificial Sequence
  Synthetic polypeptide
MVDENDIRALNVRHYRDHIGVVSQEPVLFGTTISNNIKYGRDDVTDEEMERAAREANAYDFIMEFPNGSQKIGHS

SEQ ID NO: 8880 - protein, 586 aa, Artificial Sequence
  Synthetic polypeptide
MENSERAEEMQENYQRNGTAEEQPKLRKEAVGSIEIFRFADGLDITLMILGILASLVNGACLPLMPLVLGEMSDNLISGCLVQTNTTNYQNCTQSQEKLNEDMTLLTLYYVGIGVAALIFGYIQISLWIITAARQTKRIRKQFFHSVLAQDIGWFDSCDIGELNTRMTDDIDKISDGIGDKIALLFQNMSTFSIGLAVGLVKGWKLTLVTLSTSPLIMASAAACSRMVISLTSKELSAYSKAGAVAEEVLSSIRTVIAFRAQEKELQRYTQNLKDAKDFGIKRTIASKVSLGAVYFFMNGTYGLAFWYGTSLILNGEPGYTIGTVLAVFFSVIHSSYCIGAAVPHFETFAIARGAAFHIFQVIDKKPSIDNFSTAGYKPESIEGTVEFKNVSFNYPSRPSIKILKGLNLRIKSGETVALVGLNGSGKSTVVQLLQRLYDPDDGFIMVDENDIRALNVRHYRDHIGVVSQEPVLFGTTISNNIKYGRDDVTDEEMERAAREANAYDFIMEFPNKFNTLVGEKGAQMSGGQKQRIAIARALVRNPKILILDEATSALDSESKSAVQAALEKPNLDCTAAISAHCNLPA

SEQ ID NO: 8881 - protein, 141 aa, Artificial Sequence
  Synthetic polypeptide
MVDENDIRALNVRHYRDHIGVVSQEPVLFGTTISNNIKYGRDDVTDEEMERAAREANAYDFIMEFPNKFNTLVGEKGAQMSGGQKQRIAIARALVRNPKILILDEATSALDSESKSAVQAALEKPNLDCTAAISAHCNLPA

SEQ ID NO: 8882 - protein, 609 aa, Artificial Sequence
  Synthetic polypeptide
MENSERAEEMQENYQRNGTAEEQPKLRKEAVGSIEIFRFADGLDITLMILGILASLVNGACLPLMPLVLGEMSDNLISGCLVQTNTTNYQNCTQSQEKLNEDMTLLTLYYVGIGVAALIFGYIQISLWIITAARQTKRIRKQFFHSVLAQDIGWFDSCDIGELNTRMTDDIDKISDGIGDKIALLFQNMSTFSIGLAVGLVKGWKLTLVTLSTSPLIMASAAACSRMVISLTSKELSAYSKAGAVAEEVLSSIRTVIAFRAQEKELQRYTQNLKDAKDFGIKRTIASKVSLGAVYFFMNGTYGLAFWYGTSLILNGEPGYTIGTVLAVFFSVIHSSYCIGAAVPHFETFAIARGAAFHIFQVIDKKPSIDNFSTAGYKPESIEGTVEFKNVSFNYPSRPSIKILKGLNLRIKSGETVALVGLNGSGKSTVVQLLQRLYDPDDGFIMVDENDIRALNVRHYRDHIGVVSQEPVLFGTTISNNIKYGRDDVTDEEMERAAREANAYDFIMEFPNKFNTLVGEKGAQMSGGQKQRIAIARALVRNPKILILDEATSALDSESKSAVQAALEKEARSASSPPPSHLGSEERLCPAAHRLRCGEHLCPAALSGM

SEQ ID NO: 8883 - protein, 164 aa, Artificial Sequence
  Synthetic polypeptide
MVDENDIRALNVRHYRDHIGVVSQEPVLFGTTISNNIKYGRDDVTDEEMERAAREANAYDFIMEFPNKFNTLVGEKGAQMSGGQKQRIAIARALVRNPKILILDEATSALDSESKSAVQAALEKEARSASSPPPSHLGSEERLCPAAHRLRCGEHLCPAALSGM

SEQ ID NO: 8884 - protein, 417 aa, Artificial Sequence
  Synthetic polypeptide
METLSSEESCDSFDSLESGKQQDVRFHSKYFTEELRRIFIEDTDSETEDFAGFTQSDLNGKTNPEVMVVESDLSDDGKASLVSEEEEDEEEDKATPRRSRSRRSSIGLRVAFQFPTKKLANKPDKNSSSEQLFSSARLQNEKKTILERKKDCRQVIQREDSTSESEDDSRDESQESSDALLKRTMNIKENKAMLAQLLAELNSMPDFFPVRTPTSASRKKTVRRAFSEGQITRRMNPTRSARPPEKFALENFTVSAAKFAEEFYSFRRRKTIGGKCREYRRRHRISSFRPVEDITEEDLENVAITVRDKIYDKVLGNTCHQCRQKTIDTKTVCRNQGCCGVRGQFCGPCLRNRYGEDVRSALLDPDWVCPPCRGICNCSYCRKRDGRCATGILIHLAKFYGYDNVKEYLERCGGSRL

SEQ ID NO: 8885 - protein, 451 aa, Artificial Sequence
  Synthetic polypeptide
MELATRYQIPKEVADIFNAPSDDEEFVGFRDDVPMETLSSEESCDSFDSLESGKQQDVRFHSKYFTEELRRIFIEDTDSETEDFAGFTQSDLNGKTNPEVMVVESDLSDDGKASLVSEEEEDEEEDKATPRRSRSRRSSIGLRVAFQFPTKKLANKPDKNSSSEQLFSSARLQNEKKTILERKKDCRQVIQREDSTSESEDDSRDESQESSDALLKRTMNIKENKAMLAQLLAELNSMPDFFPVRTPTSASRKKTVRRAFSEGQITRRMNPTRSARPPEKFALENFTVSAAKFAEEFYSFRRRKTIGGKCREYRRRHRISSFRPVEDITEEDLENVAITVRDKIYDKVLGNTCHQCRQKTIDTKTVCRNQGCCGVRGQFCGPCLRNRYGEDVRSALLDPDWVCPPCRGICNCSYCRKRDGRCATGILIHLAKFYGYDNVKEYLERCGGSRL

SEQ ID NO: 8886 - protein, 405 aa, Artificial Sequence
  Synthetic polypeptide
MELATRYQIPKEVADIFNAPSDDEEFVGFRDDVPMETLSSEESCDSFDSLESGKQVVESDLSDDGKASLVSEEEEDEEEDKATPRRSRSRRSSIGLRVAFQFPTKKLANKPDKNSSSEQLFSSARLQNEKKTILERKKDCRQVIQREDSTSESEDDSRDESQESSDALLKRTMNIKENKAMLAQLLAELNSMPDFFPVRTPTSASRKKTVRRAFSEGQITRRMNPTRSARPPEKFALENFTVSAAKFAEEFYSFRRRKTIGGKCREYRRRHRISSFRPVEDITEEDLENVAITVRDKIYDKVLGNTCHQCRQKTIDTKTVCRNQGCCGVRGQFCGPCLRNRYGEDVRSALLDPDWVCPPCRGICNCSYCRKRDGRCATGILIHLAKFYGYDNVKEYLERCGGSRL

SEQ ID NO: 8887 - protein, 102 aa, Artificial Sequence
  Synthetic polypeptide
GNTCHQCRQKTIDTKTVCRNQGCCGVRGQFCGPCLRNRYGEDVRSALLDPDWVCPPCRGICNCSYCRKRDGRCATGILIHLAKFYGYDNVKEYLERCGGSRL

SEQ ID NO: 8888 - protein, 98 aa, Artificial Sequence
  Synthetic polypeptide
METLSSEESCDSFDSLESGKQQDVRFHSKYFTEELRRIFIEDTDSETEDFAGFTQSDLNGKTNPEVMARWLIPVIPALWEAEAGGPEVRSSRPASPIW

SEQ ID NO: 8889 - protein, 132 aa, Artificial Sequence
  Synthetic polypeptide
MELATRYQIPKEVADIFNAPSDDEEFVGFRDDVPMETLSSEESCDSFDSLESGKQQDVRFHSKYFTEELRRIFIEDTDSETEDFAGFTQSDLNGKTNPEVMARWLIPVIPALWEAEAGGPEVRSSRPASPIW

SEQ ID NO: 8890 - protein, 85 aa, Artificial Sequence
  Synthetic polypeptide
MELATRYQQDVRFHSKYFTEELRRIFIEDTDSETEDFAGFTQSDLNGKTNPEVMARWLIPVIPALWEAEAGGPEVRSSRPASPIW

SEQ ID NO: 8891 - protein, 97 aa, Artificial Sequence
  Synthetic polypeptide
METLSSEESCDSFDSLESGKQDVRFHSKYFTEELRRIFIEDTDSETEDFAGFTQSDLNGKTNPEVMARWLIPVIPALWEAEAGGPEVRSSRPASPIW

SEQ ID NO: 8892 - protein, 57 aa, Artificial Sequence
  Synthetic polypeptide
MVKLSKEAKQRLQQLFKGSQFAIRWGFIPLVIYLALWKVEAGGSFEVRSLRPAWPTW

SEQ ID NO: 8893 - protein, 29 aa, Artificial Sequence
  Synthetic polypeptide
MECLYYFLGFLLLAARLPLDAAKPRVQTT

SEQ ID NO: 8894 - protein, 178 aa, Artificial Sequence
  Synthetic polypeptide
MGPGGRVARLLAPLMWRRAVSSVAGSAVGAEPGLRLLAVQRLPVGAAFCRACQTPNFVRGLHSEPGLEERAEGTVNEGRPESDAADHTGPKFDIDMMVSLLRQENARDICVIQVPPEMRYTDYFVIVSGTSTRHLHAMAFYVVKMHFGRPRQADHLRSGVQDQPHQHGETPSLLKIQN

SEQ ID NO: 8895 - protein, 96 aa, Artificial Sequence
  Synthetic polypeptide
MNKLYIGNLSENAAPSDLESIFKDAKIPVSGPFLVKTGYAFVDCPDESWALKAIEALSGKIELHGKPIEVEHSVPKRQRIRKLQIRNIPPHLQWED

SEQ ID NO: 8896 - protein, 354 aa, Artificial Sequence
  Synthetic polypeptide
MEVIHGRPYCCRELEGADILSNTFYSNELHNPLQTVTRPTASEDRYQELRESLQQCRLPWGAEREYGGIIPISLPEDHRPKYEPPRVMGKGHQHYGFGGETWPRKLPVEQFYYLTQNKKSDVYGNDSLIPKPPNSTVGEICLPYPIEHPYHTHICRGAMFPTFTSPEDLYTGIKARTQQPFPPTVPTKAYDSTVLKTRGNPYRYELIDIPMDSKKKALTWPGQGVYYDFPRGVEKNKPVFYPKPPKTFAPNTSLNSWDPICSAKEANIQRNLERSHWLTSYTHDFTGLGPMDPLELDDYHEKMVAELTRKIGFDPEPAQCLTPVIPALWEAEADRSRGQEFETSLANMVKLCLY

SEQ ID NO: 8897 - protein, 109 aa, Artificial Sequence
  Synthetic polypeptide
MEVIHGRPYCCRELEGADILSNTFYSNELHNPLQTVTRPTASEDRYQELRESLQQCRLPWGAEREYGGIIPISLPEDHRPKYEPPRVMGKGHQHYGFGGETWPRKEVII

SEQ ID NO: 8898 - protein, 43 aa, Artificial Sequence
  Synthetic polypeptide
MAGVSYAAPWWVSLLHRLPHFDLSWEATSSQFRPEDTDYQQGR

SEQ ID NO: 8899 - protein, 309 aa, Artificial Sequence
  Synthetic polypeptide
MAGVSYAAPWWVSLLHRLPHFDLSWEATSSQFRPEDTDYQQALLLLGAAALACLALDLLFLLFYSFWLCCRRRKSEEHLDADCCCTAWCVIIATLVCSAGIAVGFYGNGETSDGIHRATYSLRHANRTVAGVQDRVWDTAVGLNHTAEPSLQTLERQLAGRPEPLRAVQRLQGLLETLLGYTAAIPFWRNTAVSLEVLAEQVDLYDWYRWLGYLGLLLLDVIICLLVLVGLIRSSKGILVGVCLLGVLALVISWGALGLELAVSVGSSDFCVDPDAYVTKMVEEYSVLSGATPETEARELPEPRRWRLQ

SEQ ID NO: 8900 - protein, 277 aa, Artificial Sequence
  Synthetic polypeptide
MAGVSYAAPWWVSLLHRLPHFDLSWEATSSQFRPEDTDYQQALLLLGAAALACLALDLLFLLFYSFWLCCRRRKSEEHLDADCCCTAWCVIIATLVCSAGIAVGFYGNGETSDGIHRATYSLRHANRTVAGVQDRVWDTAVGLNHTAEPSLQTLERQLAGRPEPLRAVQRLQGLLETLLGYTAAIPFWRNTAVSLEVLAEQVDLYDWYRVCLLGVLALVISWGALGLELAVSVGSSDFCVDPDAYVTKMVEEYSVLSGATPETEARELPEPRRWRLQ

SEQ ID NO: 8901 - protein, 138 aa, Artificial Sequence
  Synthetic polypeptide
MPSGVPGCWPQLPLKGPWRPTPRPRVPVPWRTPRFACRWLGYLGLLLLDVIICLLVLVGLIRSSKGILVGVCLLGVLALVISWGALGLELAVSVGSSDFCVDPDAYVTKMVEEYSVLSGATPETEARELPEPRRWRLQ

SEQ ID NO: 8902 - protein, 318 aa, Artificial Sequence
  Synthetic polypeptide
MAGVSYAAPWWVSLLHRLPHFDLSWEATSSQFRPEDTDYQQALLLLGAAALACLALDLLFLLFYSFWLCCRRRKSEEHLDADCCCTAWCVIIATLVCSAGIAVGFYGNGETSDGIHRATYSLRHANRTVAGVQDRVWDTAVGLNHTAEPSLQTLERQLAGRPEPLRAVQRLQGLLETLLGYTAAIPFWRNTAVSLEVLAEQVDLYDWYRWLGYLGLLLLDVIICLLVLVGLIRSSKGILVGVCLLGVLALVISWGALGLELAVSVGSSDFCVDPDAYVTKMVEEYSVLSGGGGGCNEPRSHHCIPAWATRVKLHLKKK

SEQ ID NO: 8903 - protein, 286 aa, Artificial Sequence
  Synthetic polypeptide
MAGVSYAAPWWVSLLHRLPHFDLSWEATSSQFRPEDTDYQQALLLLGAAALACLALDLLFLLFYSFWLCCRRRKSEEHLDADCCCTAWCVIIATLVCSAGIAVGFYGNGETSDGIHRATYSLRHANRTVAGVQDRVWDTAVGLNHTAEPSLQTLERQLAGRPEPLRAVQRLQGLLETLLGYTAAIPFWRNTAVSLEVLAEQVDLYDWYRVCLLGVLALVISWGALGLELAVSVGSSDFCVDPDAYVTKMVEEYSVLSGGGGGCNEPRSHHCIPAWATRVKLHLKKK

SEQ ID NO: 8904 - protein, 147 aa, Artificial Sequence
  Synthetic polypeptide
MPSGVPGCWPQLPLKGPWRPTPRPRVPVPWRTPRFACRWLGYLGLLLLDVIICLLVLVGLIRSSKGILVGVCLLGVLALVISWGALGLELAVSVGSSDFCVDPDAYVTKMVEEYSVLSGGGGGCNEPRSHHCIPAWATRVKLHLKKK

SEQ ID NO: 8905 - protein, 134 aa, Artificial Sequence
  Synthetic polypeptide
MAASLRLLGAASGLRYWSRRLRPAAGSFAAVCSRSVASKTPVGFIGLGNMGNPMAKNLMKHGYPLIIYDVFPDACKEFQDAGEQLCPNLDVNHPFVQRLHAADTPWPISHLLAASVIGCCDIACLFSGNPYFIS

SEQ ID NO: 8906 - protein, 66 aa, Artificial Sequence
  Synthetic polypeptide
MAASLRLLGAASGLRYWSRRLRPAAGSFAAGYSEKMAISKRGSGPTRHWICCHLHVGLPGLQNCEK

SEQ ID NO: 8907 - protein, 8 aa, Artificial Sequence
  Synthetic polypeptide
KVLPEAVP

SEQ ID NO: 8908 - protein, 389 aa, Artificial Sequence
  Synthetic polypeptide
MVGAMWKVIVSLVLLMPGPCDGLFRSLYRSVSMPPKGDSGQPLFLTPYIEAGKIQKGRELSLVGPFPGLNMKSYAGFLTVNKTYNSNLFFWFFPAQIQPEDAPVVLWLQGGPGGSSMFGLFVEHGPYVVTSNMTLRDRDFPWTTTLSMLYIDNPVGTGFSFTDDTHGYAVNEDDVARDLYSALIQFFQIFPEYKNNDFYVTGESYAGKYVPAIAHLIHSLNPVREVKINLNGIAIGDGYSDPESIIGGYAEFLYQIGLLDEKQKKYFQKQCHECIEHIRKQNWFEAFEILDKLLDGDLTSDPSYFQNVTGCSNYYNFLRCTEPEDQLYYVKFLSLPEVRQAIHVGNQTFNDGTIVEKYLREDTVQSVKPWLTEIMNNYKLNNKKMNNPI

SEQ ID NO: 8909 - protein, 394 aa, Artificial Sequence
  Synthetic polypeptide
MVGAMWKVIVSLVLLMPGPCDGLFRSLYRSVSMPPKGDSGQPLFLTPYIEAGKIQKGRELSLVGPFPGLNMKSYAGFLTVNKTYNSNLFFWFFPAQIQPEDAPVVLWLQGGPGGSSMFGLFVEHGPYVVTSNMTLRDRDFPWTTTLSMLYIDNPVGTGFSFTDDTHGYAVNEDDVARDLYSALIQFFQIFPEYKNNDFYVTGESYAGKYVPAIAHLIHSLNPVREVKINLNGIAIGDGYSDPESIIGGYAEFLYQIGLLDEKQKKYFQKQCHECIEHIRKQNWFEAFEILDKLLDGDLTSDPSYFQNVTGCSNYYNFLRCTEPEDQLYYVKFLSLPEVRQAIHVGNQTFNDGTIVEKYLREDTVQSVKPWLTEIMNNYKCFGSLRRVDHLRSRF

SEQ ID NO: 8910 - protein, 8 aa, Artificial Sequence
  Synthetic polypeptide
KVLPEAVP

SEQ ID NO: 8911 - protein, 95 aa, Artificial Sequence
  Synthetic polypeptide
MTQTHRAKSASSCPNLLVPETWPHQVSASHAGRSKQPQGGILKINEEHRRGAIQDLLASPGFTFGKRVVFDSHCLKRQHTFADGLHSSCTSTYSM

SEQ ID NO: 8912 - protein, 284 aa, Artificial Sequence
  Synthetic polypeptide
MTQTHRAKSASSCPNLLVPETWPHQVSASHAGRSKQPQGGILKINEEHRRGAIQDLLASPGFTFGKRVVFDSHCLKRQHTFADGLHSSCTSNAEEYQPPIWKSYLYQLQQEAPRPKRIICPREVENRPKYYGREFHGIISREQADELLGGVEGAYILRESQRQPGCYTLALRFGNQTLNYRLFHDGKHFVGEKRFESIHDLVTDGLITLYIETKAAEYISKMTTNPIYEHIGYATLLREKVSRRLSRSKNEPRKTNVTHEEHTAVEKAGSRAWAAEGFPPPDRA

SEQ ID NO: 8913 - protein, 209 aa, Artificial Sequence
  Synthetic polypeptide
MAASSNSSLSGSSVSSDAEEYQPPIWKSYLYQLQQEAPRPKRIICPREVENRPKYYGREFHGIISREQADELLGGVEGAYILRESQRQPGCYTLALRFGNQTLNYRLFHDGKHFVGEKRFESIHDLVTDGLITLYIETKAAEYISKMTTNPIYEHIGYATLLREKVSRRLSRSKNEPRKTNVTHEEHTAVEKAGSRAWAAEGFPPPDRA

SEQ ID NO: 8914 - protein, 222 aa, Artificial Sequence
  Synthetic polypeptide
MAASSNSSLSGSSVSSVYSEPRSPRELPKYAEEYQPPIWKSYLYQLQQEAPRPKRIICPREVENRPKYYGREFHGIISREQADELLGGVEGAYILRESQRQPGCYTLALRFGNQTLNYRLFHDGKHFVGEKRFESIHDLVTDGLITLYIETKAAEYISKMTTNPIYEHIGYATLLREKVSRRLSRSKNEPRKTNVTHEEHTAVEKAGSRAWAAEGFPPPDRA

SEQ ID NO: 8915 - protein, 194 aa, Artificial Sequence
  Synthetic polypeptide
MDAEEYQPPIWKSYLYQLQQEAPRPKRIICPREVENRPKYYGREFHGIISREQADELLGGVEGAYILRESQRQPGCYTLALRFGNQTLNYRLFHDGKHFVGEKRFESIHDLVTDGLITLYIETKAAEYISKMTTNPIYEHIGYATLLREKVSRRLSRSKNEPRKTNVTHEEHTAVEKAGSRAWAAEGFPPPDRA

SEQ ID NO: 8916 - protein, 60 aa, Artificial Sequence
  Synthetic polypeptide
NPIYEHIGYATLLREKVSRRLSRSKNEPRKTNVTHEEHTAVEKAGSRAWAAEGFPPPDRA

SEQ ID NO: 8917 - protein, 275 aa, Artificial Sequence
  Synthetic polypeptide
MTQTHRAKSASSCPNLLVPETWPHQVSASHAGRSKQPQGGILKINEEHRRGAIQDLLASPGFTFGKRVVFDSHCLKRQHTFADGLHSSCTSNAEEYQPPIWKSYLYQLQQEAPRPKRIICPREVENRPKYYGREFHGIISREQADELLGGVEGAYILRESQRQPGCYTLALRFGNQTLNYRLFHDGKHFVGEKRFESIHDLVTDGLITLYIETKAAEYISKMTTNPIYEHIGYATLLREKVSRRLSRSKNEPRKTNVTHEEHTAVEKVLAPVSPL

SEQ ID NO: 8918 - protein, 200 aa, Artificial Sequence
  Synthetic polypeptide
MAASSNSSLSGSSVSSDAEEYQPPIWKSYLYQLQQEAPRPKRIICPREVENRPKYYGREFHGIISREQADELLGGVEGAYILRESQRQPGCYTLALRFGNQTLNYRLFHDGKHFVGEKRFESIHDLVTDGLITLYIETKAAEYISKMTTNPIYEHIGYATLLREKVSRRLSRSKNEPRKTNVTHEEHTAVEKVLAPVSPL

SEQ ID NO: 8919 - protein, 213 aa, Artificial Sequence
  Synthetic polypeptide
MAASSNSSLSGSSVSSVYSEPRSPRELPKYAEEYQPPIWKSYLYQLQQEAPRPKRIICPREVENRPKYYGREFHGIISREQADELLGGVEGAYILRESQRQPGCYTLALRFGNQTLNYRLFHDGKHFVGEKRFESIHDLVTDGLITLYIETKAAEYISKMTTNPIYEHIGYATLLREKVSRRLSRSKNEPRKTNVTHEEHTAVEKVLAPVSPL

SEQ ID NO: 8920 - protein, 185 aa, Artificial Sequence
  Synthetic polypeptide
MDAEEYQPPIWKSYLYQLQQEAPRPKRIICPREVENRPKYYGREFHGIISREQADELLGGVEGAYILRESQRQPGCYTLALRFGNQTLNYRLFHDGKHFVGEKRFESIHDLVTDGLITLYIETKAAEYISKMTTNPIYEHIGYATLLREKVSRRLSRSKNEPRKTNVTHEEHTAVEKVLAPVSPL

SEQ ID NO: 8921 - protein, 51 aa, Artificial Sequence
  Synthetic polypeptide
NPIYEHIGYATLLREKVSRRLSRSKNEPRKTNVTHEEHTAVEKVLAPVSPL

SEQ ID NO: 8922 - protein, 475 aa, Artificial Sequence
  Synthetic polypeptide
MEGVLYKWTNYLSGWQPRWFLLCGGILSYYDSPEDAWKGCKGSIQMAVCEIQVHSVDNTRMDLIIPGEQYFYLKARSVAERQRWLVALGSAKACLTDSRTQKEKEFAENTENLKTKMSELRLYCDLLVQQVDKTKEVTTTGVSNSEEGIDVGTLLKSTCNTFLKTLEECMQIANAAFTSELLYRTPPGSPQLAMLKSSKMKHPIIPIHNSLERQMELSTCENGSLNMEINGEEEILMKNKNSLYLKSAEIDCSISSEENTDDNITVQGEIRKEDGMENLKNHDNNLTQSGSDSSCSPECLWEEGKEVIPTFFSTMNTSFSDIELLEDSGIPTEAFLASCYAVVPVLDKLGPTVFAPVKMDLVGNIKKVNQKYITNKEEFTTLQKIVLHEVEADVAQVRNSATEALLWLKRGLKFLKGFLTEVKNGEKDIQTALNNAYGKTLRQHHGWVVRGVFAEIQQKTLDTKTYPDEDPELQE

SEQ ID NO: 8923 - protein, 501 aa, Artificial Sequence
  Synthetic polypeptide
AAGAPRLLGPGAVRGPAGVGRVAAGAMEGVLYKWTNYLSGWQPRWFLLCGGILSYYDSPEDAWKGCKGSIQMAVCEIQVHSVDNTRMDLIIPGEQYFYLKARSVAERQRWLVALGSAKACLTDSRTQKEKEFAENTENLKTKMSELRLYCDLLVQQVDKTKEVTTTGVSNSEEGIDVGTLLKSTCNTFLKTLEECMQIANAAFTSELLYRTPPGSPQLAMLKSSKMKHPIIPIHNSLERQMELSTCENGSLNMEINGEEEILMKNKNSLYLKSAEIDCSISSEENTDDNITVQGEIRKEDGMENLKNHDNNLTQSGSDSSCSPECLWEEGKEVIPTFFSTMNTSFSDIELLEDSGIPTEAFLASCYAVVPVLDKLGPTVFAPVKMDLVGNIKKVNQKYITNKEEFTTLQKIVLHEVEADVAQVRNSATEALLWLKRGLKFLKGFLTEVKNGEKDIQTALNNAYGKTLRQHHGWVVRGVFAEIQQKTLDTKTYPDEDPELQE

SEQ ID NO: 8924 - protein, 458 aa, Artificial Sequence
  Synthetic polypeptide
MEGVLYKWTNYLSGWQPRWFLLCGGILSYYDSPEDAWKGCKGSIQMAVCEIQVHSVDNTRMDLIIPGEQYFYLKARSVAERQRWLVALGSAKACLTDSRTQKEKEFAENTENLKTKMSELRLYCDLLVQQVDKTKEVTTTGVSNSEEGIDVGTLLKSTCNTFLKTLEECMQIANAAFTSELLYRTPPGSPQLAMLKSSKMKHPIIPIHNSLERQMELSTCENGSLNMEINGEEEILMKNKNSLYLKSAEIDCSISSEENTDDNITVQGEIRKEDGMENLKNHDNNLTQSGSDSSCSPECLWEEGKEVIPTFFSTMNTSFSDIELLEDSGIPTEAFLASCYAVVPVLDKLGPTVFAPVKMDLVGNIKKVNQKYITNKEEFTTLQKIVLHEVEADVAQVRNSATEALLWLKRGLKFLKGFLTEVKNGEKDIQTALNNAYGKTLRQHHGWVVRGVFADIIG

SEQ ID NO: 8925 - protein, 484 aa, Artificial Sequence
  Synthetic polypeptide
AAGAPRLLGPGAVRGPAGVGRVAAGAMEGVLYKWTNYLSGWQPRWFLLCGGILSYYDSPEDAWKGCKGSIQMAVCEIQVHSVDNTRMDLIIPGEQYFYLKARSVAERQRWLVALGSAKACLTDSRTQKEKEFAENTENLKTKMSELRLYCDLLVQQVDKTKEVTTTGVSNSEEGIDVGTLLKSTCNTFLKTLEECMQIANAAFTSELLYRTPPGSPQLAMLKSSKMKHPIIPIHNSLERQMELSTCENGSLNMEINGEEEILMKNKNSLYLKSAEIDCSISSEENTDDNITVQGEIRKEDGMENLKNHDNNLTQSGSDSSCSPECLWEEGKEVIPTFFSTMNTSFSDIELLEDSGIPTEAFLASCYAVVPVLDKLGPTVFAPVKMDLVGNIKKVNQKYITNKEEFTTLQKIVLHEVEADVAQVRNSATEALLWLKRGLKFLKGFLTEVKNGEKDIQTALNNAYGKTLRQHHGWVVRGVFADIIG

SEQ ID NO: 8926 - protein, 456 aa, Artificial Sequence
  Synthetic polypeptide
MEGVLYKWTNYLSGWQPRWFLLCGGILSYYDSPEDAWKGCKGSIQMAVCEIQVHSVDNTRMDLIIPGEQYFYLKARSVAERQRWLVALGSAKACLTDSRTQKEKEFAENTENLKTKMSELRLYCDLLVQQVDKTKEVTTTGVSNSEEGIDVGTLLKSTCNTFLKTLEECMQIANAAFTSELLYRTPPGSPQLAMLKSSKMKHPIIPIHNSLERQMELSTCENGSLNMEINGEEEILMKNKNSLYLKSAEIDCSISSEENTDDNITVQGEIRKEDGMENLKNHDNNLTQSGSDSSCSPECLWEEGKEVIPTFFSTMNTSFSDIELLEDSGIPTEAFLASCYAVVPVLDKLGPTVFAPVKMDLVGNIKKVNQKYITNKEEFTTLQKIVLHEVEADVAQVRNSATEALLWLKRGLKFLKGFLTEVKNGEKDIQTALNNAYGKTLRQHHGWVVRGVFAHS

SEQ ID NO: 8927 - protein, 482 aa, Artificial Sequence
  Synthetic polypeptide
AAGAPRLLGPGAVRGPAGVGRVAAGAMEGVLYKWTNYLSGWQPRWFLLCGGILSYYDSPEDAWKGCKGSIQMAVCEIQVHSVDNTRMDLIIPGEQYFYLKARSVAERQRWLVALGSAKACLTDSRTQKEKEFAENTENLKTKMSELRLYCDLLVQQVDKTKEVTTTGVSNSEEGIDVGTLLKSTCNTFLKTLEECMQIANAAFTSELLYRTPPGSPQLAMLKSSKMKHPIIPIHNSLERQMELSTCENGSLNMEINGEEEILMKNKNSLYLKSAEIDCSISSEENTDDNITVQGEIRKEDGMENLKNHDNNLTQSGSDSSCSPECLWEEGKEVIPTFFSTMNTSFSDIELLEDSGIPTEAFLASCYAVVPVLDKLGPTVFAPVKMDLVGNIKKVNQKYITNKEEFTTLQKIVLHEVEADVAQVRNSATEALLWLKRGLKFLKGFLTEVKNGEKDIQTALNNAYGKTLRQHHGWVVRGVFAHS

SEQ ID NO: 8928 - protein, 518 aa, Artificial Sequence
  Synthetic polypeptide
MEGVLYKWTNYLSGWQPRWFLLCGGILSYYDSPEDAWKGCKGSIQMAVCEIQVHSVDNTRMDLIIPGEQYFYLKARSVAERQRWLVALGSAKACLTDSRTQKEKEFAENTENLKTKMSELRLYCDLLVQQVDKTKEVTTTGVSNSEEGIDVGTLLKSTCNTFLKTLEECMQIANAAFTSELLYRTPPGSPQLAMLKSSKMKHPIIPIHNSLERQMELSTCENGSLNMEINGEEEILMKNKNSLYLKSAEIDCSISSEENTDDNITVQGEIRKEDGMENLKNHDNNLTQSGSDSSCSPECLWEEGKEVIPTFFSTMNTSFSDIELLEDSGIPTEAFLASCYAVVPVLDKLGPTVFAPVKMDLVGNIKKVNQKYITNKEEFTTLQKIVLHEVEADVAQVRNSATEALLWLKRGLKFLKGFLTEVKNGEKDIQTALNNAYGKTLRQHHGWVVRGVFALALRAAPSYEDFVAALTVKEGDHQKEAFSIGMQRDLSLYLPAMEKQLAILDTLYEVHGLESDEV

SEQ ID NO: 8929 - protein, 544 aa, Artificial Sequence
  Synthetic polypeptide
AAGAPRLLGPGAVRGPAGVGRVAAGAMEGVLYKWTNYLSGWQPRWFLLCGGILSYYDSPEDAWKGCKGSIQMAVCEIQVHSVDNTRMDLIIPGEQYFYLKARSVAERQRWLVALGSAKACLTDSRTQKEKEFAENTENLKTKMSELRLYCDLLVQQVDKTKEVTTTGVSNSEEGIDVGTLLKSTCNTFLKTLEECMQIANAAFTSELLYRTPPGSPQLAMLKSSKMKHPIIPIHNSLERQMELSTCENGSLNMEINGEEEILMKNKNSLYLKSAEIDCSISSEENTDDNITVQGEIRKEDGMENLKNHDNNLTQSGSDSSCSPECLWEEGKEVIPTFFSTMNTSFSDIELLEDSGIPTEAFLASCYAVVPVLDKLGPTVFAPVKMDLVGNIKKVNQKYITNKEEFTTLQKIVLHEVEADVAQVRNSATEALLWLKRGLKFLKGFLTEVKNGEKDIQTALNNAYGKTLRQHHGWVVRGVFALALRAAPSYEDFVAALTVKEGDHQKEAFSIGMQRDLSLYLPAMEKQLAILDTLYEVHGLESDEV

SEQ ID NO: 8930 - protein, 714 aa, Artificial Sequence
  Synthetic polypeptide
MTDAGNRKEGFKKCRSATFSIDGYSFTIVANEAGDKNARPLARFSRSKSQNCLWNSLIDGLTGNVKEKPRPTIVHDPRPPEEILADELPQLDSSEVLVKTSFRLRSLVKQLERGEASVVDLKKNLEYAATVLESVYIDETRRLLDTEDELSDIQSDAVPSEVRDWLASTFTRQMGMMLRRSDEKPRFKSIVHAVQAGIFVERMYRRTSNMVGLSYPPAVIEALKDVDKWSFDVFSLNEASGDHALKFIFYELLTRYDLISRFKIPISALVSFVEALEVGYSKHKNPYHNLMHAADVTQTVHYLLYKTGVANWLTELEIFAIIFSAAIHDYEHTGTTNNFHIQTRSDPAILYNDRSVLENHHLSAAYRLLQDDEEMNILINLSKDDWREFRTLVIEMVMATDMSCHFQQIKAMKTALQQPEAIEKPKALSLMLHTADISHPAKAWDLHHRWTMSLLEEFFRQGDREAELGLPFSPLCDRKSTMVAQSQVGFIDFIVEPTFTVLTDMTEKIVSPLIDETSQTGGTGQRRSSLNSISSSDAKRSGVKTSGSEGSAPINNSVISVDYKSFKATWTEVVHINRERWRAKVPKEEKAKKEAEEKARLAAEEQQKEMEAKSQAEEGASGKAEKKTSGETKNQVNGTRANKSDNPRGKNSKAEKSSGEQQQNGDFKDGKNKTDKKDHSNIGNDSKKTDGTKQRSHGSPAPSTSSTCRLTLPD

SEQ ID NO: 8931 - protein, 654 aa, Artificial Sequence
  Synthetic polypeptide
MESPTKEIEEFESNSLKYLQPEQIEKIWLRLRGLRKYKKTSQRLRSLVKQLERGEASVVDLKKNLEYAATVLESVYIDETRRLLDTEDELSDIQSDAVPSEVRDWLASTFTRQMGMMLRRSDEKPRFKSIVHAVQAGIFVERMYRRTSNMVGLSYPPAVIEALKDVDKWSFDVFSLNEASGDHALKFIFYELLTRYDLISRFKIPISALVSFVEALEVGYSKHKNPYHNLMHAADVTQTVHYLLYKTGVANWLTELEIFAIIFSAAIHDYEHTGTTNNFHIQTRSDPAILYNDRSVLENHHLSAAYRLLQDDEEMNILINLSKDDWREFRTLVIEMVMATDMSCHFQQIKAMKTALQQPEAIEKPKALSLMLHTADISHPAKAWDLHHRWTMSLLEEFFRQGDREAELGLPFSPLCDRKSTMVAQSQVGFIDFIVEPTFTVLTDMTEKIVSPLIDETSQTGGTGQRRSSLNSISSSDAKRSGVKTSGSEGSAPINNSVISVDYKSFKATWTEVVHINRERWRAKVPKEEKAKKEAEEKARLAAEEQQKEMEAKSQAEEGASGKAEKKTSGETKNQVNGTRANKSDNPRGKNSKAEKSSGEQQQNGDFKDGKNKTDKKDHSNIGNDSKKTDGTKQRSHGSPAPSTSSTCRLTLPD

SEQ ID NO: 8932 - protein, 726 aa, Artificial Sequence
  Synthetic polypeptide
MTDAGNRKEGFKKCRSATFSIDGYSFTIVANEAGDKNARPLARFSRSKSQNCLWNSLIDGLTGNVKEKPRPTIVHDPRPPEEILADELPQLDSSEVLVKTSFRLRSLVKQLERGEASVVDLKKNLEYAATVLESVYIDETRRLLDTEDELSDIQSDAVPSEVRDWLASTFTRQMGMMLRRSDEKPRFKSIVHAVQAGIFVERMYRRTSNMVGLSYPPAVIEALKDVDKWSFDVFSLNEASGDHALKFIFYELLTRYDLISRFKIPISALVSFVEALEVGYSKHKNPYHNLMHAADVTQTVHYLLYKTGVANWLTELEIFAIIFSAAIHDYEHTGTTNNFHIQTRSDPAILYNDRSVLENHHLSAAYRLLQDDEEMNILINLSKDDWREFRTLVIEMVMATDMSCHFQQIKAMKTALQQPEAIEKPKALSLMLHTADISHPAKAWDLHHRWTMSLLEEFFRQGDREAELGLPFSPLCDRKSTMVAQSQVGFIDFIVEPTFTVLTDMTEKIVSPLIDETSQTGGTGQRRSSLNSISSSDAKRSGVKTSGSEGSAPINNSVISVDYKSFKATWTEVVHINRERWRAKVPKEEKAKKEAEEKARLAAEEQQKEMEAKSQAEEGASGKAEKKTSGETKNQVNGTRANKSDNPRGKNSKAEKSSGEQQQNGDFKDGKNKTDKKDHSNIGNDSKKTDGTKQRSHGSPAPSTSSTCRLTLPDVLQTDSTWTCDS

SEQ ID NO: 8933 - protein, 666 aa, Artificial Sequence
  Synthetic polypeptide
MESPTKEIEEFESNSLKYLQPEQIEKIWLRLRGLRKYKKTSQRLRSLVKQLERGEASVVDLKKNLEYAATVLESVYIDETRRLLDTEDELSDIQSDAVPSEVRDWLASTFTRQMGMMLRRSDEKPRFKSIVHAVQAGIFVERMYRRTSNMVGLSYPPAVIEALKDVDKWSFDVFSLNEASGDHALKFIFYELLTRYDLISRFKIPISALVSFVEALEVGYSKHKNPYHNLMHAADVTQTVHYLLYKTGVANWLTELEIFAIIFSAAIHDYEHTGTTNNFHIQTRSDPAILYNDRSVLENHHLSAAYRLLQDDEEMNILINLSKDDWREFRTLVIEMVMATDMSCHFQQIKAMKTALQQPEAIEKPKALSLMLHTADISHPAKAWDLHHRWTMSLLEEFFRQGDREAELGLPFSPLCDRKSTMVAQSQVGFIDFIVEPTFTVLTDMTEKIVSPLIDETSQTGGTGQRRSSLNSISSSDAKRSGVKTSGSEGSAPINNSVISVDYKSFKATWTEVVHINRERWRAKVPKEEKAKKEAEEKARLAAEEQQKEMEAKSQAEEGASGKAEKKTSGETKNQVNGTRANKSDNPRGKNSKAEKSSGEQQQNGDFKDGKNKTDKKDHSNIGNDSKKTDGTKQRSHGSPAPSTSSTCRLTLPDVLQTDSTWTCDS

SEQ ID NO: 8934 - protein, 35 aa, Artificial Sequence
  Synthetic polypeptide
MEKARRGGDGVPRGPVLHIVVVGFHHKKGCQQAGA

SEQ ID NO: 8935 - protein, 216 aa, Artificial Sequence
  Synthetic polypeptide
MLWFSGVGALAERYCRRSPGITCCVLLLLNCSGVPMSLASSFLTGSVAKCENEGEVLQIPFITDNPCIMCVCLNKEVTCKREKCPVLSRDCALAIKQRGACCEQCKGCTYEGNTYNSSFKWQSPAEPCVLRQCQEGVVTESGVRCVVHCKNPLEHLGMCCPTCPGCVFEGVQYQEGEEFQPEGSKCTKCSCTVAATRRHLGSRDSSPCQTPNQPAP

SEQ ID NO: 8936 - protein, 195 aa, Artificial Sequence
  Synthetic polypeptide
MLWFSGVGALAERYCRRSPGITCCVLLLLNCSGVPMSLASSFLTGSVAKCENEGEVLQIPFITDNPCIMCVCLVAPMKEIPITAPSNGRARLSLVFYASARRALSQSLGCAVLFIVKTLWSIWECAAPHVQAVCLRVCSIKKGRNFSQKEANVPSVPALLQQQGAILEAETAALARHQTSQHLDLGLPGIQNCEK

SEQ ID NO: 8937 - protein, 357 aa, Artificial Sequence
  Synthetic polypeptide
MEGRPPPEGRPPPRPRTGRAPRGRRRAVFAAVLHWSHITHLFENDRHFSHLSTLEREMAFRTEMGLYYSYFKTIVEAPSFLNGVWMIMNDKLTEYPLVINTLKRFNLYPEVILASWYRIYTKIMDLIGIQTKICWTVTRGEGLSPIESCEGLGDPACFYVAVIFILNGLMMALFFIYGTYLSGSRLGGLVTVLCFFFNHGECTRVMWTPPLRESFSYPFLVLQMLLVTHILRATKLYRGSLIALCISNVFFMLPWQFAQFVLLTQIASLFAVYVVGYIDICKLRKIIYIHMISLALCFVLMFGNSMLLTSYYASSLVIIWAQWLTPLIPALWEAEAGGSRGQEIETILANKVKSHLY

SEQ ID NO: 8938 - protein, 333 aa, Artificial Sequence
  Synthetic polypeptide
MVVGESGLGKSTLINSLFLTDLYSPEYPGPSHRIKKTVQVEQSKVLIKEGGVQLLLTIVDTPGFGDAVDNSNCWQPVIDYIDSKFEDYLNAESRVNRRQMPDNRVQCCLYFIAPSGHGLKPLDIEFMKRLHEKVNIIPLIAKADTLTPEECQQFKKQIMKEIQEHKIKIYEFPETDDEEENKLVKKIKDRLPLAVVGSNTIIEVNGKRVRGRQYPWGVAEVENGEHCDFTILRNMLIRTHMQDLKDVTNNVHYENYRSRKLAAVTYNGVDNNKNKGQLTKSPLAQMEEERREHVAKMKKMEMEMEQVFEMKVKEKVQKLKDSEAEPADVDPDS

SEQ ID NO: 8939 - protein, 385 aa, Artificial Sequence
  Synthetic polypeptide
MSVSARSAAAEERSVNSSTMGQQKNLEGYVGFANLPNQVYRKSVKRGFEFTLMVVGESGLGKSTLINSLFLTDLYSPEYPGPSHRIKKTVQVEQSKVLIKEGGVQLLLTIVDTPGFGDAVDNSNCWQPVIDYIDSKFEDYLNAESRVNRRQMPDNRVQCCLYFIAPSGHGLKPLDIEFMKRLHEKVNIIPLIAKADTLTPEECQQFKKQIMKEIQEHKIKIYEFPETDDEEENKLVKKIKDRLPLAVVGSNTIIEVNGKRVRGRQYPWGVAEVENGEHCDFTILRNMLIRTHMQDLKDVTNNVHYENYRSRKLAAVTYNGVDNNKNKGQLTKSPLAQMEEERREHVAKMKKMEMEMEQVFEMKVKEKVQKLKDSEAEPADVDPDS

SEQ ID NO: 8940 - protein, 387 aa, Artificial Sequence
  Synthetic polypeptide
MSVSARSAAAEERSVNSSTMEVAQQKNLEGYVGFANLPNQVYRKSVKRGFEFTLMVVGESGLGKSTLINSLFLTDLYSPEYPGPSHRIKKTVQVEQSKVLIKEGGVQLLLTIVDTPGFGDAVDNSNCWQPVIDYIDSKFEDYLNAESRVNRRQMPDNRVQCCLYFIAPSGHGLKPLDIEFMKRLHEKVNIIPLIAKADTLTPEECQQFKKQIMKEIQEHKIKIYEFPETDDEEENKLVKKIKDRLPLAVVGSNTIIEVNGKRVRGRQYPWGVAEVENGEHCDFTILRNMLIRTHMQDLKDVTNNVHYENYRSRKLAAVTYNGVDNNKNKGQLTKSPLAQMEEERREHVAKMKKMEMEMEQVFEMKVKEKVQKLKDSEAEPADVDPDS

SEQ ID NO: 8941 - protein, 385 aa, Artificial Sequence
  Synthetic polypeptide
MSVSARSAAAEERSVNSSTMVQQKNLEGYVGFANLPNQVYRKSVKRGFEFTLMVVGESGLGKSTLINSLFLTDLYSPEYPGPSHRIKKTVQVEQSKVLIKEGGVQLLLTIVDTPGFGDAVDNSNCWQPVIDYIDSKFEDYLNAESRVNRRQMPDNRVQCCLYFIAPSGHGLKPLDIEFMKRLHEKVNIIPLIAKADTLTPEECQQFKKQIMKEIQEHKIKIYEFPETDDEEENKLVKKIKDRLPLAVVGSNTIIEVNGKRVRGRQYPWGVAEVENGEHCDFTILRNMLIRTHMQDLKDVTNNVHYENYRSRKLAAVTYNGVDNNKNKGQLTKSPLAQMEEERREHVAKMKKMEMEMEQVFEMKVKEKVQKLKDSEAEPADVDPDS

SEQ ID NO: 8942 - protein, 372 aa, Artificial Sequence
  Synthetic polypeptide
VTHETIVEQQKNLEGYVGFANLPNQVYRKSVKRGFEFTLMVVGESGLGKSTLINSLFLTDLYSPEYPGPSHRIKKTVQVEQSKVLIKEGGVQLLLTIVDTPGFGDAVDNSNCWQPVIDYIDSKFEDYLNAESRVNRRQMPDNRVQCCLYFIAPSGHGLKPLDIEFMKRLHEKVNIIPLIAKADTLTPEECQQFKKQIMKEIQEHKIKIYEFPETDDEEENKLVKKIKDRLPLAVVGSNTIIEVNGKRVRGRQYPWGVAEVENGEHCDFTILRNMLIRTHMQDLKDVTNNVHYENYRSRKLAAVTYNGVDNNKNKGQLTKSPLAQMEEERREHVAKMKKMEMEMEQVFEMKVKEKVQKLKDSEAEPADVDPDS

SEQ ID NO: 8943 - protein, 364 aa, Artificial Sequence
  Synthetic polypeptide
QQKNLEGYVGFANLPNQVYRKSVKRGFEFTLMVVGESGLGKSTLINSLFLTDLYSPEYPGPSHRIKKTVQVEQSKVLIKEGGVQLLLTIVDTPGFGDAVDNSNCWQPVIDYIDSKFEDYLNAESRVNRRQMPDNRVQCCLYFIAPSGHGLKPLDIEFMKRLHEKVNIIPLIAKADTLTPEECQQFKKQIMKEIQEHKIKIYEFPETDDEEENKLVKKIKDRLPLAVVGSNTIIEVNGKRVRGRQYPWGVAEVENGEHCDFTILRNMLIRTHMQDLKDVTNNVHYENYRSRKLAAVTYNGVDNNKNKGQLTKSPLAQMEEERREHVAKMKKMEMEMEQVFEMKVKEKVQKLKDSEAEPADVDPDS

SEQ ID NO: 8944 - protein, 37 aa, Artificial Sequence
  Synthetic polypeptide
MKKMEMEMEQVFEMKVKEKVQKLKDSEAEPADVDPDS

SEQ ID NO: 8945 - protein, 319 aa, Artificial Sequence
  Synthetic polypeptide
MGSTLGCHRSIPRDPSDLSHSRKFSAACNFSNILVNQERLNINTATEEELMTLPGVTRAVARSIVEYREYIGGFKKVEDLALVSGVGATKLEQVKFEICVSSKGSSAQHSPSSLRRDLLAEQQPHHLATAVPLTPRVNINTATPAQLMSVRGLSEKMALSIVDFRREHGPFRSVEDLVRMDGINAAFLDRIRHQVFAERSRPPSTHTNGGLTFTAKPHPSPTSLSLQSEDLDLPPGGPTQIISTRPSVEAFGGTRDGRPVLRLATWNLQGCSVEKANNPGVREVVCMTLLENRSAVSFLKSGRPPTHQEERTTPHAPPL

SEQ ID NO: 8946 - protein, 1099 aa, Artificial Sequence
  Synthetic polypeptide
MDPFTEKLLERTRARRENLQRKMAERPTAAPRSMTHAKRARQPLSEASNQQPLSGGEEKSCTKPSPSKKRCSDNTEVEVSNLENKQPVESTSAKSCSPSPVSPQVQPQAADTISDSVAVPASLLGMRRGLNSRLEATAASSVKTRMQKLAEQRRRWDNDDMTDDIPESSLFSPMPSEEKAASPPRPLLSNASATPVGRRGRLANLAATICSWEDDVNHSFAKQNSVQEQPGTACLSKFSSASGASARINSSSVKQEATFCSQRDGDASLNKALSSSADDASLVNASISSSVKATSPVKSTTSITDAKSCEGQNPELLPKTPISPLKTGVSKPIVKSTLSQTVPSKGELSREICLQSQSKDKSTTPGGTGIKPFLERFGERCQEHSKESPARSTPHRTPIITPNTKAIQERLFKQDTSSSTTHLAQQLKQERQKELACLRGRFDKGNIWSAEKGGNSKSKQLETKQETHCQSTPLKKHQGVSKTQSLPVTEKVTENQIPAKNSSTEPKGFTECEMTKSSPLKITLFLEEDKSLKVTSDPKVEQKIEVIREIEMSVDDDDINSSKVINDLFSDVLEEGELDMEKSQEEMDQALAESSEEQEDALNISSMSLLAPLAQTVGVVSPESLVSTPRLELKDTSRSDESPKPGKFQRTRVPRAESGDSLGSEDRDLLYSIDAYRSQRFKETERPSIKQVIVRKEDVTSKLDEKNNAFPCQVNIKQKMQELNNEINMQQTVIYQASQALNCCVDEEHGKGSLEEAEAERLLLIATGKRTLLIDELNKLKNEGPQRKNKASPQSEFMPSKGSVTLSEIRLPLKADFVCSTVQKPDAANYYYLIILKAGAENMVATPLASTSNSLNGDALTFTTTFTLQDVSNDFEINIEVYSLVQKKDPSGLDKKKKTSKSKAITPKRLLTSITTKSNIHSSVMASPGGLSAVRTSNFALVGSYTLSLSSVGNTKFVLDKVPFLSSLEGHIYLKIKCQVNSSVEERGFLTIFEDVSGFGAWHRRWCVLSGNCISYWTYPDDEKRKAQWLTPIIPALWEAKAGRSPEVRSSRPAWPTWRNPVSAKNTKISWVWWQVPVIPATQEAEAGESLGSRRPRLQ

SEQ ID NO: 8947 - protein, 1062 aa, Artificial Sequence
  Synthetic polypeptide
MDPFTEKLLERTRARRENLQRKMAERPTAAPRSMTHAKRARQPLSEASNQQPLSGGEEKSCTKPSPSKKRCSDNTEVEVSNLENKQPVESTSAKSCSPSPVSPQVQPQAADTISDSVAVPASLLGMRRGLNSRLEATAASSVKTRMQKLAEQRRRWDNDDMTDDIPESSLFSPMPSEEKAASPPRPLLSNASATPVGRRGRLANLAATICSWEDDVNHSFAKQNSVQEQPGTACLSKFSSASGASARINSSSVKQEATFCSQRDGDASLNKALSSSADDASLVNASISSSVKATSPVKSTTSITDAKSCEGQNPELLPKTPISPLKTGVSKPIVKSTLSQTVPSKGELSREICLQSQSKDKSTTPGGTGIKPFLERFGERCQEHSKESPARSTPHRTPIITPNTKAIQERLFKQDTSSSTTHLAQQLKQERQKELACLRGRFDKGNIWSAEKGGNSKSKQLETKQETHCQSTPLKKHQGVSKTQSLPVTEKVTENQIPAKNSSTEPKEVIREIEMSVDDDDINSSKVINDLFSDVLEEGELDMEKSQEEMDQALAESSEEQEDALNISSMSLLAPLAQTVGVVSPESLVSTPRLELKDTSRSDESPKPGKFQRTRVPRAESGDSLGSEDRDLLYSIDAYRSQRFKETERPSIKQVIVRKEDVTSKLDEKNNAFPCQVNIKQKMQELNNEINMQQTVIYQASQALNCCVDEEHGKGSLEEAEAERLLLIATGKRTLLIDELNKLKNEGPQRKNKASPQSEFMPSKGSVTLSEIRLPLKADFVCSTVQKPDAANYYYLIILKAGAENMVATPLASTSNSLNGDALTFTTTFTLQDVSNDFEINIEVYSLVQKKDPSGLDKKKKTSKSKAITPKRLLTSITTKSNIHSSVMASPGGLSAVRTSNFALVGSYTLSLSSVGNTKFVLDKVPFLSSLEGHIYLKIKCQVNSSVEERGFLTIFEDVSGFGAWHRRWCVLSGNCISYWTYPDDEKRKAQWLTPIIPALWEAKAGRSPEVRSSRPAWPTWRNPVSAKNTKISWVWWQVPVIPATQEAEAGESLGSRRPRLQ

SEQ ID NO: 8948 - protein, 3 aa, Artificial Sequence
  Synthetic polypeptide
SRT

SEQ ID NO: 8949 - protein, 16 aa, Artificial Sequence
  Synthetic polypeptide
LCHPKDQLLCQKSACL

SEQ ID NO: 8950 - protein, 873 aa, Artificial Sequence
  Synthetic polypeptide
MAEAEEQETGSLEESTDESEEEESEEEPKLKYERLSNGVTEILQKDAASCMTVHDKFLALGTHYGKVYLLDVQGNITQKFDVSPVKINQISLDESGEHMGVCSEDGKVQVFGLYSGEEFHETFDCPIKIIAVHPHFVRSSCKQFVTGGKKLLLFERSWMNRWKSAVLHEGEGNIRSVKWRGHLIAWANNMGVKIFDIISKQRITNVPRDDISLRPDMYPCSLCWKDNVTLIIGWGTSVKVCSVKERHASEMRDLPSRYVEIVSQFETEFYISGLAPLCDQLVVLSYVKEISEKTEREYCARPRLDIIQPLSETCEEISSDALTVRGFQENECRDYHLEYSEGESLFYIVSPRDVVVAKERDQDDHIDWLLEKKKYEEALMAAEISQKNIKRHKILDIGLAYINHLVERGDYDIAARKCQKILGKNAALWEYEVYKFKEIGQLKAISPYLPRGDPVLKPLIYEMILHEFLESDYEGFATLIREWPGDLYNNSVIVQAVRDHLKKDSQNKTLLKTLAELYTYDKNYGNALEIYLTLRHKDVFQLIHKHNLFSSIKDKIVLLMDFDSEKAVDMLLDNEDKISIKKVVEELEDRPELQHVYLHKLFKRDHHKGQRYHEKQISLYAEYDRPNLLPFLRDSTHCPLEKALEICQQRNFVEETVYLLSRMGNSRSALKMIMEELHDVDKAIEFAKEQDDGELWEDLILYSIDKPPFITGLLNNIGTHVDPILLIHRIKEGMEIPNLRDSLVKILQDYNLQILLREGCKKILVADSLSLLKKMHRTQMKGVLVDEENICESCLSPILPSDAAKPFSVVVFHCRHMFHKECLPMPSMVGTARIHLYMDFLLPLPPLRRQDQALPFLLLLSLLSMKTTEMKHL

SEQ ID NO: 8951 - protein, 848 aa, Artificial Sequence
  Synthetic polypeptide
MAEAEEQETGSLEESTDESEEEESEEEPKLKYERLSNGVTEILQKDAASCMTVHDKFLALGTHYGKVYLLDVQGNITQKFDVVQVFGLYSGEEFHETFDCPIKIIAVHPHFVRSSCKQFVTGGKKLLLFERSWMNRWKSAVLHEGEGNIRSVKWRGHLIAWANNMGVKIFDIISKQRITNVPRDDISLRPDMYPCSLCWKDNVTLIIGWGTSVKVCSVKERHASEMRDLPSRYVEIVSQFETEFYISGLAPLCDQLVVLSYVKEISEKTEREYCARPRLDIIQPLSETCEEISSDALTVRGFQENECRDYHLEYSEGESLFYIVSPRDVVVAKERDQDDHIDWLLEKKKYEEALMAAEISQKNIKRHKILDIGLAYINHLVERGDYDIAARKCQKILGKNAALWEYEVYKFKEIGQLKAISPYLPRGDPVLKPLIYEMILHEFLESDYEGFATLIREWPGDLYNNSVIVQAVRDHLKKDSQNKTLLKTLAELYTYDKNYGNALEIYLTLRHKDVFQLIHKHNLFSSIKDKIVLLMDFDSEKAVDMLLDNEDKISIKKVVEELEDRPELQHVYLHKLFKRDHHKGQRYHEKQISLYAEYDRPNLLPFLRDSTHCPLEKALEICQQRNFVEETVYLLSRMGNSRSALKMIMEELHDVDKAIEFAKEQDDGELWEDLILYSIDKPPFITGLLNNIGTHVDPILLIHRIKEGMEIPNLRDSLVKILQDYNLQILLREGCKKILVADSLSLLKKMHRTQMKGVLVDEENICESCLSPILPSDAAKPFSVVVFHCRHMFHKECLPMPSMVGTARIHLYMDFLLPLPPLRRQDQALPFLLLLSLLSMKTTEMKHL

SEQ ID NO: 8952 - protein, 49 aa, Artificial Sequence
  Synthetic polypeptide
MAEAEEQETGSLEESTDESEEEESEEEPKLKLELQGSTYTWIFFCLCHP

SEQ ID NO: 8953 - protein, 36 aa, Artificial Sequence
  Synthetic polypeptide
MAEAEEQEEESEEEPKLKLELQGSTYTWIFFCLCHP

SEQ ID NO: 8954 - protein, 447 aa, Artificial Sequence
  Synthetic polypeptide
MSALLQDPMIAGQVSKPLLSVRSEMNAELRGEDKAATSDSELNEPLLAPVESNDSEDTPSKLFGARGNPALSDPGTPDQHQASQTHPPFPVGPQPLLTAQQLASAVAGVMPGGPPALNQPILIPFNMAGQLGGQQGLVLTLPTANLTNIQGLVAAAAAGGIMTLPLQNLQATSSLNSQLQQLQLQLQQQQQQQQQQPPPSTNQHPQPAPQAPSQSQQQPLQPTPPQQPPPASQQPPAPTSQLQQAPQPQQHQPHSHSQNQNQPSPTQQSSSPPQKPSQSPGHGLPSPLTPPNPLQLVNNPLASQAAAAAAAMSSIASSQAFGNALSSLQGVTGQLVTNAQGQIIGTIPLMPNPGPSSQAASGTQGLQVQPITPQLLTNAQGQIIATVIGNQILPVINTQGITLSPIKPGQQVISNVPESVCSIGLGPDVKKGMKWNKALSQPTMEVM

SEQ ID NO: 8955 - protein, 392 aa, Artificial Sequence
  Synthetic polypeptide
MIAGQVSKPLLSVRSEMNAELRGEDKAATSDSELNEPLLAPVESNDSEDTPSKLFGARGNPALSDPGTPDQHQASQTHPPFPVGPQPLLTAQQLASAVAGVMPGGPPALNQPILIPFNMAGQLGGQQGLVLTLPTANLTNIQGLVAAAAAGGIMTLPLQNLQATSSLNSQLQQLQLQLQQQQQQQQQQPPPSTNQHPQPAPQAPSQSQQQPLQPTPPQQPPPASQQPPAPTSQLQQAPQPQQHQPHSHSQNQNQPSPTQQSSSPPQKPSQSPGHGLPSPLTPPNPLQIIGTIPLMPNPGPSSQAASGTQGLQVQPITPQLLTNAQGQIIATVIGNQILPVINTQGITLSPIKPGQQVISNVPESVCSIGLGPDVKKGMKWNKALSQPTMEVM

SEQ ID NO: 8956 - protein, 439 aa, Artificial Sequence
  Synthetic polypeptide
MIAGQVSKPLLSVRSEMNAELRGEDKAATSDSELNEPLLAPVESNDSEDTPSKLFGARGNPALSDPGTPDQHQASQTHPPFPVGPQPLLTAQQLASAVAGVMPGGPPALNQPILIPFNMAGQLGGQQGLVLTLPTANLTNIQGLVAAAAAGGIMTLPLQNLQATSSLNSQLQQLQLQLQQQQQQQQQQPPPSTNQHPQPAPQAPSQSQQQPLQPTPPQQPPPASQQPPAPTSQLQQAPQPQQHQPHSHSQNQNQPSPTQQSSSPPQKPSQSPGHGLPSPLTPPNPLQLVNNPLASQAAAAAAAMSSIASSQAFGNALSSLQGVTGQLVTNAQGQIIGTIPLMPNPGPSSQAASGTQGLQVQPITPQLLTNAQGQIIATVIGNQILPVINTQGITLSPIKPGQQVISNVPESVCSIGLGPDVKKGMKWNKALSQPTMEVM

SEQ ID NO: 8957 - protein, 146 aa, Artificial Sequence
  Synthetic polypeptide
ASQAAAAAAAMSSIASSQAFGNALSSLQGVTGQLVTNAQGQIIGTIPLMPNPGPSSQAASGTQGLQVQPITPQLLTNAQGQIIATVIGNQILPVINTQGITLSPIKPGQQVISNVPESVCSIGLGPDVKKGMKWNKALSQPTMEVM

SEQ ID NO: 8958 - protein, 786 aa, Artificial Sequence
  Synthetic polypeptide
MPSSSDTALGGGGGLSWAEKKLEERRKRRRFLSPQQPPLLLPLLQPQLLQPPPPPPPLLFLAAPGTAAAAAAAAAASSSCFSPGPPLEVKRLARGKRRAGGRQKRRRGPRAGQEAEKRRVFSLPQPQQDGGGGASSGGGVTPLVEYEDVSSQSEQGLLLGGASAATAATAAGGTGGSGGSPASSSGTQRRGEGSERRPRRDRRSSSGRSKERHREHRRRDGQRGGSEASKSRSRHSHSGEERAEVAKSGSSSSSGGRRKSASATSSSSSSRKDRDSKAHRSRTKSSKEPPSAYKEPPKAYREDKTEPKAYRRRRSLSPLGGRDDSPVSHRASQSLRSRKSPSPAGGGSSPYSRRLPRSPSPYSRRRSPSYSRHSSYERGGDVSPSPYSSSSWRRSRSPYSPVLRRSGKSRSRSPYSSRHSRSRSRHRLSRSRSRHSSISPSTLTLKSSLAAELNKNKKARAAEAARAAEAAKAAEATKAAEAAAKAAKASNTSTPTKGNTETSASASQTNHVKDVKKIKIEHAPSPSSGGTLKNDKAKTKPPLQVTKVENNLIVDKATKKAVIVGKESKSAATKEESVSLKEKTKPLTPSIGAKEKEQHVALVTSTLPPLPLPPMLPEDKEADSLRGNISVKAVKKEVEKKLRCLLADLPLPPELPGGDDLSKSPEEKKTATQLHSKRRPKICGPRYGETKEKDIDWGKRCVDKFDIIGIIGEGTYGQVYKARDKDTGEMVALKKVRLDNEKEGFPITAIREIKILRQLTHQSIINMKEIVTDKEDALDFKKDKGG

SEQ ID NO: 8959 - protein, 840 aa, Artificial Sequence
  Synthetic polypeptide
MPSSSDTALGGGGGLSWAEKKLEERRKRRRFLSPQQPPLLLPLLQPQLLQPPPPPPPLLFLAAPGTAAAAAAAAAASSSCFSPGPPLEVKRLARGKRRAGGRQKRRRGPRAGQEAEKRRVFSLPQPQQDGGGGASSGGGVTPLVEYEDVSSQSEQGLLLGGASAATAATAAGGTGGSGGSPASSSGTQRRGEGSERRPRRDRRSSSGRSKERHREHRRRDGQRGGSEASKSRSRHSHSGEERAEVAKSGSSSSSGGRRKSASATSSSSSSRKDRDSKAHRSRTKSSKEPPSAYKEPPKAYREDKTEPKAYRRRRSLSPLGGRDDSPVSHRASQSLRSRKSPSPAGGGSSPYSRRLPRSPSPYSRRRSPSYSRHSSYERGGDVSPSPYSSSSWRRSRSPYSPVLRRSGKSRSRSPYSSRHSRSRSRHRLSRSRSRHSSISPSTLTLKSSLAAELNKNKKARAAEAARAAEAAKAAEATKAAEAAAKAAKASNTSTPTKGNTETSASASQTNHVKDVKKIKIEHAPSPSSGGTLKNDKAKTKPPLQVTKVENNLIVDKATKKAVIVGKESKSAATKEESVSLKEKTKPLTPSIGAKEKEQHVALVTSTLPPLPLPPMLPEDKEADSLRGNISVKAVKKEVEKKLRCLLADLPLPPELPGGDDLSKSPEEKKTATQLHSKRRPKICGPRYGETKEKDIDWGKRCVDKFDIIGIIGEGTYGQVYKARDKDTGEMVALKKVRLDNEKEGFPITAIREIKILRQLTHQSIINMKEIVTDKEDALDFKKDKAQFTIAKIWNQPKCPSAEEWIKKMWFVYTMEYYSAIKKNESVFCCNLDGTGGHYSK

SEQ ID NO: 8960 - protein, 27 aa, Artificial Sequence
  Synthetic polypeptide
DFLCLGPTRQEVDQRWPFLKQPKQTKT

SEQ ID NO: 8961 - protein, 1404 aa, Artificial Sequence
  Synthetic polypeptide
MEEGHGLDLTYITERIIAVSFPAGCSEESYLHNLQEVTRMLKSKHGDNYLVLNLSEKRYDLTKLNPKIMDVGWPELHAPPLDKMCTICKAQESWLNSNLQHVVVIHCRGGKGRIGVVISSYMHFTNVSASADQALDRFAMKKFYDDKVSALMQPSQKRYVQFLSGLLSGSVKMNASPLFLHFVILHGTPNFDTGGVCRPFLKLYQAMQPVYTSGIYNVGPENPSRICIVIEPAQLLKGDVMVKCYHKKYRSATRDVIFRLQFHTGAVQGYGLVFGKEDLDNASKDDRFPDYGKVELVFSATPEKIQGSEHLYNDHGVIVDYNTTDPLIRWDSYENLSADGEVLHTQGPVDGSLYAKVRKKSSSDPGIPGGPQAIPATNSPDHSDHTLSVSSDSGHSTASARTDKTEERLAPGTRRGLSAQEKAELDQLLSGFGLEDPGSSLKEMTDARSKYSGTRHVVPAQVHVNGDAALKDRETDILDDEMPHHDLHSVDSLGTLSSSEGPQSAHLGPFTCHKSSQNSLLSDGFGSNVGEDPQGTLVPDLGLGMDGPYERERTFGSREPKQPQPLLRKPSVSAQMQAYGQSSYSTQTWVRQQQMVVAHQYSFAPDGEARLVSRCPADNPGLVQAQPRVPLTPTRGTSSRVAVQRGVGSGPHPPDTQQPSPSKAFKPRFPGDQVVNGAGPELSTGPSPGSPTLDIDQSIEQLNRLILELDPTFEPIPTHMNALGSQANGSVSPDSVGGGLRASSRLPDTGEGPSRATGRQGSSAEQPLGGRLRKLSLGQYDNDAGGQLPFSKCAWGKAGVDYAPNLPPFPSPADVKETMTPGYPQDLDIIDGRILSSKESMCSTPAFPVSPETPYVKTALRHPPFSPPEPPLSSPASQHKGGREPRSCPETLTHAVGMSESPIGPKSTMLRADASSTPSFQQAFASSCTISSNGPGQRRESSSSAERQWVESSPKPMVSLLGSGRPTGSPLSAEFSGTRKDSPVLSCFPPSELQAPFHSHELSLAEPPDSLAPPSSQAFLGFGTAPVGSGLPPEEDLGALLANSHGASPTPSIPLTATGAADNGFLSHNFLTVAPGHSSHHSPGLQGQGVTLPGQPPLPEKKRASEGDRSLGSVSPSSSGFSSPHSGSTISIPFPNVLPDFSKASEAASPLPDSPGDKLVIVKFVQDTSKFWYKADISREQAIAMLKDKEPGSFIVRDSHSFRGAYGLAMKVATPPPSVLQLNKKAGDLANELVRHFLIECTPKGVRLKGCSNEPYFGSLTALVCQHSITPLALPCKLLIPERDPLEEIAESSPQTAANSAAELLKQGAACNVWYLNSVEMESLTGHQAIQKALSITLVQEPPPVSTVVHFKVSAQGITLTDNQRKLFFRRHYPVNSVIFCALDPQDRKWIKDGPSSNSPNRLR

SEQ ID NO: 8962 - protein, 1164 aa, Artificial Sequence
  Synthetic polypeptide
MEEGHGLDLTYITERIIAVSFPAGCSEESYLHNLQEVTRMLKSKHGDNYLVLNLSEKRYDLTKLNPKIMDVGWPELHAPPLDKMCTICKAQESWLNSNLQHVVVIHCRGGKGRIGVVISSYMHFTNVSASADQALDRFAMKKFYDDKVSALMQPSQKRYVQFLSGLLSGSVKMNASPLFLHFVILHGTPNFDTGGVCRPFLKLYQAMQPVYTSGIYNVGPENPSRICIVIEPAQLLKGDVMMPHHDLHSVDSLGTLSSSEGPQSAHLGPFTCHKSSQNSLLSDGFGSNVGEDPQGTLVPDLGLGMDGPYERERTFGSREPKQPQPLLRKPSVSAQMQAYGQSSYSTQTWVRQQQMVVAHQYSFAPDGEARLVSRCPADNPGLVQAQPRVPLTPTRGTSSRVAVQRGVGSGPHPPDTQQPSPSKAFKPRFPGDQVVNGAGPELSTGPSPGSPTLDIDQSIEQLNRLILELDPTFEPIPTHMNALGSQANGSVSPDSVGGGLRASSRLPDTGEGPSRATGRQGSSAEQPLGGRLRKLSLGQYDNDAGGQLPFSKCAWGKAGVDYAPNLPPFPSPADVKETMTPGYPQDLDIIDGRILSSKESMCSTPAFPVSPETPYVKTALRHPPFSPPEPPLSSPASQHKGGREPRSCPETLTHAVGMSESPIGPKSTMLRADASSTPSFQQAFASSCTISSNGPGQRRESSSSAERQWVESSPKPMVSLLGSGRPTGSPLSAEFSGTRKDSPVLSCFPPSELQAPFHSHELSLAEPPDSLAPPSSQAFLGFGTAPVGSGLPPEEDLGALLANSHGASPTPSIPLTATGAADNGFLSHNFLTVAPGHSSHHSPGLQGQGVTLPGQPPLPEKKRASEGDRSLGSVSPSSSGFSSPHSGSTISIPFPNVLPDFSKASEAASPLPDSPGDKLVIVKFVQDTSKFWYKADISREQAIAMLKDKEPGSFIVRDSHSFRGAYGLAMKVATPPPSVLQLNKKAGDLANELVRHFLIECTPKGVRLKGCSNEPYFGSLTALVCQHSITPLALPCKLLIPERDPLEEIAESSPQTAANSAAELLKQGAACNVWYLNSVEMESLTGHQAIQKALSITLVQEPPPVSTVVHFKVSAQGITLTDNQRKLFFRRHYPVNSVIFCALDPQDRKWIKDGPSSNSPNRLR

SEQ ID NO: 8963 - protein, 1195 aa, Artificial Sequence
  Synthetic polypeptide
MEEGHGLDLTYITERIIAVSFPAGCSEESYLHNLQEVTRMLKSKHGDNYLVLNLSEKRYDLTKLNPKIMDVGWPELHAPPLDKMCTICKAQESWLNSNLQHVVVIHCRGGKGRIGVVISSYMHFTNVSASADQALDRFAMKKFYDDKVSALMQPSQKRYVQFLSGLLSGSVKMNASPLFLHFVILHGTPNFDTGGVCRPFLKLYQAMQPVYTSGIYNVGPENPSRICIVIEPAQLLKGDVMVKCYHKKYRSATRDVIFRLQFHTGAVQGYGLVFGKEDLDNASKDDRFPDYGKVELVFSATPEKIQGSEHLYNDHGVIVDYNTTDPLIRWDSYENLSADGEVLHTQGPVDGSLYAKVRKKSSSDPGIPGGPQAIPATNSPDHSDHTLSVSSDSGHSTASARTDKTEERLAPGTRRGLSAQEKAELDQLLSGFGLEDPGSSLKEMTDARSKYSGTRHVVPAQVHVNGDAALKDRETDILDDEMPHHDLHSVDSLGTLSSSEGPQSAHLGPFTCHKSSQNSLLSDGFGSNVGEDPQGTLVPDLGLGMDGPYERERTFGSREPKQPQPLLRKPSVSAQMQAYGQSSYSTQTWVRQQQMVVAHQYSFAPDGEARLVSRCPADNPGLVQAQPRVPLTPTRGTSSRVAVQRGVGSGPHPPDTQQPSPSKAFKPRFPGDQVVNGAGPELSTGPSPGSPTLDIDQSIEQLNRLILELDPTFEPIPTHMNALGSQANGSVSPDSVGGGLRASSRLPDTGEGPSRATGRQGSSAEQPLGGRLRKLSLGQYDNDAGGQLPFSKCAWGKAGVDYAPNLPPFPSPADVKETMTPGYPQDLDIIDGRILSSKESMCSTPAFPVSPETPYVKTALRHPPFSPPEPPLSSPASQHKGGREPRSCPETLTHAVGMSESPIGPKSTMLRADASSTPSFQQAFASSCTISSNGPGQRRESSSSAERQWVESSPKPMVSLLGSGRPTGSPLSAEFSGTRKDSPVLSCFPPSELQAPFHSHELSLAEPPDSLAPPSSQAFLGFGTAPVGSGLPPEEDLGALLANSHGASPTPSIPLTATGAADNGFLSHNFLTVAPGHSSHHSPGLQGQGVTLPGQPPLPEKKRASEGDRSLGSVSPSSSGFSSPHSGSTISIPFPNVLPDFSKASEAASPLPDSPGDKLVIVKFVQDTSKFWYKADISREQGAVAHACNPSTLGG

SEQ ID NO: 8964 - protein, 955 aa, Artificial Sequence
  Synthetic polypeptide
MEEGHGLDLTYITERIIAVSFPAGCSEESYLHNLQEVTRMLKSKHGDNYLVLNLSEKRYDLTKLNPKIMDVGWPELHAPPLDKMCTICKAQESWLNSNLQHVVVIHCRGGKGRIGVVISSYMHFTNVSASADQALDRFAMKKFYDDKVSALMQPSQKRYVQFLSGLLSGSVKMNASPLFLHFVILHGTPNFDTGGVCRPFLKLYQAMQPVYTSGIYNVGPENPSRICIVIEPAQLLKGDVMMPHHDLHSVDSLGTLSSSEGPQSAHLGPFTCHKSSQNSLLSDGFGSNVGEDPQGTLVPDLGLGMDGPYERERTFGSREPKQPQPLLRKPSVSAQMQAYGQSSYSTQTWVRQQQMVVAHQYSFAPDGEARLVSRCPADNPGLVQAQPRVPLTPTRGTSSRVAVQRGVGSGPHPPDTQQPSPSKAFKPRFPGDQVVNGAGPELSTGPSPGSPTLDIDQSIEQLNRLILELDPTFEPIPTHMNALGSQANGSVSPDSVGGGLRASSRLPDTGEGPSRATGRQGSSAEQPLGGRLRKLSLGQYDNDAGGQLPFSKCAWGKAGVDYAPNLPPFPSPADVKETMTPGYPQDLDIIDGRILSSKESMCSTPAFPVSPETPYVKTALRHPPFSPPEPPLSSPASQHKGGREPRSCPETLTHAVGMSESPIGPKSTMLRADASSTPSFQQAFASSCTISSNGPGQRRESSSSAERQWVESSPKPMVSLLGSGRPTGSPLSAEFSGTRKDSPVLSCFPPSELQAPFHSHELSLAEPPDSLAPPSSQAFLGFGTAPVGSGLPPEEDLGALLANSHGASPTPSIPLTATGAADNGFLSHNFLTVAPGHSSHHSPGLQGQGVTLPGQPPLPEKKRASEGDRSLGSVSPSSSGFSSPHSGSTISIPFPNVLPDFSKASEAASPLPDSPGDKLVIVKFVQDTSKFWYKADISREQGAVAHACNPSTLGG

SEQ ID NO: 8965 - protein, 251 aa, Artificial Sequence
  Synthetic polypeptide
MEEGHGLDLTYITERIIAVSFPAGCSEESYLHNLQEVTRMLKSKHGDNYLVLNLSEKRYDLTKLNPKIMDVGWPELHAPPLDKMCTICKAQESWLNSNLQHVVVIHCRGGKGRIGVVISSYMHFTNVSASADQALDRFAMKKFYDDKVSALMQPSQKRYVQFLSGLLSGSVKMNASPLFLHFVILHGTPNFDTGGVCRPFLKLYQAMQPVYTSGIYNVGPENPSRICIVIEPAQLLKGDVMEPGQRASMTT

SEQ ID NO: 8966 - protein, 354 aa, Artificial Sequence
  Synthetic polypeptide
MNWLCRNQDPNPPPQPEELTSSLHAFKNKAFKKSKVCGVCKQIIDGQGISCRACKYSCHKKCEAKVVIPCGVQVRLEQAPGSSTLSSSLCRDKPLRPVILSPTMEEGHGLDLTYITERIIAVSFPAGCSEESYLHNLQEVTRMLKSKHGDNYLVLNLSEKRYDLTKLNPKIMDVGWPELHAPPLDKMCTICKAQESWLNSNLQHVVVIHCRGGKGRIGVVISSYMHFTNVSASADQALDRFAMKKFYDDKVSALMQPSQKRYVQFLSGLLSGSVKMNASPLFLHFVILHGTPNFDTGGVCRPFLKLYQAMQPVYTSGIYNVGPENPSRICIVIEPAQLLKGDVMEPGQRASMTT

SEQ ID NO: 8967 - protein, 340 aa, Artificial Sequence
  Synthetic polypeptide
MPEELTSSLHAFKNKAFKKSKVCGVCKQIIDGQGISCRACKYSCHKKCEAKVVIPCGVQVRLEQAPGSSTLSSSLCRDKPLRPVILSPTMEEGHGLDLTYITERIIAVSFPAGCSEESYLHNLQEVTRMLKSKHGDNYLVLNLSEKRYDLTKLNPKIMDVGWPELHAPPLDKMCTICKAQESWLNSNLQHVVVIHCRGGKGRIGVVISSYMHFTNVSASADQALDRFAMKKFYDDKVSALMQPSQKRYVQFLSGLLSGSVKMNASPLFLHFVILHGTPNFDTGGVCRPFLKLYQAMQPVYTSGIYNVGPENPSRICIVIEPAQLLKGDVMEPGQRASMTT

SEQ ID NO: 8968 - protein, 51 aa, Artificial Sequence
  Synthetic polypeptide
MAATGANAEKAESHNCFHMSTVDLRSSRNHAACKTTCIYYLAFYEEKFADA

SEQ ID NO: 8969 - protein, 17 aa, Artificial Sequence
  Synthetic polypeptide
MQRKLKVTIAFTCLRWT

SEQ ID NO: 8970 - protein, 574 aa, Artificial Sequence
  Synthetic polypeptide
MFSAGAESLLHQAREIQDEELKKFCSRICKLLQAEDLGPDTLDSLQRLFLIISATKYSRRLEKTCVDLLQATLGLPACPEQLQVLCAAILREMSPSDSLSLAWDHTQNSRQLSLVASVLLAQGDRNEEVRAVGQGVLRALESRQPEGPSLRHLLPVMAKVVVLSPGTLQEDQATLLSKRLVDWLRYASLQQGLPHSGGFFSTPRARQPGPVTEVDGAVATDFFTVLSSGHRFTDDQWLNVQAFSMLRAWLLHSGPEGPGTLDTDDRSEQEGSTLSVISATSSAGRLLPPRERLREVAFEYCQRLIEQSNRRALRKGDSDLQKACLVEAVLVLDVLCRQDPSFLYRSLSCLKALHGRVRGDPASVRVLLPLAHFFLSHGEAAAVDSEAVYQHLFTRIPVEQFHSPMLAFEFIQFCRDNLHLFSGHLSTLRLSFPNLFKFLAWNSPPLTSEFVALLPALVDAGTALEMLHALLDLPCLTAVLDLQLRSAPAASERPLWDTSLRAPSCLEAFRDPQFQGLFQYLLRPKASGATERLAPLHQLLQPMAGCARVAQCAQAVPTLLQAFFSAVTQVLSPI

SEQ ID NO: 8971 - protein, 4328 aa, Artificial Sequence
  Synthetic polypeptide
MGHAGCQFKALLWKNWLCRLRNPVLFLAEFFWPCILFVILTVLRFQEPPRYRDICYLQPRDLPSCGVIPFVQSLLCNTGSRCRNFSYEGSMEHHFRLSRFQTAADPKKVNNLAFLKEIQDLAEEIHGMMDKAKNLKRLWVERSNTPDSSYGSSFFTMDLNKTEEVILKLESLHQQPHIWDFLLLLPRLHTSHDHVEDGMDVAVNLLQTILNSLISLEDLDWLPLNQTFSQVSELVLNVTISTLTFLQQHGVAVTEPVYHLSMQNIVWDPQKVQYDLKSQFGFDDLHTEQILNSSAELKEIPTDTSLEKMVCSVLSSTSEDEAEKWGHVGGCHPKWSEAKNYLVHAVSWLRVYQQVFVQWQQGSLLQKTLTGMGHSLEALRNQFEEESKPWKVVEALHTALLLLNDSLSADGPKDNHTFPKILQHLWKLQSLLQNLPQWPALKRFLQLDGALRNAIAQNLHFVQEVLICLETSANDFKWFELNQLKLEKDVFFWELKQMLAKNAVCPNGRFSEKEVFLPPGNSSIWGGLQGLLCYCNSSETSVLNKLLGSVEDADRILQEVITWHKNMSVLIPEEYLDWQELEMQLSEASLSCTRLFLLLGADPSPENDVFSSDCKHQLVSTVIFHTLEKTQFFLEQAYYWKAFKKFIRKTCEVAQYVNMQESFQNRLLAFPEESPCFEENMDWKMISDNYFQFLNNLLKSPTASISRALNFTKHLLMMEKKLHTLEDEQMNFLLSFVEFFEKLLLPNLFDSSIVPSFHSLPSLTEDILNISSLWTNHLKSLKRDPSATDAQKLLEFGNEVIWKMQTLGSHWIRKEPKNLLRFIELILFEINPKLLELWAYGISKGKRAKLENFFTLLNFSVPENEILSTSFNFSQLFHSDWPKSPAMNIDFVRLSEAIITSLHEFGFLEQEQISEALNTVYAIRNASDLFSALSEPQKQEVDKILTHIHLNVFQDKDSALLLQIYSSFYRYIYELLNIQSRGSSLTFLTQISKHILDIIKQFNFQNISKAFAFLFKTAEVLGGISNVSYCQQLLSIFNFLELQAQSFMSTEGQELEVIHTTLTGLKQLLIIDEDFRISLFQYMSQFFNSSVEDLLDNKCLISDNKHISSVNYSTSEESSFVFPLAQIFSNLSANVSVFNKFMSIHCTVSWLQMWTEIWETISQLFKFDMNVFTSLHHGFTQLLDELEDDVKVSKSCQGILPTHNVARLILNLFKNVTQANDFHNWEDFLDLRDFLVALGNALVSVKKLNLEQVEKSLFTMEAALHQLKTFPFNESTSREFLNSLLEVFIEFSSTSEYIVRNLDSINDFLSNNLTNYGEKFENIITELREAIVFLRNVSHDRDLFSCADIFQNVTECILEDGFLYVNTSQRMLRILDTLNSTFSSENTISSLKGCIVWLDVINHLYLLSNSSFSQGHLQNILGNFRDIENKMNSILKIVTWVLNIKKPLCSSNGSHINCVNIYLKDVTDFLNIVLTTVFEKEKKPKFEILLALLNDSTKQVRMSINNLTTDFDFASQSNWRYFTELILRPIEMSDEIPNQFQNIWLHLITLGKEFQKLVKGIYFNILENNSSSKTENLLNIFATSPKEKDVNSVGNSIYHLASYLAFSLSHDLQNSPKIIISPEIMKATGLGIQLIRDVFNSLMPVVHHTSPQNAGYMQALKKVTSVMRTLKKADIDLLVDQLEQVSVNLMDFFKNISSVGTGNLVVNLLVGLMEKFADSSHSWNVNHLLQLSRLFPKDVVDAVIDVYYVLPHAVRLLQGVPGKNITEGLKDVYSFTLLHGITISNITKEDFAIVIKILLDTIELVSDKPDIISEALACFPVVWCWNHTNSGFRQNSKIDPCNVHGLMSSSFYGKVASILDHFHLSPQGEDSPCSNESSRMEITRKVVCIIHELVDWNSILLELSEVFHVNISLVKTVQKFWHKILPFVPPSINQTRDSISELCPSGSIKQVALQIIEKLKNVNFTKVTSGENILDKLSSLNKILNINEDTETSVQNIISSNLERTVQLISEDWSLEKSTHNLLSLFMMLQNANVTGSSLEALSSFIEKSETPYNFEELWPKFQQIMKDLTQDFRIRHLLSEMNKGIKSINSMALQKITLQFAHFLEILDSPSLKTLEIIEDFLLVTKNWLQEYANEDYSRMIETLFIPVTNESSTEDIALLAKAIATFWGSLKNISRAGNFDVAFLTHLLNQEQLTNFSVVQLLFENILINLINNLAGNSQEAAWNLNDTDLQIMNFINLILNHMQSETSRKTVLSLRSIVDFTEQFLKTFFSLFLKEDSENKISLLLKYFHKDVIAEMSFVPKDKILEILKLDQFLTLMIQDRLMNIFSSLKETIYHLMKSSFILDNGEFYFDTHQGLKFMQDLFNALLRETSMKNKTENNIDFFTVVSQLFFHVNKSEDLFKLNQDLGSALHLVRECSTEMARLLDTILHSPNKDFYALYPTLQEVILANLTDLLFFINNSFPLRNRATLEITKRLVGAISRASEESHVLKPLLEMSGTLVMLLNDSADLRDLATSMDSIVKLLKLVKKVSGKMSTVFKTHFISNTKDSVKFFDTLYSIMQQSVQNLVKEIATLKKIDHFTFEKINDLLVPFLDLAFEMIGVEPYISSNSDIFSMSPSILSYMNQSKDFSDILEEIAEFLTSVKMNLEDMRSLAVAFNNETQTFSMDSVNLREEILGCLVPINNITNQMDFLYPNPISTHSGPQDIKWEIIHEVIPFLDKILSQNSTEIGSFLKMVICLTLEALWKNLKKDNWNVSNVLMTFTQHPNNLLKTIETVLEASSGIKSDYEGDLNKSLYFDTPLSQNITHHQLEKAIHNVLSRIALWRKGLLFNNSEWITSTRTLFQPLFEIFIKATTGKNVTSEKEERTKKEMIDFPYSFKPFFCLEKYLGGLFVLTKYWQQIPLTDQSVVEICEVFQQTVKPSEAMEMLQKVKMMVVRVLTIVAENPSWTKDILCATLSCKQNGIRHLILSAIQGVTLAQDHFQEIEKIWSSPNQLNCESLSKNLSSTLESFKSSLENATGQDCTSQPRLETVQQHLYMLAKSLEETWSSGNPIMTFLSNFTVTEDVKIKDLMKNITKLTEELRSSIQISNETIHSILEANISHSKVLFSALTVALSGKCDQEILHLLLTFPKGEKSWIAAEELCSLPGSKVYSLIVLLSRNLDVRAFIYKTLMPSEANGLLNSLLDIVSSLSALLAKAQHVFEYLPEFLHTFKITALLETLDFQQVSQNVQARSSAFGSFQFVMKMVCKDQASFLSDSNMFINLPRVKELLEDDKEKFNIPEDSTPFCLKLYQEILQLPNGALVWTFLKPILHGKILYTPNTPEINKVIQKANYTFYIVDKLKTLSETLLEMSSLFQRSGSGQMFNQLQEALRNKFVRNFVENQLHIDVDKLTEKLQTYGGLLDEMFNHAGAGRFRFLGSILVNLSSCVALNRFQALQSVDILETKAHELLQQNSFLASIIFSNSLFDKNFRSESVKLPPHVSYTIRTNVLYSVRTDVVKNPSWKFHPQNLPADGFKYNYVFAPLQDMIERAIILVQTGQEALEPAAQTQAAPYPCHTSDLFLNNVGFFFPLIMMLTWMVSVASMVRKLVYEQEIQIEEYMRMMGVHPVIHFLAWFLENMAVLTISSATLAIVLKTSGIFAHSNTFIVFLFLLDFGMSVVMLSYLLSAFFSQANTAALCTSLVYMISFLPYIVLLVLHNQLSFVNQTFLCLLSTTAFGQGVFFITFLEGQETGIQWNNMYQALEQGGMTFGWVCWMILFDSSLYFLCGWYLSNLIPGTFGLRKPWYFPFTASYWKSVGFLVEKRQYFLSSSLFFFNENFDNKGSSLQNREGELEGSAPGVTLVSVTKEYEGHKAVVQDLSLTFYRDQITALLGTNGAGKTTIISMLTGLHPPTSGTIIINGKNLQTDLSRVRMELGVCPQQDILLDNLTVREHLLLFASIKAPQWTKKELHQQVNQTLQDVDLTQHQHKQTRALSGGLKRKLSLGIAFMGMSRTVVLDEPTSGVDPCSRHSLWDILLKYREGRTIIFTTHHLDEAEALSDRVAVLQHGRLRCCGPPFCLKEAYGQGLRLTLTRQPSVLEAHDLKDMACVTSLIKIYIPQAFLKDSSGSELTYTIPKDTDKACLKGLFQALDENLHQLHLTGYGISDTTLEEVFLMLLQDSNKKSHIALGTESELQNHRPTGHLSGYCGSLARPATVQGVQLLRAQVAAILARRLRRTLRAGKSTLADLLLPVLFVALAMGLFMVRPLATEYPPLRLTPGHYQRAETYFFSSGGDNLDLTRVLLRKFRDQDLPCADLNPRQKNSSCWRTDPFSHPEFQDSCGCLGHG

SEQ ID NO: 8972 - protein, 4 aa, Artificial Sequence
  Synthetic polypeptide
DSME

SEQ ID NO: 8973 - protein, 101 aa, Artificial Sequence
  Synthetic polypeptide
VQGVQLLRAQVAAILARRLRRTLRAGKSTLADLLLPVLFVALAMGLFMVRPLATEYPPLRLTPGHYQRAETYFFRKNSSCWRTDPFSHPEFQDSCGCLGHG

SEQ ID NO: 8974 - protein, 58 aa, Artificial Sequence
  Synthetic polypeptide
MGLFMVRPLATEYPPLRLTPGHYQRAETYFFRKNSSCWRTDPFSHPEFQDSCGCLGHG

SEQ ID NO: 8975 - protein, 4 aa, Artificial Sequence
  Synthetic polypeptide
DSME

SEQ ID NO: 8976 - protein, 4806 aa, Artificial Sequence
  Synthetic polypeptide
MGHAGCQFKALLWKNWLCRLRNPVLFLAEFFWPCILFVILTVLRFQEPPRYRDICYLQPRDLPSCGVIPFVQSLLCNTGSRCRNFSYEGSMEHHFRLSRFQTAADPKKVNNLAFLKEIQDLAEEIHGMMDKAKNLKRLWVERSNTPDSSYGSSFFTMDLNKTEEVILKLESLHQQPHIWDFLLLLPRLHTSHDHVEDGMDVAVNLLQTILNSLISLEDLDWLPLNQTFSQVSELVLNVTISTLTFLQQHGVAVTEPVYHLSMQNIVWDPQKVQYDLKSQFGFDDLHTEQILNSSAELKEIPTDTSLEKMVCSVLSSTSEDEAEKWGHVGGCHPKWSEAKNYLVHAVSWLRVYQQVFVQWQQGSLLQKTLTGMGHSLEALRNQFEEESKPWKVVEALHTALLLLNDSLSADGPKDNHTFPKILQHLWKLQSLLQNLPQWPALKRFLQLDGALRNAIAQNLHFVQEVLICLETSANDFKWFELNQLKLEKDVFFWELKQMLAKNAVCPNGRFSEKEVFLPPGNSSIWGGLQGLLCYCNSSETSVLNKLLGSVEDADRILQEVITWHKNMSVLIPEEYLDWQELEMQLSEASLSCTRLFLLLGADPSPENDVFSSDCKHQLVSTVIFHTLEKTQFFLEQAYYWKAFKKFIRKTCEVAQYVNMQESFQNRLLAFPEESPCFEENMDWKMISDNYFQFLNNLLKSPTASISRALNFTKHLLMMEKKLHTLEDEQMNFLLSFVEFFEKLLLPNLFDSSIVPSFHSLPSLTEDILNISSLWTNHLKSLKRDPSATDAQKLLEFGNEVIWKMQTLGSHWIRKEPKNLLRFIELILFEINPKLLELWAYGISKGKRAKLENFFTLLNFSVPENEILSTSFNFSQLFHSDWPKSPAMNIDFVRLSEAIITSLHEFGFLEQEQISEALNTVYAIRNASDLFSALSEPQKQEVDKILTHIHLNVFQDKDSALLLQIYSSFYRYIYELLNIQSRGSSLTFLTQISKHILDIIKQFNFQNISKAFAFLFKTAEVLGGISNVSYCQQLLSIFNFLELQAQSFMSTEGQELEVIHTTLTGLKQLLIIDEDFRISLFQYMSQFFNSSVEDLLDNKCLISDNKHISSVNYSTSEESSFVFPLAQIFSNLSANVSVFNKFMSIHCTVSWLQMWTEIWETISQLFKFDMNVFTSLHHGFTQLLDELEDDVKVSKSCQGILPTHNVARLILNLFKNVTQANDFHNWEDFLDLRDFLVALGNALVSVKKLNLEQVEKSLFTMEAALHQLKTFPFNESTSREFLNSLLEVFIEFSSTSEYIVRNLDSINDFLSNNLTNYGEKFENIITELREAIVFLRNVSHDRDLFSCADIFQNVTECILEDGFLYVNTSQRMLRILDTLNSTFSSENTISSLKGCIVWLDVINHLYLLSNSSFSQGHLQNILGNFRDIENKMNSILKIVTWVLNIKKPLCSSNGSHINCVNIYLKDVTDFLNIVLTTVFEKEKKPKFEILLALLNDSTKQVRMSINNLTTDFDFASQSNWRYFTELILRPIEMSDEIPNQFQNIWLHLITLGKEFQKLVKGIYFNILENNSSSKTENLLNIFATSPKEKDVNSVGNSIYHLASYLAFSLSHDLQNSPKIIISPEIMKATGLGIQLIRDVFNSLMPVVHHTSPQNAGYMQALKKVTSVMRTLKKADIDLLVDQLEQVSVNLMDFFKNISSVGTGNLVVNLLVGLMEKFADSSHSWNVNHLLQLSRLFPKDVVDAVIDVYYVLPHAVRLLQGVPGKNITEGLKDVYSFTLLHGITISNITKEDFAIVIKILLDTIELVSDKPDIISEALACFPVVWCWNHTNSGFRQNSKIDPCNVHGLMSSSFYGKVASILDHFHLSPQGEDSPCSNESSRMEITRKVVCIIHELVDWNSILLELSEVFHVNISLVKTVQKFWHKILPFVPPSINQTRDSISELCPSGSIKQVALQIIEKLKNVNFTKVTSGENILDKLSSLNKILNINEDTETSVQNIISSNLERTVQLISEDWSLEKSTHNLLSLFMMLQNANVTGSSLEALSSFIEKSETPYNFEELWPKFQQIMKDLTQDFRIRHLLSEMNKGIKSINSMALQKITLQFAHFLEILDSPSLKTLEIIEDFLLVTKNWLQEYANEDYSRMIETLFIPVTNESSTEDIALLAKAIATFWGSLKNISRAGNFDVAFLTHLLNQEQLTNFSVVQLLFENILINLINNLAGNSQEAAWNLNDTDLQIMNFINLILNHMQSETSRKTVLSLRSIVDFTEQFLKTFFSLFLKEDSENKISLLLKYFHKDVIAEMSFVPKDKILEILKLDQFLTLMIQDRLMNIFSSLKETIYHLMKSSFILDNGEFYFDTHQGLKFMQDLFNALLRETSMKNKTENNIDFFTVVSQLFFHVNKSEDLFKLNQDLGSALHLVRECSTEMARLLDTILHSPNKDFYALYPTLQEVILANLTDLLFFINNSFPLRNRATLEITKRLVGAISRASEESHVLKPLLEMSGTLVMLLNDSADLRDLATSMDSIVKLLKLVKKVSGKMSTVFKTHFISNTKDSVKFFDTLYSIMQQSVQNLVKEIATLKKIDHFTFEKINDLLVPFLDLAFEMIGVEPYISSNSDIFSMSPSILSYMNQSKDFSDILEEIAEFLTSVKMNLEDMRSLAVAFNNETQTFSMDSVNLREEILGCLVPINNITNQMDFLYPNPISTHSGPQDIKWEIIHEVIPFLDKILSQNSTEIGSFLKMVICLTLEALWKNLKKDNWNVSNVLMTFTQHPNNLLKTIETVLEASSGIKSDYEGDLNKSLYFDTPLSQNITHHQLEKAIHNVLSRIALWRKGLLFNNSEWITSTRTLFQPLFEIFIKATTGKNVTSEKEERTKKEMIDFPYSFKPFFCLEKYLGGLFVLTKYWQQIPLTDQSVVEICEVFQQTVKPSEAMEMLQKVKMMVVRVLTIVAENPSWTKDILCATLSCKQNGIRHLILSAIQGVTLAQDHFQEIEKIWSSPNQLNCESLSKNLSSTLESFKSSLENATGQDCTSQPRLETVQQHLYMLAKSLEETWSSGNPIMTFLSNFTVTEDVKIKDLMKNITKLTEELRSSIQISNETIHSILEANISHSKVLFSALTVALSGKCDQEILHLLLTFPKGEKSWIAAEELCSLPGSKVYSLIVLLSRNLDVRAFIYKTLMPSEANGLLNSLLDIVSSLSALLAKAQHVFEYLPEFLHTFKITALLETLDFQQVSQNVQARSSAFGSFQFVMKMVCKDQASFLSDSNMFINLPRVKELLEDDKEKFNIPEDSTPFCLKLYQEILQLPNGALVWTFLKPILHGKILYTPNTPEINKVIQKANYTFYIVDKLKTLSETLLEMSSLFQRSGSGQMFNQLQEALRNKFVRNFVENQLHIDVDKLTEKLQTYGGLLDEMFNHAGAGRFRFLGSILVNLSSCVALNRFQALQSVDILETKAHELLQQNSFLASIIFSNSLFDKNFRSESVKLPPHVSYTIRTNVLYSVRTDVVKNPSWKFHPQNLPADGFKYNYVFAPLQDMIERAIILVQTGQEALEPAAQTQAAPYPCHTSDLFLNNVGFFFPLIMMLTWMVSVASMVRKLVYEQEIQIEEYMRMMGVHPVIHFLAWFLENMAVLTISSATLAIVLKTSGIFAHSNTFIVFLFLLDFGMSVVMLSYLLSAFFSQANTAALCTSLVYMISFLPYIVLLVLHNQLSFVNQTFLCLLSTTAFGQGVFFITFLEGQETGIQWNNMYQALEQGGMTFGWVCWMILFDSSLYFLCGWYLSNLIPGTFGLRKPWYFPFTASYWKSVGFLVEKRQYFLSSSLFFFNENFDNKGSSLQNREGELEGSAPGVTLVSVTKEYEGHKAVVQDLSLTFYRDQITALLGTNGAGKTTIISMLTGLHPPTSGTIIINGKNLQTDLSRVRMELGVCPQQDILLDNLTVREHLLLFASIKAPQWTKKELHQQVNQTLQDVDLTQHQHKQTRALSGGLKRKLSLGIAFMGMSRTVVLDEPTSGVDPCSRHSLWDILLKYREGRTIIFTTHHLDEAEALSDRVAVLQHGRLRCCGPPFCLKEAYGQGLRLTLTRQPSVLEAHDLKDMACVTSLIKIYIPQAFLKDSSGSELTYTIPKDTDKACLKGLFQALDENLHQLHLTGYGISDTTLEEVFLMLLQDSNKKSHIALGTESELQNHRPTGHLSGYCGSLARPATVQGVQLLRAQVAAILARRLRRTLRAGKSTLADLLLPVLFVALAMGLFMVRPLATEYPPLRLTPGHYQRAETYFFSSGGDNLDLTRVLLRKFRDQDLPCADLNPRQKNSSCWRTDPFSHPEFQDSCGCLKCPNRSASAPYLTNHLGHTLLNLSGFNMEEYLLAPSEKPRLGGWSFGLKIPSEAGGANGNISKPPTLAKVWYNQKGFHSLPSYLNHLNNLILWQHLPPTVDWRQYGITLYSHPYGGALLNKDKILESIRQCGVALCIVLGFSILSASIGSSVVRDRVIGAKRLQHISGLGYRMYWFTNFLYDMLFYLVSVCLCVAVIVAFQLTAFTFRKNLAATALLLSLFGYATLPWMYLMSRIFSSSDVAFISYVSLNFIFGLCTMLITIMPRLLAIISKAKNLQNIYDVLKWVFTIFPQFCLGQGLVELCYNQIKYDLTHNFGIDSYVSPFEMNFLGWIFVQLASQGTVLLLLRVLLHWDLLRWPRGHSTLQGTVKSSKDTDVEKEEKRVFEGRTNGDILVLYNLSKHYRRFFQNIIAVQDISLGIPKGECFGLLGVNGAGKSTTFKMLNGEVSLTSGHAIIRTPMGPGAVAHTCNPSIMGGRGGRIT

SEQ ID NO: 8977 - protein, 579 aa, Artificial Sequence
  Synthetic polypeptide
VQGVQLLRAQVAAILARRLRRTLRAGKSTLADLLLPVLFVALAMGLFMVRPLATEYPPLRLTPGHYQRAETYFFRKNSSCWRTDPFSHPEFQDSCGCLKCPNRSASAPYLTNHLGHTLLNLSGFNMEEYLLAPSEKPRLGGWSFGLKIPSEAGGANGNISKPPTLAKVWYNQKGFHSLPSYLNHLNNLILWQHLPPTVDWRQYGITLYSHPYGGALLNKDKILESIRQCGVALCIVLGFSILSASIGSSVVRDRVIGAKRLQHISGLGYRMYWFTNFLYDMLFYLVSVCLCVAVIVAFQLTAFTFRKNLAATALLLSLFGYATLPWMYLMSRIFSSSDVAFISYVSLNFIFGLCTMLITIMPRLLAIISKAKNLQNIYDVLKWVFTIFPQFCLGQGLVELCYNQIKYDLTHNFGIDSYVSPFEMNFLGWIFVQLASQGTVLLLLRVLLHWDLLRWPRGHSTLQGTVKSSKDTDVEKEEKRVFEGRTNGDILVLYNLSKHYRRFFQNIIAVQDISLGIPKGECFGLLGVNGAGKSTTFKMLNGEVSLTSGHAIIRTPMGPGAVAHTCNPSIMGGRGGRIT

SEQ ID NO: 8978 - protein, 536 aa, Artificial Sequence
  Synthetic polypeptide
MGLFMVRPLATEYPPLRLTPGHYQRAETYFFRKNSSCWRTDPFSHPEFQDSCGCLKCPNRSASAPYLTNHLGHTLLNLSGFNMEEYLLAPSEKPRLGGWSFGLKIPSEAGGANGNISKPPTLAKVWYNQKGFHSLPSYLNHLNNLILWQHLPPTVDWRQYGITLYSHPYGGALLNKDKILESIRQCGVALCIVLGFSILSASIGSSVVRDRVIGAKRLQHISGLGYRMYWFTNFLYDMLFYLVSVCLCVAVIVAFQLTAFTFRKNLAATALLLSLFGYATLPWMYLMSRIFSSSDVAFISYVSLNFIFGLCTMLITIMPRLLAIISKAKNLQNIYDVLKWVFTIFPQFCLGQGLVELCYNQIKYDLTHNFGIDSYVSPFEMNFLGWIFVQLASQGTVLLLLRVLLHWDLLRWPRGHSTLQGTVKSSKDTDVEKEEKRVFEGRTNGDILVLYNLSKHYRRFFQNIIAVQDISLGIPKGECFGLLGVNGAGKSTTFKMLNGEVSLTSGHAIIRTPMGPGAVAHTCNPSIMGGRGGRIT

SEQ ID NO: 8979 - protein, 155 aa, Artificial Sequence
  Synthetic polypeptide
LRDNIAGEELELSKSLNELGIKELYAWDNRRETFRKSSLGNDETDKEKKKFLGFFKVNKRSNSKAEQLVLSGADSDEDTSRAAPGRGLNGCLTTPNSPSMHSRSLTLGPSLSLGSISGVSVKSEMKKRRAPPPPGSGPPVQDKASEKAGCSSSRL

SEQ ID NO: 8980 - protein, 219 aa, Artificial Sequence
  Synthetic polypeptide
MKEKVPEEKVKPGPPKVPEKSVRLVVNYLRTQKAVVRVSPEVPLQNILPVICAKCEVSPEHVVLLRDNIAGEELELSKSLNELGIKELYAWDNRRETFRKSSLGNDETDKEKKKFLGFFKVNKRSNSKAEQLVLSGADSDEDTSRAAPGRGLNGCLTTPNSPSMHSRSLTLGPSLSLGSISGVSVKSEMKKRRAPPPPGSGPPVQDKASEKAGCSSSRL

SEQ ID NO: 8981 - protein, 327 aa, Artificial Sequence
  Synthetic polypeptide
MDAPRASAAKPPTGRKMKARAPPPPGKAATLHVHSDQKPPHDGALGSQQNLVRMKEALRASTMDVTVVLPSGLEKRSVLNGSHAMMDLLVELCLQNHLNPSHHALEIRSSETQQPLSFKPNTLIGTLNVHTVFLKEKVPEEKVKPGPPKVPEKSVRLVVNYLRTQKAVVRVSPEVPLQNILPVICAKCEVSPEHVVLLRDNIAGEELELSKSLNELGIKELYAWDNRRETFRKSSLGNDETDKEKKKFLGFFKVNKRSNSKGCLTTPNSPSMHSRSLTLGPSLSLGSISGVSVKSEMKKRRAPPPPGSGPPVQDKASEKAGCSSSRL

SEQ ID NO: 8982 - protein, 352 aa, Artificial Sequence
  Synthetic polypeptide
MDAPRASAAKPPTGRKMKARAPPPPGKAATLHVHSDQKPPHDGALGSQQNLVRMKEALRASTMDVTVVLPSGLEKRSVLNGSHAMMDLLVELCLQNHLNPSHHALEIRSSETQQPLSFKPNTLIGTLNVHTVFLKEKVPEEKVKPGPPKVPEKSVRLVVNYLRTQKAVVRVSPEVPLQNILPVICAKCEVSPEHVVLLRDNIAGEELELSKSLNELGIKELYAWDNRRETFRKSSLGNDETDKEKKKFLGFFKVNKRSNSKAEQLVLSGADSDEDTSRAAPGRGLNGCLTTPNSPSMHSRSLTLGPSLSLGSISGVSVKSEMKKRRAPPPPGSGPPVQDKASEKAGCSSSRL

SEQ ID NO: 8983 - protein, 8 aa, Artificial Sequence
  Synthetic polypeptide
PCDDGPTG

SEQ ID NO: 8984 - protein, 484 aa, Artificial Sequence
  Synthetic polypeptide
MGSVGSQRLEEPSVAGTPDPGVVMSFTFDSHQLEEAAEAAQGQGLRARGVPAFTDTTLDEPVPDDRYHAIYFAMLLAGVGFLLPYNSFITDVDYLHHKYPGTSIVFDMSLTYILVALAAVLLNNVLVERLTLHTRITAGYLLALGPLLFISICDVWLQLFSRDQAYAINLAAVGTVAFGCTVQQSSFYGYTGMLPKRYTQGVMTGESTAGVMISLSRILTKLLLPDERASTLIFFLVSVALELLCFLLHLLVRRSRFVLFYTTRPRDSHRGRPGLGRGYGYRVHHDVVAGDVHFEHPAPALAPNESPKDSPAHEVTGSGGAYMRFDVPRPRVQRSWPTFRALLLHRYVVARVIWADMLSIAVTYFITLCLFPGLESEIRHCILGEWLPILIMAVFNLSDFVGKILAALPVDWRGTHLLACSCLRVVFIPLFILCVYPSGMPALRHPAWPCIFSLLMGISNGYFGSVPMILAAGKVSPKQRELAG

SEQ ID NO: 8985 - protein, 470 aa, Artificial Sequence
  Synthetic polypeptide
MGSVGSQRLEEPSVAGTPDPGVVMSFTFDSHQLEEAAEAAQGQGLRARGVPAFTDTTLDEPVPDDRYHAIYFAMLLAGVGFLLPYNSFITDVDYLHHKYPGTSIVFDMSLTYILVALAAVLLNNVLVERLTLHTRITAASATCGCSSSLGTRPTPSTWPLWAPWPSAAQQSSFYGYTGMLPKRYTQGVMTGESTAGVMISLSRILTKLLLPDERASTLIFFLVSVALELLCFLLHLLVRRSRFVLFYTTRPRDSHRGRPGLGRGYGYRVHHDVVAGDVHFEHPAPALAPNESPKDSPAHEVTGSGGAYMRFDVPRPRVQRSWPTFRALLLHRYVVARVIWADMLSIAVTYFITLCLFPGLESEIRHCILGEWLPILIMAVFNLSDFVGKILAALPVDWRGTHLLACSCLRVVFIPLFILCVYPSGMPALRHPAWPCIFSLLMGISNGYFGSVPMILAAGKVSPKQRELAG

SEQ ID NO: 8986 - protein, 2092 aa, Artificial Sequence
  Synthetic polypeptide
MDGRDFGPQRSVHGPPPPLLSGLAMDSHRVGAATAGRLPASGLPGPLPPGKYMAGLNLHPHPGEAFLGSFVASGMGPSASSHGSPVPLPSDLSFRSPTPSNLPMVQLWAAHAHEGFSHLPSGLYPSYLHLNHLEPPSSGSPLLSQLGQPSIFDTQKGQGPGGDGFYLPTAGAPGSLHSHAPSARTPGGGHSSGAPAKGSSSRDGPAKERAGRGGEPPPLFGKKDPRARGEEASGPRGVVDLTQEARAEGRQDRGPPRLAERLSPFLAESKTKNAALQPSVLTMCNGGAGDVGLPALVAEAGRGGAKEAARQDEGARLLRRTETLLPGPRPCPSPLPPPPAPPKGPPAPPAATPAGVYTVFREQGREHRVVAPTFVPSVEAFDERPGPIQIASQARDARAREREAGRPGVLQAPPGSPRPLDRPEGLREKNSVIRSLKRPPPADAPTVRATRASPDPRAYVPAKELLKPEADPRPCERAPRGPAGPAAQQAAKLFGLEPGRPPPTGPEHKWKPFELGNFAATQMAVLAAQHHHSRAEEEAAVVAASSSKKAYLDPGAVLPRSAATCGRPVADMHSAAHGSGEASAMQSLIKYSGSFARDAVAVRPGGCGKKSPFGGLGTMKPEPAPTSAGASRAQARLPHSGGPAAGGGRQLKRDPERPESAKAFGREGSGAQGEAEVRHPPVGIAVAVARQKDSGGSGRLGPGLVDQERSLSLSNVKGHGRADEDCVDDRARHREERLLGARLDRDQEKLLRESKELADLARLHPTSCAPNGLNPNLMVTGGPALAGSGRWSADPAAHLATHPWLPRSGNASMWLAGHPYGLGPPSLHQGMAPAFPPGLGGSLPSAYQFVRDPQSGQLVVIPSDHLPHFAELMERATVPPLWPALYPPGRSPLHHAQQLQLFSQQHFLRQQEFLYLQQQAAQALELQRSAQLVQERLKAQEHRAEMEEKGSKRGLEAAGKAGLATAGPGLLPRKPPGLAAGPAGTYGKAVSPPPSPRASPVAALKAKVIQKLEDVSKPPAYAYPATPSSHPTSPPPASPPPTPGITRKEEAPENVVEKKDLELEKEAPSPFQALFSDIPPRYPFQALPPHYGRPYPFLLQPTAAADADGLAPDVPLPADGPERLALSPEDKPIRLSPSKITEPLREGPEEEPLAEREVKAEVEDMDEGPTELPPLESPLPLPAAEAMATPSPAGGCGGGLLEAQALSATGQSCAEPSECPDFVEGPEPRVDSPGRTEPCTAALDLGVQLTPETLVEAKEEPVEVPVAVPVVEAVPEEGLAQVAPSESQPTLEMSDCDVPAGEGQCPSLEPQEAVPVLGSTCFLEEASSDQFLPSLEDPLAGMNALAAAAELPQARPLPSPGAAGAQALEKLEAAESLVLEQSFLHGITLLSEIAELELERRSQEMGGAERALVARPSLESLLAAGSHMLREVLDGPVVDPLKNLRLPRELKPNKKYSWMRKKEERMYAMKSSLEDMDALELDFRMRLAEVQRQYKEKQRELVKLQRRRDSEDRREEPHRSLARRGPGRPRKRTHAPSALSPPRKRGKSGHSSGKLSSKSLLTSDDYELGAGIRKRHKGSEEEHDALIGMGKARGRNQTWDEHEASSDFISQLKIKKKKMASDQEQLASKLDKALSLTKQDKLKSPFKFSDSAGGKSKTSGGCGRYLTPYDSLLGKNRKALAKGLGLSLKSSREGKHKRAAKTRKMEVGFKARGQPKSAHSPFASEVSSYSYNTDSEEDEEFLKDEWPAQGPSSSKLTPSLLCSMVAKNSKAAGGPKLTKRGLAAPRTLKPKPATSRKQPFCLLLREAEARSSFSDSSEESFDQDESSEEEDEEEELEEEDEASGGGYRLGARERALSPGLEESGLGLLARFAASALPSPTVGPSLSVVQLEAKQKARKKEERQSLLGTEFEYTDSESEVKVRKRSPAGLLRPKKGLGEPGPSLAAPTPGARGPDPSSPDKAKLAVEKGRKARKLRGPKEPGFEAGPEASDDDLWTRRRSERIFLHDASAAAPAPVSTAPATKTSRCAKGGPLSPRKDAGRAKDRKDPRKGAFAHACNPSTLGGRGGQITRSGDRDHPRKHGKTPSLLKIQKH

SEQ ID NO: 8987 - protein, 68 aa, Artificial Sequence
  Synthetic polypeptide
RWRRGARPGSCGAPRSLASRRGPRPATTTCGRGAAASASSCTTPRLLHLRPSAPRPPPRPAAAPRAAP

SEQ ID NO: 8988 - protein, 170 aa, Artificial Sequence
  Synthetic polypeptide
MRRQPAKVAALLLGLLLECTEAKKHCWYFEGLYPTYYICRSYEDCCGSRCCVRALSIQRLWYFWFLLMMGVLFCCGAGFFIRRRMYPPPLIEEPAFNVSYTRQPPNPGPGAQQPGPPYYTDPGGPGMNPVGNSMAMAFQVPPNSPQGSVACPPPPAYCNTPPPPYEQQMI

SEQ ID NO: 8989 - protein, 161 aa, Artificial Sequence
  Synthetic polypeptide
MRRTGSHAQCTEAKKHCWYFEGLYPTYYICRSYEDCCGSRCCVRALSIQRLWYFWFLLMMGVLFCCGAGFFIRRRMYPPPLIEEPAFNVSYTRQPPNPGPGAQQPGPPYYTDPGGPGMNPVGNSMAMAFQVPPNSPQGSVACPPPPAYCNTPPPPYEQQMI

SEQ ID NO: 8990 - protein, 167 aa, Artificial Sequence
  Synthetic polypeptide
MLSETLGYLSSVLLQCTEAKKHCWYFEGLYPTYYICRSYEDCCGSRCCVRALSIQRLWYFWFLLMMGVLFCCGAGFFIRRRMYPPPLIEEPAFNVSYTRQPPNPGPGAQQPGPPYYTDPGGPGMNPVGNSMAMAFQVPPNSPQGSVACPPPPAYCNTPPPPYEQQMI

SEQ ID NO: 8991 - protein, 103 aa, Artificial Sequence
  Synthetic polypeptide
MMGVLFCCGAGFFIRRRMYPPPLIEEPAFNVSYTRQPPNPGPGAQQPGPPYYTDPGGPGMNPVGNSMAMAFQVPPNSPQGSVACPPPPAYCNTPPPPYEQQMI

SEQ ID NO: 8992 - protein, 153 aa, Artificial Sequence
  Synthetic polypeptide
MCTEAKKHCWYFEGLYPTYYICRSYEDCCGSRCCVRALSIQRLWYFWFLLMMGVLFCCGAGFFIRRRMYPPPLIEEPAFNVSYTRQPPNPGPGAQQPGPPYYTDPGGPGMNPVGNSMAMAFQVPPNSPQGSVACPPPPAYCNTPPPPYEQQMI

SEQ ID NO: 8993 - protein, 107 aa, Artificial Sequence
  Synthetic polypeptide
MFLLMMGVLFCCGAGFFIRRRMYPPPLIEEPAFNVSYTRQPPNPGPGAQQPGPPYYTDPGGPGMNPVGNSMAMAFQVPPNSPQGSVACPPPPAYCNTPPPPYEQQMI

SEQ ID NO: 8994 - protein, 168 aa, Artificial Sequence
  Synthetic polypeptide
MRIRSLHPVQQTEPTTCTEAKKHCWYFEGLYPTYYICRSYEDCCGSRCCVRALSIQRLWYFWFLLMMGVLFCCGAGFFIRRRMYPPPLIEEPAFNVSYTRQPPNPGPGAQQPGPPYYTDPGGPGMNPVGNSMAMAFQVPPNSPQGSVACPPPPAYCNTPPPPYEQQMI

SEQ ID NO: 8995 - protein, 212 aa, Artificial Sequence
  Synthetic polypeptide
MAARVLRARGAAWAGGLLQRAAPCSLLPRLRTWTSSSNRSREDSWLKSLFVRKVDPRKDAHSNLLAKKETSNLYKLQFHNVKPECLEAYNKICQEVLPKIHEDKHYPCTLVGTWNTWYGEQDQAVHLWRYEGGYPALTEVMNKLRENKEFLEFRKARSDMLLSRKNQLLLEFSFWNEPVPRSGPNIYELRSYQLRPGTMIEWGNYWRGGSHL

SEQ ID NO: 8996 - protein, 173 aa, Artificial Sequence
  Synthetic polypeptide
MAARVLRARGAAWAGGLLQRAAPCSLLPRLRTWTSSSNRSREDSWLKSLFVRKVDPRKDAHSNLLAKKETSNLYKLQFKRCCQRFTKINTTLVLWWGLGTRGMASRTKLEFLEFRKARSDMLLSRKNQLLLEFSFWNEPVPRSGPNIYELRSYQLRPGTMIEWGNYWRGGSHL

SEQ ID NO: 8997 - protein, 72 aa, Artificial Sequence
  Synthetic polypeptide
MNKLRENKEFLEFRKARSDMLLSRKNQLLLEFSFWNEPVPRSGPNIYELRSYQLRPGTMIEWGNYWRGGSHL

SEQ ID NO: 8998 - protein, 10 aa, Artificial Sequence
  Synthetic polypeptide
SRGVAKDSRR

SEQ ID NO: 8999 - protein, 748 aa, Artificial Sequence
  Synthetic polypeptide
MEEGNNNEEVIHLNNFHCHRGQEWINLRDGPITISDSSDEERIPMLVTPAPQQHEEEDLDDDVILTEDDSEDDYGEFLDLGPPGISEFTKPSGQTEREPKPGPSHNQAANDIVNPRSEQKVIILEEGSLLYTESDPLETQNQSSEDSETELLSNLGESAALADDQAIEEDCWLDHPYFQSLNQQPREITNQVVPQERQPEAELGRLLFQHEFPGPAFPRPEPQQGGISGPSSPQPAHPLGEFEDQQLASDDEEPGPAFPMQESQEPNLENIWGQEAAEVDQELVELLVKETEARFPDVANGFIEEIIHFKNYYDLNVLCNFLLENPDYPKREDRIIINPSSSLLASQDETKLPKIDFFDYSKLTPLDQRCFIQAADLLMADFKVLSSQDIKWALHELKGHYAITRKALSDAIKKWQELSPETSGKRKKRKQMNQYSYIDFKFEQGDIKIEKRMFFLENKRRHCRSYDRRALLPAVQQEQEFYEQKIKEMAEHEDFLLALQMNEEQYQKDGQLIECRCCYGEFPFEELTQCADAHLFCKECLIRYAQEAVFGSGKLELSCMEGSCTCSFPTSELEKVLPQTILYKYYERKAEEEVAAAYADELVRCPSCSFPALLDSDVKRFSCPNPHCRKETCRKCQGLWKEHNGLTCEELAEKDDIKYRTSIKSLVWDEESNKREKDLTPLLLALKMDEGGHEPRIEVACRSWENPQLTATKKIETPVLQPQLNSADNPNEQQTYSLLRPPGGNAAL

SEQ ID NO: 9000 - protein, 805 aa, Artificial Sequence
  Synthetic polypeptide
MEEGNNNEEVIHLNNFHCHRGQEWINLRDGPITISDSSDEERIPMLVTPAPQQHEEEDLDDDVILTETNKPQRSRPNLIKPAAQWQDLKRLGEERPKKSRAAFESDKSSYFSVCNNPLFDSGAQDDSEDDYGEFLDLGPPGISEFTKPSGQTEREPKPGPSHNQAANDIVNPRSEQKVIILEEGSLLYTESDPLETQNQSSEDSETELLSNLGESAALADDQAIEEDCWLDHPYFQSLNQQPREITNQVVPQERQPEAELGRLLFQHEFPGPAFPRPEPQQGGISGPSSPQPAHPLGEFEDQQLASDDEEPGPAFPMQESQEPNLENIWGQEAAEVDQELVELLVKETEARFPDVANGFIEEIIHFKNYYDLNVLCNFLLENPDYPKREDRIIINPSSSLLASQDETKLPKIDFFDYSKLTPLDQRCFIQAADLLMADFKVLSSQDIKWALHELKGHYAITRKALSDAIKKWQELSPETSGKRKKRKQMNQYSYIDFKFEQGDIKIEKRMFFLENKRRHCRSYDRRALLPAVQQEQEFYEQKIKEMAEHEDFLLALQMNEEQYQKDGQLIECRCCYGEFPFEELTQCADAHLFCKECLIRYAQEAVFGSGKLELSCMEGSCTCSFPTSELEKVLPQTILYKYYERKAEEEVAAAYADELVRCPSCSFPALLDSDVKRFSCPNPHCRKETCRKCQGLWKEHNGLTCEELAEKDDIKYRTSIKSLVWDEESNKREKDLTPLLLALKMDEGGHEPRIEVACRSWENPQLTATKKIETPVLQPQLNSADNPNEQQTYSLLRPPGGNAAL

SEQ ID NO: 9001 - protein, 658 aa, Artificial Sequence
  Synthetic polypeptide
MEEGNNNEEVIHLNNFHCHRGQEWINLRDGPITISDSSDEERIPMLVTPAPQQHEEEDLDDDVILTEDDSEDDYGEFLDLGPPGISEFTKPSGQTEREPKPGPSHNQAANDIVNPRSEQKVIILEEGSLLYTESDPLETQNQSSEDSETELLSNLGESAALADDQAIEEDCWLDHPYFQSLNQQPREITNQVVPQERQPEAELGRLLFQHEFPGPAFPRPEPQQGGISGPSSPQPAHPLGEFEDQQLASDDEEPGPAFPMQESQEPNLENIWGQEAAEVDQELVELLVKETEARFPDVANGFIEEIIHFKNYYDLNVLCNFLLENPDYPKREDRIIINPSSSLLASQDETKLPKIDFFDYSKLTPLDQRCFIQAADLLMADFKVLSSQDIKWALHELKGHYAITRKALSDAIKKWQELSPETSGKRKKRKQMNQYSYIDFKFEQGDIKIEKRMFFLENKRRHCRSYDRRALLPAVQQEQEFYEQKIKEMAEHEDFLLALQMNEEQYQKDGQLIECRCCYGEFPFEELTQCADAHLFCKECLIRYAQEAVFGSGKLELSCMEGSCTCSFPTSELEKVLPQTILYKYYERKAEEEVAAAYADELVRCPSCSFPALLDSDVKRFSCPNPHCRKREQFNNNGRTISLCEKSRNQLHQRLGNL

SEQ ID NO: 9002 - protein, 715 aa, Artificial Sequence
  Synthetic polypeptide
MEEGNNNEEVIHLNNFHCHRGQEWINLRDGPITISDSSDEERIPMLVTPAPQQHEEEDLDDDVILTETNKPQRSRPNLIKPAAQWQDLKRLGEERPKKSRAAFESDKSSYFSVCNNPLFDSGAQDDSEDDYGEFLDLGPPGISEFTKPSGQTEREPKPGPSHNQAANDIVNPRSEQKVIILEEGSLLYTESDPLETQNQSSEDSETELLSNLGESAALADDQAIEEDCWLDHPYFQSLNQQPREITNQVVPQERQPEAELGRLLFQHEFPGPAFPRPEPQQGGISGPSSPQPAHPLGEFEDQQLASDDEEPGPAFPMQESQEPNLENIWGQEAAEVDQELVELLVKETEARFPDVANGFIEEIIHFKNYYDLNVLCNFLLENPDYPKREDRIIINPSSSLLASQDETKLPKIDFFDYSKLTPLDQRCFIQAADLLMADFKVLSSQDIKWALHELKGHYAITRKALSDAIKKWQELSPETSGKRKKRKQMNQYSYIDFKFEQGDIKIEKRMFFLENKRRHCRSYDRRALLPAVQQEQEFYEQKIKEMAEHEDFLLALQMNEEQYQKDGQLIECRCCYGEFPFEELTQCADAHLFCKECLIRYAQEAVFGSGKLELSCMEGSCTCSFPTSELEKVLPQTILYKYYERKAEEEVAAAYADELVRCPSCSFPALLDSDVKRFSCPNPHCRKREQFNNNGRTISLCEKSRNQLHQRLGNL

SEQ ID NO: 9003 - protein, 145 aa, Artificial Sequence
  Synthetic polypeptide
MAKRPGPPGSREMGLLTFRDIAIEFSLAEWQCLDHAQQNLYRDVMLENYRNLVSLGIAVSKPDLITCLEQNKEPQNIKRNEMVAKHPVTCSHFTQDLQSEQGIKDSLQKVILRRYGKCGQEDLQVKKCCKSVVIWSGCVHTQISL

SEQ ID NO: 9004 - protein, 555 aa, Artificial Sequence
  Synthetic polypeptide
MEEGNNNEEVIHLNNFHCHRGQEWINLRDGPITISDSSDEERIPMLVTPAPQQHEEEDLDDDVILTEDDSEDDYGEFLDLGPPGISEFTKPSGQTEREPKPGPSHNQAANDIVNPRSEQKVIILEEGSLLYTESDPLETQNQSSEDSETELLSNLGESAALADDQAIEEDCWLDHPYFQSLNQQPREITNQVVPQERQPEAELGRLLFQHEFPGPAFPRPEPQQGGISGPSSPQPAHPLGEFEDQQLASDDEEPGPAFPMQESQEPNLENIWGQEAAEVDQELVELLVKETEARFPDVANGFIEEIIHFKNYYDLNVLCNFLLENPDYPKREDRIIINPSSSLLASQDETKLPKIDFFDYSKLTPLDQRCFIQAADLLMADFKVLSSQDIKWALHELKGHYAITRKALSDAIKKWQELSPETSGKRKKRKQMNQYSYIDFKFEQGDIKIEKRMFFLENKRRHCRSYDRRALLPAVQQEQEFYEQKIKEMAEHEDFLLALQMNEEQYQKDGQLIECRCCYGEFPFEELTQCADAHLFCKECLIRYAQEAVFGSGKQ

SEQ ID NO: 9005 - protein, 612 aa, Artificial Sequence
  Synthetic polypeptide
MEEGNNNEEVIHLNNFHCHRGQEWINLRDGPITISDSSDEERIPMLVTPAPQQHEEEDLDDDVILTETNKPQRSRPNLIKPAAQWQDLKRLGEERPKKSRAAFESDKSSYFSVCNNPLFDSGAQDDSEDDYGEFLDLGPPGISEFTKPSGQTEREPKPGPSHNQAANDIVNPRSEQKVIILEEGSLLYTESDPLETQNQSSEDSETELLSNLGESAALADDQAIEEDCWLDHPYFQSLNQQPREITNQVVPQERQPEAELGRLLFQHEFPGPAFPRPEPQQGGISGPSSPQPAHPLGEFEDQQLASDDEEPGPAFPMQESQEPNLENIWGQEAAEVDQELVELLVKETEARFPDVANGFIEEIIHFKNYYDLNVLCNFLLENPDYPKREDRIIINPSSSLLASQDETKLPKIDFFDYSKLTPLDQRCFIQAADLLMADFKVLSSQDIKWALHELKGHYAITRKALSDAIKKWQELSPETSGKRKKRKQMNQYSYIDFKFEQGDIKIEKRMFFLENKRRHCRSYDRRALLPAVQQEQEFYEQKIKEMAEHEDFLLALQMNEEQYQKDGQLIECRCCYGEFPFEELTQCADAHLFCKECLIRYAQEAVFGSGKQ

SEQ ID NO: 9006 - protein, 38 aa, Artificial Sequence
  Synthetic polypeptide
MPMYQVGRGGSRLESQRFGRLRREDQLNPKSLRPLSAT

SEQ ID NO: 9007 - protein, 241 aa, Artificial Sequence
  Synthetic polypeptide
MQGGNSGVRKREEEGDGAGAVAAPPAIDFPAEGPDPEYDESDVPAEIQVLKEPLQQPTFPFAVANQLLLVSLLEHLSHVHEPNPLRSRQVFKLLCQTFIKMGLLSSFTCSDEFSSLRLHHNRAITHLMRSAKERVRQDPCEDISRIQKIRSREVALEAQTSRYLNEFEELAILGKGGYGRVYKVRNKLDGQYYAIKKILIKGATKTVCMKVQWLTPVIPALWEAKAGRSLEARSVRPAWPT

SEQ ID NO: 9008 - protein, 117 aa, Artificial Sequence
  Synthetic polypeptide
MNQTHFVQDRCLSDPCEDISRIQKIRSREVALEAQTSRYLNEFEELAILGKGGYGRVYKVRNKLDGQYYAIKKILIKGATKTVCMKVQWLTPVIPALWEAKAGRSLEARSVRPAWPT

SEQ ID NO: 9009 - protein, 123 aa, Artificial Sequence
  Synthetic polypeptide
MDEDGGGEGGGVPEDLSLEEREELLDIRRRKKELIDDIERLKYEIAEVMTEIDNLTSVEESKTTQRNKQIAMGRKKFNMDPKKGIQFLIENDLLQSSPEDVAQFLYKGEGLNKTVIGDYLGER

SEQ ID NO: 9010 - protein, 4 aa, Artificial Sequence
  Synthetic polypeptide
MWTG

SEQ ID NO: 9011 - protein, 38 aa, Artificial Sequence
  Synthetic polypeptide
MMLPALKHRIPSSSVLGLGLALLAPQLADSLLLDLVIM

SEQ ID NO: 9012 - protein, 102 aa, Artificial Sequence
  Synthetic polypeptide
MGVLTFRDVAVEFSPEEWECLDSAQQRLYRDVMLENYGNLVSLGLAIFKPDLMTCLEQRKEPWKVKRQEAVAKHPDASCPQTSDSKFFSFGTRTGSPCSSAC

SEQ ID NO: 9013 - protein, 309 aa, Artificial Sequence
  Synthetic polypeptide
MPGMVLFGRRWAIASDDLVFPGFFELVVRVLWWIGILTLYLMHRGKLDCAGGALLSSYLIVLMILLAVVICTVSAIMCVSMRGTICNPGPRKSMSKLLYIRLALFFPEMVWASLGAAWVADGVQCDRTVVNGIIATVVVSWIIIAATVVSIIIVFDPLGGKMAPYSSAGPSHLDSHDSSQLLNGLKTAATSVWETRIKLLCCCIGKDDHTRVAFSSTAELFSTYFSDTDLVPSDIAAGLALLHQQQDNIRNNQEPAQVVCHAPGSSQEADLDAELENCHHYMQFAAAAYGWPLYIYRNPLTGLCRIGGD

SEQ ID NO: 9014 - protein, 268 aa, Artificial Sequence
  Synthetic polypeptide
MHRGKLDCAGGALLSSYLIVLMILLAVVICTVSAIMCVSMRGTICNPGPRKSMSKLLYIRLALFFPEMVWASLGAAWVADGVQCDRTVVNGIIATVVVSWIIIAATVVSIIIVFDPLGGKMAPYSSAGPSHLDSHDSSQLLNGLKTAATSVWETRIKLLCCCIGKDDHTRVAFSSTAELFSTYFSDTDLVPSDIAAGLALLHQQQDNIRNNQEPAQVVCHAPGSSQEADLDAELENCHHYMQFAAAAYGWPLYIYRNPLTGLCRIGGD

SEQ ID NO: 9015 - protein, 182 aa, Artificial Sequence
  Synthetic polypeptide
MYCVSHHVCQHESWIIIAATVVSIIIVFDPLGGKMAPYSSAGPSHLDSHDSSQLLNGLKTAATSVWETRIKLLCCCIGKDDHTRVAFSSTAELFSTYFSDTDLVPSDIAAGLALLHQQQDNIRNNQEPAQVVCHAPGSSQEADLDAELENCHHYMQFAAAAYGWPLYIYRNPLTGLCRIGGD

SEQ ID NO: 9016 - protein, 316 aa, Artificial Sequence
  Synthetic polypeptide
MPGMVLFGRRWAIASDDLVFPGFFELVVRVLWWIGILTLYLMHRGKLDCAGGALLSSYLIVLMILLAVVICTVSAIMCVSMRGTICNPGPRKSMSKLLYIRLALFFPEMVWASLGAAWVADGVQCDRTVVNGIIATVVVSWIIIAATVVSIIIVFDPLGGKMAPYSSAGPSHLDSHDSSQLLNGLKTAATSVWETRIKLLCCCIGKDDHTRVAFSSTAELFSTYFSDTDLVPSDIAAGLALLHQQQDNIRNNQEPAQVVCHAPGSSQEADLDAELENCHHYMQFAAAAYGWPLYIYRNPLTGLCRIGGDWCSGSCL

SEQ ID NO: 9017 - protein, 275 aa, Artificial Sequence
  Synthetic polypeptide
MHRGKLDCAGGALLSSYLIVLMILLAVVICTVSAIMCVSMRGTICNPGPRKSMSKLLYIRLALFFPEMVWASLGAAWVADGVQCDRTVVNGIIATVVVSWIIIAATVVSIIIVFDPLGGKMAPYSSAGPSHLDSHDSSQLLNGLKTAATSVWETRIKLLCCCIGKDDHTRVAFSSTAELFSTYFSDTDLVPSDIAAGLALLHQQQDNIRNNQEPAQVVCHAPGSSQEADLDAELENCHHYMQFAAAAYGWPLYIYRNPLTGLCRIGGDWCSGSCL

SEQ ID NO: 9018 - protein, 189 aa, Artificial Sequence
  Synthetic polypeptide
MYCVSHHVCQHESWIIIAATVVSIIIVFDPLGGKMAPYSSAGPSHLDSHDSSQLLNGLKTAATSVWETRIKLLCCCIGKDDHTRVAFSSTAELFSTYFSDTDLVPSDIAAGLALLHQQQDNIRNNQEPAQVVCHAPGSSQEADLDAELENCHHYMQFAAAAYGWPLYIYRNPLTGLCRIGGDWCSGSCL

SEQ ID NO: 9019 - protein, 117 aa, Artificial Sequence
  Synthetic polypeptide
MNIFRLTGDLSHLAAIVILLLKIWKTRSCAGISGKSQLLFALVFTTRYLDLFTSFISLYNTSMKVIYLACSYATVYLIYLKFKATYDGNHDTFRVEFLVVPVGGLSFLVNHDFSPLE

SEQ ID NO: 9020 - protein, 149 aa, Artificial Sequence
  Synthetic polypeptide
MAAPVLLRVSVPRWERVARYAVCAAGILLSIYAYHVEREKERDPEHRALCDLGPWVKCSAALASRWGRGFGLLGSIFGKDGVLNQPNSVFGLIFYILQLLLDGQDVVKVQRRFSPNVCSSEEKGCGPHVPLFIWCLGAVDVTSQLHCLM

SEQ ID NO: 9021 - protein, 103 aa, Artificial Sequence
  Synthetic polypeptide
MASESGKLWGGRFVGAVDPIMEKFNASIAYDRHLWEVDVQGSKAYSRGLEKAGLLTKAEMDQILHGLDKVAEEWAQGTFKLNSNDEDIHTANERRLKLQKLKK

SEQ ID NO: 9022 - protein, 38 aa, Artificial Sequence
  Synthetic polypeptide
MASEVAEEWAQGTFKLNSNDEDIHTANERRLKLQKLKK

SEQ ID NO: 9023 - protein, 470 aa, Artificial Sequence
  Synthetic polypeptide
MDPSADTWDLFSPLISLWINRFYIYLGFAVSISLWICVQIVIKTQGKNLQEKSVPKAAQDLMTNGYVSLQEKDIFVSGVKIFYGSQTGTAKGFATVLAEAVTSLDLPVAIINLKEYDPDDHLIEEVTSKNVCVFLVATYTDGLPTESAEWFCKWLEEASIDFRFGKTYLKGMRYAVFGLGNSAYASHFNKVGKNVDKWLWMLGAHRVMSRGEGDCDVVKSKHGSIEADFRAWKTKFISQLQALQKGERKKSCGGHCKKGKCESHQHGSEEREEGSHEQDELHHRDTEEEEPFESSSEEEFGGEDHQSLNSIVDVEDLGKIMDHVKKEKREKEQQEEKSGLFRNMGRNEDGERRAMITPALREALTKQGYQLIGSHSGVKLCRWTKSMLRGRGGCYKHTFYGIESHRCMETTPSLACANKCVFCWRHHTNPVGTEWRWKMDQPEMILKEAIENHQNMIKQFKDHSLSMRNI

SEQ ID NO: 9024 - protein, 694 aa, Artificial Sequence
  Synthetic polypeptide
MDPSADTWDLFSPLISLWINRFYIYLGFAVSISLWICVQIVIKTQGKNLQEKSVPKAAQDLMTNGYVSLQEKDIFVSGVKIFYGSQTGTAKGFATVLAEAVTSLDLPVAIINLKEYDPDDHLIEEVTSKNVCVFLVATYTDGLPTESAEWFCKWLEEASIDFRFGKTYLKGMRYAVFGLGNSAYASHFNKVGKNVDKWLWMLGAHRVMSRGEGDCDVVKSKHGSIEADFRAWKTKFISQLQALQKGERKKSCGGHCKKGKCESHQHGSEEREEGSHEQDELHHRDTEEEEPFESSSEEEFGGEDHQSLNSIVDVEDLGKIMDHVKKEKREKEQQEEKSGLFRNMGRNEDGERRAMITPALREALTKQGYQLIGSHSGVKLCRWTKSMLRGRGGCYKHTFYGIESHRCMETTPSLACANKCVFCWRHHTNPVGTEWRWKMDQPEMILKEAIENHQNMIKQFKGVPGVKAERFEEGMTVKHCALSLVGEPIMYPEINRFLKLLHQCKISSFLVTNAQFPAEIRNLEPVTQLYVSVDASTKDSLKKIDRPLFKDFWQRFLDSLKALAVKQQRTVYRLTLVKAWNVDELQAYAQLVSLGNPDFIEVKGVTYCGESSASSLTMAHVPWHEEVVQFVHELVDLIPEYEIACEHEHSNCLLIAHRKDECLRNFADLALDGSAGTTQLDKLAHLILWPPPRN

SEQ ID NO: 9025 - protein, 151 aa, Artificial Sequence
  Synthetic polypeptide
MASPPACPSEEDESLKGCELYVQLHGIQQVLKDCIVHLCISKPERPMKFLREHFEKLEKEENRQILARQKSNSQSDSHDEEVSPTPPNPVVKARRRRGGVSAEVYTEEDAVSYVRKVIPKDYKTMTALAKAISKNVLFAHLDDNERRGGRR

SEQ ID NO: 9026 - protein, 96 aa, Artificial Sequence
  Synthetic polypeptide
MDPLEENRQILARQKSNSQSDSHDEEVSPTPPNPVVKARRRRGGVSAEVYTEEDAVSYVRKVIPKDYKTMTALAKAISKNVLFAHLDDNERRGGRR

SEQ ID NO: 9027 - protein, 20 aa, Artificial Sequence
  Synthetic polypeptide
MKDRTQELRTNGASVTYFAE

SEQ ID NO: 9028 - protein, 723 aa, Artificial Sequence
  Synthetic polypeptide
MAGLTAAAPRPGVLLLLLSILHPSRPGGVPGAIPGGVPGGVFYPGAGLGALGGGALGPGGKPLKPVPGGLAGAGLGAGLGAFPAVTFPGALVPGGVADAAAAYKAAKAGAGLGGVPGVGGLGVSAGAVVPQPGAGVKPGKVPGVGLPGVYPGGVLPGARFPGVGVLPGVPTGAGVKPKAPGVGGAFAGIPGVGPFGGPQPGVPLGYPIKAPKLPGGYGLPYTTGKLPYGYGPGGVAGAAGKAGYPTGTGVGPQAAAAAAAKAAAKFGAGAAGVLPGVGGAGVPGVPGAIPGIGGIAGVGTPAAAAAAAAAAKAAKYGAAAGLVPGGPGFGPGVVGVPGAGVPGVGVPGAGIPVVPGAGIPGAAVPGVVSPEAAAKAAAKAAKYGARPGVGVGGIPTYGVGAGGFPGFGVGVGGIPGVAGVPGVGGVPGVGGVPGVGISPEAQAAAAAKAAKYGVGTPAAAAAKAAAKAAQFGLVPGVGVAPGVGVAPGVGVAPGVGLAPGVGVAPGVGVAPGVGVAPGIGPGGVAAAAKSAAKVAAKAQLRAAAGLGAGIPGLGVGVGVPGLGVGAGVPGLGVGAGVPGFGAVPGALAAAKAAKYGAAVPGVLGGLGALGGVGIPGGVVGAGPAAAAAAAKAAAKAAQFGLVGAAGLGGLGVGGLGVPGVGGLGGAVAHACNPSTLVGQGGRITRGEEFETSLGDMAKPHLYQKYKNKPGVVVGTCISSYLRG

SEQ ID NO: 9029 - protein, 791 aa, Artificial Sequence
  Synthetic polypeptide
MAGLTAAAPRPGVLLLLLSILHPSRPGGVPGAIPGGVPGGVFYPGAGLGALGGGALGPGGKPLKPVPGGLAGAGLGAGLGAFPAVTFPGALVPGGVADAAAAYKAAKAGAGLGGVPGVGGLGVSAGAVVPQPGAGVKPGKVPGVGLPGVYPGGVLPGARFPGVGVLPGVPTGAGVKPKAPGVGGAFAGIPGVGPFGGPQPGVPLGYPIKAPKLPGGYGLPYTTGKLPYGYGPGGVAGAAGKAGYPTGTGVGPQAAAAAAAKAAAKFGAGAAGVLPGVGGAGVPGVPGAIPGIGGIAGVGTPAAAAAAAAAAKAAKYGAAAGLVPGGPGFGPGVVGVPGAGVPGVGVPGAGIPVVPGAGIPGAAVPGVVSPEAAAKAAAKAAKYGARPGVGVGGIPTYGVGAGGFPGFGVGVGGIPGVAGVPGVGGVPGVGGVPGVGISPEAQAAAAAKAAKYGAAGAGVLGGLVPGAPGAVPGVPGTGGVPGVGTPAAAAAKAAAKAAQFALLNLAGLVPGVGVAPGVGVAPGVGVAPGVGLAPGVGVAPGVGVAPGVGVAPGIGPGGVAAAAKSAAKVAAKAQLRAAAGLGAGIPGLGVGVGVPGLGVGAGVPGLGVGAGVPGFGAGADEGVRRSLSPELREGDPSSSQHLPSTPSSPRVPGALAAAKAAKYGAAVPGVLGGLGALGGVGIPGGVVGAGPAAAAAAAKAAAKAAQFGLVGAAGLGGLGVGGLGVPGVGGLGGAVAHACNPSTLVGQGGRITRGEEFETSLGDMAKPHLYQKYKNKPGVVVGTCISSYLRG

SEQ ID NO: 9030 - protein, 642 aa, Artificial Sequence
  Synthetic polypeptide
MAGLTAAAPRPGVLLLLLSILHPSRPGGVPGAIPGGVPGGVFYPGAGLGALGGGALGPGGKPLKPGLGAFPAVTFPGALVPGGVADAAAAYKAAKAGAGLGGVPGVGGLGVSAGAVVPQPGAGVKPGKVPGVGLPGVYPGGVLPGARFPGVGVLPGVPTGAGVKPKAPGVGPFGGPQPGVPLGYPIKAPKLPGYGPGGVAGAAGKAGYPTGTGVGPQAAAAAAAKAAAKFGAGAAGVLPGVGGAGVPGVPGAIPGIGGIAGVGTPAAAAAAAAAAKAAKYGAAAGLVPGGPGFGPGVVGVPGAGVPGVGVPGAGIPVVPGAGIPGAAVPGVVSPEAAAKAAAKAAKYGARPGVGVGGIPTYGVGAGGFPGFGVGVGAEAQAAAAAKAAKYGLVPGVGVAPGVGVAPGVGVAPGVGLAPGVGVAPGVGVAPGVGVAPGIGPGGVAAAAKSAAKVAAKAQLRAAAGLGAGIPGLGVGVGVPGLGVGAGVPGLGVGAGVPGFGAVPGALAAAKAAKYGAAVPGVLGGLGALGGVGIPGGVVGAGPAAAAAAAKAAAKAAQFGLVGAAGLGGLGVGGLGVPGVGGLGGAVAHACNPSTLVGQGGRITRGEEFETSLGDMAKPHLYQKYKNKPGVVVGTCISSYLRG

SEQ ID NO: 9031 - protein, 699 aa, Artificial Sequence
  Synthetic polypeptide
MAGLTAAAPRPGVLLLLLSILHPSRPGGVPGAIPGGVPGGVFYPALGPGGKPLKPVPGGLAGAGLGAGLGAFPAVTFPGALVPGGVADAAAAYKAAKAGAGLGGVPGVGGLGVSAAPSVPGAVVPQPGAGVKPGKVPGVGLPGVYPGGVLPGARFPGVGVLPGVPTGAGVKPKAPGVGGAFAGIPGVGPFGGPQPGVPLGYPIKAPKLPGGYGLPYTTGKLPYGYGPGGVAGAAGKAGYPTGTGVGPQAAAAAAAKAAAKFGAGAAGVLPGVGGAGVPGVPGAIPGIGGIAGVGTPAAAAAAAAAAKAAKYGAAAGLVPGGPGFGPGVVGVPGAGVPGVGVPGAGIPVVPGAGIPGAAVPGVVSPEAAAKAAAKAAKYGARPGVGVGGIPTYGVGAGGFPGFGVGVGGIPGVAGVPGVGGVPGVGGVPGVGISPEAQAAAAAKAAKYGLVPGVGVAPGVGVAPGVGVAPGVGLAPGVGVAPGVGVAPGVGVAPGIGPGGVAAAAKSAAKVAAKAQLRAAAGLGAGIPGLGVGVGVPGLGVGAGVPGLGVGAGVPGFGAVPGALAAAKAAKYGAAVPGVLGGLGALGGVGIPGGVVGAGPAAAAAAAKAAAKAAQFGLVGAAGLGGLGVGGLGVPGVGGLGGAVAHACNPSTLVGQGGRITRGEEFETSLGDMAKPHLYQKYKNKPGVVVGTCISSYLRG

SEQ ID NO: 9032 - protein, 729 aa, Artificial Sequence
  Synthetic polypeptide
MAGLTAAAPRPGVLLLLLSILHPSRPGGVPGAIPGGVPGGVFYPGAGLGALGGGALGPGGKPLKPVPGGLAGAGLGAGLGAFPAVTFPGALVPGGVADAAAAYKAAKAGAGLGGVPGVGGLGVSAGAVVPQPGAGVKPGKVPGVGLPGVYPGGVLPGARFPGVGVLPGVPTGAGVKPKAPGVGGAFAGIPGVGPFGGPQPGVPLGYPIKAPKLPGGYGLPYTTGKLPYGYGPGGVAGAAGKAGYPTGTGVGPQAAAAAAAKAAAKFGAGAAGVLPGVGGAGVPGVPGAIPGIGGIAGVGTPAAAAAAAAAAKAAKYGAAAGLVPGGPGFGPGVVGVPGAGVPGVGVPGAGIPVVPGAGIPGAAVPGVVSPEAAAKAAAKAAKYGARPGVGVGGIPTYGVGAGGFPGFGVGVGGIPGVAGVPGVGGVPGVGGVPGVGISPEAQAAAAAKAAKYGVGTPAAAAAKAAAKAAQFALLNLAGLVPGVGVAPGVGVAPGVGVAPGVGLAPGVGVAPGVGVAPGVGVAPGIGPGGVAAAAKSAAKVAAKAQLRAAAGLGAGIPGLGVGVGVPGLGVGAGVPGLGVGAGVPGFGAVPGALAAAKAAKYGAAVPGVLGGLGALGGVGIPGGVVGAGPAAAAAAAKAAAKAAQFGLVGAAGLGGLGVGGLGVPGVGGLGGAVAHACNPSTLVGQGGRITRGEEFETSLGDMAKPHLYQKYKNKPGVVVGTCISSYLRG

SEQ ID NO: 9033 - protein, 694 aa, Artificial Sequence
  Synthetic polypeptide
MAGLTAAAPRPGVLLLLLSILHPSRPGGVPGAIPGGVPGGVFYPALGPGGKPLKPVPGGLAGAGLGAGLGAFPAVTFPGALVPGGVADAAAAYKAAKAGAGLGGVPGVGGLGVSAGAVVPQPGAGVKPGKVPGVGLPGVYPGGVLPGARFPGVGVLPGVPTGAGVKPKAPGVGGAFAGIPGVGPFGGPQPGVPLGYPIKAPKLPGGYGLPYTTGKLPYGYGPGGVAGAAGKAGYPTGTGVGPQAAAAAAAKAAAKFGAGAAGVLPGVGGAGVPGVPGAIPGIGGIAGVGTPAAAAAAAAAAKAAKYGAAAGLVPGGPGFGPGVVGVPGAGVPGVGVPGAGIPVVPGAGIPGAAVPGVVSPEAAAKAAAKAAKYGARPGVGVGGIPTYGVGAGGFPGFGVGVGGIPGVAGVPGVGGVPGVGGVPGVGISPEAQAAAAAKAAKYGLVPGVGVAPGVGVAPGVGVAPGVGLAPGVGVAPGVGVAPGVGVAPGIGPGGVAAAAKSAAKVAAKAQLRAAAGLGAGIPGLGVGVGVPGLGVGAGVPGLGVGAGVPGFGAVPGALAAAKAAKYGAAVPGVLGGLGALGGVGIPGGVVGAGPAAAAAAAKAAAKAAQFGLVGAAGLGGLGVGGLGVPGVGGLGGAVAHACNPSTLVGQGGRITRGEEFETSLGDMAKPHLYQKYKNKPGVVVGTCISSYLRG

SEQ ID NO: 9034 - protein, 675 aa, Artificial Sequence
  Synthetic polypeptide
MAGLTAAAPRPGVLLLLLSILHPSRPGGVPGAIPGGVPGGVFYPGAGLGALGGGALGPGGKPLKPVPGGLAGAGLGAGLGAFPAVTFPGALVPGGVADAAAAYKAAKAGAGLGGVPGVGGLGVSAGAVVPQPGAGVKPGKVPGVGLPGVYPGGVLPGARFPGVGVLPGVPTGAGVKPKAPGVGGAFAGIPGVGPFGGPQPGVPLGYPIKAPKLPGYGPGGVAGAAGKAGYPTGTGVGPQAAAAAAAKAAAKFGAGAAGVLPGVGGAGVPGVPGAIPGIGGIAGVGTPAAAAAAAAAAKAAKYGAAAGLVPGGPGFGPGVVGVPGAGVPGVGVPGAGIPVVPGAGIPGAAVPGVVSPEAAAKAAAKAAKYGARPGVGVGGIPTYGVGAGGFPGFGVGVGGIPGVAGVPGVGGVPGVGGVPGVGISPEAQAAAAAKAAKYGLVPGVGVAPGVGVAPGVGVAPGVGLAPGVGVAPGVGVAPGVGVAPGIGPGGVAGAAAGLGAGIPGLGVGVGVPGLGVGAGVPGLGVGAGVPGFGAVPGALAAAKAAKYGAAVPGVLGGLGALGGVGIPGGVVGAGPAAAAAAAKAAAKAAQFGLVGAAGLGGLGVGGLGVPGVGGLGGAVAHACNPSTLVGQGGRITRGEEFETSLGDMAKPHLYQKYKNKPGVVVGTCISSYLRG

SEQ ID NO: 9035 - protein, 713 aa, Artificial Sequence
  Synthetic polypeptide
MAGLTAAAPRPGVLLLLLSILHPSRPGGVPGAIPGGVPGGVFYPALGPGGKPLKPVPGGLAGAGLGAGLGAFPAVTFPGALVPGGVADAAAAYKAAKAGAGLGGVPGVGGLGVSAGAVVPQPGAGVKPGKVPGVGLPGVYPGGVLPGARFPGVGVLPGVPTGAGVKPKAPGVGGAFAGIPGVGPFGGPQPGVPLGYPIKAPKLPGGYGLPYTTGKLPYGYGPGGVAGAAGKAGYPTGTGVGPQAAAAAAAKAAAKFGAGAAGVLPGVGGAGVPGVPGAIPGIGGIAGVGTPAAAAAAAAAAKAAKYGAAAGLVPGGPGFGPGVVGVPGAGVPGVGVPGAGIPVVPGAGIPGAAVPGVVSPEAAAKAAAKAAKYGARPGVGVGGIPTYGVGAGGFPGFGVGVGGIPGVAGVPGVGGVPGVGGVPGVGISPEAQAAAAAKAAKYGVGTPAAAAAKAAAKAAQFGLVPGVGVAPGVGVAPGVGVAPGVGLAPGVGVAPGVGVAPGVGVAPGIGPGGVAAAAKSAAKVAAKAQLRAAAGLGAGIPGLGVGVGVPGLGVGAGVPGLGVGAGVPGFGAVPGALAAAKAAKYGAAVPGVLGGLGALGGVGIPGGVVGAGPAAAAAAAKAAAKAAQFGLVGAAGLGGLGVGGLGVPGVGGLGGAVAHACNPSTLVGQGGRITRGEEFETSLGDMAKPHLYQKYKNKPGVVVGTCISSYLRG

SEQ ID NO: 9036 - protein, 728 aa, Artificial Sequence
  Synthetic polypeptide
MAGLTAAAPRPGVLLLLLSILHPSRPGGVPGAIPGGVPGGVFYPGAGLGALGGGALGPGGKPLKPVPGGLAGAGLGAGLGAFPAVTFPGALVPGGVADAAAAYKAAKAGAGLGGVPGVGGLGVSAAPSVPGAVVPQPGAGVKPGKVPGVGLPGVYPGGVLPGARFPGVGVLPGVPTGAGVKPKAPGVGGAFAGIPGVGPFGGPQPGVPLGYPIKAPKLPGGYGLPYTTGKLPYGYGPGGVAGAAGKAGYPTGTGVGPQAAAAAAAKAAAKFGAGAAGVLPGVGGAGVPGVPGAIPGIGGIAGVGTPAAAAAAAAAAKAAKYGAAAGLVPGGPGFGPGVVGVPGAGVPGVGVPGAGIPVVPGAGIPGAAVPGVVSPEAAAKAAAKAAKYGARPGVGVGGIPTYGVGAGGFPGFGVGVGGIPGVAGVPGVGGVPGVGGVPGVGISPEAQAAAAAKAAKYGVGTPAAAAAKAAAKAAQFGLVPGVGVAPGVGVAPGVGVAPGVGLAPGVGVAPGVGVAPGVGVAPGIGPGGVAAAAKSAAKVAAKAQLRAAAGLGAGIPGLGVGVGVPGLGVGAGVPGLGVGAGVPGFGAVPGALAAAKAAKYGAAVPGVLGGLGALGGVGIPGGVVGAGPAAAAAAAKAAAKAAQFGLVGAAGLGGLGVGGLGVPGVGGLGGAVAHACNPSTLVGQGGRITRGEEFETSLGDMAKPHLYQKYKNKPGVVVGTCISSYLRG

SEQ ID NO: 9037 - protein, 709 aa, Artificial Sequence
  Synthetic polypeptide
MAGLTAAAPRPGVLLLLLSILHPSRPGGVPGAIPGGVPGGVFYPGAGLGALGGGALGPGGKPLKPVPGGLAGAGLGAGLGAFPAVTFPGALVPGGVADAAAAYKAAKAGAGLGGVPGVGGLGVSAAPSVPGAVVPQPGAGVKPGKVPGVGLPGVYPGGVLPGARFPGVGVLPGVPTGAGVKPKAPGVGGAFAGIPGVGPFGGPQPGVPLGYPIKAPKLPGGYGLPYTTGKLPYGYGPGGVAGAAGKAGYPTGTGVGPQAAAAAAAKAAAKFGAGAAGVLPGVGGAGVPGVPGAIPGIGGIAGVGTPAAAAAAAAAAKAAKYGAAAGLVPGGPGFGPGVVGVPGAGVPGVGVPGAGIPVVPGAGIPGAAVPGVVSPEAAAKAAAKAAKYGARPGVGVGGIPTYGVGAGGFPGFGVGVGGIPGVAGVPGVGGVPGVGGVPGVGISPEAQAAAAAKAAKYGLVPGVGVAPGVGVAPGVGVAPGVGLAPGVGVAPGVGVAPGVGVAPGIGPGGVAAAAKSAAKVAAKAQLRAAAGLGAGIPGLGVGVGVPGLGVGAGVPGLGVGAGVPGFGAVPGALAAAKAAKYGAAVPGVLGGLGALGGVGIPGGVVGAGPAAAAAAAKAAAKAAQFGLVGAAGLGGLGVGGLGVPGVGGLGGAVAHACNPSTLVGQGGRITRGEEFETSLGDMAKPHLYQKYKNKPGVVVGTCISSYLRG

SEQ ID NO: 9038 - protein, 587 aa, Artificial Sequence
  Synthetic polypeptide
MAGLTAAAPRPGVLLLLLSILHPSRPGGVPGAIPGGVPGGVFYPGAGLGALGGGALGPGGKPLKPVPGGLAGAGLGAGVGGAFAGIPGVGPFGGPQPGVPLGYPIKAPKLPGYGPGGVAGAAGKAGYPTGTGVGPQAAAAAAAKAAAKFGAGAAGVLPGVGGAGVPGVPGAIPGIGGIAGVGTPAAAAAAAAAAKAAKYGAAAGLVPGGPGFGPGVVGVPGAGVPGVGVPGAGIPVVPGAGIPGAAVPGVVSPEAAAKAAAKAAKYGARPGVGVGGIPTYGVGAGGFPGFGVGVGGIPGVAGVPGVGGVPGVGGVPGVGISPEAQAAAAAKAAKYGLVPGVGVAPGVGVAPGVGVAPGVGLAPGVGVAPGVGVAPGVGVAPGIGPGGVAAAAKSAAKVAAKAQLRAAAGLGAGIPGLGVGVGVPGLGVGAGVPGLGVGAGVPGFGAVPGALAAAKAAKYGAAVPGVLGGLGALGGVGIPGGVVGAGPAAAAAAAKAAAKAAQFGLVGAAGLGGLGVGGLGVPGVGGLGGAVAHACNPSTLVGQGGRITRGEEFETSLGDMAKPHLYQKYKNKPGVVVGTCISSYLRG

SEQ ID NO: 9039 - protein, 704 aa, Artificial Sequence
  Synthetic polypeptide
MAGLTAAAPRPGVLLLLLSILHPSRPGGVPGAIPGGVPGGVFYPGAGLGALGGGALGPGGKPLKPVPGGLAGAGLGAGLGAFPAVTFPGALVPGGVADAAAAYKAAKAGAGLGGVPGVGGLGVSAGAVVPQPGAGVKPGKVPGVGLPGVYPGGVLPGARFPGVGVLPGVPTGAGVKPKAPGVGGAFAGIPGVGPFGGPQPGVPLGYPIKAPKLPGGYGLPYTTGKLPYGYGPGGVAGAAGKAGYPTGTGVGPQAAAAAAAKAAAKFGAGAAGVLPGVGGAGVPGVPGAIPGIGGIAGVGTPAAAAAAAAAAKAAKYGAAAGLVPGGPGFGPGVVGVPGAGVPGVGVPGAGIPVVPGAGIPGAAVPGVVSPEAAAKAAAKAAKYGARPGVGVGGIPTYGVGAGGFPGFGVGVGGIPGVAGVPGVGGVPGVGGVPGVGISPEAQAAAAAKAAKYGLVPGVGVAPGVGVAPGVGVAPGVGLAPGVGVAPGVGVAPGVGVAPGIGPGGVAAAAKSAAKVAAKAQLRAAAGLGAGIPGLGVGVGVPGLGVGAGVPGLGVGAGVPGFGAVPGALAAAKAAKYGAAVPGVLGGLGALGGVGIPGGVVGAGPAAAAAAAKAAAKAAQFGLVGAAGLGGLGVGGLGVPGVGGLGGAVAHACNPSTLVGQGGRITRGEEFETSLGDMAKPHLYQKYKNKPGVVVGTCISSYLRG

SEQ ID NO: 9040 - protein, 756 aa, Artificial Sequence
  Synthetic polypeptide
MAGLTAAAPRPGVLLLLLSILHPSRPGGVPGAIPGGVPGGVFYPGAGLGALGGGALGPGGKPLKPVPGGLAGAGLGAGLGAFPAVTFPGALVPGGVADAAAAYKAAKAGAGLGGVPGVGGLGVSAGAVVPQPGAGVKPGKVPGVGLPGVYPGGVLPGARFPGVGVLPGVPTGAGVKPKAPGVGGAFAGIPGVGPFGGPQPGVPLGYPIKAPKLPGGYGLPYTTGKLPYGYGPGGVAGAAGKAGYPTGTGVGPQAAAAAAAKAAAKFGAGAAGVLPGVGGAGVPGVPGAIPGIGGIAGVGTPAAAAAAAAAAKAAKYGAAAGLVPGGPGFGPGVVGVPGAGVPGVGVPGAGIPVVPGAGIPGAAVPGVVSPEAAAKAAAKAAKYGARPGVGVGGIPTYGVGAGGFPGFGVGVGGIPGVAGVPGVGGVPGVGGVPGVGISPEAQAAAAAKAAKYGVGTPAAAAAKAAAKAAQFGLVPGVGVAPGVGVAPGVGVAPGVGLAPGVGVAPGVGVAPGVGVAPGIGPGGVAAAAKSAAKVAAKAQLRAAAGLGAGIPGLGVGVGVPGLGVGAGVPGLGVGAGVPGFGAGADEGVRRSLSPELREGDPSSSQHLPSTPSSPRVPGALAAAKAAKYGAAVPGVLGGLGALGGVGIPGGVVGAGPAAAAAAAKAAAKAAQFGLVGAAGLGGLGVGGLGVPGVGGLGGAVAHACNPSTLVGQGGRITRGEEFETSLGDMAKPHLYQKYKNKPGVVVGTCISSYLRG

SEQ ID NO: 9041 - protein, 666 aa, Artificial Sequence
  Synthetic polypeptide
MAGLTAAAPRPGVLLLLLSILHPSRPGGVPGAIPGGVPGGVFYPGAGLGALGGGALGPGGKPLKPVPGGLAGAGLGAGLGAFPAVTFPGALVPGGVADAAAAYKAAKAGAGLGGVPGVGGLGVSAGAVVPQPGAGVKPGKVPGVGLPGVYPGGVLPGARFPGVGVLPGVPTGAGVKPKAPGVGGAFAGIPGVGPFGGPQPGVPLGYPIKAPKLPGGYGLPYTTGKLPYGYGPGGVAGAAGKAGYPTGTGVGPQAAAAAAAKAAAKFGAGAAGVLPGVGGAGVPGVPGAIPGIGGIAGVGTPAAAAAAAAAAKAAKYGAAAGLVPGGPGFGPGVVGVPGAGVPGVGVPGAGIPVVPGAGIPGAAVPGVVSPEAAAKAAAKAAKYGARPGVGVGGIPTYGVGAGGFPGFGVGVGGIPGVAGVPGVGGVPGVGGVPGVGISPEAQAAAAAKAAKYGVGTPAAAAAKAAAKAAQFGLVPGVGVAPGVGVAPGVGVAPGVGLAPGVGVAPGVGVAPGVGVAPGIGPGGVAAAAKSAAKVAAKAQLRAAAGLGAGIPGLGVGVGVPGLGVGAGVPGLGVGAGVPGFGAVPGALAAAKAAKYGAAVPGVLGGLGALGGVGIPGGVVGAGPAAAAAAAKAAAKAAQFGLVGAAGLGGLGVGGLGVPGVGGLGAT

SEQ ID NO: 9042 - protein, 734 aa, Artificial Sequence
  Synthetic polypeptide
MAGLTAAAPRPGVLLLLLSILHPSRPGGVPGAIPGGVPGGVFYPGAGLGALGGGALGPGGKPLKPVPGGLAGAGLGAGLGAFPAVTFPGALVPGGVADAAAAYKAAKAGAGLGGVPGVGGLGVSAGAVVPQPGAGVKPGKVPGVGLPGVYPGGVLPGARFPGVGVLPGVPTGAGVKPKAPGVGGAFAGIPGVGPFGGPQPGVPLGYPIKAPKLPGGYGLPYTTGKLPYGYGPGGVAGAAGKAGYPTGTGVGPQAAAAAAAKAAAKFGAGAAGVLPGVGGAGVPGVPGAIPGIGGIAGVGTPAAAAAAAAAAKAAKYGAAAGLVPGGPGFGPGVVGVPGAGVPGVGVPGAGIPVVPGAGIPGAAVPGVVSPEAAAKAAAKAAKYGARPGVGVGGIPTYGVGAGGFPGFGVGVGGIPGVAGVPGVGGVPGVGGVPGVGISPEAQAAAAAKAAKYGAAGAGVLGGLVPGAPGAVPGVPGTGGVPGVGTPAAAAAKAAAKAAQFALLNLAGLVPGVGVAPGVGVAPGVGVAPGVGLAPGVGVAPGVGVAPGVGVAPGIGPGGVAAAAKSAAKVAAKAQLRAAAGLGAGIPGLGVGVGVPGLGVGAGVPGLGVGAGVPGFGAGADEGVRRSLSPELREGDPSSSQHLPSTPSSPRVPGALAAAKAAKYGAAVPGVLGGLGALGGVGIPGGVVGAGPAAAAAAAKAAAKAAQFGLVGAAGLGGLGVGGLGVPGVGGLGAT

SEQ ID NO: 9043 - protein, 585 aa, Artificial Sequence
  Synthetic polypeptide
MAGLTAAAPRPGVLLLLLSILHPSRPGGVPGAIPGGVPGGVFYPGAGLGALGGGALGPGGKPLKPGLGAFPAVTFPGALVPGGVADAAAAYKAAKAGAGLGGVPGVGGLGVSAGAVVPQPGAGVKPGKVPGVGLPGVYPGGVLPGARFPGVGVLPGVPTGAGVKPKAPGVGPFGGPQPGVPLGYPIKAPKLPGYGPGGVAGAAGKAGYPTGTGVGPQAAAAAAAKAAAKFGAGAAGVLPGVGGAGVPGVPGAIPGIGGIAGVGTPAAAAAAAAAAKAAKYGAAAGLVPGGPGFGPGVVGVPGAGVPGVGVPGAGIPVVPGAGIPGAAVPGVVSPEAAAKAAAKAAKYGARPGVGVGGIPTYGVGAGGFPGFGVGVGAEAQAAAAAKAAKYGLVPGVGVAPGVGVAPGVGVAPGVGLAPGVGVAPGVGVAPGVGVAPGIGPGGVAAAAKSAAKVAAKAQLRAAAGLGAGIPGLGVGVGVPGLGVGAGVPGLGVGAGVPGFGAVPGALAAAKAAKYGAAVPGVLGGLGALGGVGIPGGVVGAGPAAAAAAAKAAAKAAQFGLVGAAGLGGLGVGGLGVPGVGGLGAT

SEQ ID NO: 9044 - protein, 642 aa, Artificial Sequence
  Synthetic polypeptide
MAGLTAAAPRPGVLLLLLSILHPSRPGGVPGAIPGGVPGGVFYPALGPGGKPLKPVPGGLAGAGLGAGLGAFPAVTFPGALVPGGVADAAAAYKAAKAGAGLGGVPGVGGLGVSAAPSVPGAVVPQPGAGVKPGKVPGVGLPGVYPGGVLPGARFPGVGVLPGVPTGAGVKPKAPGVGGAFAGIPGVGPFGGPQPGVPLGYPIKAPKLPGGYGLPYTTGKLPYGYGPGGVAGAAGKAGYPTGTGVGPQAAAAAAAKAAAKFGAGAAGVLPGVGGAGVPGVPGAIPGIGGIAGVGTPAAAAAAAAAAKAAKYGAAAGLVPGGPGFGPGVVGVPGAGVPGVGVPGAGIPVVPGAGIPGAAVPGVVSPEAAAKAAAKAAKYGARPGVGVGGIPTYGVGAGGFPGFGVGVGGIPGVAGVPGVGGVPGVGGVPGVGISPEAQAAAAAKAAKYGLVPGVGVAPGVGVAPGVGVAPGVGLAPGVGVAPGVGVAPGVGVAPGIGPGGVAAAAKSAAKVAAKAQLRAAAGLGAGIPGLGVGVGVPGLGVGAGVPGLGVGAGVPGFGAVPGALAAAKAAKYGAAVPGVLGGLGALGGVGIPGGVVGAGPAAAAAAAKAAAKAAQFGLVGAAGLGGLGVGGLGVPGVGGLGAT

SEQ ID NO: 9045 - protein, 672 aa, Artificial Sequence
  Synthetic polypeptide
MAGLTAAAPRPGVLLLLLSILHPSRPGGVPGAIPGGVPGGVFYPGAGLGALGGGALGPGGKPLKPVPGGLAGAGLGAGLGAFPAVTFPGALVPGGVADAAAAYKAAKAGAGLGGVPGVGGLGVSAGAVVPQPGAGVKPGKVPGVGLPGVYPGGVLPGARFPGVGVLPGVPTGAGVKPKAPGVGGAFAGIPGVGPFGGPQPGVPLGYPIKAPKLPGGYGLPYTTGKLPYGYGPGGVAGAAGKAGYPTGTGVGPQAAAAAAAKAAAKFGAGAAGVLPGVGGAGVPGVPGAIPGIGGIAGVGTPAAAAAAAAAAKAAKYGAAAGLVPGGPGFGPGVVGVPGAGVPGVGVPGAGIPVVPGAGIPGAAVPGVVSPEAAAKAAAKAAKYGARPGVGVGGIPTYGVGAGGFPGFGVGVGGIPGVAGVPGVGGVPGVGGVPGVGISPEAQAAAAAKAAKYGVGTPAAAAAKAAAKAAQFALLNLAGLVPGVGVAPGVGVAPGVGVAPGVGLAPGVGVAPGVGVAPGVGVAPGIGPGGVAAAAKSAAKVAAKAQLRAAAGLGAGIPGLGVGVGVPGLGVGAGVPGLGVGAGVPGFGAVPGALAAAKAAKYGAAVPGVLGGLGALGGVGIPGGVVGAGPAAAAAAAKAAAKAAQFGLVGAAGLGGLGVGGLGVPGVGGLGAT

SEQ ID NO: 9046 - protein, 637 aa, Artificial Sequence
  Synthetic polypeptide
MAGLTAAAPRPGVLLLLLSILHPSRPGGVPGAIPGGVPGGVFYPALGPGGKPLKPVPGGLAGAGLGAGLGAFPAVTFPGALVPGGVADAAAAYKAAKAGAGLGGVPGVGGLGVSAGAVVPQPGAGVKPGKVPGVGLPGVYPGGVLPGARFPGVGVLPGVPTGAGVKPKAPGVGGAFAGIPGVGPFGGPQPGVPLGYPIKAPKLPGGYGLPYTTGKLPYGYGPGGVAGAAGKAGYPTGTGVGPQAAAAAAAKAAAKFGAGAAGVLPGVGGAGVPGVPGAIPGIGGIAGVGTPAAAAAAAAAAKAAKYGAAAGLVPGGPGFGPGVVGVPGAGVPGVGVPGAGIPVVPGAGIPGAAVPGVVSPEAAAKAAAKAAKYGARPGVGVGGIPTYGVGAGGFPGFGVGVGGIPGVAGVPGVGGVPGVGGVPGVGISPEAQAAAAAKAAKYGLVPGVGVAPGVGVAPGVGVAPGVGLAPGVGVAPGVGVAPGVGVAPGIGPGGVAAAAKSAAKVAAKAQLRAAAGLGAGIPGLGVGVGVPGLGVGAGVPGLGVGAGVPGFGAVPGALAAAKAAKYGAAVPGVLGGLGALGGVGIPGGVVGAGPAAAAAAAKAAAKAAQFGLVGAAGLGGLGVGGLGVPGVGGLGAT

SEQ ID NO: 9047 - protein, 618 aa, Artificial Sequence
  Synthetic polypeptide
MAGLTAAAPRPGVLLLLLSILHPSRPGGVPGAIPGGVPGGVFYPGAGLGALGGGALGPGGKPLKPVPGGLAGAGLGAGLGAFPAVTFPGALVPGGVADAAAAYKAAKAGAGLGGVPGVGGLGVSAGAVVPQPGAGVKPGKVPGVGLPGVYPGGVLPGARFPGVGVLPGVPTGAGVKPKAPGVGGAFAGIPGVGPFGGPQPGVPLGYPIKAPKLPGYGPGGVAGAAGKAGYPTGTGVGPQAAAAAAAKAAAKFGAGAAGVLPGVGGAGVPGVPGAIPGIGGIAGVGTPAAAAAAAAAAKAAKYGAAAGLVPGGPGFGPGVVGVPGAGVPGVGVPGAGIPVVPGAGIPGAAVPGVVSPEAAAKAAAKAAKYGARPGVGVGGIPTYGVGAGGFPGFGVGVGGIPGVAGVPGVGGVPGVGGVPGVGISPEAQAAAAAKAAKYGLVPGVGVAPGVGVAPGVGVAPGVGLAPGVGVAPGVGVAPGVGVAPGIGPGGVAGAAAGLGAGIPGLGVGVGVPGLGVGAGVPGLGVGAGVPGFGAVPGALAAAKAAKYGAAVPGVLGGLGALGGVGIPGGVVGAGPAAAAAAAKAAAKAAQFGLVGAAGLGGLGVGGLGVPGVGGLGAT

SEQ ID NO: 9048 - protein, 656 aa, Artificial Sequence
  Synthetic polypeptide
MAGLTAAAPRPGVLLLLLSILHPSRPGGVPGAIPGGVPGGVFYPALGPGGKPLKPVPGGLAGAGLGAGLGAFPAVTFPGALVPGGVADAAAAYKAAKAGAGLGGVPGVGGLGVSAGAVVPQPGAGVKPGKVPGVGLPGVYPGGVLPGARFPGVGVLPGVPTGAGVKPKAPGVGGAFAGIPGVGPFGGPQPGVPLGYPIKAPKLPGGYGLPYTTGKLPYGYGPGGVAGAAGKAGYPTGTGVGPQAAAAAAAKAAAKFGAGAAGVLPGVGGAGVPGVPGAIPGIGGIAGVGTPAAAAAAAAAAKAAKYGAAAGLVPGGPGFGPGVVGVPGAGVPGVGVPGAGIPVVPGAGIPGAAVPGVVSPEAAAKAAAKAAKYGARPGVGVGGIPTYGVGAGGFPGFGVGVGGIPGVAGVPGVGGVPGVGGVPGVGISPEAQAAAAAKAAKYGVGTPAAAAAKAAAKAAQFGLVPGVGVAPGVGVAPGVGVAPGVGLAPGVGVAPGVGVAPGVGVAPGIGPGGVAAAAKSAAKVAAKAQLRAAAGLGAGIPGLGVGVGVPGLGVGAGVPGLGVGAGVPGFGAVPGALAAAKAAKYGAAVPGVLGGLGALGGVGIPGGVVGAGPAAAAAAAKAAAKAAQFGLVGAAGLGGLGVGGLGVPGVGGLGAT

SEQ ID NO: 9049 - protein, 671 aa, Artificial Sequence
  Synthetic polypeptide
MAGLTAAAPRPGVLLLLLSILHPSRPGGVPGAIPGGVPGGVFYPGAGLGALGGGALGPGGKPLKPVPGGLAGAGLGAGLGAFPAVTFPGALVPGGVADAAAAYKAAKAGAGLGGVPGVGGLGVSAAPSVPGAVVPQPGAGVKPGKVPGVGLPGVYPGGVLPGARFPGVGVLPGVPTGAGVKPKAPGVGGAFAGIPGVGPFGGPQPGVPLGYPIKAPKLPGGYGLPYTTGKLPYGYGPGGVAGAAGKAGYPTGTGVGPQAAAAAAAKAAAKFGAGAAGVLPGVGGAGVPGVPGAIPGIGGIAGVGTPAAAAAAAAAAKAAKYGAAAGLVPGGPGFGPGVVGVPGAGVPGVGVPGAGIPVVPGAGIPGAAVPGVVSPEAAAKAAAKAAKYGARPGVGVGGIPTYGVGAGGFPGFGVGVGGIPGVAGVPGVGGVPGVGGVPGVGISPEAQAAAAAKAAKYGVGTPAAAAAKAAAKAAQFGLVPGVGVAPGVGVAPGVGVAPGVGLAPGVGVAPGVGVAPGVGVAPGIGPGGVAAAAKSAAKVAAKAQLRAAAGLGAGIPGLGVGVGVPGLGVGAGVPGLGVGAGVPGFGAVPGALAAAKAAKYGAAVPGVLGGLGALGGVGIPGGVVGAGPAAAAAAAKAAAKAAQFGLVGAAGLGGLGVGGLGVPGVGGLGAT

SEQ ID NO: 9050 - protein, 652 aa, Artificial Sequence
  Synthetic polypeptide
MAGLTAAAPRPGVLLLLLSILHPSRPGGVPGAIPGGVPGGVFYPGAGLGALGGGALGPGGKPLKPVPGGLAGAGLGAGLGAFPAVTFPGALVPGGVADAAAAYKAAKAGAGLGGVPGVGGLGVSAAPSVPGAVVPQPGAGVKPGKVPGVGLPGVYPGGVLPGARFPGVGVLPGVPTGAGVKPKAPGVGGAFAGIPGVGPFGGPQPGVPLGYPIKAPKLPGGYGLPYTTGKLPYGYGPGGVAGAAGKAGYPTGTGVGPQAAAAAAAKAAAKFGAGAAGVLPGVGGAGVPGVPGAIPGIGGIAGVGTPAAAAAAAAAAKAAKYGAAAGLVPGGPGFGPGVVGVPGAGVPGVGVPGAGIPVVPGAGIPGAAVPGVVSPEAAAKAAAKAAKYGARPGVGVGGIPTYGVGAGGFPGFGVGVGGIPGVAGVPGVGGVPGVGGVPGVGISPEAQAAAAAKAAKYGLVPGVGVAPGVGVAPGVGVAPGVGLAPGVGVAPGVGVAPGVGVAPGIGPGGVAAAAKSAAKVAAKAQLRAAAGLGAGIPGLGVGVGVPGLGVGAGVPGLGVGAGVPGFGAVPGALAAAKAAKYGAAVPGVLGGLGALGGVGIPGGVVGAGPAAAAAAAKAAAKAAQFGLVGAAGLGGLGVGGLGVPGVGGLGAT

SEQ ID NO: 9051 - protein, 530 aa, Artificial Sequence
  Synthetic polypeptide
MAGLTAAAPRPGVLLLLLSILHPSRPGGVPGAIPGGVPGGVFYPGAGLGALGGGALGPGGKPLKPVPGGLAGAGLGAGVGGAFAGIPGVGPFGGPQPGVPLGYPIKAPKLPGYGPGGVAGAAGKAGYPTGTGVGPQAAAAAAAKAAAKFGAGAAGVLPGVGGAGVPGVPGAIPGIGGIAGVGTPAAAAAAAAAAKAAKYGAAAGLVPGGPGFGPGVVGVPGAGVPGVGVPGAGIPVVPGAGIPGAAVPGVVSPEAAAKAAAKAAKYGARPGVGVGGIPTYGVGAGGFPGFGVGVGGIPGVAGVPGVGGVPGVGGVPGVGISPEAQAAAAAKAAKYGLVPGVGVAPGVGVAPGVGVAPGVGLAPGVGVAPGVGVAPGVGVAPGIGPGGVAAAAKSAAKVAAKAQLRAAAGLGAGIPGLGVGVGVPGLGVGAGVPGLGVGAGVPGFGAVPGALAAAKAAKYGAAVPGVLGGLGALGGVGIPGGVVGAGPAAAAAAAKAAAKAAQFGLVGAAGLGGLGVGGLGVPGVGGLGAT

SEQ ID NO: 9052 - protein, 647 aa, Artificial Sequence
  Synthetic polypeptide
MAGLTAAAPRPGVLLLLLSILHPSRPGGVPGAIPGGVPGGVFYPGAGLGALGGGALGPGGKPLKPVPGGLAGAGLGAGLGAFPAVTFPGALVPGGVADAAAAYKAAKAGAGLGGVPGVGGLGVSAGAVVPQPGAGVKPGKVPGVGLPGVYPGGVLPGARFPGVGVLPGVPTGAGVKPKAPGVGGAFAGIPGVGPFGGPQPGVPLGYPIKAPKLPGGYGLPYTTGKLPYGYGPGGVAGAAGKAGYPTGTGVGPQAAAAAAAKAAAKFGAGAAGVLPGVGGAGVPGVPGAIPGIGGIAGVGTPAAAAAAAAAAKAAKYGAAAGLVPGGPGFGPGVVGVPGAGVPGVGVPGAGIPVVPGAGIPGAAVPGVVSPEAAAKAAAKAAKYGARPGVGVGGIPTYGVGAGGFPGFGVGVGGIPGVAGVPGVGGVPGVGGVPGVGISPEAQAAAAAKAAKYGLVPGVGVAPGVGVAPGVGVAPGVGLAPGVGVAPGVGVAPGVGVAPGIGPGGVAAAAKSAAKVAAKAQLRAAAGLGAGIPGLGVGVGVPGLGVGAGVPGLGVGAGVPGFGAVPGALAAAKAAKYGAAVPGVLGGLGALGGVGIPGGVVGAGPAAAAAAAKAAAKAAQFGLVGAAGLGGLGVGGLGVPGVGGLGAT

SEQ ID NO: 9053 - protein, 699 aa, Artificial Sequence
  Synthetic polypeptide
MAGLTAAAPRPGVLLLLLSILHPSRPGGVPGAIPGGVPGGVFYPGAGLGALGGGALGPGGKPLKPVPGGLAGAGLGAGLGAFPAVTFPGALVPGGVADAAAAYKAAKAGAGLGGVPGVGGLGVSAGAVVPQPGAGVKPGKVPGVGLPGVYPGGVLPGARFPGVGVLPGVPTGAGVKPKAPGVGGAFAGIPGVGPFGGPQPGVPLGYPIKAPKLPGGYGLPYTTGKLPYGYGPGGVAGAAGKAGYPTGTGVGPQAAAAAAAKAAAKFGAGAAGVLPGVGGAGVPGVPGAIPGIGGIAGVGTPAAAAAAAAAAKAAKYGAAAGLVPGGPGFGPGVVGVPGAGVPGVGVPGAGIPVVPGAGIPGAAVPGVVSPEAAAKAAAKAAKYGARPGVGVGGIPTYGVGAGGFPGFGVGVGGIPGVAGVPGVGGVPGVGGVPGVGISPEAQAAAAAKAAKYGVGTPAAAAAKAAAKAAQFGLVPGVGVAPGVGVAPGVGVAPGVGLAPGVGVAPGVGVAPGVGVAPGIGPGGVAAAAKSAAKVAAKAQLRAAAGLGAGIPGLGVGVGVPGLGVGAGVPGLGVGAGVPGFGAGADEGVRRSLSPELREGDPSSSQHLPSTPSSPRVPGALAAAKAAKYGAAVPGVLGGLGALGGVGIPGGVVGAGPAAAAAAAKAAAKAAQFGLVGAAGLGGLGVGGLGVPGVGGLGAT

SEQ ID NO: 9054 - protein, 11 aa, Artificial Sequence
  Synthetic polypeptide
GGRKKPQTPGL

SEQ ID NO: 9055 - protein, 74 aa, Artificial Sequence
  Synthetic polypeptide
MTERRVPFSLLRGPSWDPFRDWYPHSRLFDQAFGLPRLPEEWSQWLGGSSWPGYVRPLPPAAIESPAAAAPGAG

SEQ ID NO: 9056 - protein, 49 aa, Artificial Sequence
  Synthetic polypeptide
MHKEAEMLIGPQLDEKRWGWRLGDGSAAPPFLPQALSFLLLLPLGWVTD

SEQ ID NO: 9057 - protein, 4 aa, Artificial Sequence
  Synthetic polypeptide
KWRS

SEQ ID NO: 9058 - protein, 48 aa, Artificial Sequence
  Synthetic polypeptide
MEQVEILRKFIQRVQAMKSPDHNGEDNFARDFMLDLVARICNSSYSGG

SEQ ID NO: 9059 - protein, 551 aa, Artificial Sequence
  Synthetic polypeptide
MAEPPSPVHCVAAAAPTATVSEKEPFGKLQLSSRDPPGSLSAKKVRTEEKKAPRRVNGEGGSGGNSRQLQPPAAPSPQSYGSPASWSFAPLSAAPSPSSSRSSFSFSAGTAVPSSASASLSQPVPRKLLVPPTLLHAQPHHLLLPAAAAAASANAKSRRPKEKREKERRRHGLGGAREAGGASREENGEVKPLPRDKIKDKIKERDKEKEREKKKHKVMNEIKKENGEVKILLKSGKEKPKTNIEDLQIKKVKKKKKKKHKENEKRKRPKMYSKSIQTICSGLLTDVEDQAAKGILNDNIKDYVGKNLDTKNYDSKIPENSEFPFVSLKEPRVQNNLKRLDTLEFKQLIHIEHQPNGGASVIHAYSNELSHLSPMEMERFAEEFVGLVFSENENSAAFYVMGIVHGAATYLPDFLDYFSFNFPNSPVKMEILGKKDIETTTMSNFHAQVKRTYSHGTYRAGPMRQISLVGAVDEEVGDYFPEFLDMLEESPFLKCTLPWGTLSSLKLQSRKDSDDGPIMWVRPGEQMIPVADMPKSPFKRKSTPTFGNPKE

SEQ ID NO: 9060 - protein, 281 aa, Artificial Sequence
  Synthetic polypeptide
MYSKSIQTICSGLLTDVEDQAAKGILNDNIKDYVGKNLDTKNYDSKIPENSEFPFVSLKEPRVQNNLKRLDTLEFKQLIHIEHQPNGGASVIHAYSNELSHLSPMEMERFAEEFVGLVFSENENSAAFYVMGIVHGAATYLPDFLDYFSFNFPNSPVKMEILGKKDIETTTMSNFHAQVKRTYSHGTYRAGPMRQISLVGAVDEEVGDYFPEFLDMLEESPFLKCTLPWGTLSSLKLQSRKDSDDGPIMWVRPGEQMIPVADMPKSPFKRKSTPTFGNPKE

SEQ ID NO: 9061 - protein, 89 aa, Artificial Sequence
  Synthetic polypeptide
MRQISLVGAVDEEVGDYFPEFLDMLEESPFLKCTLPWGTLSSLKLQSRKDSDDGPIMWVRPGEQMIPVADMPKSPFKRKSTPTFGNPKE

SEQ ID NO: 9062 - protein, 57 aa, Artificial Sequence
  Synthetic polypeptide
CTLPWGTLSSLKLQSRKDSDDGPIMWVRPGEQMIPVADMPKSPFKRKSTPTFGNPKE

SEQ ID NO: 9063 - protein, 627 aa, Artificial Sequence
  Synthetic polypeptide
MASKVTDAIVWYQKKIGAYDQQIWEKSVEQREIKFIKLGLRNKPKKTAHVKPDLIDVDLVRGSAFAKAKPESPWTSLTRKGIVRVVFFPFFFRWWLQVTSKVIFFWLLVLYLLQVAAIVLFCSTSSPHSIPLTEVIGPIWLMLLLGTVHCQIVSTRTPKPPLSTGGKRRRKLRKAAHLEVHREGDGSSTTDNTQEGAVQNHGTSTSHSVGTVFRDLWHAAFFLSGSKKAKNSIDKSTETDNGYVSLDGKKTVKSGEDGIQNHEPQCETIRPEETAWNTGTLRNGPSKDTQRTITNVSDEVSSEEGPETGYSLRRHVDRTSEGVLRNRKSHHYKKHYPNEDAPKSGTSCSSRCSSSRQDSESARPESETEDVLWEDLLHCAECHSSCTSETDVENHQINPCVKKEYRDDPFHQSHLPWLHSSHPGLEKISAIVWEGNDCKKADMSVLEISGMIMNRVNSHIPGIGYQIFGNAVSLILGLTPFVFRLSQATDLEQLTAHSASELYVIAFGSNEDVIVLSMVIISFVVRVSLVWIFFFLLCVAERTYKQRLLFAKLFGHLTSARRARKSEVPHFRLKKVQNIKMWLSLRSYLKRRGPQRSVDVIVSSAFLLTISVVFICCAQAGHSGSHL

SEQ ID NO: 9064 - protein, 623 aa, Artificial Sequence
  Synthetic polypeptide
MASKVTDAIVWYQKKIGAYDQQIWEKSVEQREIKGLRNKPKKTAHVKPDLIDVDLVRGSAFAKAKPESPWTSLTRKGIVRVVFFPFFFRWWLQVTSKVIFFWLLVLYLLQVAAIVLFCSTSSPHSIPLTEVIGPIWLMLLLGTVHCQIVSTRTPKPPLSTGGKRRRKLRKAAHLEVHREGDGSSTTDNTQEGAVQNHGTSTSHSVGTVFRDLWHAAFFLSGSKKAKNSIDKSTETDNGYVSLDGKKTVKSGEDGIQNHEPQCETIRPEETAWNTGTLRNGPSKDTQRTITNVSDEVSSEEGPETGYSLRRHVDRTSEGVLRNRKSHHYKKHYPNEDAPKSGTSCSSRCSSSRQDSESARPESETEDVLWEDLLHCAECHSSCTSETDVENHQINPCVKKEYRDDPFHQSHLPWLHSSHPGLEKISAIVWEGNDCKKADMSVLEISGMIMNRVNSHIPGIGYQIFGNAVSLILGLTPFVFRLSQATDLEQLTAHSASELYVIAFGSNEDVIVLSMVIISFVVRVSLVWIFFFLLCVAERTYKQRLLFAKLFGHLTSARRARKSEVPHFRLKKVQNIKMWLSLRSYLKRRGPQRSVDVIVSSAFLLTISVVFICCAQAGHSGSHL

SEQ ID NO: 9065 - protein, 661 aa, Artificial Sequence
  Synthetic polypeptide
MASKVTDAIVWYQKKEFLSVATTAPGPQQVLPGYCQCSLKDQGLFIQCLIGAYDQQIWEKSVEQREIKFIKLGLRNKPKKTAHVKPDLIDVDLVRGSAFAKAKPESPWTSLTRKGIVRVVFFPFFFRWWLQVTSKVIFFWLLVLYLLQVAAIVLFCSTSSPHSIPLTEVIGPIWLMLLLGTVHCQIVSTRTPKPPLSTGGKRRRKLRKAAHLEVHREGDGSSTTDNTQEGAVQNHGTSTSHSVGTVFRDLWHAAFFLSGSKKAKNSIDKSTETDNGYVSLDGKKTVKSGEDGIQNHEPQCETIRPEETAWNTGTLRNGPSKDTQRTITNVSDEVSSEEGPETGYSLRRHVDRTSEGVLRNRKSHHYKKHYPNEDAPKSGTSCSSRCSSSRQDSESARPESETEDVLWEDLLHCAECHSSCTSETDVENHQINPCVKKEYRDDPFHQSHLPWLHSSHPGLEKISAIVWEGNDCKKADMSVLEISGMIMNRVNSHIPGIGYQIFGNAVSLILGLTPFVFRLSQATDLEQLTAHSASELYVIAFGSNEDVIVLSMVIISFVVRVSLVWIFFFLLCVAERTYKQRLLFAKLFGHLTSARRARKSEVPHFRLKKVQNIKMWLSLRSYLKRRGPQRSVDVIVSSAFLLTISVVFICCAQAGHSGSHL

SEQ ID NO: 9066 - protein, 51 aa, Artificial Sequence
  Synthetic polypeptide
MTARGKTSDIEANQPLEGRAQWLTLVIPALWEAEAGGSPEVRSSRPAWPTW

SEQ ID NO: 9067 - protein, 63 aa, Artificial Sequence
  Synthetic polypeptide
MAFRTICVLVGVFICSICVKGSSQPQARVYLTFDEPTLYNAVCYICGYKKKCGVNLVLSNHLL

SEQ ID NO: 9068 - protein, 52 aa, Artificial Sequence
  Synthetic polypeptide
MAFRTICVLVGVFICSICVKGSSQPQARVYLTFDDVNKFKLLRWENYPGLSG

SEQ ID NO: 9069 - protein, 70 aa, Artificial Sequence
  Synthetic polypeptide
MLSKKGIFPWILTCISEEMAFRTICVLVGVFICSICVKGSSQPQARVYLTFDDVNKFKLLRWENYPGLSG

SEQ ID NO: 9070 - protein, 2 aa, Artificial Sequence
  Synthetic polypeptide
MM

SEQ ID NO: 9071 - protein, 768 aa, Artificial Sequence
  Synthetic polypeptide
MAALGVAEAVAAPHPAEGAETAEAVELSRALSRLLPGLEADSKPGRRRALEALRRALEEPGPAADPTAFQGPWARLLLPRLLRCLSDPAEGCRALAVHLLDLGLRRAARPRDALPRLLPALAARLAGPVPARRPPEACEELRLALVQLLGLAVDLCGAALAPHLDDALRALRCSLLDPFAAVRRESCSCAAALAQATPDHFHMQSESLIGPLMQTISHQHWKVRVAAIEATGAVIHFGNGKSVDDVLSHFAQRLFDDVPQVRRAVASVVGGWLLCLRDRYSFFHKLIPLLLSSLNDEVPEVRQLAASLWEDVGLQWQKENEEDLKDKLDFAPPTPPHYPPHERRPVLGCRELVFRNLSKILPALCHDITDWVVGTRVKSAQLLPVLLLHAEDHATQHLEVVLRTLFQACTDEEAAVVQSCTRSAELVGTFVSPEVFLKLILSTLKKTPSASGLLVLASAMRGCPREALQPHLAAIATELAQAHICQASENDLYLERLLLCVQALVSVCHEDCGVASLQLLDVLLTIVALAGATGLRDKAQETMDSLAMVEGVSSCQDLYRKHIGPLLERVTASHLDWTAHSPELLQFSVIVAQSGPALGEALPHVVPTLRACLQPSQDPQMRLKLFSILSTVLLRATDTINSQGQFPSYLETVTKDILAPNLQWHAGRTAAAIRTAAVSCLWALTSSEVLSAEQIRDVQETLMPQVLTTLEEDSKMTRLISCRIINTFLKTSGGMTDPEKLIRIYPEFHSSKKQSLNLLGTKYNVEPA

SEQ ID NO: 9072 - protein, 29 aa, Artificial Sequence
  Synthetic polypeptide
FAAVRRESCSCAAALAQATPALEGPCGRH

SEQ ID NO: 9073 - protein, 193 aa, Artificial Sequence
  Synthetic polypeptide
MTGGAREKAHIARSPATAQGPALGEALPHVVPTLRACLQPSQDPQMRLKLFSILSTVLLRATDTINSQGQFPSYLETVTKDILAPNLQWHAGRTAAAIRTAAVSCLWALTSSEVLSAEQIRDVQETLMPQVLTTLEEDSKMTRLISCRIINTFLKTSGGMTDPEKLIRIYPEFHSSKKQSLNLLGTKYNVEPA

SEQ ID NO: 9074 - protein, 472 aa, Artificial Sequence
  Synthetic polypeptide
MSGHKCSYPWDLQDRYAQDKSVVNKMQQKYWETKQAFIKATGKKEDEHVVASDADLDAKLELFHSIQRTCLDLSKAIVLYQKRICFLSQEENELGKFLRSQGFQDKTRAGKMMQATGKALCFSSQQRLALRNPLCRFHQEVETFRHRAISDTWLTVNRMEQCRTEYRGALLWMKDVSQELDPDLYKQMEKFRKVQTQVRLAKKNFDKLKMDVCQKVDLLGASRCNLLSHMLATYQTTLLHFWEKTSHTMAAIHESFKGYQPYEFTTLKSLQDPMKKLVEKEEKKKINQQESTDAAVQEPSQLISLEEENQRKESSSFKTEDGKSILSALDKGSTHTACSGPIDELLDMKSEEGACLGPVAGTPEPEGADKDDLLLLSEIFNASSLEEGEFSKEWAAVFGDGQVKEPVPTMALGEPDPKAQTGSGFLPSQLLDQNMKDLQASLQGCHGNRSHIYVAHHRISRTQLSAWNTVNV

SEQ ID NO: 9075 - protein, 471 aa, Artificial Sequence
  Synthetic polypeptide
MSGHKCYPWDLQDRYAQDKSVVNKMQQKYWETKQAFIKATGKKEDEHVVASDADLDAKLELFHSIQRTCLDLSKAIVLYQKRICFLSQEENELGKFLRSQGFQDKTRAGKMMQATGKALCFSSQQRLALRNPLCRFHQEVETFRHRAISDTWLTVNRMEQCRTEYRGALLWMKDVSQELDPDLYKQMEKFRKVQTQVRLAKKNFDKLKMDVCQKVDLLGASRCNLLSHMLATYQTTLLHFWEKTSHTMAAIHESFKGYQPYEFTTLKSLQDPMKKLVEKEEKKKINQQESTDAAVQEPSQLISLEEENQRKESSSFKTEDGKSILSALDKGSTHTACSGPIDELLDMKSEEGACLGPVAGTPEPEGADKDDLLLLSEIFNASSLEEGEFSKEWAAVFGDGQVKEPVPTMALGEPDPKAQTGSGFLPSQLLDQNMKDLQASLQGCHGNRSHIYVAHHRISRTQLSAWNTVNV

SEQ ID NO: 9076 - protein, 460 aa, Artificial Sequence
  Synthetic polypeptide
MDRYAQDKSVVNKMQQKYWETKQAFIKATGKKEDEHVVASDADLDAKLELFHSIQRTCLDLSKAIVLYQKRICFLSQEENELGKFLRSQGFQDKTRAGKMMQATGKALCFSSQQRLALRNPLCRFHQEVETFRHRAISDTWLTVNRMEQCRTEYRGALLWMKDVSQELDPDLYKQMEKFRKVQTQVRLAKKNFDKLKMDVCQKVDLLGASRCNLLSHMLATYQTTLLHFWEKTSHTMAAIHESFKGYQPYEFTTLKSLQDPMKKLVEKEEKKKINQQESTDAAVQEPSQLISLEEENQRKESSSFKTEDGKSILSALDKGSTHTACSGPIDELLDMKSEEGACLGPVAGTPEPEGADKDDLLLLSEIFNASSLEEGEFSKEWAAVFGDGQVKEPVPTMALGEPDPKAQTGSGFLPSQLLDQNMKDLQASLQGCHGNRSHIYVAHHRISRTQLSAWNTVNV

SEQ ID NO: 9077 - protein, 501 aa, Artificial Sequence
  Synthetic polypeptide
MSGHKCSYPWDLQDRYAQDKSVVNKMQQKYWETKQAFIKATGKKEDEHVVASDADLDAKLELFHSIQRTCLDLSKAIVLYQKRICFLSQEENELGKFLRSQGFQDKTRAGKMMQATGKALCFSSQQRLALRNPLCRFHQEVETFRHRAISDTWLTVNRMEQCRTEYRGALLWMKDVSQELDPDLYKQMEKFRKVQTQVRLAKKNFDKLKMDVCQKVDLLGASRCNLLSHMLATYQTTLLHFWEKTSHTMAAIHESFKGYQPYEFTTLKSLQDPMKKLVEKEEKKKINQQESTDAAVQEPSQYLQNICLEMKANSDIKMLQKGKEGQQIGILISLEEENQRKESSSFKTEDGKSILSALDKGSTHTACSGPIDELLDMKSEEGACLGPVAGTPEPEGADKDDLLLLSEIFNASSLEEGEFSKEWAAVFGDGQVKEPVPTMALGEPDPKAQTGSGFLPSQLLDQNMKDLQASLQGCHGNRSHIYVAHHRISRTQLSAWNTVNV

SEQ ID NO: 9078 - protein, 108 aa, Artificial Sequence
  Synthetic polypeptide
MASAGHIITLLLWGYLLELWTGGHTADTTHPRLRLSHKASTGDTQANRVWSGTPVNSSELQQTPADLEKRSLTVRKKTPKQEAIASTSTERMTTQKLHLKVTNLKDKR

SEQ ID NO: 9079 - protein, 594 aa, Artificial Sequence
  Synthetic polypeptide
MGWLTRIVCLFWGVLLTARANYQNGKNNVPRLKLSYKEMLESNNVITFNGLANSSSYHTFLLDEERSRLYVGAKDHIFSFDLVNIKDFQKIVWPVSYTRRDECKWAGKDILKECANFIKVLKAYNQTHLYACGTGAFHPICTYIEIGHHPEDNIFKLENSHFENGRGKSPYDPKLLTASLLIDGELYSGTAADFMGRDFAIFRTLGHHHPIRTEQHDSRWLNDPKFISAHLISESDNPEDDKVYFFFRENAIDGEHSGKATHARIGQICKNDFGGHRSLVNKWTTFLKARLICSVPGPNGIDTHFDELQDVFLMNFKDPKNPVVYGVFTTSSNIFKGSAVCMYSMSDVRRVFLGPYAHRDGPNYQWVPYQGRVPYPRPGTCPSKTFGGFDSTKDLPDDVITFARSHPAMYNPVFPMNNRPIVIKTDVNYQFTQIVVDRVDAEDGQYDVMFIGTDVGTVLKVVSIPKETWYDLEEVLLEEMTVFREPTAISAMELSTKQQQLYIGSTAGVAQLPLHRCDIYGKACAECCLARDPYCAWDGSACSRYFPTAKRRTRRQDIRNGDPLTHCSDLHHGHMRTQQEGCCLQARKWALTRK

SEQ ID NO: 9080 - protein, 1051 aa, Artificial Sequence
  Synthetic polypeptide
MLFRARGPVRGRGWGRPAEAPRRGRSPPWSPAWICCWALAGCQAAWAGDLPSSSSRPLPPCQEKDYHFEYTECDSSGSRWRVAIPNSAVDCSGLPDPVRGKECTFSCASGEYLEMKNQVCSKCGEGTYSLGSGIKFDEWDELPAGFSNIATFMDTVVGPSDSRPDGCNNSSWIPRGNYIESNRDDCTVSLIYAVHLKKSGYVFFEYQYVDNNIFFEFFIQNDQCQEMDTTTDKWVKLTDNGEWGSHSVMLKSGTNILYWRTTGILMGSKAVKPVLVKNITIEGVAYTSECFPCKPGTFSNKPGSFNCQVCPRNTYSEKGAKECIRCKDDSQFSEEGSSECTERPPCTTKDYFQIHTPCDEEGKTQIMYKWIEPKICREDLTDAIRLPPSGEKKDCPPCNPGFYNNGSSSCHPCPPGTFSDGTKECRPCPAGTEPALGFEYKWWNVLPGNMKTSCFNVGNSKCDGMNGWEVAGDHIQSGAGGSDNDYLILNLHIPGFKPPTSMTGATGSELGRITFVFETLCSADCVLYFMVDINRKSTNVVESWGGTKEKQAYTHIIFKNATFTFTWAFQRTNQGQDNRRFINDMVKIYSITATNAVDGVASSCRACALGSEQSGSSCVPCPPGHYIEKETNQCKECPPDTYLSIHQVYGKEACIPCGPGSKNNQDHSVCYSDCFFYHEKENQSLHYDFSNLSSVGSLMNGPSFTSKGTKYFHFFNISLCGHEGKKMALCTNNITDFTVKEIVAGSDDYTNLVGAFVCQSTIIPSESKGFRAALSSQSIILADTFIGVTVETTLKNINIKEDMFPVPTSQIPDVHFFYKSSTATTSCINGRSTAVKMRCNPTKSGAGVISVPSKCPAGTCDGCTFYFLWESAEACPLCTEHDFHEIEGACKRGFQETLYVWNEPKWCIKGISLPEKKLATCETVDFWLKVGAGVGAFTAVLLVALTCYFWKKNQKLEYKYSKLVMTTNSKECELPAADSCAIMEGEDNEEEVVYSNKQSLLGKLKSLATKKLPQSPQSSATTTLISQQPSTLRQDRQSAKRVWLAKGWDDC

SEQ ID NO: 9081 - protein, 811 aa, Artificial Sequence
  Synthetic polypeptide
MLEGNYQVMLKSGTNILYWRTTGILMGSKAVKPVLVKNITIEGVAYTSECFPCKPGTFSNKPGSFNCQVCPRNTYSEKGAKECIRCKDDSQFSEEGSSECTERPPCTTKDYFQIHTPCDEEGKTQIMYKWIEPKICREDLTDAIRLPPSGEKKDCPPCNPGFYNNGSSSCHPCPPGTFSDGTKECRPCPAGTEPALGFEYKWWNVLPGNMKTSCFNVGNSKCDGMNGWEVAGDHIQSGAGGSDNDYLILNLHIPGFKPPTSMTGATGSELGRITFVFETLCSADCVLYFMVDINRKSTNVVESWGGTKEKQAYTHIIFKNATFTFTWAFQRTNQGQDNRRFINDMVKIYSITATNAVDGVASSCRACALGSEQSGSSCVPCPPGHYIEKETNQCKECPPDTYLSIHQVYGKEACIPCGPGSKNNQDHSVCYSDCFFYHEKENQSLHYDFSNLSSVGSLMNGPSFTSKGTKYFHFFNISLCGHEGKKMALCTNNITDFTVKEIVAGSDDYTNLVGAFVCQSTIIPSESKGFRAALSSQSIILADTFIGVTVETTLKNINIKEDMFPVPTSQIPDVHFFYKSSTATTSCINGRSTAVKMRCNPTKSGAGVISVPSKCPAGTCDGCTFYFLWESAEACPLCTEHDFHEIEGACKRGFQETLYVWNEPKWCIKGISLPEKKLATCETVDFWLKVGAGVGAFTAVLLVALTCYFWKKNQKLEYKYSKLVMTTNSKECELPAADSCAIMEGEDNEEEVVYSNKQSLLGKLKSLATKKLPQSPQSSATTTLISQQPSTLRQDRQSAKRVWLAKGWDDC

SEQ ID NO: 9082 - protein, 980 aa, Artificial Sequence
  Synthetic polypeptide
MLFRARGPVRGRGWGRPAEAPRRGRSPPWSPAWICCWALAGCQAAWAGDLPSSSSRPLPPCQEKDYHFEYTECDSSGSRWRVAIPNSAVDCSGLPDPVRGKECTFSCASGEYLEMKNQVCSKCGEGTYSLGSGIKFDEWDELPAGFSNIATFMDTVVGPSDSRPDGCNNSSWIPRGNYIESNRDDCTVSLIYAVHLKKSGYVFFEYQYVDNNIFFEFFIQNDQCQEMDTTTDKWVKLTDNGEWGSHSVMLKSGTNILYWRTTGILMGSKAVKPVLVKNITIEGVAYTSECFPCKPGTFSNKPGSFNCQVCPRNTYSEKGAKECIRCKDDSQFSEEGSSECTERPPCTTKDYFQIHTPCDEEGKTQIMYKWIEPKICREDLTDAIRLPPSGEKKDCPPCNPGFYNNGSSSCHPCPPGTFSDGTKECRPCPAGTEPALGFEYKWWNVLPGNMKTSCFNVGNSKCDGMNGWEVAGDHIQSGAGGSDNDYLILNLHIPGFKPPTSMTGATGSELGRITFVFETLCSADCVLYFMVDINRKSTNVVESWGGTKEKQAYTHIIFKNATFTFTWAFQRTNQGQDATTLRKKPTSARNVHLTPTCPYIRSMAKRLVFHAGLGVKTISNLSSVGSLMNGPSFTSKGTKYFHFFNISLCGHEGKKMALCTNNITDFTVKEIVAGSDDYTNLVGAFVCQSTIIPSESKGFRAALSSQSIILADTFIGVTVETTLKNINIKEDMFPVPTSQIPDVHFFYKSSTATTSCINGRSTAVKMRCNPTKSGAGVISVPSKCPAGTCDGCTFYFLWESAEACPLCTEHDFHEIEGACKRGFQETLYVWNEPKWCIKGISLPEKKLATCETVDFWLKVGAGVGAFTAVLLVALTCYFWKKNQKLEYKYSKLVMTTNSKECELPAADSCAIMEGEDNEEEVVYSNKQSLLGKLKSLATKKLPQSPQSSATTTLISQQPSTLRQDRQSAKRVWLAKGWDDC

SEQ ID NO: 9083 - protein, 884 aa, Artificial Sequence
  Synthetic polypeptide
MHSSWIPRGNYIESNRDDCTVSLIYAVHLKKSGYVFFEYQYVDNNIFFEFFIQNDQCQEMDTTTDKWVKLTDNGEWGSHSVMLKSGTNILYWRTTGILMGSKAVKPVLVKNITIEGVAYTSECFPCKPGTFSNKPGSFNCQVCPRNTYSEKGAKECIRCKDDSQFSEEGSSECTERPPCTTKDYFQIHTPCDEEGKTQIMYKWIEPKICREDLTDAIRLPPSGEKKDCPPCNPGFYNNGSSSCHPCPPGTFSDGTKECRPCPAGTEPALGFEYKWWNVLPGNMKTSCFNVGNSKCDGMNGWEVAGDHIQSGAGGSDNDYLILNLHIPGFKPPTSMTGATGSELGRITFVFETLCSADCVLYFMVDINRKSTNVVESWGGTKEKQAYTHIIFKNATFTFTWAFQRTNQGQDNRRFINDMVKIYSITATNAVDGVASSCRACALGSEQSGSSCVPCPPGHYIEKETNQCKECPPDTYLSIHQVYGKEACIPCGPGSKNNQDHSVCYSDCFFYHEKENQSLHYDFSNLSSVGSLMNGPSFTSKGTKYFHFFNISLCGHEGKKMALCTNNITDFTVKEIVAGSDDYTNLVGAFVCQSTIIPSESKGFRAALSSQSIILADTFIGVTVETTLKNINIKEDMFPVPTSQIPDVHFFYKSSTATTSCINGRSTAVKMRCNPTKSGAGVISVPSKCPAGTCDGCTFYFLWESAEACPLCTEHDFHEIEGACKRGFQETLYVWNEPKWCIKGISLPEKKLATCETVDFWLKVGAGVGAFTAVLLVALTCYFWKKNQKLEYKYSKLVMTTNSKECELPAADSCAIMEGEDNEEEVVYSNKQSLLGKLKSLATKKLPQSPQSSATTTLISQQPSTLRQDRQSAKRVWLAKGWDDC

SEQ ID NO: 9084 - protein, 81 aa, Artificial Sequence
  Synthetic polypeptide
RCCSAPGGRYGAGAGGGRRRLPAAGARRPGAPPGFAAGRSPAARRPGLGTCPPPPAARFLLARSFLLCFWRVSRNEEPGMQ

SEQ ID NO: 9085 - protein, 99 aa, Artificial Sequence
  Synthetic polypeptide
MDLEGDRNGGAKKKNFFKLNNKSEKDKKEKKPTVSVFSMFRYSNWLDKLYMVVGTLAAIIHGAGLPLMMLVFGEMTDIFANAGNLEDLMSNITNRRTPN

SEQ ID NO: 9086 - protein, 113 aa, Artificial Sequence
  Synthetic polypeptide
MQAAVAVSVPFLLLCVLGTCPPARCGQAGDASLMELEKRKENRFVERQSIVPLRLIYRSGGEDESRHDALDTRVRGDLGGPQLTHVDQASFQVDAFGTSFILDVVLNQKKLNL

SEQ ID NO: 9087 - protein, 130 aa, Artificial Sequence
  Synthetic polypeptide
MQAAVAVSVPFLLLCVLGTCPPARCGQAGDASLMELEKRKENRFVERQSIVPLRLIYRSGGEDESRHDALDTRVRGDLGGPQIQMFLKSESQKTIYQIQLTHVDQASFQVDAFGTSFILDVVLNQKKLNL

SEQ ID NO: 9088 - protein, 80 aa, Artificial Sequence
  Synthetic polypeptide
MELEKRKENRFVERQSIVPLRLIYRSGGEDESRHDALDTRVRGDLGGPQLTHVDQASFQVDAFGTSFILDVVLNQKKLNL

SEQ ID NO: 9089 - protein, 126 aa, Artificial Sequence
  Synthetic polypeptide
MQAAVAVSVPFLLLCVLGTCPPARCGQAGDASLMELEKRKENRFVERQSIVPLRLIYRSGGEDESRHDALDTRVRGDLGGPQLTHVDQASFQVDAFGTSFILDVVLNQDAHPSTTLLFFTELPGMS

SEQ ID NO: 9090 - protein, 143 aa, Artificial Sequence
  Synthetic polypeptide
MQAAVAVSVPFLLLCVLGTCPPARCGQAGDASLMELEKRKENRFVERQSIVPLRLIYRSGGEDESRHDALDTRVRGDLGGPQIQMFLKSESQKTIYQIQLTHVDQASFQVDAFGTSFILDVVLNQDAHPSTTLLFFTELPGMS

SEQ ID NO: 9091 - protein, 93 aa, Artificial Sequence
  Synthetic polypeptide
MELEKRKENRFVERQSIVPLRLIYRSGGEDESRHDALDTRVRGDLGGPQLTHVDQASFQVDAFGTSFILDVVLNQDAHPSTTLLFFTELPGMS

SEQ ID NO: 9092 - protein, 419 aa, Artificial Sequence
  Synthetic polypeptide
MQAAVAVSVPFLLLCVLGTCPPARCGQAGDASLMELEKRKENRFVERQSIVPLRLIYRSGGEDESRHDALDTRVRGDLGGPQLTHVDQASFQVDAFGTSFILDVVLNHDLLSSEYIERHIEHGGKTVEVKGGEHCYYQGHIRGNPDSFVALSTCHGLHGMFYDGNHTYLIEPEENDTTQEDFHFHSVYKSRLFEFSLDDLPSEFQQVNITPSKFILKPRPKRSKRQLRRYPRNVEEETKYIELMIVNDHLMFKKHRLSVVHTNTYAKSVVNMADLIYKDQLKTRIVLVAMETWATDNKFAISENPLITLREFMKYRRDFIKEKSDAVHLFSGSQFESSRSGAAYIGGICSLLKGGGVNEFGKTDLMAVTLAQSLAHNIGIISDKRKLASGECKCEDTWSGCIMGDTGQAWWLMAVIPSL

SEQ ID NO: 9093 - protein, 386 aa, Artificial Sequence
  Synthetic polypeptide
MELEKRKENRFVERQSIVPLRLIYRSGGEDESRHDALDTRVRGDLGGPQLTHVDQASFQVDAFGTSFILDVVLNHDLLSSEYIERHIEHGGKTVEVKGGEHCYYQGHIRGNPDSFVALSTCHGLHGMFYDGNHTYLIEPEENDTTQEDFHFHSVYKSRLFEFSLDDLPSEFQQVNITPSKFILKPRPKRSKRQLRRYPRNVEEETKYIELMIVNDHLMFKKHRLSVVHTNTYAKSVVNMADLIYKDQLKTRIVLVAMETWATDNKFAISENPLITLREFMKYRRDFIKEKSDAVHLFSGSQFESSRSGAAYIGGICSLLKGGGVNEFGKTDLMAVTLAQSLAHNIGIISDKRKLASGECKCEDTWSGCIMGDTGQAWWLMAVIPSL

SEQ ID NO: 9094 - protein, 17 aa, Artificial Sequence
  Synthetic polypeptide
MQSLSLGQTRIHEQTSI

SEQ ID NO: 9095 - protein, 48 aa, Artificial Sequence
  Synthetic polypeptide
MQSLSLGQTSFTWNNQKLEVTQWTLEQHGIEKYIVIYSGSGILLTNMK

SEQ ID NO: 9096 - protein, 3029 aa, Artificial Sequence
  Synthetic polypeptide
MEDEERQKKLEAGKAKLAQFRQRKAQSDGQSPSKKQKKKRKTSSSKHDVSAHHDLNIDQSQCNEMYINSSQRVESTVIPESTIMRTLHSGEITSHEQGFSVELESEISTTADDCSSEVNGCSFVMRTGKPTNLLREEEFGVDDSYSEQGAQDSPTHLEMMESELAGKQHEIEELNRELEEMRVTYGTEGLQQLQEFEAAIKQRDGIITQLTANLQQARREKDETMREFLELTEQSQKLQIQFQQLQASETLRNSTHSSTAADLLQAKQQILTHQQQLEEQDHLLEDYQKKKEDFTMQISFLQEKIKVYEMEQDKKVENSNKEEIQEKETIIEELNTKIIEEEKKTLELKDKLTTADKLLGELQEQIVQKNQEIKNMKLELTNSKQKERQSSEEIKQLMGTVEELQKRNHKDSQFETDIVQRMEQETQRKLEQLRAELDEMYGQQIVQMKQELIRQHMAQMEEMKTRHKGEMENALRSYSNITVNEDQIKLMNVAINELNIKLQDTNSQKEKLKEELGLILEEKCALQRQLEDLVEELSFSREQIQRARQTIAEQESKLNEAHKSLSTVEDLKAEIVSASESRKELELKHEAEVTNYKIKLEMLEKEKNAVLDRMAESQEAELERLRTQLLFSHEEELSKLKEDLEIEHRINIEKLKDNLGIHYKQQIDGLQNEMSQKIETMQFEKDNLITKQNQLILEISKLKDLQQSLVNSKSEEMTLQINELQKEIEILRQEEKEKGTLEQEVQELQLKTELLEKQMKEKENDLQEKFAQLEAENSILKDEKKTLEDMLKIHTPVSQEERLIFLDSIKSKSKDSVWEKEIEILIEENEDLKQQCIQLNEEIEKQRNTFSFAEKNFEVNYQELQEEYACLLKVKDDLEDSKNKQELEYKSKLKALNEELHLQRINPTTVKMKSSVFDEDKTFVAETLEMGEVVEKDTTELMEKLEVTKREKLELSQRLSDLSEQLKQKHGEISFLNEEVKSLKQEKEQVSLRCRELEIIINHNRAENVQSCDTQVSSLLDGVVTMTSRGAEGSVSKVNKSFGEESKIMVEDKVSFENMTVGEESKQEQLILDHLPSVTKESSLRATQPSENDKLQKELNVLKSEQNDLRLQMEAQRICLSLVYSTHVDQVREYMENEKDKALCSLKEELIFAQEEKIKELQKIHQLELQTMKTQETGDEGKPLHLLIGKLQKAVSEECSYFLQTLCSVLGEYYTPALKCEVNAEDKENSGDYISENEDPELQDYRYEVQDFQENMHTLLNKVTEEYNKLLVLQTRLSKIWGQQTDGMKLEFGEENLPKEETEFLSIHSQMTNLEDIDVNHKSKLSSLQDLEKTKLEEQVQELESLISSLQQQLKETEQNYEAEIHCLQKRLQAVSESTVPPSLPVDSVVITESDAQRTMYPGSCVKKNIDGTIEFSGEFGVKEETNIVKLLEKQYQEQLEEEVAKVIVSMSIAFAQQTELSRISGGKENTASSKQAHAVCQQEQHYFNEMKLSQDQIGFQTFETVDVKFKEEFKPLSKELGEHGKEILLSNSDPHDIPESKDCVLTISEEMFSKDKTFIVRQSIHDEISVSSMDASRQLMLNEEQLEDMRQELVRQYQEHQQATELLRQAHMRQMERQREDQEQLQEEIKRLNRQLAQRSSIDNENLVSERERVLLEELEALKQLSLAGREKLCCELRNSSTQTQNGNENQGEVEEQTFKEKELDRKPEDVPPEILSNERYALQKANNRLLKILLEVVKTTAAVEETIGRHVLGILDRSSKSQSSASLIWRSEAEASVKSCVHEEHTRVTDESIPSYSGSDMPRNDINMWSKVTEEGTELSQRLVRSGFAGTEIDPENEELMLNISSRLQAAVEKLLEAISETSSQLEHAKVTQTELMRESFRQKQEATESLKCQEELRERLHEESRAREQLAVELSKAEGVIDGYADEKTLFERQIQEKTDIIDRLEQELLCASNRLQELEAEQQQIQEERELLSRQKEAMKAEAGPVEQQLLQETEKLMKEKLEVQCQAEKVRDDLQKQVKALEIDVEEQVSRFIELEQEKNTELMDLRQQNQALEKQLEKMRKFLDEQAIDREHERDVFQQEIQKLEQQLKVVPRFQPISEHQTREVEQLANHLKEKTDKCSELLLSKEQLQRDIQERNEEIEKLEFRVRELEQALLVSADTFQKVEDRKHFGAVEAKPELSLEVQLQAERDAIDRKEKEITNLEEQLEQFREELENKNEEVQQLHMQLEIQKKESTTRLQELEQENKLFKDDMEKLGLAIKESDAMSTQDQHVLFGKFAQIIQEKEVEIDQLNEQVTKLQQQLKITTDNKVIEEKNELIRDLETQIECLMSDQECVKRNREEEIEQLNEVIEKLQQELANIGQKTSMNAHSLSEEADSLKHQLDVVIAEKLALEQQVETANEEMTFMKNVLKETNFKMNQLTQELFSLKRERESVEKIQSIPENSVNVAIDHLSKDKPELEVVLTEDALKSLENQTYFKSFEENGKGSIINLETRLLQLESTVSAKDLELTQCYKQIKDMQEQGQFETEMLQKKIVNLQKIVEEKVAAALVSQIQLEAVQEYAKFCQDNQTISSEPERTNIQNLNQLREDELGSDISALTLRISELESQVVEMHTSLILEKEQVEIAEKNVLEKEKKLLELQKLLEGNEKKQREKEKKRSPQDVEVLKTTTELFHSNEESGFFNELEALRAESVATKAELASYKEKAEKLQEELLVKETNMTSLQKDLSQVRDHLAEAKEKLSILEKEDETEVQESKKACMFEPLPIKLSKSIASQTDGTLKISSSNQTPQILVKNAGIQINLQSECSSEEVTEIISQFTEKIEKMQELHAAEILDMESRHISETETLKREHYVAVQLLKEECGTLKAVIQCLRSKEGSSIPELAHSDAYQTREICSSDSGSDWGQGIYLTHSQGFDIASEGRGEESESATDSFPKKIKGLLRAVHNEGMQVLSLTESPYSDGEDHSIQQVSEPWLEERKAYINTISSLKDLITKMQLQREAEPEAVPHACNPSTLGGRGGWIT

SEQ ID NO: 9097 - protein, 2979 aa, Artificial Sequence
  Synthetic polypeptide
MEDEERQKKLEAGKAKIEELSLAFLVRQLAQFRQRKAQSDGQSPSKKQKKKRKTSSSKHDVSAHHDLNIDQSQCNEMYINSSQRVESTVIPESTIMRTLHSGEITSHEQGFSVELESEISTTADDCSSEVNGCSFVMRTGKPTNLLREEEFGVDDSYSEQGAQDSPTHLEMMESELAGKQHEIEELNRELEEMRVTYGTEGLQQLQEFEAAIKQRDGIITQLTANLQQARREKDETMREFLELTEQSQKLQIQFQQLQASETLRNSTHSSTAADLLQAKQQILTHQQQLEEQDHLLEDYQKKKEDFTMQISFLQEKIKVYEMEQDKKVENSNKEEIQEKETIIEELNTKIIEEEKKTLELKDKLTTADKLLGELQEQIVQKNQEIKNMKLELTNSKQKERQSSEEIKQLMGTVEELQKRNHKDSQFETDIVQRMEQETQRKLEQLRAELDEMYGQQIVQMKQELIRQHMAQMEEMKTRHKGEMENALRSYSNITVNEDQIKLMNVAINELNIKLQDTNSQKEKLKEELGLILEEKCALQRQLEDLVEELSFSREQIQRARQTIAEQESKLNEAHKSLSTVEDLKAEIVSASESRKELELKHEAEVTNYKIKLEMLEKEKNAVLDRMAESQEAELERLRTQLLFSHEEELSKLKEDLEIEHRINIEKLKDNLGIHYKQQIDGLQNEMSQKIETMQFEKDNLITKQNQLILEISKLKDLQQSLVNSKSEEMTLQINELQKEIEILRQEEKEKGTLEQEVQELQLKTELLEKQMKEKENDLQEKFAQLEAENSILKDEKKTLEDMLKIHTPVSQEERLIFLDSIKSKSKDSVWEKEIEILIEENEDLKQQCIQLNEEIEKQRNTFSFAEKNFEVNYQELQEEYACLLKVKDDLEDSKNKQELEYKSKLKALNEELHLQRINPTTVKMKSSVFDEDKTFVAETLEMGEVVEKDTTELMEKLEVTKREKLELSQRLSDLSEQLKQKHGEISFLNEEVKSLKQEKEQVSLRCRELEIIINHNRAENVQSCDTQVSSLLDGVVTMTSRGAEGSVSKVNKSFGEESKIMVEDKVSFENMTVGEESKQEQLILDHLPSVTKESSLRATQPSENDKLQKELNVLKSEQNDLRLQMEAQRICLSLVYSTHVDQVREYMENEKDKALCSLKEELIFAQEEKIKELQKIHQLELQTMKTQETGDEGKPLHLLIGKLQKAVSEECSYFLQTLCSVLGEYYTPALKCEVNAEDKENSGDYISENEDPELQDYRYEVQDFQENMHTLLNKVTEEYNKLLVLQTRLSKIWGQQTDGMKLEFGEENLPKEETEFLSIHSQMTNLEDIDVNHKSKLSSLQDLEKTKLEEQVQELESLISSLQQQLKETEQNYEAEIHCLQKRLQAVSESTVPPSLPVDSVVITESDAQRTMYPGSCVKKNIDGTIEFSGEFGVKEETNIVKLLEKQYQEQLEEEVAKVIVSMSIAFAQQTELSRISGGKENTASSKQAHAVCQQEQHYFNEMKLSQDQIGFQTFETVDVKFKEEFKPLSKELGEHGKEILLSNSDPHDIPESKDCVLTISEEMFSKDKTFIVRQSIHDEISVSSMDASRQLMLNEEQLEDMRQELVRQYQEHQQATELLRQAHMRQMERQREDQEQLQEEIKRLNRQLAQRSSIDNENLVSERERVLLEELEALKQLSLAGREKLCCELRNSSTQTQNGNENQGEVEEQTFKEKELDRKPEDVPPEILSNERYALQKANNRLLKILLEVVKTTAAVEETIGRHVLGILDRSSKSQSSASLIWRSEAEASVKSCVHEEHTRVTDESIPSYSGSDMPRNDINMWSKVTEEGTELSQRLVRSGFAGTEIDPENEELMLNISSRLQAAVEKLLEAISETSSQLEHAKVTQTELMRESFRQKQEATESLKCQEELRERLHEESRAREQLAVELSKAEGVIDGYADEKTLFERQIQEKTDIIDRLEQELLCASNRLQELEAEQQQIQEERELLSRQKEAMKAEAGPVEQQLLQETEKLMKEKLEVQCQAEKVRDDLQKQVKALEIDVEEQVSRFIELEQEKNTELMDLRQQNQALEKQLEKMRKFLDEQAIDREHERDVFQQEIQKLEQQLKVVPRFQPISEHQTREVEQLANHLKEKTDKCSELLLSKEQLQRDIQERNEEIEKLEFRVRELEQALLVSADTFQKVEDRKHFGAVEAKPELSLEVQLQAERDAIDRKEKEITNLEEQLEQFREELENKNEEVQQLHMQLEIQKKESTTRLQELEQENKLFKDDMEKLGLAIKESDAMSTQDQHVLFGKFAQIIQEKEVEIDQLNEQVTKLQQQLKITTDNKVIEEKNELIRDLETQIECLMSDQECVKRNREEEIEQLNEVIEKLQQELANIGQKTSMNAHSLSEEADSLKHQLDVVIAEKLALEQQVETANEEMTFMKNVLKETNFKMNQLTQELFSLKRERESVEKIQSIPENSVNVAIDHLSKDKPELEVVLTEDALKSLENQTYFKSFEENGKGSIINLETRLLQLESTVSAKDLELTQCYKQIKDMQEQGQFETEMLQKKIVNLQKIVEEKVAAALVSQIQLEAVQEYAKFCQDNQTISSEPERTNIQNLNQLREDELGSDISALTLRISELESQVVEMHTSLILEKEQVEIAEKNVLEKEKKLLELQKLLEGNEKKQREKEKKRSPQDVEVLKTTTELFHSNEESGFFNELEALRAESVATKAELASYKEKAEKLQEELLVKETNMTSLQKDLSQVRDHLAEAKEKLSILEKEDETEVQESKKACMFEPLPIKLSKSIASQTDGTLKISSSNQTPQILVKNAGIQINLQSECSSEEVTEIISQFTEKIEKMQELHAAEILDMESRHISETETLKREHYVAVQLLKEECGTLKAVIQCLRSKEGLLRAVHNEGMQVLSLTESPYSDGEDHSIQQVSEPWLEERKAYINTISSLKDLITKMQLQREAEPEAVPHACNPSTLGGRGGWIT

SEQ ID NO: 9098 - protein, 3033 aa, Artificial Sequence
  Synthetic polypeptide
MEDEERQKKLEAGKAKIEELSLAFLVRQLAQFRQRKAQSDGQSPSKKQKKKRKTSSSKHDVSAHHDLNIDQSQCNEMYINSSQRVESTVIPESTIMRTLHSGEITSHEQGFSVELESEISTTADDCSSEVNGCSFVMRTGKPTNLLREEEFGVDDSYSEQGAQDSPTHLEMMESELAGKQHEIEELNRELEEMRVTYGTEGLQQLQEFEAAIKQRDGIITQLTANLQQARREKDETMREFLELTEQSQKLQIQFQQLQASETLRNSTHSSTAADLLQAKQQILTHQQQLEEQDHLLEDYQKKKEDFTMQISFLQEKIKVYEMEQDKKVENSNKEEIQEKETIIEELNTKIIEEEKKTLELKDKLTTADKLLGELQEQIVQKNQEIKNMKLELTNSKQKERQSSEEIKQLMGTVEELQKRNHKDSQFETDIVQRMEQETQRKLEQLRAELDEMYGQQIVQMKQELIRQHMAQMEEMKTRHKGEMENALRSYSNITVNEDQIKLMNVAINELNIKLQDTNSQKEKLKEELGLILEEKCALQRQLEDLVEELSFSREQIQRARQTIAEQESKLNEAHKSLSTVEDLKAEIVSASESRKELELKHEAEVTNYKIKLEMLEKEKNAVLDRMAESQEAELERLRTQLLFSHEEELSKLKEDLEIEHRINIEKLKDNLGIHYKQQIDGLQNEMSQKIETMQFEKDNLITKQNQLILEISKLKDLQQSLVNSKSEEMTLQINELQKEIEILRQEEKEKGTLEQEVQELQLKTELLEKQMKEKENDLQEKFAQLEAENSILKDEKKTLEDMLKIHTPVSQEERLIFLDSIKSKSKDSVWEKEIEILIEENEDLKQQCIQLNEEIEKQRNTFSFAEKNFEVNYQELQEEYACLLKVKDDLEDSKNKQELEYKSKLKALNEELHLQRINPTTVKMKSSVFDEDKTFVAETLEMGEVVEKDTTELMEKLEVTKREKLELSQRLSDLSEQLKQKHGEISFLNEEVKSLKQEKEQVSLRCRELEIIINHNRAENVQSCDTQVSSLLDGVVTMTSRGAEGSVSKVNKSFGEESKIMVEDKVSFENMTVGEESKQEQLILDHLPSVTKESSLRATQPSENDKLQKELNVLKSEQNDLRLQMEAQRICLSLVYSTHVDQVREYMENEKDKALCSLKEELIFAQEEKIKELQKIHQLELQTMKTQETGDEGKPLHLLIGKLQKAVSEECSYFLQTLCSVLGEYYTPALKCEVNAEDKENSGDYISENEDPELQDYRYEVQDFQENMHTLLNKVTEEYNKLLVLQTRLSKIWGQQTDGMKLEFGEENLPKEETEFLSIHSQMTNLEDIDVNHKSKLSSLQDLEKTKLEEQVQELESLISSLQQQLKETEQNYEAEIHCLQKRLQAVSESTVPPSLPVDSVVITESDAQRTMYPGSCVKKNIDGTIEFSGEFGVKEETNIVKLLEKQYQEQLEEEVAKVIVSMSIAFAQQTELSRISGGKENTASSKQAHAVCQQEQHYFNEMKLSQDQIGFQTFETVDVKFKEEFKPLSKELGEHGKEILLSNSDPHDIPESKDCVLTISEEMFSKDKTFIVRQSIHDEISVSSMDASRQLMLNEEQLEDMRQELVRQYQEHQQATELLRQAHMRQMERQREDQEQLQEEIKRLNRQLAQRSSIDNENLVSERERVLLEELEALKQLSLAGREKLCCELRNSSTQTQNGNENQGEVEEQTFKEKELDRKPEDVPPEILSNERYALQKANNRLLKILLEVVKTTAAVEETIGRHVLGILDRSSKSQSSASLIWRSEAEASVKSCVHEEHTRVTDESIPSYSGSDMPRNDINMWSKVTEEGTELSQRLVRSGFAGTEIDPENEELMLNISSRLQAAVEKLLEAISETSSQLEHAKVTQTELMRESFRQKQEATESLKCQEELRERLHEESRAREQLAVELSKAEGVIDGYADEKTLFERQIQEKTDIIDRLEQELLCASNRLQELEAEQQQIQEERELLSRQKEAMKAEAGPVEQQLLQETEKLMKEKLEVQCQAEKVRDDLQKQVKALEIDVEEQVSRFIELEQEKNTELMDLRQQNQALEKQLEKMRKFLDEQAIDREHERDVFQQEIQKLEQQLKVVPRFQPISEHQTREVEQLANHLKEKTDKCSELLLSKEQLQRDIQERNEEIEKLEFRVRELEQALLVSADTFQKVEDRKHFGAVEAKPELSLEVQLQAERDAIDRKEKEITNLEEQLEQFREELENKNEEVQQLHMQLEIQKKESTTRLQELEQENKLFKDDMEKLGLAIKESDAMSTQDQHVLFGKFAQIIQEKEVEIDQLNEQVTKLQQQLKITTDNKVIEEKNELIRDLETQIECLMSDQECVKRNREEEIEQLNEVIEKLQQELANIGQKTSMNAHSLSEEADSLKHQLDVVIAEKLALEQQVETANEEMTFMKNVLKETNFKMNQLTQELFSLKRERESVEKIQSIPENSVNVAIDHLSKDKPELEVVLTEDALKSLENQTYFKSFEENGKGSIINLETRLLQLESTVSAKDLELTQCYKQIKDMQEQGQFETEMLQKKIVNLQKIVEEKVAAALVSQIQLEAVQEYAKFCQDNQTISSEPERTNIQNLNQLREDELGSDISALTLRISELESQVVEMHTSLILEKEQVEIAEKNVLEKEKKLLELQKLLEGNEKKQREKEKKRSPQDVEVLKTTTELFHSNEESGFFNELEALRAESVATKAELASYKEKAEKLQEELLVKETNMTSLQKDLSQVRDHLAEAKEKLSILEKEDETEVQESKKACMFEPLPIKLSKSIASQTDGTLKISSSNQTPQILVKNAGIQINLQSECSSEEVTEIISQFTEKIEKMQELHAAEILDMESRHISETETLKREHYVAVQLLKEECGTLKAVIQCLRSKEVFGFYNMCFSTLCDSGSDWGQGIYLTHSQGFDIASEGRGEESESATDSFPKKIKGLLRAVHNEGMQVLSLTESPYSDGEDHSIQQVSEPWLEERKAYINTISSLKDLITKMQLQREAEPEAVPHACNPSTLGGRGGWIT

SEQ ID NO: 9099 - protein, 875 aa, Artificial Sequence
  Synthetic polypeptide
EKLEFRVRELEQALLVEDRKHFGAVEAKPELSLEVQLQAERDAIDRKEKEITNLEEQLEQFREELENKNEEVQQLHMQLEIQKKESTTRLQELEQENKLFKDDMEKLGLAIKESDAMSTQDQHVLFGKFAQIIQEKEVEIDQLNEQVTKLQQQLKITTDNKVIEEKNELIRDLETQIECLMSDQECVKRNREEEIEQLNEVIEKLQQELANIGQKTSMNAHSLSEEADSLKHQLDVVIAEKLALEQQVETANEEMTFMKNVLKETNFKMNQLTQELFSLKRERESVEKIQSIPENSVNVAIDHLSKDKPELEVVLTEDALKSLENQTYFKSFEENGKGSIINLETRLLQLESTVSAKDLELTQCYKQIKDMQEQGQFETEMLQKKIVNLQKIVEEKVAAALVSQIQLEAVQEYAKFCQDNQTISSEPERTNIQNLNQLREDELGSDISALTLRISELESQVVEMHTSLILEKEQVEIAEKNVLEKEKKLLELQKLLEGNEKKQREKEKKRSPQDVEVLKTTTELFHSNEESGFFNELEALRAESVATKAELASYKEKAEKLQEELLVKETNMTSLQKDLSQVRDHLAEAKEKLSILEKEDETEVQESKKACMFEPLPIKLSKSIASQTDGTLKISSSNQTPQILVKNAGIQINLQSECSSEEVTEIISQFTEKIEKMQELHAAEILDMESRHISETETLKREHYVAVQLLKEECGTLKAVIQCLRSKEGSSIPELAHSDAYQTREICSSDSGSDWGQGIYLTHSQGFDIASEGRGEESESATDSFPKKIKGLLRAVHNEGMQVLSLTESPYSDGEDHSIQQVSEPWLEERKAYINTISSLKDLITKMQLQREAEPEAVPHACNPSTLGGRGGWIT

SEQ ID NO: 9100 - protein, 8 aa, Artificial Sequence
  Synthetic polypeptide
NTMLPFSY

SEQ ID NO: 9101 - protein, 340 aa, Artificial Sequence
  Synthetic polypeptide
MGNPENIEDAYVAVIRPKNTASLNSREYRAKSYEILLHEVPIEGQKKKRKKVLLETKLQGNSEITQGILDYVVETTKPISPANQGIRGKRVVLMKKFPLDGEKMGREASLFIVPSVVKDNTKYTYTPGCPIFYCLQDIMRVCSESSTHFATLTARMLIALDKWLDERHAQSHFIPALFRPSPLERIKTNVINPAYATESGQTENSLHMGYSALEIKSKMLALEKADTCIYNPLFGSDLQYTNRVDKVVINPYFGLGAPDYSKIQIPKQEKWQRSMSSVTEDKERQWVDDFPLHRSACEGDSELLSRLLSERFSVNQLDSDHWAPIHYACWTMDGAGDHYF

SEQ ID NO: 9102 - protein, 102 aa, Artificial Sequence
  Synthetic polypeptide
MLLNQVDKVVINPYFGLGAPDYSKIQIPKQEKWQRSMSSVTEDKERQWVDDFPLHRSACEGDSELLSRLLSERFSVNQLDSDHWAPIHYACWTMDGAGDHYF

SEQ ID NO: 9103 - protein, 34 aa, Artificial Sequence
  Synthetic polypeptide
MNPIAMARSRGPIQSSGPTIQDYLNRPRPTCWMW

SEQ ID NO: 9104 - protein, 44 aa, Artificial Sequence
  Synthetic polypeptide
MGKRDNRVAYMNPIAMARSRGPIQSSGPTIQDYLNRPRPTCWMW

SEQ ID NO: 9105 - protein, 198 aa, Artificial Sequence
  Synthetic polypeptide
MQKIKSLMTRQGLKSPQESLSDLGAIESLRVPGKEEFRELREQPSDPQAEQELINSIEQVYFSVDSFDIVKYELEKLPPVLNLQELEAYRDKLKQQQAAVSKKVADLILEKQPAYVKELERVTSLQTGLQLAAVICTNGRRHLNIAKEGFTQASLGLLANQRKRQLLIGLLKSLRTIKTLQRTDVRLSEMLEVHQSIM

SEQ ID NO: 9106 - protein, 9 aa, Artificial Sequence
  Synthetic polypeptide
MLEVHQSIM

SEQ ID NO: 9107 - protein, 168 aa, Artificial Sequence
  Synthetic polypeptide
MLTLEEFRELREQPSDPQAEQELINSIEQVYFSVDSFDIVKYELEKLPPVLNLQELEAYRDKLKQQQAAVSKKVADLILEKQPAYVKELERVTSLQTGLQLAAVICTNGRRHLNIAKEGFTQASLGLLANQRKRQLLIGLLKSLRTIKTLQRTDVRLSEMLEVHQSIM

SEQ ID NO: 9108 - protein, 161 aa, Artificial Sequence
  Synthetic polypeptide
MDPARPLGLSILLLFLTEAALGDAAQEPTGNNAEICLLPLDYGPCRALLLRYYYDRYTQSCRQFLYGGCEGNANNFYTWEACDDACWRIEKVPKVCRLQVSVDDQCEGSTEKYFFNLSSMTCEKFFSGGCHRNRIENRFPDEATCMGFCAPKKRLRPIVAS

SEQ ID NO: 9109 - protein, 82 aa, Artificial Sequence
  Synthetic polypeptide
EACDDACWRIEKVPKVCRLQVSVDDQCEGSTEKYFFNLSSMTCEKFFSGGCHRNRIENRFPDEATCMGFCAPKKRLRPIVAS

SEQ ID NO: 9110 - protein, 98 aa, Artificial Sequence
  Synthetic polypeptide
MDPARPLGLSILLLFLTEAALGDAAQEPTGNNAEICLLPLDYGPCRALLLRYYYDRYTQSCRQFLYGGCEGNANNFYTWEACDDACWRIERLRPIVAS

SEQ ID NO: 9111 - protein, 19 aa, Artificial Sequence
  Synthetic polypeptide
EACDDACWRIERLRPIVAS

SEQ ID NO: 9112 - protein, 151 aa, Artificial Sequence
  Synthetic polypeptide
MQLPRWWELGDPCAWTGQGRGTRRMSPATTGTFLLTVYSIFSKVHSDRNVYPSAGVLFVHVLEREYFKGEFPPYPKPGEISNDPITFNTNLMGYPDRPGWLRYIQRTPYSDGVLYGSPTAENVGKPTIIENVLEVPASTVKKEKEIKSLRI

SEQ ID NO: 9113 - protein, 110 aa, Artificial Sequence
  Synthetic polypeptide
MQLPRWWELGDPCAWTGQGRGTRRMSPATTGTFLLTGEISNDPITFNTNLMGYPDRPGWLRYIQRTPYSDGVLYGSPTAENVGKPTIIENVLEVPASTVKKEKEIKSLRI

SEQ ID NO: 9114 - protein, 187 aa, Artificial Sequence
  Synthetic polypeptide
MQLPRWWELGDPCAWTGQGRGTRRMSPATTGTFLLTAFLLSCADGINGTVNWKTRQANNFIISRKMAAGMKDVYSIFSKVHSDRNVYPSAGVLFVHVLEREYFKGEFPPYPKPGEISNDPITFNTNLMGYPDRPGWLRYIQRTPYSDGVLYGSPTAENVGKPTIIENVLEVPASTVKKEKEIKSLRI

SEQ ID NO: 9115 - protein, 722 aa, Artificial Sequence
  Synthetic polypeptide
MLKTESSGERTTLRSASPHRNAYRTEFQALKSTFDKPKSDGEQKTKEGEGSQQSRGRKYGSNVNRIKNLFMQMGMEPNENAAVIAKTRGKGGHSSPQRRMKPKEFLEKTDGSVVKLESSVSERISRFDTMYDGPSYSKFTETRKMFERSVHESGQNNRYSPKKEKAGGSEPQDEWGGSKSNRGSTDSLDSLSSRTEAVSPTVSQLSAVFENTDSPSAIISEKAENNEYSVTGHYPLNLPSVTVTNLDTFGHLKDSNSWPPSNKRGVDTEDAHKSNATPVPEVASKSTSLASIPGEEIQQSKEPEDSTSNQQTPDSIDKDGPEEPCAESKAMPKSEIPSPQSQLLEDAEANLVGREAAKQQRKELAGGDFTSPDASASSCGKEVPEDSNNFDGSHVYMHSDYNVYRVRSRYNSDWGETGTEQDEEEDSDENSYYQPDMEYSEIVGLPEEEEIPANRKIKFSSAPIKVFNTYSNEDYDRRNDEVDPVAASAEYELEKRVEKLELFPVELEKDEDGLGISIIGMGVGADAGLEKLGIFVKTVTEGGAAQRDGRIQVNDQIVEVDGISLVGVTQNFAATVLRNTKGNVRFVIGREKPGQVSEVAQLISQTLEQERRQRELLEQHYAQYDADDDENTVAELQGMSGNCNNNNNYFLKTGEYATDEEEDEVGPVLPGSDMAIEVFELPENEDMFSPSELDTSKLSHKFKESASKDPAVDNKQFVEDTS

SEQ ID NO: 9116 - protein, 700 aa, Artificial Sequence
  Synthetic polypeptide
MLKTESSGERTTLRSASPHRNAYRTEFQALKSTFDKPKSDGEQKTKEGEGSQQSRGRKYGSNVNRIKNLFMQMGMEPNENAAVIAKTRGKGGHSSPQRRMKPKEFLEKTDGSVVKLESSVSERISRFDTMYDGPSYSKFTETRKMFERSVHESGQNNRYSPKKEKAGGSEPQDEWGGSKSNRGSTDSLDSLSSRTEAVSPTVSQLSAVFENTDSPSAIISEKAENNEYSVTGHYPLNLPSVTVTNLDTFGHLKDSNSWPPSNKRGVDTEDAHKSNATPVPEVASKSTSLASIPGEEIQQSKEPEDSTSNQQTPDSIDKDGPEEPCAESKAMPKSEIPSPQSQLLEDAEANLVGREAAKQQRKELAGGDFTSPDASASSCGKEVPEDSNNFDGSHVYMHSDYNVYRVRSRYNSDWGETGTEQDEEEDSDENSYYQPDMEYSEIVGLPEEEEIPANRKIKFSSAPIKVFNTYSNEDYDRRNDEVDPVAASAEYELEKRVEKLELFPVELEKDEDGLGISIIGMGVGADAGLEKLGIFVKTVTEGGAAQRDGRIQVNDQIVEVDGISLVGVTQNFAATVLRNTKGNVRFVIGREKPGQVSEVAQLISQTLEQERRQRELLEQHYAQYDADDDETGEYATDEEEDEVGPVLPGSDMAIEVFELPENEDMFSPSELDTSKLSHKFKESASKDPAVDNKQFVEDTS

SEQ ID NO: 9117 - protein, 48 aa, Artificial Sequence
  Synthetic polypeptide
MAPPTELLARPERGSAPGSRAMGRLVAVGLLGIALALLGERLLALRVV

SEQ ID NO: 9118 - protein, 27 aa, Artificial Sequence
  Synthetic polypeptide
MGRLVAVGLLGIALALLGERLLALRVV

SEQ ID NO: 9119 - protein, 171 aa, Artificial Sequence
  Synthetic polypeptide
MDGTTAPVTKSGAAKLVKRNFLEALKSNDFGKLKAILIQRQIDVDTVFEVEDENMVLASYKQGYWLPSYKLKSSWATGLHLSVLFGHVECLLVLLDHNATINCRPNGKTPLHVACEMANVDCVKILCDRGAKLNCYSLSGHTALHFCTTPSSILCAKQLVWRVSSALSWRS

SEQ ID NO: 9120 - protein, 177 aa, Artificial Sequence
  Synthetic polypeptide
MDGTTAPVTKSGAAKLVKRNFLEALKSNDFGKLKAILIQRQIDVDTVFEVEDENMVLASYKQGYWLPSYKLKSSWATGLHLSVLFGHVECLLVLLDHNATINCRPNGKTPLHVACEMANVDCVKILCDRGAKLNCYSLSGHTALHFCTTPSSILCAKQLVWRAAQFVVTCDSSNKKL

SEQ ID NO: 9121 - protein, 367 aa, Artificial Sequence
  Synthetic polypeptide
MDGTTAPVTKSGAAKLVKRNFLEALKSNDFGKLKAILIQRQIDVDTVFEVEDENMVLASYKQGYWLPSYKLKSSWATGLHLSVLFGHVECLLVLLDHNATINCRPNGKTPLHVACEMANVDCVKILCDRGAKLNCYSLSGHTALHFCTTPSSILCAKQLVWRGANVNMKTNNQDEETPLHTAAHFGLSELVAFYVEHGAIVDSVNAHMETPLAIAAYWALRFKEQEYSTEHHLVCRMLLDYKAEVNARDDDFKSPLHKAAWNCDHVLMHMMLEAGAEANLMDINGCAAIQYVLKVTSVRPAAQPEICYQLLLNHGAARIYPPQFHKVIQACHSCPKAIEVVVNAYEHIRWNTKWRRAIPDDDLEGSD

SEQ ID NO: 9122 - protein, 9 aa, Artificial Sequence
  Synthetic polypeptide
MAAAKILNS

SEQ ID NO: 9123 - protein, 57 aa, Artificial Sequence
  Synthetic polypeptide
MPGPPALRRRLLLLLLVLLIAGSAGAAPLPQTGAGSHNLGLILRRHWVAQIERHSTK

SEQ ID NO: 9124 - protein, 3554 aa, Artificial Sequence
  Synthetic polypeptide
MAFVATQGATVVDQTTLMKKYLQFVAALTDVNTPDETKLKMMQEVSENFENVTSSPQYSTFLEHIIPRFLTFLQDGEVQFLQEKPAQQLRKLVLEIIHRIPTNEHLRPHTKNVLSVMFRFLETENEENVLICLRIIIELHKQFRPPITQEIHHFLDFVKQIYKELPKVVNRYFENPQVIPENTVPPPEMVGMITTIAVKVNPEREDSETRTHSIIPRGSLSLKVLAELPIIVVLMYQLYKLNIHNVVAEFVPLIMNTIAIQVSAQARQHKLYNKELYADFIAAQIKTLSFLAYIIRIYQELVTKYSQQMVKGMLQLLSNCPAETAHLRKELLIAAKHILTTELRNQFIPCMDKLFDESILIGSGYTARETLRPLAYSTLADLVHHVRQHLPLSDLSLAVQLFAKNIDDESLPSSIQTMSCKLLLNLVDCIRSKSEQESGNGRDVLMRMLEVFVLKFHTIARYQLSAIFKKCKPQSELGAVEAALPGVPTAPAAPGPAPSPAPVPAPPPPPPPPPPATPVTPAPVPPFEKQGEKDKEDKQTFQVTDCRSLVKTLVCGVKTITWGITSCKAPGEAQFIPNKQLQPKETQIYIKLVKYAMQALDIYQVQIAGNGQTYIRVANCQTVRMKEEKEVLEHFAGVFTMMNPLTFKEIFQTTVPYMVERISKNYALQIVANSFLANPTTSALFATILVEYLLDRLPEMGSNVELSNLYLKLFKLVFGSVSLFAAENEQMLKPHLHKIVNSSMELAQTAKEPYNYFLLLRALFRSIGGGSHDLLYQEFLPLLPNLLQGLNMLQSGLHKQHMKDLFVELCLTVPVRLSSLLPYLPMLMDPLVSALNGSQTLVSQGLRTLELCVDNLQPDFLYDHIQPVRAELMQALWRTLRNPADSISHVAYRVLGKFGGSNRKMLKESQKLHYVVTEVQGPSITVEFSDCKASLQLPMEKAIETALDCLKSANTEPYYRRQAWEVIKCFLVAMMSLEDNKHALYQLLAHPNFTEKTIPNVIISHRYKAQDTPARKTFEQALTGAFMSAVIKDLRPSALPFVASLIRHYTMVAVAQQCGPFLLPCYQVGSQPSTAMFHSEENGSKGMDPLVLIDAIAICMAYEEKELCKIGEVALAVIFDVASIILGSKERACQLPLFSYIVERLCACCYEQAWYAKLGGVVSIKFLMERLPLTWVLQNQQTFLKALLFVMMDLTGEVSNGAVAMAKTTLEQLLMRCATPLKDEERAEEIVAAQEKSFHHVTHDLVREVTSPNSTVRKQAMHSLQVLAQVTGKSVTVIMEPHKEVLQDMVPPKKHLLRHQPANAQIGLMEGNTFCTTLQPRLFTMDLNVVEHKVFYTELLNLCEAEDSALTKLPCYKSLPSLVPLRIAALNALAACNYLPQSREKIIAALFKALNSTNSELQEAGEACMRKFLEGATIEVDQIHTHMRPLLMMLGDYRSLTLNVVNRLTSVTRLFPNSFNDKFCDQMMQHLRKWMEVVVITHKGGQRSDGNEMKICSAIINLFHLIPAAPQTLVKPLLEVVMKTERAMLIEAGSPFREPLIKFLTRHPSQTVELFMMEATLNDPQWSRMFMSFLKHKDARPLRDVLAANPNRFITLLLPGGAQTAVRPGSPSTSTMRLDLQFQAIKIISIIVKNDDSWLASQHSLVSQLRRVWVSENFQERHRKENMAATNWKEPKLLAYCLLNYCKRNYGDIELLFQLLRAFTGRFLCNMTFLKEYMEEEIPKNYSIAQKRALFFRFVDFNDPNFGDELKAKVLQHILNPAFLYSFEKGEGEQLLGPPNPEGDNPESITSVFITKVLDPEKQADMLDSLRIYLLQYATLLVEHAPHHIHDNNKNRNSKLRRLMTFAWPCLLSKACVDPACKYSGHLLLAHIIAKFAIHKKIVLQVFHSLLKAHAMEARAIVRQAMAILTPAVPARMEDGHQMLTHWTRKIIVEEGHTVPQLVHILHLIVQHFKVYYPVRHHLVQHMVSAMQRLGFTPSVTIEQRRLAVDLSEVVIKWELQRIKDQQPDSDMDPNSSGEGVNSVSSSIKRGLSVDSAQEVKRFRTATGAISAVFGRSQSLPGADSLLAKPIDKQHTDTVVNFLIRVACQVNDNTNTAGSPGEVLSRRCVNLLKTALRPDMWPKSELKLQWFDKLLMTVEQPNQVNYGNICTGLEVLSFLLTVLQSPAILSSFKPLQRGIAACMTCGNTKVLRAVHSLLSRLMSIFPTEPSTSSVASKYEELECLYAAVGKVIYEGLTNYEKATNANPSQLFGTLMILKSACSNNPSYIDRLISVFMRSLQKMVREHLNPQAASGSTEATSGTSELVMLSLELVKTRLAVMSMEMRKNFIQAILTSLIEKSPDAKILRAVVKIVEEWVKNNSPMAANQTPTLREKSILLVKMMTYIEKRFPEDLELNAQFLDLVNYVYRDETLSGSELTAKLEPAFLSGLRCAQPLIRAKFFEVFDNSMKRRVYERLLYVTCSQNWEAMGNHFWIKQCIELLLAVCEKSTPIGTSCQGAMLPSITNVINLADSHDRAAFAMVTHVKQEPRERENSESKEEDVEIDIELAPGDQTSTPKTKELSEKDIGNQLHMLTNRHDKFLDTLREVKTGALLSAFVQLCHISTTLAEKTWVQLFPRLWKILSDRQQHALAGEISPFLCSGSHQVQRDCQPSALNCFVEAMSQCVPPIPIRPCVLKYLGKTHNLWFRSTLMLEHQAFEKGLSLQIKPKQTTEFYEQESITPPQQEILDSLAELYSLLQEEDMWAGLWQKRCKYSETATAIAYEQHGFFEQAQESYEKAMDKAKKEHERSNASPAIFPEYQLWEDHWIRCSKELNQWEALTEYGQSKGHINPYLVLECAWRVSNWTAMKEALVQVEVSCPKEMAWKVNMYRGYLAICHPEEQQLSFIERLVEMASSLAIREWRRLPHVVSHVHTPLLQAAQQIIELQEAAQINAGLQPTNLGRNNSLHDMKTVVKTWRNRLPIVSDDLSHWSSIFMWRQHHYQAIVTAYENSSQHDPSSNNAMLGVHASASAIIQYGKIARKQGLVNVALDILSRIHTIPTVPIVDCFQKIRQQVKCYLQLAGVMGKNECMQGLEVIESTNLKYFTKEMTAEFYALKGMFLAQINKSEEANKAFSAAVQMHDVLVKAWAMWGDYLENIFVKERQLHLGVSAITCYLHACRHQNESKSRKYLAKVLWLLSFDDDKNTLADAVDKYCIGVPPIQWLAWIPQLLTCLVGSEGKLLLNLISQVGRVYPQAVYFPIRTLYLTLKIEQRERYKSDPGPIRATAPMWRCSRIMHMQRELHPTLLSSLEGIVDQMVWFRENWHEEVLRQLQQGLAKCYSVAFEKSGAVSDAKITPHTLNFVKKLVSTFGVGLENVSNVSTMFSSAASESLARRAQATAQDPVFQKLKGQFTTDFDFSVPGSMKLHNLISKLKKWIKILEAKTKQLPKFFLIEEKCRFLSNFSAQTAEVEIPGEFLMPKPTHYYIKIARFMPRVEIVQKHNTAARRLYIRGHNGKIYPYLVMNDACLTESRREERVLQLLRLLNPCLEKRKETTKRHLFFTAHHLSCQCILCVA

SEQ ID NO: 9125 - protein, 3583 aa, Artificial Sequence
  Synthetic polypeptide
MAFVATQGATVVDQTTLMKKYLQFVAALTDVNTPDETKLKMMQEVSENFENVTSSPQYSTFLEHIIPRFLTFLQDGEVQFLQEKPAQQLRKLVLEIIHRIPTNEHLRPHTKNVLSVMFRFLETENEENVLICLRIIIELHKQFRPPITQEIHHFLDFVKQIYKELPKVVNRYFENPQVIPENTVPPPEMVGMITTIAVKVNPEREDSETRTHSIIPRGSLSLKVLAELPIIVVLMYQLYKLNIHNVVAEFVPLIMNTIAIQVSAQARQHKLYNKELYADFIAAQIKTLSFLAYIIRIYQELVTKYSQQMVKGMLQLLSNCPAETAHLRKELLIAAKHILTTELRNQFIPCMDKLFDESILIGSGYTARETLRPLAYSTLADLVHHVRQHLPLSDLSLAVQLFAKNIDDESLPSSIQTMSCKLLLNLVDCIRSKSEQESGNGRDVLMRMLEVFVLKFHTIARYQLSAIFKKCKPQSELGAVEAALPGVPTAPAAPGPAPSPAPVPAPPPPPPPPPPATPVTPAPVPPFEKQGEKDKEDKQTFQVTDCRSLVKTLVCGVKTITWGITSCKAPGEAQFIPNKQLQPKETQIYIKLVKYAMQALDIYQVQIAGNGQTYIRVANCQTVRMKEEKEVLEHFAGVFTMMNPLTFKEIFQTTVPYMVERISKNYALQIVANSFLANPTTSALFATILVEYLLDRLPEMGSNVELSNLYLKLFKLVFGSVSLFAAENEQMLKPHLHKIVNSSMELAQTAKEPYNYFLLLRALFRSIGGGSHDLLYQEFLPLLPNLLQGLNMLQSGLHKQHMKDLFVELCLTVPVRLSSLLPYLPMLMDPLVSALNGSQTLVSQGLRTLELCVDNLQPDFLYDHIQPVRAELMQALWRTLRNPADSISHVAYRVLGKFGGSNRKMLKESQKLHYVVTEVQGPSITVEFSDCKASLQLPMEKAIETALDCLKSANTEPYYRRQAWEVIKCFLVAMMSLEDNKHALYQLLAHPNFTEKTIPNVIISHRYKAQDTPARKTFEQALTGAFMSAVIKDLRPSALPFVASLIRHYTMVAVAQQCGPFLLPCYQVGSQPSTAMFHSEENGSKGMDPLVLIDAIAICMAYEEKELCKIGEVALAVIFDVASIILGSKERACQLPLFSYIVERLCACCYEQAWYAKLGGVVSIKFLMERLPLTWVLQNQQTFLKALLFVMMDLTGEVSNGAVAMAKTTLEQLLMRCATPLKDEERAEEIVAAQEKSFHHVTHDLVREVTSPNSTVRKQAMHSLQVLAQVTGKSVTVIMEPHKEVLQDMVPPKKHLLRHQPANAQIGLMEGNTFCTTLQPRLFTMDLNVVEHKVFYTELLNLCEAEDSALTKLPCYKSLPSLVPLRIAALNALAACNYLPQSREKIIAALFKALNSTNSELQEAGEACMRKFLEGATIEVDQIHTHMRPLLMMLGDYRSLTLNVVNRLTSVTRLFPNSFNDKFCDQMMQHLRKWMEVVVITHKGGQRSDGNESISECGRCPLSPFCQFEEMKICSAIINLFHLIPAAPQTLVKPLLEVVMKTERAMLIEAGSPFREPLIKFLTRHPSQTVELFMMEATLNDPQWSRMFMSFLKHKDARPLRDVLAANPNRFITLLLPGGAQTAVRPGSPSTSTMRLDLQFQAIKIISIIVKNDDSWLASQHSLVSQLRRVWVSENFQERHRKENMAATNWKEPKLLAYCLLNYCKRNYGDIELLFQLLRAFTGRFLCNMTFLKEYMEEEIPKNYSIAQKRALFFRFVDFNDPNFGDELKAKVLQHILNPAFLYSFEKGEGEQLLGPPNPEGDNPESITSVFITKVLDPEKQADMLDSLRIYLLQYATLLVEHAPHHIHDNNKNRNSKLRRLMTFAWPCLLSKACVDPACKYSGHLLLAHIIAKFAIHKKIVLQVFHSLLKAHAMEARAIVRQAMAILTPAVPARMEDGHQMLTHWTRKIIVEEGHTVPQLVHILHLIVQHFKVYYPVRHHLVQHMVSAMQRLGFTPSVTIEQRRLAVDLSEVVIKWELQRIKDQQPDSDMDPNSSGEGVNSVSSSIKRGLSVDSAQEVKRFRTATGAISAVFGRSQSLPGADSLLAKPIDKQHTDTVVNFLIRVACQVNDNTNTAGSPGEVLSRRCVNLLKTALRPDMWPKSELKLQWFDKLLMTVEQPNQVNYGNICTGLEVLSFLLTVLQSPAILSSFKPLQRGIAACMTCGNTKVLRAVHSLLSRLMSIFPTEPSTSSVASKYEELECLYAAVGKVIYEGLTNYEKATNANPSQLFGTLMILKSACSNNPSYIDRLISVFMRSLQKMVREHLNPQAASGSTEATSGTSELVMLSLELVKTRLAVMSMEMRKNFIQAILTSLIEKSPDAKILRAVVKIVEEWVKNNSPMAANQTPTLREKSILLVKMMTYIEKRFPEDLELNAQFLDLVNYVYRDETLSGSELTAKLEPAFLSGLRCAQPLIRAKFFEVFDNSMKRRVYERLLYVTCSQNWEAMGNHFWIKQCIELLLAVCEKSTPIGTSCQGAMLPSITNVINLADSHDRAAFAMVTHVKQEPRERENSESKEEDVEIDIELAPGDQTSTPKTKELSEKDIGNQLHMLTNRHDKFLDTLREVKTGALLSAFVQLCHISTTLAEKTWVQLFPRLWKILSDRQQHALAGEISPFLCSGSHQVQRDCQPSALNCFVEAMSQCVPPIPIRPCVLKYLGKTHNLWFRSTLMLEHQAFEKGLSLQIKPKQTTEFYEQESITPPQQEILDSLAELYSLLQEEDMWAGLWQKRCKYSETATAIAYEQHGFFEQAQESYEKAMDKAKKEHERSNASPAIFPEYQLWEDHWIRCSKELNQWEALTEYGQSKGHINPYLVLECAWRVSNWTAMKEALVQVEVSCPKEMAWKVNMYRGYLAICHPEEQQLSFIERLVEMASSLAIREWRRLPHVVSHVHTPLLQAAQQIIELQEAAQINAGLQPTNLGRNNSLHDMKTVVKTWRNRLPIVSDDLSHWSSIFMWRQHHYQGKPTWSGMHSSSIVTAYENSSQHDPSSNNAMLGVHASASAIIQYGKIARKQGLVNVALDILSRIHTIPTVPIVDCFQKIRQQVKCYLQLAGVMGKNECMQGLEVIESTNLKYFTKEMTAEFYALKGMFLAQINKSEEANKAFSAAVQMHDVLVKAWAMWGDYLENIFVKERQLHLGVSAITCYLHACRHQNESKSRKYLAKVLWLLSFDDDKNTLADAVDKYCIGVPPIQWLAWIPQLLTCLVGSEGKLLLNLISQVGRVYPQAVYFPIRTLYLTLKIEQRERYKSDPGPIRATAPMWRCSRIMHMQRELHPTLLSSLEGIVDQMVWFRENWHEEVLRQLQQGLAKCYSVAFEKSGAVSDAKITPHTLNFVKKLVSTFGVGLENVSNVSTMFSSAASESLARRAQATAQDPVFQKLKGQFTTDFDFSVPGSMKLHNLISKLKKWIKILEAKTKQLPKFFLIEEKCRFLSNFSAQTAEVEIPGEFLMPKPTHYYIKIARFMPRVEIVQKHNTAARRLYIRGHNGKIYPYLVMNDACLTESRREERVLQLLRLLNPCLEKRKETTKRHLFFTAHHLSCQCILCVA

SEQ ID NO: 9126 - protein, 3572 aa, Artificial Sequence
  Synthetic polypeptide
MAFVATQGATVVDQTTLMKKYLQFVAALTDVNTPDETKLKMMQEVSENFENVTSSPQYSTFLEHIIPRFLTFLQDGEVQFLQEKPAQQLRKLVLEIIHRIPTNEHLRPHTKNVLSVMFRFLETENEENVLICLRIIIELHKQFRPPITQEIHHFLDFVKQIYKELPKVVNRYFENPQVIPENTVPPPEMVGMITTIAVKVNPEREDSETRTHSIIPRGSLSLKVLAELPIIVVLMYQLYKLNIHNVVAEFVPLIMNTIAIQVSAQARQHKLYNKELYADFIAAQIKTLSFLAYIIRIYQELVTKYSQQMVKGMLQLLSNCPAETAHLRKELLIAAKHILTTELRNQFIPCMDKLFDESILIGSGYTARETLRPLAYSTLADLVHHVRQHLPLSDLSLAVQLFAKNIDDESLPSSIQTMSCKLLLNLVDCIRSKSEQESGNGRDVLMRMLEVFVLKFHTIARYQLSAIFKKCKPQSELGAVEAALPGVPTAPAAPGPAPSPAPVPAPPPPPPPPPPATPVTPAPVPPFEKQGEKDKEDKQTFQVTDCRSLVKTLVCGVKTITWGITSCKAPGAQFIPNKQLQPKETQIYIKLVKYAMQALDIYQVQIAGNGQTYIRVANCQTVRMKEEKEVLEHFAGVFTMMNPLTFKEIFQTTVPYMVERISKNYALQIVANSFLANPTTSALFATILVEYLLDRLPEMGSNVELSNLYLKLFKLVFGSVSLFAAENEQMLKPHLHKIVNSSMELAQTAKEPYNYFLLLRALFRSIGGGSHDLLYQEFLPLLPNLLQGLNMLQSGLHKQHMKDLFVELCLTVPVRLSSLLPYLPMLMDPLVSALNGSQTLVSQGLRTLELCVDNLQPDFLYDHIQPVRAELMQALWRTLRNPADSISHVAYRVLGKFGGSNRKMLKESQKLHYVVTEVQGPSITVEFSDCKASLQLPMEKAIETALDCLKSANTEPYYRRQAWEVIKCFLVAMMSLEDNKHALYQLLAHPNFTEKTIPNVIISHRYKAQDTPARKTFEQALTGAFMSAVIKDLRPSALPFVASLIRHYTMVAVAQQCGPFLLPCYQVGSQPSTAMFHSEENGSKGMDPLVLIDAIAICMAYEEKELCKIGEVALAVIFDVASIILGSKERACQLPLFSYIVERLCACCYEQAWYAKLGGVVSIKFLMERLPLTWVLQNQQTFLKALLFVMMDLTGEVSNGAVAMAKTTLEQLLMRCATPLKDEERAEEIVAAQEKSFHHVTHDLVREVTSPNSTVRKQAMHSLQVLAQVTGKSVTVIMEPHKEVLQDMVPPKKHLLRHQPANAQIGLMEGNTFCTTLQPRLFTMDLNVVEHKVFYTELLNLCEAEDSALTKLPCYKSLPSLVPLRIAALNALAACNYLPQSREKIIAALFKALNSTNSELQEAGEACMRKFLEGATIEVDQIHTHMRPLLMMLGDYRSLTLNVVNRLTSVTRLFPNSFNDKFCDQMMQHLRKWMEVVVITHKGGQRSDGNEMKICSAIINLFHLIPAAPQTLVKPLLEVVMKTERAMLIEAGSPFREPLIKFLTRHPSQTVELFMMEATLNDPQWSRMFMSFLKHKDARPLRDVLAANPNRFITLLLPGGAQTAVRPGSPSTSTMRLDLQFQAIKIISIIVKNDDSWLASQHSLVSQLRRVWVSENFQERHRKENMAATNWKEPKLLAYCLLNYCKRNYGDIELLFQLLRAFTGRFLCNMTFLKEYMEEEIPKNYSIAQKRALFFRFVDFNDPNFGDELKAKVLQHILNPAFLYSFEKGEGEQLLGPPNPEGDNPESITSVFITKVLDPEKQADMLDSLRIYLLQYATLLVEHAPHHIHDNNKNRNSKLRRLMTFAWPCLLSKACVDPACKYSGHLLLAHIIAKFAIHKKIVLQVFHSLLKAHAMEARAIVRQAMAILTPAVPARMEDGHQMLTHWTRKIIVEEGHTVPQLVHILHLIVQHFKVYYPVRHHLVQHMVSAMQRLGFTPSVTIEQRRLAVDLSEVVIKWELQRIKDQQPDSDMDPNSSGEGVNSVSSSIKRGLSVDSAQEVKRFRTATGAISAVFGRSQSLPGADSLLAKPIDKQHTDTVVNFLIRVACQVNDNTNTAGSPGEVLSRRCVNLLKTALRPDMWPKSELKLQWFDKLLMTVEQPNQVNYGNICTGLEVLSFLLTVLQSPAILSSFKPLQRGIAACMTCGNTKVLRAVHSLLSRLMSIFPTEPSTSSVASKYEELECLYAAVGKVIYEGLTNYEKATNANPSQLFGTLMILKSACSNNPSYIDRLISVFMRSLQKMVREHLNPQAASGSTEATSAGTSELVMLSLELVKTRLAVMSMEMRKNFIQAILTSLIEKSPDAKILRAVVKIVEEWVKNNSPMAANQTPTLREKSILLVKMMTYIEKRFPEDLELNAQFLDLVNYVYRDETLSGSELTAKLEPAFLSGLRCAQPLIRAKFFEVFDNSMKRRVYERLLYVTCSQNWEAMGNHFWIKQCIELLLAVCEKSTPIGTSCQGAMLPSITNVINLADSHDRAAFAMVTHVKQEPRERENSESKEEDVEIDIELAPGDQTSTPKTKELSEKDIGNQLHMLTNRHDKFLDTLREVKTGALLSAFVQLCHISTTLAEKTWVQLFPRLWKILSDRQQHALAGEISPFLCSGSHQVQRDCQPSALNCFVEAMSQCVPPIPIRPCVLKYLGKTHNLWFRSTLMLEHQAFEKGLSLQIKPKQTTEFYEQESITPPQQEILDSLAELYSLLQEEDMWAGLWQKRCKYSETATAIAYEQHGFFEQAQESYEKAMDKAKKEHERSNASPAIFPEYQLWEDHWIRCSKELNQWEALTEYGQSKGHINPYLVLECAWRVSNWTAMKEALVQVEVSCPKEMAWKVNMYRGYLAICHPEEQQLSFIERLVEMASSLAIREWRRLPHVVSHVHTPLLQAAQQIIELQEAAQINAGLQPTNLGRNNSLHDMKTVVKTWRNRLPIVSDDLSHWSSIFMWRQHHYQAIVTAYENSSQHDPSSNNAMLGVHASASAIIQYGKIARKQGLVNVALDILSRIHTIPTVPIVDCFQKIRQQVKCYLQLAGVMGKNECMQGLEVIESTNLKYFTKEMTAEFYALKGMFLAQINKSEEANKAFSAAVQMHDVLVKAWAMWGDYLENIFVKERQLHLGVSAITCYLHACRHQNESKSRKYLAKVLWLLSFDDDKNTLADAVDKYCIGVPPIQWLAWIPQLLTCLVGSEGKLLLNLISQVGRVYPQAVYFPIRTLYLTLKIEQRERYKSDSGQQQPSSVGNQSHSASDPGPIRATAPMWRCSRIMHMQRELHPTLLSSLEGIVDQMVWFRENWHEEVLRQLQQGLAKCYSVAFEKSGAVSDAKITPHTLNFVKKLVSTFGVGLENVSNVSTMFSSAASESLARRAQATAQDPVFQKLKGQFTTDFDFSVPGSMKLHNLISKLKKWIKILEAKTKQLPKFFLIEEKCRFLSNFSAQTAEVEIPGEFLMPKPTHYYIKIARFMPRVEIVQKHNTAARRLYIRGHNGKIYPYLVMNDACLTESRREERVLQLLRLLNPCLEKRKETTKRHLFFTAHHLSCQCILCVA

SEQ ID NO: 9127 - protein, 5 aa, Artificial Sequence
  Synthetic polypeptide
KHCHF

SEQ ID NO: 9128 - protein, 217 aa, Artificial Sequence
  Synthetic polypeptide
MSNPGTRRNGSSIKIRLTVLCAKNLAKKDFFRLPDPFAKIVVDGSGQCHSTDTVKNTLDPKWNQHYDLYVGKTDSITISVWNHKKIHKKQGAGFLGCVRLLSNAISRLKDTGYQRLDLCKLNPSDTDAVRGQIVVSLQTRDRIGTGGSVVDCRGLLENEGEPGMCLTAPREYNQQTSRMGPSVGQTTQGLQQIDCKKSKDRREGEPVNNSYSNKLET

SEQ ID NO: 9129 - protein, 154 aa, Artificial Sequence
  Synthetic polypeptide
MHERFIHCFCIDWAPKSDRIVTCGADRNAYVWSQKDGVWKPTLVILRINRAATFVKWSPLENKFAVGSGARLISVCYFESENDWPGTVAHACNPSTLRGQGRRITKSRVRNHPGQHGETPSLLKIQNISQVWWCMPIIPATWESEAGESLEPGR

SEQ ID NO: 9130 - protein, 201 aa, Artificial Sequence
  Synthetic polypeptide
MSLHQFLLEPITCHAWNRDRTQIALSPNNHEVHIYKKNGSQWVKAHELKEHNGHITGIDWAPKSDRIVTCGADRNAYVWSQKDGVWKPTLVILRINRAATFVKWSPLENKFAVGSGARLISVCYFESENDWPGTVAHACNPSTLRGQGRRITKSRVRNHPGQHGETPSLLKIQNISQVWWCMPIIPATWESEAGESLEPGR

SEQ ID NO: 9131 - protein, 349 aa, Artificial Sequence
  Synthetic polypeptide
MHERFIHCFCIDWAPKSDRIVTCGADRNAYVWSQKDGVWKPTLVILRINRAATFVKWSPLENKFAVGSGARLISVCYFESENDWWVSKHIKKPIRSTVLSLDWHPNNVLLAAGSCDFKCRVFSAYIKEVDEKPASTPWGSKMPFGQLMSEFGGSGTGGWVHGVSFSASGSRLAWVSHDSTVSVADASKSVQVSTLKTEFLPLLSVSFVSENSVVAAGHDCCPMLFNYDDRGCLTFVSKLDIPKQSIQRNMSAMERFRNMDKRATTEDRNTALETLHQNSITQVSIYEVDKQDCRKFCTTGIDGAMTIWDFKLLEKLRQEDHLSPGVGGCSELWSHHCTPAWGNRARPYL

SEQ ID NO: 9132 - protein, 396 aa, Artificial Sequence
  Synthetic polypeptide
MSLHQFLLEPITCHAWNRDRTQIALSPNNHEVHIYKKNGSQWVKAHELKEHNGHITGIDWAPKSDRIVTCGADRNAYVWSQKDGVWKPTLVILRINRAATFVKWSPLENKFAVGSGARLISVCYFESENDWWVSKHIKKPIRSTVLSLDWHPNNVLLAAGSCDFKCRVFSAYIKEVDEKPASTPWGSKMPFGQLMSEFGGSGTGGWVHGVSFSASGSRLAWVSHDSTVSVADASKSVQVSTLKTEFLPLLSVSFVSENSVVAAGHDCCPMLFNYDDRGCLTFVSKLDIPKQSIQRNMSAMERFRNMDKRATTEDRNTALETLHQNSITQVSIYEVDKQDCRKFCTTGIDGAMTIWDFKLLEKLRQEDHLSPGVGGCSELWSHHCTPAWGNRARPYL

SEQ ID NO: 9133 - protein, 114 aa, Artificial Sequence
  Synthetic polypeptide
MPKGGRKGGHKGRARQYTSPEEIDAQLQAEKQKAREEEEQKEGGDGAAGDPKKEKKSLDSDESEDEEDDYQQKRKGVEGLIDIENPNRVAQTTKKVTQLDLDGPKELSRRERVV

SEQ ID NO: 9134 - protein, 156 aa, Artificial Sequence
  Synthetic polypeptide
MDFVRLARLFARARPMGLFILQHLDPCRARWAGGREGLMRPMWAPFSSSSSQLPLGQERQENTGSLGSDPSHSNSTATQEEDEEEEESFGTLSDKYSSRRLFRKSAAQFHNLRFGERRDEQMEPEPKLWRGRRNTPYWYFLQCKHLIKEGKRRRLH

SEQ ID NO: 9135 - protein, 205 aa, Artificial Sequence
  Synthetic polypeptide
MASVVPVKDKKLLEVKLGELPSWILMRDFSPSGIFGAFQRGPGGTGKPEMDFVRLARLFARARPMGLFILQHLDPCRARWAGGREGLMRPMWAPFSSSSSQLPLGQERQENTGSLGSDPSHSNSTATQEEDEEEEESFGTLSDKYSSRRLFRKSAAQFHNLRFGERRDEQMEPEPKLWRGRRNTPYWYFLQCKHLIKEGKRRRLH

SEQ ID NO: 9136 - protein, 232 aa, Artificial Sequence
  Synthetic polypeptide
MQEIIASVDHIKFDLEIAVEQQLGAQPLPFPGMDKSGAAVCEFFLKAACGKGGMCPFRHISGEKTVVCKHWLRGLCKKGDQCEFLHEYDMTKMPECYFYSKFGECSNKECPFLHIDPESKIKDCPWYDRGFCKHGPLCRHRHTRRVICVNYLVGFCPEGPSCKFMHPRFELPMGTTEQPPLPQQTQPPAKQRTPQVIGVMQSQNSSAGNRGPRPLEQVTCYKDWCVPGTWQE

SEQ ID NO: 9137 - protein, 199 aa, Artificial Sequence
  Synthetic polypeptide
MQEIIASVDHIKFDLEIAVEQQLGAQPLPFPGMDKSGAAVCEFFLKAACGKGGMCPFRHISGEKTVVCKHWLRGLCKKGDQCEFLHEYDMTKMPECYFYSKFGPLCRHRHTRRVICVNYLVGFCPEGPSCKFMHPRFELPMGTTEQPPLPQQTQPPAKRTPQVIGVMQSQNSSAGNRGPRPLEQVTCYKDWCVPGTWQE

SEQ ID NO: 9138 - protein, 257 aa, Artificial Sequence
  Synthetic polypeptide
MQEIIASVDHIKFDLEIAVEQQLGAQPLPFPGMDKSGAAVCEFFLKAACGKGGMCPFRHISGEKTVVCKHWLRGLCKKGDQCEFLHEYDMTKMPECYFYSKFGECSNKECPFLHIDPESKIKDCPWYDRGFCKHGPLCRHRHTRRVICVNYLVGFCPEGPSCKFMHPRFELPMGTTEQPPLPQQTQPPAKQSNNPPLQRSSSLIQLTSQNSSPNQQRTPQVIGVMQSQNSSAGNRGPRPLEQVTCYKDWCVPGTWQE

SEQ ID NO: 9139 - protein, 179 aa, Artificial Sequence
  Synthetic polypeptide
MCPFRHISGEKTVVCKHWLRGLCKKGDQCEFLHEYDMTKMPECYFYSKFGECSNKECPFLHIDPESKIKDCPWYDRGFCKHGPLCRHRHTRRVICVNYLVGFCPEGPSCKFMHPRFELPMGTTEQPPLPQQTQPPAKQRTPQVIGVMQSQNSSAGNRGPRPLEQVTCYKDWCVPGTWQE

SEQ ID NO: 9140 - protein, 193 aa, Artificial Sequence
  Synthetic polypeptide
TESGAAVCEFFLKAACGKGGMCPFRHISGEKTVVCKHWLRGLCKKGDQCEFLHEYDMTKMPECYFYSKFGECSNKECPFLHIDPESKIKDCPWYDRGFCKHALDLNCPWEPPSSPHCRSRHSLQQSREPRRSSGSCRVKTAARATGDPGHWSRSPVTRIGVSLARGRSNPQYSLKSMFSTQGAHNSYSWSSEE

SEQ ID NO: 9141 - protein, 8 aa, Artificial Sequence
  Synthetic polypeptide
QDQGLSLV

SEQ ID NO: 9142 - protein, 275 aa, Artificial Sequence
  Synthetic polypeptide
MLKEHPEMAEAPQQQLGIPVVKLEKELPWGRGREDPSPETFRLRFRQFRYQEAAGPQEALRELQELCRRWLRPELHTKEQILELLVLEQFLTILPREFYAWIREHGPESGKALAAMVEDLTERALEAKAVPCHRQGEQEETALCRGAWEPGIQLGPVEVKPEWGMPPGEGVQGPDPGTEEQLSQDPGDETRAFQEQALPVLQAGPGLPAVNPRDQEMAAGFFTAGSQGLGPFKDMALAFPEEEWRHVTPAQIDCFGEYVEPQDCRVSPGDIIVNV

SEQ ID NO: 9143 - protein, 281 aa, Artificial Sequence
  Synthetic polypeptide
MLKEHPEMAEAPQQQLGIPVVKLEKELPWGRGREDPSPETFRLRFRQFRYQEAAGPQEALRELQELCRRWLRPELHTKEQILELLVLEQFLTILPREFYAWIREHGPESGKALAAMVEDLTERALEAKAVPCHRQGEQEETALCRGAWEPGIQLGPVEVKPEWGMPPGEGVQGPDPGTEEQLSQDPGDETRAFQEQALPVLQAGPGLPAVNPRDQEMAAGFFTAGSQGLGPFKDMALAFPEEEWRHVTPAQIDCFGEYVEPQDCRVSPDSFSDSVSLHPGD

SEQ ID NO: 9144 - protein, 36 aa, Artificial Sequence
  Synthetic polypeptide
GRPAASVPGVQGVPGAPDSRHGTHRRGLRELPGETS

SEQ ID NO: 9145 - protein, 372 aa, Artificial Sequence
  Synthetic polypeptide
MEAEDIQEELTCPICLDYFQDPVSIECGHNFCRGCLHRNWAPGGGPFPCPECRHPSAPAALRPNWALARLTEKTQRRRLGPVPPGLCGRHWEPLRLFCEDDQRPVCLVCRESQEHQTHAMAPIDEAFESYRTGNFDIHVDEWKRRLIRLLLYHFKQEEKLLKSQRNLVAKMKKVMHLQDVEVKNATQWKDKIKSQRMRISTEFSKLHNFLVEEEDLFLQRLNKEEEETKKKLNENTLKLNQTIASLKKLILEVGEKSQAPTLELLQNPKEVLTRSEIQDVNYSLEAVKVKTVCQIPLMKEMLKRFQDPRCSTNPEYEKYEEKYAKAHHNLLETSVKKKILNATRGEDSYLQWNKDEVDITLLIGNNASKQTL

SEQ ID NO: 9146 - protein, 346 aa, Artificial Sequence
  Synthetic polypeptide
MEAEDIQEELTCPICLDYFQDPVSIECGHNFCRGCLHRNWAPGGGPFPCPECRHPSAPAALRPNWALARLTEKTQRRRLGPVPPGLCGRHWEPLRLFCEDDQRPVCLVCRESQEHQTHAMAPIDEAFESYREKLLKSQRNLVAKMKKVMHLQDVEVKNATQWKDKIKSQRMRISTEFSKLHNFLVEEEDLFLQRLNKEEEETKKKLNENTLKLNQTIASLKKLILEVGEKSQAPTLELLQNPKEVLTRSEIQDVNYSLEAVKVKTVCQIPLMKEMLKRFQDPRCSTNPEYEKYEEKYAKAHHNLLETSVKKKILNATRGEDSYLQWNKDEVDITLLIGNNASKQTL

SEQ ID NO: 9147 - protein, 201 aa, Artificial Sequence
  Synthetic polypeptide
MMTAESREATGLSPQAAQEKDGIVIVKVEEEDEEDHMWGQDSTLQDTPPPDPEIFRQRFRRFCYQNTFGPREALSRLKELCHQWLRPEINTKEQILELLVLEQFLSILPKELQVWLQEYRPDSGEEAVTLLEDLELDLSGQQVPGQVHGPEMLARGMVPLDPVQESSSFDLHHEATQSHFKHSSRKPRLLQSRARHGGTFL

SEQ ID NO: 9148 - protein, 165 aa, Artificial Sequence
  Synthetic polypeptide
MWGQDSTLQDTPPPDPEIFRQRFRRFCYQNTFGPREALSRLKELCHQWLRPEINTKEQILELLVLEQFLSILPKELQVWLQEYRPDSGEEAVTLLEDLELDLSGQQVPGQVHGPEMLARGMVPLDPVQESSSFDLHHEATQSHFKHSSRKPRLLQSRARHGGTFL

SEQ ID NO: 9149 - protein, 46 aa, Artificial Sequence
  Synthetic polypeptide
METQADLVSQEPQALLDSALREAEAGRSQGQEIETILANTVKPHLY

SEQ ID NO: 9150 - protein, 54 aa, Artificial Sequence
  Synthetic polypeptide
MISQFFILSSKGDPLIYKDFRGDSGGRDVAELFYRKLTGLPGDESPVVMRQRLQ

SEQ ID NO: 9151 - protein, 58 aa, Artificial Sequence
  Synthetic polypeptide
LPPASPRGQWRPGCGRALLPEADGTARRRVPGCHEAEVAVSRDPDTALQPGRQSETPS

SEQ ID NO: 9152 - protein, 98 aa, Artificial Sequence
  Synthetic polypeptide
MGRASYGGSPVGHQSSSDHPRAKTCRSPVRDGPRTLCGVPTVALSLHFLREASSGSRTCGRRTSLCTSAKSSWTYRSGRLSWQSIKGTHLTITQGFEV

SEQ ID NO: 9153 - protein, 100 aa, Artificial Sequence
  Synthetic polypeptide
MLESYVTPILMSYVNRYIKNLKPSDLQLSLWGGDVVLSKLELKLDVLEQELKLPFTFLSGHIHELRIHVPWTKLGSEPVVITINTMECILKLKDGIQMAQ

SEQ ID NO: 9154 - protein, 2210 aa, Artificial Sequence
  Synthetic polypeptide
MLESYVTPILMSYVNRYIKNLKPSDLQLSLWGGDVVLSKLELKLDVLEQELKLPFTFLSGHIHELRIHVPWTKLGSEPVVITINTMECILKLKDGIQDDHESCGSNSTNRSTAESTKSSIKPRRMQQAAPTDPDLPPGYVQSLIRRVVNNVNIVINNLILKYVEDDIVLSVNITSAECYTVGELWDRAFMDISATDLVLRKVINFSDCTVCLDKRNASGKIEFYQDPLLYKCSFRTRLHFTYENLNSKMPSVIKIHTLVESLKLSITDQQLPMFIRIMQLGIALYYGEIGNFKEGEIEDLTCHNKDMLGNITGSEDETRIDMQYPAQHKGQELYSQQDEEQPQGWVSWAWSFVPAIVSYDDGEEDFVGNDPASTMHQQKAQTLKDPIVSIGFYCTKATVTFKLTEMQVESSYYSPQKVKSKEVLCWEQEGTTVEALMMGEPFFDCQIGFVGCRAMCLKGIMGVKDFEENMNRSETEACFFICGDNLSTKGFTYLTNSLFDYRSPENNGTRAEFILDSTHHKETYTEIAGMQRFGAFYMDYLYTMENTSGKGSTNQQDFSSGKSEDLGTVQEKSTKSLVIGPLDFRLDSSAVHRILKMIVCALEHEYEPYSRLKSDIKDENETILNPEEVALLEEYIPTRHTSVTLLKCTCTISMAEFNLLDHLLPVIMGEKNSSNFMNTTNFQSLRPLPSIRILVDKINLEHSVPMYAEQLVHVVSSLTQPSDNLLHYCYVHCYLKIFGFQAGLTSLDCSGSYCLPVPVIPSFSTALYGKLLKLPTCWTKRSQIAITEGIFELPNLTIQATRAQTLLLQAIYQSWSHLGNVSSSAVIEALINEIFLSIGVKSKNPLPTLEGSIQNVELKYCSTSLVKCASGTMGSIKICAKAPVDSGKEKLIPLLQGPSDTKDLHSTKWLNESRKPESLLAPDLMAFTIQVPQYIDYCHNSGAVLLCSIQGLAVNIDPILYTWLIYQPQKRTSRHMQQQPVVAVPLVMPVCRRKEDEVSIGSAPLAKQQSYQASEYASSPVKTKTVTESRPLSVPVKAMLNISESCRSPEERMKEFIGIVWNAVKHLTLQLEVQSCCVFIPNDSLPSPSTIVSGDIPGTVRSWYHGQTSMPGTLVLCLPQIKIISAGHKYMEPLQEIPFVIPRPILEEGDAFPWTISLHNFSIYTLLGKQVTLCLVEPMGCTSTLAVTSQKLLATGPDTRHSFVVCLHVDLESLEIKCSNPQVQLFYELTDIMNKVWNKIQKRGNLNLSPTSPETMAGPVPTSPVRSSIGTAPPDTSTCSPSADIGTTTEGDSIQAGEESPFSDSVTLEQTTSNIGGTSGRVSLWMQWVLPKITIKLFAPDPENKGTEVCMVSELEDLSASIDVQDVYTKVKCKIESFNIDHYRSRPGEGWQSGHFEGVFLQCKEKSVTTTKLLDGTHQQHGFLSLTYTKAVTKNVRHKLTSRNERRSFHKLSEGLMDGSPHFLHEILLSAQAFDIVLYFPLLNAIASIFQAKLPKTQKEKRKSPGQPMRTHTLTSRNLPLIYVNTSVIRIFIPKTEEMQPTVEANQAAKEDTVVLKIGSVAMAPQADNPLGRSVLRKDIYQRALNLGILRDPGSEIEDRQYQIDLQSINIGTAQWHQLKPEKESVSGGVVTETERNSQNPALEWNMASSIRRHQERRAILTPVLTDFSVRITGAPAVIFTKVVSPENLHTEEILVCGHSLEVNITTNLDFFLSVAQVQLLHQLIVANMTGLEPSNKAAEISKQEQKKVDIFDGGMAETSSRYSGAQDSGIGSDSVKIRIVQIEQHSGASQHRIARPSRQSSIVKNLNFIPFDIFITASRISLMTYSCMALSKSKSQEQKNNEKTDKSSLNLPEVDSDVAKPNQACISTVTAEDLLRSSISFPSGKKIGVLSLESLHASTRSSARQALGITIVRQPGRRGTGDLQLEPFLYFIVSQPSLLLSCHHRKQRVEVSIFDAVLKGVASDYKCIGAPRFIKQVLSDLQRDLDSHTLIMGDFNTPLSTLDRSTRQKVNKDTQELNSAVHQADLIDIYRTLHPKSTEYTFFSAPHHTYSKIDHIVGSKTLLSKCKRTEIITNYLSDHSAIKLELRIKNLTQSRSTTWKLNNLLLNDYWVHNEMKAEIKMFFETSENKDTTYQNLWDAFKAVCRGKFIALNAHKRKQERSKIDTLTSQLKELEKQEQTHSKASRRQEITKIRAELKEIEKQKNPSKNQ

SEQ ID NO: 9155 - protein, 2235 aa, Artificial Sequence
  Synthetic polypeptide
MLESYVTPILMSYVNRYIKNLKPSDLQLSLWGGDVVLSKLELKLDVLEQELKLPFTFLSGHIHELRIHVPWTKLGSEPVVITINTMECILKLKDGIQDDHESCGSNSTNRSTAESTKSSIKPRRMQQAAPTDPDLPPGYVQSLIRRVVNNVNIVINNLILKYVEDDIVLSVNITSAECYTVGELWDRAFMDISATDLVLRKVINFSDCTVCLDKRNASGKIEFYQDPLLYKCSFRTRLHFTYENLNSKMPSVIKIHTLVESLKLSITDQQLPMFIRIMQLGIALYYGEIGNFKEGEIEDLTCHNKDMLGNITGSEDETRIDMQYPAQHKGQELYSQQDEEQPQGWVSWAWSFVPAIVSYDDGEEDFVGNDPASTMHQQKAQTLKDPIVSIGFYCTKATVTFKLTEMQVESSYYSPQKVKSKEVLCWEQEGTTVEALMMGEPFFDCQIGFVGCRAMCLKGIMGVKDFEENMNRSETEACFFICGDNLSTKGFTYLTNSLFDYRSPENNGTRAEFILDSTHHKETYTEIAGMQRFGAFYMDYLYTMENTSGKGSTNQQDFSSGKSEDLGTVQEKSTKSLVIGPLDFRLDSSAVHRILKMIVCALEHEYEPYSRLKSDIKDENETILNPEEVALLEEYIPTRHTSVTLLKCTCTISMAEFNLLDHLLPVIMGEKNSSNFMNTTNFQSLRPLPSIRILVDKINLEHSVPMYAEQLVHVVSSLTQPSDNLLHYCYVHCYLKIFGFQAGLTSLDCSGSYCLPVPVIPSFSTALYGKLLKLPTCWTKRSQIAITEGIFELPNLTIQATRAQTLLLQAIYQSWSHLGNVSSSAVIEALINEIFLSIGVKSKNPLPTLEGSIQNVELKYCSTSLVKCASGTMGSIKICAKAPVDSGKEKLIPLLQGPSDTKDLHSTKWLNESRKPESLLAPDLMAFTIQVPQYIDYCHNSGAVLLCSIQGLAVNIDPILYTWLIYQPQKRTSRHMQQQPVVAVPLVMPVCRRKEDEVSIGSAPLAKQQSYQASEYASSPVKTKTVTESRPLSVPVKAMLNISESCRSPEERMKEFIGIVWNAVKHLTLQLEVQSCCVFIPNDSLPSPSTIVSGDIPGTVRSWYHGQTSMPGTLVLCLPQIKIISAGHKYMEPLQEIPFVIPRPILEEGDAFPWTISLHNFSIYTLLGKQVTLCLVEPMGCTSTLAVTSQKLLATGPDTRHSFVVCLHVDLESLEIKCSNPQVQLFYELTDIMNKVWNKIQKRGNLNLSPTSPETMAGPVPTSPVRSSIGTAPPDTSTCSPSADIGTTTEGDSIQAGEESPFSDSVTLEQTTSNIGGTSGRVSLWMQWVLPKITIKLFAPDPENKGTEVCMVSELEDLSASIDVQDVYTKVKCKIESFNIDHYRSSLGEECWSLGQCGGVFLSCTDKLNRRTLLVRPISKQDPFSNCSGFFPSTTTKLLDGTHQQHGFLSLTYTKAVTKNVRHKLTSRNERRSFHKLSEGLMDGSPHFLHEILLSAQAFDIVLYFPLLNAIASIFQAKLPKTQKEKRKSPGQPMRTHTLTSRNLPLIYVNTSVIRIFIPKTEEMQPTVEANQAAKEDTVVLKIGSVAMAPQADNPLGRSVLRKDIYQRALNLGILRDPGSEIEDRQYQIDLQSINIGTAQWHQLKPEKESVSGGVVTETERNSQNPALEWNMASSIRRHQERRAILTPVLTDFSVRITGAPAVIFTKVVSPENLHTEEILVCGHSLEVNITTNLDFFLSVAQVQLLHQLIVANMTGLEPSNKAAEISKQEQKKVDIFDGGMAETSSRYSGAQDSGIGSDSVKIRIVQIEQHSGASQHRIARPSRQSSIVKNLNFIPFDIFITASRISLMTYSCMALSKSKSQEQKNNEKTDKSSLNLPEVDSDVAKPNQACISTVTAEDLLRSSISFPSGKKIGVLSLESLHASTRSSARQALGITIVRQPGRRGTGDLQLEPFLYFIVSQPSLLLSCHHRKQRVEVSIFDAVLKGVASDYKCIGAPRFIKQVLSDLQRDLDSHTLIMGDFNTPLSTLDRSTRQKVNKDTQELNSAVHQADLIDIYRTLHPKSTEYTFFSAPHHTYSKIDHIVGSKTLLSKCKRTEIITNYLSDHSAIKLELRIKNLTQSRSTTWKLNNLLLNDYWVHNEMKAEIKMFFETSENKDTTYQNLWDAFKAVCRGKFIALNAHKRKQERSKIDTLTSQLKELEKQEQTHSKASRRQEITKIRAELKEIEKQKNPSKNQ

SEQ ID NO: 9156 - protein, 466 aa, Artificial Sequence
  Synthetic polypeptide
MNPSAPSYPMASLYVGDLHPDVTEAMLYEKFSPAGPILSIRVCRDMITRRSLGYAYVNFQQPADAERALDTMNFDVIKGKPVRIMWSQRDPSLRKSGVGNIFIKNLDKSIDNKALYDTFSAFGNILSCKVVCDENGSKGYGFVHFETQEAAERAIEKMNGMLLNDRKVFVGRFKSRKEREAELGARAKEFTNVYIKNFGEDMDDERLKDLFGKFGPALSVKVMTDESGKSKGFGFVSFERHEDAQKAVDEMNGKELNGKQIYVGRAQKKVERQTELKRKFEQMKQDRITRYQGVNLYVKNLDDGIDDERLRKEFSPFGTITSAKVMMEGGRSKGFGFVCFSSPEEATKAVTEMNGRIVATKPLYVALAQRKEERQAHLTNQYMQRMASVRAVPNPVINPYQPAPPSGYFMAAIPQTQNRAAYYPPSQIAQLRPSPRWTAQGARPHRGEGPPLQWTRNPRDLTYHWR

SEQ ID NO: 9157 - protein, 421 aa, Artificial Sequence
  Synthetic polypeptide
MITRRSLGYAYVNFQQPADAERALDTMNFDVIKGKPVRIMWSQRDPSLRKSGVGNIFIKNLDKSIDNKALYDTFSAFGNILSCKVVCDENGSKGYGFVHFETQEAAERAIEKMNGMLLNDRKVFVGRFKSRKEREAELGARAKEFTNVYIKNFGEDMDDERLKDLFGKFGPALSVKVMTDESGKSKGFGFVSFERHEDAQKAVDEMNGKELNGKQIYVGRAQKKVERQTELKRKFEQMKQDRITRYQGVNLYVKNLDDGIDDERLRKEFSPFGTITSAKVMMEGGRSKGFGFVCFSSPEEATKAVTEMNGRIVATKPLYVALAQRKEERQAHLTNQYMQRMASVRAVPNPVINPYQPAPPSGYFMAAIPQTQNRAAYYPPSQIAQLRPSPRWTAQGARPHRGEGPPLQWTRNPRDLTYHWR

SEQ ID NO: 9158 - protein, 434 aa, Artificial Sequence
  Synthetic polypeptide
MNPSAPSYPMASLYVGDLHPDVTEAMLYEKFSPAGPILSIRVCRDMITRRSLGYAYVNFQQPADAERALDTMNFDVIKGKPVRIMWSQRDPSLRKSGVVCDENGSKGYGFVHFETQEAAERAIEKMNGMLLNDRKVFVGRFKSRKEREAELGARAKEFTNVYIKNFGEDMDDERLKDLFGKFGPALSVKVMTDESGKSKGFGFVSFERHEDAQKAVDEMNGKELNGKQIYVGRAQKKVERQTELKRKFEQMKQDRITRYQGVNLYVKNLDDGIDDERLRKEFSPFGTITSAKVMMEGGRSKGFGFVCFSSPEEATKAVTEMNGRIVATKPLYVALAQRKEERQAHLTNQYMQRMASVRAVPNPVINPYQPAPPSGYFMAAIPQTQNRAAYYPPSQIAQLRPSPRWTAQGARPHRGEGPPLQWTRNPRDLTYHWR

SEQ ID NO: 9159 - protein, 11 aa, Artificial Sequence
  Synthetic polypeptide
PERVFSIWYNH

SEQ ID NO: 9160 - protein, 27 aa, Artificial Sequence
  Synthetic polypeptide
SMENKFMLVELRKRWNGRRNLSANLNR

SEQ ID NO: 9161 - protein, 245 aa, Artificial Sequence
  Synthetic polypeptide
MDKNELVQKAKLAEQAERYDDMAACMKSVTEQGAELSNEERNLLSVAYKNVVGARRSSWRVVSSIEQKTEGAEKKQQMAREYREKIETELRDICNDVLSLLEKFLIPNASQAESKVFYLKMKGDYYRYLAEVAAGDDKKGIVDQSQQAYQEAFEISKKEMQPTHPIRLGLALNFSVFYYEILNSPEKACSLAKTAFDEAIAELDTLSEESYKDSTLIMQLLRDNLTPRRWPPMDQSAHTSSLQNP

SEQ ID NO: 9162 - protein, 130 aa, Artificial Sequence
  Synthetic polypeptide
VFYLKMKGDYYRYLAEVAAGDDKKGIVDQSQQAYQEAFEISKKEMQPTHPIRLGLALNFSVFYYEILNSPEKACSLAKTAFDEAIAELDTLSEESYKDSTLIMQLLRDNLTPRRWPPMDQSAHTSSLQNP

SEQ ID NO: 9163 - protein, 170 aa, Artificial Sequence
  Synthetic polypeptide
MSQPCRKLWRHNYETSSCIEFLKSLLEKFLIPNASQAESKVFYLKMKGDYYRYLAEVAAGDDKKGIVDQSQQAYQEAFEISKKEMQPTHPIRLGLALNFSVFYYEILNSPEKACSLAKTAFDEAIAELDTLSEESYKDSTLIMQLLRDNLTPRRWPPMDQSAHTSSLQNP

SEQ ID NO: 9164 - protein, 125 aa, Artificial Sequence
  Synthetic polypeptide
MKGDYYRYLAEVAAGDDKKGIVDQSQQAYQEAFEISKKEMQPTHPIRLGLALNFSVFYYEILNSPEKACSLAKTAFDEAIAELDTLSEESYKDSTLIMQLLRDNLTPRRWPPMDQSAHTSSLQNP

SEQ ID NO: 9165 - protein, 168 aa, Artificial Sequence
  Synthetic polypeptide
MAREYREKIETELRDICNDVLSLLEKFLIPNASQAESKVFYLKMKGDYYRYLAEVAAGDDKKGIVDQSQQAYQEAFEISKKEMQPTHPIRLGLALNFSVFYYEILNSPEKACSLAKTAFDEAIAELDTLSEESYKDSTLIMQLLRDNLTPRRWPPMDQSAHTSSLQNP

SEQ ID NO: 9166 - protein, 253 aa, Artificial Sequence
  Synthetic polypeptide
MDKNELVQKAKLAEQAERYDDMAACMKSVTEQGAELSNEERNLLSVAYKNVVGARRSSWRVVSSIEQKTEGAEKKQQMAREYREKIETELRDICNDVLSLLEKFLIPNASQAESKVFYLKMKGDYYRYLAEVAAGDDKKVRFGVSYPGIVDQSQQAYQEAFEISKKEMQPTHPIRLGLALNFSVFYYEILNSPEKACSLAKTAFDEAIAELDTLSEESYKDSTLIMQLLRDNLTPRRWPPMDQSAHTSSLQNP

SEQ ID NO: 9167 - protein, 30 aa, Artificial Sequence
  Synthetic polypeptide
MSQESDKGNQLLYVVRIFRHRCGELHKAYN

SEQ ID NO: 9168 - protein, 365 aa, Artificial Sequence
  Synthetic polypeptide
MSQESDNNKRLVALVPMPSDPPFNTRRAYTSEDEAWKSYLENPLTAATKAMMSINGDEDSAAALGLLYDYYKVPRDKRLLSVSKASDSQEDQEKRNCLGTSEAQSNLSGGENRVQVLKTVPVNLSLNQDHLENSKREQYSISFPESSAIIPVSGITVVKAEDFTPVFMAPPVHYPRGDGEEQRVVIFEQTQYDVPSLATHSAYLKDDQRSTPDSTYSESFKDAATEKFRSASVGAEEYMYDQTSSGTFQYTLEATKSLRQKQGEGPMTYLNKGQFYAITLSETGDNKCFRHPISKVRSVVMVVFSEDKNRDEQLKYWKYWHSRQHTAKQRVLDIGTWMKLETIILSKLSQGQKTEHRMFSLIGGN

SEQ ID NO: 9169 - protein, 349 aa, Artificial Sequence
  Synthetic polypeptide
MPSDPPFNTRRAYTSEDEAWKSYLENPLTAATKAMMSINGDEDSAAALGLLYDYYKVPRDKRLLSVSKASDSQEDQEKRNCLGTSEAQSNLSGGENRVQVLKTVPVNLSLNQDHLENSKREQYSISFPESSAIIPVSGITVVKAEDFTPVFMAPPVHYPRGDGEEQRVVIFEQTQYDVPSLATHSAYLKDDQRSTPDSTYSESFKDAATEKFRSASVGAEEYMYDQTSSGTFQYTLEATKSLRQKQGEGPMTYLNKGQFYAITLSETGDNKCFRHPISKVRSVVMVVFSEDKNRDEQLKYWKYWHSRQHTAKQRVLDIGTWMKLETIILSKLSQGQKTEHRMFSLIGGN

SEQ ID NO: 9170 - protein, 517 aa, Artificial Sequence
  Synthetic polypeptide
MSQESDNNKRLVALVPMPSDPPFNTRRAYTSEDEAWKSYLENPLTAATKAMMSINGDEDSAAALGLLYDYYKVPRDKRLLSVSKASDSQEDQEKRNCLGTSEAQSNLSGGENRVQVLKTVPVNLSLNQDHLENSKREQYSISFPESSAIIPVSGITVVKAEDFTPVFMAPPVHYPRGDGEEQRVVIFEQTQYDVPSLATHSAYLKDDQRSTPDSTYSESFKDAATEKFRSASVGAEEYMYDQTSSGTFQYTLEATKSLRQKQGEGPMTYLNKGQFYAITLSETGDNKCFRHPISKVRSVVMVVFSEDKNRDEQLKYWKYWHSRQHTAKQRVLDIADYKESFNTIGNIEEIAYNAVSFTWDVNEEAKIFITVNCLSTDFSSQKGVKGLPLMIQIDTYSYNNRSNKPIHRAYCQIKVFCDKGAERKIRDEERKQNRKKGKGQASQTQCNSSSDGKLAAIPLQKKSDITYFKTMPDLHSQPVLFIPDVHFANLQRTGQEFLIRIRIPEFHPSSFELKFPK

SEQ ID NO: 9171 - protein, 501 aa, Artificial Sequence
  Synthetic polypeptide
MPSDPPFNTRRAYTSEDEAWKSYLENPLTAATKAMMSINGDEDSAAALGLLYDYYKVPRDKRLLSVSKASDSQEDQEKRNCLGTSEAQSNLSGGENRVQVLKTVPVNLSLNQDHLENSKREQYSISFPESSAIIPVSGITVVKAEDFTPVFMAPPVHYPRGDGEEQRVVIFEQTQYDVPSLATHSAYLKDDQRSTPDSTYSESFKDAATEKFRSASVGAEEYMYDQTSSGTFQYTLEATKSLRQKQGEGPMTYLNKGQFYAITLSETGDNKCFRHPISKVRSVVMVVFSEDKNRDEQLKYWKYWHSRQHTAKQRVLDIADYKESFNTIGNIEEIAYNAVSFTWDVNEEAKIFITVNCLSTDFSSQKGVKGLPLMIQIDTYSYNNRSNKPIHRAYCQIKVFCDKGAERKIRDEERKQNRKKGKGQASQTQCNSSSDGKLAAIPLQKKSDITYFKTMPDLHSQPVLFIPDVHFANLQRTGQEFLIRIRIPEFHPSSFELKFPK

SEQ ID NO: 9172 - protein, 2383 aa, Artificial Sequence
  Synthetic polypeptide
MTSIHFVVHPLPGTEDQLNDRLREVSEKLNKYNLNSHPPLNVLEQATIKQCVVGPNHAAFLLEDGRVCRIGFSVQPDRLELGKPDNNDGSKLNSNSGAGRTSRPGRTSDSPWFLSGSETLGRLAGNTLGSRWSSGVGGSGGGSSGRSSAGARDSRRQTRVIRTGRDRGSGLLGSQPQPVIPASVIPEELISQAQVVLQGKSRSVIIRELQRTNLDVNLAVNNLLSRDDEDGDDGDDTASESYLPGEDLMSLLDADIHSAHPSVIIDADAMFSEDISYFGYPSFRRSSLSRLGSSRVLLLPLERDSELLRERESVLRLRERRWLDGASFDNERGSTSKEGEPNLDKKNTPVQSPVSLGEDLQWWPDKDGTKFICIGALYSELLAVSSKGELYQWKWSESEPYRNAQNPSLHHPRATFLGLTNEKIVLLSANSIRATVATENNKVATWVDETLSSVASKLEHTAQTYSELQGERIVSLHCCALYTCAQLENSLYWWGVVPFSQRKKMLEKARAKNKKPKSSAGISSMPNITVGTQVCLRNNPLYHAGAVAFSISAGIPKVGVLMESVWNMNDSCRFQLRSPESLKNMEKASKTTEAKPESKQEPVKTEMGPPPSPASTCSDASSIASSASMPYKRRRSTPAPKEEEKVNEEQWSLREVVFVEDVKNVPVGKVLKVDGAYVAVKFPGTSSNTNCQNSSGPDADPSSLLQDCRLLRIDELQVVKTGGTPKVPDCFQRTPKKLCIPEKTEILAVNVDSKGVHAVLKTGNWVRYCIFDLATGKAEQENNFPTSSIAFLGQNERNVAIFTAGQESPIILRDGNGTIYPMAKDCMGGIRDPDWLDLPPISSLGMGVHSLINLPANSTIKKKAAVIIMAVEKQTLMQHILRCDYEACRQYLMNLEQAVVLEQNLQMLQTFISHRCDGNRNILHACVSVCFPTSNKETKEEEEAERSERNTFAERLSAVEAIANAISVVSSNGPGNRAGSSSSRSLRLREMMRRSLRAAGLGRHEAGASSSDHQDPVSPPIAPPSWVPDPPAMDPDGDIDFILAPAVGSLTTAATGTGQGPSTSTIPGPSTEPSVVESKDRKANAHFILKLLCDSVVLQPYLRELLSAKDARGMTPFMSAVSGRAYPAAITILETAQKIAKAEISSSEKEEDVFMGMVCPSGTNPDDSPLYVLCCNDTCSFTWTGAEHINQDIFECRTCGLLESLCCCTECARVCHKGHDCKLKRTSPTAYCDCWEKCKCKTLIAGQKSARLDLLYRLLTATNLVTLPNSRGEHLLLFLVQTVARQTVEHCQYRPPRIREDRNRKTASPEDSDMPDHDLEPPRFAQLALERVLQDWNALKSMIMFGSQENKDPLSASSRIGHLLPEEQVYLNQQSGTIRLDCFTHCLIVKCTADILLLDTLLGTLVKELQNKYTPGRREEAIAVTMRFLRSVARVFVILSVEMASSKKKNNFIPQPIGKCKRVFQALLPYAVEELCNVAESLIVPVRMGIARPTAPFTLASTSIDAMQGSEELFSVEPLPPRPSSDQSSSSSQSQSSYIIRNPQQRRISQSQPVRGRDEEQDDIVSADVEEVEVVEGVAGEEDHHDEQEEHGEENAEAEGQHDEHDEDGSDMELDLLAAAETESDSESNHSNQDNASGRRSVVTAATAGSEAGASSVPAFFSEDDSQSNDSSDSDSSSSQSDDIEQETFMLDEPLERTTNSSHANGAAQAPRSMQWAVRNTQHQRAASTAPSSTSTPAASSAGLIYIDPSNLRRSGTISTSAAAAAAALEASNASSYLTSASSLARAYSIVIRQISDLMGLIPKYNHLVYSQIPAAVKLTYQDAVNLQNYVEEKLIPTWNWMVSIMDSTEAQLRYGSALASAGDPGHPNHPLHASQNSARRERMTAREEASLRTLEGRRRATLLSARQGMMSARGDFLNYALSLMRSHNDEHSDVLPVLDVCSLKHVAYVFQALIYWIKAMNQQTTLDTPQLERKRTRELLELGIDNEDSEHENDDDTNQSATLNDKDDDSLPAETGQNHPFFRRSDSMTFLGCIPPNPFEVPLAEAIPLADQPHLLQPNARKEDLFGRPSQGLYSSSASSGKCLMEVTVDRNCLEVLPTKMSYAANLKNVMNMQNRQKKEGEEQPVLPEETESSKPGPSAHDLAAQLKSSLLAEIGLTESEGPPLTSFRPQCSFMGMVISHDMLLGRWRLSLELFGRVFMEDVGAEPGSILTELGGFEVKESKFRREMEKLRNQQSRDLSLEVDRDRDLLIQQTMRQLNNHFGRRCATTPMAVHRVKVTFKDEPGEGSGVARSFYTAIAQAFLSNEKLPNLECIQNANKGTHTSLMQRLRNRGERDREREREREMRRSSGLRAGSRRDRDRPHAVAHACNSSTLGGRGGWII

SEQ ID NO: 9173 - protein, 112 aa, Artificial Sequence
  Synthetic polypeptide
MAVHRVKVTFKDEPGEGSGVARSFYTAIAQAFLSNEKLPNLECIQNANKGTHTSLMQRLRNRGERDREREREREMRRSSGLRAGSRRDRDRPHAVAHACNSSTLGGRGGWII

SEQ ID NO: 9174 - protein, 2377 aa, Artificial Sequence
  Synthetic polypeptide
MTSIHFVVHPLPGTEDQLNDRLREVSEKLNKYNLNSHPPLNVLEQATIKQCVVGPNHAAFLLEDGRVCRIGFSVQPDRLELGKPDNNDGSKLNSNSGAGRTSRPGRTSDSPWFLSGSETLGRLAGNTLGSRWSSGVGGSGGGSSGRSSAGARDSRRQTRVIRTGRDRGSGLLGSQPQPVIPASVIPEELISQAQVVLQGKSRSVIIRELQRTNLDVNLAVNNLLSRDDEDGDDGDDTASESYLPGEDLMSLLDADIHSAHPSVIIDADAMFSEDISYFGYPSFRRSSLSRLGSSRERDSELLRERESVLRLRERRWLDGASFDNERGSTSKEGEPNLDKKNTPVQSPVSLGEDLQWWPDKDGTKFICIGALYSELLAVSSKGELYQWKWSESEPYRNAQNPSLHHPRATFLGLTNEKIVLLSANSIRATVATENNKVATWVDETLSSVASKLEHTAQTYSELQGERIVSLHCCALYTCAQLENSLYWWGVVPFSQRKKMLEKARAKNKKPKSSAGISSMPNITVGTQVCLRNNPLYHAGAVAFSISAGIPKVGVLMESVWNMNDSCRFQLRSPESLKNMEKASKTTEAKPESKQEPVKTEMGPPPSPASTCSDASSIASSASMPYKRRRSTPAPKEEEKVNEEQWSLREVVFVEDVKNVPVGKVLKVDGAYVAVKFPGTSSNTNCQNSSGPDADPSSLLQDCRLLRIDELQVVKTGGTPKVPDCFQRTPKKLCIPEKTEILAVNVDSKGVHAVLKTGNWVRYCIFDLATGKAEQENNFPTSSIAFLGQNERNVAIFTAGQESPIILRDGNGTIYPMAKDCMGGIRDPDWLDLPPISSLGMGVHSLINLPANSTIKKKAAVIIMAVEKQTLMQHILRCDYEACRQYLMNLEQAVVLEQNLQMLQTFISHRCDGNRNILHACVSVCFPTSNKETKEEEEAERSERNTFAERLSAVEAIANAISVVSSNGPGNRAGSSSSRSLRLREMMRRSLRAAGLGRHEAGASSSDHQDPVSPPIAPPSWVPDPPAMDPDGDIDFILAPAVGSLTTAATGTGQGPSTSTIPGPSTEPSVVESKDRKANAHFILKLLCDSVVLQPYLRELLSAKDARGMTPFMSAVSGRAYPAAITILETAQKIAKAEISSSEKEEDVFMGMVCPSGTNPDDSPLYVLCCNDTCSFTWTGAEHINQDIFECRTCGLLESLCCCTECARVCHKGHDCKLKRTSPTAYCDCWEKCKCKTLIAGQKSARLDLLYRLLTATNLVTLPNSRGEHLLLFLVQTVARQTVEHCQYRPPRIREDRNRKTASPEDSDMPDHDLEPPRFAQLALERVLQDWNALKSMIMFGSQENKDPLSASSRIGHLLPEEQVYLNQQSGTIRLDCFTHCLIVKCTADILLLDTLLGTLVKELQNKYTPGRREEAIAVTMRFLRSVARVFVILSVEMASSKKKNNFIPQPIGKCKRVFQALLPYAVEELCNVAESLIVPVRMGIARPTAPFTLASTSIDAMQGSEELFSVEPLPPRPSSDQSSSSSQSQSSYIIRNPQQRRISQSQPVRGRDEEQDDIVSADVEEVEVVEGVAGEEDHHDEQEEHGEENAEAEGQHDEHDEDGSDMELDLLAAAETESDSESNHSNQDNASGRRSVVTAATAGSEAGASSVPAFFSEDDSQSNDSSDSDSSSSQSDDIEQETFMLDEPLERTTNSSHANGAAQAPRSMQWAVRNTQHQRAASTAPSSTSTPAASSAGLIYIDPSNLRRSGTISTSAAAAAAALEASNASSYLTSASSLARAYSIVIRQISDLMGLIPKYNHLVYSQIPAAVKLTYQDAVNLQNYVEEKLIPTWNWMVSIMDSTEAQLRYGSALASAGDPGHPNHPLHASQNSARRERMTAREEASLRTLEGRRRATLLSARQGMMSARGDFLNYALSLMRSHNDEHSDVLPVLDVCSLKHVAYVFQALIYWIKAMNQQTTLDTPQLERKRTRELLELGIDNEDSEHENDDDTNQSATLNDKDDDSLPAETGQNHPFFRRSDSMTFLGCIPPNPFEVPLAEAIPLADQPHLLQPNARKEDLFGRPSQGLYSSSASSGKCLMEVTVDRNCLEVLPTKMSYAANLKNVMNMQNRQKKEGEEQPVLPEETESSKPGPSAHDLAAQLKSSLLAEIGLTESEGPPLTSFRPQCSFMGMVISHDMLLGRWRLSLELFGRVFMEDVGAEPGSILTELGGFEVKESKFRREMEKLRNQQSRDLSLEVDRDRDLLIQQTMRQLNNHFGRRCATTPMAVHRVKVTFKDEPGEGSGVARSFYTAIAQAFLSNEKLPNLECIQNANKGTHTSLMQRLRNRGERDREREREREMRRSSGLRAGSRRDRDRPHAVAHACNSSTLGGRGGWII

SEQ ID NO: 9175 - protein, 24 aa, Artificial Sequence
  Synthetic polypeptide
MTSIHFVVHPLPGTEDQLNDRQVA

SEQ ID NO: 9176 - protein, 200 aa, Artificial Sequence
  Synthetic polypeptide
MSAPVGPRGRLAPIPAASQPPLQPEMPDLSHLTEEERKIILAVMDRQKKEEEKEQSVLKKLHQQFEMYKEQVKKMGEESQQQQEQKGDAPTCGICHKTKFADGCGHNCSYCQTKFCARCGGRVSLRSNKVMWVCNLCRKQQEILTKSGAWFYNSGSNTPQQPDQKVLRGLRNEEAPQEKKPKLHEQTQFQGPSGKLPLNF

SEQ ID NO: 9177 - protein, 697 aa, Artificial Sequence
  Synthetic polypeptide
MSAPVGPRGRLAPIPAASQPPLQPEMPDLSHLTEEERKIILAVMDRQKKEEEKEQSVLKKLHQQFEMYKEQVKKMGEESQQQQEQKGDAPTCGICHKTKFADGCGHNCSYCQTKFCARCGGRVSLRSNKVMWVCNLCRKQQEILTKSGAWFYNSGSNTPQQPDQKVLRGLRNEEAPQEKKPKLHEQTQFQGPSGDLSVPAVEKSRSHGLTRQHSIKNGSGVKHHIASDIASDRKRSPSVSRDQNRRYDQREEREEYSQYATSDTAMPRSPSDYADRRSQHEPQFYEDSDHLSYRDSNRRSHRHSKEYIVDDEDVESRDEYERQRREEEYQSRYRSDPNLARYPVKPQPYEEQMRIHAEVSRARHERRHSDVSLANADLEDSRISMLRMDRPSRQRSISERRAAMENQRSYSMERTREAQGPSSYAQRTTNHSPPTPRRSPLPIDRPDLRRTDSLRKQHHLDPSSAVRKTKREKMETMLRNDSLSSDQSESVRPPPPKPHKSKKGGKMRQISLSSSEEELASTPEYTSCDDVEIESESVSEKGDMDYNWLDHTSWHSSEASPMSLHPVTWQPSKDGDRLIGRILLNKRLKDGSVPRDSGAMLGLKVVGGKMTESGRLCAFITKVKKGSLADTVGHLRPGDEVLEWNGRLLQGATFEEVYNIILESKPEPQVELVVSRPIGDIPRIPDSTHAQLESSLP

SEQ ID NO: 9178 - protein, 505 aa, Artificial Sequence
  Synthetic polypeptide
MQFETLRQVCNSVLSHFHGVFSSPPNILQNELFGQTLNNARKRSPSVSRDQNRRYDQREEREEYSQYATSDTAMPRSPSDYADRRSQHEPQFYEDSDHLSYRDSNRRSHRHSKEYIVDDEDVESRDEYERQRREEEYQSRYRSDPNLARYPVKPQPYEEQMRIHAEVSRARHERRHSDVSLANADLEDSRISMLRMDRPSRQRSISERRAAMENQRSYSMERTREAQGPSSYAQRTTNHSPPTPRRSPLPIDRPDLRRTDSLRKQHHLDPSSAVRKTKREKMETMLRNDSLSSDQSESVRPPPPKPHKSKKGGKMRQISLSSSEEELASTPEYTSCDDVEIESESVSEKGDMDYNWLDHTSWHSSEASPMSLHPVTWQPSKDGDRLIGRILLNKRLKDGSVPRDSGAMLGLKVVGGKMTESGRLCAFITKVKKGSLADTVGHLRPGDEVLEWNGRLLQGATFEEVYNIILESKPEPQVELVVSRPIGDIPRIPDSTHAQLESSLP

SEQ ID NO: 9179 - protein, 552 aa, Artificial Sequence
  Synthetic polypeptide
MQFETLRQVCNSVLSHFHGVFSSPPNILQNELFGQTLNNARKRSPSVSRDQNRRYDQREEREEYSQYATSDTAMPRSPSDYADRRSQHEPQFYEDSDHLSYRDSNRRSHRHSKEYIVDDEDVESRDEYERQRREEEYQSRYRSDPNLARYPVKPQPYEEQMRIHAEVSRARHERRHSDVSLANADLEDSRISMLRMDRPSRQRSISERRAAMENQRSYSMERTREAQGPSSYAQRTTNHSPPTPRRSPLPIDRPDLRRTDSLRKQHHLDPSSAVRKTKREKMETMLRNDSLSSDQSESVRPPPPKPHKSKKGGKMRQISLSSSEEELASTPEYTSCDDVEIESESVSEKGDSQKGKRKTSEQAVLSDSNTRSERQKEMMYFGGHSLEEDLEWSEPQIKDSGVDTCSSTTLNEEHSHSDKHPVTWQPSKDGDRLIGRILLNKRLKDGSVPRDSGAMLGLKVVGGKMTESGRLCAFITKVKKGSLADTVGHLRPGDEVLEWNGRLLQGATFEEVYNIILESKPEPQVELVVSRPIGDIPRIPDSTHAQLESSLP

SEQ ID NO: 9180 - protein, 475 aa, Artificial Sequence
  Synthetic polypeptide
MLDRCALVEQRKRSPSVSRDQNRRYDQREEREEYSQYATSDTAMPRSPSDYADRRSQHEPQFYEDSDHLSYRDSNRRSHRHSKEYIVDDEDVESRDEYERQRREEEYQSRYRSDPNLARYPVKPQPYEEQMRIHAEVSRARHERRHSDVSLANADLEDSRISMLRMDRPSRQRSISERRAAMENQRSYSMERTREAQGPSSYAQRTTNHSPPTPRRSPLPIDRPDLRRTDSLRKQHHLDPSSAVRKTKREKMETMLRNDSLSSDQSESVRPPPPKPHKSKKGGKMRQISLSSSEEELASTPEYTSCDDVEIESESVSEKGDMDYNWLDHTSWHSSEASPMSLHPVTWQPSKDGDRLIGRILLNKRLKDGSVPRDSGAMLGLKVVGGKMTESGRLCAFITKVKKGSLADTVGHLRPGDEVLEWNGRLLQGATFEEVYNIILESKPEPQVELVVSRPIGDIPRIPDSTHAQLESSLP

SEQ ID NO: 9181 - protein, 121 aa, Artificial Sequence
  Synthetic polypeptide
MSRRKQSKPRQIKRPLEDAIEDEEEECPSEETDIISKGDFPLEESFSTEFGPENLSCEEVEYFCNKGDDEGIQETAESDGDTQSEKPGQPGVETDDWDGPGECLVEIKAETPVILLHAKES

SEQ ID NO: 9182 - protein, 120 aa, Artificial Sequence
  Synthetic polypeptide
MSRRKQSKPRQIKRPLEDAIEDEEEECPSEETDIISKGDFPLEESFSTEFGPENLSCEEVEYFCNKGDDEGIQETAESDGDTQSEKPGQPGVETDDWDGPGPWKNMHETSTKFAKKVGDP

SEQ ID NO: 9183 - protein, 6 aa, Artificial Sequence
  Synthetic polypeptide
GSYMNR

SEQ ID NO: 9184 - protein, 137 aa, Artificial Sequence
  Synthetic polypeptide
MAKVSELYDVTWEEMRDKMRKWREENSRNSEQIVEVGEELINEYASKLGDDIWIIYEQVMIAALDYGRDDLALFCLQELRRQFPGSHRVKRLTGMRFEAMERYDDAIQLYDRILQEDPTNTEAEAGESLEPGWQRLQ

SEQ ID NO: 9185 - protein, 265 aa, Artificial Sequence
  Synthetic polypeptide
MWSWFLCWKPVQLDRQTASGFIYTCGGTLKGLNGTIESPGFPYGYPNGANCTWVIIAEERNRIQIVFQSFALEEEYDYLSLYDGHPHPTNFRTRLTGFHLPPPVTSTKSVFSLRLTSDFAVSAHGFKVYYEELQSSSCGNPGVPPKGVLYGTRFDVGDKIRYSCVTGYILDGHPQLTCIANSVNTASWDFPVPICRAEDACGGTMRGSSGIISSPSFPNEYHNNADCTWTIVAEPGDTISLIFTDFQMEEKYDYLEIEGSEPPTI

SEQ ID NO: 9186 - protein, 305 aa, Artificial Sequence
  Synthetic polypeptide
MKGIRKGESRAKESKPWEPGKRRCAKCGRLDFILMKKMGIKSGFTFWNLVFLLTVSCVKGFIYTCGGTLKGLNGTIESPGFPYGYPNGANCTWVIIAEERNRIQIVFQSFALEEEYDYLSLYDGHPHPTNFRTRLTGFHLPPPVTSTKSVFSLRLTSDFAVSAHGFKVYYEELQSSSCGNPGVPPKGVLYGTRFDVGDKIRYSCVTGYILDGHPQLTCIANSVNTASWDFPVPICRAEDACGGTMRGSSGIISSPSFPNEYHNNADCTWTIVAEPGDTISLIFTDFQMEEKYDYLEIEGSEPPTI

SEQ ID NO: 9187 - protein, 103 aa, Artificial Sequence
  Synthetic polypeptide
MASRKEGTGSTATSSSSTAGAAGKGKGKGGSGDSAVKQVQIDGLVVLKIIKHYQEEGQGTEVVQGVLLGLVVEDRLEITNCFPFPQHTEDDADFDEALHPAIL

SEQ ID NO: 9188 - protein, 117 aa, Artificial Sequence
  Synthetic polypeptide
MYSRHAQRIPPGKKMASRKEGTGSTATSSSSTAGAAGKGKGKGGSGDSAVKQVQIDGLVVLKIIKHYQEEGQGTEVVQGVLLGLVVEDRLEITNCFPFPQHTEDDADFDEALHPAIL

SEQ ID NO: 9189 - protein, 119 aa, Artificial Sequence
  Synthetic polypeptide
MASRKEGTGSTATSSSSTAGAAGKGKGKGGSGDSAVKQVQIDGLFSGQVSSQKPFLDPPKVVLKIIKHYQEEGQGTEVVQGVLLGLVVEDRLEITNCFPFPQHTEDDADFDEALHPAIL

SEQ ID NO: 9190 - protein, 48 aa, Artificial Sequence
  Synthetic polypeptide
MASRKEGTGSTATSSSSTAGAAGKGKGKGGSGDSAVKQVQIDGLNVCY

SEQ ID NO: 9191 - protein, 62 aa, Artificial Sequence
  Synthetic polypeptide
MYSRHAQRIPPGKKMASRKEGTGSTATSSSSTAGAAGKGKGKGGSGDSAVKQVQIDGLNVCY

SEQ ID NO: 9192 - protein, 30 aa, Artificial Sequence
  Synthetic polypeptide
MALMYATEGRDYAFSPVLSPVLNLLIHKVG

SEQ ID NO: 9193 - protein, 93 aa, Artificial Sequence
  Synthetic polypeptide
MASPSGSSEATGKPRGRDGRPRREEDDVPPEEKRLRLLLEGGSAEPEDCEDGEDVPRPGREETGTQTGGDGRGVVGIKQDHQCGRLHTLQCLP

SEQ ID NO: 9194 - protein, 74 aa, Artificial Sequence
  Synthetic polypeptide
MASPSGSSEATGKPRGRDGRPRREEDDVPPEEKRLRLLLEGGSAEPEDCEDGEDVPRPGREETGTQTGGDGRGV

SEQ ID NO: 9195 - protein, 547 aa, Artificial Sequence
  Synthetic polypeptide
MQAKKRYFILLSAGSCLALLFYFGGLQFRASRSHSRREEHSGRNGLHHPSPDHFWPRFPDALRPFVPWDQLENEDSSVHISPRQKRDANSSIYKGKKCRMESCFDFTLCKKNGFKVYVYPQQKGEKIAESYQNILAAIEGSRFYTSDPSQACLFVLSLDTLDRDQLSPQYVHNLRSKVQSLHLWNNGRNHLIFNLYSGTWPDYTEDVGFDIGQAMLAKASISTENFRPNFDVSIPLFSKDHPRTGGERGFLKFNTIPPLRKYMLVFKGKRYLTGIGSDTRNALYHVHNGEDVVLLTTCKHGKDWQKHKDSRCDRDNTEYEKYDYREMLHNATFCLVPRGRRLGSFRFLEALQAACVPVMLSNGWELPFSEVINWNQAAVIGDERLLLQIPSTIRSIHQDKILALRQQTQFLWEAYFSSVEKIVLTTLEIIQDRIFKHISRNSLIWNKHPGGLFVLPQYSSYLGDFPYYYANLGLKPPSKFTAVIHAVTPLVSQSQPVLKLLVAAAKSQYCAQIIVLWNCDKPLPAKHRWPATAVPVVVIEGESKGPA

SEQ ID NO: 9196 - protein, 156 aa, Artificial Sequence
  Synthetic polypeptide
MAVEALHCGLNPRGIDHPAHAEGIKLQIEGEGVESQSIKNKNFQKVPDQKGTPKRLQAEAETAKSATVKLSKPVALWTQQDVCKWLKKHCPNQYQIYSESFKQHDITGRALLRLTDKKLERMGIAQENLRQHILQQVLQLKVREEVRNLQLLTQGQ

SEQ ID NO: 9197 - protein, 11 aa, Artificial Sequence
  Synthetic polypeptide
SSPLWFESTGY

SEQ ID NO: 9198 - protein, 148 aa, Artificial Sequence
  Synthetic polypeptide
GLNPRGIDHPAHAEGIKLQIEGEGVESQSIKNKNFQKVPDQKGTPKRLQAEAETAKSATVKLSKPVALWTQQDVCKWLKKHCPNQYQIYSESFKQHDITGRALLRLTDKKLERMGIAQENLRQHILQQVLQLKVREEVRNLQLLTQGQ

SEQ ID NO: 9199 - protein, 15 aa, Artificial Sequence
  Synthetic polypeptide
TPCARRAGSRLPRFA

SEQ ID NO: 9200 - protein, 11 aa, Artificial Sequence
  Synthetic polypeptide
SSPLWFESTGY

SEQ ID NO: 9201 - protein, 15 aa, Artificial Sequence
  Synthetic polypeptide
TPCARRAGSRLPRFA

SEQ ID NO: 9202 - protein, 158 aa, Artificial Sequence
  Synthetic polypeptide
MAVEALHCGLNPRGIDHPAHAEGIKLQIEGEGVESQSIKNKNFQKVPDQKGTPKRLQAEAETAKSATVKLSKPVALWTQQDVCKWLKKHCPNQYQIYSESFKQHDITGRALLRLTDKKLERMGIAQENLRQHILQQVLQLKVREEVRNLQLLTQGNAE

SEQ ID NO: 9203 - protein, 150 aa, Artificial Sequence
  Synthetic polypeptide
GLNPRGIDHPAHAEGIKLQIEGEGVESQSIKNKNFQKVPDQKGTPKRLQAEAETAKSATVKLSKPVALWTQQDVCKWLKKHCPNQYQIYSESFKQHDITGRALLRLTDKKLERMGIAQENLRQHILQQVLQLKVREEVRNLQLLTQGNAE

SEQ ID NO: 9204 - protein, 15 aa, Artificial Sequence
  Synthetic polypeptide
TPCARRAGSRLPRFA

SEQ ID NO: 9205 - protein, 135 aa, Artificial Sequence
  Synthetic polypeptide
MAVEALHCGLNPRGIDHPAHAEGIKLQIEGEGVESQSIKNKNFQKVPDQKGTPKRLQAEAETAKSATVKLSKPVALWTQQDVCKWLKKHCPNQYQIYSESFKQHDITEVQLTCLTTVDKVSFTSHLHIYFSLPDL

SEQ ID NO: 9206 - protein, 127 aa, Artificial Sequence
  Synthetic polypeptide
GLNPRGIDHPAHAEGIKLQIEGEGVESQSIKNKNFQKVPDQKGTPKRLQAEAETAKSATVKLSKPVALWTQQDVCKWLKKHCPNQYQIYSESFKQHDITEVQLTCLTTVDKVSFTSHLHIYFSLPDL

SEQ ID NO: 9207 - protein, 16 aa, Artificial Sequence
  Synthetic polypeptide
MAVEVSGKVPGKPKVF

SEQ ID NO: 9208 - protein, 60 aa, Artificial Sequence
  Synthetic polypeptide
MSAGGASVPPPPNPAVSFPPPRVTLPAGPDILRTYSGAFVCLEITVSSVVTETKCNLFTI

SEQ ID NO: 9209 - protein, 79 aa, Artificial Sequence
  Synthetic polypeptide
MSSFSRAPQQWATFARIWYLLDGKMQPPGKLAAMASIRLQGLHKPVYHALNFCSGIYILREASPDSSAHPFTLYTFTLL

SEQ ID NO: 9210 - protein, 55 aa, Artificial Sequence
  Synthetic polypeptide
MQPPGKLAAMASIRLQGLHKPVYHALNFCSGIYILREASPDSSAHPFTLYTFTLL

SEQ ID NO: 9211 - protein, 144 aa, Artificial Sequence
  Synthetic polypeptide
MDRYLLLVIWGEGKFPSAASREAEHGPEVSSGEGTENQPDFTAANVYHLLKRSISASINPEDSTFPACSVGGIPGSKKWFFAVQAIYGFYQFCSSDWQEIHFDTEKDKIEDVLQTNIEECLGAVECFEEEDSNSRESLSLAEKN

SEQ ID NO: 9212 - protein, 427 aa, Artificial Sequence
  Synthetic polypeptide
MDRYLLLVIWGEGKFPSAASREAEHGPEVSSGEGTENQPDFTAANVYHLLKRSISASINPEDSTFPACSVGGIPGSKKWFFAVQAIYGFYQFCSSDWQEIHFDTEKDKIEDVLQTNIEECLGAVECFEEEDSNSRESLSLADLYEEAAENLHQLSDKLPAPGRAMVDIILLLSDKDPPKLKDYLPTVGALKHLREWYSAKITIAGNHCEINCQKIAEYLSANVVSLEDLRNVIDSKELWRGKIQIWERKFGFEISFPEFCLKGVTLKNFSTSNLNTDFLAKKIIPSKDKNILPKVFHYYGPALEFVQMIKLSDLPSCYMSDIEFELGLTNSTKQNSVLLLEQISSLCSKVGALFVLPCTISNILIPPPNQLSSRKWKEYIAKKPKTISGPFLPAHLKLQTDSSPDLLFIFLALSFYLSTHAVYYTKC

SEQ ID NO: 9213 - protein, 439 aa, Artificial Sequence
  Synthetic polypeptide
MDRYLLLVIWGEGKFPSAASREAEHGPEVSSGEGTENQPDFTAANVYHLLKRSISASINPEDSTFPACSVGGIPGSKKWFFAVQAIYGFYQFCSSDWQEIHFDTEKDKIEDVLQTNIEECLGAVECFEEEDSNSRESLSLADLYEEAAENLHQLSDKLPAPGRAMVDIILLLSDKDPPKLKDYLPTVGALKHLREWYSAKITIAGNHCEINCQKIAEYLSANVVSLEDLRNVIDSKELWRGKIQIWERKFGFEISFPEFCLKGVTLKNFSTSNLNTDFLAKKIIPSKDKNILPKVFHYYGPALEFVQMIKLSDLPSCYMSDIEFELGLTNSTKQNSVLLLEQISSLCSKVGALFVLPCTISNILIPPPNQLSSRKWKEYIAKKPKTISGNMIVYLENSIVSAQNLLKLINNFSKVSRYKINVQKLQTFLYTNNRQRAKS

SEQ ID NO: 9214 - protein, 405 aa, Artificial Sequence
  Synthetic polypeptide
MAVAAAAAAAGPAGAGGGRAQRSGLLEVLVRDRWHKVLVNLSEDALVLSSEEGAAAYNGIGTATNGSFCRGAGAGHPGAGGAQPPDSPAGVRTAFTDLPEQVPESISNQKRGVKVLKQELGGLGISIKGGKENKMPILISKIFKGLAADQTQALYVGDAILSVNGADLRDATHDEAVQALKRAGKEVLLEVKYMREATPYVKKGSPVSEIGWETPPPESPRLGGSTSDPPSSQSFSFHRDRKSIPLKMCYVTRSMALADPENRQLEIHSPDAKHTVILRSKDSATAQAWFSAIHSNVNDLLTRVIAEVREQLGKTGIAGSREIRHLGWLAEKVPGESKKQWKPALVVLTEKDLLIYDSMPRRKEAWFSPVHTYPLLATSAPHCSHYRLSSASCQISCSVRFSQEF

SEQ ID NO: 9215 - protein, 191 aa, Artificial Sequence
  Synthetic polypeptide
MAVAAAAAAAGPAGAGGGRAQRSGLLEVLVRDRWHKVLVNLSEDALVLSSEEGAAAYNGIGTATNGSFCRGAGAGHPGAGGAQPPDSPAGVRTAFTDLPEQVPESISNQKRGVKVLKQELGGLGISIKGGKENKMPILISKIFKGLAADQTQALYVGDAILSVNGADLRDATHDEAVQALKRAGKEVLLEG

SEQ ID NO: 9216 - protein, 193 aa, Artificial Sequence
  Synthetic polypeptide
MAVAAAAAAAGPAGAGGGRAQRSGLLEVLVRDRWHKVLVNLSEDALVLSSEEGAAAYNGIGTATNGSFCRGAGAGHPGAGGAQPPDSPAGVRTAFTDLPEQVPESISNQKRGVKVLKQELGGLGISIKGGKENKMPILISKIFKGLAADQTQALYVGDAILSVNGADLRDATHDEAVQALKRAGKEVLLEGLF

SEQ ID NO: 9217 - protein, 63 aa, Artificial Sequence
  Synthetic polypeptide
MSDIGDWFRSIPAITRYWFAATVAVPLVGKLGLISPAYLFLWPEAFLYRFQGWNVEVDFWPRG

SEQ ID NO: 9218 - protein, 187 aa, Artificial Sequence
  Synthetic polypeptide
MEGNGPAAVHYQPASPPRDACVYSSCYCEENIWKLCEYIKNHDQYPLEECYAVFISNERKMIPIWKQQARPGDGPVIWDYHVVLLHVSSGGQNFIYDLDTVLPFPCLFDTYVEDAFKSDDDIHPQFRRKFRVIRADSYLKNFASDRSHMKDSSGNWREPPPPYPCIETGDSKMNLNDFISMDPKMKW

SEQ ID NO: 9219 - protein, 127 aa, Artificial Sequence
  Synthetic polypeptide
MIPIWKQQARPGDGPVIWDYHVVLLHVSSGGQNFIYDLDTVLPFPCLFDTYVEDAFKSDDDIHPQFRRKFRVIRADSYLKNFASDRSHMKDSSGNWREPPPPYPCIETGDSKMNLNDFISMDPKMKW

SEQ ID NO: 9220 - protein, 39 aa, Artificial Sequence
  Synthetic polypeptide
MKDSSGNWREPPPPYPCIETGDSKMNLNDFISMDPKMKW

SEQ ID NO: 9221 - protein, 236 aa, Artificial Sequence
  Synthetic polypeptide
MNIDVEFHIRHNYPWNKLPANVRQSLGNSQREYEKQVVLYSIRNQLRYRNNLVKHVKKDERRYYEELLKYSRDHLMLYPYHLSDIMVKGLRITPFSYYTGIMEDIMNSEKSYDSLPNFTAADCLRLLGIGRNQYIDLMNQCRSSKKFFRRKTARDLLPIKPVEIAIEAWWVVQAGYITEDDIKICTLPEKCAVDKIIDSGPQLSGSLDYNVVHSLYNKGFIYLDVPISDDSCIAGG

SEQ ID NO: 9222 - protein, 19 aa, Artificial Sequence
  Synthetic polypeptide
VCITKDLFIWMYQYLMTVV

SEQ ID NO: 9223 - protein, 177 aa, Artificial Sequence
  Synthetic polypeptide
MLDFLAENNLCGQAILRIVSCGNAIIAELLRLSEFIPAVFRLKDRADQQKYGDIIFDFSYFKGPELWESKLDAKPELQDLDEEFRENNIEIVTRFYLAFQSVHKYIVDLNRYLDDLNEGVYIQQTLETVLLNEDGKQLLCEALYLYGVMLLVIDQKIEGEVRERMLVSYYRYRYSGG

SEQ ID NO: 9224 - protein, 29 aa, Artificial Sequence
  Synthetic polypeptide
MLLVIDQKIEGEVRERMLVSYYRYRYSGG

SEQ ID NO: 9225 - protein, 260 aa, Artificial Sequence
  Synthetic polypeptide
MSSPAVARTSPGGSREMAPAPQGRGRFWEVGGGSGHRLERAAAESERWELLLRRGELLALGGHLKGALEAFAAALRRGAPARPECLGALVDCLVFNYRLRHGLGWSAAPVAGADGGAGGLLRCLGCRGFLSEPVTVPCGHSYCRRCLRRELRARCRLCRDRLPPATASATDAEGTAPRPPPLAAAIAASDFRTSVVLNHLAEKWFPGQRERARAAGRLGELLHQGRYREALAAACEALRAGMVAQTCNPSTLGDRGGRIA

SEQ ID NO: 9226 - protein, 146 aa, Artificial Sequence
  Synthetic polypeptide
MPGRSSSNSGSTGFISFSGVESALSSLKNFQACINSGMDTASSVALDLVESQTEVSSEYSMDKAMVEFATLDRQLNHYVKAVQSTINHVKEERPEKIPDLKLLVEKKFLALQSKNSDADFQNNEKFVQFKQQLKELKKQCHSKRNL

SEQ ID NO: 9227 - protein, 86 aa, Artificial Sequence
  Synthetic polypeptide
MDKAMVEFATLDRQLNHYVKAVQSTINHVKEERPEKIPDLKLLVEKKFLALQSKNSDADFQNNEKFVQFKQQLKELKKQCHSKRNL

SEQ ID NO: 9228 - protein, 139 aa, Artificial Sequence
  Synthetic polypeptide
MPGRSSSNSGSTGFISFSGVESALSSLKNFQACINSGMDTASSVALDLVESQTEVSSEYSMDKAMVEFATLDRQLNHYVKAVQSTINHVKEERPEKIPDLKLLVEKKFLALQSKNSDADFQNNEKFVQFKQQLKELKKQ

SEQ ID NO: 9229 - protein, 79 aa, Artificial Sequence
  Synthetic polypeptide
MDKAMVEFATLDRQLNHYVKAVQSTINHVKEERPEKIPDLKLLVEKKFLALQSKNSDADFQNNEKFVQFKQQLKELKKQ

SEQ ID NO: 9230 - protein, 242 aa, Artificial Sequence
  Synthetic polypeptide
MPGRSSSNSGSTGFISFSGVESALSSLKNFQACINSGMDTASSVALDLVESQTEVSSEYSMDKAMVEFATLDRQLNHYVKAVQSTINHVKEERPEKIPDLKLLVEKKFLALQSKNSDADFQNNEKFVQFKQQLKELKKQCGLQADREADGTEGVDEDIIVTQSQTNFTCPITKEEMKKPVKNKVCGHTYEEDAIVRMIESRQKRKKKAYQVQWLMPVIPALWEADVGRSLEVRSSRPAGATW

SEQ ID NO: 9231 - protein, 182 aa, Artificial Sequence
  Synthetic polypeptide
MDKAMVEFATLDRQLNHYVKAVQSTINHVKEERPEKIPDLKLLVEKKFLALQSKNSDADFQNNEKFVQFKQQLKELKKQCGLQADREADGTEGVDEDIIVTQSQTNFTCPITKEEMKKPVKNKVCGHTYEEDAIVRMIESRQKRKKKAYQVQWLMPVIPALWEADVGRSLEVRSSRPAGATW

SEQ ID NO: 9232 - protein, 18 aa, Artificial Sequence
  Synthetic polypeptide
EKRARKTTWDDPHRDNRS

SEQ ID NO: 9233 - protein, 540 aa, Artificial Sequence
  Synthetic polypeptide
MRSSASRLSSFSSRDSLWNRMPDQISVSEFIAETTEDYNSPTTSSFTTRLHNCRNTVTLLEEALDQDRTALQKVKKSVKAIYNSGQDHVQNEENYAQVLDKFGSNFLSRDNPDLGTAFVKFSTLTKELSTLLKNLLQGLSHNVIFTLDSLLKGDLKGVKGDLKKPFDKAWKDYETKFTKIEKEKREHAKQHGMIRTEITGAEIAEEMEKERRLFQLQMCEYLIKVNEIKTKKGVDLLQNLIKYYHAQCNFFQDGLKTADKLKQYIEKLAADLYNIKQTQDEEKKQLTALRDLIKSSLQLDQKEDSQSRQGGYSMHQLQGNKEYGSEKKGYLLKKSDGIRKVWQRRKCSVKNGILTISHATSNRQPAKLNLLTCQVKPNAEDKKSFDLISHNRTYHFQAEDEQDYVAWISVLTNSKEEALTMAFRGEQSAGENSLEDLTKAIIEDVQRLPGNDICCDCGSSEPTWLSTNLGILTCIECSGIHREMGVHISRIQSLELDKLGTSELLLAKNVGNNSFNDIMEANLPSPSPKPTPSSDIGSRL

SEQ ID NO: 9234 - protein, 57 aa, Artificial Sequence
  Synthetic polypeptide
MGDPKAHVMARPLRAPLRRSFSDHIRDSTARALDVIWKNTRDRRLAASAGDTQANRV

SEQ ID NO: 9235 - protein, 265 aa, Artificial Sequence
  Synthetic polypeptide
MGLKARRAAGAAGGGGDGGGGGGGAANPAGGDAAAAGDEERKVGLAPGDVEQVTLALGAGADKDGTLLLEGGGRDEGQRRTPQGIGLLAKTPLSRPVKRNNAKYRRIQTLIYDALERPRGWALLYHALVFLIVLGCLILAVLTTFKEYETVSGDWLLLLETFAIFIFGAEFALRIWAAGCCCRYKGWRGRLKFARKPLCMLDIFVLIASVPVVAVGNQGNVLATSLRSLRFLQILRMLRMDRRGGTWKLLGSAICAHSKIFERME

SEQ ID NO: 9236 - protein, 145 aa, Artificial Sequence
  Synthetic polypeptide
MKPAEHATMFLIVLGCLILAVLTTFKEYETVSGDWLLLLETFAIFIFGAEFALRIWAAGCCCRYKGWRGRLKFARKPLCMLDIFVLIASVPVVAVGNQGNVLATSLRSLRFLQILRMLRMDRRGGTWKLLGSAICAHSKIFERME

SEQ ID NO: 9237 - protein, 582 aa, Artificial Sequence
  Synthetic polypeptide
MSKKPPNRPGITFEIGARLEALDYLQKWYPSRIEKIDYEEGKMLVHFERWSHRYDEWIYWDSNRLRPLERPALRKEGLKDEEDFFDFKAGEEVLARWTDCRYYPAKIEAINKEGTFTVQFYDGVIRCLKRMHIKAMPEDAKGQVKSQHPLSWCCPIDPAGSCNQSMGSEDWIALVKAAAAAAAKNKTGSKPRTSANSNKDKDKDERKWFKVPSKKEETSTCIATPDVEKKEDLPTSSETFGLHVENVPKMVFPQPESTLSNKRKNNQGNSFQAKRARLNKITGLLASKAVGVDGAEKKEDYNETAPMLEQAISPKPQSQKKNEADISSSANTQKPALLSSTLSSGKARSKKCKHESGDSSGCIKPPKSPLSPELIQVEDLTLVSQLSSSVINKTSPPQPVNPPRPFKHSERRRRSQRLATLPMPDDSVEKVSSPSPATDGKVFSISSQNQQESSVPEVPDVAHLPLEKLGPCLPLDLSRGSEVTAPVASDSSYRNECPRAEKEDTQMLPNPSSKAIADGRGAPAAAGISKTEKKVKLEDKSSTAFGKRKEKDKERREKRDKDHYRPKQKKKKKKKKKSKQHA

SEQ ID NO: 9238 - protein, 557 aa, Artificial Sequence
  Synthetic polypeptide
MSKKPPNRPGITFEIGARLEALDYLQKWYPSRIEKIDYEEGKMLVHFERWSHRYDEWIYWDSNRLRPLERPALRKEGLKDEEDFFDFKAGEEVLARWTDCRYYPAKIEAINKEGTFTVQFYDGVIRCLKRMHIKAMPEDAKGQDWIALVKAAAAAAAKNKTGSKPRTSANSNKDKDKDERKWFKVPSKKEETSTCIATPDVEKKEDLPTSSETFVGLHVENVPKMVFPQPESTLSNKRKNNQGNSFQAKRARLNKITGLLASKAVGVDGAEKKEDYNETAPMLEQAISPKPQSQKKNEADISSSANTQKPALLSSTLSSGKARSKKCKHESGDSSGCIKPPKSPLSPELIQVEDLTLVSQLSSSVINKTSPPQPVNPPRPFKHSERRRRSQRLATLPMPDDSVEKVSSPSPATDGKVFSISSQNQQESSVPEVPDVAHLPLEKLGPCLPLDLSRGSEVTAPVASDSSYRNECPRAEKEDTQMLPNPSSKAIADGRGAPAAAGISKTEKKVKLEDKSSTAFGKRKEKDKERREKRDKDHYRPKQKKKKKKKKKSKQHA

SEQ ID NO: 9239 - protein, 222 aa, Artificial Sequence
  Synthetic polypeptide
MAGLRGNAVAGLLWMLLLWSGGGGCQAQRAGCKSVHYDLVFLLDTSSSVGKEDFEKVRQWVANLVDTFEVGPDRTRVGVVRYSDRPTTAFELGLFGSQEEVKAAARRLAYHGGNTNTGDALRYITARSFSPHAGGRPRDRAYKQVAILLTDGRSQDLVLDAAAAAHRAGIRIFAVGVGEALKEELEEIASEPKSAHVFHVSDFNAIDKIRGKLRRRLCERRS

SEQ ID NO: 9240 - protein, 882 aa, Artificial Sequence
  Synthetic polypeptide
MSVPDYMQCAEDHQTLLVVVQPVGIVSEENFFRIYKRICSVSQISVRDSQRVLYIRYRHHYPPENNEWGDFQTHRKVVGLITITDCFSAKDWPQTFEKFHVQKEIYGSTLYDSRLFVFGLQGEIVEQPRTDVAFYPNYEDCQTVEKRIEDFIESLFIVLESKRLDRATDKSGDKIPLLCVPFEKKDFVGLDTDSRHYKKRCQGRMRKHVGDLCLQAGMLQDSLVHYHMSVELLRSVNDFLWLGAALEGLCSASVIYHYPGGTGGKSGARRFQGSTLPAEAANRHRPGALTTNGINPDTSTEIGRAKNCLSPEDIIDKYKEAISYYSKYKNAGVIELEACIKAVRVLAIQKRSMEASEFLQNAVYINLRQLSEEEKIQRYSILSELYELIGFHRKSAFFKRVAAMQCVAPSIAEPGWRACYKLLLETLPGYSLSLDPKDFSRGTHRGWAAVQMRLLHELVYASRRMGNPALSVRHLSFLLQTMLDFLSDQEKKDVAQSLENYTSKCPGTMEPIALPGGLTLPPVPFTKLPIVRHVKLLNLPASLRPHKMKSLLGQNVSTKSPFIYSPIIAHNRGEERNKKIDFQWVQGDVCEVQLMVYNPMPFELRVENMGLLTSGVEFESLPAALSLPAESGLYPVTLVGVPQTTGTITVNGYHTTVFGVFSDCLLDNLPGIKTSGSTVEVIPALPRLQISTSLPRSAHSLQPSSGDEISTNVSVQLYNGESQQLIIKLENIGMEPLEKLEVTSKVLTTKEKLYGDFLSWKLEETLAQFPLQPGKVATFTINIKVKLDFSCQENLLQDLSDDGISVSGFPLSSPFRQVVRPRVEGKPVNPPESNKAGDYSHVKENENTDSLKDMTDAHSSFIHNSPKLETKCPGTDEWINTL

SEQ ID NO: 9241 - protein, 989 aa, Artificial Sequence
  Synthetic polypeptide
MVPAGDQDRAPHRGKPAQAGARTSRASRALRSWRRSQAARATVTHPRGGHDRGSHGGYREGHRGCRRDPQWASAGPPPLSFTEEVKFELRALKDWDFKMSVPDYMQCAEDHQTLLVVVQPVGIVSEENFFRIYKRICSVSQISVRDSQRVLYIRYRHHYPPENNEWGDFQTHRKVVGLITITDCFSAKDWPQTFEKFHVQKEIYGSTLYDSRLFVFGLQGEIVEQPRTDVAFYPNYEDCQTVEKRIEDFIESLFIVLESKRLDRATDKSGDKIPLLCVPFEKKDFVGLDTDSRHYKKRCQGRMRKHVGDLCLQAGMLQDSLVHYHMSVELLRSVNDFLWLGAALEGLCSASVIYHYPGGTGGKSGARRFQGSTLPAEAANRHRPGAQEVLIDPGALTTNGINPDTSTEIGRAKNCLSPEDIIDKYKEAISYYSKYKNAGVIELEACIKAVRVLAIQKRSMEASEFLQNAVYINLRQLSEEEKIQRYSILSELYELIGFHRKSAFFKRVAAMQCVAPSIAEPGWRACYKLLLETLPGYSLSLDPKDFSRGTHRGWAAVQMRLLHELVYASRRMGNPALSVRHLSFLLQTMLDFLSDQEKKDVAQSLENYTSKCPGTMEPIALPGGLTLPPVPFTKLPIVRHVKLLNLPASLRPHKMKSLLGQNVSTKSPFIYSPIIAHNRGEERNKKIDFQWVQGDVCEVQLMVYNPMPFELRVENMGLLTSGVEFESLPAALSLPAESGLYPVTLVGVPQTTGTITVNGYHTTVFGVFSDCLLDNLPGIKTSGSTVEVIPALPRLQISTSLPRSAHSLQPSSGDEISTNVSVQLYNGESQQLIIKLENIGMEPLEKLEVTSKVLTTKEKLYGDFLSWKLEETLAQFPLQPGKVATFTINIKVKLDFSCQENLLQDLSDDGISVSGFPLSSPFRQVVRPRVEGKPVNPPESNKAGDYSHVKENENTDSLKDMTDAHSSFIHNSPKLETKCPGTDEWINTL

SEQ ID NO: 9242 - protein, 25 aa, Artificial Sequence
  Synthetic polypeptide
RGLHRVTVHRAGVQASGQSHRQVWG

SEQ ID NO: 9243 - protein, 891 aa, Artificial Sequence
  Synthetic polypeptide
MSVPDYMQCAEDHQTLLVVVQPVGIVSEENFFRIYKRICSVSQISVRDSQRVLYIRYRHHYPPENNEWGDFQTHRKVVGLITITDCFSAKDWPQTFEKFHVQKEIYGSTLYDSRLFVFGLQGEIVEQPRTDVAFYPNYEDCQTVEKRIEDFIESLFIVLESKRLDRATDKSGDKIPLLCVPFEKKDFVGLDTDSRHYKKRCQGRMRKHVGDLCLQAGMLQDSLVHYHMSVELLRSVNDFLWLGAALEGLCSASVIYHYPGGTGGKSGARRFQGSTLPAEAANRHRPGAQEVLIDPGALTTNGINPDTSTEIGRAKNCLSPEDIIDKYKEAISYYSKYKNAGVIELEACIKAVRVLAIQKRSMEASEFLQNAVYINLRQLSEEEKIQRYSILSELYELIGFHRKSAFFKRVAAMQCVAPSIAEPGWRACYKLLLETLPGYSLSLDPKDFSRGTHRGWAAVQMRLLHELVYASRRMGNPALSVRHLSFLLQTMLDFLSDQEKKDVAQSLENYTSKCPGTMEPIALPGGLTLPPVPFTKLPIVRHVKLLNLPASLRPHKMKSLLGQNVSTKSPFIYSPIIAHNRGEERNKKIDFQWVQGDVCEVQLMVYNPMPFELRVENMGLLTSGVEFESLPAALSLPAESGLYPVTLVGVPQTTGTITVNGYHTTVFGVFSDCLLDNLPGIKTSGSTVEVIPALPRLQISTSLPRSAHSLQPSSGDEISTNVSVQLYNGESQQLIIKLENIGMEPLEKLEVTSKVLTTKEKLYGDFLSWKLEETLAQFPLQPGKVATFTINIKVKLDFSCQENLLQDLSDDGISVSGFPLSSPFRQVVRPRVEGKPVNPPESNKAGDYSHVKENENTDSLKDMTDAHSSFIHNSPKLETKCPGTDEWINTL

SEQ ID NO: 9244 - protein, 25 aa, Artificial Sequence
  Synthetic polypeptide
RGLHRVTVHRAGVQASGQSHRQVWG

SEQ ID NO: 9245 - protein, 754 aa, Artificial Sequence
  Synthetic polypeptide
MSVPDYMQCAEDHQTLLVVVQPVGIVSEENFFRIYKRICSVSQISVRDSQRVLYIRYRHHYPPENNEWGDFQTHRKVVGLITITDCFSAKDWPQTFEKFHVQKEIYGSTLYDSRLFVFGLQGEIVEQPRTDVAFYPNYEDCQTVEKRIEDFIESLFIVLESKRLDRATDKSGDKIPLLCVPFEKKDFVGLDTDSRHYKKRCQGRMRKHVGDLCLQAGMLQDSLVHYHMSVELLRSVNDFLWLGAALEGLCSASVIYHYPGGTGGKSGARRFQGSTLPAEAANRHRPGALTTNGINPDTSTEIGRAKNCLSPEDIIDKYKEAISYYSKYKNAGVIELEACIKAVRVLAIQKRSMEASEFLQNAVYINLRQLSEEEKIQRYSILSELYELIGFHRKSAFFKRVAAMQCVAPSIAEPGWRACYKLLLETLPGYSLSLDPKDFSRGTHRGWAAVQMRLLHELVYASRRMGNPALSVRHLSFLLQTMLDFLSDQEKKDVAQSLENYTSKCPGTMEPIALPGGLTLPPVPFTKLPIVRHVKLLNLPASLRPHKMKSLLGQNVSTKSPFIYSPIIAHNRGEERNKKIDFQWVQGDVCEVQLMVYNPMPFELRVENMGLLTSGVEFESLPAALSLPAESGLYPVTLVGVPQTTGTITVNGYHTTVFGVFSDCLLDNLPGIKTSGSTVEVIPALPRLQISTSLPRSAHSLQPSSGDEISTNVSVQLYNGESQQLIIKLENIGMEPLEKLEVTSKVLTTKGPGT

SEQ ID NO: 9246 - protein, 861 aa, Artificial Sequence
  Synthetic polypeptide
MVPAGDQDRAPHRGKPAQAGARTSRASRALRSWRRSQAARATVTHPRGGHDRGSHGGYREGHRGCRRDPQWASAGPPPLSFTEEVKFELRALKDWDFKMSVPDYMQCAEDHQTLLVVVQPVGIVSEENFFRIYKRICSVSQISVRDSQRVLYIRYRHHYPPENNEWGDFQTHRKVVGLITITDCFSAKDWPQTFEKFHVQKEIYGSTLYDSRLFVFGLQGEIVEQPRTDVAFYPNYEDCQTVEKRIEDFIESLFIVLESKRLDRATDKSGDKIPLLCVPFEKKDFVGLDTDSRHYKKRCQGRMRKHVGDLCLQAGMLQDSLVHYHMSVELLRSVNDFLWLGAALEGLCSASVIYHYPGGTGGKSGARRFQGSTLPAEAANRHRPGAQEVLIDPGALTTNGINPDTSTEIGRAKNCLSPEDIIDKYKEAISYYSKYKNAGVIELEACIKAVRVLAIQKRSMEASEFLQNAVYINLRQLSEEEKIQRYSILSELYELIGFHRKSAFFKRVAAMQCVAPSIAEPGWRACYKLLLETLPGYSLSLDPKDFSRGTHRGWAAVQMRLLHELVYASRRMGNPALSVRHLSFLLQTMLDFLSDQEKKDVAQSLENYTSKCPGTMEPIALPGGLTLPPVPFTKLPIVRHVKLLNLPASLRPHKMKSLLGQNVSTKSPFIYSPIIAHNRGEERNKKIDFQWVQGDVCEVQLMVYNPMPFELRVENMGLLTSGVEFESLPAALSLPAESGLYPVTLVGVPQTTGTITVNGYHTTVFGVFSDCLLDNLPGIKTSGSTVEVIPALPRLQISTSLPRSAHSLQPSSGDEISTNVSVQLYNGESQQLIIKLENIGMEPLEKLEVTSKVLTTKGPGT

SEQ ID NO: 9247 - protein, 763 aa, Artificial Sequence
  Synthetic polypeptide
MSVPDYMQCAEDHQTLLVVVQPVGIVSEENFFRIYKRICSVSQISVRDSQRVLYIRYRHHYPPENNEWGDFQTHRKVVGLITITDCFSAKDWPQTFEKFHVQKEIYGSTLYDSRLFVFGLQGEIVEQPRTDVAFYPNYEDCQTVEKRIEDFIESLFIVLESKRLDRATDKSGDKIPLLCVPFEKKDFVGLDTDSRHYKKRCQGRMRKHVGDLCLQAGMLQDSLVHYHMSVELLRSVNDFLWLGAALEGLCSASVIYHYPGGTGGKSGARRFQGSTLPAEAANRHRPGAQEVLIDPGALTTNGINPDTSTEIGRAKNCLSPEDIIDKYKEAISYYSKYKNAGVIELEACIKAVRVLAIQKRSMEASEFLQNAVYINLRQLSEEEKIQRYSILSELYELIGFHRKSAFFKRVAAMQCVAPSIAEPGWRACYKLLLETLPGYSLSLDPKDFSRGTHRGWAAVQMRLLHELVYASRRMGNPALSVRHLSFLLQTMLDFLSDQEKKDVAQSLENYTSKCPGTMEPIALPGGLTLPPVPFTKLPIVRHVKLLNLPASLRPHKMKSLLGQNVSTKSPFIYSPIIAHNRGEERNKKIDFQWVQGDVCEVQLMVYNPMPFELRVENMGLLTSGVEFESLPAALSLPAESGLYPVTLVGVPQTTGTITVNGYHTTVFGVFSDCLLDNLPGIKTSGSTVEVIPALPRLQISTSLPRSAHSLQPSSGDEISTNVSVQLYNGESQQLIIKLENIGMEPLEKLEVTSKVLTTKGPGT

SEQ ID NO: 9248 - protein, 990 aa, Artificial Sequence
  Synthetic polypeptide
MAAAYLDPNLNHTPNSSTKTHLGTGMERSPGAMERVLKVFHYFESNSEPTTWASIIRHGDATDVRGIIQKIVDSHKVKHVACYGFRLSHLRSEEVHWLHVDMGVSSVREKYELAHPPEEWKYELRIRYLPKGFLNQFTEDKPTLNFFYQQVKSDYMLEIADQVDQEIALKLGCLEIRRSYWEMRGNALEKKSNYEVLEKDVGLKRFFPKSLLDSVKAKTLRKLIQQTFRQFANLNREESILKFFEILSPVYRFDKECFKCALGSSWIISVELAIGPEEGISYLTDKGCNPTHLADFTQVQTIQYSNSEDKDRKGMLQLKIAGAPEPLTVTAPSLTIAENMADLIDGYCRLVNGTSQSFIIRPQKEGERALPSIPKLANSEKQGMRTHAVSVSETDDYAEIIDEEDTYTMPSTRDYEIQRERIELGRCIGEGQFGDVHQGIYMSPENPALAVAIKTCKNCTSDSVREKFLQEALTMRQFDHPHIVKLIGVITENPVWIIMELCTLGELRSFLQVRKYSLDLASLILYAYQLSTALAYLESKRFVHRDIAARNVLVSSNDCVKLGDFGLSRYMEDSTYYKASKGKLPIKWMAPESINFRRFTSASDVWMFGVCMWEILMHGVKPFQGVKNNDVIGRIENGERLPMPPNCPPTLYSLMTKCWAYDPSRRPRFTELKAQLSTILEEEKAQQEERMRMESRRQATVSWDSGGSDEAPPKPSRPGYPSPRSSEGFYPSPQHMVQTNHYQVSGYPGSHGITAMAGSIYPGQASLLDQTDSWNHRPQEIAMWQPNVEDSTVLDLRGIGQVLPTHLMEERLIRQQQEMEEDQRWLEKEERFLKPDVRLSRGSIDREDGSLQGPIGNQHIYQPVGKPDPAAPPKKPPRPGAPGHLGSLASLSSPADSYNEGVKLQPQEISPPPTANLDRSNDKVYENVTGLVKAVIEMSSKIQPAPPEEYVPMVKEVGLALRTLLATVDETIPLLPASTHREARHGSSRP

SEQ ID NO: 9249 - protein, 1 aa, Artificial Sequence
  Synthetic polypeptide
I

SEQ ID NO: 9250 - protein, 944 aa, Artificial Sequence
  Synthetic polypeptide
MAAAYLDPNLNHTPNSSTKTHLGTGMERSPGAMERVLKVFHYFESNSEPTTWASIIRHGDATDVRGIIQKIVDSHKVKHVACYGFRLSHLRSEEVHWLHVDMGVSSVREKYELAHPPEEWKYELRIRYLPKGFLNQFTEDKPTLNFFYQQVKSDYMLEIADQVDQEIALKLGCLEIRRSYWEMRGNALEKKSNYEVLEKDVGLKRFFPKSLLDSVKAKTLRKLIQQTFRQFANLNREESILKFFEILSPVYRFDKECFKCALGSSWIISVELAIGPEEGISYLTDKGCNPTHLADFTQVQTIQYSNSEDKDRKGMLQLKIAGAPEPLTVTAPSLTIAENMADLIDGYCRLVNGTSQSFIIRPQKEGERALPSIPKLANSEKQGMRTHAVSVSETDDYAEIIDEEDTYTMPSTRDYEIQRERIELGRCIGEGQFGDVHQGIYMSPENPALAVAIKTCKNCTSDSVREKFLQEALTMRQFDHPHIVKLIGVITENPVWIIMELCTLGELRSFLQVRKYSLDLASLILYAYQLSTALAYLESKRFVHRDIAARNVLVSSNDCVKLGDFGLSRYMEDSTYYKASKGKLPIKWMAPESINFRRFTSASDVWMFGVCMWEILMHGVKPFQGVKNNDVIGRIENGERLPMPPNCPPTLYSLMTKCWAYDPSRRPRFTELKAQLSTILEEEKAQQEERMRMESRRQATVSWDSGGSDEAPPKPSRPGYPSPRSSEGFYPSPQHMVQTNHYQDSTVLDLRGIGQVLPTHLMEERLIRQQQEMEEDQRWLEKEERFLKPDVRLSRGSIDREDGSLQGPIGNQHIYQPVGKPDPAAPPKKPPRPGAPGHLGSLASLSSPADSYNEGVKLQPQEISPPPTANLDRSNDKVYENVTGLVKAVIEMSSKIQPAPPEEYVPMVKEVGLALRTLLATVDETIPLLPASTHREARHGSSRP

SEQ ID NO: 9251 - protein, 618 aa, Artificial Sequence
  Synthetic polypeptide
MKYQEVRCLTSFNISVSFPAETDDYAEIIDEEDTYTMPSTRDYEIQRERIELGRCIGEGQFGDVHQGIYMSPENPALAVAIKTCKNCTSDSVREKFLQEALTMRQFDHPHIVKLIGVITENPVWIIMELCTLGELRSFLQVRKYSLDLASLILYAYQLSTALAYLESKRFVHRDIAARNVLVSSNDCVKLGDFGLSRYMEDSTYYKASKGKLPIKWMAPESINFRRFTSASDVWMFGVCMWEILMHGVKPFQGVKNNDVIGRIENGERLPMPPNCPPTLYSLMTKCWAYDPSRRPRFTELKAQLSTILEEEKAQQEERMRMESRRQATVSWDSGGSDEAPPKPSRPGYPSPRSSEGFYPSPQHMVQTNHYQVSGYPGSHGITAMAGSIYPGQASLLDQTDSWNHRPQEIAMWQPNVEDSTVLDLRGIGQVLPTHLMEERLIRQQQEMEEDQRWLEKEERFLKPDVRLSRGSIDREDGSLQGPIGNQHIYQPVGKPDPAAPPKKPPRPGAPGHLGSLASLSSPADSYNEGVKLQPQEISPPPTANLDRSNDKVYENVTGLVKAVIEMSSKIQPAPPEEYVPMVKEVGLALRTLLATVDETIPLLPASTHREARHGSSRP

SEQ ID NO: 9252 - protein, 1034 aa, Artificial Sequence
  Synthetic polypeptide
MLLELAGQEALKPAGAIYMEKSGCSPFPVCWAKEYDRYLASSKIMAAAYLDPNLNHTPNSSTKTHLGTGMERSPGAMERVLKVFHYFESNSEPTTWASIIRHGDATDVRGIIQKIVDSHKVKHVACYGFRLSHLRSEEVHWLHVDMGVSSVREKYELAHPPEEWKYELRIRYLPKGFLNQFTEDKPTLNFFYQQVKSDYMLEIADQVDQEIALKLGCLEIRRSYWEMRGNALEKKSNYEVLEKDVGLKRFFPKSLLDSVKAKTLRKLIQQTFRQFANLNREESILKFFEILSPVYRFDKECFKCALGSSWIISVELAIGPEEGISYLTDKGCNPTHLADFTQVQTIQYSNSEDKDRKGMLQLKIAGAPEPLTVTAPSLTIAENMADLIDGYCRLVNGTSQSFIIRPQKEGERALPSIPKLANSEKQGMRTHAVSVSETDDYAEIIDEEDTYTMPSTRDYEIQRERIELGRCIGEGQFGDVHQGIYMSPENPALAVAIKTCKNCTSDSVREKFLQEALTMRQFDHPHIVKLIGVITENPVWIIMELCTLGELRSFLQVRKYSLDLASLILYAYQLSTALAYLESKRFVHRDIAARNVLVSSNDCVKLGDFGLSRYMEDSTYYKASKGKLPIKWMAPESINFRRFTSASDVWMFGVCMWEILMHGVKPFQGVKNNDVIGRIENGERLPMPPNCPPTLYSLMTKCWAYDPSRRPRFTELKAQLSTILEEEKAQQEERMRMESRRQATVSWDSGGSDEAPPKPSRPGYPSPRSSEGFYPSPQHMVQTNHYQVSGYPGSHGITAMAGSIYPGQASLLDQTDSWNHRPQEIAMWQPNVEDSTVLDLRGIGQVLPTHLMEERLIRQQQEMEEDQRWLEKEERFLKPDVRLSRGSIDREDGSLQGPIGNQHIYQPVGKPDPAAPPKKPPRPGAPGHLGSLASLSSPADSYNEGVKLQPQEISPPPTANLDRSNDKVYENVTGLVKAVIEMSSKIQPAPPEEYVPMVKEVGLALRTLLATVDETIPLLPASTHREARHGSSRP

SEQ ID NO: 9253 - protein, 1003 aa, Artificial Sequence
  Synthetic polypeptide
MAAAYLDPNLNHTPNSSTKTHLGTGMERSPGAMERVLKVFHYFESNSEPTTWASIIRHGDATDVRGIIQKIVDSHKVKHVACYGFRLSHLRSEEVHWLHVDMGVSSVREKYELAHPPEEWKYELRIRYLPKGFLNQFTEDKPTLNFFYQQVKSDYMLEIADQVDQEIALKLGCLEIRRSYWEMRGNALEKKSNYEVLEKDVGLKRFFPKSLLDSVKAKTLRKLIQQTFRQFANLNREESILKFFEILSPVYRFDKECFKCALGSSWIISVELAIGPEEGISYLTDKGCNPTHLADFTQVQTIQYSNSEDKDRKGMLQLKIAGAPEPLTVTAPSLTIAENMADLIDGYCRLVNGTSQSFIIRPQKEGERALPSIPKLANSEKQGMRTHAVSVSETDDYAEIIDEEDTYTMPSTRDYEIQRERIELGRCIGEGQFGDVHQGIYMSPENPALAVAIKTCKNCTSDSVREKFLQEALTMRQFDHPHIVKLIGVITENPVWIIMELCTLGELRSFLQVRKYSLDLASLILYAYQLSTALAYLESKRFVHRDIAARNVLVSSNDCVKLGDFGLSRYMEDSTYYKASKGKLPIKWMAPESINFRRFTSASDVWMFGVCMWEILMHGVKPFQGVKNNDVIGRIENGERLPMPPNCPPTLYSLMTKCWAYDPSRRPRFTELKAQLSTILEEEKAQQEERMRMESRRQATVSWDSGGSDEAPPKPSRPGYPSPRSSEGFYPSPQHMVQTNHYQVSGYPGSHGITAMAGSIYPGQASLLDQTDSWNHRPQEIAMWQPNVEDSTVLDLRGIGQVLPTHLMEERLIRQQQEMEEDQRWLEKEERFLKPDVRLSRGSIDREDGSLQGPIGNQHIYQPVGKPGKEEKNWAERNPAAPPKKPPRPGAPGHLGSLASLSSPADSYNEGVKPNQLQPQEISPPPTANLDRSNDKVYENVTGLVKAVIEMSSKIQPAPPEEYVPMVKEVGLALRTLLATVDETIPLLPASTHREARHGSSRP

SEQ ID NO: 9254 - protein, 53 aa, Artificial Sequence
  Synthetic polypeptide
MSSKIQPAPPEEYVPMVKEVGLALRTLLATVDETIPLLPASTHREARHGSSRP

SEQ ID NO: 9255 - protein, 662 aa, Artificial Sequence
  Synthetic polypeptide
IAENMADLIDGYCRLVNGTSQSFIIRPQKEGERALPSIPKLANSEKQGMRTHAVSVSETDDYAEIIDEEDTYTMPSKSYGIDEARDYEIQRERIELGRCIGEGQFGDVHQGIYMSPENPALAVAIKTCKNCTSDSVREKFLQEALTMRQFDHPHIVKLIGVITENPVWIIMELCTLGELRSFLQVRKYSLDLASLILYAYQLSTALAYLESKRFVHRDIAARNVLVSSNDCVKLGDFGLSRYMEDSTYYKASKGKLPIKWMAPESINFRRFTSASDVWMFGVCMWEILMHGVKPFQGVKNNDVIGRIENGERLPMPPNCPPTLYSLMTKCWAYDPSRRPRFTELKAQLSTILEEEKAQQEERMRMESRRQATVSWDSGGSDEAPPKPSRPGYPSPRSSEGFYPSPQHMVQTNHYQVSGYPGSHGITAMAGSIYPGQASLLDQTDSWNHRPQEIAMWQPNVEDSTVLDLRGIGQVLPTHLMEERLIRQQQEMEEDQRWLEKEERFLKPDVRLSRGSIDREDGSLQGPIGNQHIYQPVGKPDPAAPPKKPPRPGAPGHLGSLASLSSPADSYNEGVKLQPQEISPPPTANLDRSNDKVYENVTGLVKAVIEMSSKIQPAPPEEYVPMVKEVGLALRTLLATVDETIPLLPASTHREARHGSSRP

SEQ ID NO: 9256 - protein, 658 aa, Artificial Sequence
  Synthetic polypeptide
MADLIDGYCRLVNGTSQSFIIRPQKEGERALPSIPKLANSEKQGMRTHAVSVSETDDYAEIIDEEDTYTMPSKSYGIDEARDYEIQRERIELGRCIGEGQFGDVHQGIYMSPENPALAVAIKTCKNCTSDSVREKFLQEALTMRQFDHPHIVKLIGVITENPVWIIMELCTLGELRSFLQVRKYSLDLASLILYAYQLSTALAYLESKRFVHRDIAARNVLVSSNDCVKLGDFGLSRYMEDSTYYKASKGKLPIKWMAPESINFRRFTSASDVWMFGVCMWEILMHGVKPFQGVKNNDVIGRIENGERLPMPPNCPPTLYSLMTKCWAYDPSRRPRFTELKAQLSTILEEEKAQQEERMRMESRRQATVSWDSGGSDEAPPKPSRPGYPSPRSSEGFYPSPQHMVQTNHYQVSGYPGSHGITAMAGSIYPGQASLLDQTDSWNHRPQEIAMWQPNVEDSTVLDLRGIGQVLPTHLMEERLIRQQQEMEEDQRWLEKEERFLKPDVRLSRGSIDREDGSLQGPIGNQHIYQPVGKPDPAAPPKKPPRPGAPGHLGSLASLSSPADSYNEGVKLQPQEISPPPTANLDRSNDKVYENVTGLVKAVIEMSSKIQPAPPEEYVPMVKEVGLALRTLLATVDETIPLLPASTHREARHGSSRP

SEQ ID NO: 9257 - protein, 1003 aa, Artificial Sequence
  Synthetic polypeptide
MAAAYLDPNLNHTPNSSTKTHLGTGMERSPGAMERVLKVFHYFESNSEPTTWASIIRHGDATDVRGIIQKIVDSHKVKHVACYGFRLSHLRSEEVHWLHVDMGVSSVREKYELAHPPEEWKYELRIRYLPKGFLNQFTEDKPTLNFFYQQVKSDYMLEIADQVDQEIALKLGCLEIRRSYWEMRGNALEKKSNYEVLEKDVGLKRFFPKSLLDSVKAKTLRKLIQQTFRQFANLNREESILKFFEILSPVYRFDKECFKCALGSSWIISVELAIGPEEGISYLTDKGCNPTHLADFTQVQTIQYSNSEDKDRKGMLQLKIAGAPEPLTVTAPSLTIAENMADLIDGYCRLVNGTSQSFIIRPQKEGERALPSIPKLANSEKQGMRTHAVSVSETDDYAEIIDEEDTYTMPSTRDYEIQRERIELGRCIGEGQFGDVHQGIYMSPENPALAVAIKTCKNCTSDSVREKFLQEALTMRQFDHPHIVKLIGVITENPVWIIMELCTLGELRSFLQVRKYSLDLASLILYAYQLSTALAYLESKRFVHRDIAARNVLVSSNDCVKLGDFGLSRYMEDSTYYKASKGKLPIKWMAPESINFRRFTSASDVWMFGVCMWEILMHGVKPFQGVKNNDVIGRIENGERLPMPPNCPPTLYSLMTKCWAYDPSRRPRFTELKAQLSTILEEEKAQQEERMRMESRRQATVSWDSGGSDEAPPKPSRPGYPSPRSSEGFYPSPQHMVQTNHYQVSGYPGSHGITAMAGSIYPGQASLLDQTDSWNHRPQEIAMWQPNVEDSTVLDLRGIGQVLPTHLMEERLIRQQQEMEEDQRWLEKEERFLKPDVRLSRGSIDREDGSLQGPIGNQHIYQPVGKPGKEEKNWAERNPAAPPKKPPRPGAPGHLGSLASLSSPADSYNEGVKPWRLQPQEISPPPTANLDRSNDKVYENVTGLVKAVIEMSSKIQPAPPEEYVPMVKEVGLALRTLLATVDETIPLLPASTHREARHGSSRP

SEQ ID NO: 9258 - protein, 300 aa, Artificial Sequence
  Synthetic polypeptide
MRMESRRQATVSWDSGGSDEAPPKPSRPGYPSPRSSEGFYPSPQHMVQTNHYQVSGYPGSHGITAMAGSIYPGQASLLDQTDSWNHRPQEIAMWQPNVEDSTVLDLRGIGQVLPTHLMEERLIRQQQEMEEDQRWLEKEERFLKPDVRLSRGSIDREDGSLQGPIGNQHIYQPVGKPDPAAPPKKPPRPGAPGHLGSLASLSSPADSYNEGVKLQPQEISPPPTANLDRSNDKVYENVTGLVKAVIEMSSKIQPAPPEEYVPMVKEVGLALRTLLATVDETIPLLPASTHREARHGSSRP

SEQ ID NO: 9259 - protein, 691 aa, Artificial Sequence
  Synthetic polypeptide
AENMADLIDGYCRLVNGTSQSFIIRPQKEGERALPSIPKLANSEKQGMRTHAVSVSGVSHCQHKVKKARRFLPLVFCSHDPPSTDEISGDETDDYAEIIDEEDTYTMPSTRDYEIQRERIELGRCIGEGQFGDVHQGIYMSPENPALAVAIKTCKNCTSDSVREKFLQEALTMRQFDHPHIVKLIGVITENPVWIIMELCTLGELRSFLQVRKYSLDLASLILYAYQLSTALAYLESKRFVHRDIAARNVLVSSNDCVKLGDFGLSRYMEDSTYYKASKGKLPIKWMAPESINFRRFTSASDVWMFGVCMWEILMHGVKPFQGVKNNDVIGRIENGERLPMPPNCPPTLYSLMTKCWAYDPSRRPRFTELKAQLSTILEEEKAQQEERMRMESRRQATVSWDSGGSDEAPPKPSRPGYPSPRSSEGFYPSPQHMVQTNHYQVSGYPGSHGITAMAGSIYPGQASLLDQTDSWNHRPQEIAMWQPNVEDSTVLDLRGIGQVLPTHLMEERLIRQQQEMEEDQRWLEKEERFLKPDVRLSRGSIDREDGSLQGPIGNQHIYQPVGKPDPAAPPKKPPRPGAPGHLGSLASLSSPADSYNEGVKPWRLQPQEISPPPTANLDRSNDKVYENVTGLVKAVIEMSSKIQPAPPEEYVPMVKEVGLALRTLLATVDETIPLLPASTHREARHGSSRP

SEQ ID NO: 9260 - protein, 1 aa, Artificial Sequence
  Synthetic polypeptide
I

SEQ ID NO: 9261 - protein, 725 aa, Artificial Sequence
  Synthetic polypeptide
MAAAYLDPNLNHTPNSSTKTHLGTGMERSPGAMERVLKVFHYFESNSEPTTWASIIRHGDATDVRGIIQKIVDSHKVKHVACYGFRLSHLRSEEVHWLHVDMGVSSVREKYELAHPPEEWKYELRIRYLPKGFLNQFTEDKPTLNFFYQQVKSDYMLEIADQVDQEIALKLGCLEIRRSYWEMRGNALEKKSNYEVLEKDVGLKRFFPKSLLDSVKAKTLRKLIQQTFRQFANLNREESILKFFEILSPVYRFDKECFKCALGSSWIISVELAIGPEEGISYLTDKGCNPTHLADFTQVQTIQYSNSEDKDRKGMLQLKIAGAPEPLTVTAPSLTIAENMADLIDGYCRLVNGTSQSFIIRPQKEGERALPSIPKLANSEKQGMRTHAVSVSETDDYAEIIDEEDTYTMPSTRDYEIQRERIELGRCIGEGQFGDVHQGIYMSPENPALAVAIKTCKNCTSDSVREKFLQEALTMRQFDHPHIVKLIGVITENPVWIIMELCTLGELRSFLQVRKYSLDLASLILYAYQLSTALAYLESKRFVHRDIAARNVLVSSNDCVKLGDFGLSRYMEDSTYYKASKGKLPIKWMAPESINFRRFTSASDVWMFGVCMWEILMHGVKPFQGVKNNDVIGRIENGERLPMPPNCPPTLYSLMTKCWAYDPSRRPRFTELKAQLSTILEEEKAQQEERMRMESRRQATVSWDSGGSDEAPPKKNGLDEAVKNI

SEQ ID NO: 9262 - protein, 353 aa, Artificial Sequence
  Synthetic polypeptide
MKYQEVRCLTSFNISVSFPAETDDYAEIIDEEDTYTMPSTRDYEIQRERIELGRCIGEGQFGDVHQGIYMSPENPALAVAIKTCKNCTSDSVREKFLQEALTMRQFDHPHIVKLIGVITENPVWIIMELCTLGELRSFLQVRKYSLDLASLILYAYQLSTALAYLESKRFVHRDIAARNVLVSSNDCVKLGDFGLSRYMEDSTYYKASKGKLPIKWMAPESINFRRFTSASDVWMFGVCMWEILMHGVKPFQGVKNNDVIGRIENGERLPMPPNCPPTLYSLMTKCWAYDPSRRPRFTELKAQLSTILEEEKAQQEERMRMESRRQATVSWDSGGSDEAPPKKNGLDEAVKNI

SEQ ID NO: 9263 - protein, 769 aa, Artificial Sequence
  Synthetic polypeptide
MLLELAGQEALKPAGAIYMEKSGCSPFPVCWAKEYDRYLASSKIMAAAYLDPNLNHTPNSSTKTHLGTGMERSPGAMERVLKVFHYFESNSEPTTWASIIRHGDATDVRGIIQKIVDSHKVKHVACYGFRLSHLRSEEVHWLHVDMGVSSVREKYELAHPPEEWKYELRIRYLPKGFLNQFTEDKPTLNFFYQQVKSDYMLEIADQVDQEIALKLGCLEIRRSYWEMRGNALEKKSNYEVLEKDVGLKRFFPKSLLDSVKAKTLRKLIQQTFRQFANLNREESILKFFEILSPVYRFDKECFKCALGSSWIISVELAIGPEEGISYLTDKGCNPTHLADFTQVQTIQYSNSEDKDRKGMLQLKIAGAPEPLTVTAPSLTIAENMADLIDGYCRLVNGTSQSFIIRPQKEGERALPSIPKLANSEKQGMRTHAVSVSETDDYAEIIDEEDTYTMPSTRDYEIQRERIELGRCIGEGQFGDVHQGIYMSPENPALAVAIKTCKNCTSDSVREKFLQEALTMRQFDHPHIVKLIGVITENPVWIIMELCTLGELRSFLQVRKYSLDLASLILYAYQLSTALAYLESKRFVHRDIAARNVLVSSNDCVKLGDFGLSRYMEDSTYYKASKGKLPIKWMAPESINFRRFTSASDVWMFGVCMWEILMHGVKPFQGVKNNDVIGRIENGERLPMPPNCPPTLYSLMTKCWAYDPSRRPRFTELKAQLSTILEEEKAQQEERMRMESRRQATVSWDSGGSDEAPPKKNGLDEAVKNI

SEQ ID NO: 9264 - protein, 397 aa, Artificial Sequence
  Synthetic polypeptide
IAENMADLIDGYCRLVNGTSQSFIIRPQKEGERALPSIPKLANSEKQGMRTHAVSVSETDDYAEIIDEEDTYTMPSKSYGIDEARDYEIQRERIELGRCIGEGQFGDVHQGIYMSPENPALAVAIKTCKNCTSDSVREKFLQEALTMRQFDHPHIVKLIGVITENPVWIIMELCTLGELRSFLQVRKYSLDLASLILYAYQLSTALAYLESKRFVHRDIAARNVLVSSNDCVKLGDFGLSRYMEDSTYYKASKGKLPIKWMAPESINFRRFTSASDVWMFGVCMWEILMHGVKPFQGVKNNDVIGRIENGERLPMPPNCPPTLYSLMTKCWAYDPSRRPRFTELKAQLSTILEEEKAQQEERMRMESRRQATVSWDSGGSDEAPPKKNGLDEAVKNI

SEQ ID NO: 9265 - protein, 393 aa, Artificial Sequence
  Synthetic polypeptide
MADLIDGYCRLVNGTSQSFIIRPQKEGERALPSIPKLANSEKQGMRTHAVSVSETDDYAEIIDEEDTYTMPSKSYGIDEARDYEIQRERIELGRCIGEGQFGDVHQGIYMSPENPALAVAIKTCKNCTSDSVREKFLQEALTMRQFDHPHIVKLIGVITENPVWIIMELCTLGELRSFLQVRKYSLDLASLILYAYQLSTALAYLESKRFVHRDIAARNVLVSSNDCVKLGDFGLSRYMEDSTYYKASKGKLPIKWMAPESINFRRFTSASDVWMFGVCMWEILMHGVKPFQGVKNNDVIGRIENGERLPMPPNCPPTLYSLMTKCWAYDPSRRPRFTELKAQLSTILEEEKAQQEERMRMESRRQATVSWDSGGSDEAPPKKNGLDEAVKNI

SEQ ID NO: 9266 - protein, 35 aa, Artificial Sequence
  Synthetic polypeptide
MRMESRRQATVSWDSGGSDEAPPKKNGLDEAVKNI

SEQ ID NO: 9267 - protein, 423 aa, Artificial Sequence
  Synthetic polypeptide
AENMADLIDGYCRLVNGTSQSFIIRPQKEGERALPSIPKLANSEKQGMRTHAVSVSGVSHCQHKVKKARRFLPLVFCSHDPPSTDEISGDETDDYAEIIDEEDTYTMPSTRDYEIQRERIELGRCIGEGQFGDVHQGIYMSPENPALAVAIKTCKNCTSDSVREKFLQEALTMRQFDHPHIVKLIGVITENPVWIIMELCTLGELRSFLQVRKYSLDLASLILYAYQLSTALAYLESKRFVHRDIAARNVLVSSNDCVKLGDFGLSRYMEDSTYYKASKGKLPIKWMAPESINFRRFTSASDVWMFGVCMWEILMHGVKPFQGVKNNDVIGRIENGERLPMPPNCPPTLYSLMTKCWAYDPSRRPRFTELKAQLSTILEEEKAQQEERMRMESRRQATVSWDSGGSDEAPPKKNGLDEAVKNI

SEQ ID NO: 9268 - protein, 1 aa, Artificial Sequence
  Synthetic polypeptide
I

SEQ ID NO: 9269 - protein, 497 aa, Artificial Sequence
  Synthetic polypeptide
MAAAYLDPNLNHTPNSSTKTHLGTGMERSPGAMERVLKVFHYFESNSEPTTWASIIRHGDATDVRGIIQKIVDSHKVKHVACYGFRLSHLRSEEVHWLHVDMGVSSVREKYELAHPPEEWKYELRIRYLPKGFLNQFTEDKPTLNFFYQQVKSDYMLEIADQVDQEIALKLGCLEIRRSYWEMRGNALEKKSNYEVLEKDVGLKRFFPKSLLDSVKAKTLRKLIQQTFRQFANLNREESILKFFEILSPVYRFDKECFKCALGSSWIISVELAIGPEEGISYLTDKGCNPTHLADFTQVQTIQYSNSEDKDRKGMLQLKIAGAPEPLTVTAPSLTIAENMADLIDGYCRLVNGTSQSFIIRPQKEGERALPSIPKLANSEKQGMRTHAVSVSETDDYAEIIDEEDTYTMPSTRDYEIQRERIELGRCIGEGQFGDVHQGIYMSPENPALAVAIKTCKNCTSDSVREKFLQEACLKLPGDKDHVCFAHHSILSVLHST

SEQ ID NO: 9270 - protein, 125 aa, Artificial Sequence
  Synthetic polypeptide
MKYQEVRCLTSFNISVSFPAETDDYAEIIDEEDTYTMPSTRDYEIQRERIELGRCIGEGQFGDVHQGIYMSPENPALAVAIKTCKNCTSDSVREKFLQEACLKLPGDKDHVCFAHHSILSVLHST

SEQ ID NO: 9271 - protein, 541 aa, Artificial Sequence
  Synthetic polypeptide
MLLELAGQEALKPAGAIYMEKSGCSPFPVCWAKEYDRYLASSKIMAAAYLDPNLNHTPNSSTKTHLGTGMERSPGAMERVLKVFHYFESNSEPTTWASIIRHGDATDVRGIIQKIVDSHKVKHVACYGFRLSHLRSEEVHWLHVDMGVSSVREKYELAHPPEEWKYELRIRYLPKGFLNQFTEDKPTLNFFYQQVKSDYMLEIADQVDQEIALKLGCLEIRRSYWEMRGNALEKKSNYEVLEKDVGLKRFFPKSLLDSVKAKTLRKLIQQTFRQFANLNREESILKFFEILSPVYRFDKECFKCALGSSWIISVELAIGPEEGISYLTDKGCNPTHLADFTQVQTIQYSNSEDKDRKGMLQLKIAGAPEPLTVTAPSLTIAENMADLIDGYCRLVNGTSQSFIIRPQKEGERALPSIPKLANSEKQGMRTHAVSVSETDDYAEIIDEEDTYTMPSTRDYEIQRERIELGRCIGEGQFGDVHQGIYMSPENPALAVAIKTCKNCTSDSVREKFLQEACLKLPGDKDHVCFAHHSILSVLHST

SEQ ID NO: 9272 - protein, 169 aa, Artificial Sequence
  Synthetic polypeptide
IAENMADLIDGYCRLVNGTSQSFIIRPQKEGERALPSIPKLANSEKQGMRTHAVSVSETDDYAEIIDEEDTYTMPSKSYGIDEARDYEIQRERIELGRCIGEGQFGDVHQGIYMSPENPALAVAIKTCKNCTSDSVREKFLQEACLKLPGDKDHVCFAHHSILSVLHST

SEQ ID NO: 9273 - protein, 165 aa, Artificial Sequence
  Synthetic polypeptide
MADLIDGYCRLVNGTSQSFIIRPQKEGERALPSIPKLANSEKQGMRTHAVSVSETDDYAEIIDEEDTYTMPSKSYGIDEARDYEIQRERIELGRCIGEGQFGDVHQGIYMSPENPALAVAIKTCKNCTSDSVREKFLQEACLKLPGDKDHVCFAHHSILSVLHST

SEQ ID NO: 9274 - skipped

SEQ ID NO: 9275 - protein, 195 aa, Artificial Sequence
  Synthetic polypeptide
AENMADLIDGYCRLVNGTSQSFIIRPQKEGERALPSIPKLANSEKQGMRTHAVSVSGVSHCQHKVKKARRFLPLVFCSHDPPSTDEISGDETDDYAEIIDEEDTYTMPSTRDYEIQRERIELGRCIGEGQFGDVHQGIYMSPENPALAVAIKTCKNCTSDSVREKFLQEACLKLPGDKDHVCFAHHSILSVLHST

SEQ ID NO: 9276 - protein, 132 aa, Artificial Sequence
  Synthetic polypeptide
MKYQEVRCLTSFNISVSFPAETDDYAEIIDEEDTYTMPSKSYGIDEARDYEIQRERIELGRCIGEGQFGDVHQGIYMSPENPALAVAIKTCKNCTSDSVREKFLQEACLKLPGDKDHVCFAHHSILSVLHST

SEQ ID NO: 9277 - protein, 1 aa, Artificial Sequence
  Synthetic polypeptide
I

SEQ ID NO: 9278 - protein, 339 aa, Artificial Sequence
  Synthetic polypeptide
MAAAYLDPNLNHTPNSSTKTHLGTGMERSPGAMERVLKVFHYFESNSEPTTWASIIRHGDATDVRGIIQKIVDSHKVKHVACYGFRLSHLRSEEVHWLHVDMGVSSVREKYELAHPPEEWKYELRIRYLPKGFLNQFTEDKPTLNFFYQQVKSDYMLEIADQVDQEIALKLGCLEIRRSYWEMRGNALEKKSNYEVLEKDVGLKRFFPKSLLDSVKAKTLRKLIQQTFRQFANLNREESILKFFEILSPVYRFDKECFKCALGSSWIISVELAIGPEEGISYLTDKGCNAPWLMPVIPALWKAEAGGSPEVRSLRPAWPTWQNPVSTKNTKISQAWWRL

SEQ ID NO: 9279 - protein, 383 aa, Artificial Sequence
  Synthetic polypeptide
MLLELAGQEALKPAGAIYMEKSGCSPFPVCWAKEYDRYLASSKIMAAAYLDPNLNHTPNSSTKTHLGTGMERSPGAMERVLKVFHYFESNSEPTTWASIIRHGDATDVRGIIQKIVDSHKVKHVACYGFRLSHLRSEEVHWLHVDMGVSSVREKYELAHPPEEWKYELRIRYLPKGFLNQFTEDKPTLNFFYQQVKSDYMLEIADQVDQEIALKLGCLEIRRSYWEMRGNALEKKSNYEVLEKDVGLKRFFPKSLLDSVKAKTLRKLIQQTFRQFANLNREESILKFFEILSPVYRFDKECFKCALGSSWIISVELAIGPEEGISYLTDKGCNAPWLMPVIPALWKAEAGGSPEVRSLRPAWPTWQNPVSTKNTKISQAWWRL

SEQ ID NO: 9280 - skipped

SEQ ID NO: 9281 - protein, 1 aa, Artificial Sequence
  Synthetic polypeptide
I

SEQ ID NO: 9282 - protein, 199 aa, Artificial Sequence
  Synthetic polypeptide
MAAAYLDPNLNHTPNSSTKTHLGTGMERSPGAMERVLKVFHYFESNSEPTTWASIIRHGDATDVRGIIQKIVDSHKVKHVACYGFRLSHLRSEEVHWLHVDMGVSSVREKYELAHPPEEWKYELRIRYLPKGFLNQFTEDKPTLNFFYQQVKSDYMLEIADQVDQEIALKLGCLEIRRSYWEMRGNALEKKSNYEVLES

SEQ ID NO: 9283 - protein, 243 aa, Artificial Sequence
  Synthetic polypeptide
MLLELAGQEALKPAGAIYMEKSGCSPFPVCWAKEYDRYLASSKIMAAAYLDPNLNHTPNSSTKTHLGTGMERSPGAMERVLKVFHYFESNSEPTTWASIIRHGDATDVRGIIQKIVDSHKVKHVACYGFRLSHLRSEEVHWLHVDMGVSSVREKYELAHPPEEWKYELRIRYLPKGFLNQFTEDKPTLNFFYQQVKSDYMLEIADQVDQEIALKLGCLEIRRSYWEMRGNALEKKSNYEVLES

SEQ ID NO: 9284 - skipped

SEQ ID NO: 9285 - protein, 204 aa, Artificial Sequence
  Synthetic polypeptide
MRSLRKKREKPRPEQWKGLPGPPRAPEPEDVAVPGGVDLLTLPQLCFPGGVCVATEPKEDCVHFLVLTDVCGNRTYGVVAQYYRPLHDEYCFYNGKTHRECPGCFVPFAVCVVSRFPYYNSLKDCLSCLLALLKPCKDFEVDSHIKDFAAKLSLIPSPPPGPLHLLTDWTPFWPRGPQRNPKNRMTGQNGREVRHAWLYPLPLA

SEQ ID NO: 9286 - protein, 284 aa, Artificial Sequence
  Synthetic polypeptide
MAEAASPHLSLPSGLLELCALLGAPRDSLRSLEQVAYKKGVKHLSALLDPEVLSIFVPPFISKEDSQMAGANCGTLGKTRMRSLRKKREKPRPEQWKGLPGPPRAPEPEDVAVPGGVDLLTLPQLCFPGGVCVATEPKEDCVHFLVLTDVCGNRTYGVVAQYYRPLHDEYCFYNGKTHRECPGCFVPFAVCVVSRFPYYNSLKDCLSCLLALLKPCKDFEVDSHIKDFAAKLSLIPSPPPGPLHLLTDWTPFWPRGPQRNPKNRMTGQNGREVRHAWLYPLPLA

SEQ ID NO: 9287 - protein, 13 aa, Artificial Sequence
  Synthetic polypeptide
PPGQSPKSRAGCL

SEQ ID NO: 9288 - protein, 387 aa, Artificial Sequence
  Synthetic polypeptide
MSYGSIARGGGLGSRGPFGGPSRQGCQPLECARCWTEYGIRHFPCPSPESKLQNRCVGKDGEGDLGPAGTPIVPRARKRGPGVAPEGSRMPEPTSSPTIGPRKDSAAGPHGRMAGPSTTRAKKRKPNFCPQETEVLVSKVSKHHQLLFGTGLLKAEPTRRYRVWSRILQAVNALGYCRRDVVDLKHKWRDLRAVVRRKLGDLRKAAHGPSPGSGKPQALALTPVEQVVAKTFSCQALPSEGFSLEPPRATQVDPCNLQELFQEMSANVFRINSSVTSLERSLQSLGTPSDTQELRDSLHTAQQETNKTIAASASSVKQMAELLRSSCPERLQQERPQLDRLKTQLSDAIQCYGVVQKKIAEKSRALLPMAQRGSKQAFADPYSLVCA

SEQ ID NO: 9289 - protein, 388 aa, Artificial Sequence
  Synthetic polypeptide
MSYGSIARGGGLGSRGPFGGPSRQGCQPLECARCWTEYGIRHFPCPSPESKLQNRCVGKDGEGDLGPAGTPIVPRARKRGPGVAPEGSRMPEPTSSPTIGPRKDSAAGPHGRMAGPSTTRAKKRKPNFCPQETEVLVSKVSKHHQLLFGTGLLKAEPTRRYRVWSRILQAVNALGYCRRDVVDLKHKWRDLRAVVRRKLGDLRKAAHGPSPGSGKPQALALTPVEQVVAKTFSCQALPSEGFSLEPPRATQVDPCNLQELFQEMSANVFRINSSVTSLERSLQSLGTPSDTQELRDSLHTAQQETNKTIAASASSVKQMAELLRSSCPQERLQQERPQLDRLKTQLSDAIQCYGVVQKKIAEKSRALLPMAQRGSKQAFADPYSLVCA

SEQ ID NO: 9290 - protein, 168 aa, Artificial Sequence
  Synthetic polypeptide
MSYGSIARGGGLGSRGPFGGPSRQGCQPLATQVDPCNLQELFQEMSANVFRINSSVTSLERSLQSLGTPSDTQELRDSLHTAQQETNKTIAASASSVKQMAELLRSSCPERLQQERPQLDRLKTQLSDAIQCYGVVQKKIAEKSRALLPMAQRGSKQAFADPYSLVCA

SEQ ID NO: 9291 - protein, 104 aa, Artificial Sequence
  Synthetic polypeptide
MAEKPHQNSCNSVRQLFKTKQLVTHRDRGAQGLLAARTTALQRSPLQQEIWESTTALKTHPWWRFKMLMTHATYEQAGAATARVHPEDPPRTCFLATPLPTRCE

SEQ ID NO: 9292 - protein, 109 aa, Artificial Sequence
  Synthetic polypeptide
MAEKPHQNSCNSVRQLFKTKQLVTHRDRGSCTHRAQGLLAARTTALQRSPLQQEIWESTTALKTHPWWRFKMLMTHATYEQAGAATARVHPEDPPRTCFLATPLPTRCE

SEQ ID NO: 9293 - protein, 778 aa, Artificial Sequence
  Synthetic polypeptide
MEEKEILRRQIRLLQGLIDDYKTLHGNAPAPGTPAASGWQPPTYHSGRAFSARYPRPSRRGYSSHHGPSWRKKYSLVNRPPGPSDPPADHAVRPLHGARGGQPPVPQQHVLERQVQLSQGQNVVIKVKPPSKSGSASASGAQRGSLEEFEETPWSDQRPREGEGEPPRGQLQPSRPTRARGTCSVEDPLLVCQKEPGKPRMVKSVGSVGDSPREPRRTVSESVIAVKASFPSSALPPRTGVALGRKLGSHSVASCAPQLLGDRRVDAGHTDQPVPSGSVGGPARPASGPRQAREASLVVTCRTNKFRKNNYKWVAASSKSPRVARRALSPRVAAENVCKASAGMANKVEKPQLIADPEPKPRKPATSSKPGSAPSKYKWKASSPSASSSSSFRWQSEASSKDHASQLSPVLSRSPSGDRPAVGHSGLKPLSGETPLSAYKVKSRTKIIRRRSSTSLPGDKKSGTSPAATAKSHLSLRRRQALRGKSSPVLKKTPNKGLVQVTTHRLCRLPPSRAHLPTKEASSLHAVRTAPTSKVIKTRYRIVKKTPASPLSAPPFPLSLPSWRARRLSLSRSLVLNRLRPVASGGGKAQPGSPWWRSKGYRCIGGVLYKVSANKLSKTSGQPSDAGSRPLLRTGRLDPAGSCSRSLASRAVQRSLAIIRQARQRREKRKEYCMYYNRFGRCNRGERCPYIHDPEKVAVCTRFVRGTCKKTDGTCPFSHHVSKEKMPVCSYFLKGICSNSNCPYSHVYVSRKAEVCSDFLKGYCPLGAKPPLSTCSAA

SEQ ID NO: 9294 - protein, 133 aa, Artificial Sequence
  Synthetic polypeptide
MAPPAGGAAAAASDLGSAAVLLAVHAAVRPLGAGPDAEAQLRRLQLSADPERPGRFRLELLGAGPGAVNLEWPLESVSYTIRGPTQHELQPPPGGPGTLSLHFLNPQEAQRWAVLVRGATVEGQNAGRGGACL

SEQ ID NO: 9295 - protein, 477 aa, Artificial Sequence
  Synthetic polypeptide
MAGSRGAGRTAAPSVRPEKRRSEPELEPEPEPEPPLLCTSPLSHSTGSDSGVSDSEESVFSGLEDSGSDSSEDDDEGDEEGEDGALDDEGHSGIKKTTEEQVQASTPCPRTEMASARIGDEYAEDSSDEEDIRNTVGNVPLEWYDDFPHVGYDLDGRRIYKPLRTRDELDQFLDKMDDPDYWRTVQDPMTGRDLRLTDEQVALVRRLQSGQFGDVGFNPYEPAVDFFSGDVMIHPVTNRPADKRSFIPSLVEKEKVSRMVHAIKMGWIQPRRPRDPTPSFYDLWAQEDPNAVLGRHKMHVPAPKLALPGHAESYNPPPEYLLSEEERLAWEQQEPGERKLSFLPRKFPSLRAVPAYGRFIQERFERCLDLYLCPRQRKMRVNVDPEDLIPKLPRPRDLQPFPTCQALVYRGHSDLVRCLSVSPGGQWLVSGSDDGSLRLWEVATARCVRTVPVGGVVKSVAWNPSPAVCLVAAAVED

SEQ ID NO: 9296 - protein, 1194 aa, Artificial Sequence
  Synthetic polypeptide
MSLERELRQLSKAKAKAQRAGQRREEAALCHQLGELLAGHGRYAEALEQHWQELQLRERADDPLGCAVAHRKIGERLAEMEDYPAALQHQHQYLELAHSLRNHTELQRAWATIGRTHLDIYDHCQSRDALLQAQAAFEKSLAIVDEELEGTLAQGELNEMRTRLYLNLGLTFESLQQTALCNDYFRKSIFLAEQNHLYEDLFRARYNLGTIHWRAGQHSQAMRCLEGARECAHTMRKRFMESECCVVIAQVLQDLGDFLAAKRALKKAYRLGSQKPVQRAAICQNLQHVLAVVRLQQQLEEAEGRDPQGAMVICEQLGDLFSKAGDFPRAAEAYQKQLRFAELLDRPGAERAIIHVSLATTLGDMKDHHGAVRHYEEELRLRSGNVLEEAKTWLNIALSREEAGDAYELLAPCFQKALSCAQQAQRPQLQRQVLQHLHTVQLRLQPQEAPETETRLRELSVAEDEDEEEEAEEAAATAESEALEAGEVELSEGEDDTDGLTPQLEEDEELQGHLGRRKGSKWNRRNDMGETLLHRACIEGQLRRVQDLVRQGHPLNPRDYCGWTPLHEACNYGHLEIVRFLLDHGAAVDDPGGQGCEGITPLHDALNCGHFEVAELLLERGASVTLRTRKGLSPLETLQQWVKLYRRDLDLETRQKARAMEMLLQAAASGQDPHSSQAFHTPSSLLFDPETSPPLSPCPEPPSNSTRLPEASQAHVRVSPGQAAPAMARPRRSRHGPASSSSSSEGEDSAGPARPSQKRPRCSATAQRVAAWTPGPASNREAATASTSRAAYQAAIRGVGSAQSRLGPGPPRGHSKALAPQAALIPEEECLAGDWLELDMPLTRSRRPRPRGTGDNRRPSSTSGSDSEESRPRARAKQVRLTCMQSCSAPVNAGPSSLASEPPGSPSTPRVSEPSGDSSAAGQPLGPAPPPPIRVRVQVQDHLFLIPVPHSSDTHSVAWLAEQAAQRYYQTCGLLPRLTLRKEGALLAPQDLIPDVLQSNDEVLAEVTSWDLPPLTDRYRRACQSLGQGEHQQVLQAVELQGLGLSFSACSLALDQAQLTPLLRALKLHTALRELRLAGNRLGDKCVAELVAALGTMPSLALLDLSSNHLGPEGLRQLAMGLPGQATLQSLEELDLSMNPLGDGCGQSLASLLHACPLLSTLRLQACGFGPSFFLSHQTALGSAFQAGRGGRCL

SEQ ID NO: 9297 - protein, 357 aa, Artificial Sequence
  Synthetic polypeptide
MRGKLLPLAGLYLVQGLPYGLQSGLLPVLLRAGGLSLTRVGLAKVLYAPWLLKLAWAPLVDAQGSARAWVTRSTAGLGLVCGLLAGLPPPGAGQAGLPAAVAGLLLLLNLGAAMQDVALDALAVQLLEPAELGPGNTVQVVAYKLGAALAGGALLALLPTFSWPQLFLLLAATYWLAAALAWAAPALRRLPQQPPSEQRPHTAHLLRDVLAVPGTVWTAGFVLTYKLGEQGASSLFPLLLLDHGVSAPELGLWNGVGAVVCSIAGSSLGGTLLAKHWKLLPLLRSVLRFRLGGLACQTALVFHLDTLGASMDAGTILRGSALLSLCLQHFLGGLVTTVTFTGMMRCSQLAPRALQGD

SEQ ID NO: 9298 - protein, 94 aa, Artificial Sequence
  Synthetic polypeptide
MAATFQLPGHQEMPLTFQDVAVYFSQAEGRQLGPQQRALYRDVMLENYGNVASLGFPVPKPELISQLEQGKELWVLNLLGAEEPDILKSCQKGN

SEQ ID NO: 9299 - protein, 96 aa, Artificial Sequence
  Synthetic polypeptide
ALPRWLPRVEQTGKFGETSGQGSLLSSLGNHSSPCTQNGSHIPASRAPGDAADLPGCGRVLLSGGGAAAGPPAAGALPGCDAGELWERGLSGIPCP

SEQ ID NO: 9300 - protein, 183 aa, Artificial Sequence
  Synthetic polypeptide
MGRVIRGQRKGAGSVFRAHVKHRKGAARLRAVDFAERHGYIKGIVKDIIHDPGRGAPLAKVVFRDPYRFKKRTELFIAAEGIHTGQFVYCGKKAQLNIGNVLPVGTMPEGTIVCCLEEKPGDRGKLARASGNYATVISHNPETKKTRVKLPSGSKKVISSANRAVLGVVLCTYKSQLLKRLMW

SEQ ID NO: 9301 - protein, 74 aa, Artificial Sequence
  Synthetic polypeptide
MGRVIRGQRKGAGSVFRAHVKHRKGAARLRAVDFAERHGYIKGIVKKVISSANRAVLGVVLCTYKSQLLKRLMW

SEQ ID NO: 9302 - protein, 162 aa, Artificial Sequence
  Synthetic polypeptide
MGRVIRGQRKGAGSVFRAHVKHRKGAARLRAVDFAERHGYIKGIVKDIIHDPGRGAPLAKVVFRDPYRFKKRTELFIAAEGIHTGQFVYCGKKAQLNIGNVLPVGTMPEGTIVCCLEEKPGDRGKLARASGNYATVISSANRAVLGVVLCTYKSQLLKRLMW

SEQ ID NO: 9303 - protein, 51 aa, Artificial Sequence
  Synthetic polypeptide
MEVVTFGDVAVHFSREEWQCLDPGQRALYREVMLENHSSVAGLAGHGVACL

SEQ ID NO: 9304 - protein, 62 aa, Artificial Sequence
  Synthetic polypeptide
MGFLGCWCVSFQEVVTFGDVAVHFSREEWQCLDPGQRALYREVMLENHSSVAGLAGHGVACL

SEQ ID NO: 9305 - protein, 86 aa, Artificial Sequence
  Synthetic polypeptide
MEVVTFGDVAVHFSREEWQCLDPGQRALYREVMLENHSSVAGLAGFLVFKPELISRLEQGEEPWVLDLQGAEGTEAPRTSKTVLLG

SEQ ID NO: 9306 - protein, 97 aa, Artificial Sequence
  Synthetic polypeptide
MGFLGCWCVSFQEVVTFGDVAVHFSREEWQCLDPGQRALYREVMLENHSSVAGLAGFLVFKPELISRLEQGEEPWVLDLQGAEGTEAPRTSKTVLLG

SEQ ID NO: 9307 - protein, 119 aa, Artificial Sequence
  Synthetic polypeptide
MEVVTFGDVAVHFSREEWQCLDPGQRALYREVMLENHSSVAGLAFSDPTLWFGYLCPCFPRDGNLWAWPSRGAAAFPGFLVFKPELISRLEQGEEPWVLDLQGAEGTEAPRTSKTVLLG

SEQ ID NO: 9308 - protein, 85 aa, Artificial Sequence
  Synthetic polypeptide
MEVVTFGDVAVHFSREEWQCLDPGQRALYREVMLENHSSVAGLGFLVFKPELISRLEQGEEPWVLDLQGAEGTEAPRTSKTVLLG

SEQ ID NO: 9309 - protein, 25 aa, Artificial Sequence
  Synthetic polypeptide
MSAVGAATPYLHHPGDSHSGREMAT

SEQ ID NO: 9310 - protein, 131 aa, Artificial Sequence
  Synthetic polypeptide
MAAARLLPVPAGPQPLSFQAKLTFEDVAVLLSQDEWDRLCPAQRGLYRNVMMETYGNVVSLGLPGSKPDIISQLERGEDPWVLDRKGAKKSQGLWSDYSDNLKYDHTTACTQQDSLSCPWARTFVCKHQET

SEQ ID NO: 9311 - protein, 126 aa, Artificial Sequence
  Synthetic polypeptide
MAAARLLPVPAGPQAKLTFEDVAVLLSQDEWDRLCPAQRGLYRNVMMETYGNVVSLGLPGSKPDIISQLERGEDPWVLDRKGAKKSQGLWSDYSDNLKYDHTTACTQQDSLSCPWARTFVCKHQET

SEQ ID NO: 9312 - protein, 241 aa, Artificial Sequence
  Synthetic polypeptide
MAALGHLAGEAAAAPGPGTPCASRGARLPGPVSSARNPSTVCLCPEQPTCSNADSRAHPLGDEGGTASKKQKNKKKTRNRASVANGGEKASEKLAPEEVPLSAEAQAQQLAQELAWCVEQLELGLKRQKPTPKQKEQAIGAIRTLRSKRTPLPRKRQLMHSLFGDYRAQMEAEWREALRALRAAAYSAQVQPVDGATRKKSQRVCRPRSIWRAKATLDMPDEEFSKTQLKHANNHCGRTPL

SEQ ID NO: 9313 - protein, 202 aa, Artificial Sequence
  Synthetic polypeptide
MKGLSGSRTQPPLCSGHTCGLAPPEDCEHLHHGPDARPPYLLSPADSCPGGRHRCSPRSSVHSECVMMPVVLGDHVSSSTFPRMHYSSHYDTRDDCAVAHAGAKINRIPANLLDQFEKQLPLHRDGFHTLQYQRTSAAAEQRSESPGRIRHLVHSVQKLFTKSHSLEGSLWSSGNASAWEGPGYLAGLGLAVAPVPGKAPVT

SEQ ID NO: 9314 - protein, 17 aa, Artificial Sequence
  Synthetic polypeptide
RPRSTSMRSATRPRPGA

SEQ ID NO: 9315 - protein, 68 aa, Artificial Sequence
  Synthetic polypeptide
MIQQEEIRKLEEEKKQLEGEIIDFYKMKAASEALQTQLSTDTKKDKHRLYVEETCPVSGETLDCQLLS

SEQ ID NO: 9316 - protein, 73 aa, Artificial Sequence
  Synthetic polypeptide
MIQQEEIRKLEEEKKQLEGEIIDFYKMKAASEALQTQLSTDTKKDKHRLDLTVGTTRSTRGARTTSRVRARGS

SEQ ID NO: 9317 - protein, 22 aa, Artificial Sequence
  Synthetic polypeptide
MHLLQAGTSGSPLFACCHPRKM

SEQ ID NO: 9318 - protein, 134 aa, Artificial Sequence
  Synthetic polypeptide
MPAATVDHSQRICEVWACNLDEEMKKIRQVIRKYNYVAMDTEFPGVVARPIGEFRSNADYQYQLLRCNVDLLKIIQLGLTFMNEQGEYPPGTSTWQFNFKFNLTLGVVAHACNPSTLGGRGGRITRSGDREHPG

SEQ ID NO: 9319 - protein, 3 aa, Artificial Sequence
  Synthetic polypeptide
MKR

SEQ ID NO: 9320 - protein, 397 aa, Artificial Sequence
  Synthetic polypeptide
MSWLFPLTKSASSSAAGSPGGLTSLQQQKQRLIESLRNSHSSIAEIQKDVEYRLPFTINNLTININILLPPQFPQEKPVISVYPPIRHHLMDKQGVYVTSPLVNNFTMHSDLGKIIQSLLDEFWKNPPVLAPTSTAFPYLYSNPSGMSPYASQGFPFLPPYPPQEANRSITSLSVADTVSSSTTSHTTAKPAAPSFGVLSNLPLPIPTVDASIPTSQNGFGYKMPDVPDAFPELSELSVSQLTDMNEQEEVLLEQFLTLPQLKQIITDKDDLVKSIEELARKNLLLEPSLEAKRQTVLDKYELLTQMKSTFEKKMQRQHELSESCSASALQARLKVAAHEAEEESDNIAEDFLEGKMEIDDFLSSFMEKRTICHCRRAKEEKLQQAIAMHSQFHAPL

SEQ ID NO: 9321 - protein, 372 aa, Artificial Sequence
  Synthetic polypeptide
MSWLFPLTKSASSSAAGSPGGLTSLQQQKQRLIESLRNSHSRLLPPQFPQEKPVISVYPPIRHHLMDKQGVYVTSPLVNNFTMHSDLGKIIQSLLDEFWKNPPVLAPTSTAFPYLYSNPSGMSPYASQGFPFLPPYPPQEANRSITSLSVADTVSSSTTSHTTAKPAAPSFGVLSNLPLPIPTVDASIPTSQNGFGYKMPDVPDAFPELSELSVSQLTDMNEQEEVLLEQFLTLPQLKQIITDKDDLVKSIEELARKNLLLEPSLEAKRQTVLDKYELLTQMKSTFEKKMQRQHELSESCSASALQARLKVAAHEAEEESDNIAEDFLEGKMEIDDFLSSFMEKRTICHCRRAKEEKLQQAIAMHSQFHAPL

SEQ ID NO: 9322 - protein, 170 aa, Artificial Sequence
  Synthetic polypeptide
PDAFPELSELSVSQLTDMNEQEEVLLEQFLTLPQLKQIITDKDDLVKSIEELARKNLLLEPSLEAKRQTVLDKYELLTQMKSTFEKKMQRQHELSESCSASALQARLKVAAHEAEEESDNIAEDFLEGKMEIDDFLSSFMEKRTICHCRRAKEEKLQQAIAMHSQFHAPL

SEQ ID NO: 9323 - protein, 542 aa, Artificial Sequence
  Synthetic polypeptide
MEHIRTPKVENVRLVDRVSPKKAALGTLYLTATHVIFVENSPDPRKETWILHSQISTIEKQATTATGCPLLIRCKNFQIIQLIIPQERDCHDVYISLIRLARPVKYEELYCFSFNPMLDKEEREQGWVLIDLSEEYTRMGLPNHYWQLSDVNRDYRVCDSYPTELYVPKSATAHIIVGSSKFRSRRRFPVLSYYYKDNHASICRSSQPLSGFSARCLEDEQMLQAIRKANPGSDFVYVVDTRPKLNAMANRAAGKGYENEDNYSNIKFQFIGIENIHVMRNSLQKMLEVCELKSPSMSDFLWGLENSGWLRHIKAIMDAGIFIAKAVSEEGASVLVHCSDGWDRTAQVCSVASLLLDPHYRTLKGFMVLIEKDWISFGHKFNHRYGNLDGDPKEISPVIDQFIECVWQLMEQFPCAFEFNERFLIHIQHHIYSCQFGNFLCNSQKERRELKIQERTYSLWAHLWKNRADYLNPLFRADHSQTQGTLHLPTTPCNFMYKFWSGMYNRFEKGMQPRQSVTDYLMAVKEETQQLEEELEALEEGR

SEQ ID NO: 9324 - protein, 133 aa, Artificial Sequence
  Synthetic polypeptide
MEQFPCAFEFNERFLIHIQHHIYSCQFGNFLCNSQKERRELKIQERTYSLWAHLWKNRADYLNPLFRADHSQTQGTLHLPTTPCNFMYKFWSGMYNRFEKGMQPRQSVTDYLMAVKEETQQLEEELEALEEGR

SEQ ID NO: 9325 - protein, 124 aa, Artificial Sequence
  Synthetic polypeptide
MKVWLLLGLLLVHEALEDVTGQHLPKNKRPKEPGENRIKPTNKKVKPKIPKMKDRDSANSAPKTQSIMMQVLDKGRFQKPAATLSLLAGQTVELRCKGSRIGWSYPAYLDTFKDSRLRCSGSCL

SEQ ID NO: 9326 - protein, 146 aa, Artificial Sequence
  Synthetic polypeptide
MKVWLLLGLLLVHEALEDVTGQHLPKNKRPKEPGENRIKPTNKKVKPKIPKMKDRDSANSAPKTQSIMMQVLDKGRFQKPAATLSLLAGQTVELRCKGSRIGWSYPAYLDTFKDSRLRDMDEAGNHHSQQTVVRTKNQTLHVLTHR

SEQ ID NO: 9327 - protein, 829 aa, Artificial Sequence
  Synthetic polypeptide
MATGGGPFEDGMNDQDLPNWSNENVDDRLNNMDWGAQQKKANRSSEKNKKKFGVESDKRVTNDISPESSPGVGRRRTKTPHTFPHSRYMSQMSVPEQAELEKLKQRINFSDLDQRSIGSDSQGRATAANNKRQLSENRKPFNFLPMQINTNKSKDASTNPPNRETIGSAQCKELFASALSNDLLQNCQVSEEDGRGEPAMESSQIVSRLVQIRDYITKASSMREDLVEKNERSANVERLTHLIDHLKEQEKSYMKFLKKILARDPQQEPMEEIENLKKQHDLLKRMLQQQEQLRALQGRQAALLALQHKAEQAIAVMDDSVVAETAGSLSGVSITSELNEELNDLIQRFHNQLRDSQPPAVPDNRRQAESLSLTREVSQSRKPSASERLPDEKVELFSKMRVLQEKKQKMDKLLGELHTLRDQHLNNSSSSPQRSVDQRSTSAPSASVGLAPVVNGESNSLTSSVPYPTASLVSQNESENEGHLNPSEKLQKLNEVRKRLNELRELVHYYEQTSDMMTDAVNENRKDEETEESEYDSEHENSEPVTNIRNPQVASTWNEVNSHSNAQCVSNNRDGRTVNSNCEINNRSAANIRALNMPPSLDCRYNREGEQEIHVAQGEDDEEEEEEAEEEGVSGASLSSHRSSLVDEHPEDAEFEQKINRLMAAKQKLRQLQDLVAMVQDDDAAQGVISASASNLDDFYPAEEDTKQNSNNTRGNANKTQKDTGVNEKAREKFYEAKLQQQQRELKQLQEERKKLIDIQEKIQALQTACPDLQLSAASVGNCPTKKYMPAVTSTPTVNQHETSTSKSVFEPEDSSIVDNEAMCGDSHL

SEQ ID NO: 9328 - protein, 830 aa, Artificial Sequence
  Synthetic polypeptide
MATGGGPFEDGMNDQDLPNWSNENVDDRLNNMDWGAQQKKANRSSEKNKKKFGVESDKRVTNDISPESSPGVGRRRTKTPHTFPHSRYMSQMSVPEQAELEKLKQRINFSDLDQRSIGSDSQGRATAANNKRQLSENRKPFNFLPMQINTNKSKDASTNPPNRETIGSAQCKELFASALSNDLLQNCQVSEEDGRGEPAMESSQIVSRLVQIRDYITKASSMREDLVEKNERSANVERLTHLIDHLKEQEKSYMKFLKKILARDPQQEPMEEIENLKKQHDLLKRMLQQQEQLRALQGRQAALLALQHKAEQAIAVMDDSVVAETAGSLSGVSITSELNEELNDLIQRFHNQLRDSQPPAVPDNRRQAESLSLTREVSQSRKPSASERLPDEKVELFSKMRVLQEKKQKMDKLLGELHTLRDQHLNNSSSSPQRSVDQRSTSAPSASVGLAPVVNGESNSLTSSVPYPTASLVSQNESENEGHLNPSEKLQKLNEVRKRLNELRELVHYYEQTSDMMTDAVNENRKDEETEESEYDSEHENSEPVTNIRNPQVASTWNEVNSHSNAQCVSNNRDGRTVNSNCEINNRSAANIRALNMPPSLADCRYNREGEQEIHVAQGEDDEEEEEEAEEEGVSGASLSSHRSSLVDEHPEDAEFEQKINRLMAAKQKLRQLQDLVAMVQDDDAAQGVISASASNLDDFYPAEEDTKQNSNNTRGNANKTQKDTGVNEKAREKFYEAKLQQQQRELKQLQEERKKLIDIQEKIQALQTACPDLQLSAASVGNCPTKKYMPAVTSTPTVNQHETSTSKSVFEPEDSSIVDNEAMCGDSHL

SEQ ID NO: 9329 - protein, 40 aa, Artificial Sequence
  Synthetic polypeptide
MDQREPLPPAPAEPRSSHDVLQEVNGWINWGPFRQWNIQC

SEQ ID NO: 9330 - protein, 64 aa, Artificial Sequence
  Synthetic polypeptide
MRPPGFLSRAPSLNRAERGIWSCSMDQREPLPPAPAEPRSSHDVLQEVNGWINWGPFRQWNIQC

SEQ ID NO: 9331 - protein, 22 aa, Artificial Sequence
  Synthetic polypeptide
MEGRSAAKIPGDSYIQQSTKTI

SEQ ID NO: 9332 - protein, 115 aa, Artificial Sequence
  Synthetic polypeptide
MSDESSSPSMGWKHWPVTSATQDLWGMDPRCRDALGCSPPRAVLVHAADGAERTVLRRGAETCQILPRSCKEATGTTAQATRAWLYRYCPAVHTSKGCPAPPATLPLKVLLPTTM

SEQ ID NO: 9333 - protein, 326 aa, Artificial Sequence
  Synthetic polypeptide
MILANVFCLFFFLDETLRSLASPSSLQGPELHGWRPPVDCVRANELCAAESNCSSRYRTLRQCLAGRDRNTMLANKECQAALEVLQESPLYDCRCKRGMKKELQCLQIYWSIHLGLTEGEEFYEASPYEPVTSRLSDIFRLASIFSGTGADPVVSAKSNHCLDAAKACNLNDNCKKLRSSYISICNREISPTERCNRRKCHKALRQFFDRVPSEYTYRMLFCSCQDQACAERRRQTILPSCSYEDKEKPNCLDLRGVCRTDHLCRRLPWPPKVPRLQPLPGRHPVWEVRSVSAWPPIVWDVRSPSAWLPSLESEERLCPPAIPSRK

SEQ ID NO: 9334 - protein, 221 aa, Artificial Sequence
  Synthetic polypeptide
MILANVFCLFFFLGEEFYEASPYEPVTSRLSDIFRLASIFSGTGADPVVSAKSNHCLDAAKACNLNDNCKKLRSSYISICNREISPTERCNRRKCHKALRQFFDRVPSEYTYRMLFCSCQDQACAERRRQTILPSCSYEDKEKPNCLDLRGVCRTDHLCRRLPWPPKVPRLQPLPGRHPVWEVRSVSAWPPIVWDVRSPSAWLPSLESEERLCPPAIPSRK

SEQ ID NO: 9335 - protein, 193 aa, Artificial Sequence
  Synthetic polypeptide
MILANVFCLFFFLGTGADPVVSAKSNHCLDAAKACNLNDNCKKLRSSYISICNREISPTERCNRRKCHKALRQFFDRVPSEYTYRMLFCSCQDQACAERRRQTILPSCSYEDKEKPNCLDLRGVCRTDHLCRRLPWPPKVPRLQPLPGRHPVWEVRSVSAWPPIVWDVRSPSAWLPSLESEERLCPPAIPSRK

SEQ ID NO: 9336 - protein, 944 aa, Artificial Sequence
  Synthetic polypeptide
MADHVQSLAQLENLCKQLYETTDTTTRLQAEKALVEFTNSPDCLSKCQLLLERGSSSYSQLLAATCLTKLVSRTNNPLPLEQRIDIRNYVLNYLATRPKLATFVTQALIQLYARITKLGWFDCQKDDYVFRNAITDVTRFLQDSVEYCIIGVTILSQLTNEINQVSATAFLIEADTTHPLTKHRKIASSFRDSSLFDIFTLSCNLLKQASGKNLNLNDESQHGLLMQLLKLTHNCLNFDFIGTSTDESSDDLCTVQIPTSWRSAFLDSSTLQLFFDLYHSIPPSFSPLVLSCLVQIASVRRSLFNNAERAKFLSHLVDGVKRILENPQSLSDPNNYHEFCRLLARLKSNYQLGELVKVENYPEVIRLIANFTVTSLQHWEFAPNSVHYLLSLWQRLAASVPYVKATEPHMLETYTPEVTKAYITSRLESVHIILRDGLEDPLEDTGLVQQQLDQLSTIGRCEYEKTCALLVQLFDQSAQSYQELLQSASASPMDIAVQEGRLTWLVYIIGAVIGGRVSFASTDEQDAMDGELVCRVLQLMNLTDSRLAQAGNEKLELAMLSFFEQFRKIYIGDQVQKSSKLYRRLSEVLGLNDETMVLSVFIGKIITNLKYWGRCEPITSKTLQLLNDLSIGYSSVRKLVKLSAVQFMLNNHTSEHFSFLGINNQSNLTDMRCRTTFYTALGRLLMVDLGEDEDQYEQFMLPLTAAFEAVAQMFSTNSFNEQEAKRTLVGLVRDLRGIAFAFNAKTSFMMLFEWIYPSYMPILQRAIELWYHDPACTTPVLKLMAELVHNRSQRLQFDVSSPNGILLFRETSKMITMYGNRILTLGEVPKDQVYALKLKGISICFSMLKAALSGSYVNFGVFRLYGDDALDNALQTFIKLLLSIPHSDLLDYPKLSQSYYSLLEVLTQDHMNFIASLEPHVIMYILSSISEGLTALARRGGVCL

SEQ ID NO: 9337 - protein, 935 aa, Artificial Sequence
  Synthetic polypeptide
MADHVQSLAQLENLCKQLYETTDTTTRLQAEKALVEFTNSPDCLSKCQLLLERGSSSYSQLLAATCLTKLVSRTNNPLPLEQRIDIRNYVLNYLATRPKLATFVTQALIQLYARITKLGWFDCQKDDYVFRNAITDVTRFLQDSVEYCIIGVTILSQLTNEINQADTTHPLTKHRKIASSFRDSSLFDIFTLSCNLLKQASGKNLNLNDESQHGLLMQLLKLTHNCLNFDFIGTSTDESSDDLCTVQIPTSWRSAFLDSSTLQLFFDLYHSIPPSFSPLVLSCLVQIASVRRSLFNNAERAKFLSHLVDGVKRILENPQSLSDPNNYHEFCRLLARLKSNYQLGELVKVENYPEVIRLIANFTVTSLQHWEFAPNSVHYLLSLWQRLAASVPYVKATEPHMLETYTPEVTKAYITSRLESVHIILRDGLEDPLEDTGLVQQQLDQLSTIGRCEYEKTCALLVQLFDQSAQSYQELLQSASASPMDIAVQEGRLTWLVYIIGAVIGGRVSFASTDEQDAMDGELVCRVLQLMNLTDSRLAQAGNEKLELAMLSFFEQFRKIYIGDQVQKSSKLYRRLSEVLGLNDETMVLSVFIGKIITNLKYWGRCEPITSKTLQLLNDLSIGYSSVRKLVKLSAVQFMLNNHTSEHFSFLGINNQSNLTDMRCRTTFYTALGRLLMVDLGEDEDQYEQFMLPLTAAFEAVAQMFSTNSFNEQEAKRTLVGLVRDLRGIAFAFNAKTSFMMLFEWIYPSYMPILQRAIELWYHDPACTTPVLKLMAELVHNRSQRLQFDVSSPNGILLFRETSKMITMYGNRILTLGEVPKDQVYALKLKGISICFSMLKAALSGSYVNFGVFRLYGDDALDNALQTFIKLLLSIPHSDLLDYPKLSQSYYSLLEVLTQDHMNFIASLEPHVIMYILSSISEGLTALARRGGVCL

SEQ ID NO: 9338 - protein, 936 aa, Artificial Sequence
  Synthetic polypeptide
MRDPGRKSLAQLENLCKQLYETTDTTTRLQAEKALVEFTNSPDCLSKCQLLLERGSSSYSQLLAATCLTKLVSRTNNPLPLEQRIDIRNYVLNYLATRPKLATFVTQALIQLYARITKLGWFDCQKDDYVFRNAITDVTRFLQDSVEYCIIGVTILSQLTNEINQADTTHPLTKHRKIASSFRDSSLFDIFTLSCNLLKQASGKNLNLNDESQHGLLMQLLKLTHNCLNFDFIGTSTDESSDDLCTVQIPTSWRSAFLDSSTLQLFFDLYHSIPPSFSPLVLSCLVQIASVRRSLFNNAERAKFLSHLVDGVKRILENPQSLSDPNNYHEFCRLLARLKSNYQLGELVKVENYPEVIRLIANFTVTSLQHWEFAPNSVHYLLSLWQRLAASVPYVKATEPHMLETYTPEVTKAYITSRLESVHIILRDGLEDPLEDTGLVQQQLDQLSTIGRCEYEKTCALLVQLFDQSAQSYQELLQSASASPMDIAVQEGRLTWLVYIIGAVIGGRVSFASTDEQDAMDGELVCRVLQLMNLTDSRLAQAGNEKLELAMLSFFEQFRKIYIGDQVQKSSKLYRRLSEVLGLNDETMVLSVFIGKIITNLKYWGRCEPITSKTLQLLNDLSIGYSSVRKLVKLSAVQFMLNNHTSEHFSFLGINNQSNLTDMRCRTTFYTALGRLLMVDLGEDEDQYEQFMLPLTAAFEAVAQMFSTNSFNEQEAKRTLVGLVRDLRGIAFAFNAKTSFMMLFEWIYPSYMPILQRAIELWYHDPACTTPVLKLMAELVHNRSQRLQFDVSSPNGILLFRETSKMITMYGNRILTLGEVPKDQVYALKLKGISICFSMLKAALSGSYVNFGVFRLYGDDALDNALQTFIKLLLSIPHSDLLDYPKLSQSYYSLLEVLTQDHMNFIASLEPHVIMYILSSISEGLTALARRGGVCL

SEQ ID NO: 9339 - protein, 245 aa, Artificial Sequence
  Synthetic polypeptide
MLPLTAAFEAVAQMFSTNSFNEQEAKRTLVGLVRDLRGIAFAFNAKTSFMMLFEWIYPSYMPILQRAIELWYHDPACTTPVLKLMAELVHNRSQRLQFDVSSPNGILLFRETSKMITMYGNRILTLGEVPKDQVYALKLKGISICFSMLKAALSGSYVNFGVFRLYGDDALDNALQTFIKLLLSIPHSDLLDYPKLSQSYYSLLEVLTQDHMNFIASLEPHVIMYILSSISEGLTALARRGGVCL

SEQ ID NO: 9340 - protein, 150 aa, Artificial Sequence
  Synthetic polypeptide
MNLSSASSTEEKAVTTVLWGCELSQERRTWTFRPQLEGKQSCRLLLHTICLGEKAKEEMHRVEILPPANQEDKKMQPVTIASLQASVLPMGSPTAGSRTRTRPVRNQAAQQEVSSQLASITPEPCLPSDQSGIRFSEEHEPYGKLCVRGV

SEQ ID NO: 9341 - protein, 416 aa, Artificial Sequence
  Synthetic polypeptide
MSQFKRQRINPLPGGRNFSGTASTSLLGPPPGLLTPPVATELSQNARHLQGGEKQRVFTGIVTSLHDYFGVVDEEVFFQLSVVKGRLPQLGEKVLVKAAYNPGQAVPWNAVKVQTLSNQPLLKSPAPPLLHVAALGQKQGILGAQPQLIFQPHRIPPLFPQKPLSLFQTSHTLHLSHLNRFPARGPHGRLDQGRSDDYDSKKRKQRAGGEPWGAKKPRHDLPPYRVHLTPYTVDSPICDFLELQRRYRSLLVPSDFLSVHLSWLSAFPLSQPFSLHHPSRIQVSSEKEAAPDAGAEPITADSDPAYSSKVLLLSSPGLEELYRCCMLFVDDMAEPRETPEHPLKQIKFLLGRKEEEAVLVGGEWSPSLDGLDPQADPQVLVRTAIRCAQAQTGIDLSGCTKCLVRSVCSLSADWKL

SEQ ID NO: 9342 - protein, 91 aa, Artificial Sequence
  Synthetic polypeptide
MLFVDDMAEPRETPEHPLKQIKFLLGRKEEEAVLVGGEWSPSLDGLDPQADPQVLVRTAIRCAQAQTGIDLSGCTKCLVRSVCSLSADWKL

SEQ ID NO: 9343 - protein, 234 aa, Artificial Sequence
  Synthetic polypeptide
MWFLTVGDGSTSSDDYDSKKRKQRAGGEPWGAKKPRHDLPPYRVHLTPYTVDSPICDFLELQRRYRSLLVPSDFLSVHLSWLSAFPLSQPFSLHHPSRIQVSSEKEAAPDAGAEPITADSDPAYSSKVLLLSSPGLEELYRCCMLFVDDMAEPRETPEHPLKQIKFLLGRKEEEAVLVGGEWSPSLDGLDPQADPQVLVRTAIRCAQAQTGIDLSGCTKCLVRSVCSLSADWKL

SEQ ID NO: 9344 - protein, 34 aa, Artificial Sequence
  Synthetic polypeptide
RYCCSLPRGWRNCIVVACSLWMTWLSQGRRQSIL

SEQ ID NO: 9345 - protein, 3 aa, Artificial Sequence
  Synthetic polypeptide
MSC

SEQ ID NO: 9346 - protein, 92 aa, Artificial Sequence
  Synthetic polypeptide
MELRSGSVGSQAVARRMDGDSRDGGGGKDATGSEDYENLPTSASVSTHMTAGAMAGILEHSVMYPVDSVKLLTALVQGPGCLLFLEIPDCPS

SEQ ID NO: 9347 - protein, 73 aa, Artificial Sequence
  Synthetic polypeptide
DSRDGGGGKDATGSEDYENLPTSASVSTHMTAGAMAGILEHSVMYPVDSVKLLTALVQGPGCLLFLEIPDCPS

SEQ ID NO: 9348 - protein, 107 aa, Artificial Sequence
  Synthetic polypeptide
MELRSGSVGSQAVARRMDGDSRDGGGGKDATGSEDYENLPTSASVSTHMTAGAMAGILEHSVMYPVDSVKLIVKEPQAGPSGGIPEEGIAITGGASCIGTRCGGGRQ

SEQ ID NO: 9349 - protein, 88 aa, Artificial Sequence
  Synthetic polypeptide
DSRDGGGGKDATGSEDYENLPTSASVSTHMTAGAMAGILEHSVMYPVDSVKLIVKEPQAGPSGGIPEEGIAITGGASCIGTRCGGGRQ

SEQ ID NO: 9350 - protein, 354 aa, Artificial Sequence
  Synthetic polypeptide
MARWIPTKRQKYGVAIYNYNASQDVELSLQIGDTVHILEMYEGWYRGYTLQNKSKKGIFPETYIHLKEATVEDLGQHETVIPGELPLVQELTSTLREWAVIWRKLYVNNKLTLFRQLQQMTYSLIEWRSQILSGTLPKDELAELKKKVTAKIDHGNRMLGLDLVVRDDNGNILDPDETSTIALFKAHEVASKRIEEKIQEEKSILQNLDLRGQSIFSTIHTYGLYVNFKNFVCNIGEDAELFMALYDPDQSTFISENYLIRWGSNGMPKEIEKLNNLQAVFTDLSSMDLIRPRVSLVCQIVRVGHMELKEGKKHTCGLRRPFGVAVMDITDIIHGKVDDEEKQHFIPFQHGGRL

SEQ ID NO: 9351 - protein, 24 aa, Artificial Sequence
  Synthetic polypeptide
SQSCRTSICGASPSSVPSTPMASM

SEQ ID NO: 9352 - protein, 24 aa, Artificial Sequence
  Synthetic polypeptide
SQSCRTSICGASPSSVPSTPMASM

SEQ ID NO: 9353 - protein, 946 aa, Artificial Sequence
  Synthetic polypeptide
MARWIPTKRQKYGVAIYNYNASQDVELSLQIGDTVHILEMYEGWYRGYTLQNKSKKGIFPETYIHLKEATVEDLGQHETVIPGELPLVQELTSTLREWAVIWRKLYVNNKLTLFRQLQQMTYSLIEWRSQILSGTLPKDELAELKKKVTAKIDHGNRMLGLDLVVRDDNGNILDPDETSTIALFKAHEVASKRIEEKIQEEKSILQNLDLRGQSIFSTIHTYGLYVNFKNFVCNIGEDAELFMALYDPDQSTFISENYLIRWGSNGMPKEIEKLNNLQAVFTDLSSMDLIRPRVSLVCQIVRVGHMELKEGKKHTCGLRRPFGVAVMDITDIIHGKVDDEEKQHFIPFQQIAMETYIRQRQLIMSPLITSHVIGENEPLTSVLNKVIAAKEVNHKGQGLWVSLKLLPGDLTQVQKNFSHLVDRSTAIARKMGFPEIILPGDVRNDIYVTLIHGEFDKGKKKTPKNVEVTMSVHDEEGKLLEKAIHPGAGYEGISEYKSVVYYQVKQPCWYETVKVSIAIEEVTRCHIRFTFRHRSSQETRDKSERAFGVAFVKLMNPDGTTLQDGRHDLVVYKGDNKKMEDAKFYLTLPGTKMEMEEKELQASKNLVTFTPSKDSTKDSFQIATLICSTKLTQNVDLLGLLNWRSNSQNIKHNLKKLMEVDGGEIVKFLQDTLDALFNIMMEMSDSETYDFLVFDALVFIISLIGDIKFQHFNPVLETYIYKHFSATLAYVKLSKVLNFYVANADDSSKTELLFAALKALKYLFRFIIQSRVLYLRFYGQSKDGDEFNNSIRQLFLAFNMLMDRPLEEAVKIKGAALKYLPSIINDVKLVFDPVELSVLFCKFIQSIPDNQLVRQKLNCMTKIVESTLFRQSECREVLLPLLTDQLSGQLDDNSNKPDHEASSQLLSNILEVLDRKDVVEMEAIILSEVTQEWKIKYYMFSLISGS

SEQ ID NO: 9354 - protein, 19 aa, Artificial Sequence
  Synthetic polypeptide
MRRVTLFLNGSPKNGKIKI

SEQ ID NO: 9355 - protein, 274 aa, Artificial Sequence
  Synthetic polypeptide
MDANSKDKPPETKESAMNNAGNASFILGTGKIVTPQKHAELPPNPCTPDTFKSPLNFSTVTVEQLGITPESFVRNSAGKSSSYLKKCRRRSAVGARGSPETNHLIRFIARQQNIKNARKSPLAQDSPSQGSPALYRNVNTLRERISAFQSAFHSIKENEKMTGCLEFSEAGKESEMTDLTRKEGLSACQQSGFPAVLSSKRRRISYQRDSDENLTDAEGKVIGLQIFNIDTDRACAVETSVDLSEISSKLGSTQSGFLVEESLPLSELTETSNG

SEQ ID NO: 9356 - protein, 259 aa, Artificial Sequence
  Synthetic polypeptide
MSSVSGNASFILGTGKIVTPQKHAELPPNPCTPDTFKSPLNFSTVTVEQLGITPESFVRNSAGKSSSYLKKCRRRSAVGARGSPETNHLIRFIARQQNIKNARKSPLAQDSPSQGSPALYRNVNTLRERISAFQSAFHSIKENEKMTGCLEFSEAGKESEMTDLTRKEGLSACQQSGFPAVLSSKRRRISYQRDSDENLTDAEGKVIGLQIFNIDTDRACAVETSVDLSEISSKLGSTQSGFLVEESLPLSELTETSNG

SEQ ID NO: 9357 - protein, 33 aa, Artificial Sequence
  Synthetic polypeptide
MAETKDVFGQEPHPGLWEAKAGGSLEPRSSRPA

SEQ ID NO: 9358 - protein, 2 aa, Artificial Sequence
  Synthetic polypeptide
RN

SEQ ID NO: 9359 - protein, 3151 aa, Artificial Sequence
  Synthetic polypeptide
MTAWRRFQSLLLLLGLLVLCARLLTAAKGQNCGGLVQGPNGTIESPGFPHGYPNYANCTWIIITGERNRIQLSFHTFALEEDFDILSVYDGQPQQGNLKVRLSGFQLPSSIVSTGSILTLWFTTDFAVSAQGFKALYEVLPSHTCGNPGEILKGVLHGTRFNIGDKIRYSCLPGYILEGHAILTCIVSPGNGASWDFPAPFCRAEGACGGTLRGTSSSISSPHFPSEYENNADCTWTILAEPGDTIALVFTDFQLEEGYDFLEISGTEAPSIWLTGMNLPSPVISSKNWLRLHFTSDSNHRRKGFNAQFQVKKAIELKSRGVKMLPSKDGSHKNSVLSQGGVALVSDMCPDPGIPENGRRAGSDFSRVGANVQFSCEDNYVLQGSKSITCQRVTETLAAWSDHRPICRARTCGSNLRGPSGVITSPNYPVQYEDNAHCVWVITTTDPDKVIKLAFEEFELERGYDTLTVGDAGKVGDTRSVLYVLTGSSVPDLIVSMSNQMWLHLQSDDSIGSPGFKAVYQEIEKGGCGDPGIPAYGKRTGSSFLHGDTLTFECPAAFELVGERVITCQQNNQWSGNKPSCVFSCFFNFTASSGIILSPNYPEEYGNNMNCVWLIISEPGSRIHLIFNDFDVEPQFDFLAVKDDGISDITVLGTFSGNEVPSQLASSGHIVRLEFQSDHSTTGRGFNITYTTFGQNECHDPGIPINGRRFGDRFLLGSSVSFHCDDGFVKTQGSESITCILQDGNVVWSSTVPRCEAPCGGHLTASSGVILPPGWPGYYKDSLHCEWIIEAKPGHSIKITFDRFQTEVNYDTLEVRDGPASSSPLIGEYHGTQAPQFLISTGNFMYLLFTTDNSRSSIGFLIHYESVTLESDSCLDPGIPVNGHRHGGDFGIRSTVTFSCDPGYTLSDDEPLVCERNHQWNHALPSCDALCGGYIQGKSGTVLSPGFPDFYPNSLNCTWTIEVSHGKGVQMIFHTFHLESSHDYLLITEDGSFSEPVARLTGSVLPHTIKAGLFGNFTAQLRFISDFSISYEGFNITFSEYDLEPCDDPGVPAFSRRIGFHFGVGDSLTFSCFLGYRLEGATKLTCLGGGRRVWSAPLPRCVAECGASVKGNEGTLLSPNFPSNYDNNHECIYKIETEAGKGIHLRTRSFQLFEGDTLKVYDGKDSSSRPLGTFTKNELLGLILNSTSNHLWLEFNTNGSDTDQGFQLTYTSFDLVKCEDPGIPNYGYRIRDEGHFTDTVVLYSCNPGYAMHGSNTLTCLSGDRRVWDKPLPSCIAECGGQIHAATSGRILSPGYPAPYDNNLHCTWIIEADPGKTISLHFIVFDTEMAHDILKVWDGPVDSDILLKEWSGSALPEDIHSTFNSLTLQFDSDFFISKSGFSIQFSTSIAATCNDPGMPQNGTRYGDSREAGDTVTFQCDPGYQLQGQAKITCVQLNNRFFWQPDPPTCIAACGGNLTGPAGVILSPNYPQPYPPGKECDWRVKVNPDFVIALIFKSFNMEPSYDFLHIYEGEDSNSPLIGSYQGSQAPERIESSGNSLFLAFRSDASVGLSGFAIEFKEKPREACFDPGNIMNGTRVGTDFKLGSTITYQCDSGYKILDPSSITCVIGADGKPSWDQVLPSCNAPCGGQYTGSEGVVLSPNYPHNYTAGQICLYSITVPKEFVVFGQFAYFQTALNDLAELFDGTHAQARLLSSLSGSHSGETLPLATSNQILLRFSAKSGASARGFHFVYQAVPRTSDTQCSSVPEPRYGRRIGSEFSAGSIVRFECNPGYLLQGSTALHCQSVPNALAQWNDTIPSCVVPCSGNFTQRRGTILSPGYPEPYGNNLNCIWKIIVTEGSGIQIQVISFATEQNWDSLEIHDGGDVTAPRLGSFSGTTVPALLNSTSNQLYLHFQSDISVAAAGFHLEYKTVGLAACQEPALPSNSIKIGDRYMVNDVLSFQCEPGYTLQGRSHISCMPGTVRRWNYPSPLCIATCGGTLSTLGGVILSPGFPGSYPNNLDCTWRISLPIGYGAHIQFLNFSTEANHDFLEIQNGPYHTSPMIGQFSGTDLPAALLSTTHETLIHFYSDHSQNRQGFKLAYQAYELQNCPDPPPFQNGYMINSDYSVGQSVSFECYPGYILIGHPVLTCQHGINRNWNYPFPRCDAPCGYNVTSQNGTIYSPGFPDEYPILKDCIWLITVPPGHGVYINFTLLQTEAVNDYIAVWDGPDQNSPQLGVFSGNTALETAYSSTNQVLLKFHSDFSNGGFFVLNFHAFQLKKCQPPPAVPQAEMLTEDDDFEIGDFVKYQCHPGYTLVGTDILTCKLSSQLQFEGSLPTCEAQCPANEVRTGSSGVILSPGYPGNYFNSQTCSWSIKVEPNYNITIFVDTFQSEKQFDALEVFDGSSGQSPLLVVLSGNHTEQSNFTSRSNQLYLRWSTDHATSKKGFKIRYAAPYCSLTHPLKNGGILNRTAGAVGSKVHYFCKPGYRMVGHSNATCRRNPLGMYQWDSLTPLCQAVSCGIPESPGNGSFTGNEFTLDSKVVYECHEGFKLESSQQATAVCQEDGLWSNKGKPPTCKPVACPSIEAQLSEHVIWRLVSGSLNEYGAQVLLSCSPGYYLEGWRLLRCQANGTWNIGDERPSCRAGHCGSPDPIVNGHISGDGFSYRDTVVYQCNPGFRLVGTSVRICLQDHKWSGQTPVCVPITCGHPGNPAHGFTNGSEFNLNDVVNFTCNTGYLLQGVSRAQCRSNGQWSSPLPTCRVVNCSDPGFVENAIRHGQQNFPESFEYGMSILYHCKKGFYLLGSSALTCMANGLWDRSLPKCLAISCGHPGVPANAVLTGELFTYGAVVHYSCRGSESLIGNDTRVCQEDSHWSGALPHCTGNNPGFCGDPGTPAHGSRLGDDFKTKSLLRFSCEMGHQLRGSPERTCLLNGSWSGLQPVCEAVLCPQPPPVQNGTVEGSDFRWGSSISYSCMDGYQLSHSAILSCEGRGVWKGEIPQCLPVFCGDPGIPAEGRLSGKSFTYKSEVFFQCKSPFILVGSSRRVCQADGTWSGIQPTCIDPAHNTCPDPGTPHFGIQNSSRGYEVGSTVFFRCRKGYHIQGSTTRTCLANLTWSGIQTECILWFPRTGSITIGWTLGCEGCSQAPSLTLNQSLWREPGRREGGQFSLTSAPGDSQAL

SEQ ID NO: 9360 - protein, 3328 aa, Artificial Sequence
  Synthetic polypeptide
MTAWRRFQSLLLLLGLLVLCARLLTAAKGQNCGGLVQGPNGTIESPGFPHGYPNYANCTWIIITGERNRIQLSFHTFALEEDFDILSVYDGQPQQGNLKVRLSGFQLPSSIVSTGSILTLWFTTDFAVSAQGFKALYEVLPSHTCGNPGEILKGVLHGTRFNIGDKIRYSCLPGYILEGHAILTCIVSPGNGASWDFPAPFCRAEGACGGTLRGTSSSISSPHFPSEYENNADCTWTILAEPGDTIALVFTDFQLEEGYDFLEISGTEAPSIWLTGMNLPSPVISSKNWLRLHFTSDSNHRRKGFNAQFQVKKAIELKSRGVKMLPSKDGSHKNSVLSQGGVALVSDMCPDPGIPENGRRAGSDFSRVGANVQFSCEDNYVLQGSKSITCQRVTETLAAWSDHRPICRARTCGSNLRGPSGVITSPNYPVQYEDNAHCVWVITTTDPDKVIKLAFEEFELERGYDTLTVGDAGKVGDTRSVLYVLTGSSVPDLIVSMSNQMWLHLQSDDSIGSPGFKAVYQEIEKGGCGDPGIPAYGKRTGSSFLHGDTLTFECPAAFELVGERVITCQQNNQWSGNKPSCVFSCFFNFTASSGIILSPNYPEEYGNNMNCVWLIISEPGSRIHLIFNDFDVEPQFDFLAVKDDGISDITVLGTFSGNEVPSQLASSGHIVRLEFQSDHSTTGRGFNITYTTFGQNECHDPGIPINGRRFGDRFLLGSSVSFHCDDGFVKTQGSESITCILQDGNVVWSSTVPRCEAPCGGHLTASSGVILPPGWPGYYKDSLHCEWIIEAKPGHSIKITFDRFQTEVNYDTLEVRDGPASSSPLIGEYHGTQAPQFLISTGNFMYLLFTTDNSRSSIGFLIHYESVTLESDSCLDPGIPVNGHRHGGDFGIRSTVTFSCDPGYTLSDDEPLVCERNHQWNHALPSCDALCGGYIQGKSGTVLSPGFPDFYPNSLNCTWTIEVSHGKGVQMIFHTFHLESSHDYLLITEDGSFSEPVARLTGSVLPHTIKAGLFGNFTAQLRFISDFSISYEGFNITFSEYDLEPCDDPGVPAFSRRIGFHFGVGDSLTFSCFLGYRLEGATKLTCLGGGRRVWSAPLPRCVAECGASVKGNEGTLLSPNFPSNYDNNHECIYKIETEAGKGIHLRTRSFQLFEGDTLKVYDGKDSSSRPLGTFTKNELLGLILNSTSNHLWLEFNTNGSDTDQGFQLTYTSFDLVKCEDPGIPNYGYRIRDEGHFTDTVVLYSCNPGYAMHGSNTLTCLSGDRRVWDKPLPSCIAECGGQIHAATSGRILSPGYPAPYDNNLHCTWIIEADPGKTISLHFIVFDTEMAHDILKVWDGPVDSDILLKEWSGSALPEDIHSTFNSLTLQFDSDFFISKSGFSIQFSTSIAATCNDPGMPQNGTRYGDSREAGDTVTFQCDPGYQLQGQAKITCVQLNNRFFWQPDPPTCIAACGGNLTGPAGVILSPNYPQPYPPGKECDWRVKVNPDFVIALIFKSFNMEPSYDFLHIYEGEDSNSPLIGSYQGSQAPERIESSGNSLFLAFRSDASVGLSGFAIEFKEKPREACFDPGNIMNGTRVGTDFKLGSTITYQCDSGYKILDPSSITCVIGADGKPSWDQVLPSCNAPCGGQYTGSEGVVLSPNYPHNYTAGQICLYSITVPKEFVVFGQFAYFQTALNDLAELFDGTHAQARLLSSLSGSHSGETLPLATSNQILLRFSAKSGASARGFHFVYQAVPRTSDTQCSSVPEPRYGRRIGSEFSAGSIVRFECNPGYLLQGSTALHCQSVPNALAQWNDTIPSCVVPCSGNFTQRRGTILSPGYPEPYGNNLNCIWKIIVTEGSGIQIQVISFATEQNWDSLEIHDGGDVTAPRLGSFSGTTVPALLNSTSNQLYLHFQSDISVAAAGFHLEYKTVGLAACQEPALPSNSIKIGDRYMVNDVLSFQCEPGYTLQGRSHISCMPGTVRRWNYPSPLCIATCGGTLSTLGGVILSPGFPGSYPNNLDCTWRISLPIGYGAHIQFLNFSTEANHDFLEIQNGPYHTSPMIGQFSGTDLPAALLSTTHETLIHFYSDHSQNRQGFKLAYQAYELQNCPDPPPFQNGYMINSDYSVGQSVSFECYPGYILIGHPVLTCQHGINRNWNYPFPRCDAPCGYNVTSQNGTIYSPGFPDEYPILKDCIWLITVPPGHGVYINFTLLQTEAVNDYIAVWDGPDQNSPQLGVFSGNTALETAYSSTNQVLLKFHSDFSNGGFFVLNFHAFQLKKCQPPPAVPQAEMLTEDDDFEIGDFVKYQCHPGYTLVGTDILTCKLSSQLQFEGSLPTCEAQCPANEVRTGSSGVILSPGYPGNYFNSQTCSWSIKVEPNYNITIFVDTFQSEKQFDALEVFDGSSGQSPLLVVLSGNHTEQSNFTSRSNQLYLRWSTDHATSKKGFKIRYAAPYCSLTHPLKNGGILNRTAGAVGSKVHYFCKPGYRMVGHSNATCRRNPLGMYQWDSLTPLCQAVSCGIPESPGNGSFTGNEFTLDSKVVYECHEGFKLESSQQATAVCQEDGLWSNKGKPPTCKPVACPSIEAQLSEHVIWRLVSGSLNEYGAQVLLSCSPGYYLEGWRLLRCQANGTWNIGDERPSCRVISCGSLSFPPNGNKIGTLTVYGATAIFTCNTGYTLVGSHVRECLANGLWSGSETRCLAGHCGSPDPIVNGHISGDGFSYRDTVVYQCNPGFRLVGTSVRICLQDHKWSGQTPVCVPITCGHPGNPAHGFTNGSEFNLNDVVNFTCNTGYLLQGVSRAQCRSNGQWSSPLPTCRVVNCSDPGFVENAIRHGQQNFPESFEYGMSILYHCKKGFYLLGSSALTCMANGLWDRSLPKCLAISCGHPGVPANAVLTGELFTYGAVVHYSCRGSESLIGNDTRVCQEDSHWSGALPHCTGNNPGFCGDPGTPAHGSRLGDDFKTKSLLRFSCEMGHQLRGSPERTCLLNGSWSGLQPVCEAVSCGNPGTPTNGMIVSSDGILFSSSVIYACWEGYKTSGLMTRHCTANGTWTGTAPDCTIISCGDPGTLANGIQFGTDFTFNKTVSYQCNPGYVMEAVTSATIRCTKDGRWNPSKPVCKAVLCPQPPPVQNGTVEGSDFRWGSSISYSCMDGYQLSHSAILSCEGRGVWKGEIPQCLPVFCGDPGIPAEGRLSGKSFTYKSEVFFQCKSPFILVGSSRRVCQADGTWSGIQPTCIDPAHNTCPDPGTPHFGIQNSSRGYEVGSTVFFRCRKGYHIQGSTTRTCLANLTWSGIQTECILWFPRTGSITIGWTLGCEGCSQAPSLTLNQSLWREPGRREGGQFSLTSAPGDSQAL

SEQ ID NO: 9361 - protein, 3327 aa, Artificial Sequence
  Synthetic polypeptide
MTAWRRFQSLLLLLGLLVLCARLLTAAKGQNCGGLVQGPNGTIESPGFPHGYPNYANCTWIIITGERNRIQLSFHTFALEEDFDILSVYDGQPQQGNLKVRLSGFQLPSSIVSTGSILTLWFTTDFAVSAQGFKALYEVLPSHTCGNPGEILKGVLHGTRFNIGDKIRYSCLPGYILEGHAILTCIVSPGNGASWDFPAPFCRAEGACGGTLRGTSSSISSPHFPSEYENNADCTWTILAEPGDTIALVFTDFQLEEGYDFLEISGTEAPSIWLTGMNLPSPVISSKNWLRLHFTSDSNHRRKGFNAQFQVKKAIELKSRGVKMLPSKDGSHKNSVLSQGGVALVSDMCPDPGIPENGRRAGSDFRVGANVQFSCEDNYVLQGSKSITCQRVTETLAAWSDHRPICRARTCGSNLRGPSGVITSPNYPVQYEDNAHCVWVITTTDPDKVIKLAFEEFELERGYDTLTVGDAGKVGDTRSVLYVLTGSSVPDLIVSMSNQMWLHLQSDDSIGSPGFKAVYQEIEKGGCGDPGIPAYGKRTGSSFLHGDTLTFECPAAFELVGERVITCQQNNQWSGNKPSCVFSCFFNFTASSGIILSPNYPEEYGNNMNCVWLIISEPGSRIHLIFNDFDVEPQFDFLAVKDDGISDITVLGTFSGNEVPSQLASSGHIVRLEFQSDHSTTGRGFNITYTTFGQNECHDPGIPINGRRFGDRFLLGSSVSFHCDDGFVKTQGSESITCILQDGNVVWSSTVPRCEAPCGGHLTASSGVILPPGWPGYYKDSLHCEWIIEAKPGHSIKITFDRFQTEVNYDTLEVRDGPASSSPLIGEYHGTQAPQFLISTGNFMYLLFTTDNSRSSIGFLIHYESVTLESDSCLDPGIPVNGHRHGGDFGIRSTVTFSCDPGYTLSDDEPLVCERNHQWNHALPSCDALCGGYIQGKSGTVLSPGFPDFYPNSLNCTWTIEVSHGKGVQMIFHTFHLESSHDYLLITEDGSFSEPVARLTGSVLPHTIKAGLFGNFTAQLRFISDFSISYEGFNITFSEYDLEPCDDPGVPAFSRRIGFHFGVGDSLTFSCFLGYRLEGATKLTCLGGGRRVWSAPLPRCVAECGASVKGNEGTLLSPNFPSNYDNNHECIYKIETEAGKGIHLRTRSFQLFEGDTLKVYDGKDSSSRPLGTFTKNELLGLILNSTSNHLWLEFNTNGSDTDQGFQLTYTSFDLVKCEDPGIPNYGYRIRDEGHFTDTVVLYSCNPGYAMHGSNTLTCLSGDRRVWDKPLPSCIAECGGQIHAATSGRILSPGYPAPYDNNLHCTWIIEADPGKTISLHFIVFDTEMAHDILKVWDGPVDSDILLKEWSGSALPEDIHSTFNSLTLQFDSDFFISKSGFSIQFSTSIAATCNDPGMPQNGTRYGDSREAGDTVTFQCDPGYQLQGQAKITCVQLNNRFFWQPDPPTCIAACGGNLTGPAGVILSPNYPQPYPPGKECDWRVKVNPDFVIALIFKSFNMEPSYDFLHIYEGEDSNSPLIGSYQGSQAPERIESSGNSLFLAFRSDASVGLSGFAIEFKEKPREACFDPGNIMNGTRVGTDFKLGSTITYQCDSGYKILDPSSITCVIGADGKPSWDQVLPSCNAPCGGQYTGSEGVVLSPNYPHNYTAGQICLYSITVPKEFVVFGQFAYFQTALNDLAELFDGTHAQARLLSSLSGSHSGETLPLATSNQILLRFSAKSGASARGFHFVYQAVPRTSDTQCSSVPEPRYGRRIGSEFSAGSIVRFECNPGYLLQGSTALHCQSVPNALAQWNDTIPSCVVPCSGNFTQRRGTILSPGYPEPYGNNLNCIWKIIVTEGSGIQIQVISFATEQNWDSLEIHDGGDVTAPRLGSFSGTTVPALLNSTSNQLYLHFQSDISVAAAGFHLEYKTVGLAACQEPALPSNSIKIGDRYMVNDVLSFQCEPGYTLQGRSHISCMPGTVRRWNYPSPLCIATCGGTLSTLGGVILSPGFPGSYPNNLDCTWRISLPIGYGAHIQFLNFSTEANHDFLEIQNGPYHTSPMIGQFSGTDLPAALLSTTHETLIHFYSDHSQNRQGFKLAYQAYELQNCPDPPPFQNGYMINSDYSVGQSVSFECYPGYILIGHPVLTCQHGINRNWNYPFPRCDAPCGYNVTSQNGTIYSPGFPDEYPILKDCIWLITVPPGHGVYINFTLLQTEAVNDYIAVWDGPDQNSPQLGVFSGNTALETAYSSTNQVLLKFHSDFSNGGFFVLNFHAFQLKKCQPPPAVPQAEMLTEDDDFEIGDFVKYQCHPGYTLVGTDILTCKLSSQLQFEGSLPTCEAQCPANEVRTGSSGVILSPGYPGNYFNSQTCSWSIKVEPNYNITIFVDTFQSEKQFDALEVFDGSSGQSPLLVVLSGNHTEQSNFTSRSNQLYLRWSTDHATSKKGFKIRYAAPYCSLTHPLKNGGILNRTAGAVGSKVHYFCKPGYRMVGHSNATCRRNPLGMYQWDSLTPLCQAVSCGIPESPGNGSFTGNEFTLDSKVVYECHEGFKLESSQQATAVCQEDGLWSNKGKPPTCKPVACPSIEAQLSEHVIWRLVSGSLNEYGAQVLLSCSPGYYLEGWRLLRCQANGTWNIGDERPSCRVISCGSLSFPPNGNKIGTLTVYGATAIFTCNTGYTLVGSHVRECLANGLWSGSETRCLAGHCGSPDPIVNGHISGDGFSYRDTVVYQCNPGFRLVGTSVRICLQDHKWSGQTPVCVPITCGHPGNPAHGFTNGSEFNLNDVVNFTCNTGYLLQGVSRAQCRSNGQWSSPLPTCRVVNCSDPGFVENAIRHGQQNFPESFEYGMSILYHCKKGFYLLGSSALTCMANGLWDRSLPKCLAISCGHPGVPANAVLTGELFTYGAVVHYSCRGSESLIGNDTRVCQEDSHWSGALPHCTGNNPGFCGDPGTPAHGSRLGDDFKTKSLLRFSCEMGHQLRGSPERTCLLNGSWSGLQPVCEAVSCGNPGTPTNGMIVSSDGILFSSSVIYACWEGYKTSGLMTRHCTANGTWTGTAPDCTIISCGDPGTLANGIQFGTDFTFNKTVSYQCNPGYVMEAVTSATIRCTKDGRWNPSKPVCKAVLCPQPPPVQNGTVEGSDFRWGSSISYSCMDGYQLSHSAILSCEGRGVWKGEIPQCLPVFCGDPGIPAEGRLSGKSFTYKSEVFFQCKSPFILVGSSRRVCQADGTWSGIQPTCIDPAHNTCPDPGTPHFGIQNSSRGYEVGSTVFFRCRKGYHIQGSTTRTCLANLTWSGIQTECILWFPRTGSITIGWTLGCEGCSQAPSLTLNQSLWREPGRREGGQFSLTSAPGDSQAL

SEQ ID NO: 9362 - protein, 3150 aa, Artificial Sequence
  Synthetic polypeptide
MTAWRRFQSLLLLLGLLVLCARLLTAAKGQNCGGLVQGPNGTIESPGFPHGYPNYANCTWIIITGERNRIQLSFHTFALEEDFDILSVYDGQPQQGNLKVRLSGFQLPSSIVSTGSILTLWFTTDFAVSAQGFKALYEVLPSHTCGNPGEILKGVLHGTRFNIGDKIRYSCLPGYILEGHAILTCIVSPGNGASWDFPAPFCRAEGACGGTLRGTSSSISSPHFPSEYENNADCTWTILAEPGDTIALVFTDFQLEEGYDFLEISGTEAPSIWLTGMNLPSPVISSKNWLRLHFTSDSNHRRKGFNAQFQVKKAIELKSRGVKMLPSKDGSHKNSVLSQGGVALVSDMCPDPGIPENGRRAGSDFRVGANVQFSCEDNYVLQGSKSITCQRVTETLAAWSDHRPICRARTCGSNLRGPSGVITSPNYPVQYEDNAHCVWVITTTDPDKVIKLAFEEFELERGYDTLTVGDAGKVGDTRSVLYVLTGSSVPDLIVSMSNQMWLHLQSDDSIGSPGFKAVYQEIEKGGCGDPGIPAYGKRTGSSFLHGDTLTFECPAAFELVGERVITCQQNNQWSGNKPSCVFSCFFNFTASSGIILSPNYPEEYGNNMNCVWLIISEPGSRIHLIFNDFDVEPQFDFLAVKDDGISDITVLGTFSGNEVPSQLASSGHIVRLEFQSDHSTTGRGFNITYTTFGQNECHDPGIPINGRRFGDRFLLGSSVSFHCDDGFVKTQGSESITCILQDGNVVWSSTVPRCEAPCGGHLTASSGVILPPGWPGYYKDSLHCEWIIEAKPGHSIKITFDRFQTEVNYDTLEVRDGPASSSPLIGEYHGTQAPQFLISTGNFMYLLFTTDNSRSSIGFLIHYESVTLESDSCLDPGIPVNGHRHGGDFGIRSTVTFSCDPGYTLSDDEPLVCERNHQWNHALPSCDALCGGYIQGKSGTVLSPGFPDFYPNSLNCTWTIEVSHGKGVQMIFHTFHLESSHDYLLITEDGSFSEPVARLTGSVLPHTIKAGLFGNFTAQLRFISDFSISYEGFNITFSEYDLEPCDDPGVPAFSRRIGFHFGVGDSLTFSCFLGYRLEGATKLTCLGGGRRVWSAPLPRCVAECGASVKGNEGTLLSPNFPSNYDNNHECIYKIETEAGKGIHLRTRSFQLFEGDTLKVYDGKDSSSRPLGTFTKNELLGLILNSTSNHLWLEFNTNGSDTDQGFQLTYTSFDLVKCEDPGIPNYGYRIRDEGHFTDTVVLYSCNPGYAMHGSNTLTCLSGDRRVWDKPLPSCIAECGGQIHAATSGRILSPGYPAPYDNNLHCTWIIEADPGKTISLHFIVFDTEMAHDILKVWDGPVDSDILLKEWSGSALPEDIHSTFNSLTLQFDSDFFISKSGFSIQFSTSIAATCNDPGMPQNGTRYGDSREAGDTVTFQCDPGYQLQGQAKITCVQLNNRFFWQPDPPTCIAACGGNLTGPAGVILSPNYPQPYPPGKECDWRVKVNPDFVIALIFKSFNMEPSYDFLHIYEGEDSNSPLIGSYQGSQAPERIESSGNSLFLAFRSDASVGLSGFAIEFKEKPREACFDPGNIMNGTRVGTDFKLGSTITYQCDSGYKILDPSSITCVIGADGKPSWDQVLPSCNAPCGGQYTGSEGVVLSPNYPHNYTAGQICLYSITVPKEFVVFGQFAYFQTALNDLAELFDGTHAQARLLSSLSGSHSGETLPLATSNQILLRFSAKSGASARGFHFVYQAVPRTSDTQCSSVPEPRYGRRIGSEFSAGSIVRFECNPGYLLQGSTALHCQSVPNALAQWNDTIPSCVVPCSGNFTQRRGTILSPGYPEPYGNNLNCIWKIIVTEGSGIQIQVISFATEQNWDSLEIHDGGDVTAPRLGSFSGTTVPALLNSTSNQLYLHFQSDISVAAAGFHLEYKTVGLAACQEPALPSNSIKIGDRYMVNDVLSFQCEPGYTLQGRSHISCMPGTVRRWNYPSPLCIATCGGTLSTLGGVILSPGFPGSYPNNLDCTWRISLPIGYGAHIQFLNFSTEANHDFLEIQNGPYHTSPMIGQFSGTDLPAALLSTTHETLIHFYSDHSQNRQGFKLAYQAYELQNCPDPPPFQNGYMINSDYSVGQSVSFECYPGYILIGHPVLTCQHGINRNWNYPFPRCDAPCGYNVTSQNGTIYSPGFPDEYPILKDCIWLITVPPGHGVYINFTLLQTEAVNDYIAVWDGPDQNSPQLGVFSGNTALETAYSSTNQVLLKFHSDFSNGGFFVLNFHAFQLKKCQPPPAVPQAEMLTEDDDFEIGDFVKYQCHPGYTLVGTDILTCKLSSQLQFEGSLPTCEAQCPANEVRTGSSGVILSPGYPGNYFNSQTCSWSIKVEPNYNITIFVDTFQSEKQFDALEVFDGSSGQSPLLVVLSGNHTEQSNFTSRSNQLYLRWSTDHATSKKGFKIRYAAPYCSLTHPLKNGGILNRTAGAVGSKVHYFCKPGYRMVGHSNATCRRNPLGMYQWDSLTPLCQAVSCGIPESPGNGSFTGNEFTLDSKVVYECHEGFKLESSQQATAVCQEDGLWSNKGKPPTCKPVACPSIEAQLSEHVIWRLVSGSLNEYGAQVLLSCSPGYYLEGWRLLRCQANGTWNIGDERPSCRAGHCGSPDPIVNGHISGDGFSYRDTVVYQCNPGFRLVGTSVRICLQDHKWSGQTPVCVPITCGHPGNPAHGFTNGSEFNLNDVVNFTCNTGYLLQGVSRAQCRSNGQWSSPLPTCRVVNCSDPGFVENAIRHGQQNFPESFEYGMSILYHCKKGFYLLGSSALTCMANGLWDRSLPKCLAISCGHPGVPANAVLTGELFTYGAVVHYSCRGSESLIGNDTRVCQEDSHWSGALPHCTGNNPGFCGDPGTPAHGSRLGDDFKTKSLLRFSCEMGHQLRGSPERTCLLNGSWSGLQPVCEAVLCPQPPPVQNGTVEGSDFRWGSSISYSCMDGYQLSHSAILSCEGRGVWKGEIPQCLPVFCGDPGIPAEGRLSGKSFTYKSEVFFQCKSPFILVGSSRRVCQADGTWSGIQPTCIDPAHNTCPDPGTPHFGIQNSSRGYEVGSTVFFRCRKGYHIQGSTTRTCLANLTWSGIQTECILWFPRTGSITIGWTLGCEGCSQAPSLTLNQSLWREPGRREGGQFSLTSAPGDSQAL

SEQ ID NO: 9363 - protein, 18 aa, Artificial Sequence
  Synthetic polypeptide
MKLLDVVAHTCSPSYSRG

SEQ ID NO: 9364 - protein, 288 aa, Artificial Sequence
  Synthetic polypeptide
MLSSFPVVLLETMSHYTDEPRFTIEQIDLLQRLRRTGMTKHEILHALETLDRLDQEHSDKFGRRSSYGGSSYGNSTNNVPASSSTATASTQTQHSGMSPSPSNSYDTSPQPCTTNQNGRENNERLSTSNGKMSPTRYHANSMGQRSYSFEASEEDLDVDDKVEELMRRDSSVIKEEIKAFLANRRISQAVVAQVTGISQSRISHWLLQQGSDLSEQKKRAFYRWYQLEKTNPGATLSMRPAPIPIEDPEWRQTPPPVSATSGTFRLRRGSRFTWRKECLAVMESMKSS

SEQ ID NO: 9365 - protein, 98 aa, Artificial Sequence
  Synthetic polypeptide
MAEKTQKSVKIAPGAVVCVESEIRGDVTIGPRTVIHPKARIIAEAGPIVIGEGNLIEEQALIINAYPDNITPDTEDPEPKPMIIGTNNVFEVGCYSDC

SEQ ID NO: 9366 - protein, 21 aa, Artificial Sequence
  Synthetic polypeptide
HFQCTQLLLSLWEPGCYHGIR

SEQ ID NO: 9367 - protein, 287 aa, Artificial Sequence
  Synthetic polypeptide
MDDKAFTKELDQWVEQLNECKQLNENQVRTLCEKAKEILTKESNVQEVRCPVTVCGDVHGQFHDLMELFRIGGKSPDTNYLFMGDYVDRGYYSVETVTLLVALKVRYPERITILRGNHESRQITQVYGFYDECLRKYGNANVWKYFTDLFDYLPLTALVDGQIFCLHGGLSPSIDTLDHIRALDRLQEVPHEGPMCDLLWSDPDDRGGWGISPRGAGYTFGQDISETFNHANGLTLVSRAHQLVMEGYNWCHDRNVVTIFSAPNYCYRCGNQAAIMELDDTLKYSLL

SEQ ID NO: 9368 - protein, 125 aa, Artificial Sequence
  Synthetic polypeptide
IFCLHGGLSPSIDTLDHIRALDRLQEVPHEGPMCDLLWSDPDDRGGWGISPRGAGYTFGQDISETFNHANGLTLVSRAHQLVMEGYNWCHDRNVVTIFSAPNYCYRCGNQAAIMELDDTLKYSLL

SEQ ID NO: 9369 - protein, 946 aa, Artificial Sequence
  Synthetic polypeptide
MSEKKLETTAQQRKCPEWMNVQNKRCAVEERKACVRKSVFEDDLPFLEFTGSIVYSYDASDCSFLSEDISMSLSDGDVVGFDMEWPPLYNRGKLGKVALIQLCVSESKCYLFHVSSMSVFPQGLKMLLENKAVKKAGVGIEGDQWKLLRDFDIKLKNFVELTDVANKKLKCTETWSLNSLVKHLLGKQLLKDKSIRCSNWSKFPLTEDQKLYAATDAYAGFIIYRNLEILDDTVQRFAINKEEEILLSDMNKQLTSISEEVMDLAKHLPHAFSKLENPRRVSILLKDISENLYSLRRMIIGSTNIETELRPSNNLNLLSFEDSTTGGVQQKQIREHEVLIHVEDETWDPTLDHLAKHDGEDVLGNKVERKEDGFEDGVEDNKLKENMERACLMSLDITEHELQILEQQSQEEYLSDIAYKSTEHLSPNDNENDTSYVIESDEDLEMEMLKHLSPNDNENDTSYVIESDEDLEMEMLKSLENLNSGTVEPTHSKCLKMERNLGLPTKEEEEDDENEANEGEEDDDKDFLWPAPNEEQVTCLKMYFGHSSFKPVQWKVIHSVLEERRDNVAVMATGYGKSLCFQYPPVYVGKIGLVISPLISLMEDQVLQLKMSNIPACFLGSAQSENVLTDIKLGKYRIVYVTPEYCSGNMGLLQQLEADIGITLIAVDEAHCISEWGHDFRDSFRKLGSLKTALPMVPIVALTATASSSIREDIVRCLNLRNPQITCTGFDRPNLYLEVRRKTGNILQDLQPFLVKTSSHWEFEGPTIIYCPSRKMTQQVTGELRKLNLSCGTYHAGMSFSTRKDIHHRFVRDEIQCVIATIAFGMGINKADIRQVIHYGAPKDMESYYQEIGRAGRDGLQSSCHVLWAPADINLNRHLLTEIRNEKFRLYKLKMMAKMEKYLHSSRCRRQIILSHFEDKQVQKASLGIMGTEKCCDNCRSSSLGD

SEQ ID NO: 9370 - protein, 252 aa, Artificial Sequence
  Synthetic polypeptide
MRWRRAPRRSGRPGPRAQRPGSAARSSPPLPLLPLLLLLGTAALAPGAAAGNEAAPAGASVCYSSPPSVGSVQELAQRAAVVIEGKVHPQRRQQGALDRKAAAAAGEAGAWGGDREPPAAGPRALGPPAEEPLLAANGTVPSWPTAPVPSAGEPGEEAPYLVKVHQVWAVKAGGLKKDSLLTVRLGTWGHPAFPSCGRLKEDSRYIFFMEPDANSTSRAPAAFRASFPPLETGRNLKKEVSRVLCKRCGNQK

SEQ ID NO: 9371 - protein, 105 aa, Artificial Sequence
  Synthetic polypeptide
VPSAGEPGEEAPYLVKVHQVWAVKAGGLKKDSLLTVRLGTWGHPAFPSCGRLKEDSRYIFFMEPDANSTSRAPAAFRASFPPLETGRNLKKEVSRVLCKRCGNQK

SEQ ID NO: 9372 - protein, 115 aa, Artificial Sequence
  Synthetic polypeptide
MSGGSSCSQTPSRAIPATRRVVLGDGVQLPPGDYSTTPGGTLFSTTPGGTRIIYDRKFLMECRNSPVTKTPPRDLPTIPGVTSPSSDEPPMEASQSHLRNSPEDKRAGGSEAEGT

SEQ ID NO: 9373 - protein, 1 aa, Artificial Sequence
  Synthetic polypeptide
V

SEQ ID NO: 9374 - protein, 468 aa, Artificial Sequence
  Synthetic polypeptide
MTEGSMGVTLEASAEADLKAGNSCPELVPSRRSKLRKPKPVPLRKKAIGGEFSDTNAAVEGTPLPKASYHFSPEELDENTSPLLGDARFQKSPPDLKETPGTLSSDTNDSGVELGEESRSSPLKLEFDFTEDTGNIEARKALPRKLGRKLGSTLTPKIQKDGISKSAGLEQPTDPVARDGPLSQTSSKPDPSQWESPSFNPFGSHSVLQNSPPLSSEGSYHFDPDNFDESMDPFKPTTTLTSSDFCSPTGNHVNEILESPKKAKSRLITGCKVKKHETQSLALDACSRDEGAVISQISDISNRDGHATDEEKLASTSCGQKSAGAEVKGEPEEDLEYFECSNVPVSTINHAFSSSEAGIEKETCQKMEEDGSTVLGLLESSAEKAPVSVSCGGESPLDGICLSESDKTAVLTLIREEIITKEIEANEWKKKYEETRQEVLEMRKIVAEYEKTIAQMIDSTVALPLEAT

SEQ ID NO: 9375 - protein, 469 aa, Artificial Sequence
  Synthetic polypeptide
MTEGSMGVTLEASAEADLKAGNSCPELVPSRRSKLRKPKPVPLRKKAIGGEFSDTNAAVEGTPLPKASYHFSPEELDENTSPLLGDARFQKSPPDLKETPGTLSSDTNDSGVELGEESRSSPLKLEFDFTEDTGNIEARKALPRKLGRKLGSTLTPKIQKDGISKSAGLEQPTDPVARDGPLSQTSSKPDPSQWESPSFNPFGSHSVLQNSPPLSSEGSYHFDPDNFDESMDPFKPTTTLTSSDFCSPTGNHVNEILESPKKAKSRLITSGCKVKKHETQSLALDACSRDEGAVISQISDISNRDGHATDEEKLASTSCGQKSAGAEVKGEPEEDLEYFECSNVPVSTINHAFSSSEAGIEKETCQKMEEDGSTVLGLLESSAEKAPVSVSCGGESPLDGICLSESDKTAVLTLIREEIITKEIEANEWKKKYEETRQEVLEMRKIVAEYEKTIAQMIDSTVALPLEAT

SEQ ID NO: 9376 - protein, 651 aa, Artificial Sequence
  Synthetic polypeptide
MQRQTIKGAGAGGAALMAFSPWQILSPVQWAKWTWSAVRGGAAGEDEAGGPEGDPEEEDSQAETKSLSFSSDSEGNFETPEAETPIRSPFKESCDPSLGLAGPGAKSQESQEADEQLVAEVVEKCSSKTCSKPSENEVPQQAIDSHSVKNFREEPEHDFSKISIVRPFSIETKDSTDISAVLGTKAAHGCVTAVSGKALPSSPPDALQDEAMTEGSMGVTLEASAEADLKAGNSCPELVPSRRSKLRKPKPVPLRKKAIGGEFSDTNAAVEGTPLPKASYHFSPEELDENTSPLLGDARFQKSPPDLKETPGTLSSDTNDSGVELGEESRSSPLKLEFDFTEDTGNIEARKALPRKLGRKLGSTLTPKIQKDGISKSAGLEQPTDPVARDGPLSQTSSKPDPSQWESPSFNPFGSHSVLQNSPPLSSEGSYHFDPDNFDESMDPFKPTTTLTSSDFCSPTGNHVNEILESPKKAKSRLITSGCKVKKHETQSLALDACSRDEGAVISQISDISNRDGHATDEEKLASTSCGQKSAGAEVKGIEKETCQKMEEDGSTVLGLLESSAEKAPVSVSCGGESPLDGICLSESDKTAVLTLIREEIITKEIEANEWKKKYEETRQEVLEMRKIVAEYEKTIAQMIDSTVALPLEAT

SEQ ID NO: 9377 - protein, 590 aa, Artificial Sequence
  Synthetic polypeptide
MNNILKLKSSDSEGNFETPEAETPIRSPFKESCDPSLGLAGPGAKSQESQEADEQLVAEVVEKCSSKTCSKPSENEVPQQAIDSHSVKNFREEPEHDFSKISIVRPFSIETKDSTDISAVLGTKAAHGCVTAVSGKALPSSPPDALQDEAMTEGSMGVTLEASAEADLKAGNSCPELVPSRRSKLRKPKPVPLRKKAIGGEFSDTNAAVEGTPLPKASYHFSPEELDENTSPLLGDARFQKSPPDLKETPGTLSSDTNDSGVELGEESRSSPLKLEFDFTEDTGNIEARKALPRKLGRKLGSTLTPKIQKDGISKSAGLEQPTDPVARDGPLSQTSSKPDPSQWESPSFNPFGSHSVLQNSPPLSSEGSYHFDPDNFDESMDPFKPTTTLTSSDFCSPTGNHVNEILESPKKAKSRLITSGCKVKKHETQSLALDACSRDEGAVISQISDISNRDGHATDEEKLASTSCGQKSAGAEVKGIEKETCQKMEEDGSTVLGLLESSAEKAPVSVSCGGESPLDGICLSESDKTAVLTLIREEIITKEIEANEWKKKYEETRQEVLEMRKIVAEYEKTIAQMIDSTVALPLEAT

SEQ ID NO: 9378 - protein, 238 aa, Artificial Sequence
  Synthetic polypeptide
MGGSHSQTPRGREPAGERHPRPTETATTEQVKFLCFLLSGCKVKKHETQSLALDACSRDEGAVISQISDISNRDGHATDEEKLASTSCGQKSAGAEVKGEPEEDLEYFECSNVPVSTINHAFSSSEAGIEKETCQKMEEDGSTVLGLLESSAEKAPVSVSCGGESPLDGICLSESDKTAVLTLIREEIITKEIEANEWKKKYEETRQEVLEMRKIVAEYEKTIAQMIDSTVALPLEAT

SEQ ID NO: 9379 - protein, 226 aa, Artificial Sequence
  Synthetic polypeptide
MGGSHSQTPRGREPAGERHPRPTETASGCKVKKHETQSLALDACSRDEGAVISQISDISNRDGHATDEEKLASTSCGQKSAGAEVKGEPEEDLEYFECSNVPVSTINHAFSSSEAGIEKETCQKMEEDGSTVLGLLESSAEKAPVSVSCGGESPLDGICLSESDKTAVLTLIREEIITKEIEANEWKKKYEETRQEVLEMRKIVAEYEKTIAQMIDSTVALPLEAT

SEQ ID NO: 9380 - protein, 664 aa, Artificial Sequence
  Synthetic polypeptide
MAFSPWQILSPVQWAKWTWSAVRGGAAGEDEAGGPEGDPEEEDSQAETKSLSFSSDSEGNFETPEAETPIRSPFKESCDPSLGLAGPGAKSQESQEADEQLVAEVVEKCSSKTCSKPSENEVPQQAIDSHSVKNFREEPEHDFSKISIVRPFSIETKDSTDISAVLGTKAAHGCVTAVSGKALPSSPPDALQDEAMTEGSMGVTLEASAEADLKAGNSCPELVPSRRSKLRKPKPVPLRKKAIGGEFSDTNAAVEGTPLPKASYHFSPEELDENTSPLLGDARFQKSPPDLKETPGTLSSDTNDSGVELGEESRSSPLKLEFDFTEDTGNIEARKALPRKLGRKLGSTLTPKIQKDGISKSAGLEQPTDPVARDGPLSQTSSKPDPSQWESPSFNPFGSHSVLQNSPPLSSEGSYHFDPDNFDESMDPFKPTTTLTSSDFCSPTGNHVNEILESPKKAKSRLITSGCKVKKHETQSLALDACSRDEGAVISQISDISNRDGHATDEEKLASTSCGQKSAGAEVKGEPEEDLEYFECSNVPVSTINHAFSSSEAGIEKETCQKMEEDGSTVLGLLESSAEKAPVSVSCGGESPLDGICLSESDKTAVLTLIREEIITKEIEANEWKKKYEETRQEVLEMRKIVAEYEKTIAQMIDSTVALPLEAT

SEQ ID NO: 9381 - protein, 676 aa, Artificial Sequence
  Synthetic polypeptide
MAFSPWQILSPVQWAKWTWSAVRGGAAGEDEAGGPEGDPEEEDSQAETKSLSFSSDSEGNFETPEAETPIRSPFKESCDPSLGLAGPGAKSQESQEADEQLVAEVVEKCSSKTCSKPSENEVPQQAIDSHSVKNFREEPEHDFSKISIVRPFSIETKDSTDISAVLGTKAAHGCVTAVSGKALPSSPPDALQDEAMTEGSMGVTLEASAEADLKAGNSCPELVPSRRSKLRKPKPVPLRKKAIGGEFSDTNAAVEGTPLPKASYHFSPEELDENTSPLLGDARFQKSPPDLKETPGTLSSDTNDSGVELGEESRSSPLKLEFDFTEDTGNIEARKALPRKLGRKLGSTLTPKIQKDGISKSAGLEQPTDPVARDGPLSQTSSKPDPSQWESPSFNPFGSHSVLQNSPPLSSEGSYHFDPDNFDESMDPFKPTTTLTSSDFCSPTGNHVNEILESPKKAKSRLITTTEQVKFLCFLLSGCKVKKHETQSLALDACSRDEGAVISQISDISNRDGHATDEEKLASTSCGQKSAGAEVKGEPEEDLEYFECSNVPVSTINHAFSSSEAGIEKETCQKMEEDGSTVLGLLESSAEKAPVSVSCGGESPLDGICLSESDKTAVLTLIREEIITKEIEANEWKKKYEETRQEVLEMRKIVAEYEKTIAQMIDSTVALPLEAT

SEQ ID NO: 9382 - protein, 254 aa, Artificial Sequence
  Synthetic polypeptide
MAFSPWQILSPVQWAKWTWSAVRGGAAGEDEAGGPEGDPEEEDSQAETKSLSFRSGCKVKKHETQSLALDACSRDEGAVISQISDISNRDGHATDEEKLASTSCGQKSAGAEVKGEPEEDLEYFECSNVPVSTINHAFSSSEAGIEKETCQKMEEDGSTVLGLLESSAEKAPVSVSCGGESPLDGICLSESDKTAVLTLIREEIITKEIEANEWKKKYEETRQEVLEMRKIVAEYEKTIAQMIDSTVALPLEAT

SEQ ID NO: 9383 - protein, 440 aa, Artificial Sequence
  Synthetic polypeptide
MTEGSMGVTLEASAEADLKAGNSCPELVPSRRSKLRKPKPVPLRKKAIGGEFSDTNAAVEGTPLPKASYHFSPEELDENTSPLLGDARFQKSPPDLKETPGTLSSDTNDSGVELGEESRSSPLKLEFDFTEDTGNIEARKALPRKLGRKLGSTLTPKIQKDGISKSAGLEQPTDPVARDGPLSQTSSKPDPSQWESPSFNPFGSHSVLQNSPPLSSEGSYHFDPDNFDESMDPFKPTTTLTSSDFCSPTGNHVNEILESPKKAKSRLITSGCKVKKHETQSLALDACSRDEGAVISQISDISNRDGHATDEEKLASTSCGQKSAGAEVKGIEKETCQKMEEDGSTVLGLLESSAEKAPVSVSCGGESPLDGICLSESDKTAVLTLIREEIITKEIEANEWKKKYEETRQEVLEMRKIVAEYEKTIAQMIDSTVALPLEAT

SEQ ID NO: 9384 - protein, 4 aa, Artificial Sequence
  Synthetic polypeptide
EEAS

SEQ ID NO: 9385 - protein, 102 aa, Artificial Sequence
  Synthetic polypeptide
MEEDGSTVLGLLESSAEKAPVSVSCGGESPLDGICLSESDKTAVLTLIREEIITKEIEANEWKKKYEETRQEVLEMRKIVAEYEKTIAQMIDSTVALPLEAT

SEQ ID NO: 9386 - protein, 35 aa, Artificial Sequence
  Synthetic polypeptide
MGSGARFPSGTLRVRWLLLLGLVGPVLGAARPGLL

SEQ ID NO: 9387 - protein, 533 aa, Artificial Sequence
  Synthetic polypeptide
MGSGARFPSGTLRVRWLLLLGLVGPVLGAARPGFQQTSHLSSYEIITPWRLTRERREAPRPYSKQVSYVIQAEGKEHIIHLERNKDLLPEDFVVYTYNKEGTLITDHPNIQNHCHYRGYVEGVHNSSIALSDCFGLRGLLHLENASYGIEPLQNSSHFEHIIYRMDDVYKEPLKCGVSNKDIEKETAKDEEEEPPSMTQLLRRRRAVLPQTRYVELFIVVDKERYDMMGRNQTAVREEMILLANYLDSMYIMLNIRIVLVGLEIWTNGNLINIVGGAGDVLGNFVQWREKFLITRRRHDSAQLVLKKGFGGTAGMAFVGTVCSRSHAGGINVFGQITVETFASIVAHELGHNLGMNHDDGRDCSCGAKSCIMNSGASGSRNFSSCSAEDFEKLTLNKGGNCLLNIPKPDEAYSAPSCGNKLVDAGEECDCGTPKECELDPCCEGSTCKLKSFAECAYGDCCKDCRFLPGGTLCRGKTSECDVPEYCNGSSQFCQPDVFIQNGYPCQNNKAYCYNGMCQYYDAQCQVIFGSSCH

SEQ ID NO: 9388 - protein, 258 aa, Artificial Sequence
  Synthetic polypeptide
MAMDEYLWMVILGFIIAFILAFSVGANDVANSFGTAVGSGVVTLRQACILASIFETTGSVLLGAKVGETIRKGIIDVNLYNETVETLMAGEVSAMVGSAVWQLIASFLRLPISGTHCIVGSTIGFSLVAIGTKGVQWMELVKIVASWFISPLLSGFMSGLLFVLIRIFILKKEDPVPNGLRALPVFYAATIAINVFSIMYTGAPVLGLVLPMWAIALISFGVALLFAFFVWLFVCPWMRRKITAQSGNNPCVGQQANG

SEQ ID NO: 9389 - protein, 189 aa, Artificial Sequence
  Synthetic polypeptide
MAKYQGEVQSLKLDDDSVIEGVSDQVLVAVVVSFALIATLVYALFRNVHQNIHPENQELVRVLREQLQTEQDAPAATRQQFYTDMYCPICLHQASFPVETNCGHLFCGACIIAYWRYGSWLGAISCPICRQTGSSEKSSRASEQTHQEAVACLDTQNSPACTVGCRITATFQAVSQAPSAWLPTCNAAR

SEQ ID NO: 9390 - protein, 178 aa, Artificial Sequence
  Synthetic polypeptide
MHLLPLDSSSTLTCTVPSACTKPPSRWRPTVDIFFVVTLLLTVFGEDDQSQDVLRLHQDINDYNRRFSGQPRSDHSDLPGSLPGTKCLAPYMQRSPMIISSVTLLESLLSLSHRVKVKSSRQPARPHVTLVAHFLSNLISHLSPQLTLLQPSSPPCCPLSRLKTPSLRSSALASPSDC

SEQ ID NO: 9391 - protein, 274 aa, Artificial Sequence
  Synthetic polypeptide
MAKYQGEVQSLKLDDDSVIEGVSDQVLVAVVVSFALIATLVYALFRNVHQNIHPENQELVRVLREQLQTEQDAPAATRQQFYTDMYCPICLHQASFPVETNCGHLFCGACIIAYWRYGSWLGAISCPICRQTVTLLLTVFGEDDQSQDVLRLHQDINDYNRRFSGQPRSDHSDLPGSLPGTKCLAPYMQRSPMIISSVTLLESLLSLSHRVKVKSSRQPARPHVTLVAHFLSNLISHLSPQLTLLQPSSPPCCPLSRLKTPSLRSSALASPSDC

SEQ ID NO: 9392 - protein, 190 aa, Artificial Sequence
  Synthetic polypeptide
MYCPICLHQASFPVETNCGHLFCGACIIAYWRYGSWLGAISCPICRQTVTLLLTVFGEDDQSQDVLRLHQDINDYNRRFSGQPRSDHSDLPGSLPGTKCLAPYMQRSPMIISSVTLLESLLSLSHRVKVKSSRQPARPHVTLVAHFLSNLISHLSPQLTLLQPSSPPCCPLSRLKTPSLRSSALASPSDC

SEQ ID NO: 9393 - protein, 78 aa, Artificial Sequence
  Synthetic polypeptide
MAKYQGEVQSLKLDDDSVIEGVSDQVLVAVVVSFALIATLVYALFRMAVIKKMKTIKMKEALARVWSKGNCGALFWGV

SEQ ID NO: 9394 - protein, 295 aa, Artificial Sequence
  Synthetic polypeptide
MAATEGVGEAAQGGEPGQPAQPPPQPHPPPPQQQHKEEMAAEAGEAVASPMDDGFVSLDSPSYVLYRDRAEWADIDPVPQNDGPNPVVQIIYSDKFRDVYDYFRAVLQRDERSERAFKLTRDAIELNAANYTVWHFRRVLLKSLQKDLHEEMNYITAIIEEQPKNYQVWHHRRVLVEWLRDPSQELEFIADILNQDAKNYHAWQHRQWVIQEFKLWDNELQYVDQLLKEDVRNNSVWNQRYFVISNTTGYNDRAVLEREVQPPYSLRHNNIEIKPINPTVSSECSSERKSHSLSL

SEQ ID NO: 9395 - protein, 228 aa, Artificial Sequence
  Synthetic polypeptide
MAATEGVGEAAQGGEPGQPAQPPPQPHPPPPQQQHKEEMAAEAGEAVASPMDDGFVSLDSPSYVLYRHFRRVLLKSLQKDLHEEMNYITAIIEEQPKNYQVWHHRRVLVEWLRDPSQELEFIADILNQDAKNYHAWQHRQWVIQEFKLWDNELQYVDQLLKEDVRNNSVWNQRYFVISNTTGYNDRAVLEREVQPPYSLRHNNIEIKPINPTVSSECSSERKSHSLSL

SEQ ID NO: 9396 - protein, 144 aa, Artificial Sequence
  Synthetic polypeptide
MNYITAIIEEQPKNYQVWHHRRVLVEWLRDPSQELEFIADILNQDAKNYHAWQHRQWVIQEFKLWDNELQYVDQLLKEDVRNNSVWNQRYFVISNTTGYNDRAVLEREVQPPYSLRHNNIEIKPINPTVSSECSSERKSHSLSL

SEQ ID NO: 9397 - protein, 233 aa, Artificial Sequence
  Synthetic polypeptide
MSVFRDRAEWADIDPVPQNDGPNPVVQIIYSDKFRDVYDYFRAVLQRDERSERAFKLTRDAIELNAANYTVWHFRRVLLKSLQKDLHEEMNYITAIIEEQPKNYQVWHHRRVLVEWLRDPSQELEFIADILNQDAKNYHAWQHRQWVIQEFKLWDNELQYVDQLLKEDVRNNSVWNQRYFVISNTTGYNDRAVLEREVQPPYSLRHNNIEIKPINPTVSSECSSERKSHSLSL

SEQ ID NO: 9398 - protein, 233 aa, Artificial Sequence
  Synthetic polypeptide
MTGARASAAEQRRAGRSGQARAAERAAGMSGAGRALAALLLAASVLSAALLAPGGSSGRDAQAAPPRDLDKKRHAELKMDQALLLIHNELLWTNLTVYWKSECCYHCLFQVLVNVPQSPKAGKPSAAAASVSTQHGSILQLNDTLEEKEVCRLEYRFGEFGNYSLLVKNIHNGVSEIACDLAVNEDPVDSNLPVSIAFLIGLAVIIVISFLRLLLRYNNIEIRLINYPTVASK

SEQ ID NO: 9399 - protein, 205 aa, Artificial Sequence
  Synthetic polypeptide
MSGAGRALAALLLAASVLSAALLAPGGSSGRDAQAAPPRDLDKKRHAELKMDQALLLIHNELLWTNLTVYWKSECCYHCLFQVLVNVPQSPKAGKPSAAAASVSTQHGSILQLNDTLEEKEVCRLEYRFGEFGNYSLLVKNIHNGVSEIACDLAVNEDPVDSNLPVSIAFLIGLAVIIVISFLRLLLRYNNIEIRLINYPTVASK

SEQ ID NO: 9400 - protein, 155 aa, Artificial Sequence
  Synthetic polypeptide
MDQALLLIHNELLWTNLTVYWKSECCYHCLFQVLVNVPQSPKAGKPSAAAASVSTQHGSILQLNDTLEEKEVCRLEYRFGEFGNYSLLVKNIHNGVSEIACDLAVNEDPVDSNLPVSIAFLIGLAVIIVISFLRLLLRYNNIEIRLINYPTVASK

SEQ ID NO: 9401 - protein, 212 aa, Artificial Sequence
  Synthetic polypeptide
MPRGSRARGSKRKRSWNTECPSFPGERPLQVRRAGLRTAGAAASLSEAWLRCGEGFQNTSGNPSLTAEEKTITEKHLELCPRPKQETTTSKSTSGLTDITWSSSGSDLSDEDKTLSQLQRDELQFIDWEIDSDRAEASDCDEFEDDEGAVEISDCASCASNQSLTSDEKLSELPKFQGLILRQTSRPSLETQLQNSRNYFKSASQPPGPVLR

SEQ ID NO: 9402 - protein, 152 aa, Artificial Sequence
  Synthetic polypeptide
MAQSLTAEEKTITEKHLELCPRPKQETTTSKSTSGLTDITWSSSGSDLSDEDKTLSQLQRDELQFIDWEIDSDRAEASDCDEFEDDEGAVEISDCASCASNQSLTSDEKLSELPKFQGLILRQTSRPSLETQLQNSRNYFKSASQPPGPVLR

SEQ ID NO: 9403 - protein, 142 aa, Artificial Sequence
  Synthetic polypeptide
MAQVWRRVSEHFWESETTTSKSTSGLTDITWSSSGSDLSDEDKTLSQLQRDELQFIDWEIDSDRAEASDCDEFEDDEGAVEISDCASCASNQSLTSDEKLSELPKFQGLILRQTSRPSLETQLQNSRNYFKSASQPPGPVLR

SEQ ID NO: 9404 - protein, 177 aa, Artificial Sequence
  Synthetic polypeptide
MPRGSRARGSKRKRSWNTECPSFPGERPLQVRRAGLRTAGAAASLSEAWLRCGEGFQNTSGNPSLTAEEKTITEKHLELCPRPKQETTTSKSTSGLTDITWSSSGSDLSDEDKTLSQLQRDELQFIDWEIDSDRAEASDCDEFEDDEGAVEISDCASCASNQSLTSDEKLSELPKMT

SEQ ID NO: 9405 - protein, 117 aa, Artificial Sequence
  Synthetic polypeptide
MAQSLTAEEKTITEKHLELCPRPKQETTTSKSTSGLTDITWSSSGSDLSDEDKTLSQLQRDELQFIDWEIDSDRAEASDCDEFEDDEGAVEISDCASCASNQSLTSDEKLSELPKMT

SEQ ID NO: 9406 - protein, 107 aa, Artificial Sequence
  Synthetic polypeptide
MAQVWRRVSEHFWESETTTSKSTSGLTDITWSSSGSDLSDEDKTLSQLQRDELQFIDWEIDSDRAEASDCDEFEDDEGAVEISDCASCASNQSLTSDEKLSELPKMT

SEQ ID NO: 9407 - protein, 365 aa, Artificial Sequence
  Synthetic polypeptide
MPRGSRARGSKRKRSWNTECPSFPGERPLQVRRAGLRTAGAAASLSEAWLRCGEGFQNTSGNPSLTAEEKTITEKHLELCPRPKQETTTSKSTSGLTDITWSSSGSDLSDEDKTLSQLQRDELQFIDWEIDSDRAEASDCDEFEDDEGAVEISDCASCASNQSLTSDEKLSELPKPSSIEILEYSSDSEKEDDLENVLLIDSESPHKYHVQFASDARQIMERLIDPRTKSTETILHTPQKPTAKFPRTPENSAKKKLLRGGLAERLNGLQNRERSAISLWRHQCISYQKTLSGRKSGVLTVKILELHEECAMQVAMCEQLLGSPATSSSQSVAPRPGAGLKVLFTKETAGYLRGRPQDTVRIFPP

SEQ ID NO: 9408 - protein, 305 aa, Artificial Sequence
  Synthetic polypeptide
MAQSLTAEEKTITEKHLELCPRPKQETTTSKSTSGLTDITWSSSGSDLSDEDKTLSQLQRDELQFIDWEIDSDRAEASDCDEFEDDEGAVEISDCASCASNQSLTSDEKLSELPKPSSIEILEYSSDSEKEDDLENVLLIDSESPHKYHVQFASDARQIMERLIDPRTKSTETILHTPQKPTAKFPRTPENSAKKKLLRGGLAERLNGLQNRERSAISLWRHQCISYQKTLSGRKSGVLTVKILELHEECAMQVAMCEQLLGSPATSSSQSVAPRPGAGLKVLFTKETAGYLRGRPQDTVRIFPP

SEQ ID NO: 9409 - protein, 295 aa, Artificial Sequence
  Synthetic polypeptide
MAQVWRRVSEHFWESETTTSKSTSGLTDITWSSSGSDLSDEDKTLSQLQRDELQFIDWEIDSDRAEASDCDEFEDDEGAVEISDCASCASNQSLTSDEKLSELPKPSSIEILEYSSDSEKEDDLENVLLIDSESPHKYHVQFASDARQIMERLIDPRTKSTETILHTPQKPTAKFPRTPENSAKKKLLRGGLAERLNGLQNRERSAISLWRHQCISYQKTLSGRKSGVLTVKILELHEECAMQVAMCEQLLGSPATSSSQSVAPRPGAGLKVLFTKETAGYLRGRPQDTVRIFPP

SEQ ID NO: 9410 - protein, 54 aa, Artificial Sequence
  Synthetic polypeptide
MQVAMCEQLLGSPATSSSQSVAPRPGAGLKVLFTKETAGYLRGRPQDTVRIFPP

SEQ ID NO: 9411 - protein, 21 aa, Artificial Sequence
  Synthetic polypeptide
SYWGHQPPAPPKVWLPGLELA

SEQ ID NO: 9412 - protein, 21 aa, Artificial Sequence
  Synthetic polypeptide
SYWGHQPPAPPKVWLPGLELA

SEQ ID NO: 9413 - protein, 543 aa, Artificial Sequence
  Synthetic polypeptide
MPRGSRARGSKRKRSWNTECPSFPGERPLQVRRAGLRTAGAAASLSEAWLRCGEGFQNTSGNPSLTAEEKTITEKHLELCPRPKQETTTSKSTSGLTDITWSSSGSDLSDEDKTLSQLQRDELQFIDWEIDSDRAEASDCDEFEDDEGAVEISDCASCASNQSLTSDEKLSELPKPSSIEILEYSSDSEKEDDLENVLLIDSESPHKYHVQFASDARQIMERLIDPRTKSTETILHTPQKPTAKFPRTPENSAKKKLLRGGLAERLNGLQNRERSAISLWRHQCISYQKTLSGRKSGVLTVKILELHEECAMQVAMCEQLLGSPATSSSQSVAPRPGAGLKVLFTKETAGYLRGRPQDTVRIFPPWQKLIIPSGSCPVILNTYFCEKVVAKEDSEKTCEVYCPDIPLPRRSISLAQMFVIKGLTNNSPEIQVVCSGVATTGTAWTHGHKEAKQRIPTSTPLRDSLLDVVESQGAASWPGAGVRVVVQRVYSLPSRDSTRGQQGASSGHTDPAGTRPALKEFLKEALNMERNIWYQPLQKHAKL

SEQ ID NO: 9414 - protein, 483 aa, Artificial Sequence
  Synthetic polypeptide
MAQSLTAEEKTITEKHLELCPRPKQETTTSKSTSGLTDITWSSSGSDLSDEDKTLSQLQRDELQFIDWEIDSDRAEASDCDEFEDDEGAVEISDCASCASNQSLTSDEKLSELPKPSSIEILEYSSDSEKEDDLENVLLIDSESPHKYHVQFASDARQIMERLIDPRTKSTETILHTPQKPTAKFPRTPENSAKKKLLRGGLAERLNGLQNRERSAISLWRHQCISYQKTLSGRKSGVLTVKILELHEECAMQVAMCEQLLGSPATSSSQSVAPRPGAGLKVLFTKETAGYLRGRPQDTVRIFPPWQKLIIPSGSCPVILNTYFCEKVVAKEDSEKTCEVYCPDIPLPRRSISLAQMFVIKGLTNNSPEIQVVCSGVATTGTAWTHGHKEAKQRIPTSTPLRDSLLDVVESQGAASWPGAGVRVVVQRVYSLPSRDSTRGQQGASSGHTDPAGTRPALKEFLKEALNMERNIWYQPLQKHAKL

SEQ ID NO: 9415 - protein, 473 aa, Artificial Sequence
  Synthetic polypeptide
MAQVWRRVSEHFWESETTTSKSTSGLTDITWSSSGSDLSDEDKTLSQLQRDELQFIDWEIDSDRAEASDCDEFEDDEGAVEISDCASCASNQSLTSDEKLSELPKPSSIEILEYSSDSEKEDDLENVLLIDSESPHKYHVQFASDARQIMERLIDPRTKSTETILHTPQKPTAKFPRTPENSAKKKLLRGGLAERLNGLQNRERSAISLWRHQCISYQKTLSGRKSGVLTVKILELHEECAMQVAMCEQLLGSPATSSSQSVAPRPGAGLKVLFTKETAGYLRGRPQDTVRIFPPWQKLIIPSGSCPVILNTYFCEKVVAKEDSEKTCEVYCPDIPLPRRSISLAQMFVIKGLTNNSPEIQVVCSGVATTGTAWTHGHKEAKQRIPTSTPLRDSLLDVVESQGAASWPGAGVRVVVQRVYSLPSRDSTRGQQGASSGHTDPAGTRPALKEFLKEALNMERNIWYQPLQKHAKL

SEQ ID NO: 9416 - protein, 1591 aa, Artificial Sequence
  Synthetic polypeptide
MAGSGAGVRCSLLRLQETLSAADRCGAALAGHQLIRGLGQECVLSSSPAVLALQTSLVFSRDFGLLVFVRKSLNSIEFRECREEILKFLCIFLEKMGQKIAPYSVEIKNTCTSVYTKDRAAKCKIPALDLLIKLLQTFRSSRLMDEFKIGELFSKFYGELALKKKIPDTVLEKVYELLGLLGEVHPSEMINNAENLFRAFLGELKTQMTSAVREPKLPVLAGCLKGLSSLLCNFTKSMEEDPQTSREIFNFVLKAIRPQIDLKRYAVPSAGLRLFALHASQFSTCLLDNYVSLFEVLLKWCAHTNVELKKAALSALESFLKQVSNMVAKNAEMHKNKLQYFMEQFYGIIRNVDSNNKELSIAIRGYGLFAGPCKVINAKDVDFMYVELIQRCKQMFLTQTDTGDDRVYQMPSFLQSVASVLLYLDTVPEVYTPVLEHLVVMQIDSFPQYSPKMQLVCCRAIVKVFLALAAKGPVLRNCISTVVHQGLIRICSKPVVLPKGPESESEDHRASGEVRTGKWKVPTYKDYVDLFRHLLSSDQMMDSILADEAFFSVNSSSESLNHLLYDEFVKSVLKIVEKLDLTLEIQTVGEQENGDEAPGVWMIPTSDPAANLHPAKPKDFSAFINLVEFCREILPEKQAEFFEPWVYSFSYELILQSTRLPLISGFYKLLSITVRNAKKIKYFEGVSPKSLKHSPEDPEKYSCFALFVKFGKEVAVKMKQYKDELLASCLTFLLSLPHNIIELDVRAYVPALQMAFKLGLSYTPLAEVGLNALEEWSIYIDRHVMQPYYKDILPCLDGYLKTSALSDETKNNWEVSALSRAAQKGFNKVVLKHLKKTKNLSSNEAISLEEIRIRVVQMLGSLGGQINKNLLTVTSSDEMMKSYVAWDREKRLSFAVPFREMKPVIFLDVFLPRVTELALTASDRQTKVAACELLHSMVMFMLGKATQMPEGGQGAPPMYQLYKRTFPVLLRLACDVDQVTRQLYEPLVMQLIHWFTNNKKFESQDTVALLEAILDGIVDPVDSTLRDFCGRCIREFLKWSIKQITPQQQEKSPVNTKSLFKRLYSLALHPNAFKRLGASLAFNNIYREFREEESLVEQFVFEALVIYMESLALAHADEKSLGTIQQCCDAIDHLCRIIEKKHVSLNKAKKRRLPRGFPPSASLCLLDLVKWLLAHCGRPQTECRHKSIELFYKFVPLLPGNRSPNLWLKDVLKEEGVSFLINTFEGGGCGQPSGILAQPTLLYRGPFSLQATLCWLDLLLAALECYNTFIGERTVGALQVLGTEAQSSLLKAVAFFLESIAMHDIIAAEKCFGTGAAGNRTSPQEGERYNYSKCTVVVRIMEFTTTLLNTSPEGWKLLKKDLCNTHLMRVLVQTLCEPASIGFNIGDVQVMAHLPDVCVNLMKALKMSPYKDILETHLREKITAQSIEELCAVNLYGPDAQVDRSRLAAVVSACKQLHRAGLLHNILPSQSTDLHHSVGTELLSLVYKGIAPGDERQCLPSLDLSCKQLASGLLELAFAFGGLCERLVSLLLNPAVLSTASLGSSQGSVIHFSHGEYFYSLFSETINTELLKNLDLAVLELMQSSVDNTKM

SEQ ID NO: 9417 - protein, 273 aa, Artificial Sequence
  Synthetic polypeptide
MTKMDIRGAVDAAVPTNIIAAKAAEVRANKVNWQSYLQGQMISAEDCEFIQRFEMKRSPEEKQEMLQTEGSQCAKTFINLMTHICKEQTVQYILTMVDDMLQENHQRVSIFFDYARCSKNTAWPYFLPMLNRQDPFTVHMAARIIAKLAAWGKELMEGSDLNYYFNWIKTQLSSQSSQYVQCVAGCLQLMLRVNEYRFAWVEADGVNCIMGVLSNKCGFQLQYQMIFSIWLLAFSPQMCEHLRRYNIIPVLSDILQESVKEKVTRIILAAFRA

SEQ ID NO: 9418 - protein, 251 aa, Artificial Sequence
  Synthetic polypeptide
MISAEDCEFIQRFEMKRSPEEKQEMLQTEGSQCAKTFINLMTHICKEQTVQYILTMVDDMLQENHQRVSIFFDYARCSKNTAWPYFLPMLNRQDPFTVHMAARIIAKLAAWGKELMEGSDLNYYFNWIKTQLSSQKLRGSGVAVETGTVSSSDSSQYVQCVAGCLQLMLRVNEYRFAWVEADGVNCIMGVLSNKCGFQLQYQMIFSIWLLAFSPQMCEHLRRYNIIPVLSDILQESVKEKVTRIILAAFRA

SEQ ID NO: 9419 - protein, 291 aa, Artificial Sequence
  Synthetic polypeptide
MTKMDIRGAVDAAVPTNIIAAKAAEVRANKVNWQSYLQGQMISAEDCEFIQRFEMKRSPEEKQEMLQTEGSQCAKTFINLMTHICKEQTVQYILTMVDDMLQENHQRVSIFFDYARCSKNTAWPYFLPMLNRQDPFTVHMAARIIAKLAAWGKELMEGSDLNYYFNWIKTQLSSQKLRGSGVAVETGTVSSSDSSQYVQCVAGCLQLMLRVNEYRFAWVEADGVNCIMGVLSNKCGFQLQYQMIFSIWLLAFSPQMCEHLRRYNIIPVLSDILQESVKEKVTRIILAAFRA

SEQ ID NO: 9420 - protein, 37 aa, Artificial Sequence
  Synthetic polypeptide
MRTADGGEPAGASSPAGRVDGGLGAVAYMWNPNTLGG

SEQ ID NO: 9421 - protein, 24 aa, Artificial Sequence
  Synthetic polypeptide
MEDEVVRFAKKMDKMVQKKNAAEC

SEQ ID NO: 9422 - protein, 738 aa, Artificial Sequence
  Synthetic polypeptide
MCCEKWSRVAEMFLFIEEREDCKILCLCSRAFVEDRKLYNLGLKGYYIRDSGNNSGDQATEEEEGGYSCGTAESHDSKGIGLDESELDSEAELMRSMGLPLQFGRITAHKDFEVSMNTRNKVKIKKKKHQKKYLDEIVQESWRKEYEEDDILASDDPSSIEQYENTRTYELQSKKDTETENPPVENTLSPKLEITEKWEKYWNEYGGGLLWQSWQEKHPGQALSSEPWNFPDTKEEWEQHYSQLYWYYLEQFQYWEAQGWTFDASQSCDTDTYTSKTEADDKNDEKCMKVDLVSFPSSPIMVDNDSSGTSDKDHSEILDGISNIKLNSEEVTQSQLDSCTSHDGHQQLSEVSSKRECPASGQSEPRNGGTNEESNSSGNTNTDPPAEDSQKSSGANTSKDRPHASGTDGDESEEDPPEHKPSKLKRSHELDIDENPASDFDDSGSLLGFKYGSGQKYGGIPNFSHRQVRYLEKNVKLKSKYLDMRRQIKMKNKHIFFTKESEKPFFKKSKILSKVEKFLTWVNKPMDEEASQESSSHDNVHDASTSSDSEEQDMSVKKGDDLLETNNPEPEKCQSVSSAGELETENYERDSLLATVPDEQDCVTQEVPDSRQAETEAEVKKKKNKKKNKKVNGLPPEIAAVPELAKYWAQRYRLFSRFDDGIKLDREGWFSVTPEKIAEHIAGRVSQSFKCDVVVDAFCGVGGNTIQFALTGMRVNILENVLEICDKKKKLADESLVT

SEQ ID NO: 9423 - protein, 215 aa, Artificial Sequence
  Synthetic polypeptide
MADLSFIEDTVAFPEKEEDEEEEEEGVEWGYEEGVEWGLVFPDANGEYQSPINLNSREARYDPSLLDVRLSPNYVVCRDCEVTNDGHTIQVILKSKSVLSGGPLPQGHEFELYEVRFHWGRENQRGSEHTVNFKAFPMEMGPSSCRKTSSGLSLILHYGELYNYFLIYYNVIIIEIKCTINVMHLNHPETIPCPLSVEKLSSMKLVPDAKKVGHC

SEQ ID NO: 9424 - protein, 149 aa, Artificial Sequence
  Synthetic polypeptide
MADLSFIEDTVAFPEKEEDEEEEEEGVEWGYEEGVEWGLVFPDANGEYQSPINLNSREARYDPSLLDVRLSPNYVVCRDCEVTNDGHTIQVILKSKSVLSGGPLPQGHEFELYEVRFHWGRENQRGSEHTVNFKAFPMEEHEPYCELRM

SEQ ID NO: 9425 - protein, 5 aa, Artificial Sequence
  Synthetic polypeptide
SSSTS

SEQ ID NO: 9426 - protein, 28 aa, Artificial Sequence
  Synthetic polypeptide
MAYAYLFKYIIIGDTGISTNRSPCSGDQ

SEQ ID NO: 9427 - protein, 17 aa, Artificial Sequence
  Synthetic polypeptide
MAYAYLFKYIIIGDTDT

SEQ ID NO: 9428 - protein, 5 aa, Artificial Sequence
  Synthetic polypeptide
SSSTS

SEQ ID NO: 9429 - protein, 5 aa, Artificial Sequence
  Synthetic polypeptide
SSSTS

SEQ ID NO: 9430 - protein, 17 aa, Artificial Sequence
  Synthetic polypeptide
MAYAYLFKYIIIGDTGD

SEQ ID NO: 9431 - protein, 11 aa, Artificial Sequence
  Synthetic polypeptide
FFEVNTGNVFL

SEQ ID NO: 9432 - protein, 10 aa, Artificial Sequence
  Synthetic polypeptide
KMVRTLARKT

SEQ ID NO: 9433 - protein, 266 aa, Artificial Sequence
  Synthetic polypeptide
MAAHRKHDQDPHDQPKRRRIRKHKSKKKFKNPNNVLIEQAELEKQQSLLQEKSQRQHTDGTTISKNKKRKLKKKQQIKRKKAAGLAAKAAGVSFMYQPEDSSNEGEGVGEACEEDGVDTSEEDPTLAGEEDVKDTREEDGADASEEDLTRARQEEGADASEEDPTPAGEEDVKDAREEDGVDTIEEDLTRAGEEDGKDTREEDGADASEEDPTWAGEEEGADSGEEDGADASEEDDTITNEKAHSILNFLKSTQEMYFYDGHRVTG

SEQ ID NO: 9434 - protein, 360 aa, Artificial Sequence
  Synthetic polypeptide
MAAHRKHVFVEKVLQRLFPPVPSGQGKREPQTLAVQNPPKKVTSEKVSQKHAEPLTDTGSETPTARRLYTASGPPEGYVPCWPEPSSCGSPENASSGDDTEDQDPHDQPKRRRIRKHKSKKKFKNPNNVLIEQAELEKQQSLLQEKSQRQHTDGTTISKNKKRKLKKKQQIKRKKAAGLAAKAAGVSFMYQPEDSSNEGEGVGEACEEDGVDTSEEDPTLAGEEDVKDTREEDGADASEEDLTRARQEEGADASEEDPTPAGEEDVKDAREEDGVDTIEEDLTRAGEEDGKDTREEDGADASEEDPTWAGEEEGADSGEEDGADASEEDDTITNEKAHSILNFLKSTQEMYFYDGHRVTG

SEQ ID NO: 9435 - protein, 212 aa, Artificial Sequence
  Synthetic polypeptide
MAEDKETKHGGHKNGRKGGLSGTSFFTWFMVIALLGVWTSVAVVWFDLVDYEEVLGKLGIYDADGDGDFDVDDAKVLLGLKERSTSEPAVPPEEAEPHTEPEEQVPVEAEPQNIEDEAKEQIQSLLHEMVHAEHVEGEDLQQEDGPTGEPQQEDDEFLMATDVDDRFETLEPEVSHEETEHSYHVEETVSQDCNQDMEEMMSEQENPECCLA

SEQ ID NO: 9436 - protein, 241 aa, Artificial Sequence
  Synthetic polypeptide
MAQRKNAKSSGNSSSSGSGSGSTSAGSSSPGARRETKHGGHKNGRKGGLSGTSFFTWFMVIALLGVWTSVAVVWFDLVDYEEVLGKLGIYDADGDGDFDVDDAKVLLGLKERSTSEPAVPPEEAEPHTEPEEQVPVEAEPQNIEDEAKEQIQSLLHEMVHAEHVEGEDLQQEDGPTGEPQQEDDEFLMATDVDDRFETLEPEVSHEETEHSYHVEETVSQDCNQDMEEMMSEQENPECCLA

SEQ ID NO: 9437 - protein, 54 aa, Artificial Sequence
  Synthetic polypeptide
MATDVDDRFETLEPEVSHEETEHSYHVEETVSQDCNQDMEEMMSEQENPECCLA

SEQ ID NO: 9438 - protein, 256 aa, Artificial Sequence
  Synthetic polypeptide
MAQRKNAKSSGNSSSSGSGSGSTSAGSSSPGARRETKHGGHKNGRKGGLSGTSFFTWFMVIALLGVWTSVAVVWFDLVDYEEVLAKAKDFRYNLSEVLQGKLGIYDADGDGDFDVDDAKVLLGLKERSTSEPAVPPEEAEPHTEPEEQVPVEAEPQNIEDEAKEQIQSLLHEMVHAEHVEGEDLQQEDGPTGEPQQEDDEFLMATDVDDRFETLEPEVSHEETEHSYHVEETVSQDCNQDMEEMMSEQENPECCLA

SEQ ID NO: 9439 - protein, 198 aa, Artificial Sequence
  Synthetic polypeptide
MAQRKNAKSSGNSSSSGSGSGSTSAGSSSPGARRETKHGGHKNGRKGGLSGTSFFTWFMVIALLGVWTSVAVVWFDLVDYEEVLGKLGIYDADGDGDFDVDDAKVLLGLKERSTSEPAVPPEEAEPHTEPEEQVPVEAEPQNIEDEAKEQIQSLLHEMVHAEHETEHSYHVEETVSQDCNQDMEEMMSEQENPECCLA

SEQ ID NO: 9440 - protein, 227 aa, Artificial Sequence
  Synthetic polypeptide
MAEDKETKHGGHKNGRKGGLSGTSFFTWFMVIALLGVWTSVAVVWFDLVDYEEVLAKAKDFRYNLSEVLQGKLGIYDADGDGDFDVDDAKVLLGLKERSTSEPAVPPEEAEPHTEPEEQVPVEAEPQNIEDEAKEQIQSLLHEMVHAEHVEGEDLQQEDGPTGEPQQEDDEFLMATDVDDRFETLEPEVSHEETEHSYHVEETVSQDCNQDMEEMMSEQENPECCLA

SEQ ID NO: 9441 - protein, 184 aa, Artificial Sequence
  Synthetic polypeptide
MAEDKETKHGGHKNGRKGGLSGTSFFTWFMVIALLGVWTSVAVVWFDLVDYEEVLAKAKDFRYNLSEVLQGKLGIYDADGDGDFDVDDAKVLLGLKERSTSEPAVPPEEAEPHTEPEEQVPVEAEPQNIEDEAKEQIQSLLHEMVHAEHETEHSYHVEETVSQDCNQDMEEMMSEQENPECCLA

SEQ ID NO: 9442 - protein, 58 aa, Artificial Sequence
  Synthetic polypeptide
MAQRKNAKSSGNSSSSGSGSGSTSAGSSSPGARRAAYGGACLWSQLLRRLRWEDCIQG

SEQ ID NO: 9443 - protein, 158 aa, Artificial Sequence
  Synthetic polypeptide
MGCCTGRCSLICLCALQLVSALERQIFDFLGFQWAPILGNFLHIIVVILGLFGTIQYRPRYIMVYTVWTALWVTWNVFIICFYLEVGGLSKDTDLMTFNISVHRSWWREHGPGCVRRVLPPSAHGMMDDYTYVSVTGCIVDFQYLEVIHSAVQILLSP

SEQ ID NO: 9444 - protein, 114 aa, Artificial Sequence
  Synthetic polypeptide
MLGWIKRLIRMVFQQVGVSMQSVLWSRKPYGSSRSIVRKIGTNLSLIQCPRVQFQINSHATEWSPSHPGEDAVASFADVGWVAKEEGECSARLRYWKRTELKSYPSAHLRQMHI

SEQ ID NO: 9445 - protein, 81 aa, Artificial Sequence
  Synthetic polypeptide
MLGWIKRLIRMVFQQVGVSMQSINSHATEWSPSHPGEDAVASFADVGWVAKEEGECSARLRYWKRTELKSYPSAHLRQMHI

SEQ ID NO: 9446 - protein, 8 aa, Artificial Sequence
  Synthetic polypeptide
GWFFNKLE

SEQ ID NO: 9447 - protein, 204 aa, Artificial Sequence
  Synthetic polypeptide
MEVCYQLPVLPLDRPVPQHVLSRRGAISFSSSSALFGCPNPRQLSQRRGAISYDSSDQTALYIRMLGDVRVRSRAGFESERRGSHPYIDFRIFHSQSEIEVSVSARNIRRLLSFQRYLRSSRFFRGTAVSNSLNILDDDYNGQAKCMLEKVGNWNFDIFLFDRLTNGNSLVSLTFHLFSLHGLIEYFHLDMMKLRRFLVTHGQL

SEQ ID NO: 9448 - protein, 178 aa, Artificial Sequence
  Synthetic polypeptide
MGITLIWCLALVLIKWITSKRRGAISYDSSDQTALYIRMLGDVRVRSRAGFESERRGSHPYIDFRIFHSQSEIEVSVSARNIRRLLSFQRYLRSSRFFRGTAVSNSLNILDDDYNGQAKCMLEKVGNWNFDIFLFDRLTNGNSLVSLTFHLFSLHGLIEYFHLDMMKLRRFLVTHGQL

SEQ ID NO: 9449 - protein, 60 aa, Artificial Sequence
  Synthetic polypeptide
MEVCYQLPVLPLDRPVPQHVLSRRGAISFSSSSALFGCPNPRQLSQGHFRDSGRSPSPLN

SEQ ID NO: 9450 - protein, 55 aa, Artificial Sequence
  Synthetic polypeptide
MEVCYQLPVLPLDRPVPQHVLSRRGAISFSSSSALFGCPNPRQLSQISMPKSFKY

SEQ ID NO: 9451 - protein, 628 aa, Artificial Sequence
  Synthetic polypeptide
MSNLKMKEAALIYLDRSGGLQKFIDDCKYYNDSKQSYAVYRFKILINPSDVVELDAELGNHILHQPLKAAEVFQSVCFIAVKTLSLIGQLQTETQINIVLKLTHLPPLPSYGLDLCEFPLDYTSQRFYMMQGIVIAMTTITKYTQGARFLCSDEACPLSKGFQYIRVHVPGATESATIRNDFLCNLCASSLQEDRKFRVLGDKQIVEIIATKALRAFQGYSNNQPFRFQSLTIFLRDESVNKMNIGNEYKIIGIPTCVKTSQTAVCIEANSITFCNSKVPSGISDNFRCLLSLTSSSCWKFTAILANIFASQITPPGTYNLLKLCLLMSLVQTTDRNKELEDCLDILIITSDTLLIDRLLNFSINLVPRGIRHLVSTEIFPTLSRNKYGTGAVSIQAGSALLAKGGICFIGDLASHKKDKLEQLQTVLESRSITVYIPGKKFGEDIDQQMTFPVQCSFWSFVDVDSSSRRNAQKINTLIGQMDCSLIPANLVEAFGLLINCNESSPCHPFLPTVQHTLNKAINPEGLFYAASRQFTTEDFEKLLAFAKNLNVEFSLEAERMTHGYYLASRRIRTGSVCGSKLSASALKYLVFLSEAHARLNLRNKVLKEDVLIAALLFETSLTLKYGS

SEQ ID NO: 9452 - protein, 565 aa, Artificial Sequence
  Synthetic polypeptide
MIASTTMVRSAKVCFIAVKTLSLIGQLQTETQINIVLKLTHLPPLPSYGLDLCEFPLDYTSQRFYMMQGIVIAMTTITKYTQGARFLCSDEACPLSKGFQYIRVHVPGATESATIRNDFLCNLCASSLQEDRKFRVLGDKQIVEIIATKALRAFQGYSNNQPFRFQSLTIFLRDESVNKMNIGNEYKIIGIPTCVKTSQTAVCIEANSITFCNSKVPSGISDNFRCLLSLTSSSCWKFTAILANIFASQITPPGTYNLLKLCLLMSLVQTTDRNKELEDCLDILIITSDTLLIDRLLNFSINLVPRGIRHLVSTEIFPTLSRNKYGTGAVSIQAGSALLAKGGICFIGDLASHKKDKLEQLQTVLESRSITVYIPGKKFGEDIDQQMTFPVQCSFWSFVDVDSSSRRNAQKINTLIGQMDCSLIPANLVEAFGLLINCNESSPCHPFLPTVQHTLNKAINPEGLFYAASRQFTTEDFEKLLAFAKNLNVEFSLEAERMTHGYYLASRRIRTGSVCGSKLSASALKYLVFLSEAHARLNLRNKVLKEDVLIAALLFETSLTLKYGS

SEQ ID NO: 9453 - protein, 746 aa, Artificial Sequence
  Synthetic polypeptide
MDERFRYESDFDRRLSRVYTNDRMHRNKRGNMPPMEHDGDVIEQSNIRISSAENKSAPDNETSKSANQDTCSPFAGMLFGGEDRELIQRRKEKYRLELLEQMAEQQRNKRREKDLELRVAASGAQDPEKSPDRLKQFSVAPRHFEEMIPPERPRIAFQTPLPPLSAPSVPPIPSVHPVPSQNEDLRSGLSSALGEMVSPRIAPLPPPPLLPPLATNYRTPYDDAYYFYGSRNTFDPSLAYYGSGMMGVQPAAYVSAPVTHQLAQPVVNTVGQNELKITSDQVINSGLIFEDKPKPSKQSLQSYQEALQQQIREREERRKKEREEKEEYEAKLEAEMRTYNPWGKGGGGAPLRDAKGNLISHMQTQSSPFARGNVFGEPPTELQIKQQELYKNFLRFQIEEKKQREEAERERLRIAEEKEERRLAEQRARIQQEYEEEQEKKREKEEEQRLKNEEHIRLAEERQKEAERKKKEEEEKYNLQLQHYCERDNLIGEETKHMRQPSPIVPALQNKIASKLQRPPSVDSIIRSFIHESSMSRAQSPPVPARKNQLRAEEEKKNVIMELSEMRKQLRSEERRLQERLLHMDSDDEIPIRKKERNPMDIFDMARHRLQAPVRRQSPKGLDAATFQNVHDFNELKDRDSETRVDLKFMYLDPPRDHHTLEIQQQALLREQQKRLNRIKMQEGAKVDLDAIPSAKVREQRMPRDDTSDFLKNSLLESDSAFIELPEENYKTDEIEGLLNKWRYIS

SEQ ID NO: 9454 - protein, 1091 aa, Artificial Sequence
  Synthetic polypeptide
MLFPLQVAAVTSSVRDDPLEHCVSPRTRARSPEICKMADNLDEFIEEQKARLAEDKAELESDPPYMEMKGKLSAKLSENSKILISMAKENIPPNSQQTRGSLGIDYGLSLPLGEDYERKKHKLKEELRQDYRRYLTQERLKLERNKEYNQFLRGKEESSEKFRQVEKSTEPKSQRNKKPIGQVKPDLTSQIQTSCENSEGPRKDVLTPSEAYEELLNQRRLEEDRYRQLDDEIELRNRRIIKKANEEVGISNLKHQRFASKAGIPDRRFHRFNEDRVFDRRYHRPDQDPEVSEEMDERFRYESDFDRRLSRVYTNDRMHRNKRGNMPPMEHDGDVIEQSNIRISSAENKSAPDNETSKSANQDTCSPFAGMLFGGEDRELIQRRKEKYRLELLEQMAEQQRNKRREKDLELRVAASGAQDPEKSPDRLKQFSVAPRHFEEMIPPERPRIAFQTPLPPLSAPSVPPIPSVHPVPSQNEDLRSGLSSALGEMVSPRIAPLPPPPLLPPLATNYRTPYDDAYYFYGSRNTFDPSLAYYGSGMMGVQPAAYVSAPVTHQLAQPVVNTVGQNELKITSDQVINSGLIFEDKPKPSKQSLQSYQEALQQQIREREERRKKEREEKEEYEAKLEAEMRTYNPWGKGGGGAPLRDAKGNLITDLNRMHRQNIDAYHNPDARTYEDKRAVVSLDPNLATSNAENLEDAANKSSGHMQTQSSPFARGNVFGEPPTELQIKQQELYKNFLRFQIEEKKQREEAERERLRIAEEKEERRLAEQRARIQQEYEEEQEKKREKEEEQRLKNEEHIRLAEERQKEAERKKKEEEEKYNLQLQHYCERDNLIGEETKHMRQPSPIVPALQNKIASKLQRPPSVDSIIRSFIHESSMSRAQSPPVPARKNQLRAEEEKKNVIMELSEMRKQLRSEERRLQERLLHMDSDDEIPIRKKERNPMDIFDMARHRLQAPVRRQSPKGLDAATFQNVHDFNELKDRDSETRVDLKFMYLDPPRDHHTLEIQQQALLREQQKRLNRIKMQEGAKVDLDAIPSAKVREQRMPRDDTSDFLKNSLLESDSAFIELPEENYKTDEIEGLLNKWRYIS

SEQ ID NO: 9455 - protein, 77 aa, Artificial Sequence
  Synthetic polypeptide
MHHLNKTHSGLIHMFSIGRSYEGRSLFILKLGRRSRLKRAVWIDCGIHAREWIGPAFCQWFVKEVLENTAHKCQECT

SEQ ID NO: 9456 - protein, 225 aa, Artificial Sequence
  Synthetic polypeptide
MKCLGKRRGQAAAFLPLCWLFLKILQPGHSHLYNNRYAGDKVIRFIPKTEEEAYALKKISYQLKVDLWQPSSISYVSEGTVTDVHIPQNGSRALLAFLQEANIQYKVLIEDLQKTLEKGSSLHTQRNRRSLSGYNYEVYHSLEEIQNWMHHLNKTHSGLIHMFSIGRSYEGRSLFILKLGRRSRLKRAVWIDCGIHAREWIGPAFCQWFVKEVLENTAHKCQECT

SEQ ID NO: 9457 - protein, 434 aa, Artificial Sequence
  Synthetic polypeptide
MASHPQTRIQAYLEKNKIGPLFEELMTKLITETPDQPIPFLIDHLQSKQGNRGQLQRTLSGSAALWAESEKSESKGTRRDFRSYDKPWQLNAKKPKKSKSDLAVSNISPPSPDSKSLPRSVEHPKWNWRTKPQSRDFDELNHILQESKKLGKALENLSRSIAISDELDKETVTFNSSLLRPRVIGEWIGREENDADPLAAEMLQPPIPRSKNDQWESEDSGSSPAGSLKMEPKNKGLKQQQQQHKKLLAAMLSQDSFESIHSPTPSVTEEDIDNEDDAMELLEDLNDLRMEGVTTLVPSGSKFNQGRPTYPAEPQAKVTLNICSRCARLQGDNLEERTEESLPILHSPDEKIPDSFDSLPGTEEALMEEGDEFEKASKLTGPGEASSGVGHSLKNYMEEKTKLCPNHLGHMSSGLTEAVSQVCILNFGKKNFLN

SEQ ID NO: 9458 - protein, 520 aa, Artificial Sequence
  Synthetic polypeptide
MSSPLASELSELAALRPGFRLSAPHARVAPRAATHARGRGRASHAGQPRLRSSCPGPSPGKRRVVPSGGAQPRVLPALSSRSHLFPMASHPQTRIQAYLEKNKIGPLFEELMTKLITETPDQPIPFLIDHLQSKQGNRGQLQRTLSGSAALWAESEKSESKGTRRDFRSYDKPWQLNAKKPKKSKSDLAVSNISPPSPDSKSLPRSVEHPKWNWRTKPQSRDFDELNHILQESKKLGKALENLSRSIAISDELDKETVTFNSSLLRPRVIGEWIGREENDADPLAAEMLQPPIPRSKNDQWESEDSGSSPAGSLKMEPKNKGLKQQQQQHKKLLAAMLSQDSFESIHSPTPSVTEEDIDNEDDAMELLEDLNDLRMEGVTTLVPSGSKFNQGRPTYPAEPQAKVTLNICSRCARLQGDNLEERTEESLPILHSPDEKIPDSFDSLPGTEEALMEEGDEFEKASKLTGPGEASSGVGHSLKNYMEEKTKLCPNHLGHMSSGLTEAVSQVCILNFGKKNFLN

SEQ ID NO: 9459 - protein, 409 aa, Artificial Sequence
  Synthetic polypeptide
MTKLITETPDQPIPFLIDHLQSKQGNRGQLQRTLSGSAALWAESEKSESKGTRRDFRSYDKPWQLNAKKPKKSKSDLAVSNISPPSPDSKSLPRSVEHPKWNWRTKPQSRDFDELNHILQESKKLGKALENLSRSIAISDELDKETVTFNSSLLRPRVIGEWIGREENDADPLAAEMLQPPIPRSKNDQWESEDSGSSPAGSLKMEPKNKGLKQQQQQHKKLLAAMLSQDSFESIHSPTPSVTEEDIDNEDDAMELLEDLNDLRMEGVTTLVPSGSKFNQGRPTYPAEPQAKVTLNICSRCARLQGDNLEERTEESLPILHSPDEKIPDSFDSLPGTEEALMEEGDEFEKASKLTGPGEASSGVGHSLKNYMEEKTKLCPNHLGHMSSGLTEAVSQVCILNFGKKNFLN

SEQ ID NO: 9460 - protein, 178 aa, Artificial Sequence
  Synthetic polypeptide
MENGFTMCQTGRQHPVACGLHLSGGKEDLNDLRMEGVTTLVPSGSKFNQGRPTYPAEPQAKVTLNICSRCARLQGDNLEERTEESLPILHSPDEKIPDSFDSLPGTEEALMEEGDEFEKASKLTGPGEASSGVGHSLKNYMEEKTKLCPNHLGHMSSGLTEAVSQVCILNFGKKNFLN

SEQ ID NO: 9461 - protein, 273 aa, Artificial Sequence
  Synthetic polypeptide
MLVAIIIHAVIQEYMLDKINRRMHFSKTKHSKFNESGQLSAFYLFACVWGTFILISENYISDPTILWRAYPHNLMTFQMKFFYISQLAYWLHAFPELYFQKTKKEDIPRQLVYIGLYLFHIAGAYLLNLNHLGLVLLVLHYFVEFLFHISRLFYFSNEKYQKGFSLWAVLFVLGRLLTLILSVLTVGFGLARAENQKLDFSTGNFNVLAVRIAVLASICVTQAFMMWKFINFQLRRWREHSAFQAPAVKKKPTVTKGRSSKKGTACSWPIVGS

SEQ ID NO: 9462 - protein, 359 aa, Artificial Sequence
  Synthetic polypeptide
MAIRKKSTKSPPVLSHEFVLQNHADIVSCVAMVFLLGLMFEITAKASIIFVTLQYNVTLPATEEQATESVSLYYYGIKDLATVFFYMLVAIIIHAVIQEYMLDKINRRMHFSKTKHSKFNESGQLSAFYLFACVWGTFILISENYISDPTILWRAYPHNLMTFQMKFFYISQLAYWLHAFPELYFQKTKKEDIPRQLVYIGLYLFHIAGAYLLNLNHLGLVLLVLHYFVEFLFHISRLFYFSNEKYQKGFSLWAVLFVLGRLLTLILSVLTVGFGLARAENQKLDFSTGNFNVLAVRIAVLASICVTQAFMMWKFINFQLRRWREHSAFQAPAVKKKPTVTKGRSSKKGTACSWPIVGS

SEQ ID NO: 9463 - protein, 328 aa, Artificial Sequence
  Synthetic polypeptide
MVFLLGLMFEITAKASIIFVTLQYNVTLPATEEQATESVSLYYYGIKDLATVFFYMLVAIIIHAVIQEYMLDKINRRMHFSKTKHSKFNESGQLSAFYLFACVWGTFILISENYISDPTILWRAYPHNLMTFQMKFFYISQLAYWLHAFPELYFQKTKKEDIPRQLVYIGLYLFHIAGAYLLNLNHLGLVLLVLHYFVEFLFHISRLFYFSNEKYQKGFSLWAVLFVLGRLLTLILSVLTVGFGLARAENQKLDFSTGNFNVLAVRIAVLASICVTQAFMMWKFINFQLRRWREHSAFQAPAVKKKPTVTKGRSSKKGTACSWPIVGS

SEQ ID NO: 9464 - protein, 594 aa, Artificial Sequence
  Synthetic polypeptide
MEMQDLTSPHSRLSGSSESPSGPKLGNSHINSNSMTPNGTEVKTEPMSSSETASTTADGSLNNFSGSAIGSSSFSPRPTHQFSPPQIYPSNRPYPHILPTPSSQTMAAYGQTQFTTGMQQATAYATYPQPGQPYGISSYGALWAGIKTEGGLSQSQSPGQTGFLSYGTSFSTPQPGQAPYSYQMQGSSFTTSSGIYTGNNSLTNSSGFNSSQQDYPSYPSFGQGQYAQYYNSSPYPAHYMTSSNTSPTTPSTNATYQLQEPPSGITSQAVTDPTAEYSTIHSPSTPIKDSDSDRLRRGSDGKSRGRGRRNNNPSPPPDSDLERVFIWDLDETIIVFHSLLTGSYANRYGRDPPTSVSLGLRMEEMIFNLADTHLFFNDLEECDQVHIDDVSSDDNGQDLSTYNFGTDGFPAAATSANLCLATGVRGGVDWMRKLAFRYRRVKEIYNTYKNNVGGLLGPAKREAWLQLRAEIEALTDSWLTLALKALSLIHSRTNCVNILVTTTQLIPALAKVLLYGLGIVFPIENIYSATKIGKESCFERIIQRFGRKVVYVVIGDGVEEEQGAKKPNQHEDNKDEDLYDDPLPLNGKYIFSSL

SEQ ID NO: 9465 - protein, 561 aa, Artificial Sequence
  Synthetic polypeptide
MLLFPQVAVKTEPMSSSETASTTADGSLNNFSGSAIGSSSFSPRPTHQFSPPQIYPSNRPYPHILPTPSSQTMAAYGQTQFTTGMQQATAYATYPQPGQPYGISSYGALWAGIKTEGGLSQSQSPGQTGFLSYGTSFSTPQPGQAPYSYQMQGSSFTTSSGIYTGNNSLTNSSGFNSSQQDYPSYPSFGQGQYAQYYNSSPYPAHYMTSSNTSPTTPSTNATYQLQEPPSGITSQAVTDPTAEYSTIHSPSTPIKDSDSDRLRRGSDGKSRGRGRRNNNPSPPPDSDLERVFIWDLDETIIVFHSLLTGSYANRYGRDPPTSVSLGLRMEEMIFNLADTHLFFNDLEECDQVHIDDVSSDDNGQDLSTYNFGTDGFPAAATSANLCLATGVRGGVDWMRKLAFRYRRVKEIYNTYKNNVGGLLGPAKREAWLQLRAEIEALTDSWLTLALKALSLIHSRTNCVNILVTTTQLIPALAKVLLYGLGIVFPIENIYSATKIGKESCFERIIQRFGRKVVYVVIGDGVEEEQGAKKPNQHEDNKDEDLYDDPLPLNGKYIFSSL

SEQ ID NO: 9466 - protein, 588 aa, Artificial Sequence
  Synthetic polypeptide
MEMQDLTSPHSRLSGSSESPSGPKLGNSHINSNSMTPNGTEVKTEPMSSSETASTTADGSLNNFSGSAIGSSSFSPRPTHQFSPPQIYPSKPYPHILPTPSSQTMAAYGQTQFTTGMQQATAYATYPQPGQPYGISSYGIKTEGGLSQSQSPGQTGFLSYGTSFSTPQPGQAPYSYQMQGSSFTTSSGIYTGNNSLTNSSGFNSSQQDYPSYPSFGQGQYAQYYNSSPYPAHYMTSSNTSPTTPSTNATYQLQEPPSGITSQAVTDPTAEYSTIHSPSTPIKDSDSDRLRRGSDGKSRGRGRRNNNPSPPPDSDLERVFIWDLDETIIVFHSLLTGSYANRYGRDPPTSVSLGLRMEEMIFNLADTHLFFNDLEECDQVHIDDVSSDDNGQDLSTYNFGTDGFPAAATSANLCLATGVRGGVDWMRKLAFRYRRVKEIYNTYKNNVGGLLGPAKREAWLQLRAEIEALTDSWLTLALKALSLIHSRTNCVNILVTTTQLIPALAKVLLYGLGIVFPIENIYSATKIGKESCFERIIQRFGRKVVYVVIGDGVEEEQGAKKPNQHEDNKDEDLYDDPLPLNGKYIFSSL

SEQ ID NO: 9467 - protein, 560 aa, Artificial Sequence
  Synthetic polypeptide
MLLFPQVAVKTEPMSSSETASTTADGSLNNFSGSAIGSSSFSPRPTHQFSPPQIYPSKPYPHILPTPSSQTMAAYGQTQFTTGMQQATAYATYPQPGQPYGISSYGALWAGIKTEGGLSQSQSPGQTGFLSYGTSFSTPQPGQAPYSYQMQGSSFTTSSGIYTGNNSLTNSSGFNSSQQDYPSYPSFGQGQYAQYYNSSPYPAHYMTSSNTSPTTPSTNATYQLQEPPSGITSQAVTDPTAEYSTIHSPSTPIKDSDSDRLRRGSDGKSRGRGRRNNNPSPPPDSDLERVFIWDLDETIIVFHSLLTGSYANRYGRDPPTSVSLGLRMEEMIFNLADTHLFFNDLEECDQVHIDDVSSDDNGQDLSTYNFGTDGFPAAATSANLCLATGVRGGVDWMRKLAFRYRRVKEIYNTYKNNVGGLLGPAKREAWLQLRAEIEALTDSWLTLALKALSLIHSRTNCVNILVTTTQLIPALAKVLLYGLGIVFPIENIYSATKIGKESCFERIIQRFGRKVVYVVIGDGVEEEQGAKKPNQHEDNKDEDLYDDPLPLNGKYIFSSL

SEQ ID NO: 9468 - protein, 593 aa, Artificial Sequence
  Synthetic polypeptide
MEMQDLTSPHSRLSGSSESPSGPKLGNSHINSNSMTPNGTEVKTEPMSSSETASTTADGSLNNFSGSAIGSSSFSPRPTHQFSPPQIYPSKPYPHILPTPSSQTMAAYGQTQFTTGMQQATAYATYPQPGQPYGISSYGALWAGIKTEGGLSQSQSPGQTGFLSYGTSFSTPQPGQAPYSYQMQGSSFTTSSGIYTGNNSLTNSSGFNSSQQDYPSYPSFGQGQYAQYYNSSPYPAHYMTSSNTSPTTPSTNATYQLQEPPSGITSQAVTDPTAEYSTIHSPSTPIKDSDSDRLRRGSDGKSRGRGRRNNNPSPPPDSDLERVFIWDLDETIIVFHSLLTGSYANRYGRDPPTSVSLGLRMEEMIFNLADTHLFFNDLEECDQVHIDDVSSDDNGQDLSTYNFGTDGFPAAATSANLCLATGVRGGVDWMRKLAFRYRRVKEIYNTYKNNVGGLLGPAKREAWLQLRAEIEALTDSWLTLALKALSLIHSRTNCVNILVTTTQLIPALAKVLLYGLGIVFPIENIYSATKIGKESCFERIIQRFGRKVVYVVIGDGVEEEQGAKKPNQHEDNKDEDLYDDPLPLNGKYIFSSL

SEQ ID NO: 9469 - protein, 559 aa, Artificial Sequence
  Synthetic polypeptide
MEMQDLTSPHSRLSGSSESPSGPKLGNSHINSNSMTPNGTEVKTEPMSSSETASTTADGSLNNFSGSAIGSSSFSPRPTHQFSPPQIYPSNRPYPHILPTPSSQTMAAYGQTQFTTGMQQATAYATYPQPGQPYGISSYGIKTEGGLSQSQSPGQTGFLSYGTSFSTPQPGQAPYSYQMQGSSFTTSSGIYTGNNSLTNSSGFNSSQQDYPSYPSFGQGQYAQYYNSSPYPAHYMTSSNTSPTTPSTNATYQLQEPPSGITSQAVTDPTAEYSTIHSPSTPIKDSDSDRLRRGSDGKSRGRGRRNNNPSPPPDSDLERVFIWDLDETIIVFHSLLTGSYANRYGRECDQVHIDDVSSDDNGQDLSTYNFGTDGFPAAATSANLCLATGVRGGVDWMRKLAFRYRRVKEIYNTYKNNVGGLLGPAKREAWLQLRAEIEALTDSWLTLALKALSLIHSRTNCVNILVTTTQLIPALAKVLLYGLGIVFPIENIYSATKIGKESCFERIIQRFGRKVVYVVIGDGVEEEQGAKKPNQHEDNKDEDLYDDPLPLNGKYIFSSL

SEQ ID NO: 9470 - protein, 169 aa, Artificial Sequence
  Synthetic polypeptide
MAVTGVQCSERCKQTRRVDSSSGKWLATPLIWEKLNWPSRSQSQNLHPFRILPNGLTLPGAQERPGYLLAALPNPCAPRPYQVHWVHVAVLIAVLLQQLPQSRCLRLPLPGGGGGQRALQGRLKTQAGKRGVRKRGGWRERERPSADPGERGLRVGAQVQNPRAPRGYT

SEQ ID NO: 9471 - protein, 55 aa, Artificial Sequence
  Synthetic polypeptide
MSLETTGPQERQKVPCFPFTFHHDCKFPEASSAMQNCESIKPLSFISYPVSGSSL

SEQ ID NO: 9472 - protein, 452 aa, Artificial Sequence
  Synthetic polypeptide
MKRGEPAIYRPLDPKPFPNYRANYNFRGMYNQRYHCPVPKIFYVQLTVGNNEFFGEGKTRQAARHNAAMKALQALQNEPIPERSPQNGESGKDVDDDKDANKSEISLVFEIALKRNMPVSFEVIKESGPPHMKSFVTRVSVGEFSAEGEGNSKKLSKKRAATTVLQELKKLPPLPVVEKPKLFFKKRPKTIVKAGPEYGQGMNPISRLAQIQQAKKEKEPDYVLLSERGMPRRREFVMQVKVGNEVATGTGPNKKIAKKNAAEAMLLQLGYKASTNLQDQLEKTGENKGWSGPKPGFPEPTNNTPKGILHLSPDVYQEMEASRHKVISGTTLGYLSPKDMNQPSSSFFSISPTSNSSATIARELLMNGTSSTAEAIGLKGSSPTPPCSPVQPSKQLEYLARIQGFQVHYCDRQSGKECVTCLTLAPVQMTFHAIGSSIEASHDQMWLQKLHM

SEQ ID NO: 9473 - protein, 169 aa, Artificial Sequence
  Synthetic polypeptide
TGENKGWSGPKPGFPEPTNNTPKGILHLSPDVYQEMEASRHKVISGTTLGYLSPKDMNQPSSSFFSISPTSNSSATIARELLMNGTSSTAEAIGLKGSSPTPPCSPVQPSKQLEYLARIQGFQVHYCDRQSGKECVTCLTLAPVQMTFHAIGSSIEASHDQMWLQKLHM

SEQ ID NO: 9474 - protein, 454 aa, Artificial Sequence
  Synthetic polypeptide
MKRGEPAIYRPLDPKPFPNYRANYNFRGMYNQRYHCPVPKIFYVQLTVGNNEFFGEGKTRQAARHNAAMKALQALQNEPIPERSPQNGESGKDVDDDKDANKSEISLVFEIALKRNMPVSFEVIKESGPPHMKSFVTRVSVGEFSAEGEGNSKKLSKKRAATTVLQELKKLPPLPVVEKPKLFFKKRPKTIVKAGPEYGQGMNPISRLAQIQQAKKEKEPDYVLLSERGMPRRREFVMQVKVGNEVATGTGPNKKIAKKNAAEAMLLQLGYKASTNLQDQLEKTGENKGWSGPKPGFPEPTNNTPKGILHLSPDVYQEMEASRHKVISGTTLGYLSPKDMNQPSSSFFSISPTSNSSATIARELLMNGTSSTAEAIGLKGSSPTPPCSPVQPSKQLEYLARIQGFQVHYCDRQSGKECVTCLTLAPVQMTFHAIGSSIEASHDQASLFPETQQY

SEQ ID NO: 9475 - protein, 171 aa, Artificial Sequence
  Synthetic polypeptide
TGENKGWSGPKPGFPEPTNNTPKGILHLSPDVYQEMEASRHKVISGTTLGYLSPKDMNQPSSSFFSISPTSNSSATIARELLMNGTSSTAEAIGLKGSSPTPPCSPVQPSKQLEYLARIQGFQVHYCDRQSGKECVTCLTLAPVQMTFHAIGSSIEASHDQASLFPETQQY

SEQ ID NO: 9476 - protein, 486 aa, Artificial Sequence
  Synthetic polypeptide
MLQINQMFSVQLSLGEQTWESEGSSIKKAQQAVANKALTESTLPKPVQKPPKSNVNNNPGSITPTVELNGLAMKRGEPAIYRPLDPKPFPNYRANYNFRGMYNQRYHCPVPKIFYVQLTVGNNEFFGEGKTRQAARHNAAMKALQALQNEPIPERSPQNGESGKDVDDDKDANKSEISLVFEIALKRNMPVSFEVIKESGPPHMKSFVTRVSVGEFSAEGEGNSKKLSKKRAATTVLQELKKLPPLPVVEKPKLFFKKRPKTIVKAGPEYGQGMNPISRLAQIQQAKKEKEPDYVLLSERGMPRRREFVMQVKVGNEVATGTGPNKKIAKKNAAEAMLLQLGYKASTNLQDQLEKTGENKGWSGPKPGFPEPTNNTPKGILHLSPDVYQEMEASRHKVISGTTLGYLSPKDMNQPSSSFFSISPTSNSSATIARELLMNGTSSTAEAIGLKGSSPTPPCSPVQPSKQLEYLARIQGFQMWLQKLHM

SEQ ID NO: 9477 - protein, 518 aa, Artificial Sequence
  Synthetic polypeptide
MANPKEKTAMCLVNELARFNRVQPQYKLLNERGPAHSKMFSVQLSLGEQTWESEGSSIKKAQQAVANKALTESTLPKPVQKPPKSNVNNNPGSITPTVELNGLAMKRGEPAIYRPLDPKPFPNYRANYNFRGMYNQRYHCPVPKIFYVQLTVGNNEFFGEGKTRQAARHNAAMKALQALQNEPIPERSPQNGESGKDVDDDKDANKSEISLVFEIALKRNMPVSFEVIKESGPPHMKSFVTRVSVGEFSAEGEGNSKKLSKKRAATTVLQELKKLPPLPVVEKPKLFFKKRPKTIVKAGPEYGQGMNPISRLAQIQQAKKEKEPDYVLLSERGMPRRREFVMQVKVGNEVATGTGPNKKIAKKNAAEAMLLQLGYKASTNLQDQLEKTGENKGWSGPKPGFPEPTNNTPKGILHLSPDVYQEMEASRHKVISGTTLGYLSPKDMNQPSSSFFSISPTSNSSATIARELLMNGTSSTAEAIGLKGSSPTPPCSPVQPSKQLEYLARIQGFQMWLQKLHM

SEQ ID NO: 9478 - protein, 346 aa, Artificial Sequence
  Synthetic polypeptide
MKALQALQNEPIPERSPQNGESGKDVDDDKDANKSEISLVFEIALKRNMPVSFEVIKESGPPHMKSFVTRVSVGEFSAEGEGNSKKLSKKRAATTVLQELKKLPPLPVVEKPKLFFKKRPKTIVKAGPEYGQGMNPISRLAQIQQAKKEKEPDYVLLSERGMPRRREFVMQVKVGNEVATGTGPNKKIAKKNAAEAMLLQLGYKASTNLQDQLEKTGENKGWSGPKPGFPEPTNNTPKGILHLSPDVYQEMEASRHKVISGTTLGYLSPKDMNQPSSSFFSISPTSNSSATIARELLMNGTSSTAEAIGLKGSSPTPPCSPVQPSKQLEYLARIQGFQMWLQKLHM

SEQ ID NO: 9479 - protein, 414 aa, Artificial Sequence
  Synthetic polypeptide
MKRGEPAIYRPLDPKPFPNYRANYNFRGMYNQRYHCPVPKIFYVQLTVGNNEFFGEGKTRQAARHNAAMKALQALQNEPIPERSPQNGESGKDVDDDKDANKSEISLVFEIALKRNMPVSFEVIKESGPPHMKSFVTRVSVGEFSAEGEGNSKKLSKKRAATTVLQELKKLPPLPVVEKPKLFFKKRPKTIVKAGPEYGQGMNPISRLAQIQQAKKEKEPDYVLLSERGMPRRREFVMQVKVGNEVATGTGPNKKIAKKNAAEAMLLQLGYKASTNLQDQLEKTGENKGWSGPKPGFPEPTNNTPKGILHLSPDVYQEMEASRHKVISGTTLGYLSPKDMNQPSSSFFSISPTSNSSATIARELLMNGTSSTAEAIGLKGSSPTPPCSPVQPSKQLEYLARIQGFQMWLQKLHM

SEQ ID NO: 9480 - protein, 131 aa, Artificial Sequence
  Synthetic polypeptide
TGENKGWSGPKPGFPEPTNNTPKGILHLSPDVYQEMEASRHKVISGTTLGYLSPKDMNQPSSSFFSISPTSNSSATIARELLMNGTSSTAEAIGLKGSSPTPPCSPVQPSKQLEYLARIQGFQMWLQKLHM

SEQ ID NO: 9481 - protein, 498 aa, Artificial Sequence
  Synthetic polypeptide
MVARPLHSTEGQPESLGKMFSVQLSLGEQTWESEGSSIKKAQQAVANKALTESTLPKPVQKPPKSNVNNNPGSITPTVELNGLAMKRGEPAIYRPLDPKPFPNYRANYNFRGMYNQRYHCPVPKIFYVQLTVGNNEFFGEGKTRQAARHNAAMKALQALQNEPIPERSPQNGESGKDVDDDKDANKSEISLVFEIALKRNMPVSFEVIKESGPPHMKSFVTRVSVGEFSAEGEGNSKKLSKKRAATTVLQELKKLPPLPVVEKPKLFFKKRPKTIVKAGPEYGQGMNPISRLAQIQQAKKEKEPDYVLLSERGMPRRREFVMQVKVGNEVATGTGPNKKIAKKNAAEAMLLQLGYKASTNLQDQLEKTGENKGWSGPKPGFPEPTNNTPKGILHLSPDVYQEMEASRHKVISGTTLGYLSPKDMNQPSSSFFSISPTSNSSATIARELLMNGTSSTAEAIGLKGSSPTPPCSPVQPSKQLEYLARIQGFQMWLQKLHM

SEQ ID NO: 9482 - protein, 298 aa, Artificial Sequence
  Synthetic polypeptide
MPVSFEVIKESGPPHMKSFVTRVSVGEFSAEGEGNSKKLSKKRAATTVLQELKKLPPLPVVEKPKLFFKKRPKTIVKAGPEYGQGMNPISRLAQIQQAKKEKEPDYVLLSERGMPRRREFVMQVKVGNEVATGTGPNKKIAKKNAAEAMLLQLGYKASTNLQDQLEKTGENKGWSGPKPGFPEPTNNTPKGILHLSPDVYQEMEASRHKVISGTTLGYLSPKDMNQPSSSFFSISPTSNSSATIARELLMNGTSSTAEAIGLKGSSPTPPCSPVQPSKQLEYLARIQGFQMWLQKLHM

SEQ ID NO: 9483 - protein, 480 aa, Artificial Sequence
  Synthetic polypeptide
MFSVQLSLGEQTWESEGSSIKKAQQAVANKALTESTLPKPVQKPPKSNVNNNPGSITPTVELNGLAMKRGEPAIYRPLDPKPFPNYRANYNFRGMYNQRYHCPVPKIFYVQLTVGNNEFFGEGKTRQAARHNAAMKALQALQNEPIPERSPQNGESGKDVDDDKDANKSEISLVFEIALKRNMPVSFEVIKESGPPHMKSFVTRVSVGEFSAEGEGNSKKLSKKRAATTVLQELKKLPPLPVVEKPKLFFKKRPKTIVKAGPEYGQGMNPISRLAQIQQAKKEKEPDYVLLSERGMPRRREFVMQVKVGNEVATGTGPNKKIAKKNAAEAMLLQLGYKASTNLQDQLEKTGENKGWSGPKPGFPEPTNNTPKGILHLSPDVYQEMEASRHKVISGTTLGYLSPKDMNQPSSSFFSISPTSNSSATIARELLMNGTSSTAEAIGLKGSSPTPPCSPVQPSKQLEYLARIQGFQMWLQKLHM

SEQ ID NO: 9484 - protein, 488 aa, Artificial Sequence
  Synthetic polypeptide
MLQINQMFSVQLSLGEQTWESEGSSIKKAQQAVANKALTESTLPKPVQKPPKSNVNNNPGSITPTVELNGLAMKRGEPAIYRPLDPKPFPNYRANYNFRGMYNQRYHCPVPKIFYVQLTVGNNEFFGEGKTRQAARHNAAMKALQALQNEPIPERSPQNGESGKDVDDDKDANKSEISLVFEIALKRNMPVSFEVIKESGPPHMKSFVTRVSVGEFSAEGEGNSKKLSKKRAATTVLQELKKLPPLPVVEKPKLFFKKRPKTIVKAGPEYGQGMNPISRLAQIQQAKKEKEPDYVLLSERGMPRRREFVMQVKVGNEVATGTGPNKKIAKKNAAEAMLLQLGYKASTNLQDQLEKTGENKGWSGPKPGFPEPTNNTPKGILHLSPDVYQEMEASRHKVISGTTLGYLSPKDMNQPSSSFFSISPTSNSSATIARELLMNGTSSTAEAIGLKGSSPTPPCSPVQPSKQLEYLARIQGFQASLFPETQQY

SEQ ID NO: 9485 - protein, 520 aa, Artificial Sequence
  Synthetic polypeptide
MANPKEKTAMCLVNELARFNRVQPQYKLLNERGPAHSKMFSVQLSLGEQTWESEGSSIKKAQQAVANKALTESTLPKPVQKPPKSNVNNNPGSITPTVELNGLAMKRGEPAIYRPLDPKPFPNYRANYNFRGMYNQRYHCPVPKIFYVQLTVGNNEFFGEGKTRQAARHNAAMKALQALQNEPIPERSPQNGESGKDVDDDKDANKSEISLVFEIALKRNMPVSFEVIKESGPPHMKSFVTRVSVGEFSAEGEGNSKKLSKKRAATTVLQELKKLPPLPVVEKPKLFFKKRPKTIVKAGPEYGQGMNPISRLAQIQQAKKEKEPDYVLLSERGMPRRREFVMQVKVGNEVATGTGPNKKIAKKNAAEAMLLQLGYKASTNLQDQLEKTGENKGWSGPKPGFPEPTNNTPKGILHLSPDVYQEMEASRHKVISGTTLGYLSPKDMNQPSSSFFSISPTSNSSATIARELLMNGTSSTAEAIGLKGSSPTPPCSPVQPSKQLEYLARIQGFQASLFPETQQY

SEQ ID NO: 9486 - protein, 348 aa, Artificial Sequence
  Synthetic polypeptide
MKALQALQNEPIPERSPQNGESGKDVDDDKDANKSEISLVFEIALKRNMPVSFEVIKESGPPHMKSFVTRVSVGEFSAEGEGNSKKLSKKRAATTVLQELKKLPPLPVVEKPKLFFKKRPKTIVKAGPEYGQGMNPISRLAQIQQAKKEKEPDYVLLSERGMPRRREFVMQVKVGNEVATGTGPNKKIAKKNAAEAMLLQLGYKASTNLQDQLEKTGENKGWSGPKPGFPEPTNNTPKGILHLSPDVYQEMEASRHKVISGTTLGYLSPKDMNQPSSSFFSISPTSNSSATIARELLMNGTSSTAEAIGLKGSSPTPPCSPVQPSKQLEYLARIQGFQASLFPETQQY

SEQ ID NO: 9487 - protein, 416 aa, Artificial Sequence
  Synthetic polypeptide
MKRGEPAIYRPLDPKPFPNYRANYNFRGMYNQRYHCPVPKIFYVQLTVGNNEFFGEGKTRQAARHNAAMKALQALQNEPIPERSPQNGESGKDVDDDKDANKSEISLVFEIALKRNMPVSFEVIKESGPPHMKSFVTRVSVGEFSAEGEGNSKKLSKKRAATTVLQELKKLPPLPVVEKPKLFFKKRPKTIVKAGPEYGQGMNPISRLAQIQQAKKEKEPDYVLLSERGMPRRREFVMQVKVGNEVATGTGPNKKIAKKNAAEAMLLQLGYKASTNLQDQLEKTGENKGWSGPKPGFPEPTNNTPKGILHLSPDVYQEMEASRHKVISGTTLGYLSPKDMNQPSSSFFSISPTSNSSATIARELLMNGTSSTAEAIGLKGSSPTPPCSPVQPSKQLEYLARIQGFQASLFPETQQY

SEQ ID NO: 9488 - protein, 133 aa, Artificial Sequence
  Synthetic polypeptide
TGENKGWSGPKPGFPEPTNNTPKGILHLSPDVYQEMEASRHKVISGTTLGYLSPKDMNQPSSSFFSISPTSNSSATIARELLMNGTSSTAEAIGLKGSSPTPPCSPVQPSKQLEYLARIQGFQASLFPETQQY

SEQ ID NO: 9489 - protein, 500 aa, Artificial Sequence
  Synthetic polypeptide
MVARPLHSTEGQPESLGKMFSVQLSLGEQTWESEGSSIKKAQQAVANKALTESTLPKPVQKPPKSNVNNNPGSITPTVELNGLAMKRGEPAIYRPLDPKPFPNYRANYNFRGMYNQRYHCPVPKIFYVQLTVGNNEFFGEGKTRQAARHNAAMKALQALQNEPIPERSPQNGESGKDVDDDKDANKSEISLVFEIALKRNMPVSFEVIKESGPPHMKSFVTRVSVGEFSAEGEGNSKKLSKKRAATTVLQELKKLPPLPVVEKPKLFFKKRPKTIVKAGPEYGQGMNPISRLAQIQQAKKEKEPDYVLLSERGMPRRREFVMQVKVGNEVATGTGPNKKIAKKNAAEAMLLQLGYKASTNLQDQLEKTGENKGWSGPKPGFPEPTNNTPKGILHLSPDVYQEMEASRHKVISGTTLGYLSPKDMNQPSSSFFSISPTSNSSATIARELLMNGTSSTAEAIGLKGSSPTPPCSPVQPSKQLEYLARIQGFQASLFPETQQY

SEQ ID NO: 9490 - protein, 300 aa, Artificial Sequence
  Synthetic polypeptide
MPVSFEVIKESGPPHMKSFVTRVSVGEFSAEGEGNSKKLSKKRAATTVLQELKKLPPLPVVEKPKLFFKKRPKTIVKAGPEYGQGMNPISRLAQIQQAKKEKEPDYVLLSERGMPRRREFVMQVKVGNEVATGTGPNKKIAKKNAAEAMLLQLGYKASTNLQDQLEKTGENKGWSGPKPGFPEPTNNTPKGILHLSPDVYQEMEASRHKVISGTTLGYLSPKDMNQPSSSFFSISPTSNSSATIARELLMNGTSSTAEAIGLKGSSPTPPCSPVQPSKQLEYLARIQGFQASLFPETQQY

SEQ ID NO: 9491 - protein, 482 aa, Artificial Sequence
  Synthetic polypeptide
MFSVQLSLGEQTWESEGSSIKKAQQAVANKALTESTLPKPVQKPPKSNVNNNPGSITPTVELNGLAMKRGEPAIYRPLDPKPFPNYRANYNFRGMYNQRYHCPVPKIFYVQLTVGNNEFFGEGKTRQAARHNAAMKALQALQNEPIPERSPQNGESGKDVDDDKDANKSEISLVFEIALKRNMPVSFEVIKESGPPHMKSFVTRVSVGEFSAEGEGNSKKLSKKRAATTVLQELKKLPPLPVVEKPKLFFKKRPKTIVKAGPEYGQGMNPISRLAQIQQAKKEKEPDYVLLSERGMPRRREFVMQVKVGNEVATGTGPNKKIAKKNAAEAMLLQLGYKASTNLQDQLEKTGENKGWSGPKPGFPEPTNNTPKGILHLSPDVYQEMEASRHKVISGTTLGYLSPKDMNQPSSSFFSISPTSNSSATIARELLMNGTSSTAEAIGLKGSSPTPPCSPVQPSKQLEYLARIQGFQASLFPETQQY

SEQ ID NO: 9492 - protein, 109 aa, Artificial Sequence
  Synthetic polypeptide
MLQINQMFSVQLSLGEQTWESEGSSIKKAQQAVANKALTESTLPKPVQKPPKSNVNNNPGSITPTVELNGLAMKRGEPAIYRPLDPKPFPNYRANYNFRGMYNQSTSGD

SEQ ID NO: 9493 - protein, 141 aa, Artificial Sequence
  Synthetic polypeptide
MANPKEKTAMCLVNELARFNRVQPQYKLLNERGPAHSKMFSVQLSLGEQTWESEGSSIKKAQQAVANKALTESTLPKPVQKPPKSNVNNNPGSITPTVELNGLAMKRGEPAIYRPLDPKPFPNYRANYNFRGMYNQSTSGD

SEQ ID NO: 9494 - protein, 37 aa, Artificial Sequence
  Synthetic polypeptide
MKRGEPAIYRPLDPKPFPNYRANYNFRGMYNQSTSGD

SEQ ID NO: 9495 - protein, 121 aa, Artificial Sequence
  Synthetic polypeptide
MVARPLHSTEGQPESLGKMFSVQLSLGEQTWESEGSSIKKAQQAVANKALTESTLPKPVQKPPKSNVNNNPGSITPTVELNGLAMKRGEPAIYRPLDPKPFPNYRANYNFRGMYNQSTSGD

SEQ ID NO: 9496 - protein, 103 aa, Artificial Sequence
  Synthetic polypeptide
MFSVQLSLGEQTWESEGSSIKKAQQAVANKALTESTLPKPVQKPPKSNVNNNPGSITPTVELNGLAMKRGEPAIYRPLDPKPFPNYRANYNFRGMYNQSTSGD

SEQ ID NO: 9497 - protein, 161 aa, Artificial Sequence
  Synthetic polypeptide
MASMQKRLQKELLALQNDPPPGMTLNEKSVQNSITQWIVDMEGAPGTLYEGEKFQLLFKFSSRYPFDSPQVMFTGENIPVHPHVYSNGHICLSILTEDWSPALSVQSVCLSIISMLSSCKEKRRPPDNSFYVRTCNKNPKKTKWWYHGKFEHRDIHKGKKM

SEQ ID NO: 9498 - protein, 18 aa, Artificial Sequence
  Synthetic polypeptide
RNDYRKNCWLCKMTHLLE

SEQ ID NO: 9499 - protein, 190 aa, Artificial Sequence
  Synthetic polypeptide
MLSPRGVTRARQLLPLRLWPRRSWGDGSIMASMQKRLQKELLALQNDPPPGMTLNEKSVQNSITQWIVDMEGAPGTLYEGEKFQLLFKFSSRYPFDSPQVMFTGENIPVHPHVYSNGHICLSILTEDWSPALSVQSVCLSIISMLSSCKEKRRPPDNSFYVRTCNKNPKKTKWWYHGKFEHRDIHKGKKM

SEQ ID NO: 9500 - protein, 172 aa, Artificial Sequence
  Synthetic polypeptide
MASMQTTGRRVEVWFPKRLQKELLALQNDPPPGMTLNEKSVQNSITQWIVDMEGAPGTLYEGEKFQLLFKFSSRYPFDSPQVMFTGENIPVHPHVYSNGHICLSILTEDWSPALSVQSVCLSIISMLSSCKEKRRPPDNSFYVRTCNKNPKKTKWWYHGKFEHRDIHKGKKM

SEQ ID NO: 9501 - protein, 201 aa, Artificial Sequence
  Synthetic polypeptide
MLSPRGVTRARQLLPLRLWPRRSWGDGSIMASMQTTGRRVEVWFPKRLQKELLALQNDPPPGMTLNEKSVQNSITQWIVDMEGAPGTLYEGEKFQLLFKFSSRYPFDSPQVMFTGENIPVHPHVYSNGHICLSILTEDWSPALSVQSVCLSIISMLSSCKEKRRPPDNSFYVRTCNKNPKKTKWWYHGKFEHRDIHKGKKM

SEQ ID NO: 9502 - protein, 18 aa, Artificial Sequence
  Synthetic polypeptide
RNDYRKNCWLCKMTHLLE

SEQ ID NO: 9503 - protein, 193 aa, Artificial Sequence
  Synthetic polypeptide
MASMQKRLQKELLALQNDPPPGMTLNEKSVQNSITQWIVDMEGAPGTLYEGEKFQLLFKFSSRYPFDSPQVMFTGENIPVHPHVYSNGHICLSILTEDWSPALSVQSVCLSIISMLSSCKEKRRPPDNSFYVRTCNKNPKKTKWWYHGQASWLTPVIPALWEVEAGGSLESRSSRPAWATWQNLISTKKIQTN

SEQ ID NO: 9504 - protein, 222 aa, Artificial Sequence
  Synthetic polypeptide
MLSPRGVTRARQLLPLRLWPRRSWGDGSIMASMQKRLQKELLALQNDPPPGMTLNEKSVQNSITQWIVDMEGAPGTLYEGEKFQLLFKFSSRYPFDSPQVMFTGENIPVHPHVYSNGHICLSILTEDWSPALSVQSVCLSIISMLSSCKEKRRPPDNSFYVRTCNKNPKKTKWWYHGQASWLTPVIPALWEVEAGGSLESRSSRPAWATWQNLISTKKIQTN

SEQ ID NO: 9505 - protein, 204 aa, Artificial Sequence
  Synthetic polypeptide
MASMQTTGRRVEVWFPKRLQKELLALQNDPPPGMTLNEKSVQNSITQWIVDMEGAPGTLYEGEKFQLLFKFSSRYPFDSPQVMFTGENIPVHPHVYSNGHICLSILTEDWSPALSVQSVCLSIISMLSSCKEKRRPPDNSFYVRTCNKNPKKTKWWYHGQASWLTPVIPALWEVEAGGSLESRSSRPAWATWQNLISTKKIQTN

SEQ ID NO: 9506 - protein, 233 aa, Artificial Sequence
  Synthetic polypeptide
MLSPRGVTRARQLLPLRLWPRRSWGDGSIMASMQTTGRRVEVWFPKRLQKELLALQNDPPPGMTLNEKSVQNSITQWIVDMEGAPGTLYEGEKFQLLFKFSSRYPFDSPQVMFTGENIPVHPHVYSNGHICLSILTEDWSPALSVQSVCLSIISMLSSCKEKRRPPDNSFYVRTCNKNPKKTKWWYHGQASWLTPVIPALWEVEAGGSLESRSSRPAWATWQNLISTKKIQTN

SEQ ID NO: 9507 - protein, 98 aa, Artificial Sequence
  Synthetic polypeptide
MDGEEKTYGGCEGPDAMYVKLISSDGHEFIVKREHALTSGTIKAMLSGPGWAWWLTPVILALWEAEAADHLRSGVQDQPDQHEEMPSLLKKYKISWVR

SEQ ID NO: 9508 - protein, 82 aa, Artificial Sequence
  Synthetic polypeptide
MYVKLISSDGHEFIVKREHALTSGTIKAMLSGPGWAWWLTPVILALWEAEAADHLRSGVQDQPDQHEEMPSLLKKYKISWVR

SEQ ID NO: 9509 - protein, 11 aa, Artificial Sequence
  Synthetic polypeptide
MGISIVKQCMT

SEQ ID NO: 9510 - protein, 5 aa, Artificial Sequence
  Synthetic polypeptide
MEKSI

SEQ ID NO: 9511 - protein, 121 aa, Artificial Sequence
  Synthetic polypeptide
MLPFLFFSTLFSSIFTEAQKQYWVCNSSDASISYTYCDKMQYPISINVNPCIELKRSKGLLHIFYIPRRDLKQLYFNLYITVNTMNLPKRKEVICRGSDDDYSFCRALKGVLVQQQTSISS

SEQ ID NO: 9512 - protein, 91 aa, Artificial Sequence
  Synthetic polypeptide
MLPFLFFSTLFSSIFTEAQKQYWVCNSSDASISYTYCGRDLKQLYFNLYITVNTMNLPKRKEVICRGSDDDYSFCRALKGVLVQQQTSISS

SEQ ID NO: 9513 - protein, 234 aa, Artificial Sequence
  Synthetic polypeptide
MAERQEEQRGSPPLRAEGKADAEVKLILYHWTHSFSSQKVRLVIAEKALKCEEHDVSLPLSEHNEPWFMRLNSTGEVPVLIHGENIICEATQIIDYLEQTFLDERTPRLMPDKESMYYPRVQHYRELLDSLPMDAYTHGCILHPELTVDSMIPAYATTRIRSQIGNTESELKKLAEENPDLQEAYIAKQKRLKSKLLDHDNVKYLKKILDELEKVLDQVETELQRRNEETPETE

SEQ ID NO: 9514 - protein, 166 aa, Artificial Sequence
  Synthetic polypeptide
MRLNSTGEVPVLIHGENIICEATQIIDYLEQTFLDERTPRLMPDKESMYYPRVQHYRELLDSLPMDAYTHGCILHPELTVDSMIPAYATTRIRSQIGNTESELKKLAEENPDLQEAYIAKQKRLKSKLLDHDNVKYLKKILDELEKVLDQVETELQRRNEETPETE

SEQ ID NO: 9515 - protein, 29 aa, Artificial Sequence
  Synthetic polypeptide
MIQRQRWQLWSKWRARKGSRTGVEASFAS

SEQ ID NO: 9516 - protein, 123 aa, Artificial Sequence
  Synthetic polypeptide
MTFTFQSEDLKRDCGKKMSHQHVFSLAMEEDVKTADTKKASRILDHEKENTRSICLLEQKRKVVSSNIDVPPASLLPPCEEGPYFPFTFHHDCKFAEASPVMWNCELIKPLSFINYLVSDISL

SEQ ID NO: 9517 - protein, 88 aa, Artificial Sequence
  Synthetic polypeptide
MTFTFQSEDLKRDCGKKMSHQHVFSLAMEEDVKTADTKKASRILDHEKENTRSICLLEQKRKVVSSNIDVPPASFRYSVLSNRKWSKT

SEQ ID NO: 9518 - protein, 67 aa, Artificial Sequence
  Synthetic polypeptide
MGPAGSLLGSGQMQITLWGSLAAVAIFFVITFLIFLCSSCDREKKPRQHSGDHENLMNVHLHCKFLA

SEQ ID NO: 9519 - protein, 31 aa, Artificial Sequence
  Synthetic polypeptide
GAIHLPKCLGIKEELLKCCLQLLLVPPMRRP

SEQ ID NO: 9520 - protein, 4 aa, Artificial Sequence
  Synthetic polypeptide
ERHT

SEQ ID NO: 9521 - protein, 501 aa, Artificial Sequence
  Synthetic polypeptide
MILLTFSTGRRLDFVHHSGVFFLQTLLWILCATVCGTEQYFNVEVWLQKYGYLPPTDPRMSVLRSAETMQSALAAMQQFYGINMTGKVDRNTIDWMKKPRCGVPDQTRGSSKFHIRRKRYALTGQKWQHKHITYSIKNVTPKVGDPETRKAIRRAFDVWQNVTPLTFEEVPYSELENGKRDVDITIIFASGFHGDSSPFDGEGGFLAHAYFPGPGIGGDTHFDSDEPWTLGNPNHDGNDLFLVAVHELGHALGLEHSNDPTAIMAPFYQYMETDNFKLPNDDLQGIQKIYGPPDKIPPPTRPLPTVPPHRSIPPADPRKNDRPKPPRPPTGRPSYPGAKPNICDGNFNTLAILRREMFVFKDQWFWRVRNNRVMDGYPMQITYFWRGLPPSIDAVYENSDGNFVFFKGNKYWVFKDTTLQPGYPHDLITLGSGIPPHGIDSAIWWEDVGKTYFFKGDRYWRYSEEMKTMDPGYPKPITVWKGIPESPQGAFVHKENGILTC

SEQ ID NO: 9522 - protein, 569 aa, Artificial Sequence
  Synthetic polypeptide
MILLTFSTGRRLDFVHHSGVFFLQTLLWILCATVCGTEQYFNVEVWLQKYGYLPPTDPRMSVLRSAETMQSALAAMQQFYGINMTGKVDRNTIDWMKKPRCGVPDQTRGSSKFHIRRKRYALTGQKWQHKHITYSIKNVTPKVGDPETRKAIRRAFDVWQNVTPLTFEEVPYSELENGKRDVDITIIFASGFHGDSSPFDGEGGFLAHAYFPGPGIGGDTHFDSDEPWTLGNPNHDGNDLFLVAVHELGHALGLEHSNDPTAIMAPFYQYMETDNFKLPNDDLQGIQKIYGPPDKIPPPTRPLPTVPPHRSIPPADPRKNDRPKPPRPPTGRPSYPGAKPNICDGNFNTLAILRREMFVFKDQWFWRVRNNRVMDGYPMQITYFWRGLPPSIDAVYENSDGNFVFFKGNKYWVFKDTTLQPGYPHDLITLGSGIPPHGIDSAIWWEDVGKTYFFKGDRYWRYSEEMKTMDPGYPKPITVWKGIPESPQGAFVHKENDLGKGDTSEETMATFGKLKTSGHLVTGLAEPRKPNHRNWEGQAESKPNSITYVLNAGGMDTPSSCGHEVNGVD

SEQ ID NO: 9523 - protein, 497 aa, Artificial Sequence
  Synthetic polypeptide
MILLTFSTGRRLDFVHHSGVFFLQTLLWILCATVCGTEQYFNVEVWLQKYGYLPPTDPRMSVLRSAETMQSALAAMQQFYGINMTGKVDRNTIDWMKKPRCGVPDQTRGSSKFHIRRKRYALTGQKWQHKHITYSIKNVTPKVGDPETRKAIRRAFDVWQNVTPLTFEEVPYSELENGKRDVDITIIFASGFHGDSSPFDGEGGFLAHAYFPGPGIGGDTHFDSDEPWTLGNPNHDGNDLFLVAVHELGHALGLEHSNDPTAIMAPFYQYMETDNFKLPNDDLQGIQKIYGPPDKIPPPTRPLPTVPPHRSIPPADPRKNDRPKPPRPPTGRPSYPGAKPNICDGNFNTLAILRREMFVFKDQWFWRVRNNRVMDGYPMQITYFWRGLPPSIDAVYENSDGNFVFFKGNKYWVFKDTTLQPGYPHDLITLGSGIPPHGIDSAIWWEDVGKTYFFKGDRYWRYSEEMKTMDPGYPKPITVWKGIPESPQGAFVHKENA

SEQ ID NO: 9524 - protein, 46 aa, Artificial Sequence
  Synthetic polypeptide
MILLTFSTGRRLDFVHHSGVFFLQTLLWILCATVCGTEQYFNVEAQ

SEQ ID NO: 9525 - protein, 63 aa, Artificial Sequence
  Synthetic polypeptide
MRDGRYCRRAVLKPGPLSRAGYLRTGRRLDFVHHSGVFFLQTLLWILCATVCGTEQYFNVEAQ

SEQ ID NO: 9526 - protein, 374 aa, Artificial Sequence
  Synthetic polypeptide
MWKLLPAAGPAGGEPYRLLTGVEYVVGRKNCAILIENDQSISRNHAVLTANFSVTNLSQTDEIPVLTLKDNSKYGTFVNEEKMQNGFSRTLKSGDGITFGVFGSKFRIEYEPLVACSSCLDVSGKTALNQAILQLGGFTVNNWTEECTHLVMVSVKVTIKTICALICGRPIVKPEYFTEFLKAVESKKQPPQIESFYPPLDEPSIGSKNVDLSGRQERKQIFKGKTFIFLNAKQHKKLSSAVVFGGGEARLITEENEEEHNFFLAPGTCVVDTGITNSQTLIPDCQKKWIQSIMDMLQRQGLRPIPEAEIGLAVIFMTTKNYCDPQGHPSTGLKTTTPGPSLSQGVSVDEKLMPSAPVNTTTYVADTESEQADT

SEQ ID NO: 9527 - protein, 292 aa, Artificial Sequence
  Synthetic polypeptide
MQNGFSRTLKSGDGITFGVFGSKFRIEYEPLVACSSCLDVSGKTALNQAILQLGGFTVNNWTEECTHLVMVSVKVTIKTICALICGRPIVKPEYFTEFLKAVESKKQPPQIESFYPPLDEPSIGSKNVDLSGRQERKQIFKGKTFIFLNAKQHKKLSSAVVFGGGEARLITEENEEEHNFFLAPGTCVVDTGITNSQTLIPDCQKKWIQSIMDMLQRQGLRPIPEAEIGLAVIFMTTKNYCDPQGHPSTGLKTTTPGPSLSQGVSVDEKLMPSAPVNTTTYVADTESEQADT

SEQ ID NO: 9528 - protein, 277 aa, Artificial Sequence
  Synthetic polypeptide
MRSPGGILLQALPRLLQHAALPGLAELPARWALPRGAGGDGPADRLPRGGGASAAAAAAAASGALLGAYLERHGPPEASELPEPGGALAGGPGSGGGGVVVGVAEVRNWRCCCLGSTCWCRSLVLVCVLAALCFASLALVRRYLHHLLLWVESLDSLLGVLLFVVGFIVVSFPCGWGYIVLNVAAGYLYGFVLGMGLMMVGVLIGTFIAHVVCKRLLTAWVAARIQSSEKLSAVIRVVEGGSGLKVVALARLTPIPFGLQNAVFSAHNKTFSRSPGI

SEQ ID NO: 9529 - protein, 146 aa, Artificial Sequence
  Synthetic polypeptide
MCFASLALVRRYLHHLLLWVESLDSLLGVLLFVVGFIVVSFPCGWGYIVLNVAAGYLYGFVLGMGLMMVGVLIGTFIAHVVCKRLLTAWVAARIQSSEKLSAVIRVVEGGSGLKVVALARLTPIPFGLQNAVFSAHNKTFSRSPGI

SEQ ID NO: 9530 - protein, 272 aa, Artificial Sequence
  Synthetic polypeptide
MMRRTLENRNAQTKQLQTAVSNVEKHFGELCQIFAAYVRKTARLRDKADLLVNEINAYAATETPHLKLGLMNFADEFAKLQDYRQAEVERLEAKVVEPLKTYGTIVKMKRDDLKATLTARNREAKQLTQLERTRQRNPSDRHVISQAETELQRAAMDASRTSRHLEETINNFERQKMKDIKTIFSEFITIEMLFHGKALEVYTAAYQNIQNIDEDEDLEARHSGPHLQSQHFGSPRRVDHLRSGVRDQPGQHGETPSLLKIQKLARLGGTRL

SEQ ID NO: 9531 - protein, 117 aa, Artificial Sequence
  Synthetic polypeptide
MDASRTSRHLEETINNFERQKMKDIKTIFSEFITIEMLFHGKALEVYTAAYQNIQNIDEDEDLEARHSGPHLQSQHFGSPRRVDHLRSGVRDQPGQHGETPSLLKIQKLARLGGTRL

SEQ ID NO: 9532 - protein, 828 aa, Artificial Sequence
  Synthetic polypeptide
MILQAHLHSLCLLMLYLATGYGQEGKFSGPLKPMTFSIYEGQEPSQIIFQFKANPPAVTFELTGETDNIFVIEREGLLYYNRALDRETRSTHNLQVAALDANGIIVEGPVPITIKVKDINDNRPTFLQSKYEGSVRQNSRPGKPFLYVNATDLDDPATPNGQLYYQIVIQLPMINNVMYFQINNKTGAISLTREGSQELNPAKNPSYNLVISVKDMGGQSENSFSDTTSVDIIVTENIWKAPKPVEMVENSTDPHPIKITQVRWNDPGAQYSLVDKEKLPRFPFSIDQEGDIYVTQPLDREEKDAYVFYAVAKDEYGKPLSYPLEIHVKVKDINDNPPTCPSPVTVFEVQENERLGNSIGTLTAHDRDEENTANSFLNYRIVEQTPKLPMDGLFLIQTYAGMLQLAKQSLKKQDTPQYNLTIEVSDKDFKTLCFVQINVIDINDQIPIFEKSDYGNLTLAEDTNIGSTILTIQATDADEPFTGSSKILYHIIKGDSEGRLGVDTDPHTNTGYVIIKKPLDFETAAVSNIVFKAENPEPLVFGVKYNASSFAKFTLIVTDVNEAPQFSQHVFQAKVSEDVAIGTKVGNVTAKDPEGLDISYSLRGDTRGWLKIDHVTGEIFSVAPLDREAGSPYRVQVVATEVGGSSLSSVSEFHLILMDVNDNPPRLAKDYTGLFFCHPLSAPGSLIFEATDDDQHLFRGPHFTFSLGSGSLQNDWEVSKINGTHARLSTRHTEFEEREYVVLIRINDGGRPPLEGIVSLPVTFCSCVEGSCFRPAGHQTGIPTVGMAVGILLTTLLVIDISVPGSWAFGLGLGLTPLAPLVPWTFLN

SEQ ID NO: 9533 - protein, 382 aa, Artificial Sequence
  Synthetic polypeptide
MAASRRSQHHHHHHQQQLQPAPGASAPPPPPPPPLSPGLAPGTTPASPTASGLAPFASPRHGLALPEGDGSRDPPDRPRSPDPVDGTSCCSTTSTICTVAAAPVVPAVSTSSAAGVAPNPAGSGSNNSPSSSSSPTSSSSSSPSSPGSSLAESPEAAGVSSTAPLGPGAAGPGTGVPAVSGALRELLEACRNGDVSRVKRLVDAANVNAKDMAGRKSSPLHFAAGFGRKDVVEHLLQMGANVHARDDGGLIPLHNACSFGHAEVVSLLLCQGADPNARDNWNYTPLHEAAIKGKIDVCIVLLQHGADPNIRNTDGKSALDLADPSAKAVLTGEYKKDELLEAARSGNEEKLMALLTPLNVNCHASDGRKGDISHPSTVAHTT

SEQ ID NO: 9534 - protein, 145 aa, Artificial Sequence [sequence omitted]

SEQ ID NO: 9535 - protein, 135 aa, Artificial Sequence
  Synthetic polypeptide
MRRSAAPSQLQGNSFKKPKFIPPGRSNPGLNEEITKLNPDIKLFEGVAINNTFLPSQNDLRICSLNLPSEESTREINNRDNCSGKYCFEAPTLATLDPPHTVQTWMRRHRLVPVHYRQQFGMNPKDIMLNGRNHF

SEQ ID NO: 9536 - protein, 165 aa, Artificial Sequence
  Synthetic polypeptide
MVGKARSSNFTLSEKLDLLKLVKPYVKILEEHTNKHSVIVEKNRCWDIIAVNYNAIGVDRPPRTAQGLRTLYKRLKEYAKQELLQQKETQSDFKSNISEPTKKVMEMIPQISSFCLVRDRNHIQSANLDEEAQAGTSSLQATIWDESQRHYAEWEKSFLKRLYTV

SEQ ID NO: 9537 - protein, 143 aa, Artificial Sequence
  Synthetic polypeptide
MVGKARSSNFTLSEKLDLLKLVKPYVKILEEHTNKHSVIVEKNRCWDIIAVNYNAIGVDRPPRTAQGLRTLYKRLKEYAKQELLQQKETQSDFKSNISEPTKKVMEMIPQISSFCLVRDRNHIQRQQFGMNPKDIMLNGRNHF

SEQ ID NO: 9538 - protein, 106 aa, Artificial Sequence
  Synthetic polypeptide
MRRSAAPSQLQGNSFKKPKFIPPGRSNPGLNEEITKLNPDIKLFEGVAINNTFLPSQNDLRICSLNLPSEESTREINNRDNCSGKYCFEAPTLATLDPPHTGNNLG

SEQ ID NO: 9539 - protein, 1 aa, Artificial Sequence
  Synthetic polypeptide
Y

SEQ ID NO: 9540 - protein, 210 aa, Artificial Sequence
  Synthetic polypeptide
MAEEEGPPVELRQRKKPKSSENKESAKEEKISDIPIPERAPKHVLFQRFAKIFIGCLAAVTSGMMYALYLSAYHERKFWFSNRQELEREITFQGDSAIYYSYYKDMLKAPSFERGVYELTHNNKTVSLKTINAVQQMSLYPELIASILYQATGSNEIIEPVYFYIGIVFGLQGIYVTALFVTSWLMSGTWLAGMLTVAWFVINSLCRKRD

SEQ ID NO: 9541 - protein, 181 aa, Artificial Sequence
  Synthetic polypeptide
KISDIPIPERAPKHVLFQRFAKIFIGCLAAVTSGMMYALYLSAYHERKFWFSNRQELEREITFQGDSAIYYSYYKDMLKAPSFERGVYELTHNNKTVSLKTINAVQQMSLYPELIASILYQATGSNEIIEPVYFYIGIVFGLQGIYVTALFVTSWLMSGTWLAGMLTVAWFVINSLCRKRD

SEQ ID NO: 9542 - protein, 60 aa, Artificial Sequence
  Synthetic polypeptide
ATGSNEIIEPVYFYIGIVFGLQGIYVTALFVTSWLMSGTWLAGMLTVAWFVINSLCRKRD

SEQ ID NO: 9543 - protein, 737 aa, Artificial Sequence
  Synthetic polypeptide
MSAEAADREAATSSRPCTPPQTCWFEFLLEESLLEKHLRKPCPDPAPVQLIVQFLEQASKPSVNEQNQVQPPPDNKRNRILKLLALKVAAHLKWDLDILEKSLSVPVLNMLLNELLCISKVPPGTKHVDMDLATLPPTTAMAVLLYNRWAIRTIVQSSFPVKQAKPGPPQLSVMNQMQQEKELTENILKVLKEQAADSILVLEAALKLNKDLYVHTMRTLDLLAMEPGMVNGETESSTAGLKVKTEEMQCQVCYDLGAAYFQQGSTNSAVYENAREKFFRTKELIAEIGSLSLHCTIDEKRLAGYCQACDVLVPSSDSTSQQLTPYSQVHICLRSGNYQEVIQIFIEDNLTLSLPVQFRQSVLRELFKKAQQGNEALDEICFKVCACNTVRDILEGRTISVQFNQLFLRPNKEKIDFLLEVCSRSVNLEKASESLKGNMAAFLKNVCLGLEDLQYVFMISSHELFITLLKDEERKLLVDQMRKRSPRVNLCIKPVTSFYDIPASASVNIGQLEHQLILSVDPWRIRQILIELHGMTSERQFWTVSNKWEVPSVYSGVILGIKDNLTRDLVYILMAKGLHCSTVKDFSHAKQLFAACLELVTEFSPKLRQVMLNEMLLLDIHTHEAGTGQAGERPPSDLISRVRGYLEMRLPDIPLRQVIAEECVAFMLNWRENEYLTLQVPAFLLQSNPYVKLLRRLRHKNRLSLGGGGCSEPRLYHCIPAWVQSKTLPPKRKENKR

SEQ ID NO: 9544 - protein, 4 aa, Artificial Sequence
  Synthetic polypeptide
RKKS

SEQ ID NO: 9545 - protein, 91 aa, Artificial Sequence
  Synthetic polypeptide
EMRLPDIPLRQVIAEECVAFMLNWRENEYLTLQVPAFLLQSNPYVKLLRRLRHKNRLSLGGGGCSEPRLYHCIPAWVQSKTLPPKRKENKR

SEQ ID NO: 9546 - protein, 202 aa, Artificial Sequence
  Synthetic polypeptide
MWNWLRLVKDSVSEKTIGLMRMQFWKKTVEDIYCDNPPHQPVAIELWKAVKRHNLTKRWLMKIVDEREKNLDDKAYRNIKELENYAENTQSSLLYLTLEILGIKDLHADHAASHIGKAQGIVTCLRATPYHGSRRKVFLPMDICMLHGVSQEDFLRRNQDKNVRDVIYDIASQAHLHLKHARSFHKTVPVKAFPAFLQTARL

SEQ ID NO: 9547 - protein, 242 aa, Artificial Sequence
  Synthetic polypeptide
MPISISHSSWLVQRKRDYEGYLCSLLLPAESRSSVFALRAFNVELAQVKDSVSEKTIGLMRMQFWKKTVEDIYCDNPPHQPVAIELWKAVKRHNLTKRWLMKIVDEREKNLDDKAYRNIKELENYAENTQSSLLYLTLEILGIKDLHADHAASHIGKAQGIVTCLRATPYHGSRRKVFLPMDICMLHGVSQEDFLRRNQDKNVRDVIYDIASQAHLHLKHARSFHKTVPVKAFPAFLQTARL

SEQ ID NO: 9548 - protein, 294 aa, Artificial Sequence
  Synthetic polypeptide
MAASAHGSVWGPLRLGIPGLCCRRPPLGLYARMRRLPGPEVSGRSVAAASGPGAWGTDHYCLELLRKRDYEGYLCSLLLPAESRSSVFALRAFNVELAQVKDSVSEKTIGLMRMQFWKKTVEDIYCDNPPHQPVAIELWKAVKRHNLTKRWLMKIVDEREKNLDDKAYRNIKELENYAENTQSSLLYLTLEILGIKDLHADHAASHIGKAQGIVTCLRATPYHGSRRKVFLPMDICMLHGVSQEDFLRRNQDKNVRDVIYDIASQAHLHLKHARSFHKTVPVKAFPAFLQTARL

SEQ ID NO: 9549 - protein, 142 aa, Artificial Sequence
  Synthetic polypeptide
MKIVDEREKNLDDKAYRNIKELENYAENTQSSLLYLTLEILGIKDLHADHAASHIGKAQGIVTCLRATPYHGSRRKVFLPMDICMLHGVSQEDFLRRNQDKNVRDVIYDIASQAHLHLKHARSFHKTVPVKAFPAFLQTARL

SEQ ID NO: 9550 - protein, 1300 aa, Artificial Sequence
  Synthetic polypeptide
MAASRRSQHHHHHHQQQLQPAPGASAPPPPPPPPLSPGLAPGTTPASPTASGLAPFASPRHGLALPEGDGSRDPPDRPRSPDPVDGTSCCSTTSTICTVAAAPVVPAVSTSSAAGVAPNPAGSGSNNSPSSSSSPTSSSSSSPSSPGSSLAESPEAAGVSSTAPLGPGAAGPGTGVPAVSGALRELLEACRNGDVSRVKRLVDAANVNAKDMAGRKSSPLHFAAGFGRKDVVEHLLQMGANVHARDDGGLIPLHNACSFGHAEVVSLLLCQGADPNARDNWNYTPLHEAAIKGKIDVCIVLLQHGADPNIRNTDGKSALDLADPSAKAVLTGEYKKDELLEAARSGNEEKLMALLTPLNVNCHASDGRKSTPLHLAAGYNRVRIVQLLLQHGADVHAKDKGGLVPLHNACSYGHYEVTELLLKHGACVNAMDLWQFTPLHEAASKNRVEVCSLLLSHGADPTLVNCHGKSAVDMAPTPELRERLTYEFKGHSLLQAAREADLAKVKKTLALEIINFKQPQSHETALHCAVASLHPKRKQVTELLLRKGANVNEKNKDFMTPLHVAAERAHNDVMEVLHKHGAKMNALDTLGQTALHRAALAGHLQTCRLLLSYGSDPSIISLQGFTAAQMGNEAVQQILSESTPIRTSDVDYRLLEASKAGDLETVKQLCSSQNVNCRDLEGRHSTPLHFAAGYNRVSVVEYLLHHGADVHAKDKGGLVPLHNACSYGHYEVAELLVRHGASVNVADLWKFTPLHEAAAKGKYEICKLLLKHGADPTKKNRDGNTPLDLVKEGDTDIQDLLRGDAALLDAAKKGCLARVQKLCTPENINCRDTQGRNSTPLHLAAGYNNLEVAEYLLEHGADVNAQDKGGLIPLHNAASYGHVDIAALLIKYNTCVNATDKWAFTPLHEAAQKGRTQLCALLLAHGADPTMKNQEGQTPLDLATADDIRALLIDAMPPEALPTCFKPQATVVSASLISPASTPSCLSAASSIDNLTGPLAELAVGGASNAGDGAAGTERKEGEVAGLDMNISQFLKSLGLEHLRDIFETEQITLDVLADMGHEELKEIGINAYGHRHKLIKGVERLLGGQQGTNPYLTFHCVNQGTILLDLAPEDKEYQSVEEEMQSTIREHRDGGNAGGIFNRYNVIRIQKVVNKKLRERFCHRQKEVSEENHNHHNERMLFHGSPFINAIIHKGFDERHAYIGGMFGAGIYFAENSSKSNQYVYGIGGGTGCPTHKDRSCYICHRQMLFCRVTLGKSFLQFSTMKMAHAPPGHHSVIGRPSVNGLAYAEYVIYRGEQD

SEQ ID NO: 9551 - protein, 1063 aa, Artificial Sequence
  Synthetic polypeptide
MGANVHARDDGGLIPLHNACSFGHAEVVSLLLCQGADPNARDNWNYTPLHEAAIKGKIDVCIVLLQHGADPNIRNTDGKSALDLADPSAKAVLTGEYKKDELLEAARSGNEEKLMALLTPLNVNCHASDGRKSTPLHLAAGYNRVRIVQLLLQHGADVHAKDKGGLVPLHNACSYGHYEVTELLLKHGACVNAMDLWQFTPLHEAASKNRVEVCSLLLSHGADPTLVNCHGKSAVDMAPTPELRERLTYEFKGHSLLQAAREADLAKVKKTLALEIINFKQPQSHETALHCAVASLHPKRKQVTELLLRKGANVNEKNKDFMTPLHVAAERAHNDVMEVLHKHGAKMNALDTLGQTALHRAALAGHLQTCRLLLSYGSDPSIISLQGFTAAQMGNEAVQQILSESTPIRTSDVDYRLLEASKAGDLETVKQLCSSQNVNCRDLEGRHSTPLHFAAGYNRVSVVEYLLHHGADVHAKDKGGLVPLHNACSYGHYEVAELLVRHGASVNVADLWKFTPLHEAAAKGKYEICKLLLKHGADPTKKNRDGNTPLDLVKEGDTDIQDLLRGDAALLDAAKKGCLARVQKLCTPENINCRDTQGRNSTPLHLAAGYNNLEVAEYLLEHGADVNAQDKGGLIPLHNAASYGHVDIAALLIKYNTCVNATDKWAFTPLHEAAQKGRTQLCALLLAHGADPTMKNQEGQTPLDLATADDIRALLIDAMPPEALPTCFKPQATVVSASLISPASTPSCLSAASSIDNLTGPLAELAVGGASNAGDGAAGTERKEGEVAGLDMNISQFLKSLGLEHLRDIFETEQITLDVLADMGHEELKEIGINAYGHRHKLIKGVERLLGGQQGTNPYLTFHCVNQGTILLDLAPEDKEYQSVEEEMQSTIREHRDGGNAGGIFNRYNVIRIQKVVNKKLRERFCHRQKEVSEENHNHHNERMLFHGSPFINAIIHKGFDERHAYIGGMFGAGIYFAENSSKSNQYVYGIGGGTGCPTHKDRSCYICHRQMLFCRVTLGKSFLQFSTMKMAHAPPGHHSVIGRPSVNGLAYAEYVIYRGEQD

SEQ ID NO: 9552 - protein, 45 aa, Artificial Sequence
  Synthetic polypeptide
LGKSFLQFSTMKMAHAPPGHHSVIGRPSVNGLAYAEYVIYRGEQD

SEQ ID NO: 9553 - protein, 1301 aa, Artificial Sequence
  Synthetic polypeptide
MAASRRSQHHHHHHQQQLQPAPGASAPPPPPPPPLSPGLAPGTTPASPTASGLAPFASPRHGLALPEGDGSRDPPDRPRSPDPVDGTSCCSTTSTICTVAAAPVVPAVSTSSAAGVAPNPAGSGSNNSPSSSSSPTSSSSSSPSSPGSSLAESPEAAGVSSTAPLGPGAAGPGTGVPAVSGALRELLEACRNGDVSRVKRLVDAANVNAKDMAGRKSSPLHFAAGFGRKDVVEHLLQMGANVHARDDGGLIPLHNACSFGHAEVVSLLLCQGADPNARDNWNYTPLHEAAIKGKIDVCIVLLQHGADPNIRNTDGKSALDLADPSAKAVLTGEYKKDELLEAARSGNEEKLMALLTPLNVNCHASDGRKSTPLHLAAGYNRVRIVQLLLQHGADVHAKDKGGLVPLHNACSYGHYEVTELLLKHGACVNAMDLWQFTPLHEAASKNRVEVCSLLLSHGADPTLVNCHGKSAVDMAPTPELRERLTYEFKGHSLLQAAREADLAKVKKTLALEIINFKQPQSHETALHCAVASLHPKRKQVTELLLRKGANVNEKNKDFMTPLHVAAERAHNDVMEVLHKHGAKMNALDTLGQTALHRAALAGHLQTCRLLLSYGSDPSIISLQGFTAAQMGNEAVQQILSESTPIRTSDVDYRLLEASKAGDLETVKQLCSSQNVNCRDLEGRHSTPLHFAAGYNRVSVVEYLLHHGADVHAKDKGGLVPLHNACSYGHYEVAELLVRHGASVNVADLWKFTPLHEAAAKGKYEICKLLLKHGADPTKKNRDGNTPLDLVKEGDTDIQDLLRGDAALLDAAKKGCLARVQKLCTPENINCRDTQGRNSTPLHLAAGYNNLEVAEYLLEHGADVNAQDKGGLIPLHNAASYGHVDIAALLIKYNTCVNATDKWAFTPLHEAAQKGRTQLCALLLAHGADPTMKNQEGQTPLDLATADDIRALLIDAMPPEALPTCFKPQATVVSASLISPASTPSCLSAASSIDNLTGPLAELAVGGASNAGDGAAGTERKEGEVAGLDMNISQFLKSLGLEHLRDIFETEQITLDVLADMGHEELKEIGINAYGHRHKLIKGVERLLGGQQGTNPYLTFHCVNQGTILLDLAPEDKEYQSVEEEMQSTIREHRDGGNAGGIFNRYNVIRIQKVVNKKLRERFCHRQKEVSEENHNHHNERMLFHGSPFINAIIHKGFDERHAYIGGMFGAGIYFAENSSKSNQYVYGIGGGTGCPTHKDRSCYICHRQMLFCRVTLGKSFLQFSTMKMAHAPPGHHSVIGRPSVNGLAYAEYVIYRGEQIT

SEQ ID NO: 9554 - protein, 1064 aa, Artificial Sequence
  Synthetic polypeptide
MGANVHARDDGGLIPLHNACSFGHAEVVSLLLCQGADPNARDNWNYTPLHEAAIKGKIDVCIVLLQHGADPNIRNTDGKSALDLADPSAKAVLTGEYKKDELLEAARSGNEEKLMALLTPLNVNCHASDGRKSTPLHLAAGYNRVRIVQLLLQHGADVHAKDKGGLVPLHNACSYGHYEVTELLLKHGACVNAMDLWQFTPLHEAASKNRVEVCSLLLSHGADPTLVNCHGKSAVDMAPTPELRERLTYEFKGHSLLQAAREADLAKVKKTLALEIINFKQPQSHETALHCAVASLHPKRKQVTELLLRKGANVNEKNKDFMTPLHVAAERAHNDVMEVLHKHGAKMNALDTLGQTALHRAALAGHLQTCRLLLSYGSDPSIISLQGFTAAQMGNEAVQQILSESTPIRTSDVDYRLLEASKAGDLETVKQLCSSQNVNCRDLEGRHSTPLHFAAGYNRVSVVEYLLHHGADVHAKDKGGLVPLHNACSYGHYEVAELLVRHGASVNVADLWKFTPLHEAAAKGKYEICKLLLKHGADPTKKNRDGNTPLDLVKEGDTDIQDLLRGDAALLDAAKKGCLARVQKLCTPENINCRDTQGRNSTPLHLAAGYNNLEVAEYLLEHGADVNAQDKGGLIPLHNAASYGHVDIAALLIKYNTCVNATDKWAFTPLHEAAQKGRTQLCALLLAHGADPTMKNQEGQTPLDLATADDIRALLIDAMPPEALPTCFKPQATVVSASLISPASTPSCLSAASSIDNLTGPLAELAVGGASNAGDGAAGTERKEGEVAGLDMNISQFLKSLGLEHLRDIFETEQITLDVLADMGHEELKEIGINAYGHRHKLIKGVERLLGGQQGTNPYLTFHCVNQGTILLDLAPEDKEYQSVEEEMQSTIREHRDGGNAGGIFNRYNVIRIQKVVNKKLRERFCHRQKEVSEENHNHHNERMLFHGSPFINAIIHKGFDERHAYIGGMFGAGIYFAENSSKSNQYVYGIGGGTGCPTHKDRSCYICHRQMLFCRVTLGKSFLQFSTMKMAHAPPGHHSVIGRPSVNGLAYAEYVIYRGEQIT

SEQ ID NO: 9555 - protein, 46 aa, Artificial Sequence
  Synthetic polypeptide
LGKSFLQFSTMKMAHAPPGHHSVIGRPSVNGLAYAEYVIYRGEQIT

SEQ ID NO: 9556 - protein, 439 aa, Artificial Sequence
  Synthetic polypeptide
MASCVGSRTLSKDDVNYKMHFRMINEQQVEDITIDFFYRPHTITLLSFTIVSLMYFAFTRDDSVPEDNIWRGILSVIFFFLIISVLAFPNGPFTRPHPALWRMVFGLSVLYFLFLVFLLFLNFEQVKSLMYWLDPNLRYATREADVMEYAVNCHVITWERIISHFDIFAFGHFWGWAMKALLIRSYGLCWTISITWELTELFFMHLLPNFAECWWDQVILDILLCNGGGIWLGMVVCRFLEMRTYHWASFKDIHTTTGKIKRAVLQFTPASWTYVRWFDPKSSFQRVAGVYLFMIIWQLTELNTFFLKHIFVFQASHPLSWGRILFIGGITAPTVRQYYAYLTDTQCKRVGTQCWVFGVIGFLEAIVCIKFGQDLFSKTQILYVVLWLLCVCTHPGKNHMRKQQDSKTVATYMYKPGRGSSPGNESTVTLTLDFRPPEL

SEQ ID NO: 9557 - protein, 293 aa, Artificial Sequence
  Synthetic polypeptide
MEYAVNCHVITWERIISHFDIFAFGHFWGWAMKALLIRSYGLCWTISITWELTELFFMHLLPNFAECWWDQVILDILLCNGGGIWLGMVVCRFLEMRTYHWASFKDIHTTTGKIKRAVLQFTPASWTYVRWFDPKSSFQRVAGVYLFMIIWQLTELNTFFLKHIFVFQASHPLSWGRILFIGGITAPTVRQYYAYLTDTQCKRVGTQCWVFGVIGFLEAIVCIKFGQDLFSKTQILYVVLWLLCVCTHPGKNHMRKQQDSKTVATYMYKPGRGSSPGNESTVTLTLDFRPPEL

SEQ ID NO: 9558 - protein, 236 aa, Artificial Sequence
  Synthetic polypeptide
MHLLPNFAECWWDQVILDILLCNGGGIWLGMVVCRFLEMRTYHWASFKDIHTTTGKIKRAVLQFTPASWTYVRWFDPKSSFQRVAGVYLFMIIWQLTELNTFFLKHIFVFQASHPLSWGRILFIGGITAPTVRQYYAYLTDTQCKRVGTQCWVFGVIGFLEAIVCIKFGQDLFSKTQILYVVLWLLCVCTHPGKNHMRKQQDSKTVATYMYKPGRGSSPGNESTVTLTLDFRPPEL

SEQ ID NO: 9559 - protein, 489 aa, Artificial Sequence
  Synthetic polypeptide
MASCVGSRTLSKDDVNYKMHFRMINEQQVEDITIDFFYRPHTITLLSFTIVSLMYFAFTRDDSVPEDNIWRGILSVIFFFLIISVLAFPNGPFTRPHPALWRMVFGLSVLYFLFLVFLLFLNFEQVKSLMYWLDPNLRYATREADVMEYAVNCHVITWERIISHFDIFAFGHFWGWAMKALLIRSYGLCWTISITWELTELFFMHLLPNFAECWWDQVILDILLCNGGGIWLGMVVCRFLEMRTYHWASFKDIHTTTGKIKRAVLQFTPASWTYVRWFDPKSSFQRVAGVYLFMIIWQLTELNTFFLKHIFVFQASHPLSWGRILFIGGITAPTVRQYYAYLTDTQCKRVGTQCWVFGVIGFLEAIVCIKFGQDLFSKTQILYVVLWLLCVAFTTFLCLYGMIWYAEHYGHREKTYSECEDGTYSPEISWHHRKGTKVHSPRKKPHEETARQQDSGHLHVQTRKRVLTRKRIHCHLDPGLPASRTVRNK

SEQ ID NO: 9560 - protein, 343 aa, Artificial Sequence
  Synthetic polypeptide
MEYAVNCHVITWERIISHFDIFAFGHFWGWAMKALLIRSYGLCWTISITWELTELFFMHLLPNFAECWWDQVILDILLCNGGGIWLGMVVCRFLEMRTYHWASFKDIHTTTGKIKRAVLQFTPASWTYVRWFDPKSSFQRVAGVYLFMIIWQLTELNTFFLKHIFVFQASHPLSWGRILFIGGITAPTVRQYYAYLTDTQCKRVGTQCWVFGVIGFLEAIVCIKFGQDLFSKTQILYVVLWLLCVAFTTFLCLYGMIWYAEHYGHREKTYSECEDGTYSPEISWHHRKGTKVHSPRKKPHEETARQQDSGHLHVQTRKRVLTRKRIHCHLDPGLPASRTVRNK

SEQ ID NO: 9561 - protein, 286 aa, Artificial Sequence
  Synthetic polypeptide
MHLLPNFAECWWDQVILDILLCNGGGIWLGMVVCRFLEMRTYHWASFKDIHTTTGKIKRAVLQFTPASWTYVRWFDPKSSFQRVAGVYLFMIIWQLTELNTFFLKHIFVFQASHPLSWGRILFIGGITAPTVRQYYAYLTDTQCKRVGTQCWVFGVIGFLEAIVCIKFGQDLFSKTQILYVVLWLLCVAFTTFLCLYGMIWYAEHYGHREKTYSECEDGTYSPEISWHHRKGTKVHSPRKKPHEETARQQDSGHLHVQTRKRVLTRKRIHCHLDPGLPASRTVRNK

SEQ ID NO: 9562 - protein, 712 aa, Artificial Sequence
  Synthetic polypeptide
MSNAKERKHAKKMRNQPTNVTLSSGFVADRGVKHHSGGEKPFQAQKQEPHPGTSRQRQTRVNPHSLPDPEVNEQSSSKGMFRKKGGWKAGPEGTSQEIPKYITASTFAQARAAEISAMLKAVTQKSSNSLVFQTLPRHMRRRAMSHNVKRLPRRLQEIAQKEAEKAVHQKKEHSKNKCHKARRCHMNRTLEFNRRQKKNIWLETHIWHAKRFHMVKKWGYCLGERPTVKSHRACYRAMTNRCLLQDLSYYCCLELKGKEEEILKALSGMCNIDTGLTFAAVHCLSGKRQGSLVLYRVNKYPREMLGPVTFIWKSQRTPGDPSESRQLWIWLHPTLKQDILEEIKAACQCVEPIKSAVCIADPLPTPSQEKSQTELPDEKIGKKRKRKDDGENAKPIKKIIGDGTRDPCLPYSWISPTTGIIISDLTMEMNRFRLIGPLSHSILTEAIKAASVHTVGEDTEETPHRWWIETCKKPDSVSLHCRQEAIFELLGGITSPAEIPAGTILGLTVGDPRINLPQKKSKALPNPEKCQDNEKVRQLLLEGVPVECTHSFIWNQDICKSVTENKISDQDLNRMRSELLVPGSQLILGPHESKIPILLIQQPGKVTGEDRLGWGSGWDVLLPKGWGMAFWIPFIYRGVRVGGLKESAVHSQYKRSPNVPGDFPDCPAGMLFAEEQAKNLLEKYKRLPEAQKLSLFIVAFAVSSQCLVHSRS

SEQ ID NO: 9563 - protein, 140 aa, Artificial Sequence
  Synthetic polypeptide
MAAVAPAGPGDSASAALDELSLNFTYGAPGAGNGSLSGDWYRRNQIHLFGVLLAILGNLVISISLNIQKYSHLQLAQQEHPRPYFKSVLWWGGVLLMAVGETGNFAAYGFAPITLIAPLGCVSVTGKPLLKRPSLAFRLR

SEQ ID NO: 9564 - protein, 439 aa, Artificial Sequence
  Synthetic polypeptide
MEQPPAPKSKLKKLSEDSLTKQPEEVFDVLEKLGEGSYGSVFKAIHKESGQVVAIKQVPVESDLQEIIKEISIMQQCDSPYVVKYYGSYFKNTDLWIVMEYCGAGSVSDIIRLRNKTLIEDEIATILKSTLKGLEYLHFMRKIHRDIKAGNILLNTEGHAKLADFGVAGQLTDTMAKRNTVIGTPFWMAPEVIQEIGYNCVADIWSLGITSIEMAEGKPPYADIHPMRAIFMIPTNPPPTFRKPELWSDDFTDFVKKCLVKNPEQRATATQLLQHPFIKNAKPVSILRDLITEAMEIKAKRHEEQQRELEEEEENSDEDELDSHTMVKTSVESVGTMRATSTMSEGAQTMIEHNSTMLESDLGTMVINSEDEEEEDGTMKRNATSPQVQRPSFMDYFDKQDFKNKSHENCNQNMHEPFPMSKNVFPDNWKVPQDGDFDF

SEQ ID NO: 9565 - protein, 467 aa, Artificial Sequence
  Synthetic polypeptide
MLQLMDSGITICLRNGAASVFKKKEWSTQGEENKQDSKLKKLSEDSLTKQPEEVFDVLEKLGEGSYGSVFKAIHKESGQVVAIKQVPVESDLQEIIKEISIMQQCDSPYVVKYYGSYFKNTDLWIVMEYCGAGSVSDIIRLRNKTLIEDEIATILKSTLKGLEYLHFMRKIHRDIKAGNILLNTEGHAKLADFGVAGQLTDTMAKRNTVIGTPFWMAPEVIQEIGYNCVADIWSLGITSIEMAEGKPPYADIHPMRAIFMIPTNPPPTFRKPELWSDDFTDFVKKCLVKNPEQRATATQLLQHPFIKNAKPVSILRDLITEAMEIKAKRHEEQQRELEEEEENSDEDELDSHTMVKTSVESVGTMRATSTMSEGAQTMIEHNSTMLESDLGTMVINSEDEEEEDGTMKRNATSPQVQRPSFMDYFDKQDFKNKSHENCNQNMHEPFPMSKNVFPDNWKVPQDGDFDF

SEQ ID NO: 9566 - protein, 443 aa, Artificial Sequence
  Synthetic polypeptide
MEQPPAPKSKLKKLSEDSLTKQPEEVFDVLEKLGEGSYGSVFKAIHKESGQVVAIKQVPVESDLQEIIKEISIMQQCDSPYVVKYYGSYFKNTDLWIVMEYCGAGSVSDIIRLRNKTLIEDEIATILKSTLKGLEYLHFMRKIHRDIKAGNILLNTEGHAKLADFGVAGQLTDTMAKRNTVIGTPFWMAPEVIQEIGYNCVADIWSLGITSIEMAEGKPPYADIHPMRAIFMIPTNPPPTFRKPELWSDDFTDFVKKCLVKNPEQRATATQLLQHPFIKNAKPVSILRDLITEAMEIKAKRHEEQQRELEEEEENSDEDELDSHTMVKTSVESVGTMRATSTMSEGAQTMIEHNSTMLESDLGTMVINSEDEEEEDGTMKRNATSPQVQRPSFMDYFDKQDFKNKSHENCNQNMHEPFPMSKNVFPDNWKVPQDGDFDFTSKC

SEQ ID NO: 9567 - protein, 471 aa, Artificial Sequence
  Synthetic polypeptide
MLQLMDSGITICLRNGAASVFKKKEWSTQGEENKQDSKLKKLSEDSLTKQPEEVFDVLEKLGEGSYGSVFKAIHKESGQVVAIKQVPVESDLQEIIKEISIMQQCDSPYVVKYYGSYFKNTDLWIVMEYCGAGSVSDIIRLRNKTLIEDEIATILKSTLKGLEYLHFMRKIHRDIKAGNILLNTEGHAKLADFGVAGQLTDTMAKRNTVIGTPFWMAPEVIQEIGYNCVADIWSLGITSIEMAEGKPPYADIHPMRAIFMIPTNPPPTFRKPELWSDDFTDFVKKCLVKNPEQRATATQLLQHPFIKNAKPVSILRDLITEAMEIKAKRHEEQQRELEEEEENSDEDELDSHTMVKTSVESVGTMRATSTMSEGAQTMIEHNSTMLESDLGTMVINSEDEEEEDGTMKRNATSPQVQRPSFMDYFDKQDFKNKSHENCNQNMHEPFPMSKNVFPDNWKVPQDGDFDFTSKC

SEQ ID NO: 9568 - protein, 277 aa, Artificial Sequence
  Synthetic polypeptide
MEQPPAPKSKLKKLSEDSLTKQPEEVFDVLEKLGEGSYGSVFKAIHKESGQVVAIKQVPVESDLQEIIKEISIMQQCDSPYVVKYYGSYFKNTDLWIVMEYCGAGSVSDIIRLRNKTLIEDEIATILKSTLKGLEYLHFMRKIHRDIKAGNILLNTEGHAKLADFGVAGQLTDTMAKRNTVIGTPFWMAPEVIQEIGYNCVADIWSLGITSIEMAEGKPPYADIHPMRAIFMIPTNPPPTFRKPELWSDDFTDFVKKCLVKNPEQRATATQLLQLHF

SEQ ID NO: 9569 - protein, 305 aa, Artificial Sequence
  Synthetic polypeptide
MLQLMDSGITICLRNGAASVFKKKEWSTQGEENKQDSKLKKLSEDSLTKQPEEVFDVLEKLGEGSYGSVFKAIHKESGQVVAIKQVPVESDLQEIIKEISIMQQCDSPYVVKYYGSYFKNTDLWIVMEYCGAGSVSDIIRLRNKTLIEDEIATILKSTLKGLEYLHFMRKIHRDIKAGNILLNTEGHAKLADFGVAGQLTDTMAKRNTVIGTPFWMAPEVIQEIGYNCVADIWSLGITSIEMAEGKPPYADIHPMRAIFMIPTNPPPTFRKPELWSDDFTDFVKKCLVKNPEQRATATQLLQLHF

SEQ ID NO: 9570 - protein, 166 aa, Artificial Sequence
  Synthetic polypeptide
MEQPPAPKSKLKKLSEDSLTKQPEEVFDVLEKLGEGSYGSVFKAIHKESGQVVAIKQVPVESDLQEIIKEISIMQQCDSPYVVKYYGSYFKNTDLWIVMEYCGAGSVSDIIRLRNKTAIFMIPTNPPPTFRKPELWSDDFTDFVKKCLVKNPEQRATATQLLQLHF

SEQ ID NO: 9571 - protein, 43 aa, Artificial Sequence
  Synthetic polypeptide
MLQLMDSGITICLRNGAASVFKKKEWSTQGEENKQDSPLRHWC

SEQ ID NO: 9572 - protein, 229 aa, Artificial Sequence
  Synthetic polypeptide
MLEGDLVSKMLRAVLQSHKNGVALPRLQGEYRSLTGDWIPFKQLGFPTLEAYLRSVPAVVRIETSRSGEITCYAMACTETARIAQLVARQRSSKRKTGRQVNCQMRVKKTMPFFLEGKPKATLRQPGFASNFSVGKKPNPAPLRDKGNSVGVKPDAEMSPYMLHTTLGNEAFKDIPVQRHVTMSTNNRRLTQEDLLRPGVQEQPGQHGETSSLLKKKKKKLPGHGGVHL

SEQ ID NO: 9573 - protein, 155 aa, Artificial Sequence
  Synthetic polypeptide
MACTETARIAQLVARQRSSKRKTGRQVNCQMRVKKTMPFFLEGKPKATLRQPGFASNFSVGKKPNPAPLRDKGNSVGVKPDAEMSPYMLHTTLGNEAFKDIPVQRHVTMSTNNRRLTQEDLLRPGVQEQPGQHGETSSLLKKKKKKLPGHGGVHL

SEQ ID NO: 9574 - protein, 450 aa, Artificial Sequence
  Synthetic polypeptide
MPSSTSPDQGDDLENCILRFSDLDLKDMSLINPSSSLKAELDGSTKKKYSFAKKKAFALFVKTKEVPTKRSFECKEKLWKCCRQLFTDQTSIHRHVATQHADEIYHQTASILKQLAVTLSTSKSLSSADEKNPLKECLPHSHDVSAWLPDISCFNPDELISGQGSEEGEVLLYYCYHDLEDPQWICAWQTALCQHLHLTGKIRIAAEGINGTVGGSKLATRLYVEVMLSFPLFKDDLCKDDFKTSKGGAHCFPELRVGVFEEIVPMGISPKKISYKKPGIHLSPGEFHKEVEKFLSQANQEQSDTILLDCRNFYESKIGRFQGCLAPDIRKFSYFPSYVDKNLELFREKRVLMYCTGGIRCERGSAYLKAKGVCKEVFQLKGGIHKYLEEFPDGFYKGKLFVFDERYALSYNSDVVSGQAQRLMPVIPSLLEAKVGGSLEPWSLRPVWAT

SEQ ID NO: 9575 - protein, 190 aa, Artificial Sequence
  Synthetic polypeptide
MDLCLADSSVSAPAPHRQGIHLSPGEFHKEVEKFLSQANQEQSDTILLDCRNFYESKIGRFQGCLAPDIRKFSYFPSYVDKNLELFREKRVLMYCTGGIRCERGSAYLKAKGVCKEVFQLKGGIHKYLEEFPDGFYKGKLFVFDERYALSYNSDVVSGQAQRLMPVIPSLLEAKVGGSLEPWSLRPVWAT

SEQ ID NO: 9576 - protein, 758 aa, Artificial Sequence
  Synthetic polypeptide
MSRRRHSDENDGGQPHKRRKTSDANETEDHLESLICKVGEKSACSLESNLEGLAGVLEADLPNYKSKILRLLCTVARLLPEKLTIYTTLVGLLNARNYNFGGEFVEAMIRQLKESLKANNYNEAVYLVRFLSDLVNCHVIAAPSMVAMFENFVSVTQEEDVPQVRRDWYVYAFLSSLPWVGKELYEKKDAEMDRIFANTESYLKRRQKTHVPMLQVWTADKPHPQEEYLDCLWAQIQKLKKDRWQERHILRPYLAFDSILCEALQHNLPPFTPPPHTEDSVYPMPRVIFRMFDYTDDPEGPVMPGSHSVERFVIEENLHCIIKSHWKERKTCAAQLVSYPGKNKIPLNYHIVEVIFAELFQLPAPPHIDVMYTTLLIELCKLQPGSLPQVLAQATEMLYMRLDTMNTTCVDRFINWFSHHLSNFQFRWSWEDWSDCLSQDPESPKPKFVREVLEKCMRLSYHQRILDIVPPTFSALCPANPTCIYKYGDESSNSLPGHSVALCLAVAFKSKATNDEIFSILKDVPNPNQDDDDDEGFSFNPLKIEVFVQTLLHLAAKSFSHSFSALAKFHEVFKTLAESDEGKLHVLRVMFEVWRNHPQMIAVLVDKMIRTQIVDCAAVANWIFSSELSRDFTRLFVWEILHSTIRKMNKHVLKIQKELEEAKEKLARQHKRRSDDDDRSSDRKDGVLEEQIERLQEKVESAQSEQKNLFLVIFQRFIMILTEHLVRCETDGTSVLTPWYKNCIERLQQIFLQVFFHP

SEQ ID NO: 9577 - protein, 12 aa, Artificial Sequence
  Synthetic polypeptide
IVCLGNFALYNS

SEQ ID NO: 9578 - protein, 95 aa, Artificial Sequence
  Synthetic polypeptide
MAAADGALPEAAALEQPAELPASVRASIERKRQRALMLRQARLAARPYSATAAAATGGMANVKAAPKIIDTGGGFILEEEEEEEQKIGKVVHQPG

SEQ ID NO: 9579 - protein, 159 aa, Artificial Sequence
  Synthetic polypeptide
MDMKRRIHLELRNRTPAAVRELVLDNCKSNDGKIEGLTAEFVNLEFLSLINVGLISVSNLPKLPKLKKLELSENRIFGGLDMLAEKLPNLTHLNLSGNKLKDISTLEPLMERLPWLDGFLVSLLESERSLLDVSLCTVSSIEKCWLADKCHLNLTFCRM

SEQ ID NO: 9580 - protein, 137 aa, Artificial Sequence
  Synthetic polypeptide
MPLELELCPGRWVGGQHPCFIIAEIGQNHQGDLDVAKRMIRMAKECGADCAKFQKSELEFKFNRKALERPYTSKHSWGKTYGEHKRHLEFSHDQYRELQRYAEEVGIFFTASGMDECLLPPTMILRPAQPCETVSPI

SEQ ID NO: 9581 - protein, 78 aa, Artificial Sequence
  Synthetic polypeptide
MSWHPQYRSSKFRHVFGKPASKENCYDSVPITRSVHDNHFCAVNPHFIAVVTECAGGGAFLVIPLHQSGTPPRGLRHT

SEQ ID NO: 9582 - protein, 35 aa, Artificial Sequence
  Synthetic polypeptide
MPGPTPSGTNVGSSGRSPSKAVAARAAGSTVRQRN

SEQ ID NO: 9583 - protein, 30 aa, Artificial Sequence
  Synthetic polypeptide
MWRFYTEDSPGLKVSFPEQALFACCHPCKT

SEQ ID NO: 9584 - protein, 84 aa, Artificial Sequence
  Synthetic polypeptide
MPGPTPSGTNVGSSGRSPSKAVAARAAGSTVRQRKNASCGTRSAGRTTSAGTGGMWRFYTEDSPGLKVSFPEQALFACCHPCKT

SEQ ID NO: 9585 - protein, 1115 aa, Artificial Sequence
  Synthetic polypeptide
MHIKSIILEGFKSYAQRTEVNGFDPLFNAITGLNGSGKSNILDSICFLLGISNLSQVRASNLQDLVYKNGQAGITKASVSITFDNSDKKQSPLGFEVHDEITVTRQVVIGGRNKYLINGVNANNTRVQDLFCSVGLNVNNPHFLIMQGRITKVLNMKPPEILSMIEEAAGTRMYEYKKIAAQKTIEKKEAKLKEIKTILEEEITPTIQKLKEERSSYLEYQKVMREIEHLSRLYIAYQFLLAEDTKVRSAEELKEMQDKVIKLQEELSENDKKIKALNHEIEELEKRKDKETGGILRSLEDALAEAQRVNTKSQSAFDLKKKNLACEESKRKELEKNMVEDSKTLAAKEKEVKKITDGLHALQEASNKDAEALAAAQQHFNAVSAGLSSNEDGAEATLAGQMMACKNDISKAQTEAKQAQMKLKHAQQELKNKQAEVKKMDSGYRKDQEALEAVKRLKEKLEAEMKKLNYEENKEESLLEKRRQLSRDIGRLKETYEALLARFPNLRFAYKDPEKNWNRNCVKGLVASLISVKDTSATTALELVAGERLYNVVVDTEVTGKKLLERGELKRRYTIIPLNKISARCIAPETLRVAQNLVGPDNVHVALSLVEYKPELQKAMEFVFGTTFVCDNMDNAKKVAFDKRIMTRTVTLGGDVFDPHGTLSGGARSQAASILTKFQELKDVQDELRIKENELRALEEELAGLKNTAEKYRQLKQQWEMKTEEADLLQTKLQQSSYHKQQEELDALKKTIEESEETLKNTKEIQRKAEEKYEVLENKMKNAEAERERELKDAQKKLDCAKTKADASSKKMKEKQQEVEAITLELEELKREHTSYKQQLEAVNEAIKSYESQIEVMAAEVAKNKESVNKAQEEVTKQKEVITAQDTVIKAKYAEVAKHKEQNNDSQLKIKELDHNISKHKREAEDGAAKVSKMLKDYDWINAERHLFGQPNSAYDFKTNNPKEAGQRLQKLQEMKEKLGRNVNMRAMNVLTEAEERYNDLMKKKRIVENDKSKILTTIEDLDQKKNQALNIAWQKVNKDFGSIFSTLLPGANAMLAPPEGQTVLDGLEFKVALGNTWKENLTELSGGQRQYEYFSDKNSRTILQVKGSSQAKGK

SEQ ID NO: 9586 - protein, 182 aa, Artificial Sequence
  Synthetic polypeptide
MLKDYDWINAERHLFGQPNSAYDFKTNNPKEAGQRLQKLQEMKEKLGRNVNMRAMNVLTEAEERYNDLMKKKRIVENDKSKILTTIEDLDQKKNQALNIAWQKVNKDFGSIFSTLLPGANAMLAPPEGQTVLDGLEFKVALGNTWKENLTELSGGQRQYEYFSDKNSRTILQVKGSSQAKGK

SEQ ID NO: 9587 - protein, 79 aa, Artificial Sequence
  Synthetic polypeptide
MSRINKNVVLALLTLTSSAFLLFQLYYYKHYLSTKNGAGLSKSKGSRIGFDSTQWNQLDTFPRSVNDCIDNNLEDVFRR

SEQ ID NO: 9588 - protein, 1343 aa, Artificial Sequence
  Synthetic polypeptide
MRNLKLFRTLEFRDIQGPGNPQCFSLRTEQGTVLIGSEHGLIEVDPVSREVKNEVSLVAEGFLPEDGSGRIVGVQDLLDQESVCVATASGDVILCSLSTQQLECVGSVASGISVMSWSPDQELVLLATGQQTLIMMTKDFEPILEQQIHQDDFGESKFITVGWGRKETQFHGSEGRQAAFQMQMHESALPWDDHRPQVTWRGDGQFFAVSVVCPETGARKVRVWNREFALQSTSEPVAGLGPALAWKPSGSLIASTQDKPNQQDIVFFEKNGLLHGHFTLPFLKDEVKVNDLLWNADSSVLAVWLEDLQREESSIPKTCVQLWTVGNYHWYLKQSLSFSTCGKSKIVSLMWDPVTPYRLHVLCQGWHYLAYDWHWTTDRSVGDNSSDLSNVAVIDGNRVLVTVFRQTVVPPPMCTYQLLFPHPVNQVTFLAHPQKSNDLAVLDASNQISVYKCGDCPSADPTVKLGAVGGSGFKVCLRTPHLEKRYKIQFENNEDQDVNPLKLGLLTWIEEDVFLAVSHSEFSPRSVIHHLTAASSEMDEEHGQLNVSSSAAVDGVIISLCCNSKTKSVVLQLADGQIFKYLWESPSLAIKPWKNSGGFPVRFPYPCTQTELAMIGEEECVLGLTDRCRFFINDIEVASNITSFAVYDEFLLLTTHSHTCQCFCLRDASFKTLQAGLSSNHVSHGEVLRKVERGSRIVTVVPQDTKLVLQMPRGNLEVVHHRALVLAQIRKWLDKLMFKEAFECMRKLRINLNLIYDHNPKVFLGNVETFIKQIDSVNHINLFFTELKEEDVTKTMYPAPVTSSVYLSRDPDGNKIDLVCDAMRAVMESINPHKYCLSILTSHVKKTTPELEIVLQKVHELQGNAPSDPDAVSAEEALKYLLHLVDVNELYDHSLGTYDFDLVLMVAEKSQKDPKEYLPFLNTLKKMETNYQRFTIDKYLKRYEKAIGHLSKCGPEYFPECLNLIKDKNLYNEALKLYSPSSQQYQDISIAYGEHLMQEHMYEPAGLMFARCGAHEKALSAFLTCGNWKQALCVAAQLNFTKDQLVGLGRTLAGKLVEQRKHIDAAMVLEECAQDYEEAVLLLLEGAAWEEALRLVYKYNRLDIIETNVKPSILEAQKNYMAFLDSQTATFSRHKKRLLVVRELKEQAQQAGLDDEVPHGQESDLFSETSSVVSGSEMSGKYSHSNSRISARSSKNRRKAERKKHSLKEGSPLEDLALLEALSEVVQNTENLKDEVYHILKVLFLFEFDEQGRELQKAFEDTLQLMERSLPEIWTLTYQQNSATPVLGPNSTANSIMASYQQQKTSVPVLARPTPPLPPLLQPTQRGDDKDEDLYDDPLPFNE

SEQ ID NO: 9589 - protein, 994 aa, Artificial Sequence
  Synthetic polypeptide
MWDPVTPYRLHVLCQGWHYLAYDWHWTTDRSVGDNSSDLSNVAVIDGNRVLVTVFRQTVVPPPMCTYQLLFPHPVNQVTFLAHPQKSNDLAVLDASNQISVYKCGDCPSADPTVKLGAVGGSGFKVCLRTPHLEKRYKIQFENNEDQDVNPLKLGLLTWIEEDVFLAVSHSEFSPRSVIHHLTAASSEMDEEHGQLNVSSSAAVDGVIISLCCNSKTKSVVLQLADGQIFKYLWESPSLAIKPWKNSGGFPVRFPYPCTQTELAMIGEEECVLGLTDRCRFFINDIEVASNITSFAVYDEFLLLTTHSHTCQCFCLRDASFKTLQAGLSSNHVSHGEVLRKVERGSRIVTVVPQDTKLVLQMPRGNLEVVHHRALVLAQIRKWLDKLMFKEAFECMRKLRINLNLIYDHNPKVFLGNVETFIKQIDSVNHINLFFTELKEEDVTKTMYPAPVTSSVYLSRDPDGNKIDLVCDAMRAVMESINPHKYCLSILTSHVKKTTPELEIVLQKVHELQGNAPSDPDAVSAEEALKYLLHLVDVNELYDHSLGTYDFDLVLMVAEKSQKDPKEYLPFLNTLKKMETNYQRFTIDKYLKRYEKAIGHLSKCGPEYFPECLNLIKDKNLYNEALKLYSPSSQQYQDISIAYGEHLMQEHMYEPAGLMFARCGAHEKALSAFLTCGNWKQALCVAAQLNFTKDQLVGLGRTLAGKLVEQRKHIDAAMVLEECAQDYEEAVLLLLEGAAWEEALRLVYKYNRLDIIETNVKPSILEAQKNYMAFLDSQTATFSRHKKRLLVVRELKEQAQQAGLDDEVPHGQESDLFSETSSVVSGSEMSGKYSHSNSRISARSSKNRRKAERKKHSLKEGSPLEDLALLEALSEVVQNTENLKDEVYHILKVLFLFEFDEQGRELQKAFEDTLQLMERSLPEIWTLTYQQNSATPVLGPNSTANSIMASYQQQKTSVPVLARPTPPLPPLLQPTQRGDDKDEDLYDDPLPFNE

SEQ ID NO: 9590 - protein, 31 aa, Artificial Sequence
  Synthetic polypeptide
MEEGAQRSGALGAPHQVSSLKDRINQLSCSQ

SEQ ID NO: 9591 - protein, 925 aa, Artificial Sequence
  Synthetic polypeptide
MSETLGDELEILRGKMMQRRPRSAEVKYFYFFKILLRLRLAILKYLFIDDKGILFVSSRKHLPTLPTLLSRLKLFLVKDPLLDFKGQIFTEANFSRECFSLQETLEAFVKEDFCMDKVNFCQEKLEDTICLNEPSSFLIEYEFLIPPSLKPEIDIPSLSELKELLNPVPEIINYVDEKEKLFERDLTNKHGIEDIGDIKFSSTEILTIQSQSEPEECSKPGELEMPLTPLFLTCQHSSVNSLRTELQTFPLSPVCKINLLTAEESANEYYMMWQLERCRSPLNPFLLTVPRIQEPHSQYSVTDLKKIFSVKEESLVINLEKAEWWKQAGLNLKMMETLEHLNTYLCHDNLSSNDTKIEIFLPTKVLQLESCLEHKSHSSPIALIDEKSTNAHLSLPQKSPSLAKEVPDLCFSDDYFSDKGAAKEEKPKNDQEPVNRIIQKKENNDHFELDCTGPSIKSPSSSIIKKASFEHGKKQENDLDLLSDFIMLRNKYKTCTSKTEVTNSDEKHDKEACSLTLQEESPIVHINKTLEEINQERGTDSVIEIQASDSQCQAFCLLEAAASPILKNLVSLCTLPTANWKFATVIFDQTRFLLKEQEKVVSDAVRQGYLSKAKDIYNSILGPYLGDIWRQLEIVQFIRGKKPETNYKIQELQCQILSWMQSQQQIKVLIIIRMDSDGEKHFLIKILNKIEGLTLTVLHSNERKDFLESEGVLRGTSSCVVVHNQYIGADFPWSNFSFVVEYNYVEDSCWTKHCKELNIPYMAFKVILPDTVLERSTLLDRFGGFLLEIQIPYVFFASEGLLNTPDILQLLESNYNISLVERGCSESLKLFGSSECYVVVTIDEHTAIILQDLEELNYEKASDNIIMRLMALSLQYRYCWIILYTKETLNSEYLLTEKTLHHLALIYAALVSFGLNSEELDVKKN

SEQ ID NO: 9592 - protein, 960 aa, Artificial Sequence
  Synthetic polypeptide
MSETLGDELEILRGKMMQRRPRSAEVKYFYFFKILLRLRLAILKYLFIDDKGILFVSSRKHLPTLPTLLSRLKLFLVKDPLLDFKGQIFTEANFSRECFSLQETLEAFVKEDFCMDKVNFCQEKLEDTICLNEPSSFLIEYEFLIPPSLKPEIDIPSLSELKELLNPVPEIINYVDEKEKLFERDLTNKHGIEDIGDIKFSSTEILTIQSQSEPEECSKPGELEMPLTPLFLTCQHSSVNSLRTELQTFPLSPVCKINLLTAEESANEYYMMWQLERCRSPLNPFLLTVPRIQEPHSQYSVTDLKKIFSVKEESLVINLEKAEWWKQAGLNLKMMETLEHLNTYLCHDNLSSNDTKIEIFLPTKVLQLESCLEHKSHSSPIALIDEKSTNAHLSLPQKSPSLAKEVPDLCFSDDYFSDKGAAKEEKPKNDQEPVNRIIQKKENNDHFELDCTGPSIKSPSSSIIKKASFEHGKKQENDLDLLSDFIMLRNKYKTCTSKTEVTNSDEKHDKEACSLTLQEESPIVHINKTLEEINQERGTDSVIEIQASDSQCQAFCLLEAAASPILKNLVSLCTLPTANWKFATVIFDQTRFLLKEQEKVVSDAVRQGTIDEREMTFKHAALLHLLVTIRDVLLTCSLDTALGYLSKAKDIYNSILGPYLGDIWRQLEIVQFIRGKKPETNYKIQELQCQILSWMQSQQQIKVLIIIRMDSDGEKHFLIKILNKIEGLTLTVLHSNERKDFLESEGVLRGTSSCVVVHNQYIGADFPWSNFSFVVEYNYVEDSCWTKHCKELNIPYMAFKVILPDTVLERSTLLDRFGGFLLEIQIPYVFFASEGLLNTPDILQLLESNYNISLVERGCSESLKLFGSSECYVVVTIDEHTAIILQDLEELNYEKASDNIIMRLMALSLQYRYCWIILYTKETLNSEYLLTEKTLHHLALIYAALVSFGLNSEELDVKKN

SEQ ID NO: 9593 - protein, 999 aa, Artificial Sequence
  Synthetic polypeptide
MTDTSVLDQWKASFFVEDFLEKKTITRMVTQINCEFEEVVPSSNPDSQIEVEEVSLYTHMDYNEVFTPVSCLEKCSALQNQNQDLFIDDKGILFVSSRKHLPTLPTLLSRLKLFLVKDPLLDFKGQIFTEANFSRECFSLQETLEAFVKEDFCMDKVNFCQEKLEDTICLNEPSSFLIEYEFLIPPSLKPEIDIPSLSELKELLNPVPEIINYVDEKEKLFERDLTNKHGIEDIGDIKFSSTEILTIQSQSEPEECSKPGELEMPLTPLFLTCQHSSVNSLRTELQTFPLSPVCKINLLTAEESANEYYMMWQLERCRSPLNPFLLTVPRIQEPHSQYSVTDLKKIFSVKEESLVINLEKAEWWKQAGLNLKMMETLEHLNTYLCHDNLSSNDTKIEIFLPTKVLQLESCLEHKSHSSPIALIDEKSTNAHLSLPQKSPSLAKEVPDLCFSDDYFSDKGAAKEEKPKNDQEPVNRIIQKKENNDHFELDCTGPSIKSPSSSIIKKASFEHGKKQENDLDLLSDFIMLRNKYKTCTSKTEVTNSDEKHDKEACSLTLQEESPIVHINKTLEEINQERGTDSVIEIQASDSQCQAFCLLEAAASPILKNLVSLCTLPTANWKFATVIFDQTRFLLKEQEKVVSDAVRQGTIDEREMTFKHAALLHLLVTIRDVLLTCSLDTALGYLSKAKDIYNSILGPYLGDIWRQLEIVQFIRGKKPETNYKIQELQCQILSWMQSQQQIKVLIIIRMDSDGEKHFLIKILNKIEGLTLTVLHSNERKDFLESEGVLRGTSSCVVVHNQYIGADFPWSNFSFVVEYNYVEDSCWTKHCKELNIPYMAFKVILPDTVLERSTLLDRFGGFLLEIQIPYVFFASEGLLNTPDILQLLESNYNISLVERGCSESLKLFGSSECYVVVTIDEHTAIILQDLEELNYEKASDNIIMRLMALSLQYRYCWIILYTKETLNSEYLLTEKTLHHLALIYAALVSFGLNSEELDVKKN

SEQ ID NO: 9594 - protein, 938 aa, Artificial Sequence
  Synthetic polypeptide
MSETLGDELEILRGKMMQRRPRSAEVKYFYFFKILLRLRLAILKYLFIDDKGILFVSSRKHLPTLPTLLSRLKLFLVKDPLLDFKGQIFTEANFSRECFSLQETLEAFVKEDFCMDKVNFCQEKLEDTICLNEPSSFLIEYEFLIPPSLKPEIDIPSLSELKELLNPVPEIINYVDEKEKLFERDLTNKHGIEDIGDIKFSSTEILTIQSQSEPEECSKPGELEMPLTPLFLTCQHSSVNSLRTELQTFPLSPVCKINLLTAEESANEYYMMWQLERCRSPLNPFLLTVPRIQEPHSQYSVTDLKKIFSVKEESLVINLEKAEWWKQAGLNLKMMETLEHLNTYLCHDNLSSNDTKIEIFLPTKVLQLESCLEHKSHSSPIALIDEKSTNAHLSLPQKSPSLAKEVPDLCFSDDYFSDKGAAKEEKPKNDQEPVNRIIQKKENNDHFELDCTGPSIKSPSSSIIKKASFEHGKKQENDLDLLSDFIMLRNKYKTCTSKTEVTNSDEKHDKEACSLTLQEESPIVHINKTLEEINQERGTDSVIEIQASDSQCQAFCLLEAAASPILKNLVSLCTLPTANWKFATVIFDQTRFLLKEQEKVVSDAVRQGYLSKAKDIYNSILGPYLGDIWRQLEIVQFIRGKKPETNYKIQELQCQILSWMQSQQQIKVLIIIRMDSDGEKHFLIKILNKIEGLTLTVLHSNERKDFLESEGVLRGTSSCVVVHNQYIGADFPWSNFSFVVEYNYVEDSCWTKHCKELNIPYMAFKVILPDTVLERSTLLDRFGGFLLEIQIPYVFFASEGLLNTPDILQLLESNYNISLVERGCSESLKLFGSSECYVVVTIDEHTAIILQDLEELNYEKASDNIIMRLMALSLQYRYCWIILYTKETLNSEYLLTEKTLHHLALIYAALVSFGLNSEELDVKTPITFPKYSCEYFTH

SEQ ID NO: 9595 - protein, 973 aa, Artificial Sequence
  Synthetic polypeptide
MSETLGDELEILRGKMMQRRPRSAEVKYFYFFKILLRLRLAILKYLFIDDKGILFVSSRKHLPTLPTLLSRLKLFLVKDPLLDFKGQIFTEANFSRECFSLQETLEAFVKEDFCMDKVNFCQEKLEDTICLNEPSSFLIEYEFLIPPSLKPEIDIPSLSELKELLNPVPEIINYVDEKEKLFERDLTNKHGIEDIGDIKFSSTEILTIQSQSEPEECSKPGELEMPLTPLFLTCQHSSVNSLRTELQTFPLSPVCKINLLTAEESANEYYMMWQLERCRSPLNPFLLTVPRIQEPHSQYSVTDLKKIFSVKEESLVINLEKAEWWKQAGLNLKMMETLEHLNTYLCHDNLSSNDTKIEIFLPTKVLQLESCLEHKSHSSPIALIDEKSTNAHLSLPQKSPSLAKEVPDLCFSDDYFSDKGAAKEEKPKNDQEPVNRIIQKKENNDHFELDCTGPSIKSPSSSIIKKASFEHGKKQENDLDLLSDFIMLRNKYKTCTSKTEVTNSDEKHDKEACSLTLQEESPIVHINKTLEEINQERGTDSVIEIQASDSQCQAFCLLEAAASPILKNLVSLCTLPTANWKFATVIFDQTRFLLKEQEKVVSDAVRQGTIDEREMTFKHAALLHLLVTIRDVLLTCSLDTALGYLSKAKDIYNSILGPYLGDIWRQLEIVQFIRGKKPETNYKIQELQCQILSWMQSQQQIKVLIIIRMDSDGEKHFLIKILNKIEGLTLTVLHSNERKDFLESEGVLRGTSSCVVVHNQYIGADFPWSNFSFVVEYNYVEDSCWTKHCKELNIPYMAFKVILPDTVLERSTLLDRFGGFLLEIQIPYVFFASEGLLNTPDILQLLESNYNISLVERGCSESLKLFGSSECYVVVTIDEHTAIILQDLEELNYEKASDNIIMRLMALSLQYRYCWIILYTKETLNSEYLLTEKTLHHLALIYAALVSFGLNSEELDVKTPITFPKYSCEYFTH

SEQ ID NO: 9596 - protein, 1012 aa, Artificial Sequence
  Synthetic polypeptide
MTDTSVLDQWKASFFVEDFLEKKTITRMVTQINCEFEEVVPSSNPDSQIEVEEVSLYTHMDYNEVFTPVSCLEKCSALQNQNQDLFIDDKGILFVSSRKHLPTLPTLLSRLKLFLVKDPLLDFKGQIFTEANFSRECFSLQETLEAFVKEDFCMDKVNFCQEKLEDTICLNEPSSFLIEYEFLIPPSLKPEIDIPSLSELKELLNPVPEIINYVDEKEKLFERDLTNKHGIEDIGDIKFSSTEILTIQSQSEPEECSKPGELEMPLTPLFLTCQHSSVNSLRTELQTFPLSPVCKINLLTAEESANEYYMMWQLERCRSPLNPFLLTVPRIQEPHSQYSVTDLKKIFSVKEESLVINLEKAEWWKQAGLNLKMMETLEHLNTYLCHDNLSSNDTKIEIFLPTKVLQLESCLEHKSHSSPIALIDEKSTNAHLSLPQKSPSLAKEVPDLCFSDDYFSDKGAAKEEKPKNDQEPVNRIIQKKENNDHFELDCTGPSIKSPSSSIIKKASFEHGKKQENDLDLLSDFIMLRNKYKTCTSKTEVTNSDEKHDKEACSLTLQEESPIVHINKTLEEINQERGTDSVIEIQASDSQCQAFCLLEAAASPILKNLVSLCTLPTANWKFATVIFDQTRFLLKEQEKVVSDAVRQGTIDEREMTFKHAALLHLLVTIRDVLLTCSLDTALGYLSKAKDIYNSILGPYLGDIWRQLEIVQFIRGKKPETNYKIQELQCQILSWMQSQQQIKVLIIIRMDSDGEKHFLIKILNKIEGLTLTVLHSNERKDFLESEGVLRGTSSCVVVHNQYIGADFPWSNFSFVVEYNYVEDSCWTKHCKELNIPYMAFKVILPDTVLERSTLLDRFGGFLLEIQIPYVFFASEGLLNTPDILQLLESNYNISLVERGCSESLKLFGSSECYVVVTIDEHTAIILQDLEELNYEKASDNIIMRLMALSLQYRYCWIILYTKETLNSEYLLTEKTLHHLALIYAALVSFGLNSEELDVKTPITFPKYSCEYFTH

SEQ ID NO: 9597 - protein, 138 aa, Artificial Sequence
  Synthetic polypeptide
MLPNTGRLAGCTVFITGASRGIGKAIALKAAKDGANIVIAAKTAQPHPKLLGTIYTAAEEIEAVGGKALPCIVDVRDEQQISAAVEKAIKKFGGIDILVNNASAISLTNTLDTPTKRLDLMMNVNTRGTYLACGGSRL

SEQ ID NO: 9598 - protein, 18 aa, Artificial Sequence
  Synthetic polypeptide
MMNVNTRGTYLACGGSRL

SEQ ID NO: 9599 - protein, 37 aa, Artificial Sequence
  Synthetic polypeptide
RPPPTQRGSPPGSRRRRTRPRPARGLSPTCRCLCVCP

SEQ ID NO: 9600 - protein, 37 aa, Artificial Sequence; identical to SEQ ID NO: 9599
  Synthetic polypeptide

SEQ ID NO: 9601 - protein, 852 aa, Artificial Sequence
  Synthetic polypeptide
MGAGSARGARGTAAAAAARGGGFLFSWILVSFACHLASTQGAPEDVDILQRLGLSWTKAGSPAPPGVIPFQSGFIFTQRARLQAPTGTVIPAALGTELALVLSLCSHRVNHAFLFAVRSQKRKLQLGLQFLPGKTVVHLGSRRSVAFDLDMHDGRWHHLALELRGRTVTLVTACGQRRVPVLLPFHRDPALDPGGSFLFGKMNPHAVQFEGALCQFSIYPVTQVAHNYCTHLRKQCGQADTYQSPLGPLFSQDSGRPFTFQSDLALLGLENLTTATPALGSLPAGRGPRGTVAPATPTKPQRTSPTNPHQHMAVGGPAQTPLLPAKLSASNALDPMLPASVGGSTRTPRPAAAQPSQKITATKIPKSLPTKPSAPSTSIVPIKSPHPTQKTAPSSFTKSALPTQKQVPPTSRPVPARVSRPAEKPIQRNPGMPRPPPPSTRPLPPTTSSSKKPIPTLARTEAKITSHASKPASARTSTHKPPPFTALSSSPAPTPGSTRSTRPPATMVPPTSGTSTPRTAPAVPTPGSAPTGSKKPIGSEASKKAGPKSSPRKPVPLRPGKAARDVPLSDLTTRPSPRQPQPSQQTTPALVLAPAQFLSSSPRPTSSGYSIFHLAGSTPFPLLMGPPGPKGDCGLPGPPGLPGLPGIPGARGPRGPPGPYGNPGLPGPPGAKGQKGDPGLSPGKAHDGAKGDMGLPGLSGNPGPPGRKGHKGYPGPAGHPGEQGQPGPEGSPGAKGYPGRQGLPGPVGDPGPKGSRGYIGLPGLFGLPGSDGERGLPGVPGKRGKMGMPGFPGVFGERGPPGLDGNPGELGLPGPPGVPGLITLEPDHLGSSHRPTTSWLCDLGQATYLLWA

SEQ ID NO: 9602 - protein, 99 aa, Artificial Sequence
  Synthetic polypeptide
GRSTITEDHSHQNPQKPPYQAFGPFYFNCAHQKPPSYPENSSIFIYKVSPTHSEASATYFPSSSCQSLPSRREAHPEEPGNAQAPTAQHPAPTSYHQLL

SEQ ID NO: 9603 - protein, 1175 aa, Artificial Sequence
  Synthetic polypeptide
MGAGSARGARGTAAAAAARGGGFLFSWILVSFACHLASTQGAPEDVDILQRLGLSWTKAGSPAPPGVIPFQSGFIFTQRARLQAPTGTVIPAALGTELALVLSLCSHRVNHAFLFAVRSQKRKLQLGLQFLPGKTVVHLGSRRSVAFDLDMHDGRWHHLALELRGRTVTLVTACGQRRVPVLLPFHRDPALDPGGSFLFGKMNPHAVQFEGALCQFSIYPVTQVAHNYCTHLRKQCGQADTYQSPLGPLFSQDSGRPFTFQSDLALLGLENLTTATPALGSLPAGRGPRGTVAPATPTKPQRTSPTNPHQHMAVGGPAQTPLLPAKLSASNALDPMLPASVGGSTRTPRPAAAQPSQKITATKIPKSLPTKPSAPSTSIVPIKSPHPTQKTAPSSFTKSALPTQKQVPPTSRPVPARVSRPAEKPIQRNPGMPRPPPPSTRPLPPTTSSSKKPIPTLARTEAKITSHASKPASARTSTHKPPPFTALSSSPAPTPGSTRSTRPPATMVPPTSGTSTPRTAPAVPTPGSAPTGSKKPIGSEASKKAGPKSSPRKPVPLRPGKAARDVPLSDLTTRPSPRQPQPSQQTTPALVLAPAQFLSSSPRPTSSGYSIFHLAGSTPFPLLMGPPGPKGDCGLPGPPGLPGLPGIPGARGPRGPPGPYGNPGLPGPPGAKGQKGDPGLSPGKAHDGAKGDMGLPGLSGNPGPPGRKGHKGYPGPAGHPGEQGQPGPEGSPGAKGYPGRQGLPGPVGDPGPKGSRGYIGLPGLFGLPGSDGERGLPGVPGKRGKMGMPGFPGVFGERGPPGLDGNPGELGLPGPPGVPGLIGDLGVLGPIGYPGPKGMKGLMGSVGEPGLKGDKGEQGVPGVSGDPGFQGDKGSQGLPGFPGARGKPGPLGKVGDKGSIGFPGPPGPEGFPGDIGPPGDNGPEGMKGKPGARGLPGPRGQLGPEGDEGPMGPPGAPGLEGQPGRKGFPGRPGLDGVKGEPGDPGRPGPVGEQGFMGFIGLVGEPGIVGEKGDRGMMGPPGVPGPKGSMGHPGMPGGMGTPGEPGPQGPPGSRGPPGMRGAKGRRGPRGPDGPAGEQGSRGLKGPPGPQGRPGRPGQQGVAGERGHLGSRGFPGIPGPSGPPGTKGLPGEPGPQGPQGPIGPPGEMGPKGPPGAVGEPGLPGEAGMKGCLESQIC

SEQ ID NO: 9604 - protein, 1170 aa, Artificial Sequence
  Synthetic polypeptide
MGAGSARGARGTAAAAAARGGGFLFSWILVSFACHLASTQGAPEDVDILQRLGLSWTKAGSPAPPGVIPFQSGFIFTQRARLQAPTGTVIPAALGTELALVLSLCSHRVNHAFLFAVRSQKRKLQLGLQFLPGKTVVHLGSRRSVAFDLDMHDGRWHHLALELRGRTVTLVTACGQRRVPVLLPFHRDPALDPGGSFLFGKMNPHAVQFEGALCQFSIYPVTQVAHNYCTHLRKQCGQADTYQSPLGPLFSQDSGRPFTFQSDLALLGLENLTTATPALGSLPAGRGPRGTVAPATPTKPQRTSPTNPHQHMAVGGPAQTPLLPAKLSASNALDPMLPASVGGSTRTPRPAAAQPSQKITATKIPKSLPTKPSAPSTSIVPIKSPHPTQKTAPSSFTKSALPTQKQVPPTSRPVPARVSRPAEKPIQRNPGMPRPPPPSTRPLPPTTSSSKKPIPTLARTEAKITSHASKPASARTSTHKPPPFTALSSSPAPTPGSTRSTRPPATMVPPTSGTSTPRTAPAVPTPGSAPTGSKKPIGSEASKKAGPKSSPRKPVPLRPGKAARDVPLSDLTTRPSPRQPQPSQQTTPALVLAPAQFLSSSPRPTSSGYSIFHLAGSTPFPLLMGPPGPKGDCGLPGPPGLPGLPGIPGARGPRGPPGPYGNPGLPGPPGAKGQKGDPGLSPGKAHDGAKGDMGLPGLSGNPGPPGRKGHKGYPGPAGHPGEQGQPGPEGSPGAKGYPGRQGLPGPVGDPGPKGSRGYIGLPGLFGLPGSDGERGLPGVPGKRGKMGMPGFPGVFGERGPPGLDGNPGELGLPGPPGVPGLIGDLGVLGPIGYPGPKGMKGLMGSVGEPGLKGDKGEQGVPGVSGDPGFQGDKGSQGLPGFPGARGKPGPLGKVGDKGSIGFPGPPGPEGFPGDIGPPGDNGPEGMKGKPGARGLPGPRGQLGPEGDEGPMGPPGAPGLEGQPGRKGFPGRPGLDGVKGEPGDPGRPGPVGEQGFMGFIGLVGEPGIVGEKGDRGMMGPPGVPGPKGSMGHPGMPGGMGTPGEPGPQGPPGSRGPPGMRGAKGRRGPRGPDGPAGEQGSRGLKGPPGPQGRPGRPGQQGVAGERGHLGSRGFPGIPGPSGPPGTKGLPGEPGPQGPQGPIGPPGEMGPKGPPGAVGEPGLPGEAGMKDDG

SEQ ID NO: 9605 - protein, 327 aa, Artificial Sequence
  Synthetic polypeptide
MNAPLDGLSVSSSSTGSLGSAAGAGGGGGAGLRLLSANVRQLHQALTALLSEAEREQFTHCLNAYHARRNVFDLVRTLRVLLDSPVKRRLLPMLRLVIPRSDQLLFDQYTAEGLYLPATTPYRQPAWGGPDSAGPGEVRLVSLRRAKAHEGLGFSIRGGSEHGVGIYVSLVEPGSLAEKEGLRVGDQILRVNDKSLARVTHAEAVKALKGSKKLVLSVYSAGRIPGGYVTNHIYTWVDPQGRSISPPSGLPQPHGGALRQQEGDRRSTLHLLQGGDEKKVNLVLGDGRSLGLTIRGGAEYGLGIYITGVDPGSEAEGSGLKQPKGTD

SEQ ID NO: 9606 - protein, 252 aa, Artificial Sequence
  Synthetic polypeptide
MERKDFETWLDNISVTFLSLTDLQKNETLDHLISLSGAVQLRHLSNNLETLLKRDFLKLLPLELSFYLLKWLDPQTLLTCCLVSKQWNKVISACTEVWQTACKNLGWQIDDSVQDALHWKKVYLKAILRMKQLEDHEAFETSSLIGHSARVYALYYKDGLLCTGSDDLSAKLWDVSTGQCVYGIQTHTCAAVKFDEQKLVTGSFDNTVACWEWSSGARTQHFRGHTGAGPISNIASSLKSSLIPLGRVSHSP

SEQ ID NO: 9607 - protein, 123 aa, Artificial Sequence
  Synthetic polypeptide
MKQLEDHEAFETSSLIGHSARVYALYYKDGLLCTGSDDLSAKLWDVSTGQCVYGIQTHTCAAVKFDEQKLVTGSFDNTVACWEWSSGARTQHFRGHTGAGPISNIASSLKSSLIPLGRVSHSP

SEQ ID NO: 9608 - protein, 179 aa, Artificial Sequence
  Synthetic polypeptide
MKQWKARLGCGLESGPMALEQNLSDLQLQAAVEVAGDLEVDCYRAPCSESQEELALQHFMKEKLLAELEGKLRVFENIVAVLNKEVEASHLALATSIHQSQLDRERILSLEQRVVELQQTLAQKDQALGKLEQSLRLMEEASFDGTFLWKITNVTRRCHESACGRTVSLFSPAADLGHA

SEQ ID NO: 9609 - protein, 301 aa, Artificial Sequence
  Synthetic polypeptide
MASSSGSSPRPAPDENEFPFGCPPTVCQDPKEPRALCCAGCLSENPRNGEDQICPKCRGEDLQSISPGSRLRTQEKAHPEVAEAGIGCPFAGVGCSFKGSPQSVQEHEVTSQTSHLNLLLGFMKQWKARLGCGLESGPMALEQNLSDLQLQAAVEVAGDLEVDCYRAPCSESQEELALQHFMKEKLLAELEGKLRVFENIVAVLNKEVEASHLALATSIHQSQLDRERILSLEQRVVELQQTLAQKDQALGKLEQSLRLMEEASFDGTFLWKITNVTRRCHESACGRTVSLFSPAADLGHA

SEQ ID NO: 9610 - protein, 225 aa, Artificial Sequence
  Synthetic polypeptide
MVVEHPEFLKAGKEPGLQIWRVEKFDLVPVPTNLYGDFFTGDAYVILKTVQLRNGNLQYDLHYWLGNECSQDESGAAAIFTVQLDDYLNGRAVQHREVQGFESATFLGYFKSGLKYKKGGVASGFKHVVPNEVVVQRLFQVKGRRVVRATEVPVSWESFNNGDCFILDLGNNIHQWCGSNSNRYERLKATQVSKGIRDNERSGRARVHVSEEGTEPEAMLQIPLL

SEQ ID NO: 9611 - protein, 236 aa, Artificial Sequence
  Synthetic polypeptide
MEKLFCCFPNSMVVEHPEFLKAGKEPGLQIWRVEKFDLVPVPTNLYGDFFTGDAYVILKTVQLRNGNLQYDLHYWLGNECSQDESGAAAIFTVQLDDYLNGRAVQHREVQGFESATFLGYFKSGLKYKKGGVASGFKHVVPNEVVVQRLFQVKGRRVVRATEVPVSWESFNNGDCFILDLGNNIHQWCGSNSNRYERLKATQVSKGIRDNERSGRARVHVSEEGTEPEAMLQIPLL

SEQ ID NO: 9612 - protein, 233 aa, Artificial Sequence
  Synthetic polypeptide
MPLCTPNSMVVEHPEFLKAGKEPGLQIWRVEKFDLVPVPTNLYGDFFTGDAYVILKTVQLRNGNLQYDLHYWLGNECSQDESGAAAIFTVQLDDYLNGRAVQHREVQGFESATFLGYFKSGLKYKKGGVASGFKHVVPNEVVVQRLFQVKGRRVVRATEVPVSWESFNNGDCFILDLGNNIHQWCGSNSNRYERLKATQVSKGIRDNERSGRARVHVSEEGTEPEAMLQIPLL

SEQ ID NO: 9613 - protein, 276 aa, Artificial Sequence
  Synthetic polypeptide
MAPHRPAPALLCALSLALCALSLPVRAATASRGASQAGAPQGRVPEARPNSMVVEHPEFLKAGKEPGLQIWRVEKFDLVPVPTNLYGDFFTGDAYVILKTVQLRNGNLQYDLHYWLGNECSQDESGAAAIFTVQLDDYLNGRAVQHREVQGFESATFLGYFKSGLKYKKGGVASGFKHVVPNEVVVQRLFQVKGRRVVRATEVPVSWESFNNGDCFILDLGNNIHQWCGSNSNRYERLKATQVSKGIRDNERSGRARVHVSEEGTEPEAMLQIPLL

SEQ ID NO: 9614 - protein, 7 aa, Artificial Sequence
  Synthetic polypeptide
MLQIPLL

SEQ ID NO: 9615 - protein, 599 aa, Artificial Sequence
  Synthetic polypeptide
MAAAASVTGRVTWAASPMRSLGLGRRLSLPGPRLDAVTAAVNPSLSDHGNGLGRGTRGSGCSGGSLVADWGGGAAAAAAVALALAPALSTMRRGSSESELAARWEAEAVAAAKAAAKAEAEATAETVAEQVRVDAGAAGEPECKAGEEQPKVLAPAPAQPSAAEEGNTQVLQRPPPTLPPSKPKPVQGLCPHGKPRDKGRSCKRSSGHGSGENGSQRPVTVDSSKARTSLDALKISIRQLKWKEFPFGRRLPCDIYWHGVSFHDNDIFSGQVNKFPGMTEMVRKITLSRAVRTMQNLFPEEYNFYPRSWILPDEFQLFVAQVQMVKDDDPSWKPTFIVKPDGGCQGDGIYLIKDPSDIRLAGTLQSRPAVVQEYICKPLLIDKLKFDIRLYVLLKSLDPLEIYIAKDGLSRFCTEPYQEPTPKNLHRIFMHLTNYSLNIHSGNFIHSDSASTGSKRTFSSILCRLSSKGVDIKKVWSDIISVVIKTVIALTPELKVFYQSDIPTGRPGPTCFQILGFDILLMKNLKPILLEVNANPSMRIEHEHELSPGVFENVPSLVDEEVKVAVIRDTLRLMDPLKKKRENQETVSYGNWESYEEES

SEQ ID NO: 9616 - protein, 195 aa, Artificial Sequence
  Synthetic polypeptide
MPVQAAQWTEFLSCPICYNEFDENVHKPISLGCSHTVCKTCLNKLHRKACPFDQTAINTDIDVLPVNFALLQLVGAQVPDHQSIKLSNLGENKHYEVAKKCVEDLALYLKPLSGGKGVASLNQSALSRPMQRKLVTLVNCQLVEEEGRVRAMRAARSLGERTVTELILQHQNPQQLSANLWAAVRARGCQFLGPV

SEQ ID NO: 9617 - protein, 52 aa, Artificial Sequence
  Synthetic polypeptide
MDDKASVGKISVSSDSVSTLNSEDFVLVSRQGDETPSTNNGSDDEKTGLKSQ

SEQ ID NO: 9618 - protein, 829 aa, Artificial Sequence
  Synthetic polypeptide
MDDKASVGKISVSSDSVSTLNSEDFVLVSRQGDETPSTNNGSDDEKTGLKIVGNGSEQQLQKELADVLMDPPMDDQPGEKELVKRSQLDGEGDGPLSNQLSASSTINPVPLVGLQKPEMSLPVKPGQGDSEASSPFTPVADEDSVVFSKLTYLGCASVNAPRSEVEALRMMSILRSQCQISLDVTLSVPNVSEGIVRLLDPQTNTEIANYPIYKILFCVRGHDGTPESDCFAFTESHYNAELFRIHVFRCEIQEAVSRILYSFATAFRRSAKQTPLSATAAPQTPDSDIFTFSVSLEIKEDDGKGYFSAVPKDKDRQCFKLRQGIDKKIVIYVQQTTNKELAIERCFGLLLSPGKDVRNSDMHLLDLESMGKSSDGKSYVITGSWNPKSPHFQVVNEETPKDKVLFMTTAVDLVITEVQEPVRFLLETKVRVCSPNERLFWPFSKRSTTENFFLKLKQIKQRERKNNTDTLYEVVCLESESERERRKTTASPSVRLPQSGSQSSVIPSPPEDDEEEDNDEPLLSGSGDVSKECAEKILETWGELLSKWHLNLNVRPKQLSSLVRNGVPEALRGEVWQLLAGCHNNDHLVEKYRILITKESPQDSAITRDINRTFPAHDYFKDTGGDGQDSLYKICKAYSVYDEEIGYCQGQSFLAAVLLLHMPEEQAFSVLVKIMFDYGLRELFKQNFEDLHCKFYQLERLMQEYIPDLYNHFLDISLEAHMYASQWFLTLFTAKFPLYMVFHIIDLLLCEGISVIFNVALGLLKTSKDDLLLTDFEGALKFFRVQLPKRYRSEENAKKLMELACNMKPTHHEDNQDEDLYDDPLPLSE

SEQ ID NO: 9619 - protein, 168 aa, Artificial Sequence [sequence omitted]

SEQ ID NO: 9620 - protein, 810 aa, Artificial Sequence
  Synthetic polypeptide
MDDKASVGKISVSSDSVSTLNSEDFVLVSRQGDETPSTNNGSDDEKTGLKIVGNGSEQQLQKELADVLMDPPMDDQPGEKELVKRSQLDGEGDGPLSNQLSASSTINPVPLVGLQKPEMSLPVKPGQGDSEASSPFTPVADEDSVVFSKLTYLGCASVNAPRSEVEALRMMSILRSQCQISLDVTLSVPNVSEGIVRLLDPQTNTEIANYPIYKILFCVRGHDGTPESDCFAFTESHYNAELFRIHVFRCEIQEAVSRILYSFATAFRRSAKQTPLSATAAPQTPDSDIFTFSVSLEIKEDDGKGYFSAVPKDKDRQCFKLRQGIDKKIVIYVQQTTNKELAIERCFGLLLSPGKDVRNSDMHLLDLESMGKSSDGKSYVITGSWNPKSPHFQVVNEETPKDKVLFMTTAVDLVITEVQEPVRFLLETKVRVCSPNERLFWPFSKRSTTENFFLKLKQIKQRERKNNTDTLYEVVCLESESERERRKTTASPSVRLPQSGSQSSVIPSPPEDDEEEDNDEPLLSGSGDVSKECAEKILETWGELLSKWHLNLNVRPKQLSSLVRNGVPEALRGEVWQLLAGCHNNDHLVEKYRILITKESPQDSAITRDINRTFPAHDYFKDTGGDGQDSLYKICKAYSVYDEEIGYCQGQSFLAAVLLLHMPEEQAFSVLVKIMFDYGLRELFKQNFEDLHCKFYQLERLMQEYIPDLYNHFLDISLEAHMYASQWFLTLFTAKFPLYMVFHIIDLLLCEGISVIFNVALGLLKTSKDDLLLTDFEGALKFFRVQLPKRYRSEENAKKLMELACNMKVS

SEQ ID NO: 9621 - protein, 149 aa, Artificial Sequence
  Synthetic polypeptide
MPEEQAFSVLVKIMFDYGLRELFKQNFEDLHCKFYQLERLMQEYIPDLYNHFLDISLEAHMYASQWFLTLFTAKFPLYMVFHIIDLLLCEGISVIFNVALGLLKTSKDDLLLTDFEGALKFFRVQLPKRYRSEENAKKLMELACNMKVS

SEQ ID NO: 9622 - protein, 357 aa, Artificial Sequence
  Synthetic polypeptide
MRSIRSFANDDRHVMVKHSTIYPSPEELEAVQNMVSTVECALKHVSDWLDETNKGTKTEGETEVKKDEAGENYSKDQGGRTLCGVMRIGLVAKGLLIKDDMDLELVLMCKDKPTETLLNTVKDNLPIQIQKLTEEKYQVEQCVNEASIIIRNTKEPTLTLKVILTSPLIRDELEKKDGENVSMKDPPDLLDRQKCLNALASLRHAKWFQARANGLKSCVIVLRILRDLCNRVPTWAPLKGWPLELICEKSIGTCNRPLGAGEALRRVMECLASGILLPGGPGLHDPCERDPTDALSYMTIQQKEDITHSAQHALRLSAFGQIYKVLEMDPLPSSKPFQKYSWSVTDKEGVVGQTGGR

SEQ ID NO: 9623 - protein, 343 aa, Artificial Sequence
  Synthetic polypeptide
MVKHSTIYPSPEELEAVQNMVSTVECALKHVSDWLDETNKGTKTEGETEVKKDEAGENYSKDQGGRTLCGVMRIGLVAKGLLIKDDMDLELVLMCKDKPTETLLNTVKDNLPIQIQKLTEEKYQVEQCVNEASIIIRNTKEPTLTLKVILTSPLIRDELEKKDGENVSMKDPPDLLDRQKCLNALASLRHAKWFQARANGLKSCVIVLRILRDLCNRVPTWAPLKGWPLELICEKSIGTCNRPLGAGEALRRVMECLASGILLPGGPGLHDPCERDPTDALSYMTIQQKEDITHSAQHALRLSAFGQIYKVLEMDPLPSSKPFQKYSWSVTDKEGVVGQTGGR

SEQ ID NO: 9624 - protein, 32 aa, Artificial Sequence
  Synthetic polypeptide
MGSRIKQNPETTFEVYVEVAYPRTGGTLSGGF

SEQ ID NO: 9625 - protein, 17 aa, Artificial Sequence
  Synthetic polypeptide
MLKWPIPGQVALFQVGL

SEQ ID NO: 9626 - protein, 52 aa, Artificial Sequence
  Synthetic polypeptide
MERDEPPPSGGGGGGGSAGFLEPPAALPPPPRNGFCQDELAELDPGTTRRGG

SEQ ID NO: 9627 - protein, 464 aa, Artificial Sequence
  Synthetic polypeptide
MAAAALPPRPLLLLPLVLLLSGRPTRADSKVFGDLDQVRMTSEGSDCRCKCIMRPLSKDACSRVRSGRARVEDFYTVETVSSGTDCRCSCTAPPSSLNPCENEWKMEKLKKQAPELLKLQSMVDLLEGTLYSMDLMKVHAYVHKVASQMNTLEESIKANLSRENEVVKDSVRHLSEQLRHYENHSAIMLGIKKELSRLGLQLLQKDAAAAPATPATGTGSKAQDTARGKGKDISKYGSVQKSFADRGLPKPPKEKLLQVEKLRKESGKGSFLQPTAKPRALAQQQAVIRGFTYYKAGKQEVTEAVADNTLQGTSWLEQLPPKVEGRSNSAEPNSAEQDEAEPRSSERVDLASGTPTSIPATTTTATTTPTPTTSLLPTEPPSGPEVSSQGREASCEGTLRAVDPPVRHHSYGRHEGAWMKDPAARDDRIYVTNYYYGNSLVEFRNLENFKQDGMTIDLLQETLV

SEQ ID NO: 9628 - protein, 250 aa, Artificial Sequence
  Synthetic polypeptide
MSKRDKAGKDTARGKGKDISKYGSVQKSFADRGLPKPPKEKLLQVEKLRKESGKGSFLQPTAKPRALAQQQAVIRGFTYYKAGKQEVTEAVADNTLQGTSWLEQLPPKVEGRSNSAEPNSAEQDEAEPRSSERVDLASGTPTSIPATTTTATTTPTPTTSLLPTEPPSGPEVSSQGREASCEGTLRAVDPPVRHHSYGRHEGAWMKDPAARDDRIYVTNYYYGNSLVEFRNLENFKQDGMTIDLLQETLV

SEQ ID NO: 9629 - protein, 110 aa, Artificial Sequence
  Synthetic polypeptide
MAKIKARDLRGKKKEELLKQLDDLKVELSQLRVAKVTGGAASKLSKIRVVRKSIARVLTVINQTQKENLRKFYKLCQDLDTQPSRSADLHEMRMVPPALDLGGLIELVTC

SEQ ID NO: 9630 - protein, 168 aa, Artificial Sequence
  Synthetic polypeptide
MKQLPVLEPGDKPRKATWYTLTVPGDSPCARVGHSCSYLPPVGNAKRGKVFIVGGANPNRSFSDVHTMDLETRTWTTPEVTSPPPSPRTFHTSSAAIGNQLYVFGGGERGAQPVQDTKLHVFDATTQEAEAGESLEPGRQRLQQAKIAPLHSSLGKRVRLCLKKKKKK

SEQ ID NO: 9631 - protein, 219 aa, Artificial Sequence
  Synthetic polypeptide
MKQLPVLEPGDKPRKATWYTLTVPGDSPCARVGHSCSYLPPVGNAKRGKVFIVGGANPNRSFSDVHTMDLGKHQWDLDTCKGLLPRYEHASFIPSCTPDRIWVFGGANQSGNRNCLQVLNPETRTWTTPEVTSPPPSPRTFHTSSAAIGNQLYVFGGGERGAQPVQDTKLHVFDATTQEAEAGESLEPGRQRLQQAKIAPLHSSLGKRVRLCLKKKKKK

SEQ ID NO: 9632 - protein, 18 aa, Artificial Sequence
  Synthetic polypeptide
AIASCKKMKATSFRFCDT

SEQ ID NO: 9633 - protein, 12 aa, Artificial Sequence
  Synthetic polypeptide
FEERNLCLQHLI

SEQ ID NO: 9634 - protein, 833 aa, Artificial Sequence
  Synthetic polypeptide
MVKLDIHTLAHHLKQERLYVNSEKQLIQRLNADVLKTAEKLYRTAWIAKQQRINLDRLIITSAEASPAECCQHAKILEDTQFVDGYKQLGFQETAYGEFLSRLRENPRLIASSLVAGEKLNQENTQSVIYTVFTSLYGNCIMQEDESYLLQVLRYLIEFELKESDNPRRLLRRGTCAFSILFKLFSEGLFSAKLFLTATLHEPIMQLLVEDEDHLETDPNKLIERFSPSQQEKLFGEKGSDRFRQKVQEMVESNEAKLVALVNKFIGYLKQNTYCFPHSLRWIVSQMYKTLSCVDRLEVGEVRAMCTDLLLACFICPAVVNPEQYGIISDAPINEVARFNLMQVGRLLQQLAMTGSEEGDPRTKSSLGKFDKSCVAAFLDVVIGGRAVETPPLSSVNLLEGLSRTVVYITYSQLITLVNFMKSVMSGDQLREDRMALDNLLANLPPAKPGKSSSLEMTPYNTPQLSPATTPANKKNRLPIATRSRSRTNMLMDLHMDHEGSSQETIQEVQPEEVLVISLGTGPQLTPGMMSENEVLNMQLSDGGQGDVPVDENKLHGKPDKTLRFSLCSDNLEGISEGPSNRSNSVSSLDLEGESVSELGAGPSGSNGVEALQLLEHEQATTQDNLDDKLRKFEIRDMMGLTDDRDISETVSETWSTDVLGSDFDPNIDEDRLQEIAGAAAENMLGSLLCLPGSGSVLLDPCTGSTISETTSEAWSVEVLPSDSEAPDLKQEERLQELESCSGLGSTSDDTDVREVSSRPSTPGLSVVSGISATSEDIPNKIEDLRSECSSDFGGKDSVTSPDMDEITHDISKINKVWPGALAHTCDPSTSRG

SEQ ID NO: 9635 - protein, 812 aa, Artificial Sequence
  Synthetic polypeptide
MVKLDIHTLAHHLKQERLYVNSEKQLIQRLNADVLKTAEKLYRTAWIAKQQRINLDRLIITSAEASPAECCQHAKILEDTQFVDGYKQLGFQETAYGEFLSRLRENPRLIASSLVAGEKLNQENTQSVIYTVFTSLYGNCIMQEDESYLLQVLRYLIEFELKESDNPRRLLRRGTCAFSILFKLFSEGLFSAKLFLTATLHEPIMQLLVEDEDHLETDPNKLIERFSPSQQEKLFGEKGSDRFRQKVQEMVESNEAKLVALVNKFIGYLKQNTYCFPHSLRWIVSQMYKTLSCVDRLEVGEVRAMCTDLLLACFICPAVVNPEQYGIISDAPINEVARFNLMQVGRLLQQLAMTGSEEGDPRTKSSLGKFDKSCVAAFLDVVIGGRAVETPPLSSVNLLEGLSRTVVYITYSQLITLVNFMKSVMSGDQLREDRMALDNLLANLPPAKPGKSSSLEMTPYNTPQLSPATTPANKKNRLPIATRSRSRTNMLMDLHMDHEGSSQETIQEVQPEEVLVISLGTGPQLTPGMMSENEVLNMQLSDGGQGDVPVDENKLHGPSNRSNSVSSLDLEGESVSELGAGPSGSNGVEALQLLEHEQATTQDNLDDKLRKFEIRDMMGLTDDRDISETVSETWSTDVLGSDFDPNIDEDRLQEIAGAAAENMLGSLLCLPGSGSVLLDPCTGSTISETTSEAWSVEVLPSDSEAPDLKQEERLQELESCSGLGSTSDDTDVREVSSRPSTPGLSVVSGISATSEDIPNKIEDLRSECSSDFGGKDSVTSPDMDEITHDISKINKVWPGALAHTCDPSTSRG

SEQ ID NO: 9636 - protein, 415 aa, Artificial Sequence
  Synthetic polypeptide
MAFLDNPTIILAHIRQSHVTSDDTGMCEMVLIDHDVDLEKIHPPSMPGDSGSEIQGSNGETQGYVYAQSVDITSSWDFGIRRRSNTAQRLERLRKERQNQIKCKNIQWKERNSKQSAQELKSLFEKKSLKEKPPISGKQSILSVRLEQCPLQLNNPFNEYSKFDGKGHVGTTATKKIDVYLPLHSSQDRLLPMTVVTMASARVQDLIGLICWQYTSEGREPKLNDNVSAYCLHIAEDDGEVDTDFPPLDSNEPIHKFGFSTLALVEKYSSPGLTSKESLFVRINAAHGFSLIQVDNTKVTMKEILLKAVKRRKGSQKVSGPQYRLEKQSEPNVAVDLDSTLESQSAWEFCLVRENSISGDKVEIDPVTNQKASTKFWIKQKPISIDSDLLCACDLAEEKSPTCRVPAIAGACRHA

SEQ ID NO: 9637 - protein, 462 aa, Artificial Sequence
  Synthetic polypeptide
MAFLDNPTIILAHIRQSHVTSDDTGMCEMVLIDHDVDLEKIHPPSMPGDSGSEIQGSNGETQGYVYAQSVDITSSWDFGIRRRSNTAQRLERLRKERQNQIKCKNIQWKERNSKQSAQELKSLFEKKSLKEKPPISGKQSILSVRLEQCPLQLNNPFNEYSKFDGKGHVGTTATKKIDVYLPLHSSQDRLLPMTVVTMASARVQDLIGLICWQYTSEGREPKLNDNVSAYCLHIAEDDGEVDTDFPPLDSNEPIHKFGFSTLALVEKYSSPGLTSKESLFVRINAAHGFSLIQVDNTKVTMKEILLKAVKRRKGSQKVSGPQYRLEKQSEPNVAVDLDSTLESQSAWEFCLVRENSSRADGVFEEDSQIDIATVQDMLSSHHYKSFKVSMIHRLRFTTDVQLGISGDKVEIDPVTNQKASTKFWIKQKPISIDSDLLCACDLAEEKSPTCRVPAIAGACRHA

SEQ ID NO: 9638 - protein, 426 aa, Artificial Sequence
  Synthetic polypeptide
MAFLDNPTIILAHIRQSHVTSDDTGMCEMVLIDHDVDLEKIHPPSMPGDSGSEIQGSNGETQGYVYAQSVDITSSWDFGIRRRSNTAQRLERLRKERQNQIKCKNIQWKERNSKQSAQELKSLFEKKSLKEKPPISGKQSILSVRLEQCPLQLNNPFNEYSKFDGKGHVGTTATKKIDVYLPLHSSQDRLLPMTVVTMASARVQDLIGLICWQYTSEGREPKLNDNVSAYCLHIAEDDGEVDTDFPPLDSNEPIHKFGFSTLALVEKYSSPGLTSKESLFVRINAAHGFSLIQVDNTKVTMKEILLKAVKRRKGSQKVSGSRADGVFEEDSQIDIATVQDMLSSHHYKSFKVSMIHRLRFTTDVQLGISGDKVEIDPVTNQKASTKFWIKQKPISIDSDLLCACDLAEEKSPTCRVPAIAGACRHA

SEQ ID NO: 9639 - protein, 270 aa, Artificial Sequence
  Synthetic polypeptide
MTVVTMASARVQDLIGLICWQYTSEGREPKLNDNVSAYCLHIAEDDGEVDTDFPPLDSNEPIHKFGFSTLALVEKYSSPGLTSKESLFVRINAAHGFSLIQVDNTKVTMKEILLKAVKRRKGSQKVSGPQYRLEKQSEPNVAVDLDSTLESQSAWEFCLVRENSSRADGVFEEDSQIDIATVQDMLSSHHYKSFKVSMIHRLRFTTDVQLGISGDKVEIDPVTNQKASTKFWIKQKPISIDSDLLCACDLAEEKSPTCRVPAIAGACRHA

SEQ ID NO: 9640 - protein, 175 aa, Artificial Sequence
  Synthetic polypeptide
MTVVTMASARVQDLIGLICWQYTSEGREPKLKNAAHGFSLIQVDNTKVTMKEILLKAVKRRKGSQKVSGSRADGVFEEDSQIDIATVQDMLSSHHYKSFKVSMIHRLRFTTDVQLGISGDKVEIDPVTNQKASTKFWIKQKPISIDSDLLCACDLAEEKSPTCRVPAIAGACRHA

SEQ ID NO: 9641 - protein, 234 aa, Artificial Sequence
  Synthetic polypeptide
MTVVTMASARVQDLIGLICWQYTSEGREPKLNDNVSAYCLHIAEDDGEVDTDFPPLDSNEPIHKFGFSTLALVEKYSSPGLTSKESLFVRINAAHGFSLIQVDNTKVTMKEILLKAVKRRKGSQKVSGSRADGVFEEDSQIDIATVQDMLSSHHYKSFKVSMIHRLRFTTDVQLGISGDKVEIDPVTNQKASTKFWIKQKPISIDSDLLCACDLAEEKSPTCRVPAIAGACRHA

SEQ ID NO: 9642 - protein, 322 aa, Artificial Sequence
  Synthetic polypeptide
MAFLDNPTIILAHIRQSHVTSDDTGMCEMVLIDHDVDLEKIHPPSMPGDSGSEIQGSNGETQGYVYAQSVDITSSWDFGIRRRSNTAQRLERLRKERQNQIKCKNIQWKERNSKQSAQELKSLFEKKSLKEKPPISGKQSILSVRLEQCPLQLNNPFNEYSKFDGKGHVGTTATKKIDVYLPLHSSQDRLLPMTVVTMASARVQDLIGLICWQYTSEGREPKLNDNVSAYCLHIAEDDGEVDTDFPPLDSNEPIHKFGFSTLALVEKYSSPGLTSKESLFVRINAAHGFSLIQVDNTKVTMKEILLKAVKRRKGSQKVSALL

SEQ ID NO: 9643 - protein, 130 aa, Artificial Sequence
  Synthetic polypeptide
MTVVTMASARVQDLIGLICWQYTSEGREPKLNDNVSAYCLHIAEDDGEVDTDFPPLDSNEPIHKFGFSTLALVEKYSSPGLTSKESLFVRINAAHGFSLIQVDNTKVTMKEILLKAVKRRKGSQKVSALL

SEQ ID NO: 9644 - protein, 71 aa, Artificial Sequence
  Synthetic polypeptide
MTVVTMASARVQDLIGLICWQYTSEGREPKLKNAAHGFSLIQVDNTKVTMKEILLKAVKRRKGSQKVSALL

SEQ ID NO: 9645 - protein, 320 aa, Artificial Sequence
  Synthetic polypeptide
MAFLDNPTIILAHIRQSHVTSDDTGMCEMVLIDHDVDLEKIHPPSMPGDSGSEIQGSNGETQGYVYAQSVDITSSWDFGIRRRSNTAQRLERLRKERQNQIKCKNIQWKERNSKQSAQELKSLFEKKSLKEKPPISGKQSILSVRLEQCPLQLNNPFNEYSKFDGKGHVGTTATKKIDVYLPLHSSQDRLLPMTVVTMASARVQDLIGLICWQYTSEGREPKLNDNVSAYCLHIAEDDGEVDTDFPPLDSNEPIHKFGFSTLALVEKYSSPGLTSKESLFVRMSGAVAHACNPSTLGDRGRPGFGRPRRVKSSKPAWPTW

SEQ ID NO: 9646 - protein, 128 aa, Artificial Sequence
  Synthetic polypeptide
MTVVTMASARVQDLIGLICWQYTSEGREPKLNDNVSAYCLHIAEDDGEVDTDFPPLDSNEPIHKFGFSTLALVEKYSSPGLTSKESLFVRMSGAVAHACNPSTLGDRGRPGFGRPRRVKSSKPAWPTW

SEQ ID NO: 9647 - protein, 245 aa, Artificial Sequence
  Synthetic polypeptide
MAFLDNPTIILAHIRQSHVTSDDTGMCEMVLIDHDVDLEKIHPPSMPGDSGSEIQGSNGETQGYVYAQSVDITSSWDFGIRRRSNTAQRLERLRKERQNQIKCKNIQWKERNSKQSAQELKSLFEKKSLKEKPPISGKQSILSVRLEQCPLQLNNPFNEYSKFDGKARWLTPVIPALGRPRQPDHLRSGVQAATSPEVRSSRTAWPTWQTPVSTKNTKNSRAWWQVPIIPATREAEAGESLQPGR

SEQ ID NO: 9648 - protein, 99 aa, Artificial Sequence
  Synthetic polypeptide
EQCPLQLNNPFNEYSKFDGKARWLTPVIPALGRPRQPDHLRSGVQAATSPEVRSSRTAWPTWQTPVSTKNTKNSRAWWQVPIIPATREAEAGESLQPGR

SEQ ID NO: 9649 - protein, 131 aa, Artificial Sequence
  Synthetic polypeptide
MDDQSRMLQTLAGVNLAGHSVQGGMALPPPPHGHEGADGDGRKQDIGDILHQIMTITDQSLDEAQAKKHALNCHRMKPALFSVLCEIKEKTDSRFFGLWTLGLTSVVSQGLLGLWSQTEGCTVVFPTFEAF

SEQ ID NO: 9650 - protein, 56 aa, Artificial Sequence
  Synthetic polypeptide
MKPALFSVLCEIKEKTDSRFFGLWTLGLTSVVSQGLLGLWSQTEGCTVVFPTFEAF

SEQ ID NO: 9651 - protein, 429 aa, Artificial Sequence
  Synthetic polypeptide
MGWMGEKTGKILTEFLQFYEDQYGVALFNSMRHEIEGTGLPQAQLLWRKVPLDERIVFSGNLFQHQEDSKKWRNRFSLVPHNYGLVLYENKAAYERQVPPRAVINSAGYKILTSVDQYLELIGNSLPGTTAKSGSAPILKCPTQFPLILWHPYARHYYFCMMTEAEQDKWQAVLQDCIRHCNNGIPEDSKVEGPAFTDAIRMYRQSKELYGTWEMLCGNEVQILSNLVMEELGPELKAELGPRLKGKPQERQRQWIQISDAVYHMVYEQAKARFEEVLSKVQQVQPAMQAVIRTDMDQIITSKEHLASKIRAFILPKAEVCVRNHVQPYIPSILEALMVPTSQGFTEVRDVFFKEVTDMNLNVINEGGIDKLGEYMEKLSRLAYHPLKMQSCYEKMESLRLDGLQQRFDVSSTSVFKQRAQIHMREVSA

SEQ ID NO: 9652 - protein, 442 aa, Artificial Sequence
  Synthetic polypeptide
MGDVLSTHLDDARRQHIAEKTGKILTEFLQFYEDQYGVALFNSMRHEIEGTGLPQAQLLWRKVPLDERIVFSGNLFQHQEDSKKWRNRFSLVPHNYGLVLYENKAAYERQVPPRAVINSAGYKILTSVDQYLELIGNSLPGTTAKSGSAPILKCPTQFPLILWHPYARHYYFCMMTEAEQDKWQAVLQDCIRHCNNGIPEDSKVEGPAFTDAIRMYRQSKELYGTWEMLCGNEVQILSNLVMEELGPELKAELGPRLKGKPQERQRQWIQISDAVYHMVYEQAKARFEEVLSKVQQVQPAMQAVIRTDMDQIITSKEHLASKIRAFILPKAEVCVRNHVQPYIPSILEALMVPTSQGFTEVRDVFFKEVTDMNLNVINEGGIDKLGEYMEKLSRLAYHPLKMQSCYEKMESLRLDGLQQRFDVSSTSVFKQRAQIHMREVSA

SEQ ID NO: 9653 - protein, 20 aa, Artificial Sequence
  Synthetic polypeptide
MGDVLSTHLDDARRQHIAGW

SEQ ID NO: 9654 - protein, 20 aa, Artificial Sequence
  Synthetic polypeptide
MGWMGASSRGPGTQVLTTHC

SEQ ID NO: 9655 - protein, 20 aa, Artificial Sequence
  Synthetic polypeptide
MGWMGDYNLYEDEDRDFLAY

SEQ ID NO: 9656 - protein, 32 aa, Artificial Sequence
  Synthetic polypeptide
MGWMGEAVRTVGGRKVLGVTPGLWSISINGSS

SEQ ID NO: 9657 - protein, 28 aa, Artificial Sequence
  Synthetic polypeptide
MGWMGASVFSPVKWVFPKSCDHSMRQKL

SEQ ID NO: 9658 - protein, 18 aa, Artificial Sequence
  Synthetic polypeptide
MAPIGLKAVVGERKRKTT

SEQ ID NO: 9659 - protein, 18 aa, Artificial Sequence
  Synthetic polypeptide
MTEGTKKTSKKCSGGSRL

SEQ ID NO: 9660 - protein, 40 aa, Artificial Sequence
  Synthetic polypeptide
MATGTDQVVGLGLVAVSLIIFTYYTAWVILLQAPKQVPGK

SEQ ID NO: 9661 - protein, 464 aa, Artificial Sequence
  Synthetic polypeptide
MWPQPRLPPRPAMSEETRQSKLAAAKKKLREYQQRNSPGVPTGAKKKKKIKNGSNPETTTSGGCHSPEDTPKDNAATLQPSDDTVLPGGVPSPGASLTSMAASQNHDADNVPNLMDETKTFSSTESLRQLSQQLNGLVCESATCVNGEGPASSANLKDLESRYQQLAVALDSSYVTNKQLNITIEKLKQQNQEITDQLEEEKKECHQKQGALREQLQVHIQTIGILVSEKAELQTALAHTQHAARQKEGESEDLASRLQYSRRRVGELERALSAVSTQQKKADRYNKELTKERDALRLELYKNTQSNEDLKQEKSELEEKLRVLVTEKAGMQLNLEELQKKLEMTELLLQQFSSRCEAPDANQQLQQAMEERAQLEAHLGQVMESVRQLQMERDKYAENLKGESAMWRQRMQQMSEQVHTLREEKECSMSRVQELETSLAELRNQMVPHQQRRRSARCQPPTVV

SEQ ID NO: 9662 - protein, 452 aa, Artificial Sequence
  Synthetic polypeptide
MSEETRQSKLAAAKKKLREYQQRNSPGVPTGAKKKKKIKNGSNPETTTSGGCHSPEDTPKDNAATLQPSDDTVLPGGVPSPGASLTSMAASQNHDADNVPNLMDETKTFSSTESLRQLSQQLNGLVCESATCVNGEGPASSANLKDLESRYQQLAVALDSSYVTNKQLNITIEKLKQQNQEITDQLEEEKKECHQKQGALREQLQVHIQTIGILVSEKAELQTALAHTQHAARQKEGESEDLASRLQYSRRRVGELERALSAVSTQQKKADRYNKELTKERDALRLELYKNTQSNEDLKQEKSELEEKLRVLVTEKAGMQLNLEELQKKLEMTELLLQQFSSRCEAPDANQQLQQAMEERAQLEAHLGQVMESVRQLQMERDKYAENLKGESAMWRQRMQQMSEQVHTLREEKECSMSRVQELETSLAELRNQMVPHQQRRRSARCQPPTVV

SEQ ID NO: 9663 - protein, 491 aa, Artificial Sequence
  Synthetic polypeptide
MWPQPRLPPRPAMSEETRQSKLAAAKKKLREYQQRNSPGVPTGAKKKKKIKNGSNPETTTSGGCHSPEDIQDILKVLVSDLNRSNGVALPPLDKWKTPKDNAATLQPSDDTVLPGGVPSPGASLTSMAASQNHDADNVPNLMDETKTFSSTESLRQLSQQLNGLVCESATCVNGEGPASSANLKDLESRYQQLAVALDSSYVTNKQLNITIEKLKQQNQEITDQLEEEKKECHQKQGALREQLQVHIQTIGILVSEKAELQTALAHTQHAARQKEGESEDLASRLQYSRRRVGELERALSAVSTQQKKADRYNKELTKERDALRLELYKNTQSNEDLKQEKSELEEKLRVLVTEKAGMQLNLEELQKKLEMTELLLQQFSSRCEAPDANQQLQQAMEERAQLEAHLGQVMESVRQLQMERDKYAENLKGESAMWRQRMQQMSEQVHTLREEKECSMSRVQELETSLAELRNQMVPHQQRRRSARCQPPTVV

SEQ ID NO: 9664 - protein, 466 aa, Artificial Sequence
  Synthetic polypeptide
MWPQPRLPPRPAMSEETRQSKLAAAKKKLREYQQRNSPGVPTGAKKKKKIKNGSNPETTTSGGCHSPEDTPKDNAATLQPSDDTVLPGGVPSPGASLTSMAASQNHDADNVPNLMDETKTFSSTESLRQLSQQLNGLVCESATCVNGEGPASSANLKDLESRYQQLAVALDSSYVTNKQLNITIEKLKQQNQEITDQLEEEKKECHQKQGALREQLQVHIQTIGILVSEKAELQTALAHTQHAARQKEGESEDLASRLQYSRRRVGELERALSAVSTQQKKADRYNKELTKERDALRLELYKNTQSNEDLKQEKSELEEKLRVLVTEKAGMQLNLEELQKKLEMTELLLQQFSSRCEAPDANQQLQQAMEERAQLEAHLGQVMESVRQLQMERDKYAENLKGESAMWRQRMQQMSEQVHTLREEKECSMSRVQELETSLAELRNQMASVPHQQRRRSARCQPPTVV

SEQ ID NO: 9665 - protein, 454 aa, Artificial Sequence
  Synthetic polypeptide
MSEETRQSKLAAAKKKLREYQQRNSPGVPTGAKKKKKIKNGSNPETTTSGGCHSPEDTPKDNAATLQPSDDTVLPGGVPSPGASLTSMAASQNHDADNVPNLMDETKTFSSTESLRQLSQQLNGLVCESATCVNGEGPASSANLKDLESRYQQLAVALDSSYVTNKQLNITIEKLKQQNQEITDQLEEEKKECHQKQGALREQLQVHIQTIGILVSEKAELQTALAHTQHAARQKEGESEDLASRLQYSRRRVGELERALSAVSTQQKKADRYNKELTKERDALRLELYKNTQSNEDLKQEKSELEEKLRVLVTEKAGMQLNLEELQKKLEMTELLLQQFSSRCEAPDANQQLQQAMEERAQLEAHLGQVMESVRQLQMERDKYAENLKGESAMWRQRMQQMSEQVHTLREEKECSMSRVQELETSLAELRNQMASVPHQQRRRSARCQPPTVV

SEQ ID NO: 9666 - protein, 493 aa, Artificial Sequence
  Synthetic polypeptide
MWPQPRLPPRPAMSEETRQSKLAAAKKKLREYQQRNSPGVPTGAKKKKKIKNGSNPETTTSGGCHSPEDIQDILKVLVSDLNRSNGVALPPLDKWKTPKDNAATLQPSDDTVLPGGVPSPGASLTSMAASQNHDADNVPNLMDETKTFSSTESLRQLSQQLNGLVCESATCVNGEGPASSANLKDLESRYQQLAVALDSSYVTNKQLNITIEKLKQQNQEITDQLEEEKKECHQKQGALREQLQVHIQTIGILVSEKAELQTALAHTQHAARQKEGESEDLASRLQYSRRRVGELERALSAVSTQQKKADRYNKELTKERDALRLELYKNTQSNEDLKQEKSELEEKLRVLVTEKAGMQLNLEELQKKLEMTELLLQQFSSRCEAPDANQQLQQAMEERAQLEAHLGQVMESVRQLQMERDKYAENLKGESAMWRQRMQQMSEQVHTLREEKECSMSRVQELETSLAELRNQMASVPHQQRRRSARCQPPTVV

SEQ ID NO: 9667 - protein, 64 aa, Artificial Sequence
  Synthetic polypeptide
MLLGASLVGVLLFSKLVLKLPWTQVGFSLLFLYLGSGGWRFIRVFIKTIRRDILQLSICQSWLI

SEQ ID NO: 9668 - protein, 54 aa, Artificial Sequence
  Synthetic polypeptide
MAAPLSVEVEFGGGAELLFDGIKKHRVTLPGQEEPLQKLAGAVAGICNPSYLGG

SEQ ID NO: 9669 - protein, 52 aa, Artificial Sequence
  Synthetic polypeptide
MAAPLSVEVEFGSSPGCLFLWSSFAEVVRSSCLTVLRNIESLCLDRRNPYKN

SEQ ID NO: 9670 - protein, 142 aa, Artificial Sequence
  Synthetic polypeptide
MRFPSCGKNGVTSLTQKKVLRAPCGAPSVTVTKSHKRGMKGDTVNVRRSVRVKTKVPWMPPGKSSARPVGCKWENPPHCLEITPPSSEKLVSVMRLSDLSTEDDDSGHCKMNRYDKKIDSLMNAVGCLKSEAHACNPGYLGG

SEQ ID NO: 9671 - protein, 151 aa, Artificial Sequence
  Synthetic polypeptide
MADQQGPHQNRFPSCGKNGVTSLTQKKVLRAPCGAPSVTVTKSHKRGMKGDTVNVRRSVRVKTKVPWMPPGKSSARPVGCKWENPPHCLEITPPSSEKLVSVMRLSDLSTEDDDSGHCKMNRYDKKIDSLMNAVGCLKSEAHACNPGYLGG

SEQ ID NO: 9672 - protein, 195 aa, Artificial Sequence
  Synthetic polypeptide
MGELPTGCRKRRRKRGGAAARARLHPPRRLHGTTLASDFNDFIRRRFWAQPCRSWFPSCGKNGVTSLTQKKVLRAPCGAPSVTVTKSHKRGMKGDTVNVRRSVRVKTKVPWMPPGKSSARPVGCKWENPPHCLEITPPSSEKLVSVMRLSDLSTEDDDSGHCKMNRYDKKIDSLMNAVGCLKSEAHACNPGYLGG

SEQ ID NO: 9673 - protein, 146 aa, Artificial Sequence
  Synthetic polypeptide
MKDRSSTPPLHVHVDENTPVHVHIKKLPKPSATSSQKSHKRGMKGDTVNVRRSVRVKTKVPWMPPGKSSARPVGCKWENPPHCLEITPPSSEKLVSVMRLSDLSTEDDDSGHCKMNRYDKKIDSLMNAVGCLKSEAHACNPGYLGG

SEQ ID NO: 9674 - protein, 151 aa, Artificial Sequence
  Synthetic polypeptide
MSASSSGGSPRFPSCGKNGVTSLTQKKVLRAPCGAPSVTVTKSHKRGMKGDTVNVRRSVRVKTKVPWMPPGKSSARPVGCKWENPPHCLEITPPSSEKLVSVMRLSDLSTEDDDSGHCKMNRYDKKIDSLMNAVGCLKSEAHACNPGYLGG

SEQ ID NO: 9675 - protein, 127 aa, Artificial Sequence
  Synthetic polypeptide
MKDRSSTPPLHVHVDENTPVHVHIKKLPKPSATSSQKSHKRGMKGDTVNVRRSVRVKTKNPPHCLEITPPSSEKLVSVMRLSDLSTEDDDSGHCKMNRYDKKIDSLMNAVGCLKSEAHACNPGYLGG

SEQ ID NO: 9676 - protein, 132 aa, Artificial Sequence
  Synthetic polypeptide
MGRNRYPPACWFPSCGKNGVTSLTQKKVLRAPCGAPSVTVTKSHKRGMKGDTVNVRRSVRVKTKNPPHCLEITPPSSEKLVSVMRLSDLSTEDDDSGHCKMNRYDKKIDSLMNAVGCLKSEAHACNPGYLGG

SEQ ID NO: 9677 - protein, 132 aa, Artificial Sequence
  Synthetic polypeptide
MSASSSGGSPRFPSCGKNGVTSLTQKKVLRAPCGAPSVTVTKSHKRGMKGDTVNVRRSVRVKTKNPPHCLEITPPSSEKLVSVMRLSDLSTEDDDSGHCKMNRYDKKIDSLMNAVGCLKSEAHACNPGYLGG

SEQ ID NO: 9678 - protein, 60 aa, Artificial Sequence
  Synthetic polypeptide
MAPKRQSPLPPQKKKPRPPPALGPEETSASAGLPKKGELWKAEAEGWFELRSLRPAWATW

SEQ ID NO: 9679 - protein, 381 aa, Artificial Sequence
  Synthetic polypeptide
MAKQLQARRLDGIDYNPWVEFVKLASEHDVVNLGQGFPDFPPPDFAVEAFQHAVSGDFMLNQYTKTFGYPPLTKILASFFGELLGQEIDPLRNVLVTVGGYGALFTAFQALVDEGDEVIIIEPFFDCYEPMTMMAGGRPVFVSLKPGPIQNGELGSSSNWQLDPMELAGKFTSRTKALVLNTPNNPLGKVFSREELELVASLCQQHDVVCITDEVYQWMVYDGHQHISIASLPGMWERTLTIGSAGKTFSATGWKVGWVLGPDHIMKHLRTVHQNSVFHCPTQSQAAVAESFEREQLLFRQPSSYFVQFPQAMQRCRDHMIRSLQSVGLKPIIPQGSYFLITDISDFKRKMPDLPGAVDEPYDRRFVKWMIKNKRCCVGWQ

SEQ ID NO: 9680 - protein, 331 aa, Artificial Sequence
  Synthetic polypeptide
MAKQLQARRLDGIDYNPWVEFVKLASEHDVVNLGQGFPDFPPPDFAVEAFQHAVSGDFMLNQYTKTFVIIIEPFFDCYEPMTMMAGGRPVFVSLKPGPIQNGELGSSSNWQLDPMELAGKFTSRTKALVLNTPNNPLGKVFSREELELVASLCQQHDVVCITDEVYQWMVYDGHQHISIASLPGMWERTLTIGSAGKTFSATGWKVGWVLGPDHIMKHLRTVHQNSVFHCPTQSQAAVAESFEREQLLFRQPSSYFVQFPQAMQRCRDHMIRSLQSVGLKPIIPQGSYFLITDISDFKRKMPDLPGAVDEPYDRRFVKWMIKNKRCCVGWQ

SEQ ID NO: 9681 - protein, 475 aa, Artificial Sequence
  Synthetic polypeptide
MFRTAAAISVHLVGPLQGRKAGAPLTWFLHQTQVAEKNVGSPAPRPTSHLGLANPQERKVPQGPQSPCEVPAAEGILRTGGAKLPIQGHPAKLAMAKQLQARRLDGIDYNPWVEFVKLASEHDVVNLGQGFPDFPPPDFAVEAFQHAVSGDFMLNQYTKTFGYPPLTKILASFFGELLGQEIDPLRNVLVTVGGYGALFTAFQALVDEGDEVIIIEPFFDCYEPMTMMAGGRPVFVSLKPGPIQNGELGSSSNWQLDPMELAGKFTSRTKALVLNTPNNPLGKVFSREELELVASLCQQHDVVCITDEVYQWMVYDGHQHISIASLPGMWERTLTIGSAGKTFSATGWKVGWVLGPDHIMKHLRTVHQNSVFHCPTQSQAAVAESFEREQLLFRQPSSYFVQFPQAMQRCRDHMIRSLQSVGLKPIIPQGSYFLITDISDFKRKMPDLPGAVDEPYDRRFVKWMIKNKRCCVGWQ

SEQ ID NO: 9682 - protein, 299 aa, Artificial Sequence
  Synthetic polypeptide
MAEGERQPPPDSSEEAPPATQNFIIPKKEIHTVPDMGKWKRSQAYADYIGFILTLNEGVKGKKLTFEYRVSEAIEKLVALLNTLDRWIDETPPVDQPSRFGNKAYRTWYAKLDEEAENLVATVVPTHLAAAVPEVAVYLKESVGNSTRIDYGTGHEAAFAAFLCCLCKIGVLRVDDQIAIVFKVFNRYLEVMRKLQKTYRMEPAGSQGVWGLDDFQFLPFIWGSSQLIDHPYLEPRHFVDEKAVNENHKDYMFLECILFITEMKTGPFAEHSNQLWNISAVPSWSKVNQGLIRMYKAEP

SEQ ID NO: 9683 - protein, 334 aa, Artificial Sequence
  Synthetic polypeptide
MAEGERQPPPDSSEEAPPATQNFIIPKKEIHTVPDMGKWKRSQAYADYIGFILTLNEGVKGKKLTFEYRVSEMWNEVHEEKEQAAKQSVSCDECIPLPRAGHCAPSEAIEKLVALLNTLDRWIDETPPVDQPSRFGNKAYRTWYAKLDEEAENLVATVVPTHLAAAVPEVAVYLKESVGNSTRIDYGTGHEAAFAAFLCCLCKIGVLRVDDQIAIVFKVFNRYLEVMRKLQKTYRMEPAGSQGVWGLDDFQFLPFIWGSSQLIDHPYLEPRHFVDEKAVNENHKDYMFLECILFITEMKTGPFAEHSNQLWNISAVPSWSKVNQGLIRMYKAEP

SEQ ID NO: 9684 - protein, 305 aa, Artificial Sequence
  Synthetic polypeptide
MAEGERQPPPDSSEEAPPATQNFIIPKKEIHTVPDMGKWKRSQVPFGTVAYADYIGFILTLNEGVKGKKLTFEYRVSEAIEKLVALLNTLDRWIDETPPVDQPSRFGNKAYRTWYAKLDEEAENLVATVVPTHLAAAVPEVAVYLKESVGNSTRIDYGTGHEAAFAAFLCCLCKIGVLRVDDQIAIVFKVFNRYLEVMRKLQKTYRMEPAGSQGVWGLDDFQFLPFIWGSSQLIDHPYLEPRHFVDEKAVNENHKDYMFLECILFITEMKTGPFAEHSNQLWNISAVPSWSKVNQGLIRMYKAEP

SEQ ID NO: 9685 - protein, 270 aa, Artificial Sequence
  Synthetic polypeptide
MAEGERQPPPDSSEEAPPATQNFIIPKKEIHTVPDMGKWKRSQAIEKLVALLNTLDRWIDETPPVDQPSRFGNKAYRTWYAKLDEEAENLVATVVPTHLAAAVPEVAVYLKESVGNSTRIDYGTGHEAAFAAFLCCLCKIGVLRVDDQIAIVFKVFNRYLEVMRKLQKTYRMEPAGSQGVWGLDDFQFLPFIWGSSQLIDHPYLEPRHFVDEKAVNENHKDYMFLECILFITEMKTGPFAEHSNQLWNISAVPSWSKVNQGLIRMYKAEP

SEQ ID NO: 9686 - protein, 80 aa, Artificial Sequence
  Synthetic polypeptide
MAEGERQPPPDSSEEAPPATQNFIIPKKEIHTVPDMGKWKRSQMKTGPFAEHSNQLWNISAVPSWSKVNQGLIRMYKAEP

SEQ ID NO: 9687 - protein, 257 aa, Artificial Sequence
  Synthetic polypeptide
MAEGERQPPPDSSEEAPPATQNFIIPKKEIHTVPDMGKWKRSQAYADYIGFILTLNEGVKGKKLTFEYRVSEEAENLVATVVPTHLAAAVPEVAVYLKESVGNSTRIDYGTGHEAAFAAFLCCLCKIGVLRVDDQIAIVFKVFNRYLEVMRKLQKTYRMEPAGSQGVWGLDDFQFLPFIWGSSQLIDHPYLEPRHFVDEKAVNENHKDYMFLECILFITEMKTGPFAEHSNQLWNISAVPSWSKVNQGLIRMYKAEP

SEQ ID NO: 9688 - protein, 264 aa, Artificial Sequence
  Synthetic polypeptide
MGKWKRSQAYADYIGFILTLNEGVKGKKLTFEYRVSEAIEKLVALLNTLDRWIDETPPVDQPSRFGNKAYRTWYAKLDEEAENLVATVVPTHLAAAVPEVAVYLKESVGNSTRIDYGTGHEAAFAAFLCCLCKIGVLRVDDQIAIVFKVFNRYLEVMRKLQKTYRMEPAGSQGVWGLDDFQFLPFIWGSSQLIDHPYLEPRHFVDEKAVNENHKDYMFLECILFITEMKTGPFAEHSNQLWNISAVPSWSKVNQGLIRMYKAEP

SEQ ID NO: 9689 - protein, 31 aa, Artificial Sequence
  Synthetic polypeptide
RKHTGWSQPAARECGVWMTSSFCPSSGAVRS

SEQ ID NO: 9690 - protein, 37 aa, Artificial Sequence
  Synthetic polypeptide
MKTGPFAEHSNQLWNISAVPSWSKVNQGLIRMYKAEP

SEQ ID NO: 9691 - protein, 31 aa, Artificial Sequence; identical to SEQ ID NO: 9689
  Synthetic polypeptide

SEQ ID NO: 9692 - protein, 343 aa, Artificial Sequence
  Synthetic polypeptide
MAEGERQPPPDSSEEAPPATQNFIIPKKEIHTVPDMGKWKRSQAYADYIGFILTLNEGVKGKKLTFEYRVSEAIEKLVALLNTLDRWIDETPPVDQPSRFGNKAYRTWYAKLDEEAENLVATVVPTHLAAAVPEVAVYLKESVGNSTRIDYGTGHEAAFAAFLCCLCKIGVLRVDDQIAIVFKVFNRYLEVMRKLQKTYRMEPAGSQGVWGLDDFQFLPFIWGSSQLIDHPYLEPRHFVDEKAVNENHKDYMFLECILFITEMKTGPFAEHSNQLWNISAVPSWSKVNQGLIRMYKAEEPAQVSLPPGSGACALWIPALPITALPIVALPLLQFYGVCVWLSN

SEQ ID NO: 9693 - protein, 378 aa, Artificial Sequence
  Synthetic polypeptide
MAEGERQPPPDSSEEAPPATQNFIIPKKEIHTVPDMGKWKRSQAYADYIGFILTLNEGVKGKKLTFEYRVSEMWNEVHEEKEQAAKQSVSCDECIPLPRAGHCAPSEAIEKLVALLNTLDRWIDETPPVDQPSRFGNKAYRTWYAKLDEEAENLVATVVPTHLAAAVPEVAVYLKESVGNSTRIDYGTGHEAAFAAFLCCLCKIGVLRVDDQIAIVFKVFNRYLEVMRKLQKTYRMEPAGSQGVWGLDDFQFLPFIWGSSQLIDHPYLEPRHFVDEKAVNENHKDYMFLECILFITEMKTGPFAEHSNQLWNISAVPSWSKVNQGLIRMYKAEEPAQVSLPPGSGACALWIPALPITALPIVALPLLQFYGVCVWLSN

SEQ ID NO: 9694 - protein, 349 aa, Artificial Sequence
  Synthetic polypeptide
MAEGERQPPPDSSEEAPPATQNFIIPKKEIHTVPDMGKWKRSQVPFGTVAYADYIGFILTLNEGVKGKKLTFEYRVSEAIEKLVALLNTLDRWIDETPPVDQPSRFGNKAYRTWYAKLDEEAENLVATVVPTHLAAAVPEVAVYLKESVGNSTRIDYGTGHEAAFAAFLCCLCKIGVLRVDDQIAIVFKVFNRYLEVMRKLQKTYRMEPAGSQGVWGLDDFQFLPFIWGSSQLIDHPYLEPRHFVDEKAVNENHKDYMFLECILFITEMKTGPFAEHSNQLWNISAVPSWSKVNQGLIRMYKAEEPAQVSLPPGSGACALWIPALPITALPIVALPLLQFYGVCVWLSN

SEQ ID NO: 9695 - protein, 314 aa, Artificial Sequence
  Synthetic polypeptide
MAEGERQPPPDSSEEAPPATQNFIIPKKEIHTVPDMGKWKRSQAIEKLVALLNTLDRWIDETPPVDQPSRFGNKAYRTWYAKLDEEAENLVATVVPTHLAAAVPEVAVYLKESVGNSTRIDYGTGHEAAFAAFLCCLCKIGVLRVDDQIAIVFKVFNRYLEVMRKLQKTYRMEPAGSQGVWGLDDFQFLPFIWGSSQLIDHPYLEPRHFVDEKAVNENHKDYMFLECILFITEMKTGPFAEHSNQLWNISAVPSWSKVNQGLIRMYKAEEPAQVSLPPGSGACALWIPALPITALPIVALPLLQFYGVCVWLSN

SEQ ID NO: 9696 - protein, 124 aa, Artificial Sequence
  Synthetic polypeptide
MAEGERQPPPDSSEEAPPATQNFIIPKKEIHTVPDMGKWKRSQMKTGPFAEHSNQLWNISAVPSWSKVNQGLIRMYKAEEPAQVSLPPGSGACALWIPALPITALPIVALPLLQFYGVCVWLSN

SEQ ID NO: 9697 - protein, 301 aa, Artificial Sequence
  Synthetic polypeptide
MAEGERQPPPDSSEEAPPATQNFIIPKKEIHTVPDMGKWKRSQAYADYIGFILTLNEGVKGKKLTFEYRVSEEAENLVATVVPTHLAAAVPEVAVYLKESVGNSTRIDYGTGHEAAFAAFLCCLCKIGVLRVDDQIAIVFKVFNRYLEVMRKLQKTYRMEPAGSQGVWGLDDFQFLPFIWGSSQLIDHPYLEPRHFVDEKAVNENHKDYMFLECILFITEMKTGPFAEHSNQLWNISAVPSWSKVNQGLIRMYKAEEPAQVSLPPGSGACALWIPALPITALPIVALPLLQFYGVCVWLSN

SEQ ID NO: 9698 - protein, 308 aa, Artificial Sequence
  Synthetic polypeptide
MGKWKRSQAYADYIGFILTLNEGVKGKKLTFEYRVSEAIEKLVALLNTLDRWIDETPPVDQPSRFGNKAYRTWYAKLDEEAENLVATVVPTHLAAAVPEVAVYLKESVGNSTRIDYGTGHEAAFAAFLCCLCKIGVLRVDDQIAIVFKVFNRYLEVMRKLQKTYRMEPAGSQGVWGLDDFQFLPFIWGSSQLIDHPYLEPRHFVDEKAVNENHKDYMFLECILFITEMKTGPFAEHSNQLWNISAVPSWSKVNQGLIRMYKAEEPAQVSLPPGSGACALWIPALPITALPIVALPLLQFYGVCVWLSN

SEQ ID NO: 9699 - protein, 81 aa, Artificial Sequence
  Synthetic polypeptide
MKTGPFAEHSNQLWNISAVPSWSKVNQGLIRMYKAEEPAQVSLPPGSGACALWIPALPITALPIVALPLLQFYGVCVWLSN

SEQ ID NO: 9700 - protein, 455 aa, Artificial Sequence
  Synthetic polypeptide
MAALAPVGSPASRGPRLAAGLRLLPMLGLLQLLAEPGLGRVHHLALKDDVRHKVHLNTFGFFKDGYMVVNVSSLSLNEPEDKDVTIGFSLDRTKNDGFSSYLDEDVNYCILKKQSVSVTLLILDISRSEVRVKSPPEAGTQLPKIIFSRDEKVLGQSQEPNVNPASAGNQTQKTQDGGKSKRSTVDSKAMGEKSFSVHNNGGAVSFQFFFNISTDDQEGLYSLYFHKCLGKELPSDKFTFSLDIEITEKNPDSYLSAGEIPLPKLYISMAFFFFLSGTIWIHILRKRRNDVFKIHWLMAALPFTKSLSLVFHAIDYHYISSQGFPIEGWAVVYYITHLLKGALLFITIALIGTGWAFIKHILSDKDKKIFMIVIPLQVLANVAYIIIESTEEGTTEYGLWKDSLFLVDLLCCGAILFPVVWSIRHLQEASATDGKGDSMGPLQQRANLRAGSRIG

SEQ ID NO: 9701 - protein, 58 aa, Artificial Sequence
  Synthetic polypeptide
MGKSNSKLKPEVVEELTRKTYFTEKEVQQCCLEGRDKDSEAVRHGANGKAAVRDKWGL

SEQ ID NO: 9702 - protein, 40 aa, Artificial Sequence
  Synthetic polypeptide
MATITEKEVQQCCLEGRDKDSEAVRHGANGKAAVRDKWGL

SEQ ID NO: 9703 - protein, 37 aa, Artificial Sequence
  Synthetic polypeptide
MAELVQGQSAPVGMKAEGFVDALHRVRQLLTLKCQAW

SEQ ID NO: 9704 - protein, 434 aa, Artificial Sequence
  Synthetic polypeptide
MGDEMDAMIPEREMKDFQFRALKKVRIFDSPEELPKERSSLLAVSNKYGLVFAGGASGLQIFPTKNLLIQNKPGDDPNKIVDKVQGLLVPMKFPIHHLALSCDNLTLSACMMSSEYGSIIAFFDVRTFSNEAKQQKRPFAYHKLLKDAGGMVIDMKWNPTVPSMVAVCLADGSIAVLQVTETVKVCATLPSTVAVTSVCWSPKGKQLAVGKQNGTVVQYLPTLQEKKVIPCPPFYESDHPVRVLDVLWIGTYVFAIVYAAADGTLETSPDVVMALLPKKEEKHPEIFVNFMEPCYGSCTERQHHYYLSYIEEWDLVLAASAASTEVSILARQSDQINWESWLLEDSSRAELPVTDKSDDSLPMGVVVDYTNQVEITISDEKTLPPAPVLMLLSTDGVLCPFYMINQNPGVKSLIKTPERLSLEGERQPKSPGKE

SEQ ID NO: 9705 - protein, 4 aa, Artificial Sequence
  Synthetic polypeptide
CSTK

SEQ ID NO: 9706 - protein, 1137 aa, Artificial Sequence
  Synthetic polypeptide
MSDRLGQITKGKDGKSKYSTLSLFDKYKGKSVDAIRSSVIPRHGLQSLGKVAAARRMPPPANLPSLKSENKGNDPNIVIVPKDGTGWANKQDQQDPKSSSATASQPPESLPQPGLQKSVSNLQKPTQSISQENTNSVPGGPKSWAQLNGKPVGHEGGLRGSSRLLSFSPEEFPTLKAAGGQDKAGKEKGVLDLSYGPGPSLRPQNVTSWREGGGRHIISATSLSTSPTELGSRNSSTGDGAPSSACTSDSKDPSLRPAQPVRKGASQFMGNVYHPPTYHDMLPAFMCSPKSSENQGTVERGSFPLPQLRLEPRVPFRQFQMNDQDGKENRLGLSRPLRPLRQLVERAPRPTIINAENLKGLDDLDADADDGWAGLHEEVDYSEKLKFSDDEEEEEVVKDGRPKWNSWDPRRQRQLSMSSADSADAKRTREEGKDWAEAVGASRVVRKAPDPQPPPRKLHGWAPGPDYQKSSMGSMFRQQSIEDKEDKPPPRQKFIQSEMSEAVERARKRREEEERRAREERLAACAAKLKQLDQKCKQARKAGEARKQAEKEVPWSPSAEKASPQENGPAVHKGSPEFPAQETPTTFPEEAPTVSPAVAQSNSSEEEAREAGSPAQEFKYQKSLPPRFQRQQQQQQQEQLYKMQHWQPVYPPPSHPQRTFYPHHPQMLGFDPRWMMMPSYMDPRITPTRTPVDFYPSALHPSGLMKPMMPQESLNGTGCRSEDQNCVPPLQERKVTPIDSPPVWSPEGYMALQSKGYPLPHPKSSDTLAMDMRVRSPDEALPGGLSGCSSGSGHSPYALERAAHASADLPEASSKKAEKEAKLAAPRAGEQGEAMKQFDLNYGSAIIENCGSSPGEESEVGSMVGEGFIEVLTKKQRRLLEEERRKKEQAVQVPVKGRGLSSRIPPRFAKKQNNLCLEQGDVTVPGSSLGTEIWESSSQALPVQAPANDSWRKAVTAFSSTETGSAEQGFKSSQGDSGVDLSAESRESSATSSQRSSPYGTLKPEEMSGPGLAEPKADSHKEQAPKPSEQKDSEQGSGQSKEHRPGPIGNERSLKNRKGSEGAERLQGAVVPPVNGVEIHVDSVLPVPPIEFGVSPKDSDFSLPPGSASGPTGSPVVKLQDALASNGWVLVHMLNER

SEQ ID NO: 9707 - protein, 1831 aa, Artificial Sequence
  Synthetic polypeptide
MSDRLGQITKGKDGKSKYSTLSLFDKYKGKSVDAIRSSVIPRHGLQSLGKVAAARRMPPPANLPSLKSENKGNDPNIVIVPKDGTGWANKQDQQDPKSSSATASQPPESLPQPGLQKSVSNLQKPTQSISQENTNSVPGGPKSWAQLNGKPVGHEGGLRGSSRLLSFSPEEFPTLKAAGGQDKAGKEKGVLDLSYGPGPSLRPQNVTSWREGGGRHIISATSLSTSPTELGSRNSSTGDGAPSSACTSDSKDPSLRPAQPVRKGASQFMGNVYHPPTYHDMLPAFMCSPKSSENQGTVERGSFPLPQLRLEPRVPFRQFQMNDQDGKENRLGLSRPLRPLRQLVERAPRPTIINAENLKGLDDLDADADDGWAGLHEEVDYSEKLKFSDDEEEEEVVKDGRPKWNSWDPRRQRQLSMSSADSADAKRTREEGKDWAEAVGASRVVRKAPDPQPPPRKLHGWAPGPDYQKSSMGSMFRQQSIEDKEDKPPPRQKFIQSEMSEAVERARKRREEEERRAREERLAACAAKLKQLDQKCKQARKAGEARKQAEKEVPWSPSAEKASPQENGPAVHKGSPEFPAQETPTTFPEEAPTVSPAVAQSNSSEEEAREAGSPAQEFKYQKSLPPRFQRQQQQQQQEQLYKMQHWQPVYPPPSHPQRTFYPHHPQMLGFDPRWMMMPSYMDPRITPTRTPVDFYPSALHPSGLMKPMMPQESLNGTGCRSEDQNCVPPLQERKVTPIDSPPVWSPEGYMALQSKGYPLPHPKSSDTLAMDMRVRNESSFSASLGRAGGVSAQRDLFEERGEEYLSAFDKKAQADFDSCISSQRIGQELLFPPQENVQDAGAPGGHTQNLRCSPLEPDFVPDEKKPECGSWDVSHQPETADTAHGVERETPREGTAFNISSWDKNGSPNKQPSSEPEWTPEPRSSSSQHPEQTGRTRRSGPIKKPVLKALKVEDKEKELEKIKQELGEESTRLAKEKEQSPTAEKDEDEENDASLANSSTTTLEDKGPGHATFGREATKFEEEEKPDKAWEARPPRESSDVPPMKRNNWIFIDEEQAFGVRGQARGRGRGFREFTFRGRPAGGNGSGLCGGGVLGARSIYCSSQRSGRGRGLREFARPEDCPRAKPRRRVASETHSEGSEYEELPKRRRQRGSENGNEGSLLEREESTLKKGDCRDSWRSNKGCSEDHSGLDAKSRGPRAFGRALPPRLSNCGYGRRTFVSKESPHWQSKSPGSSWQEYGPSDTCGSRRPTDRDYVPDSYRHPDAFGGRGFEDSRAEDKRSFFQDEHVADSENAENRPFRRRRPPRQDKPPRFRRLRQERESLGLWGPEEEPHLLAGQWPGRPKLCSGDKSGTVGRRSPELSYQNSSDHANEEWETASESSDFSERRERREGPGSEPDSQVDGGLSGASLGEKKELAKRSFSSQRPVVDRQSRKLEPGGFGEKPVRPGGGDTSPRYESQQNGTPLKVKRSPDEALPGGLSGCSSGSGHSPYALERAAHASADLPEASSKKAEKEAKLAAPRAGEQGEAMKQFDLNYGSAIIENCGSSPGEESEVGSMVGEGFIEVLTKKQRRLLEEERRKKEQAVQVPVKGRGLSSRIPPRFAKKQNNLCLEQGDVTVPGSSLGTEIWESSSQALPVQAPANDSWRKAVTAFSSTETGSAEQGFKSSQGDSGVDLSAESRESSATSSQRSSPYGTLKPEEMSGPGLAEPKADSHKEQAPKPSEQKDSEQGSGQSKEHRPGPIGNERSLKNRKGSEGAERLQGAVVPPVNGVEIHVDSVLPVPPIEFGVSPKDSDFSLPPGSASGPTGSPVVKLQDALASNGWVLVHMLNER

SEQ ID NO: 9708 - protein, 4 aa, Artificial Sequence
  Synthetic polypeptide
WPGL

SEQ ID NO: 9709 - protein, 494 aa, Artificial Sequence
  Synthetic polypeptide
MAYQIVLELHFSHCAAMGAALLMLIENALITQSRLMLLESVLIFFNLLAVLSYLKFFNCQKHSPFSLSWWFWLTLTGVACSCAVGIKYMGVFTYVLVLGVAAVHAWHLLGDQTLSNVCVFCHLLARAVALLVIPVVLYLLFFYVHLILVFRSGPHDQIMSSAFQASLEGGLARITQGQPLEVAFGSQVTLRNVFGKPVPCWLHSHQDTYPMIYENGRGSSHQQQVTCYPFKDVNNWWIVKDPRRHQLVVSSPPRPVRHGDMVQLVHGMTTRSLNTHDVAAPLSPHSQEVSCYIDYNISMPAQNLWRLEIVNRGSDTDVWKTILSEVRFVHVNTSAVLKLSGAHLPDWGYRQLEIVGEKLSRGYHGSTVWNVEEHRYGASQEQRERERELHSPAQVDVSRNLSFMARFSELQWRMLALRSDDSEHKYSSSPLEWVTLDTNIAYWLHPRTSAQIHLLGNIVIWVSGSLALAIYALLSLWYLLRRRRNVHDLPQAKE

SEQ ID NO: 9710 - protein, 611 aa, Artificial Sequence
  Synthetic polypeptide
MWGFLKRPVVVTADINLSLVALTGMGLLSRLWRLTYPRAVVFDEVYYGQYISFYMKQIFFLDDSGPPFGHMVLALGGYLGGFDGNFLWNRIGAEYSSNVPVWSLRLLPALAGALSVPMAYQIVLELHFSHCAAMGAALLMLIENALITQSRLMLLESVLIFFNLLAVLSYLKFFNCQKHSPFSLSWWFWLTLTGVACSCAVGIKYMGVFTYVLVLGVAAVHAWHLLGDQTLSNVCVFCHLLARAVALLVIPVVLYLLFFYVHLILVFRSGPHDQIMSSAFQASLEGGLARITQGQPLEVAFGSQVTLRNVFGKPVPCWLHSHQDTYPMIYENGRGSSHQQQVTCYPFKDVNNWWIVKDPRRHQLVVSSPPRPVRHGDMVQLVHGMTTRSLNTHDVAAPLSPHSQEVSCYIDYNISMPAQNLWRLEIVNRGSDTDVWKTILSEVRFVHVNTSAVLKLSGAHLPDWGYRQLEIVGEKLSRGYHGSTVWNVEEHRYGASQEQRERERELHSPAQVDVSRNLSFMARFSELQWRMLALRSDDSEHKYSSSPLEWVTLDTNIAYWLHPRTSAQIHLLGNIVIWVSGSLALAIYALLSLWYLLRRRRNVHDLPQAKE

SEQ ID NO: 9711 - protein, 557 aa, Artificial Sequence
  Synthetic polypeptide
MKQIFFLDDSGPPFGHMVLALGGYLGGFDGNFLWNRIGAEYSSNVPVWSLRLLPALAGALSVPMAYQIVLELHFSHCAAMGAALLMLIENALITQSRLMLLESVLIFFNLLAVLSYLKFFNCQKHSPFSLSWWFWLTLTGVACSCAVGIKYMGVFTYVLVLGVAAVHAWHLLGDQTLSNVCVFCHLLARAVALLVIPVVLYLLFFYVHLILVFRSGPHDQIMSSAFQASLEGGLARITQGQPLEVAFGSQVTLRNVFGKPVPCWLHSHQDTYPMIYENGRGSSHQQQVTCYPFKDVNNWWIVKDPRRHQLVVSSPPRPVRHGDMVQLVHGMTTRSLNTHDVAAPLSPHSQEVSCYIDYNISMPAQNLWRLEIVNRGSDTDVWKTILSEVRFVHVNTSAVLKLSGAHLPDWGYRQLEIVGEKLSRGYHGSTVWNVEEHRYGASQEQRERERELHSPAQVDVSRNLSFMARFSELQWRMLALRSDDSEHKYSSSPLEWVTLDTNIAYWLHPRTSAQIHLLGNIVIWVSGSLALAIYALLSLWYLLRRRRNVHDLPQAKE

SEQ ID NO: 9712 - protein, 633 aa, Artificial Sequence
  Synthetic polypeptide
MWGFLKRPVVVTADINLSLVALTGMGLLSRLWRLTYPRAVVFDEVYYGQYISFYMKQIFFLDDSGPPFGHMVLALGGYLGGFDGNFLWNRIGAEYSSNVPVWSLRLLPALAGALSVPMAYQIVLELHFSHCAAMGAALLMLIENALITQSRLMLLESVLIFFNLLAVLSYLKFFNCQKHSPFSLSWWFWLTLTGVACSCAVGIKYMGVFTYVLVLGVAAVHAWHLLGDQTLSNVGADVQCCMRPACMGQMQMSQGVCVFCHLLARAVALLVIPVVLYLLFFYVHLILVFRSGPHDQIMSSAFQASLEGGLARITQGQPLEVAFGSQVTLRNVFGKPVPCWLHSHQDTYPMIYENGRGSSHQQQVTCYPFKDVNNWWIVKDPRRHQLVVSSPPRPVRHGDMVQLVHGMTTRSLNTHDVAAPLSPHSQEVSCYIDYNISMPAQNLWRLEIVNRGSDTDVWKTILSEVRFVHVNTSAVLKLSGAHLPDWGYRQLEIVGEKLSRGYHGSTVWNVEEHRYGASQEQRERERELHSPAQVDVSRNLSFMARFSELQWRMLALRSDDSEHKYSSSPLEWVTLDTNIAYWLHPRTSAQIHLLGNIVIWVSGSLALAIYALLSLWYLLRRRRNVHDLPQAKE

SEQ ID NO: 9713 - protein, 459 aa, Artificial Sequence
  Synthetic polypeptide
MLLESVLIFFNLLAVLSYLKFFNCQKHSPFSLSWWFWLTLTGVACSCAVGIKYMGVFTYVLVLGVAAVHAWHLLGDQTLSNVCVFCHLLARAVALLVIPVVLYLLFFYVHLILVFRSGPHDQIMSSAFQASLEGGLARITQGQPLEVAFGSQVTLRNVFGKPVPCWLHSHQDTYPMIYENGRGSSHQQQVTCYPFKDVNNWWIVKDPRRHQLVVSSPPRPVRHGDMVQLVHGMTTRSLNTHDVAAPLSPHSQEVSCYIDYNISMPAQNLWRLEIVNRGSDTDVWKTILSEVRFVHVNTSAVLKLSGAHLPDWGYRQLEIVGEKLSRGYHGSTVWNVEEHRYGASQEQRERERELHSPAQVDVSRNLSFMARFSELQWRMLALRSDDSEHKYSSSPLEWVTLDTNIAYWLHPRTSAQIHLLGNIVIWVSGSLALAIYALLSLWYLLRRRRNVHDLPQAKE

SEQ ID NO: 9714 - protein, 351 aa, Artificial Sequence
  Synthetic polypeptide
MAIFCGTELEQVCVFCHLLARAVALLVIPVVLYLLFFYVHLILVFRSGPHDQIMSSAFQASLEGGLARITQGQPLEVAFGSQVTLRNVFGKPVPCWLHSHQDTYPMIYENGRGSSHQQQVTCYPFKDVNNWWIVKDPRRHQLVVSSPPRPVRHGDMVQLVHGMTTRSLNTHDVAAPLSPHSQEVSCYIDYNISMPAQNLWRLEIVNRGSDTDVWKTILSEVRFVHVNTSAVLKLSGAHLPDWGYRQLEIVGEKLSRGYHGSTVWNVEEHRYGASQEQRERERELHSPAQVDVSRNLSFMARFSELQAQIHLLGNIVIWVSGSLALAIYALLSLWYLLRRRRNVHDLPQAKE

SEQ ID NO: 9715 - protein, 581 aa, Artificial Sequence
  Synthetic polypeptide
MWGFLKRPVVVTADINLSLVALTGMGLLSRLWRLTYPRAVVLFRRIRWQFFVEQNWSSVVAFPEYSSNVPVWSLRLLPALAGALSVPMAYQIVLELHFSHCAAMGAALLMLIENALITQSRLMLLESVLIFFNLLAVLSYLKFFNCQKHSPFSLSWWFWLTLTGVACSCAVGIKYMGVFTYVLVLGVAAVHAWHLLGDQTLSNVCVFCHLLARAVALLVIPVVLYLLFFYVHLILVFRSGPHDQIMSSAFQASLEGGLARITQGQPLEVAFGSQVTLRNVFGKPVPCWLHSHQDTYPMIYENGRGSSHQQQVTCYPFKDVNNWWIVKDPRRHQLVVSSPPRPVRHGDMVQLVHGMTTRSLNTHDVAAPLSPHSQEVSCYIDYNISMPAQNLWRLEIVNRGSDTDVWKTILSEVRFVHVNTSAVLKLSGAHLPDWGYRQLEIVGEKLSRGYHGSTVWNVEEHRYGASQEQRERERELHSPAQVDVSRNLSFMARFSELQWRMLALRSDDSEHKYSSSPLEWVTLDTNIAYWLHPRTSAQIHLLGNIVIWVSGSLALAIYALLSLWYLLRRRRNVHDLPQAKE

SEQ ID NO: 9716 - protein, 232 aa, Artificial Sequence
  Synthetic polypeptide
WRGGGCTSPATLGAARGAVGIGKEGQYQPLIASLTWGLVPLSQAQEIVNRGSDTDVWKTILSEVRFVHVNTSAVLKLSGAHLPDWGYRQLEIVGEKLSRGYHGSTVWNVEEHRYGASQEQRERERELHSPAQVDVSRNLSFMARFSELQWRMLALRSDDSEHKYSSSPLEWVTLDTNIAYWLHPRTSAQIHLLGNIVIWVSGSLALAIYALLSLWYLLRRRRNVHDLPQAKE

SEQ ID NO: 9717 - protein, 715 aa, Artificial Sequence
  Synthetic polypeptide
MDTDSQRSHLSSFTMKLMDKFHSPKIKRTPSKKGKPAEVSVKIPEKPVNKEATDRFLPEGYPLPLDLEQQAVEFMSTSAVASRSQRQKNLSWLEEKEKEVVSALRYFKTIVDKMAIDKKVLEMLPGSASKVLEAILPLVQNDPRIQHSSALSSCYSRVYQSLANLIRWSDQVMLEGVNSEDKEMVTTVKGVIKAVLDGVKELVRLTIEKQGRPSPTSPVKPSSPASKPDGPAELPLTDREVEILNKTTGMSQSTELLPDATDEEVAPPKPPLPGIRVVDNSPPPALPPKKRQSAPSPTRVAVVAPMSRATSGSSLPVGINRQDFDVDCYAQRRLSGGSHSYGGESPRLSPCSSIGKLSKSDEQLSSLDRDSGQCSRNTSCETLDHYDPDYEFLQQDLSNADQIPQQTAWNLSPLPESLGESGSPFLGPPFQLPLGGHPQPDGPLAPGQQTDTPPALPEKKRRSAASQTADGSGCRVSYERHPSQYDNISGEDLQSTAPIPSVPYAPFAAILPFQHGGSSAPVEFVGDFTAPESTGDPEKPPPLPEKKNKHMLAYMQLLEDYSEPQPSMFYQTPQNEHIYQQKNKLLMEVYGFSDSFSGVDSVQELAPPPALPPKQRQLEPPAGKDGHPRDPSAVSGVPGKDSRDGSERAPKSPDALESAQSEEEVDELSLIDHNEIMSRLTLKQEGDDGPDVRGGSGDILLVHATETDRKGMAQC

SEQ ID NO: 9718 - protein, 732 aa, Artificial Sequence
  Synthetic polypeptide
MSGGLGLRRSPEMSGKIEKADSQRSHLSSFTMKLMDKFHSPKIKRTPSKKGKPAEVSVKIPEKPVNKEATDRFLPEGYPLPLDLEQQAVEFMSTSAVASRSQRQKNLSWLEEKEKEVVSALRYFKTIVDKMAIDKKVLEMLPGSASKVLEAILPLVQNDPRIQHSSALSSCYSRVYQSLANLIRWSDQVMLEGVNSEDKEMVTTVKGVIKAVLDGVKELVRLTIEKQGRPSPTSPVKPSSPASKPDGPAELPLTDREVEILNKTTGMSQSTELLPDATDEEVAPPKPPLPGIRVVDNSPPPALPPKKRQSAPSPTRVAVVAPMSRATSGSSLPVGINRQDFDVDCYAQRRLSGGSHSYGGESPRLSPCSSIGKLSKSDEQLSSLDRDSGQCSRNTSCETLDHYDPDYEFLQQDLSNADQIPQQTAWNLSPLPESLGESGSPFLGPPFQLPLGGHPQPDGPLAPGQQTDTPPALPEKKRRSAASQTADGSGCRVSYERHPSQYDNISGEDLQSTAPIPSVPYAPFAAILPFQHGGSSAPVEFVGDFTAPESTGDPEKPPPLPEKKNKHMLAYMQLLEDYSEPQPSMFYQTPQNEHIYQQKNKLLMEVYGFSDSFSGVDSVQELAPPPALPPKQRQLEPPAGKDGHPRDPSAVSGVPGKDSRDGSERAPKSPDALESAQSEEEVDELSLIDHNEIMSRLTLKQEGDDGPDVRGGSGDILLVHATETDRKGMAQC

SEQ ID NO: 9719 - protein, 733 aa, Artificial Sequence
  Synthetic polypeptide
MGNAIEKQKPLKRSHLYPWKQDSQRSHLSSFTMKLMDKFHSPKIKRTPSKKGKPAEVSVKIPEKPVNKEATDRFLPEGYPLPLDLEQQAVEFMSTSAVASRSQRQKNLSWLEEKEKEVVSALRYFKTIVDKMAIDKKVLEMLPGSASKVLEAILPLVQNDPRIQHSSALSSCYSRVYQSLANLIRWSDQVMLEGVNSEDKEMVTTVKGVIKAVLDGVKELVRLTIEKQGRPSPTSPVKPSSPASKPDGPAELPLTDREVEILNKTTGMSQSTELLPDATDEEVAPPKPPLPGIRVVDNSPPPALPPKKRQSAPSPTRVAVVAPMSRATSGSSLPVGINRQDFDVDCYAQRRLSGGSHSYGGESPRLSPCSSIGKLSKSDEQLSSLDRDSGQCSRNTSCETLDHYDPDYEFLQQDLSNADQIPQQTAWNLSPLPESLGESGSPFLGPPFQLPLGGHPQPDGPLAPGQQTDTPPALPEKKRRSAASQTADGSGCRVSYERHPSQYDNISGEDLQSTAPIPSVPYAPFAAILPFQHGGSSAPVEFVGDFTAPESTGDPEKPPPLPEKKNKHMLAYMQLLEDYSEPQPSMFYQTPQNEHIYQQKNKLLMEVYGFSDSFSGVDSVQELAPPPALPPKQRQLEPPAGKDGHPRDPSAVSGVPGKDSRDGSERAPKSPDALESAQSEEEVDELSLIDHNEIMSRLTLKQEGDDGPDVRGGSGDILLVHATETDRKGMAQC

SEQ ID NO: 9720 - protein, 15 aa, Artificial Sequence
  Synthetic polypeptide
AGPAARPTPQAAAAE

SEQ ID NO: 9721 - protein, 108 aa, Artificial Sequence
  Synthetic polypeptide
MDTDSQRSHLSSFTMKLMDKFHSPKIKRTPSKKGKPAEVSVKIPEKPVNKEATDRFLPEGYPLPLDLEQQAVEFMSTSAVASRSQRQKALNSDRPSSNSISVTTAVWP

SEQ ID NO: 9722 - protein, 125 aa, Artificial Sequence
  Synthetic polypeptide
MSGGLGLRRSPEMSGKIEKADSQRSHLSSFTMKLMDKFHSPKIKRTPSKKGKPAEVSVKIPEKPVNKEATDRFLPEGYPLPLDLEQQAVEFMSTSAVASRSQRQKALNSDRPSSNSISVTTAVWP

SEQ ID NO: 9723 - protein, 126 aa, Artificial Sequence
  Synthetic polypeptide
MGNAIEKQKPLKRSHLYPWKQDSQRSHLSSFTMKLMDKFHSPKIKRTPSKKGKPAEVSVKIPEKPVNKEATDRFLPEGYPLPLDLEQQAVEFMSTSAVASRSQRQKALNSDRPSSNSISVTTAVWP

SEQ ID NO: 9724 - protein, 292 aa, Artificial Sequence
  Synthetic polypeptide
MLHLLALFLHCLPLASGDYDICKSWVTTDEGPTWEFYACQPKVMRLKDYVKVKVEPSGITCGDPPERFCSHENPYLCSNECDASNPDLAHPPRLMFDKEEEGLATYWQSITWSRYPSPLEANITLSWNKTVELTDDVVMTFEYGRPTVMVLEKSLDNGRTWQPYQFYAEDCMEAFGMSARRARDMSSSSAHRVLCTEEYSRWAGSKKEKHVRFEVRDRFAIFAGPDLRNMDNLYTRLESAKGLKEFFTLTDLRMRLLRPALGGTYVQRENLYKYFYAISNIEVIGRCGSGCL

SEQ ID NO: 9725 - protein, 463 aa, Artificial Sequence
  Synthetic polypeptide
VAQEWLNSPNRENFYQLQVRKFPADYIKYWEFAVYLEECELAKQLYPKENDLVFLAPERINEEKKDTERNDIQDLHEYHSGYVHKFRRTSVMRNGKTECYLSIQTQENFPANLNELVNCIVISSLVTTQRKLKAMSLLGSRNQLARAVLNPNPMDFCTKDLLTTTSERIIAYLRDFNEDQKKAIETAYAMVKHSPSVAKICLIHGPPGTGKSKTIVGLLYRLLTENQRKGHSDENSNAKIKQNRVLVCAPSNAAVDELMKKIILEFKEKCKDKKNPLGNCGDINLVRLGPEKSINSEVLKFSLDSQVNHRMKKELPSHVQAMHKRKEFLDYQLDELSRQRALCRGGREIQRQELDENISKVSKERQELASKIKEVQGRPQKTQSIIILESHIICCTLSTSGGLLLESAFRGQGGVPFSCVIVDENVESEDKRDGAGDTRELSDQETQDPVFTRRKGQKVEMIK

SEQ ID NO: 9726 - protein, 2221 aa, Artificial Sequence
  Synthetic polypeptide
MSTCCWCTPGGASTIDFLKRYASNTPSGEFQTADEDLCYCLECVAEYHKARDELPFLHEVLWELETLRLINHFEKSMKAEIGDDDELYIVDNNGEMPLFDITGQDFENKLRVPLLEILKYPYLLLHERVNELCVEALCRMEQANCSFQVFDKHPGIYLFLVHPNEMVRRWAILTARNLGKVDRDDYYDLQEVLLCLFKVIELGLLESPDIYTSSVLEKGKLILLPSHMYDTTNYKSYWLGICMLLTILEEQAMDSLLLGSDKQNDFMQSILHTMEREADDDSVDPFWPALHCFMVILDRLGSKVWGQLMDPIVAFQTIINNASYNREIRHIRNSSVRTKLEPESYLDDMVTCSQIVYNYNPEKTKKDSGWRTAICPDYCPNMYEEMETLASVLQSDIGQDMRVHNSTFLWFIPFVQSLMDLKDLGVAYIAQVVNHLYSEVKEVLNQTDAVCDKVTEFFLLILVSVIELHRNKKCLHLLWVSSQQWVEAVVKCAKLPTTAFTRSSEKSSGNCSKGTAMISSLSLHSMPSNSVQLAYVQLIRSLLKEGYQLGQQSLCKRFWDKLNLFLRGNLSLGWQLTSQETHELQSCLKQIIRNIKFKAPPCNTFVDLTSACKISPASYNKEESEQMGKTSRKDMHCLEASSPTFSKEPMKVQDSVLIKADNTIEGDNNEQNYIKDVKLEDHLLAGSCLKQSSKNIFTERAEDQIKISTRKQKSVKEISSYTPKDCTSRNGPERGCDRGIIVSTRLLTDSSTDALEKVSTSNEDFSLKDDALAKTSKRKTKVQKDEICAKLSHVIKKQHRKSTLVDNTINLDENLTVSNIESFYSRKDTGVQKGDGFIHNLSLDPSGVLDDKNGEQKSQNNVLPKEKQLKNEELVIFSFHENNCKIQEFHVDGKELIPFTEMTNASEKKSSPFKDLMTVPESRDEEMSNSTSVIYSNLTREQAPDISPKSDTLTDSQIDRDLHKLSLLAQASVITFPSDSPQNSSQLQRKVKEDKRCFTANQNNVGDTSRGQVIIISDSDDDDDERILSLEKLTKQDKICLEREHPEQHVSTVNSKEEKNPVKEEKTETLFQFEESDSQCFEFESSSEVFSVWQDHPDDNNSVQDGEKKCLAPIANTTNGQGCTDYVSEVVKKGAEGIEEHTRPRSISVEEFCEIEVKKPKRKRSEKPMAEDPVRPSSSVRNEGQSDTNKRDLVGNDFKSIDRRTSTPNSRIQRATTVSQKKSSKLCTCTEPIRKVPVSKTPKKTHSDAKKGQNRSSNYLSCRTTPAIVPPKKFRQCPEPTSTAEKLGLKKGPRKAYELSQRSLDYVAQLRDHGKTVGVVDTRKKTKLISPQNLSVRNNKKLLTSQELQMQRQIRPKSQKNRRRLSDCESTDVKRAGSHTAQNSDIFVPESDRSDYNCTGGTEVLANSNRKQLIKCMPSEPETIKAKHGSPATDDACPLNQCDSVVLNGTVPTNEVIVSTSEDPLGGGDPTARHIEMAALKEGEPDSSSDAEEDNLFLTQNDPEDMDLCSQMENDNYKLIELIHGKDTVEVEEDSVSRPQLESLSGTKCKYKDCLETTKNQGEYCPKHSEVKAADEDVFRKPGLPPPASKPLRPTTKIFSSKSTSRIAGLSKSLETSSALSPSLKNKSKGIQSILKVPQPVPLIAQKPVGEMKNSCNVLHPQSPNNSNRQGCKVPFGESKYFPSSSPVNILLSSQSVSDTFVKEVLKWKYEMFLNFGQCGPPASLCQSISRPVPVRFHNYGDYFNVFFPLMVLNTFETVAQEWLNSPNRENFYQLQVRKFPADYIKYWEFAVYLEECELAKQLYPKENDLVFLAPERINEEKKDTERNDIQDLHEYHSGYVHKFRRTSVMRNGKTECYLSIQTQENFPANLNELVNCIVISSLVTTQRKLKAMSLLGSRNQLARAVLNPNPMDFCTKDLLTTTSERIIAYLRDFNEDQKKAIETAYAMVKHSPSVAKICLIHGPPGTGKSKTIVGLLYRLLTENQRKGHSDENSNAKIKQNRVLVCAPSNAAVDELMKKIILEFKEKCKDKKNPLGNCGDINLVRLGPEKSINSEVLKFSLDSQVNHRMKKELPSHVQAMHKRKEFLDYQLDELSRQRALCRGGREIQRQELDENISKVSKERQELASKIKEVQGRPQKTQSIIILESHIICCTLSTSGGLLLESAFRGQGGVPFSCVIVDENVESEDKRDGAGDTRELSDQETQDPVFTRRKGQKVEMIK

SEQ ID NO: 9727 - protein, 797 aa, Artificial Sequence
  Synthetic polypeptide
MEGESSRFEIHTPVSDKKKKKCSIHKERPQKHSHEIFRDSSLVNEQSQITRRKKRKKDFQHLISSPLKKSRICDETANATSTLKKRKKRRYSALEVDEEAGVTVVLVDKENINNTPKHFRKDVDVVCVDMSIEQKLPRKPKTDKFQVLAKSHAHKSEALHSKVREKKNKKHQRKAASWESQRARDTLPQSESHQEESWLSVGPGGEITELPASAHKNKSKKKKKKSSNREYETLAMPEGSQAGREAGTDMQESQPTVGLDDETPQLLGPTHKKKSKKKKKKKSNHQEFEALAMPEGSQVGSEVGADMQESRPAVGLHGETAGIPAPAYKNKSKKKKKKSNHQEFEAVAMPESLESAYPEGSQVGSEVGTVEGSTALKGFKESNSTKKKSKKRKLTSVKRARVSGDDFSVPSKNSESTLFDSVEGDGAMMEEGVKSRPRQKKTQACLASKHVQEAPRLEPANEEHNVETAEDSEIRYLSADSGDADDSDADLGSAVKQLQEFIPNIKDRATSTIKRMYRDDLERFKEFKAQGVAIKFGKFSVKENKQLEKNVEDFLALTGIESADKLLYTDRYPEEKSVITNLKRRYSFRLHIGRNIARPWKLIYYRAKKMFDVNNYKGRYSEGDTEKLKMYHSLLGNDWKTIGEMVARSSLSVALKFSQISSQRNRGAWSKSETRKLIKAVEEVILKKMSPQELKEVDSKLQENPESCLSIVREKLYKGISWVEVEAKVQTRNWMQCKSKWTEILTKRMTNGRRIYYGMNALRAKVSLIERLYEINVEDTNEIDWEDLASAIGYSGG

SEQ ID NO: 9728 - protein, 772 aa, Artificial Sequence
  Synthetic polypeptide
MAPDLASQRHSESFPSVNSRPNVILPGREGRREGLPPGGGTRGSLVPTRPVPPSPAPLGTSPYSWSRSGPGRGGGAGSSRVPRGVPGPAVCAPGSLLHHASPTQTMAAADGSLFDNPRTFSRRPPAQASRQAKATKRKYQASSEAPPAKRRNETSFLPAKKTSVKETQRTFKGNAQKMFSPKKHSVSTSDRNQEERQCIKTSSLFKNNPDIPELHRPVVKQVQEKVFTSAAFHELGLHPHLISTINTVLKMSSMTSVQKQSIPVLLEGRDALVRSQTGSGKTLAYCIPVVQSLQAMESKIQRSDGPYALVLVPTRELALQSFDTVQKLLKPFTWIVPGVLMGGEKRKSEKARLRKGINILISTPGRLVDHIKSTKNIHFSRLRWLVFDEADRILDLGFEKDITVILNAVNAECQKRQNVLLSATLTEGVTRLADISLHDPVSISVLDKSHDQLNPKDKAVQEVCPPPAGDKLDSFAIPESLKQHVTVVPSKLRLVCLAAFILQKCKFEEDQKMVVFFSSCELVEFHYSLFLQTLLSSSGAPASGQLPSASMRLKFLRLHGGMEQEERTAVFQEFSHSRRGVLLCTDVAARGLDLPQVTWIVQYNAPSSPAEYIHRIGRTARIGCHGSSLLILAPSEAEYVNSLASHKINVSEIKMEDILCVLTRDDCFKGKRWGAQKSHAVGPQEIRERATVLQTVFEDYVHSSERRVSWAKKALQSFIQAYATYPRELKHIFHVRSLHLGHVAKSFGLRDAPRNLSALTRKKRKAHVKRCN

SEQ ID NO: 9729 - protein, 699 aa, Artificial Sequence
  Synthetic polypeptide
MAPDLASQRHSESFPSVNSRPNVILPGREGRREGLPPGGGTRGSLVPTRPVPPSPAPLGTSPYSWSRSGPGRGGGAGSSRVPRGVPGPAVCAPGSLLHHASPTQTMAAADGSLFDNPRTFSRRPPAQASRQAKATKRKYQASSEAPPAKRRNETSFLPAKKTSVKETQRTFKGNAQKMFSPKKHSVSTSDRNQEERQCIKTSSLFKNNPDIPELHRPVVKQVQEKVFTSAAFHELGLHPHLISTINTVLKMSSMTSVQKQSIPVLLEGRDALVRSQTGSGKTLAYCIPVVQSLQAMESKIQRSDGPYALVLVPTRELALQSFDTVQKLLKPFTWIVPGVLMGGEKRKSEKARLRKGINILISTPGRLVDHIKSTKNIHFSRLRWLVFDEADRILDLGFEKDITVILNAVNAECQKRQNVLLSATLTEGVTRLADISLHDPVSISVLDKSHDQLNPKDKAVQEVCPPPAGDKLDSFAIPESLKQHVTVVPSKLRLVCLAAFILQKCKFEEDQKMVVFFSSCELVEFHYSLFLQTLLSSSGAPASGQLPSASMRLKFLRLHGGMEQEERTAVFQEFSHSRRGVLLCTDVAARGLDLPQVTWIVQNTSTGLEEPPGLAAMGAACSFWLLRRQNMSTRWLLTKSTLQSFIQAYATYPRELKHIFHVRSLHLGHVAKSFGLRDAPRNLSALTRKKRKAHVKRCN

SEQ ID NO: 9730 - protein, 643 aa, Artificial Sequence
  Synthetic polypeptide
MQAKATKRKYQASSEAPPAKRRNETSFLPAKKTSVKETQRTFKGNAQKMFSPKKHSVSTSDRNQEERQCIKTSSLFKNNPDIPELHRPVVKQVQEKVFTSAAFHELGLHPHLISTINTVLKMSSMTSVQKQSIPVLLEGRDALVRSQTGSGKTLAYCIPVVQSLQAMESKIQRSDGPYALVLVPTRELALQSFDTVQKLLKPFTWIVPGVLMGGEKRKSEKARLRKGINILISTPGRLVDHIKSTKNIHFSRLRWLVFDEADRILDLGFEKDITVILNAVNAECQKRQNVLLSATLTEGVTRLADISLHDPVSISVLDKSHDQLNPKDKAVQEVCPPPAGDKLDSFAIPESLKQHVTVVPSKLRLVCLAAFILQKCKFEEDQKMVVFFSSCELVEFHYSLFLQTLLSSSGAPASGQLPSASMRLKFLRLHGGMEQEERTAVFQEFSHSRRGVLLCTDVAARGLDLPQVTWIVQYNAPSSPAEYIHRIGRTARIGCHGSSLLILAPSEAEYVNSLASHKINVSEIKMEDILCVLTRDDCFKGKRWGAQKSHAVGPQEIRERATVLQTVFEDYVHSSERRVSWAKKALQSFIQAYATYPRELKHIFHVRSLHLGHVAKSFGLRDAPRNLSALTRKKRKAHVKRCN

SEQ ID NO: 9731 - protein, 226 aa, Artificial Sequence
  Synthetic polypeptide
MPRSFLVKSKKAHTYHQPRVQEDEPLWPPALTPVPRDQAPSNSPVLSTLFPNQCLDWTNLKREPELEQDQNLARMAPAPEGPIVLSRPQDGDSPLSDSPPFYKPSFSWDTLATTYGHSYRQAPSTMQSAFLEHSVSLYGSPLVPSTEPALDFSLRYSPGMDAYHCVKCNKERSFECRMCGKAFKRSSTLSTHLLIHSDTRPYPCQFCGKRFHQKSDMKKHTYIHTA

SEQ ID NO: 9732 - protein, 272 aa, Artificial Sequence
  Synthetic polypeptide
MPRSFLVKSKKAHTYHQPRVQEDEPLWPPALTPVPRDQAPSNSPVLSTLFPNQCLDWTNLKREPELEQDQNLARMAPAPEGPIVLSRPQDGDSPLSDSPPFYKPSFSWDTLATTYGHSYRQAPSTMQSAFLEHSVSLYGSPLVPSTEPALDFSLRYSPGMDAYHCVKCNKVFSTPHGLEVHVRRSHSGTRPFACDICGKTFGHAVSLEQHTHVHSQERSFECRMCGKAFKRSSTLSTHLLIHSDTRPYPCQFCGKRFHQKSDMKKHTYIHTA

SEQ ID NO: 9733 - protein, 139 aa, Artificial Sequence
  Synthetic polypeptide
MHRRRLALGLGFCLLAGTSLSVLWVYLENWLPVSYVPYYLPCPEILPMMMALSCLCHQQHEAALQEGEATPARGMVTVPSAQAAGAQAHTAADTHTLVGAHRLRGNLQPRASAAHLPATEPDHWGHGVCRGEIKDHKNS

SEQ ID NO: 9734 - protein, 133 aa, Artificial Sequence
  Synthetic polypeptide
MHRRRLALGLGFCLLAGTSLSVLWVYLENWLPVSYVPYYLPCPEIFNMKLHYKREKPLQPVVWSQYPQPKLLEHRPTQLLTLTPWLAPIVSEGTFNPELLQHIYQPLNLTIGVTVFAVGKSKIIRILRTSLGT

SEQ ID NO: 9735 - protein, 116 aa, Artificial Sequence
  Synthetic polypeptide
MHRRRLALGLGFCLLAGTSLSVLWVYLENWLPVSYVPYYLPCPEILSQYPQPKLLEHRPTQLLTLTPWLAPIVSEGTFNPELLQHIYQPLNLTIGVTVFAVGKSKIIRILRTSLGT

SEQ ID NO: 9736 - protein, 92 aa, Artificial Sequence
  Synthetic polypeptide
MHRRRLALGLGFCLLAGTSLSVLWVYLENWLPVSYVPYYLPCPEILPMMMALSCLCHQQHEAALQEGEATPARGMVTVPSAQAAGAQVDSSA

SEQ ID NO: 9737 - protein, 105 aa, Artificial Sequence
  Synthetic polypeptide
MHRRRLALGLGFCLLAGTSLSVLWVYLENWLPVSYVPYYLPCPEIFNMKLHYKREKPLQPVVWSQYPQPKLLEHRWIVVPSSLEFGGADERYCNICTVLALRRCS

SEQ ID NO: 9738 - protein, 88 aa, Artificial Sequence
  Synthetic polypeptide
MHRRRLALGLGFCLLAGTSLSVLWVYLENWLPVSYVPYYLPCPEILSQYPQPKLLEHRWIVVPSSLEFGGADERYCNICTVLALRRCS

SEQ ID NO: 9739 - protein, 566 aa, Artificial Sequence
  Synthetic polypeptide
MSTATTVAPAGIPATPGPVNPPPPEVSNPSKPGRKTNQLQYMQNVVVKTLWKHQFAWPFYQPVDAIKLNLPDYHKIIKNPMDMGTIKKRLENNYYWSASECMQDFNTMFTNCYIYNKPTDDIVLMAQALEKIFLQKVAQMPQEEVELLPPAPKGKGRKPAAGAQSAGTQQVAAVSSVSPATPFQSVPPTVSQTPVIAATPVPTITANVTSVPVPPAAAPPPPATPIVPVVPPTPPVVKKKGVKRKADTTTPTTSAITASRSESPPPLSDPKQAKVVARRESGGRPIKPPKKDLEDGEVPQHAGKKGKLSEHLRYCDSILREMLSKKHAAYAWPFYKPVDAEALELHDYHDIIKHPMDLSTVKRKMDGREYPDAQGFAADVRLMFSNCYKYNPPDHEVVAMARKLQDVFEMRFAKMPDEPVEAPALPAPAAPMVSKGAESSRSSEESSSDSGSSDSEEERATRLAELQEQLKAVHEQLAALSQAPVNKPKKKKEKKEKEKKKKDKEKEKEKHKVKAEEEKKAKVAPPAKQAQQKKAPAKKANSTTTAGRKNWPGLVTGACNPSYSGG

SEQ ID NO: 9740 - protein, 236 aa, Artificial Sequence
  Synthetic polypeptide
MDVHTRWKARSALRPGAPLLPPLLLLLLWAPPPSRAAQPADLLKVLDFHNLPDGITKTTGFCATRRSSKGPDVAYRVTKDAQLSAPTKQLYPASAFPEDFSILTTVKAKKGSQAFLVSIYNEQGIQQIGLELGRSPVFLYEDHTGKPGPEDYPLFRGINLSDGKWHRIALSVHKKNVTLILDCKKKTTKFLDRSDHPMIDINGIIVFGTRILDEEVFENEDSEDLSSWDYVLELRK

SEQ ID NO: 9741 - protein, 2308 aa, Artificial Sequence
  Synthetic polypeptide
MQPPPQTVPSGMAGPPPAGNPRSVFWASSPYRRRANNNAAVAPTTCPLQPVTDPFAFSRQALQSTPLGSSSKSSPPVLQGPAPAGFSQHPGLLVPHTHARDSSQGPCEPLPGPLTQPRAHASPFSGALTPSAPPGPEMNRSAEVGPSSEPEVQTLPYLPHYIPGVDPETSHGGHPHGNMPGLDRPLSRQNPHDGVVTPAASPSLPQPGLQMPGQWGPVQGGPQPSGQHRSPCPEGPVPSGVPCATSVPHFPTPSILHQGPGHEQHSPLVAPPAALPSDGRDEVSHLQSGSHLANNSDPESTFRQNPRIVNHWASPELRQNPGVKNEHRPASALVNPLARGDSPENRTHHPLGAGAGSGCAPLEADSGASGALAMFFQGGETENEENLSSEKAGLSGQADFDDFCSSPGLGRPPAPTHVGAGSLCQALLPGPSNEAAGDVWGDTASTGVPDASGSQYENVENLEFVQNQEVLPSEPLNLDPSSPSDQFRYGPLPGPAVPRHGAVCHTGAPDATLHTVHPDSVSSSYSSRSHGRLSGSARPQELVGTFIQQEVGKPEDEASGSFFKQIDSSPVGGETDETTVSQNYRGSVSQPSTPSPPKPTGIFQTSANSSFEPVKSHLVGVKPFEADRANVVGEVRETCVRQKQCRPAAALPDASPGNLEQPPDNMETLCAPQVCPLPLNSTTEAVHMLPHAGAPPLDTVYPAPEKRPSARTQGPVKCESPATTLWAQSELPDFGGNVLLAPAAPALYVCAKPQPPVVQPPEEAMSGQQSRNPSSAAPVQSRGGIGASENLENPPKMGEEEALQSQASSGYASLLSSPPTESLQNPPVLIAQPDHSYNLAQPINFSVSLSNSHEKNQSWREALVGDRPAVSSWALGGDSGENTSLSGIPTSSVLSLSLPSSVAQSNFPQGSGASEMVSNQPANLLVQPPSQPVPENLVPESQKDRKAGSALPGFANSPAGSTSVVLVPPAHGTLVPDGNKANHSSHQEDTYGALDFTLSRTLENPVNVYNPSHSDSLASQQSVASHPRQSGPGAPNLDRFYQQVTKDAQGQPGLERAQQELVPPQQQASPPQLPKAMFSELSNPESLPAQGQAQNSAQSPASLVLVDAGQQLPPRPPQSSSVSLVSSGSGQAAVPSEQPWPQPVPALAPGPPPQDLAAYYYYRPLYDAYQPQYSLPYPPEPGAASLYYQDVYSLYEPRYRPYDGAASAYAQNYRYPEPERPSSRASHSSERPPPRQGYPEGYYSSKSGWSSQSDYYASYYSSQYDYGDPGHWDRYHYSARVRDPRTYDRRYWCDAEYDAYRREHSAFGDRPEKRDNNWRYDPRFTGSFDDDPDPHRDPYGEEVDRRSVHSEHSARSLHSAHSLASRRSSLSSHSHQSQIYRSHNVAAGSYEAPLPPGSFHGDFAYGTYRSNFSSGPGFPEYGYPADTVWPAMEQVSSRPTSPEKFSVPHVCARFGPGGQLIKVIPNLPSEGQPALVEVHSMEALLQHTSEQEEMRAFPGPLAKDDTHKVDVINFAQNKAMKCLQNENLIDKESASLLWNFIVLLCRQNGTVVGTDIAELLLRDHRTVWLPGKSPNEANLIDFTNEAVEQVEEEESGEAQLSFLTGGPAAAASSLERETERFRELLLYGRKKDALESAMKNGLWGHALLLASKMDSRTHARVMTRFANSLPINDPLQTVYQLMSGRMPAASTCCGDEKWGDWRPHLAMVLSNLNNNMDVESRTMATMGDTLASRGLLDAAHFCYLMAQAGFGVYTKKTTKLVLIGSNHSLPFLKFATNEAIQRTEAYEYAQSLGAETCPLPSFQVFKFIYSCRLAEMGLATQAFHYCEAIAKSILTQPHLYSPVLISQLVQMASQLRLFDPQLKEKPEEESLAAPTWLVHLQQVERQIKEGAGVWHQDGALPQQCPGTPSSEMEQLDRPGLSQPGALGIANPLLAVPAPSPEHSSPSVRLLPSAPQTLPDGPLASPARVPMFPVPLPPGPLEPGPGCVTPGPALGFLEPSGPGLPPGVPPLQERRHLLQEARSPDPGIVPQEAPVGNSLSELSEENFDGKFANLTPSRTVPDSEAPPGWDRADSGPTQPPLSLSPAPETKRPGQAAKKETKEPKKGESWFFRWLPGKKKTEAYLPDDKNKSIVWDEKKNQWVNLNEPEEEKKAPPPPPTSMPKTVQAAPPALPGPPGAPVNMYSRRAAGTRARYVDVLNPSGTQRSEPALAPADFVAPLAPLPIPSNLFVPTPDAEEPQLPDGTGREGPAAARGLANPEPAPEPKLLRRLRQKNRLDPGGRGCSELRLRHCTPSRATEPDSISKKKKKK

SEQ ID NO: 9742 - protein, 702 aa, Artificial Sequence
  Synthetic polypeptide
PAAAASSLERETERFRELLLYGRKKDALESAMKNGLWGHALLLASKMDSRTHARVMTRFANSLPINDPLQTVYQLMSGRMPAASTCCGDEKWGDWRPHLAMVLSNLNNNMDVESRTMATMGDTLASRGLLDAAHFCYLMAQAGFGVYTKKTTKLVLIGSNHSLPFLKFATNEAIQRTEAYEYAQSLGAETCPLPSFQVFKFIYSCRLAEMGLATQAFHYCEAIAKSILTQPHLYSPVLISQLVQMASQLRLFDPQLKEKPEEESLAAPTWLVHLQQVERQIKEGAGVWHQDGALPQQCPGTPSSEMEQLDRPGLSQPGALGIANPLLAVPAPSPEHSSPSVRLLPSAPQTLPDGPLASPARVPMFPVPLPPGPLEPGPGCVTPGPALGFLEPSGPGLPPGVPPLQERRHLLQEARSPDPGIVPQEAPVGNSLSELSEENFDGKFANLTPSRTVPDSEAPPGWDRADSGPTQPPLSLSPAPETKRPGQAAKKETKEPKKGESWFFRWLPGKKKTEAYLPDDKNKSIVWDEKKNQWVNLNEPEEEKKAPPPPPTSMPKTVQAAPPALPGPPGAPVNMYSRRAAGTRARYVDVLNPSGTQRSEPALAPADFVAPLAPLPIPSNLFVPTPDAEEPQLPDGTGREGPAAARGLANPEPAPEPKLLRRLRQKNRLDPGGRGCSELRLRHCTPSRATEPDSISKKKKKK

SEQ ID NO: 9743 - protein, 1030 aa, Artificial Sequence
  Synthetic polypeptide
ARVRDPRTYDRRYWCDAEYDAYRREHSAFGDRPEKRDNNWRYDPRFTGSFDDDPDPHRDPYGEEVDRRSVHSEHSARSLHSAHSLASRRSSLSSHSHQSQIYRSHNVAAGSYEAPLPPGSFHGDFAYGTYRSNFSSGPGFPEYGYPADTVWPAMEQVSSRPTSPEKFSVPHVCARFGPGGQLIKVIPNLPSEGQPALVEVHSMEALLQHTSEQEEMRAFPGPLAKDDTHKVDVINFAQNKAMKCLQNENLIDKESASLLWNFIVLLCRQNGTVVGTDIAELLLRDHRTVWLPGKSPNEANLIDFTNEAVEQVEEEESGEAQLSFLTGGPAAAASSLERETERFRELLLYGRKKDALESAMKNGLWGHALLLASKMDSRTHARVMTRFANSLPINDPLQTVYQLMSGRMPAASTCCGDEKWGDWRPHLAMVLSNLNNNMDVESRTMATMGDTLASRGLLDAAHFCYLMAQAGFGVYTKKTTKLVLIGSNHSLPFLKFATNEAIQRTEAYEYAQSLGAETCPLPSFQVFKFIYSCRLAEMGLATQAFHYCEAIAKSILTQPHLYSPVLISQLVQMASQLRLFDPQLKEKPEEESLAAPTWLVHLQQVERQIKEGAGVWHQDGALPQQCPGTPSSEMEQLDRPGLSQPGALGIANPLLAVPAPSPEHSSPSVRLLPSAPQTLPDGPLASPARVPMFPVPLPPGPLEPGPGCVTPGPALGFLEPSGPGLPPGVPPLQERRHLLQEARSPDPGIVPQEAPVGNSLSELSEENFDGKFANLTPSRTVPDSEAPPGWDRADSGPTQPPLSLSPAPETKRPGQAAKKETKEPKKGESWFFRWLPGKKKTEAYLPDDKNKSIVWDEKKNQWVNLNEPEEEKKAPPPPPTSMPKTVQAAPPALPGPPGAPVNMYSRRAAGTRARYVDVLNPSGTQRSEPALAPADFVAPLAPLPIPSNLFVPTPDAEEPQLPDGTGREGPAAARGLANPEPAPEPKLLRRLRQKNRLDPGGRGCSELRLRHCTPSRATEPDSISKKKKKK

SEQ ID NO: 9744 - protein, 2130 aa, Artificial Sequence
  Synthetic polypeptide
MPGLDRPLSRQNPHDGVVTPAASPSLPQPGLQMPGQWGPVQGGPQPSGQHRSPCPEGPVPSGVPCATSVPHFPTPSILHQGPGHEQHSPLVAPPAALPSDGRDEVSHLQSGSHLANNSDPESTFRQNPRIVNHWASPELRQNPGVKNEHRPASALVNPLARGDSPENRTHHPLGAGAGSGCAPLEADSGASGALAMFFQGGETENEENLSSEKAGLSGQADFDDFCSSPGLGRPPAPTHVGAGSLCQALLPGPSNEAAGDVWGDTASTGVPDASGSQYENVENLEFVQNQEVLPSEPLNLDPSSPSDQFRYGPLPGPAVPRHGAVCHTGAPDATLHTVHPDSVSSSYSSRSHGRLSGSARPQELVGTFIQQEVGKPEDEASGSFFKQIDSSPVGGETDETTVSQNYRGSVSQPSTPSPPKPTGIFQTSANSSFEPVKSHLVGVKPFEADRANVVGEVRETCVRQKQCRPAAALPDASPGNLEQPPDNMETLCAPQVCPLPLNSTTEAVHMLPHAGAPPLDTVYPAPEKRPSARTQGPVKCESPATTLWAQSELPDFGGNVLLAPAAPALYVCAKPQPPVVQPPEEAMSGQQSRNPSSAAPVQSRGGIGASENLENPPKMGEEEALQSQASSGYASLLSSPPTESLQNPPVLIAQPDHSYNLAQPINFSVSLSNSHEKNQSWREALVGDRPAVSSWALGGDSGENTSLSGIPTSSVLSLSLPSSVAQSNFPQGSGASEMVSNQPANLLVQPPSQPVPENLVPESQKDRKAGSALPGFANSPAGSTSVVLVPPAHGTLVPDGNKANHSSHQEDTYGALDFTLSRTLENPVNVYNPSHSDSLASQQSVASHPRQSGPGAPNLDRFYQQVTKDAQGQPGLERAQQELVPPQQQASPPQLPKAMFSELSNPESLPAQGQAQNSAQSPASLVLVDAGQQLPPRPPQSSSVSLVSSGSGQAAVPSEQPWPQPVPALAPGPPPQDLAAYYYYRPLYDAYQPQYSLPYPPEPGAASLYYQDVYSLYEPRYRPYDGAASAYAQNYRYPEPERPSSRASHSSERPPPRQGYPEGYYSSKSGWSSQSDYYASYYSSQYDYGDPGHWDRYHYSARVRDPRTYDRRYWCDAEYDAYRREHSAFGDRPEKRDNNWRYDPRFTGSFDDDPDPHRDPYGEEVDRRSVHSEHSARSLHSAHSLASRRSSLSSHSHQSQIYRSHNVAAGSYEAPLPPGSFHGDFAYGTYRSNFSSGPGFPEYGYPADTVWPAMEQVSSRPTSPEKFSVPHVCARFGPGGQLIKVIPNLPSEGQPALVEVHSMEALLQHTSEQEEMRAFPGPLAKDDTHKVDVINFAQNKAMKCLQNENLIDKESASLLWNFIVLLCRQNGTVVGTDIAELLLRDHRTVWLPGKSPNEANLIDFTNEAVEQVEEEESGEAQLSFLTGGPAAAASSLERETERFRELLLYGRKKDALESAMKNGLWGHALLLASKMDSRTHARVMTRFANSLPINDPLQTVYQLMSGRMPAASTCCGDEKWGDWRPHLAMVLSNLNNNMDVESRTMATMGDTLASRGLLDAAHFCYLMAQAGFGVYTKKTTKLVLIGSNHSLPFLKFATNEAIQRTEAYEYAQSLGAETCPLPSFQVFKFIYSCRLAEMGLATQAFHYCEAIAKSILTQPHLYSPVLISQLVQMASQLRLFDPQLKEKPEEESLAAPTWLVHLQQVERQIKEGAGVWHQDGALPQQCPGTPSSEMEQLDRPGLSQPGALGIANPLLAVPAPSPEHSSPSVRLLPSAPQTLPDGPLASPARVPMFPVPLPPGPLEPGPGCVTPGPALGFLEPSGPGLPPGVPPLQERRHLLQEARSPDPGIVPQEAPVGNSLSELSEENFDGKFANLTPSRTVPDSEAPPGWDRADSGPTQPPLSLSPAPETKRPGQAAKKETKEPKKGESWFFRWLPGKKKTEAYLPDDKNKSIVWDEKKNQWVNLNEPEEEKKAPPPPPTSMPKTVQAAPPALPGPPGAPVNMYSRRAAGTRARYVDVLNPSGTQRSEPALAPADFVAPLAPLPIPSNLFVPTPDAEEPQLPDGTGREGPAAARGLANPEPAPEPKLLRRLRQKNRLDPGGRGCSELRLRHCTPSRATEPDSISKKKKKK

SEQ ID NO: 9745 - protein, 336 aa, Artificial Sequence
  Synthetic polypeptide
MDLLPTSILLASLWICSHLHPPGVSVDLPPTSILLVSLWICSHLHPPGVSVDRPPPPSSWCLCGSPPTSILLVSLWICSPPPSSWCLCGSAPTSILLVSLWIWRLWGLTEGESWFFRWLPGKKKTEAYLPDDKNKSIVWDEKKNQWVNLNEPEEEKKAPPPPPTSMPKTVQAAPPALPGPPGAPVNMYSRRAAGTRARYVDVLNPSGTQRSEPALAPADFVAPLAPLPIPSNLFVPTPVSSVRPQGRSGRNDGLLALSSPDAEEPQLPDGTGREGPAAARGLANPEPAPEPKLLRRLRQKNRLDPGGRGCSELRLRHCTPSRATEPDSISKKKKKK

SEQ ID NO: 9746 - protein, 30 aa, Artificial Sequence
  Synthetic polypeptide
MRRLRRLAHLVLFCPFSKRLQLGVRGCSEL

SEQ ID NO: 9747 - protein, 49 aa, Artificial Sequence
  Synthetic polypeptide
MRRLRRLAHLVLFCPFSKRLQAQWLTPVIPALWEAKAGRSPEVRSSRPA

SEQ ID NO: 9748 - protein, 27 aa, Artificial Sequence
  Synthetic polypeptide
MREIVHLQAGQCGNQIGAKPRPARARP

SEQ ID NO: 9749 - protein, 464 aa, Artificial Sequence
  Synthetic polypeptide
MFAGLQDLGVANGEDLKETLTNCTEPLKAIEQFQTENGVLLPSLQSALPFLDLHGTPRLEFHQSVFDELRDKLLERVSAIASEGKAEERYKKLEDLLEKSFSLVKMPSLQPVVMCVMKHLPKVPEKKLKLVMADKELYRACAVEVKRQIWQDNQALFGDEVSPLLKQYILEKESALFSTELSVLHNFFSPSPKTRRQGEVVQRLTRMVGKNVKLYDMVLQFLRTLFLRTRNVHYCTLRAELLMSLHDLDVGEICTVDPCHKFTWCLDACIRERFVDSKRARELQGFLDGVKKGQEQVLGDLSMILCDPFAINTLALSTVRHLQELVGQETLPRDSPDLLLLLRLLALGQGAWDMIDSQVFKEPKMEVELITRFLPMLMSFLVDDYTFNVDQKLPAEEKAPVSYPNTLPESFTKFLQEQRMACEVGLYYVLHITKQRNKNALLRLLPGLGPTPCLPLSTSHPPLH

SEQ ID NO: 9750 - protein, 319 aa, Artificial Sequence
  Synthetic polypeptide
MELLLPEERLPAAVAVELRRFRLQGRATEADSRLEVKDMKDRYYQLPIPRENVHLLASWEDLTRHEGALLQCHQVVGVDVEWTPVFVAGGRPRPSLLQVAVEGHVFLLDVLALSQPPTGQGAQAFSRLVAQLLSDPSITKLGYGMVGDLQKLGTSCPALAHVEKQILGGMDLLLVHRQMRVASVPAPAVDRARELRGLSLLVQQVLGTALDKTQQLSNWDRRPLCEEQVIYAAADAYCLLEVHQALCREPARFHLSEDLAGSRRPRHRERPGARKPPGLQKASAPAAPRQGLARSLRCLGVDARMLGNGEDHRRAAEKN

SEQ ID NO: 9751 - protein, 668 aa, Artificial Sequence
  Synthetic polypeptide
MDPGDPAGDPAAGERHRMGRDPLLLLQALQTLWSTRERKQLREEAWRGFAALDDPLAGLLDMLESCRGQRGEGPSLAAWISHQLQCWLQAQPCPSLAQHSLRLKQLQARAVKVLTESPPSLAAPLASIFQLQDADRSCLLAHVHRLHHEGRFREAATLGATLKLQSELGVEKMSIPLLLQDKVALVERYVAGFPDLQRRLLVLMDSWCQPGFDIKDVARRYPEVTSLSLEKLSPKALSRQVLRLQERYGVAPALCPNAAIQQRLAALRHLCHKRFVEKSLSQENWTDHVQGLVGQSPWLQEQLSQLLVSHSDPVTAAQCAMELLLPEERLPAAVAVELRRFRLQGRATEADSRLEVKDMKDRYYQLPIPRENVHLLASWEDLTRHEGALLQCHQVVGVDVEWTPVFVAGGRPRPSLLQVAVEGHVFLLDVLALSQPPTGQGAQAFSRLVAQLLSDPSITKLGYGMVGDLQKLGTSCPALAHVEKQILGGMDLLLVHRQMRVASVPAPAVDRARELRGLSLLVQQVLGTALDKTQQLSNWDRRPLCEEQVIYAAADAYCLLEVHQALCREPARFHLSEDLAGSRRPRHRERPGARKPPGLQKASAPAAPRQVPVAVAVSEGAAPQIPARAFRVVCDNMLQGLARSLRCLGVDARMLGNGEDHRRAAEKN

SEQ ID NO: 9752 - protein, 376 aa, Artificial Sequence
  Synthetic polypeptide
MACDRARVFLHSDEHPGSSVASKSRKSVMVAEIPSTVSQHSESHTDETLASRKSDAIFRAAKKDLLTLMKLEDSSLLDGRVALLHVPAGTVVSRQGDQDASILFVVSGLLHVYQRKIGSQEDTCLFLTRPGEMVGQLAVLTGEPLIFTVKANRDCSFLSISKAHFYEIMRKQPTVVLGVAHTVVKRMSSFVRQIDFALDWVEVEAGRAIYRQGDKSDCTYIMLSGRLRSVIRKDDGKKRLAGEYGRGDLVGVVETLTHQARATTVHAVRDSELAKLPAGALTSIKRRYPQVVTRLIHLLGEKILGSLQQGPVTGHQLGLPTEGSKWDLGNPAVNLSTVAVMPVSEEVPLTAFALELEHALSAIEIRKLAGRGGAHL

SEQ ID NO: 9753 - protein, 770 aa, Artificial Sequence
  Synthetic polypeptide
MEEEKDDSPQLTGIAVGALLALALVGVLILFMFRRLRQFRQAQPTPQYRFRKRDKVMFYGRKIMRKVTTLPNTLVENTALPRQRARKRTKVLSLAKRILRFKKEYPALQPKEPPPSLLEADLTEFDVKNSHLPSEVLYMLKNVRVLGHFEKPLFLELCKHIVFVQLQEGEHVFQPREPDPSICVVQDGRLEVCIQDTDGTEVVVKEVLAGDSVHSLLSILDIITGHAAPYKTVSVRAAIPSTILRLPAAAFHGVFEKYPETLVRVVQIIMVRLQRVTFLALHNYLGLTTELFNAESQAIPLVSVASVAAGKAKKQVFYGEEERLKKPPRLQESCDSDHGGGRPAAAGPLLKRSHSVPAPSIRKQILEELEKPGAGDPDPSAPQGGPGSATSDLGMACDRARVFLHSDEHPGSSVASKSRKSVMVAEIPSTVSQHSESHTDETLASRKSDAIFRAAKKDLLTLMKLEDSSLLDGRVALLHVPAGTVVSRQGDQDASILFVVSGLLHVYQRKIGSQEDTCLFLTRPGEMVGQLAVLTGEPLIFTVKANRDCSFLSISKAHFYEIMRKQPTVVLGVAHTVVKRMSSFVRQIDFALDWVEVEAGRAIYRQGDKSDCTYIMLSGRLRSVIRKDDGKKRLAGEYGRGDLVGVVETLTHQARATTVHAVRDSELAKLPAGALTSIKRRYPQVVTRLIHLLGEKILGSLQQGPVTGHQLGLPTEGSKWDLGNPAVNLSTVAVMPVSEEVPLTAFALELEHALSAIEIRKLAGRGGAHL

SEQ ID NO: 9754 - protein, 795 aa, Artificial Sequence
  Synthetic polypeptide
MEEEKDDSPQADFCLGTALHSWGLWFTEEGSPSTMLTGIAVGALLALALVGVLILFMFRRLRQFRQAQPTPQYRFRKRDKVMFYGRKIMRKVTTLPNTLVENTALPRQRARKRTKVLSLAKRILRFKKEYPALQPKEPPPSLLEADLTEFDVKNSHLPSEVLYMLKNVRVLGHFEKPLFLELCKHIVFVQLQEGEHVFQPREPDPSICVVQDGRLEVCIQDTDGTEVVVKEVLAGDSVHSLLSILDIITGHAAPYKTVSVRAAIPSTILRLPAAAFHGVFEKYPETLVRVVQIIMVRLQRVTFLALHNYLGLTTELFNAESQAIPLVSVASVAAGKAKKQVFYGEEERLKKPPRLQESCDSDHGGGRPAAAGPLLKRSHSVPAPSIRKQILEELEKPGAGDPDPSAPQGGPGSATSDLGMACDRARVFLHSDEHPGSSVASKSRKSVMVAEIPSTVSQHSESHTDETLASRKSDAIFRAAKKDLLTLMKLEDSSLLDGRVALLHVPAGTVVSRQGDQDASILFVVSGLLHVYQRKIGSQEDTCLFLTRPGEMVGQLAVLTGEPLIFTVKANRDCSFLSISKAHFYEIMRKQPTVVLGVAHTVVKRMSSFVRQIDFALDWVEVEAGRAIYRQGDKSDCTYIMLSGRLRSVIRKDDGKKRLAGEYGRGDLVGVVETLTHQARATTVHAVRDSELAKLPAGALTSIKRRYPQVVTRLIHLLGEKILGSLQQGPVTGHQLGLPTEGSKWDLGNPAVNLSTVAVMPVSEEVPLTAFALELEHALSAIEIRKLAGRGGAHL

SEQ ID NO: 9755 - protein, 761 aa, Artificial Sequence
  Synthetic polypeptide
MLTGIAVGALLALALVGVLILFMFRRLRQFRQAQPTPQYRFRKRDKVMFYGRKIMRKVTTLPNTLVENTALPRQRARKRTKVLSLAKRILRFKKEYPALQPKEPPPSLLEADLTEFDVKNSHLPSEVLYMLKNVRVLGHFEKPLFLELCKHIVFVQLQEGEHVFQPREPDPSICVVQDGRLEVCIQDTDGTEVVVKEVLAGDSVHSLLSILDIITGHAAPYKTVSVRAAIPSTILRLPAAAFHGVFEKYPETLVRVVQIIMVRLQRVTFLALHNYLGLTTELFNAESQAIPLVSVASVAAGKAKKQVFYGEEERLKKPPRLQESCDSDHGGGRPAAAGPLLKRSHSVPAPSIRKQILEELEKPGAGDPDPSAPQGGPGSATSDLGMACDRARVFLHSDEHPGSSVASKSRKSVMVAEIPSTVSQHSESHTDETLASRKSDAIFRAAKKDLLTLMKLEDSSLLDGRVALLHVPAGTVVSRQGDQDASILFVVSGLLHVYQRKIGSQEDTCLFLTRPGEMVGQLAVLTGEPLIFTVKANRDCSFLSISKAHFYEIMRKQPTVVLGVAHTVVKRMSSFVRQIDFALDWVEVEAGRAIYRQGDKSDCTYIMLSGRLRSVIRKDDGKKRLAGEYGRGDLVGVVETLTHQARATTVHAVRDSELAKLPAGALTSIKRRYPQVVTRLIHLLGEKILGSLQQGPVTGHQLGLPTEGSKWDLGNPAVNLSTVAVMPVSEEVPLTAFALELEHALSAIEIRKLAGRGGAHL

SEQ ID NO: 9756 - protein, 346 aa, Artificial Sequence
  Synthetic polypeptide
MMGCFALQTVDTELTADSVEWCPLQGCRHLLACGTYQLRRPEDRPAGPQNKGGMEVKEPQVRLGRLFLYSFNDNNSIHPLVEVQRKDTSAILDMKWCHIPVAGHALLGLADASGSIQLLRLVESEKSHVLEPLSSLALEEQCLALSLDWSTGKTGRAGDQPLKIISSDSTGQLHLLMVNETRPRLQKVASWQAHQFEAWIAAFNYWHPEIVYSGGDDGLLRGWDTRVPGKFLFTSKRHTMGVCSIQSSPHREHILATGSYDEHILLWDTRNMKQPLADTPVQGGVWRIKWHPFHHHLLLAACMHSGFKILNCQKAMAPSFRCLLHFGRPLTPLGPLVWRLGHPSLP

SEQ ID NO: 9757 - protein, 73 aa, Artificial Sequence
  Synthetic polypeptide
MMGCFALQTVDTELTADSVEWCPLQGCRHLLACGTYQLRRPEDRPAGPQNKGGMEVKEPQIYNHFLLCHTCLQ

SEQ ID NO: 9758 - protein, 64 aa, Artificial Sequence
  Synthetic polypeptide
MMGCFALQTVDTELTADSVEWCPLQGCRHLLACGTYQLRRPEDRPAGPQNKIYNHFLLCHTCLQ

SEQ ID NO: 9759 - protein, 266 aa, Artificial Sequence
  Synthetic polypeptide
MGLRIHFVVDPHGWCCMGLIVFVWLYNIVLIPKIVLFPHYEEGHIPGILIIIFYGISIFCLVALVRASITDPGRLPENPKIPHGEREFWELCNKCNLMRPKRSHHCSRCGHCVRRMDHHCPWINNCVGEDNHWLFLQLCFYTELLTCYALMFSFCHYYYFLPLKKRNLDLFVFRHELAIMRLAAFMGITMLVGITGLFYTQLIGIITMLFHCQGLPPHIFLENTCSPLWTIQLSLPGGTLSLTFPEDFLLHVLQGHHLSCFHYSMN

SEQ ID NO: 9760 - protein, 1402 aa, Artificial Sequence
  Synthetic polypeptide
MNSLSWGAANAVLLLLLLAWASPTFISINRGVRVMKGHSAFLSGDDLKFAIPKEKDACKVEVVMNEPITQRVGKLTPQVFDCHFLPNEVKYVHNGCPILDEDTVKLRLYRFTERDTFIETFILWVYLLEPDCNIIHMSNNVLEVPEFNGLSQAIDKNLLRFDYDRMASLECTVSLDTARTRLPAHGQMVLGEPRPEEPRGDQPHSFFPESQLRAKLKCPGGSCTPGLKKIGSLKVSCEEFLLMGLRYQHLDPPSPNIDYISIQLDLTDTRSKIVYKKSESAWLPVYIRAGIPNQIPKAAFMAVFILEVDQFILTSLTTSVLDCEEDETPKPLLVFNITKAPLQGYVTHLLDHTRPISSFTWKDLSDMQIAYQPPNSSHSERRHDEVELEVYDFFFERSAPMTVHISIRTADTNAPRVSWNTGLSLLEGQSRAITWEQFQVVDNDDIGAVRLVTVGGLQHGWLTLRGGKGFLFTVADLQAGVVRYHHDDSDSTKDFVVFRIFDGHHSIRHKFPINVLPKDDSPPFLITNVVIELEEGQTILIQGSMLRASDVDASDDYIFFNITKPPQAGEIMKKPGPGLIGYPVHGFLQRDLFNGIIYYRHFGGEIFEDSFQFVLWDSHEPPNLSVPQVATIHITPVDDQLPKEAPGVSRHLVVKETEVAYITKKQLHFIDSESYDRELVYTITTPPFFSFSHRHLDAGKLFMVDSIPKVVKNPTALELRSFTQHAVNYMKVAYMPPMQDIGPHCRDVQFTFSVSNQHGGTLHGICFNITILPVDNQVPEAFTNPLKVTEGGQSIISTEHILISDADTKLDNIDLSLRELPLHGRVELNGFPLNSGGTFSWGDLHTLKVRYQHDGTEVLQDDLLLEVTDGTNSAEFVLHVEVFPVNDEPPVLKADLMPVMNCSEGGEVVITSEYIFATDVDSDNLKLMFVIAREPQHGVVRRAGVTVDQFSQRDVISEAVTYKHTGGEIGLMPCFDTITLVVSDGEAGPFVNGCCYNGPNPSVPLHASFPVYDLNITVYPVDNQPPSIAIGPVFVVDEGCSTALTVNHLSATDPDTAADDLEFVLVSPPQFGYLENILPSVGFEKSNIGISIDSFQWKDMNAFHINYVQSRHLRIEPTADQFTVYVTDGKHHSLEIPFSIIINPTNDEAPDFVVQNITVCEGQMKELDSSIISAVDLDIPQDALLFSITQKPRHGLLIDRGFSKDFSENKQPANPHQKHAPVHSFSMELLKTGMRLTYMHDDSESLADDFTIQLSDGKHKILKTISVEVIPVNDEKPMLSKKAEIAMNMGETRIISSAILSAIDEDSPREKIYYVFERLPQNGQLQLKIGRDWVPLSPGMKCTQEEVDLNLLRYTHTGAMDSQNQDSFTFYLWDGNNRSPALDCQITIKDMEKGSRYSQDEA

SEQ ID NO: 9761 - protein, 1401 aa, Artificial Sequence
  Synthetic polypeptide
MNSLSWGAANAVLLLLLLAWASPTFISINRGVRVMKGHSAFLSGDDLKFAIPKEKDACKVEVVMNEPITQRVGKLTPQVFDCHFLPNEVKYVHNGCPILDEDTVKLRLYRFTERDTFIETFILWVYLLEPDCNIIHMSNNVLEVPEFNGLSQAIDKNLLRFDYDRMASLECTVSLDTARTRLPAHGQMVLGEPRPEEPRGDQPHSFFPESQLRAKLKCPGGSCTPGLKKIGSLKVSCEEFLLMGLRYQHLDPPSPNIDYISIQLDLTDTRSKIVYKSESAWLPVYIRAGIPNQIPKAAFMAVFILEVDQFILTSLTTSVLDCEEDETPKPLLVFNITKAPLQGYVTHLLDHTRPISSFTWKDLSDMQIAYQPPNSSHSERRHDEVELEVYDFFFERSAPMTVHISIRTADTNAPRVSWNTGLSLLEGQSRAITWEQFQVVDNDDIGAVRLVTVGGLQHGWLTLRGGKGFLFTVADLQAGVVRYHHDDSDSTKDFVVFRIFDGHHSIRHKFPINVLPKDDSPPFLITNVVIELEEGQTILIQGSMLRASDVDASDDYIFFNITKPPQAGEIMKKPGPGLIGYPVHGFLQRDLFNGIIYYRHFGGEIFEDSFQFVLWDSHEPPNLSVPQVATIHITPVDDQLPKEAPGVSRHLVVKETEVAYITKKQLHFIDSESYDRELVYTITTPPFFSFSHRHLDAGKLFMVDSIPKVVKNPTALELRSFTQHAVNYMKVAYMPPMQDIGPHCRDVQFTFSVSNQHGGTLHGICFNITILPVDNQVPEAFTNPLKVTEGGQSIISTEHILISDADTKLDNIDLSLRELPLHGRVELNGFPLNSGGTFSWGDLHTLKVRYQHDGTEVLQDDLLLEVTDGTNSAEFVLHVEVFPVNDEPPVLKADLMPVMNCSEGGEVVITSEYIFATDVDSDNLKLMFVIAREPQHGVVRRAGVTVDQFSQRDVISEAVTYKHTGGEIGLMPCFDTITLVVSDGEAGPFVNGCCYNGPNPSVPLHASFPVYDLNITVYPVDNQPPSIAIGPVFVVDEGCSTALTVNHLSATDPDTAADDLEFVLVSPPQFGYLENILPSVGFEKSNIGISIDSFQWKDMNAFHINYVQSRHLRIEPTADQFTVYVTDGKHHSLEIPFSIIINPTNDEAPDFVVQNITVCEGQMKELDSSIISAVDLDIPQDALLFSITQKPRHGLLIDRGFSKDFSENKQPANPHQKHAPVHSFSMELLKTGMRLTYMHDDSESLADDFTIQLSDGKHKILKTISVEVIPVNDEKPMLSKKAEIAMNMGETRIISSAILSAIDEDSPREKIYYVFERLPQNGQLQLKIGRDWVPLSPGMKCTQEEVDLNLLRYTHTGAMDSQNQDSFTFYLWDGNNRSPALDCQITIKDMEKGSRYSQDEA

SEQ ID NO: 9762 - protein, 66 aa, Artificial Sequence
  Synthetic polypeptide
MTRDFKPGDLIFAKMKGYPHWPARVDEVPDGAVKPPTNKLPIFFFGTHETGRGRIIHSLTDTEVQL

SEQ ID NO: 9763 - protein, 91 aa, Artificial Sequence
  Synthetic polypeptide
MNLNTSSNTGDTQRLKIASLDVKQILKNETELDITDNLRKKLHWAKKEKLEITTKHNAEPGVVAHACNPSTLGGQGRRIACAREFETSLGL

SEQ ID NO: 9764 - protein, 1213 aa, Artificial Sequence
  Synthetic polypeptide
MNLNTSSNTGDTQRLKIASLDVKQILKNETELDITDNLRKKLHWAKKEKLEITTKHNAELASYESQIAKLRSEVEKGEALRQSLEYDLAVARKEAGLGRRAAEERLAEAHRIQEKLCAQNSELQAKTNETEKAFQTSQQKWKEECRRFEHDLEERDNMIQNCNREYDLLMKEKSRLEKTLQEALEKHQREKNEMESHIRETALEEFRLQEEQWEAERRELQFIVQEQDTAVQNMHKKVEKLETEHMDCSDLLRRQTSELEFSTQREERLRKEFEATTLRVRKLEENIEAERAAHLESKFNSEIIQLRIRDLEGALQVEKASQAEAVADLEIIKNEFKEVESAYEREKHNAQESFAKLNLLEKEYFSKNKKLNEDIEEQKKVIIDLSKRLQYNEKSCSELQEELVMAKKHQAFLVETCENNVKELESILDSFTVSGQWTSGIHKDKDKPPSFSVVLERLRRTLTDYQNKLEDASNEEKACNELDSTKQKIDSHTKNIKELQDKLADVNKELSHLHTKCADREALISTLKVELQNVLHCWEKEKAQAAQSESELQKLSQAFHKDAEEKLTFLHTLYQHLVAGCVLIKQPEGMLDKFSWSELCAVLQENVDALIADLNRANEKIRHLEYICKNKSDTMRELQQTQEDTFTKVAEQIKAQESCWHRQKKELELQYSELFLEVQKRAQKFQEIAEKNMEKLNHIEKSHEQLVLENSHFKKLLSQTQREQMSLLAACALMAGALYPLYSRSCALSTQRDFLQEQVNTFELFKLEIRTLAQALSTVEEKKQEEAKMKKKTFKGLIRIFRKGVIAVLAANRLKILGQSCASLFTWMESFKEGIGMLVCTGEPQDKHKFPKHQKEQLRCLQALSWLTSSDLLAAIISSMAELQDVIGKADPNSRICGHLLIGAAKNSFAKLMDKISLVMECIPLHSSRSITYVEKDSLVQRLAHGLHKVNTLALKYGLRGHVPITKSTASLQKQILGFTQRLHAAEVERRSLRLEVTEFKRSVNEMKKELDKAQGLQMQLNEFKQSKLITHEKFESACEELNNALLREEQAQMLLNEQAQQLQELNYKLELHSSEEADKNQTLGEAVKSLSEAKMELRRKDQSLRQLNRHLTQLEQDKRRLEENIHDAESALRMAAKDKECVANHMRAVENTLHKVRDQISLSWSAASRNDFTLQLPKLHLETFAMEGLKGGPEVVACQVTHQKRLSWMGLT

SEQ ID NO: 9765 - protein, 11 aa, Artificial Sequence
  Synthetic polypeptide
PLSCSNWKLEL

SEQ ID NO: 9766 - protein, 3 aa, Artificial Sequence
  Synthetic polypeptide
FIK

SEQ ID NO: 9767 - protein, 266 aa, Artificial Sequence
  Synthetic polypeptide
MAHLGPTPPPHSLNYKSEDRLSEQDWPAYFKVPCCGVDTSQIESEEAEVDVRERETQRDREPKRARDLTLRDSCTDNSMQFGTRTTTAEPGFMGTWQNADTNLLFRMSQQAIRCTLVNCTCECFQPGKINLRTCDQCKHGWVAHALDKLSTQHLYHPTQVEIVQSNVVFDISSLMLYGTQAVPVRLKILLDRLFSVLKQEEVLHILHGLGWTLRDYVRGYILQPWGWTPCLPSRQYSINAPSWKQRLSPYTEATGASIMDVSVSRT

SEQ ID NO: 9768 - protein, 223 aa, Artificial Sequence
  Synthetic polypeptide
SEEAEVDVRERETQRDREPKRARDLTLRDSCTDNSMQFGTRTTTAEPGFMGTWQNADTNLLFRMSQQAIRCTLVNCTCECFQPGKINLRTCDQCKHGWVAHALDKLSTQHLYHPTQVEIVQSNVVFDISSLMLYGTQAVPVRLKILLDRLFSVLKQEEVLHILHGLGWTLRDYVRGYILQPWGWTPCLPSRQYSINAPSWKQRLSPYTEATGASIMDVSVSRT

SEQ ID NO: 9769 - protein, 199 aa, Artificial Sequence
  Synthetic polypeptide
MAHLGPTPPPHSLNYKSEDRLSEQDWPAYFKVPCCGVDTSQIEAIRCTLVNCTCECFQPGKINLRTCDQCKHGWVAHALDKLSTQHLYHPTQVEIVQSNVVFDISSLMLYGTQAVPVRLKILLDRLFSVLKQEEVLHILHGLGWTLRDYVRGYILQPWGWTPCLPSRQYSINAPSWKQRLSPYTEATGASIMDVSVSRT

SEQ ID NO: 9770 - protein, 171 aa, Artificial Sequence
  Synthetic polypeptide
MTDDVKEPSRFSLLLAIRCTLVNCTCECFQPGKINLRTCDQCKHGWVAHALDKLSTQHLYHPTQVEIVQSNVVFDISSLMLYGTQAVPVRLKILLDRLFSVLKQEEVLHILHGLGWTLRDYVRGYILQPWGWTPCLPSRQYSINAPSWKQRLSPYTEATGASIMDVSVSRT

SEQ ID NO: 9771 - protein, 188 aa, Artificial Sequence
  Synthetic polypeptide
MQFGTRTTTAEPGFMGTWQNADTNLLFRMSQQAIRCTLVNCTCECFQPGKINLRTCDQCKHGWVAHALDKLSTQHLYHPTQVEIVQSNVVFDISSLMLYGTQAVPVRLKILLDRLFSVLKQEEVLHILHGLGWTLRDYVRGYILQPWGWTPCLPSRQYSINAPSWKQRLSPYTEATGASIMDVSVSRT

SEQ ID NO: 9772 - protein, 234 aa, Artificial Sequence
  Synthetic polypeptide
MAHLGPTPPPHSLNYKSEDRLSEQDWPAYFKVPCCGVDTSQIESEEAEVDVRERETQRDREPKRARDLTLRDSCTDNSMQFGTRTTTAEPGFMGTWQNADTNLLFRMSQQAIRCTLVNCTCECFQPGKINLRTCDQCKHGWVAHALDKLSTQHLYHPTQVEIVQSNVVFDISSLMLYGTQAVPVRLKILLDRLFSVLKQEEVLHILHGLGWTLRDYVRGYILQVRWLMHFGRPK

SEQ ID NO: 9773 - protein, 191 aa, Artificial Sequence
  Synthetic polypeptide
SEEAEVDVRERETQRDREPKRARDLTLRDSCTDNSMQFGTRTTTAEPGFMGTWQNADTNLLFRMSQQAIRCTLVNCTCECFQPGKINLRTCDQCKHGWVAHALDKLSTQHLYHPTQVEIVQSNVVFDISSLMLYGTQAVPVRLKILLDRLFSVLKQEEVLHILHGLGWTLRDYVRGYILQVRWLMHFGRPK

SEQ ID NO: 9774 - protein, 167 aa, Artificial Sequence
  Synthetic polypeptide
MAHLGPTPPPHSLNYKSEDRLSEQDWPAYFKVPCCGVDTSQIEAIRCTLVNCTCECFQPGKINLRTCDQCKHGWVAHALDKLSTQHLYHPTQVEIVQSNVVFDISSLMLYGTQAVPVRLKILLDRLFSVLKQEEVLHILHGLGWTLRDYVRGYILQVRWLMHFGRPK

SEQ ID NO: 9775 - protein, 139 aa, Artificial Sequence
  Synthetic polypeptide
MTDDVKEPSRFSLLLAIRCTLVNCTCECFQPGKINLRTCDQCKHGWVAHALDKLSTQHLYHPTQVEIVQSNVVFDISSLMLYGTQAVPVRLKILLDRLFSVLKQEEVLHILHGLGWTLRDYVRGYILQVRWLMHFGRPK

SEQ ID NO: 9776 - protein, 156 aa, Artificial Sequence
  Synthetic polypeptide
MQFGTRTTTAEPGFMGTWQNADTNLLFRMSQQAIRCTLVNCTCECFQPGKINLRTCDQCKHGWVAHALDKLSTQHLYHPTQVEIVQSNVVFDISSLMLYGTQAVPVRLKILLDRLFSVLKQEEVLHILHGLGWTLRDYVRGYILQVRWLMHFGRPK

SEQ ID NO: 9777 - protein, 644 aa, Artificial Sequence
  Synthetic polypeptide
MAARSPPSPHPSPPARQLGPRSPRVGRGAEVHAMRSEASGFAGAAREVVADESDKIWVGEEGSGGRRGPGGAAPAHAPLLSAPMGSRRLEGISVEEAMVTRTQLLEEELSSLKEELALCQADKEFVWSLWKRLQVTNPDLTQVVSLVVEREKQKSEAKDRKVLEILQVKDAKIQEFEQRESVLKQEINDLVKRKIAVDEENAFLRKEFSDLEKKFKDKSQEIKDTKECVQNKEEQNRLVIKNLEEENKKLSTRCTDLLNDLEKLRKQEAHLRKEKYSTDAKIKTFEDNLIEARKEVEVSQSKYNALSLQLSNKQTELIQKDMDITLVRKELQELQNLYKQNSTHTAQQAELIQQLQVLNMDTQKVLRNQEDVHTAESISYQKLYNELHICFETTKSNEAMLRQSVTNLQDQLLQKEQENAKLKEKLQESQGAPLPLPQESDPDYSAQVPHRPSLSSLETLMVSQKSEIEYLQEKLKIANEKLSENISANKGFSRKSIMTSAEGKHKEPPVKRSRSLSPKSSFTDSEELQKLRKAERKIENLEKALQLKSQENDELRDAHEKRKERLQMLQTNYRAVKEQLKQWEEGSGMTEIRKIKRADPQQLRQEDSDAVWNELAYFKRENQELMIQNHVRPACFLFPFCHEC

SEQ ID NO: 9778 - protein, 644 aa, Artificial Sequence
  Synthetic polypeptide
MAARSPPSPHPSPPARQLGPRSPRVGRGAEVHAMRSEASGFAGAAREVVADESDKIWVGEEGSGGRRGPGGAAPAHAPLLSAPMGSRRLEGISVEEAMVTRTQLLEEELSSLKEELALCQADKEFVWSLWKRLQVTNPDLTQVVSLVVEREKQKSEAKDRKVLEILQVKDAKIQEFEQRESVLKQEINDLVKRKIAVDEENAFLRKEFSDLEKKFKDKSQEIKDTKECVQNKEEQNRLVIKNLEEENKKLSTRCTDLLNDLEKLRKQEAHLRKEKYSTDAKIKTFEDNLIEARKEVEVSQSKYNALSLQLSNKQTELIQKDMDITLVRQELQELQNLYKQNSTHTAQQAELIQQLQVLNMDTQKVLRNQEDVHTAESISYQKLYNELHICFETTKSNEAMLRQSVTNLQDQLLQKEQENAKLKEKLQESQGAPLPLPQESDPDYSAQVPHRPSLSSLETLMVSQKSEIEYLQEKLKIANEKLSENISANKGFSRKSIMTSAEGKHKEPPVKRSRSLSPKSSFTDSEELQKLRKAERKIENLEKALQLKSQENDELRDAHEKRKERLQMLQTNYRAVKEQLKQWEEGSGMTEIRKIKRADPQQLRQEDSDAVWNELAYFKRENQELMIQNHVRPACFLFPFCHEC

SEQ ID NO: 9779 - protein, 712 aa, Artificial Sequence
  Synthetic polypeptide
MAARSPPSPHPSPPARQLGPRSPRVGRGAEVHAMRSEASGFAGAAREVVADESDKIWVGEEGSGGRRGPGGAAPAHAPLLSAPMGSRRLEGISVEEAMVTRTQLLEEELSSLKEELALCQADKEFVWSLWKRLQVTNPDLTQVVSLVVEREKQKSEAKDRKVLEILQVKDAKIQEFEQRESVLKQEINDLVKRKIAVDEENAFLRKEFSDLEKKFKDKSQEIKDTKECVQNKEEQNRLVIKNLEEENKKLSTRCTDLLNDLEKLRKQEAHLRKEKYSTDAKIKTFEDNLIEARKEVEVSQSKYNALSLQLSNKQTELIQKDMDITLVRKELQELQNLYKQNSTHTAQQAELIQQLQVLNMDTQKVLRNQEDVHTAESISYQKLYNELHICFETTKSNEAMLRQSVTNLQDQLLQKEQENAKLKEKLQESQGAPLPLPQESDPDYSAQVPHRPSLSSLETLMVSQKSEIEYLQEKLKIANEKLSENISANKGFSRKSIMTSAEGKHKEPPVKRSRSLSPKSSFTDSEELQKLRKAERKIENLEKALQLKSQENDELRDAHEKRKERLQMLQTNYRAVKEQLKQWEEGSGMTEIRKIKRADPQQLRQEDSDAVWNELAYFKRENQELMIQKMNLEEELDELKVHISIDKAAIQELNRCVAERREEQLFRSGEDDEVKRSTPEKNGKEMLEQTLQKEIRIQTNTEGSPCEDTGKR

SEQ ID NO: 9780 - protein, 712 aa, Artificial Sequence
  Synthetic polypeptide
MAARSPPSPHPSPPARQLGPRSPRVGRGAEVHAMRSEASGFAGAAREVVADESDKIWVGEEGSGGRRGPGGAAPAHAPLLSAPMGSRRLEGISVEEAMVTRTQLLEEELSSLKEELALCQADKEFVWSLWKRLQVTNPDLTQVVSLVVEREKQKSEAKDRKVLEILQVKDAKIQEFEQRESVLKQEINDLVKRKIAVDEENAFLRKEFSDLEKKFKDKSQEIKDTKECVQNKEEQNRLVIKNLEEENKKLSTRCTDLLNDLEKLRKQEAHLRKEKYSTDAKIKTFEDNLIEARKEVEVSQSKYNALSLQLSNKQTELIQKDMDITLVRQELQELQNLYKQNSTHTAQQAELIQQLQVLNMDTQKVLRNQEDVHTAESISYQKLYNELHICFETTKSNEAMLRQSVTNLQDQLLQKEQENAKLKEKLQESQGAPLPLPQESDPDYSAQVPHRPSLSSLETLMVSQKSEIEYLQEKLKIANEKLSENISANKGFSRKSIMTSAEGKHKEPPVKRSRSLSPKSSFTDSEELQKLRKAERKIENLEKALQLKSQENDELRDAHEKRKERLQMLQTNYRAVKEQLKQWEEGSGMTEIRKIKRADPQQLRQEDSDAVWNELAYFKRENQELMIQKMNLEEELDELKVHISIDKAAIQELNRCVAERREEQLFRSGEDDEVKRSTPEKNGKEMLEQTLQKEIRIQTNTEGSPCEDTGKR

SEQ ID NO: 9781 - protein, 1375 aa, Artificial Sequence
  Synthetic polypeptide
MAARSPPSPHPSPPARQLGPRSPRVGRGAEVHAMRSEASGFAGAAREVVADESDKIWVGEEGSGGRRGPGGAAPAHAPLLSAPMGSRRLEGISVEEAMVTRTQLLEEELSSLKEELALCQADKEFVWSLWKRLQVTNPDLTQVVSLVVEREKQKSEAKDRKVLEILQVKDAKIQEFEQRESVLKQEINDLVKRKIAVDEENAFLRKEFSDLEKKFKDKSQEIKDTKECVQNKEEQNRLVIKNLEEENKKLSTRCTDLLNDLEKLRKQEAHLRKEKYSTDAKIKTFEDNLIEARKEVEVSQSKYNALSLQLSNKQTELIQKDMDITLVRKELQELQNLYKQNSTHTAQQAELIQQLQVLNMDTQKVLRNQEDVHTAESISYQKLYNELHICFETTKSNEAMLRQSVTNLQDQLLQKEQENAKLKEKLQESQGAPLPLPQESDPDYSAQVPHRPSLSSLETLMVSQKSEIEYLQEKLKIANEKLSENISANKGFSRKSIMTSAEGKHKEPPVKRSRSLSPKSSFTDSEELQKLRKAERKIENLEKALQLKSQENDELRDAHEKRKERLQMLQTNYRAVKEQLKQWEEGSGMTEIRKIKRADPQQLRQEDSDAVWNELAYFKRENQELMIQKMNLEEELDELKVHISIDKAAIQELNRCVAERREEQLFRSGEDDEVKRSTPEKNGKEMLEQTLQKVTELENRLKSFEKRSRKLKEGNKKLMKENDFLKSLLKQQQEDTETREKELEQIIKGSKDVEKENTELQVKISELETEVTSLRRQVAEANALRNENEELINPMEKSHQSADRAKSEMATMKVRSGRYDCKTTMTKVKFKAAKKNCSVGRHHTVLNHSIKVMSNVFENLSKDGWEDVSESSSDSEAQTSQTLGTIIVETSQKISPTEDGKDQKESDPTEDSQTQGKEIVQTYLNIDGKTPKDYFHDKNAKKPTFQKKNCKMQKSSHTAVPTRVNREKYKNITAQKSSSNIILLRERIISLQQQNSVLQNAKKTAELSVKEYKEVNEKLLHQQQVSDQRFQTSRQTIKKLNLDLAGLRKEKEDLLKKLESSSEITSLAEENSQVTFPRIQVTSLSPSRSMDLEMKQLQYKLKNATNELTKQSSNVKTLKFELLAKEEHIKEMHEKISRMERDITMKRHLIEDLKFRQKVNLESNKSFSEMLQNLDKKVKTLTEECSNKKVSIDSLKQRLNVAVKEKSQYEQMYQKSKEELEKKDLKLTLLVSRISETESAMAEIETAASKQLQELALQSEQVLEGAQKTLLLANEKVEEFTTFVKALAKELQNDVHVVRRQIRELKKMKKNRDACKTSTHKAQTLAASILNISRSDLEEILDTEDQVEIEKTKIDAENDKEWMLYIQKLLEGQRS

SEQ ID NO: 9782 - protein, 1375 aa, Artificial Sequence
  Synthetic polypeptide
MAARSPPSPHPSPPARQLGPRSPRVGRGAEVHAMRSEASGFAGAAREVVADESDKIWVGEEGSGGRRGPGGAAPAHAPLLSAPMGSRRLEGISVEEAMVTRTQLLEEELSSLKEELALCQADKEFVWSLWKRLQVTNPDLTQVVSLVVEREKQKSEAKDRKVLEILQVKDAKIQEFEQRESVLKQEINDLVKRKIAVDEENAFLRKEFSDLEKKFKDKSQEIKDTKECVQNKEEQNRLVIKNLEEENKKLSTRCTDLLNDLEKLRKQEAHLRKEKYSTDAKIKTFEDNLIEARKEVEVSQSKYNALSLQLSNKQTELIQKDMDITLVRQELQELQNLYKQNSTHTAQQAELIQQLQVLNMDTQKVLRNQEDVHTAESISYQKLYNELHICFETTKSNEAMLRQSVTNLQDQLLQKEQENAKLKEKLQESQGAPLPLPQESDPDYSAQVPHRPSLSSLETLMVSQKSEIEYLQEKLKIANEKLSENISANKGFSRKSIMTSAEGKHKEPPVKRSRSLSPKSSFTDSEELQKLRKAERKIENLEKALQLKSQENDELRDAHEKRKERLQMLQTNYRAVKEQLKQWEEGSGMTEIRKIKRADPQQLRQEDSDAVWNELAYFKRENQELMIQKMNLEEELDELKVHISIDKAAIQELNRCVAERREEQLFRSGEDDEVKRSTPEKNGKEMLEQTLQKVTELENRLKSFEKRSRKLKEGNKKLMKENDFLKSLLKQQQEDTETREKELEQIIKGSKDVEKENTELQVKISELETEVTSLRRQVAEANALRNENEELINPMEKSHQSADRAKSEMATMKVRSGRYDCKTTMTKVKFKAAKKNCSVGRHHTVLNHSIKVMSNVFENLSKDGWEDVSESSSDSEAQTSQTLGTIIVETSQKISPTEDGKDQKESDPTEDSQTQGKEIVQTYLNIDGKTPKDYFHDKNAKKPTFQKKNCKMQKSSHTAVPTRVNREKYKNITAQKSSSNIILLRERIISLQQQNSVLQNAKKTAELSVKEYKEVNEKLLHQQQVSDQRFQTSRQTIKKLNLDLAGLRKEKEDLLKKLESSSEITSLAEENSQVTFPRIQVTSLSPSRSMDLEMKQLQYKLKNATNELTKQSSNVKTLKFELLAKEEHIKEMHEKISRMERDITMKRHLIEDLKFRQKVNLESNKSFSEMLQNLDKKVKTLTEECSNKKVSIDSLKQRLNVAVKEKSQYEQMYQKSKEELEKKDLKLTLLVSRISETESAMAEIETAASKQLQELALQSEQVLEGAQKTLLLANEKVEEFTTFVKALAKELQNDVHVVRRQIRELKKMKKNRDACKTSTHKAQTLAASILNISRSDLEEILDTEDQVEIEKTKIDAENDKEWMLYIQKLLEGQRS

SEQ ID NO: 9783 - protein, 511 aa, Artificial Sequence
  Synthetic polypeptide
MIEDKGPRVTDYFVVAGLTDTSTLLDQEINRLDTKSTGPKAPITDIAIIIKSAGETVPEGYTCVEATPSALQANLNYGSLKSPELFLCYKRGRDKPPLTDIGVLYEGKERLIPGCEVILATPYGRCANVNNSSTTSQRIFITYRRAPPVRPQNSLAVTDICVIVTSKGETPPHTFCKVDKNLNCGMWGSSVFLCYKKSVPASNAIAYKAGLIFRYPEEDYESFPLSESDVPLFCLPMGATIECWDPETKYPLPVFSTFVLTGSSAKKVYGAAIQFYEPYSRELLSEKQLMHLGLLTPVERKMVSKSINTNKCICLLSHWPFFEAFRKFLMFIYKLSVSGPHPLPIEKHISHFMQNIPFPSPQRPRILVQLSVHDALILSQPVSTPLPLSGANFSTLLMNLGPENCATLLLFVLLESKILLHSLRPAVLTGVAEAVVAMIFPFQWQCPYIPLCPLSLAAVLSAPLPFIVGVDSRYFDLHDPPQDVVCIDLDTNMLYVPGVVAHACNPSTLRG

SEQ ID NO: 9784 - protein, 275 aa, Artificial Sequence
  Synthetic polypeptide
MGATIECWDPETKYPLPVFSTFVLTGSSAKKVYGAAIQFYEPYSRELLSEKQLMHLGLLTPVERKMVSKSINTNKCICLLSHWPFFEAFRKFLMFIYKLSVSGPHPLPIEKHISHFMQNIPFPSPQRPRILVQLSVHDALILSQPVSTPLPLSGANFSTLLMNLGPENCATLLLFVLLESKILLHSLRPAVLTGVAEAVVAMIFPFQWQCPYIPLCPLSLAAVLSAPLPFIVGVDSRYFDLHDPPQDVVCIDLDTNMLYVPGVVAHACNPSTLRG

SEQ ID NO: 9785 - protein, 32 aa, Artificial Sequence
  Synthetic polypeptide
QMYLFSAFLWELLLSAGILKPNIHFQFFQLLS

SEQ ID NO: 9786 - protein, 156 aa, Artificial Sequence
  Synthetic polypeptide
MSTPTDPGAMPHPGPSPGPGPSPGPILGPSPGPGPSPGSVHSMMGPSPGPPSVSHPMPTMGSTDFPQEGMHQMHKPIDGIHDKGIVEDIHCGSMKGTGMRPPHPGMGPPQSPMDQHSQGRAWWLKPVIPALWEAETGGSRDQEIETILVNMVKPRL

SEQ ID NO: 9787 - protein, 66 aa, Artificial Sequence
  Synthetic polypeptide
MASSCAVQVKLELGHRAQVRKKPTVEGFTHDWMVFVRGPEHSNIQHFVEKVVFHLHESFPRPKRAA

SEQ ID NO: 9788 - protein, 63 aa, Artificial Sequence
  Synthetic polypeptide
MCAVQVKLELGHRAQVRKKPTVEGFTHDWMVFVRGPEHSNIQHFVEKVVFHLHESFPRPKRAA

SEQ ID NO: 9789 - protein, 134 aa, Artificial Sequence
  Synthetic polypeptide
MSDDIRKRFEFPNSLIQSQAVGHLIAAVLKENGFSEKIHQSTNQTPALNLLWEKCCSDNVVVRTACCEGLVALVAQDHAEFSYVLNGILNLIPSTRPRQANHLRSGVRDQPGQHGETLSLLKIQKLAGRGDLCL

SEQ ID NO: 9790 - protein, 167 aa, Artificial Sequence
  Synthetic polypeptide
MGPLALPAWLQPRYRKNAYLFIYYLIQFCGHSWIFTNMTVRFFSFGKDSMVDTFYAIGLVMRLCQSVSLLELLHIYVGIESNHLLPRFLQLTERIIILFVVITSQEEVQEKYVVCVLFVFWNLLDMVRYTYSMLSVIGISYAVLTWLSQTLWMPIYPLCVLAEDETI

SEQ ID NO: 9791 - protein, 23 aa, Artificial Sequence
  Synthetic polypeptide
MGPLALPAWLQPRLAMCRYDILS

SEQ ID NO: 9792 - protein, 42 aa, Artificial Sequence
  Synthetic polypeptide
MATLPSAERRAFALKINRPVYPTANLTATWSPHENLKLSMPK

SEQ ID NO: 9793 - protein, 22 aa, Artificial Sequence
  Synthetic polypeptide
MASGTTTTAVKVFCYSSRKQTK

SEQ ID NO: 9794 - protein, 154 aa, Artificial Sequence
  Synthetic polypeptide
MASGTTTTAVKIGIIGGTGLDDPEILEGRTEKYVDTPFGKPSDALILGKIKNVDCVLLARHGRQHTIMPSKVNYQANIWALKEEGCTHVIVTTACGSLREEIQPGDIVIIDQFIDRTTMRPQSFYDGSHSCARGVCHIPMAEPFCPKTRELVLS

SEQ ID NO: 9795 - protein, 171 aa, Artificial Sequence
  Synthetic polypeptide
MRPARASLAAAGRDWGAALGTHLPREERIGIIGGTGLDDPEILEGRTEKYVDTPFGKPSDALILGKIKNVDCVLLARHGRQHTIMPSKVNYQANIWALKEEGCTHVIVTTACGSLREEIQPGDIVIIDQFIDRTTMRPQSFYDGSHSCARGVCHIPMAEPFCPKTRELVLS

SEQ ID NO: 9796 - protein, 87 aa, Artificial Sequence
  Synthetic polypeptide
MEPAAGSSMEPSADWLATAAARGRVEEVRALLEAGALPNAPNSYGRRPIQADTQAAERGEDHISRGTHRQLDVERSTSAGTSTLAGH

SEQ ID NO: 9797 - protein, 111 aa, Artificial Sequence
  Synthetic polypeptide
MGRGRCVGPSLQLRGQEWRCSPLVPKGGAAAAELGPGGGENMVRRFLVTLRIRRACGPPRVRVFVVHIPRLTGEWAAPGAPAAVALVLMLLRSQRLGQQPLPRRPGRYTGG

SEQ ID NO: 9798 - protein, 70 aa, Artificial Sequence
  Synthetic polypeptide
MVRRFLVTLRIRRACGPPRVRVFVVHIPRLTGEWAAPGAPAAVALVLMLLRSQRLGQQPLPRRPGRYTGG

SEQ ID NO: 9799 - protein, 497 aa, Artificial Sequence
  Synthetic polypeptide
MTSGATRYRLSCSLRGHELDVRGLVCCAYPPGAFVSVSRDRTTRLWAPDSPNRSFTEMHCMSGHSNFVSCVCIIPSSDIYPHGLIATGGNDHNICIFSLDSPMPLYILKGHKNTVCSLSSGKFGTLLSGSWDTTAKVWLNDKCMMTLQGHTAAVWAVKILPEQGLMLTGSADKTVKLWKAGRCERTFSGHEDCVRGLAILSETEFLSCANDASIRRWQITGECLEVYYGHTNYIYSISVFPNCRDFVTTAEDRSLRIWKHGECAQTIRLPAQSIWCCCVLDNGDIVVGASDGIIRVFTESEDRTASAEEIKAFEKELSHATIDSKTGDLGDINAEQLPGREHLNEPGTREGQTRLIRDGEKVEAYQWSVSEGRWIKIGDVVGSSGANQQTSGKVLYEGKEFDYVFSIDVNEGGPSYKLPYNTSDDPWLTAYNFLQKNDLNPMFLDQVAKFIIDNTKGQMLGLGNPSFSDPFTGGGRYVPGSSGSSNTLPTADPFTDN

SEQ ID NO: 9800 - protein, 6 aa, Artificial Sequence
  Synthetic polypeptide
FRGHQC

SEQ ID NO: 9801 - protein, 446 aa, Artificial Sequence
  Synthetic polypeptide
MASNHKSSAARPVSRGGVGLTGRPPSGIRPLSGNIRVATAMPPGTARPGSRGCPIGTGGVLSSQIKVAHRPVTQQGLTGMKTGTKGPQRQILDKSYYLGLLRSKISELTTEVNKLQKGIEMYNQENSVYLSYEKRAETLAVEIKELQGQLADYNMLVDKLNTNTEMEEVMNDYNMLKAQNDRETQSLDVIFTERQAKEKQIRSVEEEIEQEKQATDDIIKNMSFENQVKYLEMKTTNEKLLQELDTLQQQLDSQNMKKESLEAEIAHSQVKQEAVLLHEKLYELESHRDQMIAEDKSIGSPMEEREKLLKQIKDDNQEIASMERQLTDTKEKINQFIEEIRQLDMDLEEHQGEMNQKYKELKKREEHMDTFIETFEETKNQELKRKAQIEANIVALLEHCSRNINRIEQISSITNQELKMMQDDLNFKSTEVQKSQSTAQNLTSAP

SEQ ID NO: 9802 - protein, 448 aa, Artificial Sequence
  Synthetic polypeptide
MASNHKSSAARPVSRGGVGLTGRPPSGIRPLSGNIRVATAMPPGTARPGSRGCPIGTGGVLSSQIKVAHRPVTQQGLTGMKTGTKGPQRQILDKSYYLGLLRSKISELTTEVNKLQKGIEMYNQENSVYLSYEKRAETLAVEIKELQGQLADYNMLVDKLNTNTEMEEVMNDYNMLKAQNDRETQSLDVIFTERQAKEKQIRSVEEEIEQEKQATDDIIKNMSFENQVKYLEMKTTNEKLLQELDTLQQQLDSQNMKKESLEAEIAHSQVKQEAVLLHEKLYELESHRDQMIAEDKSIGSPMEEREKLLKQIKDDNQEIASMERQLTDTKEKINQFIEEIRQLDMDLEEHQGEMNQKYKELKKREEHMDTFIETFEETKNQELKRKAQIEANIVALLEHCSRNINRIEQISSITNQELKMMQDDLNFKSTEVQKSQSTAQNLTSAPGT

SEQ ID NO: 9803 - protein, 399 aa, Artificial Sequence
  Synthetic polypeptide
MEVKGKKQFTGKSTKTAQEKNRFHKNSDSGSSKTFPTRKVAKEGGPKVTSRNFEKSITKLGKKGVKQFKNKQQGDKSPKNKFQPANKFNKKRKFQPDGRSDESAAKKPKWDDFKKKKKELKQSRQLSDKTNYDIVVRAKQMWEILRRKDCDKEKRVKLMSDLQKLIQGKIKTIAFAHDSTRVIQCYIQYGNEEQRKQAFEELRDDLVELSKAKYSRNIVKKFLMYGSKPQIAEIIRSFKGHVRKMLRHAEASAIVEYAYNDKAILEQRNMLTEELYGNTFQLYKSADHRTLDKVLEVQPEKLELIMDEMKQILTPMAQKEAVIKHSLVHKVFLDFFTYAPPKLRSEMIEAIREAVVYLAHTHDGARVAMHCLWHGTPKDRKVIVKTMKTYVEKVANIWL

SEQ ID NO: 9804 - protein, 180 aa, Artificial Sequence
  Synthetic polypeptide
MATLPSAERRAFALKINRYSSAEIRKQFTLPPNLGQYHRQSISTSGFPSLQLPQFYDPVEPVDFEGLLMTHLNSLDVQLAQELGDFTDDDLDVVFTPKECRTLQPSLPEEGVELDPHVRDCVQTYIREWLIVNRKNQGSPEICGFKKTGSRKDFHKTLPKQTFESETLECSEPAAQHYSQ

SEQ ID NO: 9805 - protein, 112 aa, Artificial Sequence
  Synthetic polypeptide
MTHLNSLDVQLAQELGDFTDDDLDVVFTPKECRTLQPSLPEEGVELDPHVRDCVQTYIREWLIVNRKNQGSPEICGFKKTGSRKDFHKTLPKQTFESETLECSEPAAQHYSQ

SEQ ID NO: 9806 - protein, 189 aa, Artificial Sequence
  Synthetic polypeptide
MATLPSAERRAFALKINRYSSAEIRKQFTLPPNLGQYHRQSISTSGFPSLQLPQFYDPVEPVDFEGLLMTHLNSLDVQLAQELGDFTDDDLDVVFTPKECRTLQPSLPEEGVELDPHVRDCVQTYIREWLIVNRKNQGSPEICGFKKTGSRKDFHKTLPKQTFESETLECSEPAAQLEERILNVPNTKK

SEQ ID NO: 9807 - protein, 121 aa, Artificial Sequence
  Synthetic polypeptide
MTHLNSLDVQLAQELGDFTDDDLDVVFTPKECRTLQPSLPEEGVELDPHVRDCVQTYIREWLIVNRKNQGSPEICGFKKTGSRKDFHKTLPKQTFESETLECSEPAAQLEERILNVPNTKK

SEQ ID NO: 9808 - protein, 348 aa, Artificial Sequence
  Synthetic polypeptide
MSNVNLSVSDFWRVMMRVCWLVRQDSRHQRIRLPHLEAVVIGRGPETKITDKKCSRQQVQLKAECNKGYVKVKQVGVNPTSIDSVVIGKDQEVKLQPGQVLHMVNELYPYIVEFEEEAKNPGLETHRKRKRSGNSDSIERDAAQEAEAGTGLEPGSNSGQCSVPLKKGKDAPIKKESLGHWSQGLKISMQDPKMQVYKDEQVVVIKDKYPKARYHWLVLPWTSISSLKAVAREHLELLKHMHTVGEKVIVDFAGSSKLRFRLGYHAIPSMSHVHLHVISQDFDSPCLKNKKHWNSFNTEYFLESQGHFGKVGRCKINIQKAPTSLRISSKYFERKLENYFIFYSFIQA

SEQ ID NO: 9809 - protein, 276 aa, Artificial Sequence
  Synthetic polypeptide
MSNVNLSVSDFWRVMMRVCWLVRQDSRHQRIRLPHLEAVVIGRGPETKITDKKCSRQQVQLKAECNKGYVKVKQVGVNPTSIDSVVIGKDQEVKLQPGQVLHMESLGHWSQGLKISMQDPKMQVYKDEQVVVIKDKYPKARYHWLVLPWTSISSLKAVAREHLELLKHMHTVGEKVIVDFAGSSKLRFRLGYHAIPSMSHVHLHVISQDFDSPCLKNKKHWNSFNTEYFLESQGHFGKVGRCKINIQKAPTSLRISSKYFERKLENYFIFYSFIQA

SEQ ID NO: 9810 - protein, 334 aa, Artificial Sequence
  Synthetic polypeptide
MMRVCWLVRQDSRHQRIRLPHLEAVVIGRGPETKITDKKCSRQQVQLKAECNKGYVKVKQVGVNPTSIDSVVIGKDQEVKLQPGQVLHMVNELYPYIVEFEEEAKNPGLETHRKRKRSGNSDSIERDAAQEAEAGTGLEPGSNSGQCSVPLKKGKDAPIKKESLGHWSQGLKISMQDPKMQVYKDEQVVVIKDKYPKARYHWLVLPWTSISSLKAVAREHLELLKHMHTVGEKVIVDFAGSSKLRFRLGYHAIPSMSHVHLHVISQDFDSPCLKNKKHWNSFNTEYFLESQGHFGKVGRCKINIQKAPTSLRISSKYFERKLENYFIFYSFIQA

SEQ ID NO: 9811 - protein, 294 aa, Artificial Sequence
  Synthetic polypeptide
MSNVNLSVSDFWRVMMRVCWLVRQDSRHQRIRLPHLEAVVIGRGPETKITDKKCSRQQEFEEEAKNPGLETHRKRKRSGNSDSIERDAAQEAEAGTGLEPGSNSGQCSVPLKKGKDAPIKKESLGHWSQGLKISMQDPKMQVYKDEQVVVIKDKYPKARYHWLVLPWTSISSLKAVAREHLELLKHMHTVGEKVIVDFAGSSKLRFRLGYHAIPSMSHVHLHVISQDFDSPCLKNKKHWNSFNTEYFLESQGHFGKVGRCKINIQKAPTSLRISSKYFERKLENYFIFYSFIQA

SEQ ID NO: 9812 - protein, 292 aa, Artificial Sequence
  Synthetic polypeptide
MSNVNLSVSDFWRVMMRVCWLVRQDSRHQRIRLPHLEAVVIGRGPETKITDKKCSRQQVQLKAECNKGYVKVKQVGVNPTSIDSVVIGKDQEVKLQPGQVLHMVNELYPYIVEFEEEAKNPGLETHRKRKRSGNSDSIERDAAQEAEAGTGLEPGSNSGQCSVPLKKGKDAPIKKESLGHWSQGLKISMQDPKMQVYKDEQVVVIKDKYPKARYHWLVLPWTSISSLKAVAREHLELLKHMHTVGEKVIVDFAGSSKLRFRLGYHAIPSMRSFWKSGQMQDKYTKSTNFSPY

SEQ ID NO: 9813 - protein, 220 aa, Artificial Sequence
  Synthetic polypeptide
MSNVNLSVSDFWRVMMRVCWLVRQDSRHQRIRLPHLEAVVIGRGPETKITDKKCSRQQVQLKAECNKGYVKVKQVGVNPTSIDSVVIGKDQEVKLQPGQVLHMESLGHWSQGLKISMQDPKMQVYKDEQVVVIKDKYPKARYHWLVLPWTSISSLKAVAREHLELLKHMHTVGEKVIVDFAGSSKLRFRLGYHAIPSMRSFWKSGQMQDKYTKSTNFSPY

SEQ ID NO: 9814 - protein, 278 aa, Artificial Sequence
  Synthetic polypeptide
MMRVCWLVRQDSRHQRIRLPHLEAVVIGRGPETKITDKKCSRQQVQLKAECNKGYVKVKQVGVNPTSIDSVVIGKDQEVKLQPGQVLHMVNELYPYIVEFEEEAKNPGLETHRKRKRSGNSDSIERDAAQEAEAGTGLEPGSNSGQCSVPLKKGKDAPIKKESLGHWSQGLKISMQDPKMQVYKDEQVVVIKDKYPKARYHWLVLPWTSISSLKAVAREHLELLKHMHTVGEKVIVDFAGSSKLRFRLGYHAIPSMRSFWKSGQMQDKYTKSTNFSPY

SEQ ID NO: 9815 - protein, 238 aa, Artificial Sequence
  Synthetic polypeptide
MSNVNLSVSDFWRVMMRVCWLVRQDSRHQRIRLPHLEAVVIGRGPETKITDKKCSRQQEFEEEAKNPGLETHRKRKRSGNSDSIERDAAQEAEAGTGLEPGSNSGQCSVPLKKGKDAPIKKESLGHWSQGLKISMQDPKMQVYKDEQVVVIKDKYPKARYHWLVLPWTSISSLKAVAREHLELLKHMHTVGEKVIVDFAGSSKLRFRLGYHAIPSMRSFWKSGQMQDKYTKSTNFSPY

SEQ ID NO: 9816 - protein, 265 aa, Artificial Sequence
  Synthetic polypeptide
MVKETTYYDVLGVKPNATQEELKKAYRKLALKYHPDKNPNEGEKFKQISQAYEVLSDAKKRELYDKGGEQAIKEGGAGGGFGSPMDIFDMFFGGGGRMQRERRGKNVVHQLSVTLEDLYNGATRKLALQKNVICDKCEGRGGKKGAVECCPNCRGTGMQIRIHQIGPGMVQQIQSVCMECQGHGERISPKDRCKSCNGRKIVREKKILEVHIDKGMKDGQKITFHGEGDQEPGLEPGDIIIVLDQKDHAVFTRRPRWMVRSSRPA

SEQ ID NO: 9817 - protein, 108 aa, Artificial Sequence
  Synthetic polypeptide
MQIRIHQIGPGMVQQIQSVCMECQGHGERISPKDRCKSCNGRKIVREKKILEVHIDKGMKDGQKITFHGEGDQEPGLEPGDIIIVLDQKDHAVFTRRPRWMVRSSRPA

SEQ ID NO: 9818 - protein, 311 aa, Artificial Sequence
  Synthetic polypeptide
MVKETTYYDVLGVKPNATQEELKKAYRKLALKYHPDKNPNEGEKFKQISQAYEVLSDAKKRELYDKGGEQAIKEGGAGGGFGSPMDIFDMFFGGGGRMQRERRGKNVVHQLSVTLEDLYNGATRKLALQKNVICDKCEGRGGKKGAVECCPNCRGTGMQIRIHQIGPGMVQQIQSVCMECQGHGERISPKDRCKSCNGRKIVREKKILEVHIDKGMKDGQKITFHGEGDQEPGLEPGDIIIVLDQKDHAVFTRRGEDLFMCMDIQLVEALCGFQKPISTLDNRTIVITSHPGAVAHACNPSTFGGRGRWIT

SEQ ID NO: 9819 - protein, 154 aa, Artificial Sequence
  Synthetic polypeptide
MQIRIHQIGPGMVQQIQSVCMECQGHGERISPKDRCKSCNGRKIVREKKILEVHIDKGMKDGQKITFHGEGDQEPGLEPGDIIIVLDQKDHAVFTRRGEDLFMCMDIQLVEALCGFQKPISTLDNRTIVITSHPGAVAHACNPSTFGGRGRWIT

SEQ ID NO: 9820 - protein, 353 aa, Artificial Sequence
  Synthetic polypeptide
MVKETTYYDVLGVKPNATQEELKKAYRKLALKYHPDKNPNEGEKFKQISQAYEVLSDAKKRELYDKGGEQAIKEGGAGGGFGSPMDIFDMFFGGGGRMQRERRGKNVVHQLSVTLEDLYNGATRKLALQKNVICDKCEGRGGKKGAVECCPNCRGTGMQIRIHQIGPGMVQQIQSVCMECQGHGERISPKDRCKSCNGRKIVREKKILEVHIDKGMKDGQKITFHGEGDQEPGLEPGDIIIVLDQKDHAVFTRRGEDLFMCMDIQLVEALCGFQKPISTLDNRTIVITSHPGQIVKHGDIKCVLNEGMPIYRRPYEKGRLIIEFKAQWLTPVIPALSEAEAGGSPEVRSSRPA

SEQ ID NO: 9821 - protein, 196 aa, Artificial Sequence
  Synthetic polypeptide
MQIRIHQIGPGMVQQIQSVCMECQGHGERISPKDRCKSCNGRKIVREKKILEVHIDKGMKDGQKITFHGEGDQEPGLEPGDIIIVLDQKDHAVFTRRGEDLFMCMDIQLVEALCGFQKPISTLDNRTIVITSHPGQIVKHGDIKCVLNEGMPIYRRPYEKGRLIIEFKAQWLTPVIPALSEAEAGGSPEVRSSRPA

SEQ ID NO: 9822 - protein, 409 aa, Artificial Sequence
  Synthetic polypeptide
MVKETTYYDVLGVKPNATQEELKKAYRKLALKYHPDKNPNEGEKFKQISQAYEVLSDAKKRELYDKGGEQAIKEGGAGGGFGSPMDIFDMFFGGGGRMQRERRGKNVVHQLSVTLEDLYNGATRKLALQKNVICDKCEGRGGKKGAVECCPNCRGTGMQIRIHQIGPGMVQQIQSVCMECQGHGERISPKDRCKSCNGRKIVREKKILEVHIDKGMKDGQKITFHGEGDQEPGLEPGDIIIVLDQKDHAVFTRRGEDLFMCMDIQLVEALCGFQKPISTLDNRTIVITSHPGQIVKHGDIKCVLNEGMPIYRRPYEKGRLIIEFKVNFPENGFLSPDKLSLLEKLLPERKEVEETDEMDQVELVDFDPNQERRRHYNGEAYEDDEHHPRGAVAHACNPSTFGGRGRWIT

SEQ ID NO: 9823 - protein, 252 aa, Artificial Sequence
  Synthetic polypeptide
MQIRIHQIGPGMVQQIQSVCMECQGHGERISPKDRCKSCNGRKIVREKKILEVHIDKGMKDGQKITFHGEGDQEPGLEPGDIIIVLDQKDHAVFTRRGEDLFMCMDIQLVEALCGFQKPISTLDNRTIVITSHPGQIVKHGDIKCVLNEGMPIYRRPYEKGRLIIEFKVNFPENGFLSPDKLSLLEKLLPERKEVEETDEMDQVELVDFDPNQERRRHYNGEAYEDDEHHPRGAVAHACNPSTFGGRGRWIT

SEQ ID NO: 9824 - protein, 282 aa, Artificial Sequence
  Synthetic polypeptide
MRLREPLLSGSAAMPGASLQRACRLLVAVCALHLGVTLVYYLAGRDLSRLPQLVGVSTPLQGGSNSAAAIGQSSGELRTGGARPPPPLGASSQPRPGGDSSPVVDSGPGPASNLTSVPVPHTTALSLPACPEESPLLVGPMLIEFNMPVDLELVAKQNPNVKMGGRYAPRDCVSPHKVAIIIPFRNRQEHLKYWLYYLHPVLQRQQLDYGIYVINQAGDTIFNRAKLLNVGFQEALKDYDYTCFVFSDVDLIPMNDHNAYRCFSQPRHISVAMDKFGFSMKK

SEQ ID NO: 9825 - protein, 29 aa, Artificial Sequence
  Synthetic polypeptide
MNDHNAYRCFSQPRHISVAMDKFGFSMKK

SEQ ID NO: 9826 - protein, 27 aa, Artificial Sequence
  Synthetic polypeptide
MAVRQWVIALALAALLVVDRVSPAVKE

SEQ ID NO: 9827 - protein, 65 aa, Artificial Sequence
  Synthetic polypeptide
MNRLFGKAKPKAPPPSLTDCIGTVDSRAESIDKKISRLDAELVKYKDQIKKMREGPAKIHNLLTM

SEQ ID NO: 9828 - protein, 271 aa, Artificial Sequence
  Synthetic polypeptide
MMTSVSSDHCRGAREKPQISAAQSTQPQKQVVQATAEQMRLAQVIFDKNDSDFEAKVKQLMEVTGKNQDECIVALHDCNGDVNKAINILLEGNSDTTSWETVGCKKKNFAKENSENKENREKKSEKESSRGRGNNNRKGRGGNRGREFRGEENGIDCNQVDKPSDRGKRARGRGFGRGRGRGAGRFSTQGMGTFNPADYSDSTSTDVCGTKLVVWEAAQNGADEGTAGVTVNGDILNGFPLEQDKNTCGHCFHSHCTGGPSQCNKEKISKS

SEQ ID NO: 9829 - protein, 24 aa, Artificial Sequence
  Synthetic polypeptide
RERIESWTWKQQPERKRRQSWQRI

SEQ ID NO: 9830 - protein, 86 aa, Artificial Sequence
  Synthetic polypeptide
MSGAVRGRRREVGLQHGGCGTGGGYGDGLARSGQSWRWWRSLSLGAVGSSAGTEPGRPAGASTFRLLRRRQQRHSEKLARHGGGFL

SEQ ID NO: 9831 - protein, 25 aa, Artificial Sequence
  Synthetic polypeptide
QRLQARVEELERWVYGPGGARGSRK

SEQ ID NO: 9832 - protein, 32 aa, Artificial Sequence
  Synthetic polypeptide
MAGLTDLQRLQARVEELERWVYGPGGARGSRK

SEQ ID NO: 9833 - protein, 90 aa, Artificial Sequence
  Synthetic polypeptide
MAGAVSLLGVVGLLLVSALSGVLGDRANPDLRAHPGNAAHPGSGATEPRRRPPLKDQRERTRAGSLPLGALYTAAVAAFVLYKCLQGLSP

SEQ ID NO: 9834 - protein, 143 aa, Artificial Sequence
  Synthetic polypeptide
MAGAVSLLGVVGLLLVSALSGVLGDRANPDLRAHPGNAAHPGSGATEPRRRPPLKDQRERTRAGSLPLGALYTAAVAAFVLYKCLQGKDETAVLHEEASKQQPLQSEQQLAQLTQQLAQTEQHLNNLMAQLDPLFERHGSSHL

SEQ ID NO: 9835 - protein, 99 aa, Artificial Sequence
  Synthetic polypeptide
MATVRASLRGALLLLLAVAGVAEVAGGLAPGSAGALCCNHSKDNQMCRDVCEQHSWILPSQLFAGNHEGLSDMCNDLLFTETPNCNCITSYLEVSHLAW

SEQ ID NO: 9836 - protein, 690 aa, Artificial Sequence
  Synthetic polypeptide
MATVRASLRGALLLLLAVAGVAEVAGGLAPGSAGALCCNHSKDNQMCRDVCEQIFSSKSESRLKHLLQRAPDYCPETMVEIWNCMNSSLPGVFKKSDGWVGLGCCELAIALECRQACKQASSKNDISKVCRKEYENALFSCISRNEMGSVCCSYAGHHTNCREYCQAIFRTDSSPGPSQIKAVENYCASISPQLIHCVNNYTQSYPMRNPTDSLYCCDRAEDHACQNACKRILMSKKTEMEIVDGLIEGCKTQPLPQDPLWQCFLESSQSVHPGVTVHPPPSTGLDGAKLHCCSKANTSTCRELCTKLYSMSWGNTQSWQEFDRFCEYNPVEVSMLTCLADVREPCQLGCRNLTYCTNFNNRPTELFRSCNAQSDQGAMNDMKLWEKGSIKMPFINIPVLDIKKCQPEMWKAIACSLQIKPCHSKSRGSIICKSDCVEILKKCGDQNKFPEDHTAESICELLSPTDDLKNCIPLDTYLRPSTLGNIVEEVTHPCNPNPCPANELCEVNRKGCPSGDPCLPYFCVQGCKLGEASDFIVRQGTLIQVPSSAGEVGCYKICSCGQSGLLENCMEMHCIDLQKSCIVGGKRKSHGTSFSIDCNVCSCFAGNLVCSTRLCLSEHSSEDDRRTFTGLPCNCADQFVPVCGQNGRTYPSACIARCVGLQDHQFEFGSCMSKDPCNPNPCQKNQSLSE

SEQ ID NO: 9837 - protein, 705 aa, Artificial Sequence
  Synthetic polypeptide
MATVRASLRGALLLLLAVAGVAEVAGGLAPGSAGALCCNHSKDNQMCRDVCEQIFSSKSESRLKHLLQRAPDYCPETMVEIWNCMNSSLPGVFKKSDGWVGLGCCELAIALECRQACKQASSKNDISKVCRKEYENALFSCISRNEMGSVCCSYAGHHTNCREYCQAIFRTDSSPGPSQIKAVENYCASISPQLIHCVNNYTQSYPMRNPTDSLYCCDRAEDHACQNACKRILMSKKTEMEIVDGLIEGCKTQPLPQDPLWQCFLESSQSVHPGVTVHPPPSTGLDGAKLHCCSKANTSTCRELCTKLYSMSWGNTQSWQEFDRFCEYNPVEVSMLTCLADVREPCQLGCRNLTYCTNFNNRPTELFRSCNAQSDQGAMNDMKLWEKGSIKMPFINIPVLDIKKCQPEMWKAIACSLQIKPCHSKSRGSIICKSDCVEILKKCGDQNKFPEDHTAESICELLSPTDDLKNCIPLDTYLRPSTLGNIVEEVTHPCNPNPCPANELCEVNRKGCPSGDPCLPYFCVQGCKLGEASDFIVRQGTLIQVPSSAGEVGCYKICSCGQSGLLENCMEMHCIDLQKSCIVGGKRKSHGTSFSIDCNVCSCFAGNLVCSTRLCLSEHSSEDDRRTFTGLPCNCADQFVPVCGQNGRTYPSACIARCVGLQDHQFEFGSCMSKDPCNPNPCQKNQRQMTHWKEYHRESADVLVI

SEQ ID NO: 9838 - protein, 264 aa, Artificial Sequence
  Synthetic polypeptide
MDLEKNYPTPRTSRTGHGGVNQLGGVFVNGRPLPDVVRQRIVELAHQGVRPCDISRQLRVSHGCVSKILGRYYETGSIKPGVIGGSKPKVATPKVVEKIAEYKRQNPTMFAWEIRDRLLAERVCDNDTVPSVSSINRIIRTKVQQPPNQPVPASSHSIVSTGSVTQVSSVSTDSAGSSYSISGILGITSPSADTNKRKRDEGIQESPVPNGHSLPGRDFLRKQMRGDLFTQQQLEVLDRVFERQHYSDIFTTTEPIKPEQFPYL

SEQ ID NO: 9839 - protein, 221 aa, Artificial Sequence
  Synthetic polypeptide
MDLEKNYPTPRTSRTGHGGVNQLGGVFVNGRPLPDVVRQRIVELAHQGVRPCDISRQLRVSHGCVSKILGRYYETGSIKPGVIGGSKPKVATPKVVEKIAEYKRQNPTMFAWEIRDRLLAERVCDNDTVPSVSSINRIIRTKVQQPPNQPVPASSHSIGIQESPVPNGHSLPGRDFLRKQMRGDLFTQQQLEVLDRVFERQHYSDIFTTTEPIKPEQFPYL

SEQ ID NO: 9840 - protein, 198 aa, Artificial Sequence
  Synthetic polypeptide
MDLEKNYPTPRTSRTGHGGVNQLGGVFVNGRPLPDVVRQRIVELAHQGVRPCDISRQLRVSHGCVSKILGRIIRTKVQQPPNQPVPASSHSIVSTGSVTQVSSVSTDSAGSSYSISGILGITSPSADTNKRKRDEGIQESPVPNGHSLPGRDFLRKQMRGDLFTQQQLEVLDRVFERQHYSDIFTTTEPIKPEQFPYL

SEQ ID NO: 9841 - protein, 156 aa, Artificial Sequence
  Synthetic polypeptide
MFAWEIRDRLLAERVCDNDTVPSVSSINRIIRTKVQQPPNQPVPASSHSIVSTGSVTQVSSVSTDSAGSSYSISGILGITSPSADTNKRKRDEGIQESPVPNGHSLPGRDFLRKQMRGDLFTQQQLEVLDRVFERQHYSDIFTTTEPIKPEQFPYL

SEQ ID NO: 9842 - protein, 72 aa, Artificial Sequence
  Synthetic polypeptide
DTNKRKRDEGIQESPVPNGHSLPGRDFLRKQMRGDLFTQQQLEVLDRVFERQHYSDIFTTTEPIKPEQFPYL

SEQ ID NO: 9843 - protein, 354 aa, Artificial Sequence
  Synthetic polypeptide
MMFGGYETIEAYEDDLYRDESSSELSVDSEVEFQLYSQIHYAQDLDDVIREEEHEEKNSGNSESSSSKPNQKKLIVLSDSEVIQLSDGSEVITLSDEDSIYRCKGKNVRVQAQENAHGLSSSLQSNELVDKKCKSDIEKPKSEERSGVIREVMIIEVSSSEEEESTISEGDNVESWMLLGCEVDDKDDDILLNLVGCENSVTEGEDGINWSISDKDIEAQIANNRTPGRWTQRYYSANKNIICRNCDKRGHLSKNCPLPRKVRRCFLCSRRGHLLYSCPAPLCEYCPVPKMLDHSCLFRHSWDKQCDRCHMLGHYTDVLASPSTSTMIVSVLRPPQPCFLLSLWNLSQLNLFSS

SEQ ID NO: 9844 - protein, 64 aa, Artificial Sequence
  Synthetic polypeptide
MLDHSCLFRHSWDKQCDRCHMLGHYTDVLASPSTSTMIVSVLRPPQPCFLLSLWNLSQLNLFSS

SEQ ID NO: 9845 - protein, 355 aa, Artificial Sequence
  Synthetic polypeptide
MMFGGYETIEAYEDDLYRDESSSELSVDSEVEFQLYSQIHYAQDLDDVIREEEHEEKNSGNSESSSSKPNQKKLIVLSDSEVIQLSDGSEVITLSDEDSIYRCKGKNVRVQAQENAHGLSSSLQSNELVDKKCKSDIEKPKSEERSGVIREVMIIEVSSSEEEESTISEGDNVESWMLLGCEVDDKDDDILLNLVGCENSVTEGEDGINWSISDKDIEAQIANNRTPGRWTQRYYSANKNIICRNCDKRGHLSKNCPLPRKVRRCFLCSRRGHLLYSCPAPLCEYCPVPKMLDHSCLFRHSWDKQCDRCHMLGHYTDACTEIWRQYHLTNLSSLAVDPRRMRDTYSRDAHQLANP

SEQ ID NO: 9846 - protein, 65 aa, Artificial Sequence
  Synthetic polypeptide
MLDHSCLFRHSWDKQCDRCHMLGHYTDACTEIWRQYHLTNLSSLAVDPRRMRDTYSRDAHQLANP

SEQ ID NO: 9847 - protein, 150 aa, Artificial Sequence
  Synthetic polypeptide
MRPVRLMKVFVTRRIPAEGRVALARAADCEVEQWDSDEPIPAKELERGVAGAHGLLCLLSDHVDKRILDAAGANLKVISTMSVGIDHLALDEIKKRGIRVGYTPDVLTDTTAELAVSLLLTTCRRLPEAIEEVKNPGDGVRLCLKKKKKN

SEQ ID NO: 9848 - protein, 209 aa, Artificial Sequence
  Synthetic polypeptide
MDWKLEGSTQKVESPVLQGQEGILEETGEDGLPEGFQLLQIDAEGECQEGEILATGSTAWCSELSRLAGQIRRLYGSNKKADRPFWICLTGFTTDSPLYEECVRMNDGFSSYLLDITEEDCFSLFPLETLVYLTPDSEHALEDVDLNKVYILGGLVDESIQKKVTFQKAREYSVKTARLPIQEYMVRNQNGKNYHSEILAINQGLYLSG

SEQ ID NO: 9849 - protein, 236 aa, Artificial Sequence
  Synthetic polypeptide
MDWKLEGSTQKVESPVLQGQEGILEETGEDGLPEGFQLLQIDAEGECQEGEILATGSTAWCSKNVQRKQRHWEKIVAAKKSKRKQEKERRKANRAENPGICPQHSKRFLRALTKDKLLEAKHSGPRLCIDLSMTHYMSKKLDITEEDCFSLFPLETLVYLTPDSEHALEDVDLNKVYILGGLVDESIQKKVTFQKAREYSVKTARLPIQEYMVRNQNGKNYHSEILAINQGLYLSG

SEQ ID NO: 9850 - protein, 192 aa, Artificial Sequence
  Synthetic polypeptide
MVLGICPQHSKRFLRALTKDKLLEAKHSGPRLCIDLSMTHYMSKKELSRLAGQIRRLYGSNKKADRPFWICLTGFTTDSPLYEECVRMNDGFSSYLLDITEEDCFSLFPLETLVYLTPDSEHALEDVDLNKVYILGGLVDESIQKKVTFQKAREYSVKTARLPIQEYMVRNQNGKNYHSEILAINQGLYLSG

SEQ ID NO: 9851 - protein, 287 aa, Artificial Sequence
  Synthetic polypeptide
MDWKLEGSTQKVESPVLQGQEGILEETGEDGLPEGFQLLQIDAEGECQEGEILATGSTAWCSKNVQRKQRHWEKIVAAKKSKRKQEKERRKANRAENPGICPQHSKRFLRALTKDKLLEAKHSGPRLCIDLSMTHYMSKKELSRLAGQIRRLYGSNKKADRPFWICLTGFTTDSPLYEECVRMNDGFSSYLLDITEEDCFSLFPLETLVYLTPDSEHALEDVDLNKVYILGGLVDESIQKKVTFQKAREYSVKTARLPIQEYMVRNQNGKNYHSEILAINQGLYLSG

SEQ ID NO: 9852 - protein, 204 aa, Artificial Sequence
  Synthetic polypeptide
MDWKLEGSTQKVESPVLQGQEGILEETGEDGLPEGFQLLQIDAEGECQEGEILATGSTAWCSELSRLAGQIRRLYGSNKKADRPFWICLTGFTTDSPLYEECVRMNDGFSSYLLDITEEDCFSLFPLETLVYLTPDSEHALEDVDLNKVYILGGLVDESIQKKVTFQKAREYSVKTARLPIQEYMVRNQNGKNYHSEILAINQG

SEQ ID NO: 9853 - protein, 231 aa, Artificial Sequence
  Synthetic polypeptide
MDWKLEGSTQKVESPVLQGQEGILEETGEDGLPEGFQLLQIDAEGECQEGEILATGSTAWCSKNVQRKQRHWEKIVAAKKSKRKQEKERRKANRAENPGICPQHSKRFLRALTKDKLLEAKHSGPRLCIDLSMTHYMSKKLDITEEDCFSLFPLETLVYLTPDSEHALEDVDLNKVYILGGLVDESIQKKVTFQKAREYSVKTARLPIQEYMVRNQNGKNYHSEILAINQG

SEQ ID NO: 9854 - protein, 187 aa, Artificial Sequence
  Synthetic polypeptide
MVLGICPQHSKRFLRALTKDKLLEAKHSGPRLCIDLSMTHYMSKKELSRLAGQIRRLYGSNKKADRPFWICLTGFTTDSPLYEECVRMNDGFSSYLLDITEEDCFSLFPLETLVYLTPDSEHALEDVDLNKVYILGGLVDESIQKKVTFQKAREYSVKTARLPIQEYMVRNQNGKNYHSEILAINQG

SEQ ID NO: 9855 - protein, 282 aa, Artificial Sequence
  Synthetic polypeptide
MDWKLEGSTQKVESPVLQGQEGILEETGEDGLPEGFQLLQIDAEGECQEGEILATGSTAWCSKNVQRKQRHWEKIVAAKKSKRKQEKERRKANRAENPGICPQHSKRFLRALTKDKLLEAKHSGPRLCIDLSMTHYMSKKELSRLAGQIRRLYGSNKKADRPFWICLTGFTTDSPLYEECVRMNDGFSSYLLDITEEDCFSLFPLETLVYLTPDSEHALEDVDLNKVYILGGLVDESIQKKVTFQKAREYSVKTARLPIQEYMVRNQNGKNYHSEILAINQG

SEQ ID NO: 9856 - protein, 455 aa, Artificial Sequence
  Synthetic polypeptide
MAKWLNKYFSLGNSKTKSPPQPPRPDYREQRRRGERPSQPPQAVPQASSAASASCGPATASCFSASSGSLPDDSGSTSDLIRAYRAQKERDFEDPYNGPGSSLRKLRAMCRLDYCGGSGEPGGVQRAFSASSASGAAGCCCASSGAGAAASSSSSSGSPHLYRSSSERRPATPAEVRYISPKHRLIKVESAAGGGAGDPLGGACAGGRTWSPTACGGKKLLNKCAASAAEESGAGKKDKVTIADDYSDPFDAKNDLKSKAGKGESAGYMEPYEAQRIMTEFQRQESVRSQHKGIQLYDTPYEPEGQSVDSDSESTVSPRLRESKLPQDDDRPADEYDQPWEWNRVTIPALAAQFNGNEKRQSSPSPSRDRRRQLRAPGGGFKPIKHGSPEFCGILGERVDPAVPLEKQIWYHGAISRGDAENLLRLCKECSYLVRNSQTSKHDYSLSLRKSSYQN

SEQ ID NO: 9857 - protein, 880 aa, Artificial Sequence
  Synthetic polypeptide
MATLPSAERRAFALKINRYSSAEIRKQFTLPPNLGQYHRQSISTSGFPSLQLPQFYDPVEPVDFEGLLMTHLNSLDVQLAQELGDFTDDDLDVVFTPKECRTLQPSLPEEGVELDPHVRDCVQTYIREWLIVNRKNQGSPEICGFKKTGSRKDFHKTLPKQTFESETLECSEPAAQAGPRHLNVLCDVSGKGPVTACDFDLRSLQPDKRLENLLQQVSAEDFEKQNEEARRTNRQAELFALYPSVDEEDAVEIRPVPECPKEHLGNRILVKLLTLKFEIEIEPLFASIALYDVKERKKISENFHCDLNSDQFKGFLRAHTPSVAASSQARSAVFSVTYPSSDIYLVVKIEKVLQQGEIGDCAEPYTVIKESDGGKSKEKIEKLKLQAESFCQRLGKYRMPFAWAPISLSSFFNVSTLEREVTDVDSVVGRSSVGERRTLAQSRRLSERALSLEENGVGSNFKTSTLSVSSFFKQEGDRLSDEDLFKFLADYKRSSSLQRRVKSIPGLLRLEISTAPEIINCCLTPEMLPVKPFPENRTRPHKEILEFPTREVYVPHTVYRNLLYVYPQRLNFVNKLASARNITIKIQFMCGEDASNAMPVIFGKSSGPEFLQEVYTAVTYHNKSPDFYEEVKIKLPAKLTVNHHLLFTFYHISCQQKQGASVETLLGYSWLPILLNERLQTGSYCLPVALEKLPPNYSMHSAEKVPLQNPPIKWAEGHKGVFNIEVQAVSSVHTQDNHLEKFFTLCHSLESQVTFPIRVLDQKISEMALEHELKLSIICLNSSRLEPLVLFLHLVLDKLFQLSVQPMVIAGQTANFSQFAFESVVAIANSLHNSKDLSKDQHGRNCLLASYVHYVFRLPEVQRDVPKSGAHICNPSTLGG

SEQ ID NO: 9858 - protein, 812 aa, Artificial Sequence
  Synthetic polypeptide
MTHLNSLDVQLAQELGDFTDDDLDVVFTPKECRTLQPSLPEEGVELDPHVRDCVQTYIREWLIVNRKNQGSPEICGFKKTGSRKDFHKTLPKQTFESETLECSEPAAQAGPRHLNVLCDVSGKGPVTACDFDLRSLQPDKRLENLLQQVSAEDFEKQNEEARRTNRQAELFALYPSVDEEDAVEIRPVPECPKEHLGNRILVKLLTLKFEIEIEPLFASIALYDVKERKKISENFHCDLNSDQFKGFLRAHTPSVAASSQARSAVFSVTYPSSDIYLVVKIEKVLQQGEIGDCAEPYTVIKESDGGKSKEKIEKLKLQAESFCQRLGKYRMPFAWAPISLSSFFNVSTLEREVTDVDSVVGRSSVGERRTLAQSRRLSERALSLEENGVGSNFKTSTLSVSSFFKQEGDRLSDEDLFKFLADYKRSSSLQRRVKSIPGLLRLEISTAPEIINCCLTPEMLPVKPFPENRTRPHKEILEFPTREVYVPHTVYRNLLYVYPQRLNFVNKLASARNITIKIQFMCGEDASNAMPVIFGKSSGPEFLQEVYTAVTYHNKSPDFYEEVKIKLPAKLTVNHHLLFTFYHISCQQKQGASVETLLGYSWLPILLNERLQTGSYCLPVALEKLPPNYSMHSAEKVPLQNPPIKWAEGHKGVFNIEVQAVSSVHTQDNHLEKFFTLCHSLESQVTFPIRVLDQKISEMALEHELKLSIICLNSSRLEPLVLFLHLVLDKLFQLSVQPMVIAGQTANFSQFAFESVVAIANSLHNSKDLSKDQHGRNCLLASYVHYVFRLPEVQRDVPKSGAHICNPSTLGG

SEQ ID NO: 9859 - protein, 182 aa, Artificial Sequence
  Synthetic polypeptide
MHSAEKVPLQNPPIKWAEGHKGVFNIEVQAVSSVHTQDNHLEKFFTLCHSLESQVTFPIRVLDQKISEMALEHELKLSIICLNSSRLEPLVLFLHLVLDKLFQLSVQPMVIAGQTANFSQFAFESVVAIANSLHNSKDLSKDQHGRNCLLASYVHYVFRLPEVQRDVPKSGAHICNPSTLGG

SEQ ID NO: 9860 - protein, 347 aa, Artificial Sequence
  Synthetic polypeptide
MCGEDASNAMPVRRETNICLKSGWAAHPCHFTQVRDSSVYKVRLFQANTAQHVQGLLCPGYQWGNRVIFGKSSGPEFLQEVYTAVTYHNKSPDFYEEVKIKLPAKLTVNHHLLFTFYHISCQQKQGASVETLLGYSWLPILLNERLQTGSYCLPVALEKLPPNYSMHSAEKVPLQNPPIKWAEGHKGVFNIEVQAVSSVHTQDNHLEKFFTLCHSLESQVTFPIRVLDQKISEMALEHELKLSIICLNSSRLEPLVLFLHLVLDKLFQLSVQPMVIAGQTANFSQFAFESVVAIANSLHNSKDLSKDQHGRNCLLASYVHYVFRLPEVQRDVPKSGAHICNPSTLGG

SEQ ID NO: 9861 - protein, 880 aa, Artificial Sequence
  Synthetic polypeptide
MATLPSAERRAFALKINRYSSAEIRKQFTLPPNLGQYHRQSISTSGFPSLQLPQFYDPVEPVDFEGLLMTHLNSLDVQLAQELGDFTDDDLDVVFTPKECRTLQPSLPEEGVELDPHVRDCVQTYIREWLIVNRKNQGSPEICGFKKTGSRKDFHKTLPKQTFESETLECSEPAAQAGPRHLNVLCDVSGKGPVTACDFDLRSLQPDKRLENLLQQVSAEDFEKQNEEARRTNRQAELFALYPSVDEEDAVEIRPVPECPKEHLGNRILVKLLTLKFEIEIEPLFASIALYDVKERKKISENFHCDLNSDQFKGFLRAHTPSVAASSQARSAVFSVTYPSSDIYLVVKIEKVLQQGEIGDCAEPYTVIKESDGGKSKEKIEKLKLQAESFCQRLGKYRMPFAWAPISLSSFFNVSTLEREVTDVDSVVGRSSVGERRTLAQSRRLSERALSLEENGVGSNFKTSTLSVSSFFKQEGDRLSDEDLFKFLADYKRSSSLQRRVKSIPGLLRLEISTAPEIINCCLTPEMLPVKPFPENRTRPHKEILEFPTREVYVPHTVYRNLLYVYPQRLNFVNKLASARNITIKIQFMCGEDASNAMPVIFGKSSGPEFLQEVYTAVTYHNKSPDFYEEVKIKLPAKLTVNHHLLFTFYHISCQQKQGASVETLLGYSWLPILLNERLQTGSYCLPVALEKLPPNYSMHSAEKVPLQNPPIKWAEGHKGVFNIEVQAVSSVHTQDNHLEKFFTLCHSLESQVTFPIRVLDQKISEMALEHELKLSIICLNSSRLEPLVLFLHLVLDKLFQLSVQPMVIAGQTANFSQFAFESVVAIANSLHNSKDLSKDQHGRNCLLASYVHYVFRLPEVQRDVPKSVAHICNPSTLGG

SEQ ID NO: 9862 - protein, 812 aa, Artificial Sequence
  Synthetic polypeptide
MTHLNSLDVQLAQELGDFTDDDLDVVFTPKECRTLQPSLPEEGVELDPHVRDCVQTYIREWLIVNRKNQGSPEICGFKKTGSRKDFHKTLPKQTFESETLECSEPAAQAGPRHLNVLCDVSGKGPVTACDFDLRSLQPDKRLENLLQQVSAEDFEKQNEEARRTNRQAELFALYPSVDEEDAVEIRPVPECPKEHLGNRILVKLLTLKFEIEIEPLFASIALYDVKERKKISENFHCDLNSDQFKGFLRAHTPSVAASSQARSAVFSVTYPSSDIYLVVKIEKVLQQGEIGDCAEPYTVIKESDGGKSKEKIEKLKLQAESFCQRLGKYRMPFAWAPISLSSFFNVSTLEREVTDVDSVVGRSSVGERRTLAQSRRLSERALSLEENGVGSNFKTSTLSVSSFFKQEGDRLSDEDLFKFLADYKRSSSLQRRVKSIPGLLRLEISTAPEIINCCLTPEMLPVKPFPENRTRPHKEILEFPTREVYVPHTVYRNLLYVYPQRLNFVNKLASARNITIKIQFMCGEDASNAMPVIFGKSSGPEFLQEVYTAVTYHNKSPDFYEEVKIKLPAKLTVNHHLLFTFYHISCQQKQGASVETLLGYSWLPILLNERLQTGSYCLPVALEKLPPNYSMHSAEKVPLQNPPIKWAEGHKGVFNIEVQAVSSVHTQDNHLEKFFTLCHSLESQVTFPIRVLDQKISEMALEHELKLSIICLNSSRLEPLVLFLHLVLDKLFQLSVQPMVIAGQTANFSQFAFESVVAIANSLHNSKDLSKDQHGRNCLLASYVHYVFRLPEVQRDVPKSVAHICNPSTLGG

SEQ ID NO: 9863 - protein, 182 aa, Artificial Sequence
  Synthetic polypeptide
MHSAEKVPLQNPPIKWAEGHKGVFNIEVQAVSSVHTQDNHLEKFFTLCHSLESQVTFPIRVLDQKISEMALEHELKLSIICLNSSRLEPLVLFLHLVLDKLFQLSVQPMVIAGQTANFSQFAFESVVAIANSLHNSKDLSKDQHGRNCLLASYVHYVFRLPEVQRDVPKSVAHICNPSTLGG

SEQ ID NO: 9864 - protein, 347 aa, Artificial Sequence
  Synthetic polypeptide
MCGEDASNAMPVRRETNICLKSGWAAHPCHFTQVRDSSVYKVRLFQANTAQHVQGLLCPGYQWGNRVIFGKSSGPEFLQEVYTAVTYHNKSPDFYEEVKIKLPAKLTVNHHLLFTFYHISCQQKQGASVETLLGYSWLPILLNERLQTGSYCLPVALEKLPPNYSMHSAEKVPLQNPPIKWAEGHKGVFNIEVQAVSSVHTQDNHLEKFFTLCHSLESQVTFPIRVLDQKISEMALEHELKLSIICLNSSRLEPLVLFLHLVLDKLFQLSVQPMVIAGQTANFSQFAFESVVAIANSLHNSKDLSKDQHGRNCLLASYVHYVFRLPEVQRDVPKSVAHICNPSTLGG

SEQ ID NO: 9865 - protein, 136 aa, Artificial Sequence
  Synthetic polypeptide
MASVAWAVLKVLLLLPTQTWSPVGAGNPPDCDSPLASALPRSSFSSSSELSSSHGPGFSRLNRRDGAGGWTPLVSNKYQWLQIDLGERMEVTAVATQGGYGSSDWVTSYLLMFSDGGRNWKQYRREESIWLLGRLR

SEQ ID NO: 9866 - protein, 789 aa, Artificial Sequence
  Synthetic polypeptide
MASVAWAVLKVLLLLPTQTWSPVGAGNPPDCDSPLASALPRSSFSSSSELSSSHGPGFSRLNRRDGAGGWTPLVSNKYQWLQIDLGERMEVTAVATQGGYGSSDWVTSYLLMFSDGGRNWKQYRREESIWGFPGNTNADSVVHYRLQPPFEARFLRFLPLAWNPRGRIGMRIEVYGCAYKSEVVYFDGQSALLYTLDKKPLKPIRDVISLKFKAMQSNGILLHREGQHGNHITLELIKGKLVFFLNSGNAKLPSTIAPVTLTLGSLLDDQHWHSVLIELLDTQVNFTVDKHTHHFQAKGDSSNLDLNFEISFGGILSPGRSRAFTRKSFHGCLENLYYNGVDVTELAKKHKPQILMMGNVSFSCPQPQTVPVTFLSSRSYLALPGNSGEDKVSVTFQFRTWNRAGHLLFGELQRGSGSFVLFLKDGKLKLSLFQAGQSPRNVTAGAGLNDGQWHSVSFSAKWSHMNVVVDDDTAVQPLVAVLIDSGDTYYFGGCLGNSSGSGCKSPLGGFQGCLRLITIGDKAVDPILVQQGALGSFRDLQIDSCGITDRCLPSYCEHGGECSQSWDTFSCDCLGTGYTGETCHSSLYEQSCEAHKHRGNPSGLYYIDADGSGPLGPFLVYCNMTADSAWTVVRHGGPDAVTLRGAPSGHPLSAVSFAYAAGAGQLRAAVNLAERCEQRLALRCGTARRPDSRDGTPLSWWVGRTNETHTSWGGSLPDAQKCTCGLEGNCIDSQYYCNCDAGQNEWTSDTIVLSQKEHLPVTQIVMTDTGQPHSEADYTLGPLLCRGDN

SEQ ID NO: 9867 - protein, 70 aa, Artificial Sequence
  Synthetic polypeptide
MRKPQAGTGEAARDPSLRPARTVLVGDQDEYTAAENKSPRGTLCPTGEQRIHAREDACGVPFPLHFLSHS

SEQ ID NO: 9868 - protein, 78 aa, Artificial Sequence
  Synthetic polypeptide
MGASARLLRAVIMGAPGSGKGTVSSRITTHFELKHLSSGDLLRDNMLRGTATSSFSNLHPDQSAAISHGGKTLHQQKD

SEQ ID NO: 9869 - protein, 111 aa, Artificial Sequence
  Synthetic polypeptide
MGASARLLRAVIMGAPGSGKGTVSSRITTHFELKHLSSGDLLRDNMLRGTAFYWKKMPSRTSIAGEEKSMLDFKASKDRLTLLLGTNAAGDFKLKPMLIYHSKNPRVLRII

SEQ ID NO: 9870 - protein, 61 aa, Artificial Sequence
  Synthetic polypeptide
MGASARLLRAVIMGAPGSGKGTVSSRITTHFELKHLSSGDLLRDNMLRGTVKAERCVEAAE

SEQ ID NO: 9871 - protein, 297 aa, Artificial Sequence
  Synthetic polypeptide
MYFLSGWPKRLLCPLGSPAEAPFHVQSDPQRAFFAVLAAARLSIWYSRPSVLIVTYKEPAKSSTQFGSYKQAEWRPDSTMIAVSTANGYILFFHITSTRGDKYLYEPVYPKGSPQMKGTPHFKEEQCAPALNLEMRKILDLQAPIMSLQSVLEDLLVATSDGLLHLIHWEGMTNGRKAINLCTVPFSVDLQSSRVGSFLGFTDVHIRDMEYCATLDGFAVVFNDGKVGFITPVSSRFTAEQLHGVWPQDVVDGTCVAVNNKYRLMAFGCVSQENGQKYERAVLNSEHKHKVTRDSDF

SEQ ID NO: 9872 - protein, 218 aa, Artificial Sequence
  Synthetic polypeptide
MIAVSTANGYILFFHITSTRGDKYLYEPVYPKGSPQMKGTPHFKEEQCAPALNLEMRKILDLQAPIMSLQSVLEDLLVATSDGLLHLIHWEGMTNGRKAINLCTVPFSVDLQSSRVGSFLGFTDVHIRDMEYCATLDGFAVVFNDGKVGFITPVSSRFTAEQLHGVWPQDVVDGTCVAVNNKYRLMAFGCVSQENGQKYERAVLNSEHKHKVTRDSDF

SEQ ID NO: 9873 - skipped

SEQ ID NO: 9874 - protein, 104 aa, Artificial Sequence
  Synthetic polypeptide
MPREDAHFIYGYPKKGHGHSYTTAEEAAGIGILTVILGVLLLIGCWYCRRRNGYRALMDKSLHVGTQCALTRRCPQEGFDHRDSKVSLQEKNCEPVLLEILKLH

SEQ ID NO: 9875 - protein, 284 aa, Artificial Sequence
  Synthetic polypeptide
MSVPGTPGAMEPAGEEERPPPAAEGEDDEEEVAAAAQTSGPAHGRSASSLEDADDQEEEMEAMVIGGGCCKEQELTYELQQGYRILGEFLQEKHRGLTAPFLQPLGGVATAEEEVAEGPRSGGRGGRAFPQQPGQGMCLLQMEEKFASGQYGGITEFVADFRLMLETCYRLHGVDHWISKQGQKLEMMLEQKLALLSRHLREKTTIAVTSRGYYGLEDEKGTACTSTRRRSTPRSLAGLTSGVFESIMVQVLRQEEQLRAKEEKRDMDEAGSHYPQQTNTGTEN

SEQ ID NO: 9876 - protein, 329 aa, Artificial Sequence
  Synthetic polypeptide
MSVPGTPGAMEPAGEEERPPPAAEGEDDEEEVAAAAQTSGPAHGRSASSLEDADDQEEEMEAMVIGGGCCKEQELTYELQQGYRILGEFLQEKHRGLTAPFLQPLGGVATAEEEVAEGPRSGGRGGRAFPQQPGQGMCLLQMEEKFASGQYGGITEFVADFRLMLETCYRLHGVDHWISKQGQKLEMMLEQKLALLSRHLREKTTIAVTSRGYYGLEDEKGTACTSTRRRSTPRSLAGLTSGVFESIMVQVLRQEEQLRAKEEKSTIHNSKDMESTQMLSNDRLDKENVVHTDHGILCSHKKELDHVICRDMDEAGSHYPQQTNTGTEN

SEQ ID NO: 9877 - protein, 53 aa, Artificial Sequence
  Synthetic polypeptide
MKPKMKYSTNKISTAKWKNTASKALCFKLGTRRPSSATAPQSWTSQPPEPDTK

SEQ ID NO: 9878 - protein, 253 aa, Artificial Sequence
  Synthetic polypeptide
MWIQVRTIDGSKTCTIEDVSRKATIEELRERVWALFDVRPECQRLFYRGKQLENGYTLFDYDVGLNDIIQLLVRPDPDHLPGTSTQIEAKPCSNSPPKVKKAPRVGPSNQPSTSARARLIDPGFGIYKVNELVDARDVGLGAWFEAHIHSVTRASDGQSRGKTPLKNGSSCKRTNGNIKHKSKENTNKLDSVPSTSNSDCVAADEDVIYHIQYDDTVHNSKDLEPTQMPVDDRLDKENVAHIHHGILCSHKKG

SEQ ID NO: 9879 - protein, 84 aa, Artificial Sequence
  Synthetic polypeptide
VYGAKDIELCPEAQVKIDRYTQQGFGNLPICMAKTDLSLSHQPDKKGVPRDFILPISDVRASIGAGFIYPLVGTDYRTLLRGSE

SEQ ID NO: 9880 - protein, 68 aa, Artificial Sequence
  Synthetic polypeptide
MWTLGRRAVAGLLASPSPAQAQTLTRVPRPAELAPLCGRRGLRTDIDATCTPRRAGEDKGDAHFADLV

SEQ ID NO: 9881 - protein, 768 aa, Artificial Sequence
  Synthetic polypeptide
MNHLEGSAEVEVTDEAAGGEVNESVEADLEHPEVEEEQQQPPQQQHYVGRHQRGRALEDLRAQLGQEEEERGECLARSASTESGFHNHTDTAEGDVIAAARDGYDAERAQDPEDESAYAVQYRPEAEEYTEQAEAEHAEATHRRALPNHLHFHSLEHEEAMNAAYSGYVYTHRLFHRGEDEPYSEPYADYGGLQEHVYEEIGDAPELDARDGLRLYEQERDEAAAYRQEALGARLHHYDERSDGESDSPEKEAEFAPYPRMDSYEQEEDIDQIVAEVKQSMSSQSLDKAAEDMPEAEQDLERPPTPAGGRPDSPGLQAPAGQQRAVGPAGGGEAGQRYSKEKRDAISLAIKDIKEAIEEVKTRTIRSPYTPDEPKEPIWVMRQDISPTRDCDDQRPMDGDSPSPGSSSPLGAESSSTSLHPSDPVEASTNKESRKSLASFPTYVEVPGPCDPEDLIDGIIFAANYLGSTQLLSDKTPSKNVRMMQAQEAVSRIKMAQKLAKSRKKAPEGESQPMTEVDLFISTQRIKVLNADTQETMMDHPLRTISYIADIGNIVVLMARRRMPRSNSQENVEASHPSQDGKRQYKMICHVFESEDAQLIAQSIGQAFSVAYQEFLRANGINPEDLSQKEYSDLLNTQDMYNDDLIHFSKSENCKDVFIEKQKGEILGVVIVESGWGSILPTVIIANMMHGGPAEKSGKLNIGDQIMSINGTSLVGLPLSTCQSIIKGLKNQSRVKLNIVRCPPVTTVLIRRPDLRYQLGFSVQNGIL

SEQ ID NO: 9882 - protein, 109 aa, Artificial Sequence
  Synthetic polypeptide
MAETSEEVAVLVQRVVKDITNAFRRNPHIDEIGLIPCPEARYNRSPIVLVENKLGVESWCVKFLLPYVHNKLLLYRTRKQWLNRDELIDVTCTLLLLNPDFTTAWNVST

SEQ ID NO: 9883 - protein, 339 aa, Artificial Sequence
  Synthetic polypeptide
MATPSKKTSTPSPQPSKRALPRDPSSEVPSKRKNSAPQLPLLQSSGPFVEGSIVRISMENFLTYDICEVSPGPHLNMIVGANGTGKSSIVCAICLGLAGKPAFMGRADKVGFFVKRGCSRGMVEIELFRASGNLVITREIDVAKNQSFWFINKKSTTQKIVEEKVAALNIQVGNLCQFLPQDKVGEFAKLSKIELLEATEKSIGPPEMHKYHCELKNLREKEKQLETSCKEKTEYLQKMVQRNERYKQDVERFYERKRHLDLIEMLEAKRPWVEYENVRQEYEEVKLVRDRVKEEVRKLKEGQIPVTCRIEEMENERHNLEARIKEKAGDEVLWTGHSF

SEQ ID NO: 9884 - protein, 36 aa, Artificial Sequence
  Synthetic polypeptide
MSSQKGNVARSRPQKHQNTFSFKNDKFDKSVQTKVW

SEQ ID NO: 9885 - protein, 19 aa, Artificial Sequence
  Synthetic polypeptide
KMTSSIKVCRPRCGNSIVV

SEQ ID NO: 9886 - protein, 87 aa, Artificial Sequence
  Synthetic polypeptide
MSSQKGNVARSRPQKHQNTFSFKNDKFDKSVQTKKINAKLHDGVCQRCKEVLEWRVKYSKYKPLSKPKKWSTASFLKPARPQAHREQ

SEQ ID NO: 9887 - protein, 59 aa, Artificial Sequence
  Synthetic polypeptide
MPGLVDTHIHASQYSFAGSSIDLPLLEWLTKYTFPAEHRFQNIDFAEEVYTRVVNSRLQ

SEQ ID NO: 9888 - protein, 133 aa, Artificial Sequence
  Synthetic polypeptide
MCAAQMPPLAHIFRGTFVHSTWTCPMEVLRDHLLGVSDSGKIVFLEEASQQEKLAKEWCFKPCEIRELSHHEFFMPGLVDTHIHASQYSFAGSSIDLPLLEWLTKYTFPAEHRFQNIDFAEEVYTRVVNSRLQ

SEQ ID NO: 9889 - protein, 108 aa, Artificial Sequence
  Synthetic polypeptide
MEVLRDHLLGVSDSGKIVFLEEASQQEKLAKEWCFKPCEIRELSHHEFFMPGLVDTHIHASQYSFAGSSIDLPLLEWLTKYTFPAEHRFQNIDFAEEVYTRVVNSRLQ

SEQ ID NO: 9890 - protein, 91 aa, Artificial Sequence
  Synthetic polypeptide
MFLEEASQQEKLAKEWCFKPCEIRELSHHEFFMPGLVDTHIHASQYSFAGSSIDLPLLEWLTKYTFPAEHRFQNIDFAEEVYTRVVNSRLQ

SEQ ID NO: 9891 - protein, 485 aa, Artificial Sequence
  Synthetic polypeptide
MSSSGTPDLPVLLTDLKIQYTKIFINNEWHDSVSGKKFPVFNPATEEELCQVEEGDKEDVDKAVKAARQAFQIGSPWRTMDASERGRLLYKLADLIERDRLLLATMESMNGGKLYSNAYLNDLAGCIKTLRYCAGWADKIQGRTIPIDGNFFTYTRHEPIGVCGQIIPWNFPLVMLIWKIGPALSCGNTVVVKPAEQTPLTALHVASLIKEAGFPPGVVNIVPGYGPTAGAAISSHMDIDKVAFTGSTEVGKLIKEAAGKSNLKRVTLELGGKSPCIVLADADLDNAVEFAHHGVFYHQGQCCIAASRIFVEESIYDEFVRRSVERAKKYILGNPLTPGVTQGPQIDKEQYDKILDLIESGKKEGAKLECGGGPWGNKGYFVQPTVFSNVTDEMRIAKEEIFGPVQQIMKFKSLDDVIKRANNTFYGLSAGVFTKDIDKAITISSALQAGTVWVNCYGVVSAQCPFGGFKMSGNGRELVDPGQEA

SEQ ID NO: 9892 - protein, 285 aa, Artificial Sequence
  Synthetic polypeptide
MEEFLQRAKSKLNRSKRLEKVHVVIGPKSCDLDSLISTFTYAYFLDKVSPPGVLCLPVLNIPRTEFNYFTETRFILEELNISESFHIFRDEINLHQLNDEGKLSITLVGSSVLASEDKTLESAVVKVINPVEQSDANVEFRESSSSLVLKEILQEAPELITEQLAHRLRGSILFKWMTMESEKISEKQEEILSILEEKFPNLPPREDIINVLQETQFSAQGLSIEQTMLKDLKELSDGEIKVAISTVSMNLEHFGSLRRADHLMSGVRVQPDQHGETPSLLKIEN

SEQ ID NO: 9893 - protein, 2063 aa, Artificial Sequence
  Synthetic polypeptide
MVFESVVVDVLNRFLGDYVVDLDTSQLSLGIWKGAVALKNLQIKENALSQLDVPFKVKVGHIGNLKLIIPWKNLYTQPVEAVLEEIYLLIVPSSRIKYDPLKEEKQLMEAKQQELKRIEEAKQKVVDQEQHLPEKQDTFAEKLVTQIIKNLQVKISSIHIRYEDDITNRDKPLSFGISLQNLSMQTTDQYWVPCLHDETEKLVRKLIRLDNLFAYWNVKSQMFYLSDYDNSLDDLKNGIVNENIVPEGYDFVFRPISANAKLVMNRRSDFDFSAPKINLEIELHNIAIEFNKPQYFSIMELLESVDMMAQNLPYRKFKPDVPLHHHAREWWAYAIHGVLEVNVCPRLWMWSWKHIRKHRQKVKQYKELYKKKLTSKKPPGELLVSLEELEKTLDVFNITIARQTAEVEVKKAGYKIYKEGVKDPEDNKGWFSWLWSWSEQNTNEQQPDVQPETLEEMLTPEEKALLYEAIGYSETAVDPTLLKTFEALKFFVHLKSMSIVLRENHQKPELVDIVIEEFSTLIVQRPGAQAIKFETKIDSFHITGLPDNSEKPRLLSSLDDAMSLFQITFEINPLDETVSQRCIIEAEPLEIIYDARTVNSIVEFFRPPKEVHLAQLTAATLTKLEEFRSKTATGLLYIIETQKVLDLKINLKASYIIVPQDGIFSPTSNLLLLDLGHLKVTSKSRSELPDVKQGEANLKEIMDRAYDSFDIQLTSVQLLYSRVGDNWREARKLSVSTQHILVPMHFNLELSKAMVFMDVRMPKFKIYGKLPLISLRISDKKLQGIMELIESIPKPEPVTEVSAPVKSFQIQTSTSLGTSQISQKIIPLLELPSVSEDDSEEEFFDAPCSPLEEPLQFPTGVKSIRTRKLQKQDCSVNMTTFKIRFEVPKVLIEFYHLVGDCELSVVEILVLGLGAEIEIRTYDLKANAFLKEFCLKCPEYLDENKKPVYLVTTLDNTMEDLLTLEYVKAEKNVPDLKSTYNNVLQLIKVNFSSLDIHLHTEALLNTINYLHNILPQSEEKSAPVSTTETEDKGDVIKKLALKLSTNEDIITLQILAELSCLQIFIQDQKCNISEIKIEGLDSEMIMRPSETEINAKLRNIIVLDSDITAIYKKAVYITGKEVFSFKMVSYMDATAGSAYTDMNVVDIQVNLIVGCIEVVFVTKFLYSILAFIDNFQAAKQALAEATVQAAGMAATGVKELAQRSSRMALDINIKAPVVVIPQSPVSENVFVADFGLITMTNTFHMITESQSSPPPVIDLITIKLSEMRLYRSRFINDAYQEVLDLLLPLNLEVVVERNLCWEWYQEVPCFNVNAQLKPMEFILSQEDITTIFKTLHGNIWYEKDGSASPAVTKDQYSATSGVTTNASHHSGGATVVTAAVVEVHSRALLVKTTLNISFKTDDLTMVLYSPGPKQASFTDVRDPSLKLAEFKLENIISTLKMYTDGSTFSSFSLKNCILDDKRPHVKKATPRMIGLTVGFDKKDMMDIKYRKVRDGCVTDAVFQEMYICASVEFLQTVANVFLEAYTTGTAVETSVQTWTAKEEVPTQESVKWEINVIIKNPEIVFVADMTKNDAPALVITTQCEICYKGNLENSTMTAAIKDLQVRACPFLPVKRKGKITTVLQPCDLFYQTTQKGTDPQVIDMSVKSLTLKVSPVIINTMITITSALYTTKETIPEETASSTAHLWEKKDTKTLKMWFLEESNETEKIAPTTELVPKGEMIKMNIDSIFIVLEAGIGHRTVPMLLAKSRFSGEGKNWSSLINLHCQLELEVHYYNEMFGVWEPLLEPLEIDQTEDFRPWNLGIKMKKKAKMAIVESDPEEENYKVPEYKTVISFHSKDQLNITLSKCGLVMLNNLVKAFTEAATGSSADFVKDLAPFMILNSLGLTISVSPSDSFSVLNIPMAKSYVLKNGESLSMDYIRTKDNDHFNAMTSLSSKLFFILLTPVNHSTADKIPLTKVGRRLYTVRHRESGVERSIVCQIDTVEGSKKVTIRSPVQIRNHFSVPLSVYEGDTLLGTASPENEFNIPLGSYRASAQQKKLSSEGTGNLQNGEKFLQSIHLTKD

SEQ ID NO: 9894 - protein, 2024 aa, Artificial Sequence
  Synthetic polypeptide
MVFESVVVDVLNRFLGDYVVDLDTSQLSLGIWKGAVALKNLQIKENALSQLDVPFKVKVGHIGNLKLIIPWKNLYTQPVEAVLEEIYLLIVPSSRIKYDPLKEEKQLMEAKQQELKRIEEAKQKVVDQEQHLPEKQDTFAEKLVTQIIKNLQVKISSIHIRYEDDITNRDKPLSFGISLQNLSMQTTDQYWVPCLHDETEKLVRKLIRLDNLFAYWNVKSQMFYLSDYDNSLDDLKNGIVNENIVPEGYDFVFRPISANAKLVMNRRSDFDFSAPKINLEIELHNIAIEFNKPQYFSIMELLESVDMMAQNLPYRKFKPDVPLHHHAREWWAYAIHGVLEVNVCPRLWMWSWKHIRKHRQKVKQYKELYKKKLTSKKPPGELLVSLEELEKTLDVFNITIARQTAEVEVKKAGYKIYKEGVKDPEDNKGWFSWLWSWSEQNTNEQQPDVQPETLEEMLTPEEKALLYEAIGYSETAVDPTLLKTFEALKFFVHLKSMSIVLRENHQKPELVDIVIEEFSTLIVQRPGAQAIKFETKIDSFHITGLPDNSEKPRLLSSLDDAMSLFQITFEINPLDETVSQRCIIEAEPLEIIYDARTVNSIVEFFRPPKEVHLAQLTAATLTKLEEFRSKTATGLLYIIETQKVLDLKINLKASYIIVPQDGIFSPTSNLLLLDLGHLKVTSKSRSELPDVKQGEANLKEIMDRAYDSFDIQLTSVQLLYSRVGDNWREARKLSVSTQHILVPMHFNLELSKAMVFMDVRMPKFKIYGKLPLISLRISDKKLQGIMELIESIPKPEPVTEVSAPVKSFQIQTSTSLGTSQISQKIIPLLELPSVSEDDSEEEFFDAPCSPLEEPLQFPTGVKSIRTRKLQKQDCSVNMTTFKIRFEVPKVLIEFYHLVGDCELSVVEILVLGLGAEIEIRTYDLKANAFLKEFCLKCPEYLDENKKPVYLVTTLDNTMEDLLTLEYVKAEKNVPDLKSTYNNVLQLIKVNFSSLDIHLHTEALLNTINYLHNILPQSEEKSAPVSTTETEDKGDVIKKLGLDSEMIMRPSETEINAKLRNIIVLDSDITAIYKKAVYITGKEVFSFKMVSYMDATAGSAYTDMNVVDIQVNLIVGCIEVVFVTKFLYSILAFIDNFQAAKQALAEATVQAAGMAATGVKELAQRSSRMALDINIKAPVVVIPQSPVSENVFVADFGLITMTNTFHMITESQSSPPPVIDLITIKLSEMRLYRSRFINDAYQEVLDLLLPLNLEVVVERNLCWEWYQEVPCFNVNAQLKPMEFILSQEDITTIFKTLHGNIWYEKDGSASPAVTKDQYSATSGVTTNASHHSGGATVVTAAVVEVHSRALLVKTTLNISFKTDDLTMVLYSPGPKQASFTDVRDPSLKLAEFKLENIISTLKMYTDGSTFSSFSLKNCILDDKRPHVKKATPRMIGLTVGFDKKDMMDIKYRKVRDGCVTDAVFQEMYICASVEFLQTVANVFLEAYTTGTAVETSVQTWTAKEEVPTQESVKWEINVIIKNPEIVFVADMTKNDAPALVITTQCEICYKGNLENSTMTAAIKDLQVRACPFLPVKRKGKITTVLQPCDLFYQTTQKGTDPQVIDMSVKSLTLKVSPVIINTMITITSALYTTKETIPEETASSTAHLWEKKDTKTLKMWFLEESNETEKIAPTTELVPKGEMIKMNIDSIFIVLEAGIGHRTVPMLLAKSRFSGEGKNWSSLINLHCQLELEVHYYNEMFGVWEPLLEPLEIDQTEDFRPWNLGIKMKKKAKMAIVESDPEEENYKVPEYKTVISFHSKDQLNITLSKCGLVMLNNLVKAFTEAATGSSADFVKDLAPFMILNSLGLTISVSPSDSFSVLNIPMAKSYVLKNGESLSMDYIRTKDNDHFNAMTSLSSKLFFILLTPVNHSTADKIPLTKVGRRLYTVRHRESGVERSIVCQIDTVEGSKKVTIRSPVQIRNHFSVPLSVYEGDTLLGTASPENEFNIPLGSYRASAQQKKLSSEGTGNLQNGEKFLQSIHLTKD

SEQ ID NO: 9895 - protein, 13 aa, Artificial Sequence
  Synthetic polypeptide
SHVFQGKAKTGVP

SEQ ID NO: 9896 - protein, 3131 aa, Artificial Sequence
  Synthetic polypeptide
MVFESVVVDVLNRFLGDYVVDLDTSQLSLGIWKGAVALKNLQIKENALSQLDVPFKVKVGHIGNLKLIIPWKNLYTQPVEAVLEEIYLLIVPSSRIKYDPLKEEKQLMEAKQQELKRIEEAKQKVVDQEQHLPEKQDTFAEKLVTQIIKNLQVKISSIHIRYEDDITNRDKPLSFGISLQNLSMQTTDQYWVPCLHDETEKLVRKLIRLDNLFAYWNVKSQMFYLSDYDNSLDDLKNGIVNENIVPEGYDFVFRPISANAKLVMNRRSDFDFSAPKINLEIELHNIAIEFNKPQYFSIMELLESVDMMAQNLPYRKFKPDVPLHHHAREWWAYAIHGVLEVNVCPRLWMWSWKHIRKHRQKVKQYKELYKKKLTSKKPPGELLVSLEELEKTLDVFNITIARQTAEVEVKKAGYKIYKEGVKDPEDNKGWFSWLWSWSEQNTNEQQPDVQPETLEEMLTPEEKALLYEAIGYSETAVDPTLLKTFEALKFFVHLKSMSIVLRENHQKPELVDIVIEEFSTLIVQRPGAQAIKFETKIDSFHITGLPDNSEKPRLLSSLDDAMSLFQITFEINPLDETVSQRCIIEAEPLEIIYDARTVNSIVEFFRPPKEVHLAQLTAATLTKLEEFRSKTATGLLYIIETQKVLDLKINLKASYIIVPQDGIFSPTSNLLLLDLGHLKVTSKSRSELPDVKQGEANLKEIMDRAYDSFDIQLTSVQLLYSRVGDNWREARKLSVSTQHILVPMHFNLELSKAMVFMDVRMPKFKIYGKLPLISLRISDKKLQGIMELIESIPKPEPVTEVSAPVKSFQIQTSTSLGTSQISQKIIPLLELPSVSEDDSEEEFFDAPCSPLEEPLQFPTGVKSIRTRKLQKQDCSVNMTTFKIRFEVPKVLIEFYHLVGDCELSVVEILVLGLGAEIEIRTYDLKANAFLKEFCLKCPEYLDENKKPVYLVTTLDNTMEDLLTLEYVKAEKNVPDLKSTYNNVLQLIKVNFSSLDIHLHTEALLNTINYLHNILPQSEEKSAPVSTTETEDKGDVIKKLGLDSEMIMRPSETEINAKLRNIIVLDSDITAIYKKAVYITGKEVFSFKMVSYMDATAGSAYTDMNVVDIQVNLIVGCIEVVFVTKFLYSILAFIDNFQAAKQALAEATVQAAGMAATGVKELAQRSSRMALDINIKAPVVVIPQSPVSENVFVADFGLITMTNTFHMITESQSSPPPVIDLITIKLSEMRLYRSRFINDAYQEVLDLLLPLNLEVVVERNLCWEWYQEVPCFNVNAQLKPMEFILSQEDITTIFKTLHGNIWYEKDGSASPAVTKDQYSATSGVTTNASHHSGGATVVTAAVVEVHSRALLVKTTLNISFKTDDLTMVLYSPGPKQASFTDVRDPSLKLAEFKLENIISTLKMYTDGSTFSSFSLKNCILDDKRPHVKKATPRMIGLTVGFDKKDMMDIKYRKVRDGCVTDAVFQEMYICASVEFLQTVANVFLEAYTTGTAVETSVQTWTAKEEVPTQESVKWEINVIIKNPEIVFVADMTKNDAPALVITTQCEICYKGNLENSTMTAAIKDLQVRACPFLPVKRKGKITTVLQPCDLFYQTTQKGTDPQVIDMSVKSLTLKVSPVIINTMITITSALYTTKETIPEETASSTAHLWEKKDTKTLKMWFLEESNETEKIAPTTELVPKGEMIKMNIDSIFIVLEAGIGHRTVPMLLAKSRFSGEGKNWSSLINLHCQLELEVHYYNEMFGVWEPLLEPLEIDQTEDFRPWNLGIKMKKKAKMAIVESDPEEENYKVPEYKTVISFHSKDQLNITLSKCGLVMLNNLVKAFTEAATGSSADFVKDLAPFMILNSLGLTISVSPSDSFSVLNIPMAKSYVLKNGESLSMDYIRTKDNDHFNAMTSLSSKLFFILLTPVNHSTADKIPLTKVGRRLYTVRHRESGVERSIVCQIDTVEGSKKVTIRSPVQIRNHFSVPLSVYEGDTLLGTASPENEFNIPLGSYRSFIFLKPEDENYQMCEGIDFEEIIKNDGALLKKKCRSKNPSKESFLINIVPEKDNLTSLSVYSEDGWDLPYIMHLWPPILLRNLLPYKIAYYIEGIENSVFTLSEGHSAQICTAQLGKARLHLKLLDYLNHDWKSEYHIKPNQQDISFVSFTCVTEMEKTDLDIAVHMTYNTGQTVVAFHSPYWMVNKTGRMLQYKADGIHRKHPPNYKKPVLFSFQPNHFFNNNKVQLMVTDSELSNQFSIDTVGSHGAVKCKGLKMDYQVGVTIDLSSFNITRIVTFTPFYMIKNKSKYHISVAEEGNDKWLSLDLEQCIPFWPEYASSKLLIQVERSEDPPKRIYFNKQENCILLRLDNELGGIIAEVNLAEHSTVITFLDYHDGAATFLLINHTKNELVQYNQSSLSEIEDSLPPGKAVFYTWADPVGSRRLKWRCRKSHGEVTQKDDMMMPIDLGEKTIYLVSFFEGLQRIILFTEDPRVFKVTYESEKAELAEQEIAVALQDVGISLVNNYTKQEVAYIGITSSDVVWETKPKKKARWKPMSVKHTEKLEREFKEYTESSPSEDKVIQLDTNVPVRLTPTGHNMKILQPHVIALRRNYLPALKVEYNTSAHQSSFRIQIYRIQIQNQIHGAVFPFVFYPVKPPKSVTMDSAPKPFTDVSIVMRSAGHSQISRIKYFKVLIQEMDLRLDLGFIYALTDLMTEAEVTENTEVELFHKDIEAFKEEYKTASLVDQSQVSLYEYFHISPIKLHLSVSLSSGREEAKDSKQNGGLIPVHSLNLLLKSIGATLTDVQDVVFKLAFFELNYQFHTTSDLQSEVIRHYSKQAIKQMYVLILGLDVLGNPFGLIREFSEGVEAFFYEPYQGAIQGPEEFVEGMALGLKALVGGAVGGLAGAASKITGAMAKGVAAMTMDEDYQQKRREAMNKQPAGFREGITRGGKGLVSGFVSGITGIVTKPIKGAQKGGAAGFFKGVGKGLVGAVARPTGGIIDMASSTFQGIKRATETSEVESLRPPRFFNEDGVIRPYRLRDGTGNQMLQVMENGRFAKYKYFTHVMINKTDMLMITRRGVLFVTKGTFGQLTCEWQYSFDEFTKEPFIVHGRRLRIEAKERVKSVFHAREFGKIINFKTPEDARNLAEGQLSTVSS

SEQ ID NO: 9897 - protein, 3170 aa, Artificial Sequence
  Synthetic polypeptide
MVFESVVVDVLNRFLGDYVVDLDTSQLSLGIWKGAVALKNLQIKENALSQLDVPFKVKVGHIGNLKLIIPWKNLYTQPVEAVLEEIYLLIVPSSRIKYDPLKEEKQLMEAKQQELKRIEEAKQKVVDQEQHLPEKQDTFAEKLVTQIIKNLQVKISSIHIRYEDDITNRDKPLSFGISLQNLSMQTTDQYWVPCLHDETEKLVRKLIRLDNLFAYWNVKSQMFYLSDYDNSLDDLKNGIVNENIVPEGYDFVFRPISANAKLVMNRRSDFDFSAPKINLEIELHNIAIEFNKPQYFSIMELLESVDMMAQNLPYRKFKPDVPLHHHAREWWAYAIHGVLEVNVCPRLWMWSWKHIRKHRQKVKQYKELYKKKLTSKKPPGELLVSLEELEKTLDVFNITIARQTAEVEVKKAGYKIYKEGVKDPEDNKGWFSWLWSWSEQNTNEQQPDVQPETLEEMLTPEEKALLYEAIGYSETAVDPTLLKTFEALKFFVHLKSMSIVLRENHQKPELVDIVIEEFSTLIVQRPGAQAIKFETKIDSFHITGLPDNSEKPRLLSSLDDAMSLFQITFEINPLDETVSQRCIIEAEPLEIIYDARTVNSIVEFFRPPKEVHLAQLTAATLTKLEEFRSKTATGLLYIIETQKVLDLKINLKASYIIVPQDGIFSPTSNLLLLDLGHLKVTSKSRSELPDVKQGEANLKEIMDRAYDSFDIQLTSVQLLYSRVGDNWREARKLSVSTQHILVPMHFNLELSKAMVFMDVRMPKFKIYGKLPLISLRISDKKLQGIMELIESIPKPEPVTEVSAPVKSFQIQTSTSLGTSQISQKIIPLLELPSVSEDDSEEEFFDAPCSPLEEPLQFPTGVKSIRTRKLQKQDCSVNMTTFKIRFEVPKVLIEFYHLVGDCELSVVEILVLGLGAEIEIRTYDLKANAFLKEFCLKCPEYLDENKKPVYLVTTLDNTMEDLLTLEYVKAEKNVPDLKSTYNNVLQLIKVNFSSLDIHLHTEALLNTINYLHNILPQSEEKSAPVSTTETEDKGDVIKKLALKLSTNEDIITLQILAELSCLQIFIQDQKCNISEIKIEGLDSEMIMRPSETEINAKLRNIIVLDSDITAIYKKAVYITGKEVFSFKMVSYMDATAGSAYTDMNVVDIQVNLIVGCIEVVFVTKFLYSILAFIDNFQAAKQALAEATVQAAGMAATGVKELAQRSSRMALDINIKAPVVVIPQSPVSENVFVADFGLITMTNTFHMITESQSSPPPVIDLITIKLSEMRLYRSRFINDAYQEVLDLLLPLNLEVVVERNLCWEWYQEVPCFNVNAQLKPMEFILSQEDITTIFKTLHGNIWYEKDGSASPAVTKDQYSATSGVTTNASHHSGGATVVTAAVVEVHSRALLVKTTLNISFKTDDLTMVLYSPGPKQASFTDVRDPSLKLAEFKLENIISTLKMYTDGSTFSSFSLKNCILDDKRPHVKKATPRMIGLTVGFDKKDMMDIKYRKVRDGCVTDAVFQEMYICASVEFLQTVANVFLEAYTTGTAVETSVQTWTAKEEVPTQESVKWEINVIIKNPEIVFVADMTKNDAPALVITTQCEICYKGNLENSTMTAAIKDLQVRACPFLPVKRKGKITTVLQPCDLFYQTTQKGTDPQVIDMSVKSLTLKVSPVIINTMITITSALYTTKETIPEETASSTAHLWEKKDTKTLKMWFLEESNETEKIAPTTELVPKGEMIKMNIDSIFIVLEAGIGHRTVPMLLAKSRFSGEGKNWSSLINLHCQLELEVHYYNEMFGVWEPLLEPLEIDQTEDFRPWNLGIKMKKKAKMAIVESDPEEENYKVPEYKTVISFHSKDQLNITLSKCGLVMLNNLVKAFTEAATGSSADFVKDLAPFMILNSLGLTISVSPSDSFSVLNIPMAKSYVLKNGESLSMDYIRTKDNDHFNAMTSLSSKLFFILLTPVNHSTADKIPLTKVGRRLYTVRHRESGVERSIVCQIDTVEGSKKVTIRSPVQIRNHFSVPLSVYEGDTLLGTASPENEFNIPLGSYRSFIFLKPEDENYQMCEGIDFEEIIKNDGALLKKKCRSKNPSKESFLINIVPEKDNLTSLSVYSEDGWDLPYIMHLWPPILLRNLLPYKIAYYIEGIENSVFTLSEGHSAQICTAQLGKARLHLKLLDYLNHDWKSEYHIKPNQQDISFVSFTCVTEMEKTDLDIAVHMTYNTGQTVVAFHSPYWMVNKTGRMLQYKADGIHRKHPPNYKKPVLFSFQPNHFFNNNKVQLMVTDSELSNQFSIDTVGSHGAVKCKGLKMDYQVGVTIDLSSFNITRIVTFTPFYMIKNKSKYHISVAEEGNDKWLSLDLEQCIPFWPEYASSKLLIQVERSEDPPKRIYFNKQENCILLRLDNELGGIIAEVNLAEHSTVITFLDYHDGAATFLLINHTKNELVQYNQSSLSEIEDSLPPGKAVFYTWADPVGSRRLKWRCRKSHGEVTQKDDMMMPIDLGEKTIYLVSFFEGLQRIILFTEDPRVFKVTYESEKAELAEQEIAVALQDVGISLVNNYTKQEVAYIGITSSDVVWETKPKKKARWKPMSVKHTEKLEREFKEYTESSPSEDKVIQLDTNVPVRLTPTGHNMKILQPHVIALRRNYLPALKVEYNTSAHQSSFRIQIYRIQIQNQIHGAVFPFVFYPVKPPKSVTMDSAPKPFTDVSIVMRSAGHSQISRIKYFKVLIQEMDLRLDLGFIYALTDLMTEAEVTENTEVELFHKDIEAFKEEYKTASLVDQSQVSLYEYFHISPIKLHLSVSLSSGREEAKDSKQNGGLIPVHSLNLLLKSIGATLTDVQDVVFKLAFFELNYQFHTTSDLQSEVIRHYSKQAIKQMYVLILGLDVLGNPFGLIREFSEGVEAFFYEPYQGAIQGPEEFVEGMALGLKALVGGAVGGLAGAASKITGAMAKGVAAMTMDEDYQQKRREAMNKQPAGFREGITRGGKGLVSGFVSGITGIVTKPIKGAQKGGAAGFFKGVGKGLVGAVARPTGGIIDMASSTFQGIKRATETSEVESLRPPRFFNEDGVIRPYRLRDGTGNQMLQVMENGRFAKYKYFTHVMINKTDMLMITRRGVLFVTKGTFGQLTCEWQYSFDEFTKEPFIVHGRRLRIEAKERVKSVFHAREFGKIINFKTPEDARNLAEGQLSTVSS

SEQ ID NO: 9898 - protein, 106 aa, Artificial Sequence
  Synthetic polypeptide
MENGRFAKYKYFTHVMINKTDMLMITRRGVLFVTKGTFGQLTCEWQYSFDEFTKEPFIVHGRRLRIEAKERVKSVFHAREFGKIINFKTPEDARNLAEGQLSTVSS

SEQ ID NO: 9899 - protein, 9 aa, Artificial Sequence
  Synthetic polypeptide
DCALKQRNE

SEQ ID NO: 9900 - protein, 130 aa, Artificial Sequence
  Synthetic polypeptide
MAGCCCLSAEEKESQRISAEIERQLRRDKKDARRELKLLLLGTGESGKSTFIKQMRIIHGSGYSDEDRKGFTKLVYQNIFTAMQAMIRAMDTLRIQYVCEQNKVILHWAPDQIKDIPGTTGKLWMRPEDE

SEQ ID NO: 9901 - protein, 119 aa, Artificial Sequence
  Synthetic polypeptide
MAGCCCLSAEEKESQRISAEIERQLRRDKKDARRELKLLLLGTGESGKSTFIKQMRIIHGSGYSDEDRKGFTKLVYQNIFTAMQAMIRAMDTLRIQYVCEQNKTKSSLMGNHVGFTSAS

SEQ ID NO: 9902 - protein, 204 aa, Artificial Sequence
  Synthetic polypeptide
MIRDLSKMYPQTRHPAPHQPAQPFKFTISESCDRIKEEFQFLQAQYHSLKLECEKLASEKTEMQRHYVMYYEMSYGLNIEMHKQAEIVKRLNAICAQVIPFLSQEHQQQVVQAVERAKQVTMAELNAIIGQQLQAQHLSHGHGLPVPLTPHPSGLQPPAIPPIGSSAGLLALSSALGGQSHLPIKDEKKHHDNDHQRDRDSIKK

SEQ ID NO: 9903 - protein, 179 aa, Artificial Sequence
  Synthetic polypeptide
MIRDLSKMYPQTRHPAPHQPAQPFKFTISESCDRIKEEFQFLQAQYHSLKLECEKLASEKTEMQRHYVMYYEMSYGLNIEMHKQAEIVKRLNAICAQVIPFLSQEQQLQAQHLSHGHGLPVPLTPHPSGLQPPAIPPIGSSAGLLALSSALGGQSHLPIKDEKKHHDNDHQRDRDSIKK

SEQ ID NO: 9904 - protein, 189 aa, Artificial Sequence
  Synthetic polypeptide
APHQPAQPFKFTISESCDRIKEEFQFLQAQYHSLKLECEKLASEKTEMQRHYVMYYEMSYGLNIEMHKQAEIVKRLNAICAQVIPFLSQEHQQQVVQAVERAKQVTMAELNAIIGQQLQAQHLSHGHGLPVPLTPHPSGLQPPAIPPIGSSAGLLALSSALGGQSHLPIKDEKKHHDNDHQRDRDSIKK

SEQ ID NO: 9905 - protein, 74 aa, Artificial Sequence
  Synthetic polypeptide
QQLQAQHLSHGHGLPVPLTPHPSGLQPPAIPPIGSSAGLLALSSALGGQSHLPIKDEKKHHDNDHQRDRDSIKK

SEQ ID NO: 9906 - protein, 35 aa, Artificial Sequence
  Synthetic polypeptide
MAAPGALLVMGVSGSGNFSGTFYSRQVMIASCARE

SEQ ID NO: 9907 - protein, 334 aa, Artificial Sequence
  Synthetic polypeptide
MSKLKVIPEKSLTNNSRIVGLLAQLEKINAEPSESDTARYVTSKILHLAQSQEKTRREMTAKGSTGMEILLSTLENTKDLQTTLNILSILVELVSAGGGRRVSFLVTKGGSQILLQLLMNASKESPPHEDLMVQIHSILAKIGPKDKKFGVKARINGALNITLNLVKQNLQNHRLVLPCLQLLRVYSANSVNSVSLGKNGVVELMFKIIGPFSKKNSSLIKVALDTLAALLKSKTNARRAVDRGYVQVLLTIYVDWHRHDNRHRNMLIRKGILQSLKSVTNIKLGRKAFIDANGMKILYNTSQLPVIPVTGPVAQLYSLPPEEQEKKKKKKRKV

SEQ ID NO: 9908 - protein, 374 aa, Artificial Sequence
  Synthetic polypeptide
MSKLKVIPEKSLTNNSRIVGLLAQLEKINAEPSESDTARYVTSKILHLAQSQEKTRREMTAKGSTGMEILLSTLENTKDLQTTLNILSILVELVSAGGGRRVSFLVTKGGSQILLQLLMNASKESPPHEDLMVQIHSILAKIGPKDKKFGVKARINGALNITLNLVKQNLQNHRLVLPCLQLLRVYSANSVNSVSLGKNGVVELMFKIIGPFSKKNSSLIKVALDTLAALLKSKTNARRAVDRGYVQVLLTIYVDWHRHDNRHRNMLIRKGILQSLKSVTNIKLGRKAFIDANGMKILYNTSQECLAVRTLDPLVNTSSLIMRKCFPKNRLPLPTIKSSFHFQLPVIPVTGPVAQLYSLPPEEQEKKKKKKRKV

SEQ ID NO: 9909 - protein, 386 aa, Artificial Sequence
  Synthetic polypeptide
MRTGSAASSAAAAAAAAAASASPATGVCMKTPGGGRRGIRRDPGAEPGAAALRGPRQRPILSRLTNNSRIVGLLAQLEKINAEPSESDTARYVTSKILHLAQSQEKTRREMTAKGSTGMEILLSTLENTKDLQTTLNILSILVELVSAGGGRRVSFLVTKGGSQILLQLLMNASKESPPHEDLMVQIHSILAKIGPKDKKFGVKARINGALNITLNLVKQNLQNHRLVLPCLQLLRVYSANSVNSVSLGKNGVVELMFKIIGPFSKKNSSLIKVALDTLAALLKSKTNARRAVDRGYVQVLLTIYVDWHRHDNRHRNMLIRKGILQSLKSVTNIKLGRKAFIDANGMKILYNTSQLPVIPVTGPVAQLYSLPPEEQEKKKKKKRKV

SEQ ID NO: 9910 - protein, 212 aa, Artificial Sequence
  Synthetic polypeptide
MNASKESPPHEDLMVQIHSILAKIGPKAVNSVSLGKNGVVELMFKIIGPFSKKNSSLIKVALDTLAALLKSKTNARRAVDRGYVQVLLTIYVDWHRHDNRHRNMLIRKGILQSLKSVTNIKLGRKAFIDANGMKILYNTSQECLAVRTLDPLVNTSSLIMRKCFPKNRLPLPTIKSSFHFQLPVIPVTGPVAQLYSLPPEEQEKKKKKKRKV

SEQ ID NO: 9911 - protein, 292 aa, Artificial Sequence
  Synthetic polypeptide
MTVFRQENVDDYYDTGEELGSGQFAVVKKCREKSTGLQYAAKFIKKRRTKSSRRGVSREDIEREVSILKEIQHPNVITLHEVYENKTDVILILELVAGGELFDFLAEKESLTEEEATEFLKQILNGVYYLHSLQIAHFDLKPENIMLLDRNVPKPRIKIIDFGLAHKIDFGNEFKNIFGTPEFVAPEIVNYEPLGLEADMWSIGVITYILLSGASPFLGDTKQETLANVSAVNYEFEDEYFSNTSALAKDFIRRLLVKDPKKRMTIQDSLQHPWIKHVNINQIWISSFSWEI

SEQ ID NO: 9912 - protein, 298 aa, Artificial Sequence
  Synthetic polypeptide
MDQYCILGRIGEGAHGIVFKAKHVEPRVGWQCLPSILQTGEIVALKKVALRRLEDGFPNQALREIKALQEMEDNQYVVQLKAVFPHGGGFVLAFEFMLSDLAEVVRHAQRPLAQAQVKSYLQMLLKGVAFCHANNIVHRDLKPANLLISASGQLKIADFGLARVFSPDGSRLYTHQVATRSVGCIMGELLNGSPLFPGKNDIEQLCYVLRILGTPNPQVWPELTELPDYNKISFKEQVPMPLEEVLPDVSPQALDLLGQFLLYPPHQRIAASKMSYAWVPSPHDAACCCALCSLLSSP

SEQ ID NO: 9913 - protein, 285 aa, Artificial Sequence
  Synthetic polypeptide
MDQYCILGRIGEGAHGIVFKAKHVETGEIVALKKVALRRLEDGFPNQALREIKALQEMEDNQYVVQLKAVFPHGGGFVLAFEFMLSDLAEVVRHAQRPLAQAQVKSYLQMLLKGVAFCHANNIVHRDLKPANLLISASGQLKIADFGLARVFSPDGSRLYTHQVATRSVGCIMGELLNGSPLFPGKNDIEQLCYVLRILGTPNPQVWPELTELPDYNKISFKEQVPMPLEEVLPDVSPQALDLLGQFLLYPPHQRIAASKMSYAWVPSPHDAACCCALCSLLSSP

SEQ ID NO: 9914 - protein, 244 aa, Artificial Sequence
  Synthetic polypeptide
MDQYCILGRIGEGAHGIVFKAKHVETGEIVALKKVALRRLEDGFPNQALREIKALQEMEDNQYVVQLKAVFPHGGGFVLAFEFMLSDLAEVVRHAQRPLAQAQVKSYLQMLLKGVAFCHANNIVHRDLKPANLLISASGQLKIADFGLARVFSPDGSRLYTHQVATRSSLSCRTTTRSPLRSRCPCPWRRCCLTSLPRHWICWVNSFSTLLTSASQLPRCRMLGCHHLMTLPAVVPCAHSSPAP

SEQ ID NO: 9915 - protein, 306 aa, Artificial Sequence
  Synthetic polypeptide
MDQYCILGRIGEGAHGIVFKAKHVETGEIVALKKVALRRLEDGFPNQALREIKALQEMEDNQYVVQLKAVFPHGGGFVLAFEFMLSDLAEVVRHAQRPLAQAQVKSYLQMLLKGVAFCHANNIVHRDLKPANLLISASGQLKIADFGLARVFSPDGSRLYTHQVATRWYRAPELLYGARQYDQGVDLWSVGCIMGELLNGSPLFPGKNDIEQLCYVLRILGTPNPQVWPELTELPDYNKISFKEQVPMPLEEVLPDVSPQALDLLGQFLLYPPHQRIAASKMSYAWVPSPHDAACCCALCSLLSSP

SEQ ID NO: 9916 - protein, 520 aa, Artificial Sequence
  Synthetic polypeptide
MASSGMADSANHLPFFFGNITREEAEDYLVQGGMSDGLYLLRQSRNYLGGFALSVAHGRKAHHYTIERELNGTYAIAGGRTHASPADLCHYHSQESDGLVCLLKKPFNRPQGVQPKTGPFEDLKENLIREYVKQTWNLQGQALEQAIISQKPQLEKLIATTAHEKMPWFHGKISREESEQIVLIGSKTNGKFLIRARDNNGSYALCLLHEGKVLHYRIDKDKTGKLSIPEGKKFDTLWQLVEHYSYKADGLLRVLTVPCQKIGTQGNVNFGGRPQLPGSHPASSPAQGNRQESTVSFNPYEPELAPWAADKGPQREALPMDTEVYESPYADPEEIRPKEVYLDRKLLTLEDKELGSGNFGTVKKGYYQMKKVVKTVAVKILKNEANDPALKDELLAEANVMQQLDNPYIVRMIGICEAESWMLVMEMAELGPLNKYLQQNRHVKDKNIIELVHQVSMGMKYLEESNFVHRDLAARNVLLVTQHYAKISDFGLSKALRADENYYKQTPYRPGEKGMTFSKC

SEQ ID NO: 9917 - protein, 543 aa, Artificial Sequence
  Synthetic polypeptide
MASSGMADSANHLPFFFGNITREEAEDYLVQGGMSDGLYLLRQSRNYLGGFALSVAHGRKAHHYTIERELNGTYAIAGGRTHASPADLCHYHSQESDGLVCLLKKPFNRPQGVQPKTGPFEDLKENLIREYVKQTWNLQGQALEQAIISQKPQLEKLIATTAHEKMPWFHGKISREESEQIVLIGSKTNGKFLIRARDNNGSYALCLLHEGKVLHYRIDKDKTGKLSIPEGKKFDTLWQLVEHYSYKADGLLRVLTVPCQKIGTQGNVNFGGRPQLPGSHPATWSAGGIISRIKSYSFPKPGHRKSSPAQGNRQESTVSFNPYEPELAPWAADKGPQREALPMDTEVYESPYADPEEIRPKEVYLDRKLLTLEDKELGSGNFGTVKKGYYQMKKVVKTVAVKILKNEANDPALKDELLAEANVMQQLDNPYIVRMIGICEAESWMLVMEMAELGPLNKYLQQNRHVKDKNIIELVHQVSMGMKYLEESNFVHRDLAARNVLLVTQHYAKISDFGLSKALRADENYYKQTPYRPGEKGMTFSKC

SEQ ID NO: 9918 - protein, 519 aa, Artificial Sequence
  Synthetic polypeptide
MASSGMADSANHLPFFFGNITREEAEDYLVQGGMSDGLYLLRQSRNYLGGFALSVAHGRKAHHYTIERELNGTYAIAGGRTHASPADLCHYHSQESDGLVCLLKKPFNRPQGVQPKTGPFEDLKENLIREYVKQTWNLQGQALEQAIISQKPQLEKLIATTAHEKMPWFHGKISREESEQIVLIGSKTNGKFLIRARDNNGSYALCLLHEGKVLHYRIDKDKTGKLSIPEGKKFDTLWQLVEHYSYKADGLLRVLTVPCQKIGTQGNVNFGGRPQLPGSHPASSPAQGNRQESTVSFNPYEPELAPWAADKGPQREALPMDTEVYESPYADPEEIRPKEVYLDRKLLTLEDKELGSGNFGTVKKGYYQMKKVVKTVAVKILKNEANDPALKDELLAEANVMQQLDNPYIVRMIGICEAESWMLVMEMAELGPLNKYLQQNRHVKDKNIIELVHQVSMGMKYLEESNFVHRDLAARNVLLVTQHYAKISDFGLSKALRADENYYKTPYRPGEKGMTFSKC

SEQ ID NO: 9919 - protein, 542 aa, Artificial Sequence
  Synthetic polypeptide
MASSGMADSANHLPFFFGNITREEAEDYLVQGGMSDGLYLLRQSRNYLGGFALSVAHGRKAHHYTIERELNGTYAIAGGRTHASPADLCHYHSQESDGLVCLLKKPFNRPQGVQPKTGPFEDLKENLIREYVKQTWNLQGQALEQAIISQKPQLEKLIATTAHEKMPWFHGKISREESEQIVLIGSKTNGKFLIRARDNNGSYALCLLHEGKVLHYRIDKDKTGKLSIPEGKKFDTLWQLVEHYSYKADGLLRVLTVPCQKIGTQGNVNFGGRPQLPGSHPATWSAGGIISRIKSYSFPKPGHRKSSPAQGNRQESTVSFNPYEPELAPWAADKGPQREALPMDTEVYESPYADPEEIRPKEVYLDRKLLTLEDKELGSGNFGTVKKGYYQMKKVVKTVAVKILKNEANDPALKDELLAEANVMQQLDNPYIVRMIGICEAESWMLVMEMAELGPLNKYLQQNRHVKDKNIIELVHQVSMGMKYLEESNFVHRDLAARNVLLVTQHYAKISDFGLSKALRADENYYKTPYRPGEKGMTFSKC

SEQ ID NO: 9920 - protein, 215 aa, Artificial Sequence
  Synthetic polypeptide
MAAAVAAAPGALGSLHAGGARLVAACSAWLCPGLRLPGSLAGRRAGPAIWAQGWVPAAGGPAPKRGYSSEMKTEDELRVRHLEEENRGIVVLGINRAYGKNSLSKNLIKMLSKAVDALKSDKKVRTIIIRSEVPGIFCAANLPVPTIAAIDGLALGGGLELALACDIRVAASSAKMGLVETKLAIIPGGVLGGLREDHKRFQRGRKTSCLCVKKY

SEQ ID NO: 9921 - protein, 244 aa, Artificial Sequence
  Synthetic polypeptide
MAAAVAAAPGALGSLHAGGARLVAACSAWLCPGLRLPGSLAGRRAGPAIWAQGWVPAAGGPAPKRGYSSEMKTEDELRVRHLEEENRGIVVLGINRAYGKNSLSKNLIKMLSKAVDALKSDKKVRTIIIRSEVPGIFCAGADLKERAKMSSSEVGPFVSKIRAVINDIANLPVPTIAAIDGLALGGGLELALACDIRVAASSAKMGLVETKLAIIPGGVLGGLREDHKRFQRGRKTSCLCVKKY

SEQ ID NO: 9922 - protein, 158 aa, Artificial Sequence
  Synthetic polypeptide
MAAAVAAAPGALGSLHAGGARLVAACSAWLCPGLRLPGSLAGRRAGPAIWAQGWVPAAGGPAPKRGYSSEMKTEDELRVRHLEEENRGIVVLGINRAYGKNSLSKNLIKMLSKAVDALKSDKKVRTIIIRSEVPGIFCAAAQVILKKLMDHITLLFQT

SEQ ID NO: 9923 - protein, 444 aa, Artificial Sequence
  Synthetic polypeptide
MATATEQWVLVEMVQALYEAPAYHLILEGILILWIIRLLFSKTYKLQERSDLTVKEKEELIEEWQPEPLVPPVPKDHPALNYNIVSGPPSHKTVVNGKECINFASFNFLGLLDNPRVKAAALASLKKYGVGTCGPRGFYGTFDVHLDLEDRLAKFMKTEEAIIYSYGFATIASAIPAYSKRGDIVFVDRAACFAIQKGLQASRSDIKLFKHNDMADLERLLKEQEIEDQKNPRKARVTRRFIVVEGLYMNTGTICPLPELVKLKYKYKARIFLEESLSFGVLGEHGRGVTEHYGINIDDIDLISANMENALASIGGFCCGRSFVIDHQRLSGQGYCFSASLPPLLAAAAIEALNIMEENPGIFAVLKEKCGQIHKALQGISGLKVVGESLSPAFHLQLEESTGSREQDVRLLQEIVDQCMNRSIALTQARYLEKEEKCLPPPRS

SEQ ID NO: 9924 - protein, 281 aa, Artificial Sequence
  Synthetic polypeptide
MATATEQWVLVEMVQALYEAPAYHLILEGILILWIIRLLFSKTYKLQERSDLTVKEKEELIEEWQPEPLVPPVPKDHPALNYNIVSGPPSHKTVVNGKECINFASFNFLGLLDNPRVKAAALASLKKYGVGTCGPRGFYGTFDVHLDLEDRLAKFMKTEEAIIYSYGFATIASAIPAYSKRGDIVFVDRAACFAIQKGLQASRSDIKLFKHNDMADLERLLKEQEIEDQKNPRKARVTRRFIVVEGLYMNTGTICPLPELGHHSTRSNRRHFSMTLGGDSK

SEQ ID NO: 9925 - protein, 1137 aa, Artificial Sequence
  Synthetic polypeptide
MLQQVPENINFPAEEEKILEFWTEFNCFQECLKQSKHKPKFTFYDGPPFATGLPHYGHILAGTIKDIVTRYAHQSGFHVDRRFGWDCHGLPVEYEIDKTLGIRGPEDVAKMGITEYNNQCRAIVMRYSAEWKSTVSRLGRWIDFDNDYKTLYPQFMESVWWVFKQLYDKGLVYRGVKVMPFSTACNTPLSNFESHQNYKDVQDPSVFVTFPLEEDETVSLVAWTTTPWTLPSNLAVCVNPEMQYVKIKDVARGRLLILMEARLSALYKLESDYEILERFPGAYLKGKKYRPLFDYFLKCKENGAFTVLVDNYVKEEEGTGVVHQAPYFGAEDYRVCMDFNIIRKDSLPVCPVDASGCFTTEVTDFAGQYVKDADKSIIRTLKEQGRLLVATTFTHSYPFCWRSDTPLIYKAVPSWFVRVENMVDQLLRNNDLCYWVPELVREKRFGNWLKDARDWTISRNRYWGTPIPLWVSDDFEEVVCIGSVAELEELSGAKISDLHRESVDHLTIPSRCGKGSLHRISEVFDCWFESGSMPYAQVHYPFENKREFEDAFPADFIAEGIDQTRGWFYTLLVLATALFGQPPFKNVIVNGLVLASDGQKMSKRKKNYPDPVSIIQKYGADALRLYLINSPVVRAENLRFKEEGVRDVLKDVLLPWYNAYRFLIQNVLRLQKEEEIEFLYNENTVRESPNITDRWILSFMQSLIGFFETEMAAYRLYTVVPRLVKFVDILTNWYVRMNRRRLKGENGMEDCVMALETLFSVLLSLCRLMAPYTPFLTELMYQNLKVLIDPVSVQDKDTLSIHYLMLPRVREELIDKKTESAVSQMQSVIELGRVIRDRKTIPIKYPLKEIVVIHQDPEALKDIKSLEKYIIEELNVRKVTLSTDKNKYGIRLRAEPDHMVLGKRLKGAFKAVMTSIKQLSSEELEQFQKTGTIVVEGHELHDEDIRLMYTFDQATGGTAQFEAHSDAQALVLLDVTPDQSMVDEGMAREVINRIQKLRKKCNLVPTDEITVYYKAKSEGTYLNSVIESHTEFIFTTIKAPLKPYPVSPSDKVLIQEKTQLKGSELEITLTRGSSLPGPACAYVNLNICANGSEQGGVLLLENPKGDNRLDLLKLKSVVTSIFGVKNTELAVFHDETE

SEQ ID NO: 9926 - protein, 1027 aa, Artificial Sequence
  Synthetic polypeptide
MGITEYNNQCRAIVMRYSAEWKSTVSRLGRWIDFDNDYKTLYPQFMESVWWVFKQLYDKGLVYRGVKVMPFSTACNTPLSNFESHQNYKDVQDPSVFVTFPLEEDETVSLVAWTTTPWTLPSNLAVCVNPEMQYVKIKDVARGRLLILMEARLSALYKLESDYEILERFPGAYLKGKKYRPLFDYFLKCKENGAFTVLVDNYVKEEEGTGVVHQAPYFGAEDYRVCMDFNIIRKDSLPVCPVDASGCFTTEVTDFAGQYVKDADKSIIRTLKEQGRLLVATTFTHSYPFCWRSDTPLIYKAVPSWFVRVENMVDQLLRNNDLCYWVPELVREKRFGNWLKDARDWTISRNRYWGTPIPLWVSDDFEEVVCIGSVAELEELSGAKISDLHRESVDHLTIPSRCGKGSLHRISEVFDCWFESGSMPYAQVHYPFENKREFEDAFPADFIAEGIDQTRGWFYTLLVLATALFGQPPFKNVIVNGLVLASDGQKMSKRKKNYPDPVSIIQKYGADALRLYLINSPVVRAENLRFKEEGVRDVLKDVLLPWYNAYRFLIQNVLRLQKEEEIEFLYNENTVRESPNITDRWILSFMQSLIGFFETEMAAYRLYTVVPRLVKFVDILTNWYVRMNRRRLKGENGMEDCVMALETLFSVLLSLCRLMAPYTPFLTELMYQNLKVLIDPVSVQDKDTLSIHYLMLPRVREELIDKKTESAVSQMQSVIELGRVIRDRKTIPIKYPLKEIVVIHQDPEALKDIKSLEKYIIEELNVRKVTLSTDKNKYGIRLRAEPDHMVLGKRLKGAFKAVMTSIKQLSSEELEQFQKTGTIVVEGHELHDEDIRLMYTFDQATGGTAQFEAHSDAQALVLLDVTPDQSMVDEGMAREVINRIQKLRKKCNLVPTDEITVYYKAKSEGTYLNSVIESHTEFIFTTIKAPLKPYPVSPSDKVLIQEKTQLKGSELEITLTRGSSLPGPACAYVNLNICANGSEQGGVLLLENPKGDNRLDLLKLKSVVTSIFGVKNTELAVFHDETE

SEQ ID NO: 9927 - protein, 196 aa, Artificial Sequence [sequence omitted]

SEQ ID NO: 9928 - protein, 508 aa, Artificial Sequence
  Synthetic polypeptide
MKIAVLFCFFLLIIFQTDFGKNEEIPRKQRRKIYHRRLRKSSTSHKHRSNRQLGIQQTTVFTPVARLPIVNFDYSMEEKFESFSSFPGVESSYNVLPGKKGHCLVKGITMYNKAVWSPEPCTTCLCSDGRVLCDETMCHPQRCPQTVIPEGECCPVCSATEQREPTNLLHKQLPPPQVGMDRIVRKEALQSEEDEEVKEEDTEQKRETPESRNQGQLYSEGDSRGGDRKQRPGEERRLAHQQQRQGREEEEDEEEEGEEGEEDEEDEEDPVRGDMFRMPSRSPLPAPPRGTLRLPSGCSLSYRTISCINAMLTQIPPLTAPQITSLELTGNSIASIPDEAFNGLPNLERLDLSKNNITSSGIGPKAFKLLKKLMRLNMDGNNLIQIPSQLPSTLEELKVNENNLQAIDEESLSDLNQLVTLELEGNNLSEANVNPLAFKPLKSLAYLRLGKNKFRIIPQGLPGSIEHFGRPRRVDHLSLGVRDQPEQHGETLSLQKIQKLARLHGAYL

SEQ ID NO: 9929 - protein, 530 aa, Artificial Sequence
  Synthetic polypeptide
MKIAVLFCFFLLIIFQTDFGKNEEIPRKQRRKIYHRRLRKSSTSHKHRSNRQLGIQQTTVFTPVARLPIVNFDYSMEEKFESFSSFPGVESSYNVLPGKKGHCLVKGITMYNKAVWSPEPCTTCLCSDGRVLCDETMCHPQRCPQTVIPEGECCPVCSATVSYSLLSGIALNDRNEFSGDSSEQREPTNLLHKQLPPPQVGMDRIVRKEALQSEEDEEVKEEDTEQKRETPESRNQGQLYSEGDSRGGDRKQRPGEERRLAHQQQRQGREEEEDEEEEGEEGEEDEEDEEDPVRGDMFRMPSRSPLPAPPRGTLRLPSGCSLSYRTISCINAMLTQIPPLTAPQITSLELTGNSIASIPDEAFNGLPNLERLDLSKNNITSSGIGPKAFKLLKKLMRLNMDGNNLIQIPSQLPSTLEELKVNENNLQAIDEESLSDLNQLVTLELEGNNLSEANVNPLAFKPLKSLAYLRLGKNKFRIIPQGLPGSIEHFGRPRRVDHLSLGVRDQPEQHGETLSLQKIQKLARLHGAYL

SEQ ID NO: 9930 - protein, 59 aa, Artificial Sequence
  Synthetic polypeptide
MLENYFNLISVGCQVPKPEVIFSLEQEEPCMLDGEIPSQSRPAPSGPAWSCPQKASLCE

SEQ ID NO: 9931 - protein, 97 aa, Artificial Sequence
  Synthetic polypeptide
MSVLSLPESVSFKDVTVDFSRDEWQQLDLAQKSLYREVMLENYFNLISVGCQVPKPEVIFSLEQEEPCMLDGEIPSQSRPAPSGPAWSCPQKASLCE

SEQ ID NO: 9932 - protein, 95 aa, Artificial Sequence
  Synthetic polypeptide
MTKSLESVSFKDVTVDFSRDEWQQLDLAQKSLYREVMLENYFNLISVGCQVPKPEVIFSLEQEEPCMLDGEIPSQSRPAPSGPAWSCPQKASLCE

SEQ ID NO: 9933 - protein, 999 aa, Artificial Sequence
  Synthetic polypeptide
MATSEYPYSECQNAAQIYRKVTCGIKPASFEKVHDPEIKEIIGECICKNKEERYEIKDLLSHAFFAEDTGVRVELAEEDHGRKSTIALRLWVEDPKKLKGKPKDNGAIEFTFDLEKETPDEVAQEMIESGFFHESDVKIVAKSIRDRVALIQWRRERIWPALQPKEQQDVGSPDKARGPPVPLQVQVTYHAQAGQPGPPEPEEPEADQHLLPPTLPTSATSLASDSTFDSGQGSTVYSDSQSSQQSVMLGSLADAAPSPAQCVCSPPVSEGPVLPQSLPSLGAYQQPTAAPGLPVGSVPAPACPPSLQQHFPDPAMSFAPVLPPPSTPMPTGPGQPAPPGQQPPPLAQPTPLPQVLAPQPVVPLQPVPPHLPPYLAPASQVGAPAQLKPLQMPQAPLQPLAQVPPQMPPIPVVPPITPLAGIDGLPPALPDLPTATVPPVPPPQYFSPAVILPSLAAPLPPASPALPLQAVKLPHPPGAPLAMPCRTIVPNAPATIPLLAVAPPGVAALSIHSAVAQLPGQPVYPAAFPQMAPTDVPPSPHHTVQNMRATPPQPALPPQPTLPPQPVLPPQPTLPPQPVLPPQPTRPPQPVLPPQPMLPPQPVLPPQPALPVRPEPLQPHLPEQAAPAATPGSQILLGHPAPYAVDVAAQVPTVPVPPAAVLSPPLPEVLLPAAPELLPQFPSSLATVSASVQSVPTQTATLLPPANPPLPGGPGIASPCPTVQLTVEPVQEEQASQDKPPGLPQSCESYGGSDVTSGKELSDSCEGAFGGGRLEGRAARKHHRRSTRARSRQERASRPRLTILNVCNTGDKMVECQLETHNHKMVTFKFDLDGDAPDEIATYMVEHDFILQAERETFIEQMKDVMDKAEDMLSEDTDADRGSDPGTSPPHLSTCGLGTGEESRQSQANAPVYQQNVLHTGKRWFIICPVAEHPAPEAPESSPPLPLSSLPPEASQGLNLTEYVQDLYSENSRTMLMEIKEDPNKRPVHGSEDTVLLQC

SEQ ID NO: 9934 - protein, 1387 aa, Artificial Sequence
  Synthetic polypeptide
MDGDGGRRDVPGTLMEPGRGAGPAGMAEPRAKAARPGPQRFLRRSVVESDQEEPPGLEAAEAPGPQPPQPLQRRVLLLCKTRRLIAERARGRPAAPAPAALVAQPGAPGAPADAGPEPVGTQEPGPDPIAAAVETAPAPDGGPREEAAATVRKEDEGAAEAKPEPGRTRRDEPEEEEDDEDDLKAVATSLDGRFLKFDIELGRGSFKTVYKGLDTETWVEVAWCELQDRKLTKLERQRFKEEAEMLKGLQHPNIVRFYDFWESSAKGKRCIVLVTELMTSGTLKTYLKRFKVMKPKVLRSWCRQILKGLLFLHTRTPPIIHRDLKCDNIFITGPTGSVKIGDLGLATLKRASFAKSVIGTPEFMAPEMYEEHYDESVDVYAFGMCMLEMATSEYPYSECQNAAQIYRKVTCGIKPASFEKVHDPEIKEIIGECICKNKEERYEIKDLLSHAFFAEDTGVRVELAEEDHGRKSTIALRLWVEDPKKLKGKPKDNGAIEFTFDLEKETPDEVAQEMIESGFFHESDVKIVAKSIRDRVALIQWRRERIWPALQPKEQQDVGSPDKARGPPVPLQVQVTYHAQAGQPGPPEPEEPEADQHLLPPTLPTSATSLASDSTFDSGQGSTVYSDSQSSQQSVMLGSLADAAPSPAQCVCSPPVSEGPVLPQSLPSLGAYQQPTAAPGLPVGSVPAPACPPSLQQHFPDPAMSFAPVLPPPSTPMPTGPGQPAPPGQQPPPLAQPTPLPQVLAPQPVVPLQPVPPHLPPYLAPASQVGAPAQLKPLQMPQAPLQPLAQVPPQMPPIPVVPPITPLAGIDGLPPALPDLPTATVPPVPPPQYFSPAVILPSLAAPLPPASPALPLQAVKLPHPPGAPLAMPCRTIVPNAPATIPLLAVAPPGVAALSIHSAVAQLPGQPVYPAAFPQMAPTDVPPSPHHTVQNMRATPPQPALPPQPTLPPQPVLPPQPTLPPQPVLPPQPTRPPQPVLPPQPMLPPQPVLPPQPALPVRPEPLQPHLPEQAAPAATPGSQILLGHPAPYAVDVAAQVPTVPVPPAAVLSPPLPEVLLPAAPELLPQFPSSLATVSASVQSVPTQTATLLPPANPPLPGGPGIASPCPTVQLTVEPVQEEQASQDKPPGLPQSCESYGGSDVTSGKELSDSCEGAFGGGRLEGRAARKHHRRSTRARSRQERASRPRLTILNVCNTGDKMVECQLETHNHKMVTFKFDLDGDAPDEIATYMVEHDFILQAERETFIEQMKDVMDKAEDMLSEDTDADRGSDPGTSPPHLSTCGLGTGEESRQSQANAPVYQQNVLHTGKRWFIICPVAEHPAPEAPESSPPLPLSSLPPEASQGLNLTEYVQDLYSENSRTMLMEIKEDPNKRPVHGSEDTVLLQC

SEQ ID NO: 9935 - protein, 9 aa, Artificial Sequence
  Synthetic polypeptide
AAAETSPAR

SEQ ID NO: 9936 - protein, 21 aa, Artificial Sequence
  Synthetic polypeptide
GVPECGPDLPQGHLWYQAGQL

SEQ ID NO: 9937 - protein, 10 aa, Artificial Sequence
  Synthetic polypeptide
ASWRRTTTRW

SEQ ID NO: 9938 - protein, 129 aa, Artificial Sequence
  Synthetic polypeptide
MSPGLLTTRKEALMAFRDVAVAFTQKEWKLLSSAQRTLYREVMLENYSHLVSLGIAFSKPKLIEQLEQGDEPWREENEHLLDLCPAEPGGACLKYQLLGWLRSENRLNLGGEGCNELRSHHCTPAWATE

SEQ ID NO: 9939 - protein, 76 aa, Artificial Sequence
  Synthetic polypeptide
MSVEPPPELEEKAASEPEAGAMPEKRAGAQAAGSTWLQGFGRPSVYHAAIVIFLEFFAWGLLTTPMLTAGRGGSRL

SEQ ID NO: 9940 - protein, 11 aa, Artificial Sequence
  Synthetic polypeptide
MLTAGRGGSRL

SEQ ID NO: 9941 - protein, 195 aa, Artificial Sequence
  Synthetic polypeptide
MQPGSAPPPGRMDPSAPQPRAETSGKDIWHPGERCLAPSPDNGKLCEASIKSITVDENGKSFAVVLYADFQERKIPLKQLQEVKFVKDCPRNLIFDDEDLEKPYFPNRKFPSSSVAFKLSDNGDSIPYTINRYLRDYQREGTRFLYGHYIHGGGCILGDDMGLGKTVQFLPQERTPRPLKKYQRTETHQIVEFRQ

SEQ ID NO: 9942 - protein, 36 aa, Artificial Sequence
  Synthetic polypeptide
QMRIITLSLLMIIHPQMRVYPSATSVSLNRATDQEL

SEQ ID NO: 9943 - protein, 150 aa, Artificial Sequence
  Synthetic polypeptide
MNKTNQVYAANEDHNSQFIDDYSSSDESLSVSHFSFSKQSHRPRTIRDRTSFSSKLPSHNKKNSTFIPRKPMKCSNEKVVNQEQSYESMDKFLDGVQEVAYIHSNQNVIGSSKAENHMSRWAAHDVFELKQFSQLPANIAVCSSKKFGRS

SEQ ID NO: 9944 - protein, 102 aa, Artificial Sequence
  Synthetic polypeptide
MTAGGQAEAEGAGGEPGAARLPSRVARLLSALFYGTCSFLIVLVNKALLTTYGFPSPIFLGIGQMAATIMILYVSKLNKIIHFPDFDKKIPVKCLEKCQHLA

SEQ ID NO: 9945 - protein, 131 aa, Artificial Sequence
  Synthetic polypeptide
MSVEPPPELEEKAASEPEAGAMPEKRAGAQAAGSTWLQGFGPPSVYHAAIVIFLEFFAWGLLTTPMLTVLHETFSQHTFLMNGLIQGVKGLLSFLSAPLIGALSDVWGRKPFLLGTVFFTCFPIPLMRISP

SEQ ID NO: 9946 - protein, 135 aa, Artificial Sequence
  Synthetic polypeptide
MSVEPPPELEEKAASEPEAGAMPEKRAGAQAAGSTWLQGFGPPSVYHAAIVIFLEFFAWGLLTTPMLTVLHETFSQHTFLMNGLIQGVKGLLSFLSAPLIGALSDVWGRKPFLLGTVFFTCFPIPLMRISPCQMR

SEQ ID NO: 9947 - protein, 79 aa, Artificial Sequence
  Synthetic polypeptide
MSVEPPPELEEKAASEPEAGAMPEKRAGAQAAGSTWLQGFGPPSVYHAAIVIFLEFFAWGLLTTPMLTINLGETPSLLN

SEQ ID NO: 9948 - protein, 746 aa, Artificial Sequence
  Synthetic polypeptide
MSPQKRVKNVQAQNRTSQGSSSFQTTLSAWKVKQDPSNSKNISKHGQNNPVGDYEHADDQAEEDALQMAVGYFEKGPIKASQNKDKTLEKHLKTVENVAWKNGLASEEIDILLNIALSGKFGNAVNTRILKCMIPATVISEDSVVKAVSWLCVGKCSGSTKVLFYRWLVAMFDFIDRKEQINLLYGFFFASLQDDALCPYVCHLLYLLTKKENVKPFRVRKLLDLQAKMGMQPHLQALLSLYKFFAPALISVSLPVRKKIYFKNSENLWKTALLAVKQRNRGPSPEPLKLMLGPANVRPLKRKWNSLSVIPVLNSSSYTKECGKKEMSLSDCLNRSGSFPLEQLQSFPQLLQNIHCLELPSQMGSVLNNSLLLHYINCVRDEPVLLRFYYWLSQTLQEECIWYKVNNYEHGKEFTNFLDTIIRAECFLQEGFYSCEAFLYKSLPLWDGLCCRSQFLQLVSWIPFSSFSEVKPLLFDHLAQLFFTSTIYFKCSVLQSLKELLQNWLLWLSMDIHMKPVTNSPLETTLGGSMNSVSKLIHYVGWLSTTAMRLESNNTFLLHFILDFYEKVCDIYINYNLPLVVLFPPGIFYSALLSLDTSILNQLCFIMHRYRKNLTAAKKNELVQKTKSEFNFSSKTYQEFNHYLTSMVGCLWTSKPFGKGIYIDPEILEKTGVAEYKNSLNVVHHPSFLSYAVSFLLQAGPSGGIPEESIVIIRDDSSMLISAPEDLPVERDVEVEDSDIDDPALV

SEQ ID NO: 9949 - protein, 489 aa, Artificial Sequence
  Synthetic polypeptide
MAAVILESIFLKRSQQKKKTSPLNFKKRLFLLTVHKLSYYEYDFERGRRGSKKGSIDVEKITCVETVVPEKNPPPERQIPRRGEESSEMEQISIIERFPYPFQVVYDEGPLYVFSPTEELRKRWIHQLKNVIRYNSDLVQKYHPCFWIDGQYLCCSQTAKNAMGCQILENRNGSLKPGSSHRKTKKPLPPTPEEDQILKKPLPPEPAAAPVSTSELKKVVALYDYMPMNANDLQLRKGDEYFILEESNLPWWRARDKNGQEGYIPSNYVTEAEDSIEMYEWYSKHMTRSQAEQLLKQEGKEGGFIVRDSSKAGKYTVSVFAKSTGDPQGVIRHYVVCSTPQSQYYLAARNCLVNDQGVVKVSDFGLSRYVLDDEYTSSVGSKFPVRWSPPEVLMYSKFSSKSDIWAFGVLMWEIYSLGKMPYERFTNSETAEHIAQGLRLYRPHLASEKVYTIMYSCWHELLRRLRQENDLNPGGGGCSEPRSCHCTLA

SEQ ID NO: 9950 - protein, 665 aa, Artificial Sequence
  Synthetic polypeptide
MAAVILESIFLKRSQQKKKTSPLNFKKRLFLLTVHKLSYYEYDFERGRRGSKKGSIDVEKITCVETVVPEKNPPPERQIPRRGEESSEMEQISIIERFPYPFQVVYDEGPLYVFSPTEELRKRWIHQLKNVIRYNSDLVQKYHPCFWIDGQYLCCSQTAKNAMGCQILENRNGSLKPGSSHRKTKKPLPPTPEEDQILKKPLPPEPAAAPVSTSELKKVVALYDYMPMNANDLQLRKGDEYFILEESNLPWWRARDKNGQEGYIPSNYVTEAEDSIEMYEWYSKHMTRSQAEQLLKQEGKEGGFIVRDSSKAGKYTVSVFAKSTGDPQGVIRHYVVCSTPQSQYYLAEKHLFSTIPELINYHQHNSAGLISRLKYPVSQQNKNAPSTAGLGYGSWEIDPKDLTFLKELGTGQFGVVKYGKWRGQYDVAIKMIKEGSMSEDEFIEEAKVMMNLSHEKLVQLYGVCTKQRPIFIITEYMANGCLLNYLREMRHRFQTQQLLEMCKDVCEAMEYLESKQFLHRDLAARNCLVNDQGVVKVSDFGLSRYVLDDEYTSSVGSKFPVRWSPPEVLMYSKFSSKSDIWAFGVLMWEIYSLGKMPYERFTNSETAEHIAQGLRLYRPHLASEKVYTIMYSCWHELLRRLRQENDLNPGGGGCSEPRSCHCTLA

SEQ ID NO: 9951 - protein, 531 aa, Artificial Sequence
  Synthetic polypeptide
MSLPSGHTTGHTDQVVQRRARCWDIYQRRFSSRSEPVNPGMHSSSHQQQDGDAAMHGAHMDSPVRYTPYTISPYNRKGSFRKQDQTHVNMEREQKPPERRMEGNMPDGTLGSWFKITVPFGIKYNEKWLLNLIQNECSVPFVPVEFHYENMHASFFVENASIAYALKNVSGKIWDEDNEKISIFVNPAGIPHFVHRELKSEKVEQIKLAMNQQCDVSQEALDIQRLPFYPDMVNRDTKMASNPRKCMAASLDVHEENIPTVMSAGEMDKWKGIEPGEKCADRSPVCTTFSDTSSNINSILELFPKLLCLDGQQSPRATLCGTEAHKRLPTCKGSFFGSEMLKNLVLQFLQQYYLIYDSGDRQGLLSAYHDEACFSLSIPFNPEDSAPSSFCKFFKDSRNIKILKDPYLRGELLKHTKLDIVDSLSALPKTQHDLSSFLVDMWYQTEWMLCFSVNGVFKEVEGQSQGSVLAFTRTFIATPGSSSSLCIVNDKLFVRDTSHQGTQSALFTLVPTAFSSSVPAFSQEQQKMKKN

SEQ ID NO: 9952 - protein, 203 aa, Artificial Sequence
  Synthetic polypeptide
MASSHPEQLYVVLKPTRGYQPVRYYLIYDSGDRQGLLSAYHDEACFSLSIPFNPEDSAPSSFCKFFKDSRNIKILKDPYLRGELLKHTKLDIVDSLSALPKTQHDLSSFLVDMWYQTEWMLCFSVNGVFKEVEGQSQGSVLAFTRTFIATPGSSSSLCIVNDKLFVRDTSHQGTQSALFTLVPTAFSSSVPAFSQEQQKMKKN

SEQ ID NO: 9953 - protein, 24 aa, Artificial Sequence
  Synthetic polypeptide
MEQPMQNGEEDRPLGGGLLSGTDE

SEQ ID NO: 9954 - protein, 34 aa, Artificial Sequence
  Synthetic polypeptide
MANIHQENEEMEQPMQNGEEDRPLGGGLLSGTDE

SEQ ID NO: 9955 - protein, 45 aa, Artificial Sequence
  Synthetic polypeptide
MSDKPDLSEVEKFDRSKLKKTNTEEKNTLPSKERLWPYKERETSL

SEQ ID NO: 9956 - protein, 51 aa, Artificial Sequence
  Synthetic polypeptide
MSDKPDLSEVEKFDRSKLKKTNTEEKNTLPSKEKLHYVRYGNRESEYADTR

SEQ ID NO: 9957 - protein, 72 aa, Artificial Sequence
  Synthetic polypeptide
MSDEASAITSYEKFLTPEEPFPLLGPPRGVGTCPSEEPGCLDISDFGCQLSSCHRTDPLHRFHTNRCIGSHL

SEQ ID NO: 9958 - protein, 236 aa, Artificial Sequence
  Synthetic polypeptide
MASLGLQLVGYILGLLGLLGTLVAMLLPSWKTSSYVGASIVTAVGFSKGLWMECATHSTGITQCDIYSTLLGLPADIQAAQAMMVTSSAISSLACIISVVGMRCTVFCQESRAKDRVAVAGGVFFILGGLLGFIPVAWNLHGILRDFYSPLVPDSMKFEIGEALYLGIISSLFSLIAGIILCFSCSSQRNRSNYYDAYQAQPLATRSSPRPGQPPKVKSFQGLSGRSDLLEHFPEP

SEQ ID NO: 9959 - protein, 364 aa, Artificial Sequence
  Synthetic polypeptide
MKRVNSCVKSDEHVLEELETEGERQLKSLLQHQLDTSVSIEECMSKKESFAPGTMYKPFGKEAAGTMTLSQFQTLHEKDQETASLRELGLNETEILIWKSHVSGEKKTKLRATPEAIQNRLQDIEERISERQRILCLPQRFAKSKQLTRREMEIEKSLFQGADRHSFLKALYYQDEPQKKNKGDPMNNLESFYQEMIMKKRLEEFQLMRGEPFASHSLVSATSVGDSGTAESPSLLQDKGKQAAQGKGPSLHVANVIDFSPEQCWTGPKKLTQPIEFVPEDEIQRNRLSEEEIRKIPMFSSYNPGEPNKVLYLKNLSPRVTERDLVSLFARFQEKKGPPIQFRMMTGRMRGQAFITFPICLFQN

SEQ ID NO: 9960 - protein, 722 aa, Artificial Sequence
  Synthetic polypeptide
MHPGLWLLLVTLCLTEELAAAGEKSYGKPCGGQDCSGSCQCFPEKGARGRPGPIGIQGPTGPQGFTGSTGLSGLKGERGFPGLLGPYGPKGDKGPMGVPGFLGINGIPGHPGQPGPRGPPGLDGCNGTQGAVGFPGPDGYPGLLGPPGLPGQKGSKGDPVLAPGSFKGMKGDPGLPGLDGITGPQGAPGFPGAVGPAGPPGLQGPPGPPGPLGPDGNMGLGFQGEKGVKGDVGLPGPAGPPPSTGELEFMGFPKGKKGSKGEPGPKGFPGISGPPGFPGLGTTGEKGEKGEKGIPGLPGPRGPMGSEGVQGPPGQQGKKGTLGFPGLNGFQGIEGQKGDIGLPGPDVFIDIDGAVISGNPGDPGVPGLPGLKGDEGIQGLRGPSGVPGLPALSGVPGALGPQGFPGLKGDQGNPGRTTIGAAGLPGRDGLPGPPGPPGPPSPEFETETLHNKESGFPGLRGEQGPKGNLGLKGIKGDSGFCACDGGVPNTGPPGEPGPPGPWGLIGLPGLKGARGDRGSGGAQGPAGAPGLVGPLGPSGPKGKKGEPILSTIQGMPGDRGDSGSQGFRGVIGEPGKDGVPGLPGLPGLPGDGGQGFPGEKGLPGLPGEKGHPGPPGLPGNGLPGLPGPRGLPGDKGKDGLPGQQGLPGSKGITLPCIIPGSYGPSGFPGTPGFPGPKGSRGLPGTPGQPGSSGSKGEPGSPGLVHLPELPGSADHNLWGWAR

SEQ ID NO: 9961 - protein, 723 aa, Artificial Sequence
  Synthetic polypeptide
MLINKLWLLLVTLCLTEELAAAGEKSYGKPCGGQDCSGSCQCFPEKGARGRPGPIGIQGPTGPQGFTGSTGLSGLKGERGFPGLLGPYGPKGDKGPMGVPGFLGINGIPGHPGQPGPRGPPGLDGCNGTQGAVGFPGPDGYPGLLGPPGLPGQKGSKGDPVLAPGSFKGMKGDPGLPGLDGITGPQGAPGFPGAVGPAGPPGLQGPPGPPGPLGPDGNMGLGFQGEKGVKGDVGLPGPAGPPPSTGELEFMGFPKGKKGSKGEPGPKGFPGISGPPGFPGLGTTGEKGEKGEKGIPGLPGPRGPMGSEGVQGPPGQQGKKGTLGFPGLNGFQGIEGQKGDIGLPGPDVFIDIDGAVISGNPGDPGVPGLPGLKGDEGIQGLRGPSGVPGLPALSGVPGALGPQGFPGLKGDQGNPGRTTIGAAGLPGRDGLPGPPGPPGPPSPEFETETLHNKESGFPGLRGEQGPKGNLGLKGIKGDSGFCACDGGVPNTGPPGEPGPPGPWGLIGLPGLKGARGDRGSGGAQGPAGAPGLVGPLGPSGPKGKKGEPILSTIQGMPGDRGDSGSQGFRGVIGEPGKDGVPGLPGLPGLPGDGGQGFPGEKGLPGLPGEKGHPGPPGLPGNGLPGLPGPRGLPGDKGKDGLPGQQGLPGSKGITLPCIIPGSYGPSGFPGTPGFPGPKGSRGLPGTPGQPGSSGSKGEPGSPGLVHLPELPGSADHNLWGWAR

SEQ ID NO: 9962 - protein, 723 aa, Artificial Sequence
  Synthetic polypeptide
MHPGLWLLLVTLCLTEELAAAGEKSYGKPCGGQDCSGSCQCFPEKGARGRPGPIGIQGPTGPQGFTGSTGLSGLKGERGFPGLLGPYGPKGDKKFSIPVLLIYDSRPGHPGQPGPRGPPGLDGCNGTQGAVGFPGPDGYPGLLGPPGLPGQKGSKGDPVLAPGSFKGMKAFIPLFESIRGPQGAPGFPGAVGPAGPPGLQQGQPPFLEVLFPHWHEGEEAKVRDSLFGDVGLPGPAGPPPSTGELEFMGFPKGKKGSKGEPGPKGFPGISGPPGFPGLGTTGEKGEKGEKGIPGLPGPRTLLCSHTFHLVVTMFLSQGKKGTLGFPGLNGFQGIEGQKGDIGLPGPDVFIDIDGAVISGNPGDPGVPGLPGLKGDEGIQGLRGPSGVPGLPALSGVPGALGPQGFPGLKGDQGNPGRTTIGAAGLPGRDGLPGPPGPPGPPSPEFETETLHNKESGFPGLRGEQGPKGNLGLKGIKGDSGFCACDGGVPNTGPPGEPGPPGPWGLIGLPGLKGARGDRGSGGAQGPAGAPGLVGPLGPSGPKGKKGEPILSTIQGMPGDRGDSGSQGFRGVIGEPGKDGVPGLPGLPGLPGDGGQGFPGEKGLPGLPGEKGHPGPPGLPGNGLPGLPGPRGLPGDKGKDGLPGQQGLPGSKGITLPCIIPGSYGPSGFPGTPGFPGPKGSRGLPGTPGQPGSSGSKGEPGSPGLVHLPELPGSADHNLWGWAR

SEQ ID NO: 9963 - protein, 46 aa, Artificial Sequence
  Synthetic polypeptide
MKLRGVSLAAGLFLLALSLWGQPAEAAILLFNFSLLEESLRWVAGM

SEQ ID NO: 9964 - protein, 30 aa, Artificial Sequence
  Synthetic polypeptide
MNFYLLLASSILCALIVFWKYRRFQVPARP

SEQ ID NO: 9965 - protein, 813 aa, Artificial Sequence
  Synthetic polypeptide
MASESDTEEFYDAPEDVHLGGGYPVGSPGKVGLSTFKIIESIIEESQKVLQLEDDSLDSKGKELSDQATASPIVARTDLSNIPGLLAIDQVLPEESQKAESQNTFEETELELKKCFPSDETCEKPVDETTKLTQTSSTEQLNVLETETEVLNKEAVEVKGGGDVLEPVSSDSLSTKDFAAVEEVAPAKPPRHLTPEPDIVASTKKPVPARPPPPTNFPPPRPPPPSRPAPPPRKRKSELEFETLKTPDIDVPKENITSDSLLTASMASESTVKDSQPSLDLASATSGDKIVTAQENGKAPDGQTVAGEVMGPQRPRSNSGRELTDEEILASVMIKNLDTGEEIPLSLAEEKLPTGINPLTLHIMRRTKEYVSNDAAQSDDEEKLQSQPTDTDGGRLKQKTTQLKKFLGKSVKRAKHLAEEYGERAINKVKSVRDEVFHTDQDDPSSSDDEGMPYTRPVKFKAAHGFKGPYDFDQIKVVQDLSGEHMGAVWTMKFSHCGRLLASAGQDNVVRIWALKNAFDYFNNMRMKYNTEGRVSPSPSQESLSSSKSDTDTGVCSGTDEDPDDKNAPFRQRPFCKYKGHTADLLDLSWSKNYFLLSSSMDKTVRLWHISRRECLCCFQHIDFVTAIAFHPRHLKYHTQIHVRSTRGRNKVGRKITGIEPLPGENKILVTSNDSRIRLYDLRDLSLSMKYKGYVNSSSQIKASFSHDFTYLVSGSEDKYVYIWSTYHDLSKFTSVRRDRNDFWEGIKAHNAVVTSAIFAPNPSLMLSLDVQSEKSEGNEKSEDAEVLDATPSGAVAHACNPSTLGGRGRRIT

SEQ ID NO: 9966 - protein, 902 aa, Artificial Sequence
  Synthetic polypeptide
MASESDTEEFYDAPEDVHLGGGYPVGSPGKVGLSTFKETENTAYKVGNESPVQELKQDVSKKIIESIIEESQKVLQLEDDSLDSKGKELSDQATASPIVARTDLSNIPGLLAIDQVLPEESQKAESQNTFEETELELKKCFPSDETCEKPVDETTKLTQTSSTEQLNVLETETEVLNKEAVEVKGGGDVLEPVSSDSLSTKDFAAVEEVAPAKPPRHLTPEPDIVASTKKPVPARPPPPTNFPPPRPPPPSRPAPPPRKRKSELEFETLKTPDIDVPKENITSDSLLTASMASESTVKDSQPSLDLASATSGDKIVTAQENGKAPDGQTVAGEVMGPQRPRSNSGRELTDEEILASVMIKNLDTGEEIPLSLAEEKLPTGINPLTLHIMRRTKEYVSNDAAQSDDEEKLQSQPTDTDGGRLKQKTTQLKKFLGKSVKRAKHLAEEYGERAINKVKSVRDEVFHTDQDDPSSSDDEGMPYTRPVKFKAAHGFKGPYDFDQIKVVQDLSGEHMGAVWTMKFSHCGRLLASAGQDNVVRIWALKNAFDYFNNMRMKYNTEGRVSPSPSQESLSSSKSDTDTGVCSGTDEDPDDKNAPFRQRPFCKYKGHTADLLDLSWSKNYFLLSSSMDKTVRLWHISRRECLCCFQHIDFVTAIAFHPRDDRYFLSGSLDGKLRLWNIPDKKVALWNEVDGQTKLITAANFCQNGKYAVIGTYDGRCIFYDTEHLKYHTQIHVRSTRGRNKVGRKITGIEPLPGENKILVTSNDSRIRLYDLRDLSLSMKYKGYVNSSSQIKASFSHDFTYLVSGSEDKYVYIWSTYHDLSKFTSVRRDRNDFWEGIKAHNAVVTSAIFAPNPSLMLSLDVQSEKSEGNEKSEDAEVLDATPSGAVAHACNPSTLGGRGRRIT

SEQ ID NO: 9967 - protein, 894 aa, Artificial Sequence
  Synthetic polypeptide
MASESDTEEFYDAPEDVHLGGGYPVGSPGKVGLSTFKETENTAYKVGNESPVQELKQDVSKKIIESIIEESQKVLQLEDDSLDSKGKELSDQATASPIVARTDLSNIPGLLAIDQVLPEESQKAESQNTFEETELELKKCFPSDETCEKPVDETTKLTQTSSTEQLNVLETETEVLNKEAVEVKGGGDVLEPVSSDSLSTKDFAAVEEVAPAKPPRHLTPEPDIVASTKKPVPARPPPPTNFPPPRPPPPSRPAPPPRKRKSELEFETLKTPDIDVPKENITSDSLLTASMASESTVKDSQPSLDLASATSGDKIVTAQENGKAPDGQTVAGEVMGPQRPRSNSGRELTDEEILASVMIKNLDTGEEIPLSLAEEKLPTGINPLTLHIMRRTKEYVSNDAAQSDDEEKLQSQPTDTDGGRLKQKTTQLKKFLGKSVKRAKHLAEEYGERAINKVKSVRDEVFHTDQDDPSSSDDEGMPYTRPVKFKAAHGFKGPYDFDQIKVVQDLSGEHMGAVWTMKFSHCGRLLASAGQDNVVRIWALKNAFDYFNNMRMKYNTEGRVSPSPSQESLSSSKSDTDTGVCSGTDEDPDDKNAPFRQRPFCKYKGHTADLLDLSWSKNYFLLSSSMDKTVRLWHISRRECLCCFQHIDFVTAIAFHPRDDRYFLSGSLDGKLRLWNIPDKKVALWNEVDGQTKLITAANFCQNGKYAVIGTYDGRCIFYDTEHLKYHTQIHVRSTRGRNKVGRKITGIEPLPGENKILVTSNDSRIRLYDLRDLSLSMKYKGYVNSSSQIKASFSGSEDKYVYIWSTYHDLSKFTSVRRDRNDFWEGIKAHNAVVTSAIFAPNPSLMLSLDVQSEKSEGNEKSEDAEVLDATPSGAVAHACNPSTLGGRGRRIT

SEQ ID NO: 9968 - protein, 29 aa, Artificial Sequence
  Synthetic polypeptide
NRSEQYTRTVSHRSSTTGRIPKGRESEYI

SEQ ID NO: 9969 - protein, 340 aa, Artificial Sequence
  Synthetic polypeptide
MEWPARLCGLWALLLCAGGGGGGGGAAPTETQPPVTNLSVSVENLCTVIWTWNPPEGASSNCSLWYFSHFGDKQDKKIAPETRRSIEVPLNERICLQVGSQCSTNESEKPSILVEKCISPPEGDPESAVTELQCIWHNLSYMKCSWLPGRNTSPDTNYTLYYWHRSLEKIHQCENIFREGQYFGCSFDLTKVKDSSFEQHSVQIMVKDNAGKIKPSFNIVPLTSRVKPDPPHIKNLSFHNDDLYVQWENPQNFISRCLFYEVEVNNSQTETHNVFYVQEAKCENPEFERNVENTSCFMVPGVLPDTLNTVRIRVKTNKLCYEDDKLWSNWSQEMSIESRH

SEQ ID NO: 9970 - protein, 386 aa, Artificial Sequence
  Synthetic polypeptide
MEWPARLCGLWALLLCAGGGGGGGGAAPTETQPPVTNLSVSVENLCTVIWTWNPPEGASSNCSLWYFSHFGDKQDKKIAPETRRSIEVPLNERICLQVGSQCSTNESEKPSILVEKCISPPEGDPESAVTELQCIWHNLSYMKCSWLPGRNTSPDTNYTLYYWHRSLEKIHQCENIFREGQYFGCSFDLTKVKDSSFEQHSVQIMVKDNAGKIKPSFNIVPLTSRVKPDPPHIKNLSFHNDDLYVQWENPQNFISRCLFYEVEVNNSQTETHNVFYVQEAKCENPEFERNVENTSCFMVPGVLPDTLNTVRIRVKTNKLCYEDDKLWSNWSQEMSIEKPHRDTQTHREESHVKMEAEIAEMQLQPRNNKDSQELPEARKRQRGILL

SEQ ID NO: 9971 - protein, 480 aa, Artificial Sequence
  Synthetic polypeptide
MESVRIEQMLSLPAEVSSDNLESAERGASAAQVDMGPHPKVAAEGPAPLPTREPEQEQSPGTSTPESKVLLTQADALASRGRIREALEVYRQLSERQQLVAEQLEQLVRCLAEKVPQGEALAPAPPDEGSTASGTVAAEETGAAAAAAATEVWDGFKCRKCHGFLSDPVSLSCGHTFCKLCLERGRAADRRCALCGVKLSALMVATGRARGARRAGQQPPPPLRVNVVLSGLLGKLFPGPARASQLRHEGNRLYRERQVEAALLKYNEAVKLAPNDHLLYSNRSQIYFTLESHENALHDAEIACKLRPMGFKAHFRKAQALATLGKVEEALREFLYCVSLDGKNKRARCEAQRDNLELPHCSSQEEAAARGDGSSLMDPAKVKGDGQQHHMKDQEEEEEKWDATSPKAASSKTGKCQEKKRKHCQIESQEETGMPNKASKQDPPTDQGDKPALSLPLASFDASDLECALCMSIMLVVGLS

SEQ ID NO: 9972 - protein, 439 aa, Artificial Sequence
  Synthetic polypeptide
MESVRIEQMLSLPAEVSSDNLESAERGASAAQVDMGPHPKVAAEGPAPLPTREPEQEQSPGTSTPESKVLLTQADALASRGRIREALEVYRQLSERQQLVAEQLEQLVRCLAEKVPQGEALAPAPPDEGSTASGTVAAEETGAAAAAAATEVWDGFKCRKCHGFLSDPVSLSCGHTFCKLCLERGRAADRRCALCGVKLSALMVATGRARGARRAGQQPPPPLRVNVVLSGLLGKLFPGPARASQLRHEGNRLYRERQVEAALLKYNEAVKLAPNDHLLYSNRSQIYFTLESHENALHDAEIACKLRPMGFKDNLELPHCSSQEEAAARGDGSSLMDPAKVKGDGQQHHMKDQEEEEEKWDATSPKAASSKTGKCQEKKRKHCQIESQEETGMPNKASKQDPPTDQGDKPALSLPLASFDASDLECALCMSIMLVVGLS

SEQ ID NO: 9973 - protein, 76 aa, Artificial Sequence
  Synthetic polypeptide
VRGQALRLDGGHWAGAWSPAGWAAAAAAAASQRGAQRPPRQVVSRPSASVATPARGQPTVPRAPGGGGTAQVQRGS

SEQ ID NO: 9974 - protein, 224 aa, Artificial Sequence
  Synthetic polypeptide
MGFKAHFRKAQALATLGKVEEALREFLYCVSLDGKNKRARCEAQRLLLSFFSPSVPGDSQEHSPDILKLLAPHPRLKENVESMTTEVTSHNLPRLLQDNLELPHCSSQEEAAARGDGSSLMDPAKVKGDGQQHHMKDQEEEEEKWDATSPKAASSKTGKCQEKKRKHCQIESQEETGMPNKASKQDPPTDQGDKPALSLPLASFDASDLECALCMSIMLVVGLS

SEQ ID NO: 9975 - protein, 77 aa, Artificial Sequence
  Synthetic polypeptide
MSTPARRRLMRDFKRLQEDPPAGVSGAPSENNIMVWNAVIFGPEGTPFEDGVTNWWPNGRKHLQVCFLWPTQYFPKL

SEQ ID NO: 9976 - protein, 367 aa, Artificial Sequence
  Synthetic polypeptide
MAATDIARQVGEGCRTVPLAGHVGFDSLPDQLVNKSVSQGFCFNILCVGETGLGKSTLMDTLFNTKFEGEPATHTQPGVQLQSNTYDLQESNVRLKLTIVSTVGFGDQINKEDSYKPIVEFIDAQFEAYLQEELKIRRVLHTYHDSRIHVCLYFIAPTGHSLKSLDLVTMKKLDSKVNIIPIIAKADAISKSELTKFKIKITSELVSNGVQIYQFPTDDESVAEINGTMNAHLPFAVIGSTEELKIGNKMMRARQYPWGTVQVENEAHCDFVKLREMLIRVNMEDLREQTHTRHYELYRRCKLEEMGFKDTDPDSKPFSLQETYEAKRNEFLGELQKKEEEMRQMFVQRVKEKEAELKEAEKEEQRL

SEQ ID NO: 9977 - protein, 309 aa, Artificial Sequence
  Synthetic polypeptide
MDTLFNTKFEGEPATHTQPGVQLQSNTYDLQESNVRLKLTIVSTVGFGDQINKEDSYKPIVEFIDAQFEAYLQEELKIRRVLHTYHDSRIHVCLYFIAPTGHSLKSLDLVTMKKLDSKVNIIPIIAKADAISKSELTKFKIKITSELVSNGVQIYQFPTDDESVAEINGTMNAHLPFAVIGSTEELKIGNKMMRARQYPWGTVQVENEAHCDFVKLREMLIRVNMEDLREQTHTRHYELYRRCKLEEMGFKDTDPDSKPFSLQETYEAKRNEFLGELQKKEEEMRQMFVQRVKEKEAELKEAEKEEQRL

SEQ ID NO: 9978 - protein, 397 aa, Artificial Sequence
  Synthetic polypeptide
MAATDIARQVFGRRRLLLLGFETVGFSAACTEEGGHMLRRGEGCRTVPLAGHVGFDSLPDQLVNKSVSQGFCFNILCVGETGLGKSTLMDTLFNTKFEGEPATHTQPGVQLQSNTYDLQESNVRLKLTIVSTVGFGDQINKEDSYKPIVEFIDAQFEAYLQEELKIRRVLHTYHDSRIHVCLYFIAPTGHSLKSLDLVTMKKLDSKVNIIPIIAKADAISKSELTKFKIKITSELVSNGVQIYQFPTDDESVAEINGTMNAHLPFAVIGSTEELKIGNKMMRARQYPWGTVQVENEAHCDFVKLREMLIRVNMEDLREQTHTRHYELYRRCKLEEMGFKDTDPDSKPFSLQETYEAKRNEFLGELQKKEEEMRQMFVQRVKEKEAELKEAEKEEQRL

SEQ ID NO: 9979 - protein, 265 aa, Artificial Sequence
  Synthetic polypeptide
MAATDIARQVGEGCRTVPLAGHVGFDSLPDQLVNKSVSQGFCFNILCVGETGLGKSTLMDTLFNTKFEGEPATHTQPGVQLQSNTYDLQESNVRLKLTIVSTVGFGDQINKEDSYKPIVEFIDAQFEAYLQEELKIRRVLHTYHDSRIHVCLYFIAPTGHSLKSLDLVTMKKLDSKVNIIPIIAKADAISKSELTKFKIKITSELVSNGVQIYQFPTDDESVAEINGTMNAHLPFAVIGSTEELKIGNKMMRARQYPWGTVQESS

SEQ ID NO: 9980 - protein, 207 aa, Artificial Sequence
  Synthetic polypeptide
MDTLFNTKFEGEPATHTQPGVQLQSNTYDLQESNVRLKLTIVSTVGFGDQINKEDSYKPIVEFIDAQFEAYLQEELKIRRVLHTYHDSRIHVCLYFIAPTGHSLKSLDLVTMKKLDSKVNIIPIIAKADAISKSELTKFKIKITSELVSNGVQIYQFPTDDESVAEINGTMNAHLPFAVIGSTEELKIGNKMMRARQYPWGTVQESS

SEQ ID NO: 9981 - protein, 295 aa, Artificial Sequence
  Synthetic polypeptide
MAATDIARQVFGRRRLLLLGFETVGFSAACTEEGGHMLRRGEGCRTVPLAGHVGFDSLPDQLVNKSVSQGFCFNILCVGETGLGKSTLMDTLFNTKFEGEPATHTQPGVQLQSNTYDLQESNVRLKLTIVSTVGFGDQINKEDSYKPIVEFIDAQFEAYLQEELKIRRVLHTYHDSRIHVCLYFIAPTGHSLKSLDLVTMKKLDSKVNIIPIIAKADAISKSELTKFKIKITSELVSNGVQIYQFPTDDESVAEINGTMNAHLPFAVIGSTEELKIGNKMMRARQYPWGTVQESS

SEQ ID NO: 9982 - protein, 132 aa, Artificial Sequence
  Synthetic polypeptide
MAATDIARQVGEGCRTVPLAGHVGFDSLPDQLVNKSVSQGFCFNILCVGETGLGKSTLMDTLFNTKFEGEPATHTQPGVQLQSNTYDLQESNVRLKLTIVSTVGFGDQINKEDRESFRLHKPKGWKNLVLPL

SEQ ID NO: 9983 - protein, 74 aa, Artificial Sequence
  Synthetic polypeptide
MDTLFNTKFEGEPATHTQPGVQLQSNTYDLQESNVRLKLTIVSTVGFGDQINKEDRESFRLHKPKGWKNLVLPL

SEQ ID NO: 9984 - protein, 162 aa, Artificial Sequence
  Synthetic polypeptide
MAATDIARQVFGRRRLLLLGFETVGFSAACTEEGGHMLRRGEGCRTVPLAGHVGFDSLPDQLVNKSVSQGFCFNILCVGETGLGKSTLMDTLFNTKFEGEPATHTQPGVQLQSNTYDLQESNVRLKLTIVSTVGFGDQINKEDRESFRLHKPKGWKNLVLPL

SEQ ID NO: 9985 - protein, 311 aa, Artificial Sequence
  Synthetic polypeptide
MAAAAVVVPAEWIKNWEKSGRGEFLHLCRILSENKSHDSSTYRDFQQALYELSYHVIKGNLKHEQASNVLSDISEFREDMPSILADVFCILDIETNCLEEKSKRDYFTQLVLACLYLVSDTVLKERLDPETLESLGLIKQSQQFNQKSVKIKTKLFYKQQKFNLLREENEGYAKLIAELGQDLSGSITSDLILENIKSLIGCFNLDPNRVLDVILEVFECRPEHDDFFISLLESYMSMCEPQTLCHILGFKFKFYQRGMYMAHCLLTSESVMKQTNQANHRGMDIFLKRVTPPQEEPQVLQEVFQKKTLSS

SEQ ID NO: 9986 - protein, 196 aa, Artificial Sequence
  Synthetic polypeptide
MFVSDTVLKERLDPETLESLGLIKQSQQFNQKSVKIKTKLFYKQQKFNLLREENEGYAKLIAELGQDLSGSITSDLILENIKSLIGCFNLDPNRVLDVILEVFECRPEHDDFFISLLESYMSMCEPQTLCHILGFKFKFYQRGMYMAHCLLTSESVMKQTNQANHRGMDIFLKRVTPPQEEPQVLQEVFQKKTLSS

SEQ ID NO: 9987 - protein, 1246 aa, Artificial Sequence
  Synthetic polypeptide
MEQTDCKPYQPLPKVKHEMDLAYTSSSDESEDGRKPRQSYNSRETLHEYNQELRMNYNSQSRKRKEVEKSTQEMEFCETSHTLCSGYQTDMHSVSRHGYQLEMGSDVDTETEGAASPDHALRMWIRGMKSEHSSCLSSRANSALSLTDTDHERKSDGENGFKFSPVCCDMEAQAGSTQDVQSSPHNQFTFRPLPPPPPPPHACTCARKPPPAADSLQRRSMTTRSQPSPAAPAPPTSTQDSVHLHNSWVLNSNIPLETRHFLFKHGSGSSAIFSAASQNYPLTSNTVYSPPPRPLPRSTFSRPAFTFNKPYRCCNWKCTALSATAITVTLALLLAYVIAVHLFGLTWQLQPVEGELYANGVSKGNRGTESMDTTYSPIGGKVSDKSEKKVFQKGRAIDTGEVDIGAQVMQTIPPGLFWRFQITIHHPIYLKFNISLAKDSLLGIYGRRNIPPTHTQFDFVKLMDGKQLVKQDSKGSDDTQHSPRNLILTSLQETGFIEYMDQGPWYLAFYNDGKKMEQVFVLTTAIEIMDDCSTNCNGNGECISGHCHCFPGFLGPDCARDSCPVLCGGNGEYEKGHCVCRHGWKGPECDVPEEQCIDPTCFGHGTCIMGVCICVPGYKGEICEEEDCLDPMCSNHGICVKGECHCSTGWGGVNCETPLPVCQEQCSGHGTFLLDAGVCSCDPKWTGSDCSTELCTMECGSHGVCSRGICQCEEGWVGPTCEERSCHSHCTEHGQCKDGKCECSPGWEGDHCTIAHYLDAVRDGCPGLCFGNGRCTLDQNGWHCVCQVGWSGTGCNVVMEMLCGDNLDNDGDGLTDCVDPDCCQQSNCYISPLCQGSPDPLDLIQQSQTLFSQHTSRLFYDRIKFLIGKDSTHVIPPEVSFDSRRACVIRGQVVAIDGTPLVGVNVSFLHHSDYGFTISRQDGSFDLVAIGGISVILIFDRSPFLPEKRTLWLPWNQFIVVEKVTMQRVVSDPPSCDISNFISPNPIVLPSPLTSFGGSCPERGTIVPELQVVQEEIPIPSSFVRLSYLSSRTPGYKTLLRILLTHSTIPVGMIKVHLTVAVEGRLTQKWFPAAINLVYTFAWNKTDIYGQKVWGLAEALVSVGYEYETCPDFILWEQRTVVLQGFEMDASNLGGWSLNKHHILNPQSGIIHKGNGENMFISQQPPVISTIMGNGHQRSVACTNCNGPAHNNKLFAPVALASGPDGSVYVGDFNFVRRIFPSGNSVSILELRNRDTRHRSSKTRKV

SEQ ID NO: 9988 - protein, 1239 aa, Artificial Sequence
  Synthetic polypeptide
MEQTDCKPYQPLPKVKHEMDLAYTSSSDESEDGRKPRQSYNSRETLHEYNQELRMNYNSQSRKRKEVEKSTQEMEFCETSHTLCSGYQTDMHSVSRHGYQLEMGSDVDTETEGAASPDHALRMWIRGMKSEHSSCLSSRANSALSLTDTDHERKSDGENGFKFSPVCCDMEAQAGSTQDVQSSPHNQFTFRPLPPPPPPPHACTCARKPPPAADSLQRRSMTTRSQPSPAAPAPPTSTQDSVHLHNSWVLNSNIPLETRHFLFKHGSGSSAIFSAASQNYPLTSNTVYSPPPRPLPRSTFSRPAFTFNKPYRCCNWKCTALSATAITVTLALLLAYVIAVHLFGLTWQLQPVEGELYANGVSKGNRGTESMDTTYSPIGGKVSDKSEKKVFQKGRAIDTGEVDIGAQVMQTIPPGLFWRFQITIHHPIYLKFNISLAKDSLLGIYGRRNIPPTHTQFDFVKLMDGKQLVKQDSKGSDDTQHSPRNLILTSLQETGFIEYMDQGPWYLAFYNDGKKMEQVFVLTTAIEIMDDCSTNCNGNGECISGHCHCFPGFLGPDCARDSCPVLCGGNGEYEKGHCVCRHGWKGPECDVPEEQCIDPTCFGHGTCIMGVCICVPGYKGEICEEEDCLDPMCSNHGICVKGECHCSTGWGGVNCETPLPVCQEQCSGHGTFLLDAGVCSCDPKWTGSDCSTELCTMECGSHGVCSRGICQCEEGWVGPTCEERSCHSHCTEHGQCKDGKCECSPGWEGDHCTIAHYLDAVRDGCPGLCFGNGRCTLDQNGWHCVCQVGWSGTGCNVVMEMLCGDNLDNDGDGLTDCVDPDCCQQSNCYISPLCQGSPDPLDLIQQSQTLFSQHTSRLFYDRIKFLIGKDSTHVIPPEVSFDSRRACVIRGQVVAIDGTPLVGVNVSFLHHSDYGFTISRQDGSFDLVAIGGISVILIFDRSPFLPEKRTLWLPWNQFIVVEKVTMQRVVSDPPSCDISNFISPNPIVLPSPLTSFGGSCPERGTIVPELQVVQEEIPIPSSFVRLSYLSSRTPGYKTLLRILLTHSTIPVGMIKVHLTVAVEGRLTQKWFPAAINLVYTFAWNKTDIYGQKVWGLAEALVSVGYEYETCPDFILWEQRTVVLQGFEMDASNLGGWSLNKHHILNPQSGIIHKGNGENMFISQQPPVISTIMGNGHQRSVACTNCNGPAHNNKLFAPVALASGPDGSVYVGDFNFVRRIFPSGNSVSILELRSSKTRKV

SEQ ID NO: 9989 - protein, 1243 aa, Artificial Sequence
  Synthetic polypeptide
MEQTDCKPYQPLPKVKHEMDLAYTSSSDESEDGRKPRQSYNSRETLHEYNQELRMNYNSQSRKRKEVEKSTQEMEFCETSHTLCSGYQTDMHSVSRHGYQLEMGSDVDTETEGAASPDHALRMWIRGMKSEHSSCLSSRANSALSLTDTDHERKSDGENGFKFSPVCCDMEAQAGSTQDVQSSPHNQFTFRPLPPPPPPPHACTCARKPPPAADSLQRRSMTTRSQPSPAAPAPPTSTQDSVHLHNSWVLNSNIPLETRHFLFKHGSGSSAIFSAASQNYPLTSNTVYSPPPRPLPRSTFSRPAFTFNKPYRCCNWKCTALSATAITVTLALLLAYVIAVHLFGLTWQLQPVEGELYANGVSKGNRGTESMDTTYSPIGGKVSDKSEKKVFQKGRAIDTGEVDIGAQVMQTIPPGLFWRFQITIHHPIYLKFNISLAKDSLLGIYGRRNIPPTHTQFDFVKLMDGKQLVKQDSKGSDDTQHSPRNLILTSLQETGFIEYMDQGPWYLAFYNDGKKMEQVFVLTTAIEIMDDCSTNCNGNGECISGHCHCFPGFLGPDCARDSCPVLCGGNGEYEKGHCVCRHGWKGPECDVPEEQCIDPTCFGHGTCIMGVCICVPGYKGEICEEEDCLDPMCSNHGICVKGECHCSTGWGGVNCETPLPVCQEQCSGHGTFLLDAGVCSCDPKWTGSDCSTELCTMECGSHGVCSRGICQCEEGWVGPTCEERSCHSHCTEHGQCKDGKCECSPGWEGDHCTIAHYLDAVRDGCPGLCFGNGRCTLDQNGWHCVCQVGWSGTGCNVVMEMLCGDNLDNDGDGLTDCVDPDCCQQSNCYISPLCQGSPDPLDLIQQSQTLFSQHTSRLFYDRIKFLIGKDSTHVIPPEVSFDSRRACVIRGQVVAIDGTPLVGVNVSFLHHSDYGFTISRQDGSFDLVAIGGISVILIFDRSPFLPEKRTLWLPWNQFIVVEKVTMQRVVSDPPSCDISNFISPNPIVLPSPLTSFGGSCPERGTIVPELQVVQEEIPIPSSFVRLSYLSSRTPGYKTLLRILLTHSTIPVGMIKVHLTVAVEGRLTQKWFPAAINLVYTFAWNKTDIYGQKVWGLAEALVSVGYEYETCPDFILWEQRTVVLQGFEMDASNLGGWSLNKHHILNPQSGIIHKGNGENMFISQQPPVISTIMGNGHQRSVACTNCNGPAHNNKLFAPVALASGPDGSVYVGDFNFVRRIFPSGNSVSILELRASAQQKKLPSE

SEQ ID NO: 9990 - protein, 98 aa, Artificial Sequence
  Synthetic polypeptide
MPNIVLFSGSSHQDLSQRVADRLGLELGKVVTKKFSNQETRSYARMPTSKTRKYTKKEDTENGKWSAGEGAGNPRMAAVHRQRDNPGLPPLGGMPARR

SEQ ID NO: 9991 - protein, 1047 aa, Artificial Sequence
  Synthetic polypeptide
MEQDTAAVAATVAAADATATIVVIEDEQPGPSTSQEEGAAAAATEATAATEKGEKKKEKNVSSFQLKLAAKAPKSEKEMDPEYEEKMKADRAKRFEFLLKQTELFAHFIQPSAQKSPTSPLNMKLGRPRIKKDEKQSLISAGDYRHRRTEQEEDEELLSESRKTSNVCIRFEVSPSYVKGGPLRDYQIRGLNWLISLYENGVNGILADEMGLGKTLQTIALLGYLKHYRNIPGPHMVLVPKSTLHNWMNEFKRWVPSLRVICFVGDKDARAAFIRDEMMPGEWDVCVTSYEMVIKEKSVFKKFHWRYLVIDEAHRIKNEKSKLSEIVREFKSTNRLLLTGTPLQNNLHELWALLNFLLPDVFNSADDFDSWFDTKNCLGDQKLVERLHAVLKPFLLRRIKTDVEKSLPPKKEIKIYLGLSKMQREWYTKILMKDIDVLNSSGKMDKMRLLNILMQLRKCCNHPYLFDGAEPGPPYTTDEHIVSNSGKMVVLDKLLAKLKEQGSRVLIFSQMTRLLDILEDYCMWRGYEYCRLDGQTPHEEREEAIEAFNAPNSSKFIFMLSTRAGGLGINLASADVVILYDSDWNPQVDLQAMDRAHRIGQKKPVRVFRLITDNTVEERIVERAEIKLRLDSIVIQQGRLIDQQSNKLAKEEMLQMIRHGATHVFASKESELTDEDITTILERGEKKTAEMNERLQKMGESSLRNFRMDIEQSLYKFEGEDYREKQKLGMVEWIEPPKRERKANYAVDAYFREALRVSEPKIPKAPRPPKQPNVQDFQFFPPRLFELLEKEILYYRKTIGYKVPRNPDIPNPALAQREEQKKIDGAEPLTPEETEEKEKLLTQGFTNWTKRDFNQFIKANEKYGRDDIDNIAREVEGKSPEEVMEYSAVFWERCNELQDIEKIMAQIERGEARIQRRISIKKALDAKIARYKAPFHQLRIQYGTSKGKNYTEEEDRFLICMLHKMGFDRENVYEELRQCVRNAPQFRFDWFIKSRTAMEFQRRCNTLISLIEKENMEIEERERAEKKKRATKTPMGGCGARCNRKFH

SEQ ID NO: 9992 - protein, 1059 aa, Artificial Sequence
  Synthetic polypeptide
MEQDTAAVAATVAAADATATIVVIEDEQPGPSTSQEEGAAAAATEATAATEKGEKKKEKNVSSFQLKLAAKAPKSEKEMDPEYEEKMKADRAKRFEFLLKQTELFAHFIQPSAQKSPTSPLNMKLGRPRIKKDEKQSLISAGDYRHRRTEQEEDEELLSESRKTSNVCIRFEVSPSYVKGGPLRDYQIRGLNWLISLYENGVNGILADEMGLGKTLQTIALLGYLKHYRNIPGPHMVLVPKSTLHNWMNEFKRWVPSLRVICFVGDKDARAAFIRDEMMPGEWDVCVTSYEMVIKEKSVFKKFHWRYLVIDEAHRIKNEKSKLSEIVREFKSTNRLLLTGTPLQNNLHELWALLNFLLPDVFNSADDFDSWFDTKNCLGDQKLVERLHAVLKPFLLRRIKTDVEKSLPPKKEIKIYLGLSKMQREWYTKILMKDIDVLNSSGKMDKMRLLNILMQLRKCCNHPYLFDGAEPGPPYTTDEHIVSNSGKMVVLDKLLAKLKEQGSRVLIFSQMTRLLDILEDYCMWRGYEYCRLDGQTPHEEREDKFLEVEFLGQREAIEAFNAPNSSKFIFMLSTRAGGLGINLASADVVILYDSDWNPQVDLQAMDRAHRIGQKKPVRVFRLITDNTVEERIVERAEIKLRLDSIVIQQGRLIDQQSNKLAKEEMLQMIRHGATHVFASKESELTDEDITTILERGEKKTAEMNERLQKMGESSLRNFRMDIEQSLYKFEGEDYREKQKLGMVEWIEPPKRERKANYAVDAYFREALRVSEPKIPKAPRPPKQPNVQDFQFFPPRLFELLEKEILYYRKTIGYKVPRNPDIPNPALAQREEQKKIDGAEPLTPEETEEKEKLLTQGFTNWTKRDFNQFIKANEKYGRDDIDNIAREVEGKSPEEVMEYSAVFWERCNELQDIEKIMAQIERGEARIQRRISIKKALDAKIARYKAPFHQLRIQYGTSKGKNYTEEEDRFLICMLHKMGFDRENVYEELRQCVRNAPQFRFDWFIKSRTAMEFQRRCNTLISLIEKENMEIEERERAEKKKRATKTPMGGCGARCNRKFH

SEQ ID NO: 9993 - protein, 178 aa, Artificial Sequence
  Synthetic polypeptide
MNPLTKVKLINELNEREVQLGVADKVSWHSEYKDSAWIFLGGLPYELTEGDIICVFSQYGEIVNINLVRDKKTGKSKGFCFLCYEDQRSTILAVDNFNGIKIKGRTIRVDHVSNYRAPKDSEEIDDVTRQLQEKGCGARTPSPSLSESSEDEKPTKKHKKAPQNATVFGDKVFEEVTQ

SEQ ID NO: 9994 - protein, 234 aa, Artificial Sequence
  Synthetic polypeptide
MATRSPGVVISDDEPGYDLDLFCIPNHYAEDLERVFIPHGLIMDRTERLARDVMKEMGGHHIVALCVLKGGYKFFADLLDYIKALNRNSDRSIPMTVDFIRLKSYCNDQSTGDIKVIGGDDLSTLTGKNVLIVEDIIDTGKTMQTLLSLVRQYNPKMVKVASLLVKRTPRSVGYKPDFVGFEIPDKFVVGYALDYNEYFRDLNQGAVAHAPALWEAEVGGSPEVRSLRPAWPTW

SEQ ID NO: 9995 - protein, 35 aa, Artificial Sequence
  Synthetic polypeptide
MTDKTEKVPPSLLQQGQDFRTVSGQFFPGCFNFAL

SEQ ID NO: 9996 - protein, 3 aa, Artificial Sequence
  Synthetic polypeptide
MAS

SEQ ID NO: 9997 - protein, 69 aa, Artificial Sequence
  Synthetic polypeptide
MNRQLVNILTALFAFFLETNHFRTAFCKDHDSRSGKQPSQTLSPSDFLDKLMGRTSGYDARIRPNFKVE

SEQ ID NO: 9998 - protein, 53 aa, Artificial Sequence
  Synthetic polypeptide
MNLHMRMTAFCKDHDSRSGKQPSQTLSPSDFLDKLMGRTSGYDARIRPNFKVE

SEQ ID NO: 9999 - protein, 869 aa, Artificial Sequence
  Synthetic polypeptide
MTSKQAMSSNEQERLLCYNGEVLVFQLSKGNFADKEPTKTPILHVRRMVFDRGTKVFVQKSTGFFTIKEENSHLKIMCCNCVSDFRTGINLPYIVIEKNKKNNVFEYFLLILHSTNKFEMRLSFKLGYEMKDGLRVLNGPLILWRHVKAFFFISSQTGKVVSVSGNFSSIQWAGEIENLGMVLLGLKECCLSEEECTQEPSKSDYAIWNTKFCVYSLESQEVLSDIYIIPPAYSSVVTYVHICATEIIKNQLRISLIALTRKNQLISFQNGTPKNVCQLPFGDPCAVQLMDSGGGNLFFVVSFISNNACAVWKESFQVAAKWEKLSLVLIDDFIGSGTEQVLLLFKDSLNSDCLTSFKITDLGKINYSSEPSDCNEDDLFEDKQENRYLVVPPLETGLKVCFSSFRELRQHLLLKEKIISKSYKALINLVQGKDDNTSSAEEKECLVPLCGEEENSVHILDEKLSDNFQDSEQLVEKIWYRVIDDSLVVGVKTTSSLKLSLNDVTLSLLMDQAHDSRFRLLKCQNRVIKLSTNPFPAPYLMPCEIGLEAKRVTLTPDSKKEESFVCEHPSKKECVQIITAVTSLSPLLTFSKFCCTVLLQIMERESGNCPKDRYVVCGRVFLSLEDLSTGKYLLTFPKKKPIEHMEDLFALLAAFHKSCFQITSPGYALNSMKVWLLEHMKCEIIKEFPEVYFCERPGSFYGTLFTWKQRTPFEGILIIYSRNQTVMFQCLHNLIRILPINCFLKNLKSGSENFLIDNMAFTLEKELVTLSSLSSAIAKHESNFMQRCEVSKGKSSVVAAALSDRRENIHPYRKELQREKKKMLQTNLKITCFGESQPTCHEDTQAALGRVLPCKDLRPPANSQQGIEV

SEQ ID NO: 10000 - protein, 517 aa, Artificial Sequence
  Synthetic polypeptide
MTSKQAMSSNEQERLLCYNGEVLVFQLSKGNFADKEPTKTPILHVRRMVFDRGTKVFVQKSTGFFTIKEENSHLKIMCCNCVSDFRTGINLPYIVIEKNKKNNVFEYFLLILHSTNKFEMRLSFKLGYEMKDGLRVLNGPLILWRHVKAFFFISSQTGKVVSVSGNFSSIQWAGEIENLGMVLLGLKECCLSEEECTQEPSKSDYAIWNTKFCVYSLESQEVLSDIYIIPPAYSSVVTYVHICATEIIKNQLRISLIALTRKNQLISFQNGTPKNVCQLPFGDPCAVQLMDSGGGNLFFVVSFISNNACAVWKESFQVAAKWEKLSLVLIDDFIGSGTEQVLLLFKDSLNSDCLTSFKITDLGKINYSSEPSDCNEDDLFEDKQENRYLVVPPLETGLKVCFSSFRELRQHLLLKEKIISKSYKALINLVQGKDDNTSSAEEKECLVPLCGEEENSVHILDEKLSDNFQDSEQLVEKIWYRVIDDSLVVGVKTTSSLKLSHVLGKASQPAMRTLKQP

SEQ ID NO: 10001 - protein, 92 aa, Artificial Sequence
  Synthetic polypeptide
MNLRGLFQDFNPRAEGETCVEFKAMLIAVGIHLLLLMFEVLVCDRIERGSHFWLLVFMPLFFVSPVSVAACVWGFRHDRSLEGVLEPIPHRY

SEQ ID NO: 10002 - protein, 151 aa, Artificial Sequence
  Synthetic polypeptide
MNLRGLFQDFNPSKFLIYACLLLFSVLLALRLDGIIQWSYWAVFAPIWLWKLMVIVGASVGTGVWARNPQYRAEGETCVEFKAMLIAVGIHLLLLMFEVLVCDRIERGSHFWLLVFMPLFFVSPVSVAACVWGFRHDRSLEGVLEPIPHRY

SEQ ID NO: 10003 - protein, 40 aa, Artificial Sequence
  Synthetic polypeptide
WSVTESREEAISGSWSSCRCSLFPRCLLQLAFGAFDMTGH

SEQ ID NO: 10004 - protein, 40 aa, Artificial Sequence; identical to SEQ ID NO: 10003
  Synthetic polypeptide

SEQ ID NO: 10005 - protein, 87 aa, Artificial Sequence
  Synthetic polypeptide
MNLRGLFQDFNPRAEGETCVEFKAMLIAVGIHLLLLMFEVLVCDRIERGSHFWLLVFMPLFFVSPVSVAACVWGFRHDRSLEFISGT

SEQ ID NO: 10006 - protein, 146 aa, Artificial Sequence
  Synthetic polypeptide
MNLRGLFQDFNPSKFLIYACLLLFSVLLALRLDGIIQWSYWAVFAPIWLWKLMVIVGASVGTGVWARNPQYRAEGETCVEFKAMLIAVGIHLLLLMFEVLVCDRIERGSHFWLLVFMPLFFVSPVSVAACVWGFRHDRSLEFISGT

SEQ ID NO: 10007 - protein, 57 aa, Artificial Sequence
  Synthetic polypeptide
MAENHAQNKAKLISETRRRFEAEYVTGTWMKLETIILSKLSQGQKTKHRMFSLTGGI

SEQ ID NO: 10008 - protein, 86 aa, Artificial Sequence
  Synthetic polypeptide
MDRPAAAAAAGCEGGGGPNPGPAGGRRPPRAAGGATAGSRQPSVETLDSPTGSHVEWCKQLIAATISSQISGSVTSENVSRDYKKP

SEQ ID NO: 10009 - protein, 33 aa, Artificial Sequence
  Synthetic polypeptide
HVEWCKQLIAATISSQISGSVTSENVSRDYKKP

SEQ ID NO: 10010 - protein, 85 aa, Artificial Sequence
  Synthetic polypeptide
MDRPAAAAAAGCEGGGGPNPGPAGGRRPPRAAGGATAGSRQPSVETLDSPTGSHVEWCKQLIAATISSQISGSVTSENVSRDYKE

SEQ ID NO: 10011 - protein, 32 aa, Artificial Sequence
  Synthetic polypeptide
HVEWCKQLIAATISSQISGSVTSENVSRDYKE

SEQ ID NO: 10012 - protein, 76 aa, Artificial Sequence
  Synthetic polypeptide
MVAWRSAFLVCLAFSLATLVQRGSGDFDDFNLEDAVKETSSVKPALGMYHKLDGLKQQNFILSLFWMLEVLYQGSL

SEQ ID NO: 10013 - protein, 45 aa, Artificial Sequence
  Synthetic polypeptide
MTEQAISFAKDFLAGGIAAAISKTAVAPIERVKLLLQWSLMVVHL

SEQ ID NO: 10014 - protein, 230 aa, Artificial Sequence
  Synthetic polypeptide
MLSKVLPVLLGILLILQSRVEGPQTESKNEASSRDVVYGPQPQPLENQLLSEETKSTETETGSRVGKLPEASRILNTILSNYDHKLRPGIGEKPTVVTVEISVNSLGPLSILDMEYTIDIIFSQTWYDERLCYNDTFESLVLNGNVVSQLWIPDTFFRNSKRTHEHEITMPNQMVRIYKDGKVLYTIRMTIDAGCSLHMLRFPMDSHSCPLSFSSWPDTEECSVNALIEW

SEQ ID NO: 10015 - protein, 23 aa, Artificial Sequence
  Synthetic polypeptide
MSATTVEGVKRPRFLGKGILPQD

SEQ ID NO: 10016 - protein, 36 aa, Artificial Sequence
  Synthetic polypeptide
MSATTEERPRMDRLIKGHLQATNKAITRSQPRQSLI

SEQ ID NO: 10017 - protein, 165 aa, Artificial Sequence
  Synthetic polypeptide
MGGARLGARNMAGQDAGCGRGGDDYSEDEGDSSVSRAAVEVFGKLKDLNCPFLEGLYITEPKTIQELLCSPSEYRLEILEWMCTRVWPSLQDRFSSLKGVPTEVKIQEMTKLGHELMLCAPDDQELLKEYKMVQLLWKSLAVPERCQHSYPVTQQFHSQLSTQEK

SEQ ID NO: 10018 - protein, 155 aa, Artificial Sequence
  Synthetic polypeptide
MAGQDAGCGRGGDDYSEDEGDSSVSRAAVEVFGKLKDLNCPFLEGLYITEPKTIQELLCSPSEYRLEILEWMCTRVWPSLQDRFSSLKGVPTEVKIQEMTKLGHELMLCAPDDQELLKEYKMVQLLWKSLAVPERCQHSYPVTQQFHSQLSTQEK

SEQ ID NO: 10019 - protein, 99 aa, Artificial Sequence
  Synthetic polypeptide
MGGARLGARNMAGQDAGCGRGGDDYSEDEGDSSVSRAAVEVFGKLKDLNCPFLEGLYITEPKTIQELLCSPSEYRLEILEWMCTRAAGRVIADDGTKVL

SEQ ID NO: 10020 - protein, 89 aa, Artificial Sequence
  Synthetic polypeptide
MAGQDAGCGRGGDDYSEDEGDSSVSRAAVEVFGKLKDLNCPFLEGLYITEPKTIQELLCSPSEYRLEILEWMCTRAAGRVIADDGTKVL

SEQ ID NO: 10021 - protein, 47 aa, Artificial Sequence
  Synthetic polypeptide
MALKVATVAGSAAKAVLGPALLCRPWEFPLWNPEGRRLHVLKGSCQL

SEQ ID NO: 10022 - protein, 343 aa, Artificial Sequence
  Synthetic polypeptide
MAAHGKLRRERGLQAEYETQVKEMRWQLSEQLRCLELQGELRRELLQELAEFMRRRAEVELEYSRGLEKLAERFSSRGGRLGSSREHQSFRKEPSLLSPLHCWAVLLQHTRQQSRESAALSEVLAGPLAQRLSHIAEDVGRLVKKSRDLEQQLQDELLEVVSELQTVAEICVEMELRDEILPRAQNIQSRLDRQTIETEEVNKTLKATLQALLEVVASDDGDVLDSFQTSPSTESLKSTSSDPGSRQAGRRRGQQQETETFYLTKLQEYLSGRSILAKLQAKHEKLQEALQRGDKEEQEVSWTQYTQRKFQKSRQPRPSSQYNQRLFGGDMEKFIQQQFANTT

SEQ ID NO: 10023 - protein, 561 aa, Artificial Sequence
  Synthetic polypeptide
MAAHGKLRRERGLQAEYETQVKEMRWQLSEQLRCLELQGELRRELLQELAEFMRRRAEVELEYSRGLEKLAERFSSRGGRLGSSREHQSFRKEPSLLSPLHCWAVLLQHTRQQSRESAALSEVLAGPLAQRLSHIAEDVGRLVKKSRDLEQQLQDELLEVVSELQTAKKTYQAYHMESVNAEAKLREAERQEEKRAGRSVPTTTAGATEAGPLRKSSLKKGGRLVEKLWPPQRPVAASSCAPVCWLQAGFLVHPPWWGAMCAPSTHQRQAKFMEHKLKCTKARNEYLLSLASVNAAVSNYYLHDVLDLMDCCDTGFHLALGQVLRSYTAAESRTQASQVQGLGSLEEAVEALDPPGDKAKVLEVHATVFCPPLRFDYHPHDGDEVAEICVEMELRDEILPRAQNIQSRLDRQTIETEEVNKTLKATLQALLEVVASDDGDVLDSFQTSPSTESLKSTSSDPGSRQAGRRRGQQQETETFYLTKLQEYLSGRSILAKLQAKHEKLQEALQRGDKEEQEVSWTQYTQRKFQKSRQPRPSSQYNQRLFGGDMEKFIQQQFANTT

SEQ ID NO: 10024 - protein, 521 aa, Artificial Sequence
  Synthetic polypeptide
MAAHGKLRRERGLQAEYETQVKEMRWQLSEQLRCLELQGELRRELLQELAEFMRRRAEVELEYSRGLEKLAERFSSRGGRLGSSREHQSFRKEPSLLSPLHCWAVLLQHTRQQSRESAALSEVLAGPLAQRLSHIAEDVGRLVKKSRDLEQQLQDELLEVVSELQTAKKTYQAYHMESVNAEAKLREAERQEEKRAGRSVPTTTAGATEAGPLRKSSLKKGGRLVEKRQAKFMEHKLKCTKARNEYLLSLASVNAAVSNYYLHDVLDLMDCCDTGFHLALGQVLRSYTAAESRTQASQVQGLGSLEEAVEALDPPGDKAKVLEVHATVFCPPLRFDYHPHDGDEVAEICVEMELRDEILPRAQNIQSRLDRQTIETEEVNKTLKATLQALLEVVASDDGDVLDSFQTSPSTESLKSTSSDPGSRQAGRRRGQQQETETFYLTKLQEYLSGRSILAKLQAKHEKLQEALQRGDKEEQEVSWTQYTQRKFQKSRQPRPSSQYNQRLFGGDMEKFIQQQFANTT

SEQ ID NO: 10025 - protein, 500 aa, Artificial Sequence
  Synthetic polypeptide
MAAHGKLRRERGLQAEYETQVKEMRWQLSEQLRCLELQGELRRELLQELAEFMRRRAEVELEYSRGLEKLAERFSSRGGRLGSSREHQSFRKEPSLLSPLHCWAVLLQHTRQQSRESAALSEVLAGPLAQRLSHIAEDVGRLVKKAKKTYQAYHMESVNAEAKLREAERQEEKRAGRSVPTTTAGATEAGPLRKSSLKKGGRLVEKRQAKFMEHKLKCTKARNEYLLSLASVNAAVSNYYLHDVLDLMDCCDTGFHLALGQVLRSYTAAESRTQASQVQGLGSLEEAVEALDPPGDKAKVLEVHATVFCPPLRFDYHPHDGDEVAEICVEMELRDEILPRAQNIQSRLDRQTIETEEVNKTLKATLQALLEVVASDDGDVLDSFQTSPSTESLKSTSSDPGSRQAGRRRGQQQETETFYLTKLQEYLSGRSILAKLQAKHEKLQEALQRGDKEEQEVSWTQYTQRKFQKSRQPRPSSQYNQRLFGGDMEKFIQQQFANTT

SEQ ID NO: 10026 - protein, 498 aa, Artificial Sequence
  Synthetic polypeptide
MRWQLSEQLRCLELQGELRRELLQELAEFMRRRAEVELEYSRGLEKLAERFSSRGGRLGSSREHQSFRKEPSLLSPLHCWAVLLQHTRQQSRESAALSEVLAGPLAQRLSHIAEDVGRLVKKSRDLEQQLQDELLEVVSELQTAKKTYQAYHMESVNAEAKLREAERQEEKRAGRSVPTTTAGATEAGPLRKSSLKKGGRLVEKRQAKFMEHKLKCTKARNEYLLSLASVNAAVSNYYLHDVLDLMDCCDTGFHLALGQVLRSYTAAESRTQASQVQGLGSLEEAVEALDPPGDKAKVLEVHATVFCPPLRFDYHPHDGDEVAEICVEMELRDEILPRAQNIQSRLDRQTIETEEVNKTLKATLQALLEVVASDDGDVLDSFQTSPSTESLKSTSSDPGSRQAGRRRGQQQETETFYLTKLQEYLSGRSILAKLQAKHEKLQEALQRGDKEEQEVSWTQYTQRKFQKSRQPRPSSQYNQRLFGGDMEKFIQQQFANTT

SEQ ID NO: 10027 - protein, 53 aa, Artificial Sequence
  Synthetic polypeptide
ENSRRAASPAPAPSITRDSLGETWRSLSSNNLQIQRKALPKTSSKISDTYEWI

SEQ ID NO: 10028 - protein, 326 aa, Artificial Sequence
  Synthetic polypeptide
MAAHGKLRRERGLQAEYETQVKEMRWQLSEQLRCLELQGELRRELLQELAEFMRRRAEVELEYSRGLEKLAERFSSRGGRLGSSREHQSFRKEPSLLSPLHCWAVLLQHTRQQSRESAALSEVLAGPLAQRLSHIAEDVGRLVKKSRDLEQQLQDELLEVVSELQTVAEICVEMELRDEILPRAQNIQSRLDRQTIETEEVNKTLKATLQALLEVVASDDGDVLDSFQTSPSTESLKSTSSDPGSRQAGRRRGQQQETETFYLTKLQEYLSGRSILAKLQAKHEKLQEALQRGDKEEQEVSCNNLQIQRKALPKTSSKISDTYEWI

SEQ ID NO: 10029 - protein, 544 aa, Artificial Sequence
  Synthetic polypeptide
MAAHGKLRRERGLQAEYETQVKEMRWQLSEQLRCLELQGELRRELLQELAEFMRRRAEVELEYSRGLEKLAERFSSRGGRLGSSREHQSFRKEPSLLSPLHCWAVLLQHTRQQSRESAALSEVLAGPLAQRLSHIAEDVGRLVKKSRDLEQQLQDELLEVVSELQTAKKTYQAYHMESVNAEAKLREAERQEEKRAGRSVPTTTAGATEAGPLRKSSLKKGGRLVEKLWPPQRPVAASSCAPVCWLQAGFLVHPPWWGAMCAPSTHQRQAKFMEHKLKCTKARNEYLLSLASVNAAVSNYYLHDVLDLMDCCDTGFHLALGQVLRSYTAAESRTQASQVQGLGSLEEAVEALDPPGDKAKVLEVHATVFCPPLRFDYHPHDGDEVAEICVEMELRDEILPRAQNIQSRLDRQTIETEEVNKTLKATLQALLEVVASDDGDVLDSFQTSPSTESLKSTSSDPGSRQAGRRRGQQQETETFYLTKLQEYLSGRSILAKLQAKHEKLQEALQRGDKEEQEVSCNNLQIQRKALPKTSSKISDTYEWI

SEQ ID NO: 10030 - protein, 504 aa, Artificial Sequence
  Synthetic polypeptide
MAAHGKLRRERGLQAEYETQVKEMRWQLSEQLRCLELQGELRRELLQELAEFMRRRAEVELEYSRGLEKLAERFSSRGGRLGSSREHQSFRKEPSLLSPLHCWAVLLQHTRQQSRESAALSEVLAGPLAQRLSHIAEDVGRLVKKSRDLEQQLQDELLEVVSELQTAKKTYQAYHMESVNAEAKLREAERQEEKRAGRSVPTTTAGATEAGPLRKSSLKKGGRLVEKRQAKFMEHKLKCTKARNEYLLSLASVNAAVSNYYLHDVLDLMDCCDTGFHLALGQVLRSYTAAESRTQASQVQGLGSLEEAVEALDPPGDKAKVLEVHATVFCPPLRFDYHPHDGDEVAEICVEMELRDEILPRAQNIQSRLDRQTIETEEVNKTLKATLQALLEVVASDDGDVLDSFQTSPSTESLKSTSSDPGSRQAGRRRGQQQETETFYLTKLQEYLSGRSILAKLQAKHEKLQEALQRGDKEEQEVSCNNLQIQRKALPKTSSKISDTYEWI

SEQ ID NO: 10031 - protein, 483 aa, Artificial Sequence
  Synthetic polypeptide
MAAHGKLRRERGLQAEYETQVKEMRWQLSEQLRCLELQGELRRELLQELAEFMRRRAEVELEYSRGLEKLAERFSSRGGRLGSSREHQSFRKEPSLLSPLHCWAVLLQHTRQQSRESAALSEVLAGPLAQRLSHIAEDVGRLVKKAKKTYQAYHMESVNAEAKLREAERQEEKRAGRSVPTTTAGATEAGPLRKSSLKKGGRLVEKRQAKFMEHKLKCTKARNEYLLSLASVNAAVSNYYLHDVLDLMDCCDTGFHLALGQVLRSYTAAESRTQASQVQGLGSLEEAVEALDPPGDKAKVLEVHATVFCPPLRFDYHPHDGDEVAEICVEMELRDEILPRAQNIQSRLDRQTIETEEVNKTLKATLQALLEVVASDDGDVLDSFQTSPSTESLKSTSSDPGSRQAGRRRGQQQETETFYLTKLQEYLSGRSILAKLQAKHEKLQEALQRGDKEEQEVSCNNLQIQRKALPKTSSKISDTYEWI

SEQ ID NO: 10032 - protein, 481 aa, Artificial Sequence
  Synthetic polypeptide
MRWQLSEQLRCLELQGELRRELLQELAEFMRRRAEVELEYSRGLEKLAERFSSRGGRLGSSREHQSFRKEPSLLSPLHCWAVLLQHTRQQSRESAALSEVLAGPLAQRLSHIAEDVGRLVKKSRDLEQQLQDELLEVVSELQTAKKTYQAYHMESVNAEAKLREAERQEEKRAGRSVPTTTAGATEAGPLRKSSLKKGGRLVEKRQAKFMEHKLKCTKARNEYLLSLASVNAAVSNYYLHDVLDLMDCCDTGFHLALGQVLRSYTAAESRTQASQVQGLGSLEEAVEALDPPGDKAKVLEVHATVFCPPLRFDYHPHDGDEVAEICVEMELRDEILPRAQNIQSRLDRQTIETEEVNKTLKATLQALLEVVASDDGDVLDSFQTSPSTESLKSTSSDPGSRQAGRRRGQQQETETFYLTKLQEYLSGRSILAKLQAKHEKLQEALQRGDKEEQEVSCNNLQIQRKALPKTSSKISDTYEWI

SEQ ID NO: 10033 - protein, 24 aa, Artificial Sequence
  Synthetic polypeptide
FYIRTAPASSMETSRVPTSFWMRG

SEQ ID NO: 10034 - protein, 436 aa, Artificial Sequence
  Synthetic polypeptide
MAGGPGPGEPAAPGAQHFLYEVPPWVMCRFYKVMDALEPADWCQFAALIVRDQTELRLCERSGQRTASVLWPWINRNARVADLVHILTHLQLLRARDIITAWHPPAPLPSPGTTAPRPSSIPAPAEAEAWSPRKLPSSASTFLSPAFPGSQTHSGPELGLVPSPASLWPPPPSPAPSSTKPGPESSVSLLQGARPFPFCWPLCEISRGTHNFSEELKIGEGGFGCVYRAVMRNTVYAVKRLKENADLEWTAVKQSFLTEVEQLSRFRHPNIVDFAGYCAQNGFYCLVYGFLPNGSLEDRLHCQTQACPPLSWPQRLDILLGTARAIQFLHQDSPSLIHGDIKSSNVLLDERLTPKLGDFGLARFSRFAGSSPSQSSMVARTQTVRGTLAYLPEEYIKTGRLAVDTDTFSFGVVVLETLAGQRAVKTHGARTKYLKK

SEQ ID NO: 10035 - protein, 462 aa, Artificial Sequence
  Synthetic polypeptide
MAGGPGPGEPAAPGAQHFLYEVPPWVMCRFYKVMDALEPADWCQFGGWRRAAGGREARGLLAPTPDAPRPAAALIVRDQTELRLCERSGQRTASVLWPWINRNARVADLVHILTHLQLLRARDIITAWHPPAPLPSPGTTAPRPSSIPAPAEAEAWSPRKLPSSASTFLSPAFPGSQTHSGPELGLVPSPASLWPPPPSPAPSSTKPGPESSVSLLQGARPFPFCWPLCEISRGTHNFSEELKIGEGGFGCVYRAVMRNTVYAVKRLKENADLEWTAVKQSFLTEVEQLSRFRHPNIVDFAGYCAQNGFYCLVYGFLPNGSLEDRLHCQTQACPPLSWPQRLDILLGTARAIQFLHQDSPSLIHGDIKSSNVLLDERLTPKLGDFGLARFSRFAGSSPSQSSMVARTQTVRGTLAYLPEEYIKTGRLAVDTDTFSFGVVVLETLAGQRAVKTHGARTKYLKK

SEQ ID NO: 10036 - protein, 16 aa, Artificial Sequence
  Synthetic polypeptide
QRAVKTHGARTKYLKK

SEQ ID NO: 10037 - protein, 445 aa, Artificial Sequence
  Synthetic polypeptide
MAGGPGPGEPAAPGAQHFLYEVPPWVMCRFYKVMDALEPADWCQFAALIVRDQTELRLCERSGQRTASVLWPWINRNARVADLVHILTHLQLLRARDIITAWHPPAPLPSPGTTAPRPSSIPAPAEAEAWSPRKLPSSASTFLSPAFPGSQTHSGPELGLVPSPASLWPPPPSPAPSSTKPGPESSVSLLQGARPFPFCWPLCEISRGTHNFSEELKIGEGGFGCVYRAVMRNTVYAVKRLKENADLEWTAVKQSFLTEVEQLSRFRHPNIVDFAGYCAQNGFYCLVYGFLPNGSLEDRLHCQTQACPPLSWPQRLDILLGTARAIQFLHQDSPSLIHGDIKSSNVLLDERLTPKLGDFGLARFSRFAGSSPSQSSMVARTQTVRGTLAYLPEEYIKTGRLAVDTDTFSFGVVVLETLAGQRAVKTHGARTKYLGPEHHWPTVGV

SEQ ID NO: 10038 - protein, 471 aa, Artificial Sequence
  Synthetic polypeptide
MAGGPGPGEPAAPGAQHFLYEVPPWVMCRFYKVMDALEPADWCQFGGWRRAAGGREARGLLAPTPDAPRPAAALIVRDQTELRLCERSGQRTASVLWPWINRNARVADLVHILTHLQLLRARDIITAWHPPAPLPSPGTTAPRPSSIPAPAEAEAWSPRKLPSSASTFLSPAFPGSQTHSGPELGLVPSPASLWPPPPSPAPSSTKPGPESSVSLLQGARPFPFCWPLCEISRGTHNFSEELKIGEGGFGCVYRAVMRNTVYAVKRLKENADLEWTAVKQSFLTEVEQLSRFRHPNIVDFAGYCAQNGFYCLVYGFLPNGSLEDRLHCQTQACPPLSWPQRLDILLGTARAIQFLHQDSPSLIHGDIKSSNVLLDERLTPKLGDFGLARFSRFAGSSPSQSSMVARTQTVRGTLAYLPEEYIKTGRLAVDTDTFSFGVVVLETLAGQRAVKTHGARTKYLGPEHHWPTVGV

SEQ ID NO: 10039 - protein, 25 aa, Artificial Sequence
  Synthetic polypeptide
QRAVKTHGARTKYLGPEHHWPTVGV

SEQ ID NO: 10040 - protein, 24 aa, Artificial Sequence
  Synthetic polypeptide
FYIRTAPASSMETSRVPTSFWMRG

SEQ ID NO: 10041 - protein, 542 aa, Artificial Sequence
  Synthetic polypeptide
MGRRGSAPGNGRTLRGCERGGRRRRSADSVMAEQVALSRTQVCGILREELFQGDAFHQSDTHIFIIMGASGDLAKKKIYPTIWWLFRDGLLPENTFIVGYARSRLTVADIRKQSEPFFKATPEEKLKLEDFFARNSYVAGQYDDAASYQRLNSHMNALHLGSQANRLFYLALPPTVYEAVTKNIHESCMSQIGWNRIIVEKPFGRDLQSSDRLSNHISSLFREDQIYRIDHYLGKEMVQNLMVLRFANRIFGPIWNRDNIACVILTFKEPFGTEGRGGYFDEFGIIRDVMQNHLLQMLCLVAMEKPASTNSDDVRDEKVKVLKCISEVQANNVVLGQYVGNPDGEGEATKGYLDDPTVPRGSTTATFAAVVLYVENERWDGVPFILRCGKALNERKAEVRLQFHDVAGDIFHQQCKRNELVIRVQPNEAVYTKMMTKKPGMFFNPEESELDLTYGNRYKNVKLPDAYERLILDVFCGSQMHFVRSDELREAWRIFTPLLHQIELEKPKPIPYIYGRYFLKHEGKHIIRDNRAHQETTLQEKQ

SEQ ID NO: 10042 - protein, 558 aa, Artificial Sequence
  Synthetic polypeptide
MAEQVALSRTQVCGILREELFQGDAFHQSDTHIFIIMGASGDLAKKKIYPTIWWLFRDGLLPENTFIVGYARSRLTVADIRKQSEPFFKATPEEKLKLEDFFARNSYVAGQYDDAASYQRLNSHMNALHLGSQANRLFYLALPPTVYEAVTKNIHESCMSQIGWNRIIVEKPFGRDLQSSDRLSNHISSLFREDQIYRIDHYLGKEMVQNLMVLRFANRIFGPIWNRDNIACVILTFKEPFGTEGRGGYFDEFGIIRGPGRQGGSGSESCSLSLGSLVWGPHALEPGEQGGELRRALASSVPRDVMQNHLLQMLCLVAMEKPASTNSDDVRDEKVKVLKCISEVQANNVVLGQYVGNPDGEGEATKGYLDDPTVPRGSTTATFAAVVLYVENERWDGVPFILRCGKALNERKAEVRLQFHDVAGDIFHQQCKRNELVIRVQPNEAVYTKMMTKKPGMFFNPEESELDLTYGNRYKNVKLPDAYERLILDVFCGSQMHFVRSDELREAWRIFTPLLHQIELEKPKPIPYIYGRYFLKHEGKHIIRDNRAHQETTLQEKQ

SEQ ID NO: 10043 - protein, 512 aa, Artificial Sequence
  Synthetic polypeptide
MAEQVALSRTQVCGILREELFQGDAFHQSDTHIFIIMGASGDLAKKKIYPTIWWLFRDGLLPENTFIVGYARSRLTVADIRKQSEPFFKATPEEKLKLEDFFARNSYVAGQYDDAASYQRLNSHMNALHLGSQANRLFYLALPPTVYEAVTKNIHESCMSQIGWNRIIVEKPFGRDLQSSDRLSNHISSLFREDQIYRIDHYLGKEMVQNLMVLRFANRIFGPIWNRDNIACVILTFKEPFGTEGRGGYFDEFGIIRDVMQNHLLQMLCLVAMEKPASTNSDDVRDEKVKVLKCISEVQANNVVLGQYVGNPDGEGEATKGYLDDPTVPRGSTTATFAAVVLYVENERWDGVPFILRCGKALNERKAEVRLQFHDVAGDIFHQQCKRNELVIRVQPNEAVYTKMMTKKPGMFFNPEESELDLTYGNRYKNVKLPDAYERLILDVFCGSQMHFVRSDELREAWRIFTPLLHQIELEKPKPIPYIYGRYFLKHEGKHIIRDNRAHQETTLQEKQ

SEQ ID NO: 10044 - protein, 188 aa, Artificial Sequence
  Synthetic polypeptide
MAVQVVQAVQAVHLESDAFLVCLNHALSTEKEEVMGLCIGELNDDTSRSDSKFAYTGTEMRTVAEKVDAVRIVHIHSVIILRRSDKRKDRVEISPEQLSAASTEAERLAELTGRPMRVVGWYHSHPHITVWPSHVDVRTQAMYQMMDQGFVGLIFSCFIEDKNTKTGRVLYTCFQSIQAQKSSEKYPE

SEQ ID NO: 10045 - protein, 187 aa, Artificial Sequence
  Synthetic polypeptide
MAVQVVQAVQAVHLESDAFLVCLNHALSTEKEEVMGLCIGELNDDTRSDSKFAYTGTEMRTVAEKVDAVRIVHIHSVIILRRSDKRKDRVEISPEQLSAASTEAERLAELTGRPMRVVGWYHSHPHITVWPSHVDVRTQAMYQMMDQGFVGLIFSCFIEDKNTKTGRVLYTCFQSIQAQKSSEKYPE

SEQ ID NO: 10046 - protein, 163 aa, Artificial Sequence
  Synthetic polypeptide
MAVQVVQAVQAVHLESDAFLVCLNHALSTEKEEVMGLCIGEVDAVRIVHIHSVIILRRSDKRKDRVEISPEQLSAASTEAERLAELTGRPMRVVGWYHSHPHITVWPSHVDVRTQAMYQMMDQGFVGLIFSCFIEDKNTKTGRVLYTCFQSIQAQKSSEKYPE

SEQ ID NO: 10047 - protein, 187 aa, Artificial Sequence
  Synthetic polypeptide
MAVQVVQAVQAVHLESDAFLVCLNHALSTEKEEVMGLCIGEVSSPSRSDSKFAYTGTEMRTVAEKVDAVRIVHIHSVIILRRSDKRKDRVEISPEQLSAASTETHRLAELTGRPMRVVGWYHSHPHITVWPSHVDVRTQAMYQMMDQGFVGLIFSCFIEDKNTKTGRVLYTCFQSIQAQKSSEKYPE

SEQ ID NO: 10048 - protein, 135 aa, Artificial Sequence
  Synthetic polypeptide
MAPQPMIHTQQGLRTSSPSTPSPEHQEDVDSFMKQPGNETADTVLKKLDEQYQKYKFMELNLAQKKRRLKGQIPEIKQTLEILKYMQKKKESTNSMETRFLLADNLYCKASVPPTDKMCLWLGLCQLRKPEPSFL

SEQ ID NO: 10049 - protein, 140 aa, Artificial Sequence
  Synthetic polypeptide
MAAVKDSCGKGEMATGNGRRLHLGIPEAVFVEDVDSFMKQPGNETADTVLKKLDEQYQKYKFMELNLAQKKRRLKGQIPEIKQTLEILKYMQKKKESTNSMETRFLLADNLYCKASVPPTDKMCLWLGLCQLRKPEPSFL

SEQ ID NO: 10050 - protein, 367 aa, Artificial Sequence
  Synthetic polypeptide
MWYHRLSHLHSRLQDLLKGGVIYPALPQPNFKSLLPLAVHWHHTASKSLTCAWQQHEDHFELKYANTVMRFDYVWLRDHCRSASCYNSKTHQRSLDTASVDLCIKPKTIRLDETTLFFTWPDGHVTKYDLNWLVKNSYEGQKQKVIQPRILWNAEIYQQAQVPSVDCQSFLETNEGLKKFLQNFLLYGIAFVENVPPTQEHTEKLAERISLIRETIYGRMWYFTSDFSRGDTAYTKLALDRHTDTTYFQEPCGIQVFHCLKHEGTGGRTLLVDGFYAAEQVLQKAPEEFELLSKVPLKHEYIEDVGECHNHMIGIGPVLNIYPWNKELYLIRSQRGARDFFFPSLVFLPNHTRGRQRHRKRVAEKSH

SEQ ID NO: 10051 - protein, 320 aa, Artificial Sequence
  Synthetic polypeptide
MWYHRLSHLHSRLQDLLKGGVIYPALPQPNFKSLLPLAVHWHHTASKSLTCAWQQHEDHFELKYANTVMRFDYVWLRDHCRSASCYNSKTHQRSLDTASVDLCIKPKTIRLDETTLFFTWPDGHVTKYDLNWLVKNSYEGQKQKVIQPRILWNAEIYQQAQVPSVDCQSFLETNEGLKKFLQNFLLYGIAFVENVPPTQEHTEKLAERISLIRETIYGRMWYFTSDFSRGDTAYTKLALDRHTDTTYFQEPCGDMDGAGNHHSQQTITRTTNQTPHVLTHRWELNNENTWTQEGEHHTLGTVVGWGEGGGIASGDIPNAR

SEQ ID NO: 10052 - protein, 62 aa, Artificial Sequence
  Synthetic polypeptide
MWYHRLSHLHSRLQDLLKGGVIYPALPQPNFKSLLPLAVHWHHTASKSLTCAWQQHEDHFEG

SEQ ID NO: 10053 - protein, 51 aa, Artificial Sequence
  Synthetic polypeptide
MGTPWRPPSRRPWRWPTGCTRKTCGPPTWSLERTRSCLGDRVRLHLKKRKG

SEQ ID NO: 10054 - protein, 47 aa, Artificial Sequence
  Synthetic polypeptide
METAKQKALEVANRLYQKDLRAPDVVIGADTIVPGRQSETPSQEKER

SEQ ID NO: 10055 - protein, 105 aa, Artificial Sequence
  Synthetic polypeptide
MVLCPVIGKLLHKRVVLASASPRRQEILSNAGLRFEVVPSKFKEKLDKASFATPYGYAMETAKQKALEVANRLYQKDLRAPDVVIGADTIVPGRQSETPSQEKER

SEQ ID NO: 10056 - protein, 41 aa, Artificial Sequence
  Synthetic polypeptide
MGTPWRPPSRRPWRWPTGCTRKTCGPPTWSLERTRSWRRLQ

SEQ ID NO: 10057 - protein, 61 aa, Artificial Sequence
  Synthetic polypeptide
METAKQKALEVANRLYQKDLRAPDVVIGADTIVAEVAVSQDRATALQPGRQSETPSQEKER

SEQ ID NO: 10058 - protein, 119 aa, Artificial Sequence
  Synthetic polypeptide
MVLCPVIGKLLHKRVVLASASPRRQEILSNAGLRFEVVPSKFKEKLDKASFATPYGYAMETAKQKALEVANRLYQKDLRAPDVVIGADTIVAEVAVSQDRATALQPGRQSETPSQEKER

SEQ ID NO: 10059 - protein, 41 aa, Artificial Sequence
  Synthetic polypeptide
MGTPWRPPSRRPWRWPTGCTRKTCGPPTWSLERTRSCNSGG

SEQ ID NO: 10060 - protein, 66 aa, Artificial Sequence
  Synthetic polypeptide
METAKQKALEVANRLYQKDLRAPDVVIGADTIVQLGRLRQENHLNPGGGGCSEPRPCHCTPAWATE

SEQ ID NO: 10061 - protein, 124 aa, Artificial Sequence
  Synthetic polypeptide
MVLCPVIGKLLHKRVVLASASPRRQEILSNAGLRFEVVPSKFKEKLDKASFATPYGYAMETAKQKALEVANRLYQKDLRAPDVVIGADTIVQLGRLRQENHLNPGGGGCSEPRPCHCTPAWATE

SEQ ID NO: 10062 - protein, 168 aa, Artificial Sequence
  Synthetic polypeptide
MATRVEEAARGRGGGAEEATEAGRGGRRRSPRQKFEIGTMEEAGICGLGVKADMLCNSQSNDILQHQGSNCGGTSNKHSLEEDEGSDFITENRNLVSPAYCTQESREEIPGGEARTDPPDGQQDSECNRNKEKTLGKEVLLLMQALNTLSTPEEKLAALCKKYADLMP

SEQ ID NO: 10063 - protein, 231 aa, Artificial Sequence
  Synthetic polypeptide
MVFSVRQCGHVGRTEEVLLTFKIFLVIICLHVVLVTSLEEDTDNSSLSPPPDEETGACSDVTLSLLPSNETEKTKITIVKTFNASGVKPQRNICNLSSICNDSAFFRGEIMFQYDKESTVPQNQHITNGTLTGVLSLSELKRSELNKTLQTLSETYFIMCATAEAQSTLNCTFTIKLNNTMNACAVIAALERVKIRPMEHCCCSVRIPCPSSPEELEKLQCIFYILLQSDK

SEQ ID NO: 10064 - protein, 247 aa, Artificial Sequence
  Synthetic polypeptide
MVFSVRQCGHVGRTEEVLLTFKIFLVIICLHVVLVTSLEEDTDNSSLSPPPAKLSVVSFAPSSNGTPEVETTSLNDVTLSLLPSNETEKTKITIVKTFNASGVKPQRNICNLSSICNDSAFFRGEIMFQYDKESTVPQNQHITNGTLTGVLSLSELKRSELNKTLQTLSETYFIMCATAEAQSTLNCTFTIKLNNTMNACAVIAALERVKIRPMEHCCCSVRIPCPSSPEELEKLQCIFYILLQSDK

SEQ ID NO: 10065 - protein, 223 aa, Artificial Sequence
  Synthetic polypeptide
MVFSVRQCGHVGRTEEVLLTFKIFLVIICLHVVLVTSLEEDTDNSSLSPPPDVTLSLLPSNETEKTKITIVKTFNASGVKPQRNICNLSSICNDSAFFRGEIMFQYDKESTVPQNQHITNGTLTGVLSLSELKRSELNKTLQTLSETYFIMCATAEAQSTLNCTFTIKLNNTMNACAVIAALERVKIRPMEHCCCSVRIPCPSSPEELEKLQCIFYILLQSDK

SEQ ID NO: 10066 - protein, 231 aa, Artificial Sequence
  Synthetic polypeptide
MVFSVRQCGHVGRTEEVLLTFKIFLVIICLHVVLVTSLEEDTDNSSLSPPPEVETTSLNDVTLSLLPSNETEKTKITIVKTFNASGVKPQRNICNLSSICNDSAFFRGEIMFQYDKESTVPQNQHITNGTLTGVLSLSELKRSELNKTLQTLSETYFIMCATAEAQSTLNCTFTIKLNNTMNACAVIAALERVKIRPMEHCCCSVRIPCPSSPEELEKLQCIFYILLQSDK

SEQ ID NO: 10067 - protein, 244 aa, Artificial Sequence
  Synthetic polypeptide
MVFSVRQCGHVGRTEEVLLTFKIFLVIICLHVVLVTSLEEDTDNSSLSPPPAKLSVVSFAPSSNEVETTSLNDVTLSLLPSNETEKTKITIVKTFNASGVKPQRNICNLSSICNDSAFFRGEIMFQYDKESTVPQNQHITNGTLTGVLSLSELKRSELNKTLQTLSETYFIMCATAEAQSTLNCTFTIKLNNTMNACAVIAALERVKIRPMEHCCCSVRIPCPSSPEELEKLQCIFYILLQSDK

SEQ ID NO: 10068 - protein, 217 aa, Artificial Sequence
  Synthetic polypeptide
MVFSVRQCGHVGRTEEVLLTFKIFLVIICLHVVLVTSLEEDTDNSSLSPPPEVETTSLNDVTLSLLPSNETGVKPQRNICNLSSICNDSAFFRGEIMFQYDKESTVPQNQHITNGTLTGVLSLSELKRSELNKTLQTLSETYFIMCATAEAQSTLNCTFTIKLNNTMNACAVIAALERVKIRPMEHCCCSVRIPCPSSPEELEKLQCIFYILLQSDK

SEQ ID NO: 10069 - protein, 225 aa, Artificial Sequence
  Synthetic polypeptide
MVFSVRQCGHVGRTEEVLLTFKIFLVIICLHVVLVTSLEEDTDNSSLSPPPAKLSVVSFAPSSNGTPDVTLSLLPSNETGVKPQRNICNLSSICNDSAFFRGEIMFQYDKESTVPQNQHITNGTLTGVLSLSELKRSELNKTLQTLSETYFIMCATAEAQSTLNCTFTIKLNNTMNACAVIAALERVKIRPMEHCCCSVRIPCPSSPEELEKLQCIFYILLQSDK

SEQ ID NO: 10070 - protein, 233 aa, Artificial Sequence
  Synthetic polypeptide
MVFSVRQCGHVGRTEEVLLTFKIFLVIICLHVVLVTSLEEDTDNSSLSPPPAKLSVVSFAPSSNGTPEVETTSLNDVTLSLLPSNETGVKPQRNICNLSSICNDSAFFRGEIMFQYDKESTVPQNQHITNGTLTGVLSLSELKRSELNKTLQTLSETYFIMCATAEAQSTLNCTFTIKLNNTMNACAVIAALERVKIRPMEHCCCSVRIPCPSSPEELEKLQCIFYILLQSDK

SEQ ID NO: 10071 - protein, 674 aa, Artificial Sequence
  Synthetic polypeptide
MVEAIVEFDYQAQHDDELTISVGEIITNIRKEDGGWWEGQINGRRGLFPDNFVREIKKEMKKDPLTNKAPEKPLHEVPSGNSLLSSETILRTNKRGERRRRRCQVAFSYLPQNDDELELKVGDIIEVVGEVEEGWWEGVLNGKTGMFPSNFIKELSGESDELGISQDEQLSKSSLRETTGSESDGGDSSSTKSEGANGTVATAAIQPKKVKGVGFGDIFKDKPIKLRPRSIEVENDFLPVEKTIGKKLPATTATPDSSKTEMDSRTKSKDYCKVIFPYEAQNDDELTIKEGDIVTLINKDCIDVGWWEGELNGRRGVFPDNFVKLLPPDFEKEGNRPKKPPPPSAPVIKQGAGTTERKHEIKKIPPERPEMLPNRTEEKERPEREPKLDLQKPSVPAIPPKKPRPPKTNSLSRPGALPPRRPERPVGPLTHTRGDSPKIDLAGSSLSGILDKDLSDRSNDIDLEGFDSVVSSTEKLSHPTTSRPKATGRRPPSQSLTSSSLSSPDIFDSPSPEEDKEEHISLAHRGVDASKKTSKTVTISQVSDNKASLPPKPGTMAAGGGGPAPLSSAAPSPLSSSLGTAGHRANSPSLFGTEGKPKMEPAASSQAAVEELRTQVRELRSIIETMKDQQKKMAISSLSCQMKQLACIEVPVMYEEDVGNLEAQDFTLSKMFSP

SEQ ID NO: 10072 - protein, 436 aa, Artificial Sequence
  Synthetic polypeptide
MGEETIGKKLPATTATPDSSKTEMDSRTKSKDYCKVIFPYEAQNDDELTIKEGDIVTLINKDCIDVGWWEGELNGRRGVFPDNFVKLLPPDFEKEGNRPKKPPPPSAPVIKQGAGTTERKHEIKKIPPERPEMLPNRTEEKERPEREPKLDLQKPSVPAIPPKKPRPPKTNSLSRPGALPPRRPERPVGPLTHTRGDSPKIDLAGSSLSGILDKDLSDRSNDIDLEGFDSVVSSTEKLSHPTTSRPKATGRRPPSQSLTSSSLSSPDIFDSPSPEEDKEEHISLAHRGVDASKKTSKTVTISQVSDNKASLPPKPGTMAAGGGGPAPLSSAAPSPLSSSLGTAGHRANSPSLFGTEGKPKMEPAASSQAAVEELRTQVRELRSIIETMKDQQKKMAISSLSCQMKQLACIEVPVMYEEDVGNLEAQDFTLSKMFSP

SEQ ID NO: 10073 - protein, 637 aa, Artificial Sequence
  Synthetic polypeptide
MEVSAAKAPSAADLSEIEIKKEMKKDPLTNKAPEKPLHEVPSGNSLLSSETILRTNKRGERRRRRCQVAFSYLPQNDDELELKVGDIIEVVGEVEEGWWEGVLNGKTGMFPSNFIKELSGESDELGISQDEQLSKSSLRETTGSESDGGDSSSTKSEGANGTVATAAIQPKKVKGVGFGDIFKDKPIKLRPRSIEVENDFLPVEKTIGKKLPATTATPDSSKTEMDSRTKSKDYCKVIFPYEAQNDDELTIKEGDIVTLINKDCIDVGWWEGELNGRRGVFPDNFVKLLPPDFEKEGNRPKKPPPPSAPVIKQGAGTTERKHEIKKIPPERPEMLPNRTEEKERPEREPKLDLQKPSVPAIPPKKPRPPKTNSLSRPGALPPRRPERPVGPLTHTRGDSPKIDLAGSSLSGILDKDLSDRSNDIDLEGFDSVVSSTEKLSHPTTSRPKATGRRPPSQSLTSSSLSSPDIFDSPSPEEDKEEHISLAHRGVDASKKTSKTVTISQVSDNKASLPPKPGTMAAGGGGPAPLSSAAPSPLSSSLGTAGHRANSPSLFGTEGKPKMEPAASSQAAVEELRTQVRELRSIIETMKDQQKKMAISSLSCQMKQLACIEVPVMYEEDVGNLEAQDFTLSKMFSP

SEQ ID NO: 10074 - protein, 413 aa, Artificial Sequence
  Synthetic polypeptide
MDSRTKSKDYCKVIFPYEAQNDDELTIKEGDIVTLINKDCIDVGWWEGELNGRRGVFPDNFVKLLPPDFEKEGNRPKKPPPPSAPVIKQGAGTTERKHEIKKIPPERPEMLPNRTEEKERPEREPKLDLQKPSVPAIPPKKPRPPKTNSLSRPGALPPRRPERPVGPLTHTRGDSPKIDLAGSSLSGILDKDLSDRSNDIDLEGFDSVVSSTEKLSHPTTSRPKATGRRPPSQSLTSSSLSSPDIFDSPSPEEDKEEHISLAHRGVDASKKTSKTVTISQVSDNKASLPPKPGTMAAGGGGPAPLSSAAPSPLSSSLGTAGHRANSPSLFGTEGKPKMEPAASSQAAVEELRTQVRELRSIIETMKDQQKKMAISSLSCQMKQLACIEVPVMYEEDVGNLEAQDFTLSKMFSP

SEQ ID NO: 10075 - protein, 654 aa, Artificial Sequence
  Synthetic polypeptide
LTNKAPEKPLHEVPSGNSLLSSETILRTNKRGERRRRRCQVAFSYLPQNDDELELKVGDIIEVVGEVEEGWWEGVLNGKTGMFPSNFIKELSGESDELGISQDEQLSKSRPEGLPPASLLPFPAHGAKGKTTFEGTILYRAAPGKTEGHRRYYSLRETTGSESDGGDSSSTKSEGANGTVATAAIQPKKVKGVGFGDIFKDKPIKLRPRSIEVENDFLPVEKTIGKKLPATTATPDSSKTEMDSRTKSKDYCKVIFPYEAQNDDELTIKEGDIVTLINKDCIDVGWWEGELNGRRGVFPDNFVKLLPPDFEKEGNRPKKPPPPSAPVIKQGAGTTERKHEIKKIPPERPEMLPNRTEEKERPEREPKLDLQKPSVPAIPPKKPRPPKTNSLSRPGALPPRRPERPVGPLTHTRGDSPKIDLAGSSLSGILDKDLSDRSNDIDLEGFDSVVSSTEKLSHPTTSRPKATGRRPPSQSLTSSSLSSPDIFDSPSPEEDKEEHISLAHRGVDASKKTSKTVTISQVSDNKASLPPKPGTMAAGGGGPAPLSSAAPSPLSSSLGTAGHRANSPSLFGTEGKPKMEPAASSQAAVEELRTQVRELRSIIETMKDQQKKMAISSLSCQMKQLACIEVPVMYEEDVGNLEAQDFTLSKMFSP

SEQ ID NO: 10076 - protein, 529 aa, Artificial Sequence
  Synthetic polypeptide
MPLAQLADPWQKMAVESPSDSAENGQQIMDEPMGEEEINPQTEEVSIKEIAITHHVKEGHEKADPSQFELLKVLGQGSFGKVFLVKKISGSDARQLYAMKVLKKATLKVRDRVRTKMERDILVEVNHPFIVKLHYAFQTEGKLYLILDFLRGGDLFTRLSKEVMFTEEDVKFYLAELALALDHLHSLGIIYRDLKPENILLDEEGHIKLTDFGLSKESIDHEKKAYSFCGTVEYMAPEVVNRRGHTQSADWWSFGVLMFEMLTGTLPFQGKDRKETMTMILKAKLGMPQFLSPEAQSLLRMLFKRNPANRLGAGPDGVEEIKRHSFFSTIDWNKLYRREIHPPFKPATGRPEDTFYFDPEFTAKTPKDSPGIPPSANAHQLFRGFSFVAITSDDESQAMQTVGVHSIVQQLHRNSIQFTDGYEVKEDIGVGSYSVCKRCIHKATNMEFAVKIIDKSKRDPTEEIEILLRYGQHPNIITLKDSQLLWRLRWEDCFSPAGQDLSEQLSHHCTPASAAEQDPVSKTKTKQNK

SEQ ID NO: 10077 - protein, 501 aa, Artificial Sequence
  Synthetic polypeptide
MDEPMGEEEINPQTEEVSIKEIAITHHVKEGHEKADPSQFELLKVLGQGSFGKVFLVKKISGSDARQLYAMKVLKKATLKVRDRVRTKMERDILVEVNHPFIVKLHYAFQTEGKLYLILDFLRGGDLFTRLSKEVMFTEEDVKFYLAELALALDHLHSLGIIYRDLKPENILLDEEGHIKLTDFGLSKESIDHEKKAYSFCGTVEYMAPEVVNRRGHTQSADWWSFGVLMFEMLTGTLPFQGKDRKETMTMILKAKLGMPQFLSPEAQSLLRMLFKRNPANRLGAGPDGVEEIKRHSFFSTIDWNKLYRREIHPPFKPATGRPEDTFYFDPEFTAKTPKDSPGIPPSANAHQLFRGFSFVAITSDDESQAMQTVGVHSIVQQLHRNSIQFTDGYEVKEDIGVGSYSVCKRCIHKATNMEFAVKIIDKSKRDPTEEIEILLRYGQHPNIITLKDSQLLWRLRWEDCFSPAGQDLSEQLSHHCTPASAAEQDPVSKTKTKQNK

SEQ ID NO: 10078 - protein, 499 aa, Artificial Sequence
  Synthetic polypeptide
MFKFLSFRVRSIQEEVSIKEIAITHHVKEGHEKADPSQFELLKVLGQGSFGKVFLVKKISGSDARQLYAMKVLKKATLKVRDRVRTKMERDILVEVNHPFIVKLHYAFQTEGKLYLILDFLRGGDLFTRLSKEVMFTEEDVKFYLAELALALDHLHSLGIIYRDLKPENILLDEEGHIKLTDFGLSKESIDHEKKAYSFCGTVEYMAPEVVNRRGHTQSADWWSFGVLMFEMLTGTLPFQGKDRKETMTMILKAKLGMPQFLSPEAQSLLRMLFKRNPANRLGAGPDGVEEIKRHSFFSTIDWNKLYRREIHPPFKPATGRPEDTFYFDPEFTAKTPKDSPGIPPSANAHQLFRGFSFVAITSDDESQAMQTVGVHSIVQLHRNSIQFTDGYEVKEDIGVGSYSVCKRCIHKATNMEFAVKIIDKSKRDPTEEIEILLRYGQHPNIITLKDSQLLWRLRWEDCFSPAGQDLSEQLSHHCTPASAAEQDPVSKTKTKQNK

SEQ ID NO: 10079 - protein, 500 aa, Artificial Sequence
  Synthetic polypeptide
MDEPMGEEEINPQTEEVSIKEIAITHHVKEGHEKADPSQFELLKVLGQGSFGKVFLVKKISGSDARQLYAMKVLKKATLKVRDRVRTKMERDILVEVNHPFIVKLHYAFQTEGKLYLILDFLRGGDLFTRLSKEVMFTEEDVKFYLAELALALDHLHSLGIIYRDLKPENILLDEEGHIKLTDFGLSKESIDHEKKAYSFCGTVEYMAPEVVNRRGHTQSADWWSFGVLMFEMLTGTLPFQGKDRKETMTMILKAKLGMPQFLSPEAQSLLRMLFKRNPANRLGAGPDGVEEIKRHSFFSTIDWNKLYRREIHPPFKPATGRPEDTFYFDPEFTAKTPKDSPGIPPSANAHQLFRGFSFVAITSDDESQAMQTVGVHSIVQLHRNSIQFTDGYEVKEDIGVGSYSVCKRCIHKATNMEFAVKIIDKSKRDPTEEIEILLRYGQHPNIITLKDSQLLWRLRWEDCFSPAGQDLSEQLSHHCTPASAAEQDPVSKTKTKQNK

SEQ ID NO: 10080 - protein, 37 aa, Artificial Sequence
  Synthetic polypeptide
ARPDPARPFPPRACGLPACPGSGSNQAAPVQPPPRAP

SEQ ID NO: 10081 - protein, 155 aa, Artificial Sequence
  Synthetic polypeptide
MSPLSAARAALRVYAVGAAVILAQLLRRCRGGFLEPVFPPRPDRVAIVTGGTDGIGYSTAKHLARLGMHVIIAGNNDSKAKQVVSKIKEETLNDKGTWMELEIIVLSKLIQEHKSKYRMFSLIIGSSTLSKGGLKERNNRHWGLLEGEGWEERED

SEQ ID NO: 10082 - protein, 88 aa, Artificial Sequence
  Synthetic polypeptide
MHVIIAGNNDSKAKQVVSKIKEETLNDKGTWMELEIIVLSKLIQEHKSKYRMFSLIIGSSTLSKGGLKERNNRHWGLLEGEGWEERED

SEQ ID NO: 10083 - protein, 121 aa, Artificial Sequence
  Synthetic polypeptide
MPVFPPRPDRVAIVTGGTDGIGYSTAKHLARLGMHVIIAGNNDSKAKQVVSKIKEETLNDKGTWMELEIIVLSKLIQEHKSKYRMFSLIIGSSTLSKGGLKERNNRHWGLLEGEGWEERED

SEQ ID NO: 10084 - protein, 1020 aa, Artificial Sequence
  Synthetic polypeptide
MAPVHGDDCEIGASALSDSGSFVSSRARREKKSKKGRQEALERLKKAKAGEKYKYEVEDFTGVYEEVDEEQYSKLVQARQDDDWIVDDDGIGYVEDGREIFDDDLEDDALDADEKGKDGKARNKDKRNVKKLAVTKPNNIKSMFIACAGKKTADKAVDLSKDGLLGDILQDLNTETPQITPPPVMILKKKRSIGASPNPFSVHTATAVPSGKIASPVSRKEPPLTPVPLKRAEFAGDDVQVESTEEEQESGAMEFEDGDFDEPMEVEEVDLEPMAAKAWDKESEPAEEVKQEADSGKGTVSYLGSFLPDVSCWDIDQEGDSSFSVQEVQVDSSHLPLVKGADEEQVFHFYWLDAYEDQYNQPGVVFLFGKVWIESAETHVSCCVMVKNIERTLYFLPREMKIDLNTGKETGTPISMKDVYEEFDEKIATKYKIMKFKSKPVEKNYAFEIPDVPEKSEYLEVKYSAEMPQLPQDLKGETFSHVFGTNTSSLELFLMNRKIKGPCWLEVKSPQLLNQPVSWCKVEAMALKPDLVNVIKDVSPPPLVVMAFSMKTMQNAKNHQNEIIAMAALVHHSFALDKAAPKPPFQSHFCVVSKPKDCIFPYAFKEVIEKKNVKVEVAATERTLLGFFLAKVHKIDPDIIVGHNIYGFELEVLLQRINVCKAPHWSKIGRLKRSNMPKLGGRSGFGERNATCGRMICDVEISAKELIRCKSYHLSELVQQILKTERVVIPMENIQNMYSESSQLLYLLEHTWKDAKFILQIMCELNVLPLALQITNIAGNIMSRTLMGGRSERNEFLLLHAFYENNYIVPDKQIFRKPQQKLGDEDEEIDGDTNKYKKGRKKAAYAGGLVLDPKVGFYDKFILLLDFNSLYPSIIQEFNICFTTVQRVASEAQKVTEDGEQEQIPELPDPSLEMGILPREIRKLVERRKQVKQLMKQQDLNPDLILQYDIRQKALKLTANSMYGCLGFSYSRFYAKPLAALVTYKGRESQQDQPLLLLSPTQHEDDEDEDPYDDLLPLNE

SEQ ID NO: 10085 - protein, 1014 aa, Artificial Sequence
  Synthetic polypeptide
MAPVHGDDSLSDSGSFVSSRARREKKSKKGRQEALERLKKAKAGEKYKYEVEDFTGVYEEVDEEQYSKLVQARQDDDWIVDDDGIGYVEDGREIFDDDLEDDALDADEKGKDGKARNKDKRNVKKLAVTKPNNIKSMFIACAGKKTADKAVDLSKDGLLGDILQDLNTETPQITPPPVMILKKKRSIGASPNPFSVHTATAVPSGKIASPVSRKEPPLTPVPLKRAEFAGDDVQVESTEEEQESGAMEFEDGDFDEPMEVEEVDLEPMAAKAWDKESEPAEEVKQEADSGKGTVSYLGSFLPDVSCWDIDQEGDSSFSVQEVQVDSSHLPLVKGADEEQVFHFYWLDAYEDQYNQPGVVFLFGKVWIESAETHVSCCVMVKNIERTLYFLPREMKIDLNTGKETGTPISMKDVYEEFDEKIATKYKIMKFKSKPVEKNYAFEIPDVPEKSEYLEVKYSAEMPQLPQDLKGETFSHVFGTNTSSLELFLMNRKIKGPCWLEVKSPQLLNQPVSWCKVEAMALKPDLVNVIKDVSPPPLVVMAFSMKTMQNAKNHQNEIIAMAALVHHSFALDKAAPKPPFQSHFCVVSKPKDCIFPYAFKEVIEKKNVKVEVAATERTLLGFFLAKVHKIDPDIIVGHNIYGFELEVLLQRINVCKAPHWSKIGRLKRSNMPKLGGRSGFGERNATCGRMICDVEISAKELIRCKSYHLSELVQQILKTERVVIPMENIQNMYSESSQLLYLLEHTWKDAKFILQIMCELNVLPLALQITNIAGNIMSRTLMGGRSERNEFLLLHAFYENNYIVPDKQIFRKPQQKLGDEDEEIDGDTNKYKKGRKKAAYAGGLVLDPKVGFYDKFILLLDFNSLYPSIIQEFNICFTTVQRVASEAQKVTEDGEQEQIPELPDPSLEMGILPREIRKLVERRKQVKQLMKQQDLNPDLILQYDIRQKALKLTANSMYGCLGFSYSRFYAKPLAALVTYKGRESQQDQPLLLLSPTQHEDDEDEDPYDDLLPLNE

SEQ ID NO: 10086 - protein, 55 aa, Artificial Sequence
  Synthetic polypeptide
MAASKKAVLGPLVGAVDQGTSSTRFLVFNSKTAELLSHHQVEIKQEFPREGLLQS

SEQ ID NO: 10087 - protein, 10 aa, Artificial Sequence
  Synthetic polypeptide
MLWWEEVEDC

SEQ ID NO: 10088 - protein, 33 aa, Artificial Sequence
  Synthetic polypeptide
MEGKWMKLETIILIRLTQEQENKHRMFSLISGS

SEQ ID NO: 10089 - protein, 179 aa, Artificial Sequence
  Synthetic polypeptide
ILIASDGSVPLPLQFLPLQSGRYPCKILLKSRYDVRAYYVEGIVNEEQPEAKFEFETPAFEALTQNIPIKNQTNDKWTFQVTIEGEWFYGPVDLHVGPDEIVEYPLTFKPIFECVITGKLILQNEVDGREHIFDIKGVGKKPSALEHITVECQVGNVTQKHITLPHFTNTALTFKHYSQ

SEQ ID NO: 10090 - protein, 373 aa, Artificial Sequence
  Synthetic polypeptide
MREPEELMPDSGAVFTFGKSKFAENNPGKFWFKNDVPVHLSCGDEHSAVVTGNNKLYMFGSNNWGQLGLGSKSAISKPTCVKALKPEKVKLAACGRNHTLVSTEGGNVYATGGNNEGQLGLGDTEERNTFHVISFFTSEHKIKQLSAGSNTSAALTEDGRLFMWGDNSEGQIGLKNVSNVCVPQQVTIGKPVSWISCGYYHSAFVTTDGELYVFGEPENGKLGLPNQLLGNHRTPQLVSEIPEKVIQVACGGEHTVVLTENAVYTFGLGQFGQLGLGTFLFETSEPKVIENIRDQTISYISCGENHTALITDIGLMYTFGDGRHGKLGLGLENFTNHFIPTLCSNFLRFIVKLGTVAHSCNPSTLGGQGGRIT

SEQ ID NO: 10091 - protein, 15 aa, Artificial Sequence
  Synthetic polypeptide
ISALCILLEMVATEN

SEQ ID NO: 10092 - protein, 1062 aa, Artificial Sequence
  Synthetic polypeptide
MAPVQLENHQLVPPGGGGGGSGGPPSAPAPPPPGAAVAAAAAAAASPGYRLSTLIEFLLHRAYSELMVLTDLLPRKSDVERKIEIVQFASRTRQLFVRLLALVKWANNAGKVEKCAMISSFLDQQAILFVDTADRLASLARDALVHARLPSFAIPYAIDVLTTGSYPRLPTCIRDKIIPPDPITKIEKQATLHQLNQILRHRLVTTDLPPQLANLTVANGRVKFRVEGEFEATLTVMGDDPDVPWRLLKLEILVEDKETGDGRALVHSMQISFIHQLVQSRLFADEKPLQDMYNCLHSFCLSLQLEVLHSQTLMLIRERWGDLVQVERYHAGKCLSLSVWNQQVLGRKTGTASVHKVTIKIDENDVSKPLQIFHDPPLPASDSKLVERAMKIDHLSIEKLLIDSVHARAHQKLQELKAILRGFNANENSSIETALPALVVPILEPCGNSECLHIFVDLHSGMFQLMLYGLDQATLDDMEKSVNDDMKRIIPWIQQLKFWLGQQRCKQSIKHLPTISSETLQLSNYSTHPIGNLSKNKLFIKLTRLPQYYIVVEMLEVPNKPTQLSYKYYFMSVNAADREDSPAMALLLQQFKENIQDLVFRTKTGKQTRTNAKRKLSDDPCPVESKKTKRAGEMCAFNKVLAHFVAMCDTNMPFVGLRLELSNLEIPHQGVQVEGDGFSHAIRLLKIPPCKGITEETQKALDRSLLDCTFRLQGRNNRTWVAELVFANCPLNGTSTREQGPSRHVYLTYENLLSEPVGGRKVVEMFLNDWNSIARLYECVLEFARSLPDIPAHLNIFSEVRVYNYRKLILCYGTTKGSSISIQWNSIHQKFHISLGTVGPNSGCSNCHNTILHQLQEMFNKTPNVVQLLQVLFDTQAPLNAINKLPTVPMLGLTQRTNTAYQCFSILPQSSTHIRLAFRNMYCIDIYCRSRGVVAIRDGAYSLFDNSKLVEGFYPAPGLKTFLNMFVDSNQDARRRSVNEDDNPPSPIGGDMMDSLISQLQPPPQQQPFPKQPGTSGAYPLTSPPTSYHSTVNQSPSMMHTQSPGIHWGSWNLSPVDKAGTA

SEQ ID NO: 10093 - protein, 1341 aa, Artificial Sequence
  Synthetic polypeptide
MTATTRGSPVGGNDNQGQAPDGQSQPPLQQNQTSSPDSSNENSPATPPDEQGQGDAPPQLEDEEPAFPHTDLAKLDDMINRPRWVVPVLPKGELEVLLEAAIDLSKKGLDVKSEACQRFFRDGLTISFTKILTDEAVSGWKFEIHRCIINNTHRLVELCVAKLSQDWFPLLELLAMALNPHCKFHIYNGTRPCESVSSSVQLPEDELFARSPDPRSPKGWLVDLLNKFGTLNGFQILHDRFINGSALNVQIIAALIKPFGQCYEFLTLHTVKKYFLPIIEMVPQFLENLTDEELKKEAKNEAKNDALSMIIKSLKNLASRVPGQEETVKNLEIFRLKMILRLLQISSFNGKMNALNEVNKVISSVSYYTHRHGNPEEEEWLTAERMAEWIQQNNILSIVLRDSLHQPQYVEKLEKILRFVIKEKALTLQDLDNIWAAQAGKHEAIVKNVHDLLAKLAWDFSPEQLDHLFDCFKASWTNASKKQREKLLELIRRLAEDDKDGVMAHKVLNLLWNLAHSDDVPVDIMDLALSAHIKILDYSCSQDRDTQKIQWIDRFIEELRTNDKWVIPALKQIREICSLFGEAPQNLSQTQRSPHVFYRHDLINQLQHNHALVTLVAENLATYMESMRLYARDHEDYDPQTVRLGSRYSHVQEVQERLNFLRFLLKDGQLWLCAPQAKQIWKCLAENAVYLCDREACFKWYSKLMGDEPDLDPDINKDFFESNVLQLDPSLLTENGMKCFERFFKAVNCREGKLVAKRRAYMMDDLELIGLDYLWRVVIQSNDDIASRAIDLLKEIYTNLGPRLQVNQVVIHEDFIQSCFDRLKASYDTLCVLDGDKDSVNCARQEAVRMVRVLTVLREYINECDSDYHEERTILPMSRAFRGKHLSFVVRFPNQGRQVDDLEVWSHTNDTIGSVRRCILNRIKANVAHTKIELFVGGELIDPADDRKLIGQLNLKDKSLITAKLTQISSNMPSSPDSSSDSSTGSPGNHGNHYSDGPNPEVESCLPGVIMSLHPRYISFLWQVADLGSSLNMPPLRDGARVLMKLMPPDSTTIEKLRAICLDHAKLGESSLSPSLDSLFFGPSASQVLYLTEVVYALLMPAGAPLADDSSDFQFHFLKSGGLPLVLSMLTRNNFLPNADMETRRGAYLNALKIAKLLLTAIGYGHVRAVAEACQPGVEGVNPMTQINQVTHDQAVVLQSALQSIPNPSSECMLRNVSVRLAQQISDEASRYMPDICVIRAIQKIIWASGCGSLQLVFSPNEEITKIYEKTNAGNEPDLEDEQVCCEALEVMTLCFALIPTALDALSKEKAWQTFIIDLLLHCHSKPGTVAHACNPCTLGG

SEQ ID NO: 10094 - protein, 1643 aa, Artificial Sequence
  Synthetic polypeptide
MTATTRGSPVGGNDNQGQAPDGQSQPPLQQNQTSSPDSSNENSPATPPDEQGQGDAPPQLEDEEPAFPHTDLAKLDDMINRPRWVVPVLPKGELEVLLEAAIDLSKKGLDVKSEACQRFFRDGLTISFTKILTDEAVSGWKFEIHRCIINNTHRLVELCVAKLSQDWFPLLELLAMALNPHCKFHIYNGTRPCESVSSSVQLPEDELFARSPDPRSPKGWLVDLLNKFGTLNGFQILHDRFINGSALNVQIIAALIKPFGQCYEFLTLHTVKKYFLPIIEMVPQFLENLTDEELKKEAKNEAKNDALSMIIKSLKNLASRVPGQEETVKNLEIFRLKMILRLLQISSFNGKMNALNEVNKVISSVSYYTHRHGNPEEEEWLTAERMAEWIQQNNILSIVLRDSLHQPQYVEKLEKILRFVIKEKALTLQDLDNIWAAQAGKHEAIVKNVHDLLAKLAWDFSPEQLDHLFDCFKASWTNASKKQREKLLELIRRLAEDDKDGVMAHKVLNLLWNLAHSDDVPVDIMDLALSAHIKILDYSCSQDRDTQKIQWIDRFIEELRTNDKWVIPALKQIREICSLFGEAPQNLSQTQRSPHVFYRHDLINQLQHNHALVTLVAENLATYMESMRLYARDHEDYDPQTVRLGSRYSHVQEVQERLNFLRFLLKDGQLWLCAPQAKQIWKCLAENAVYLCDREACFKWYSKLMGDEPDLDPDINKDFFESNVLQLDPSLLTENGMKCFERFFKAVNCREGKLVAKRRAYMMDDLELIGLDYLWRVVIQSNDDIASRAIDLLKEIYTNLGPRLQVNQVVIHEDFIQSCFDRLKASYDTLCVLDGDKDSVNCARQEAVRMVRVLTVLREYINECDSDYHEERTILPMSRAFRGKHLSFVVRFPNQGRQVDDLEVWSHTNDTIGSVRRCILNRIKANVAHTKIELFVGGELIDPADDRKLIGQLNLKDKSLITAKLTQISSNMPSSPDSSSDSSTGSPGNHGNHYSDGPNPEVESCLPGVIMSLHPRYISFLWQVADLGSSLNMPPLRDGARVLMKLMPPDSTTIEKLRAICLDHAKLGESSLSPSLDSLFFGPSASQVLYLTEVVYALLMPAGAPLADDSSDFQFHFLKSGGLPLVLSMLTRNNFLPNADMETRRGAYLNALKIAKLLLTAIGYGHVRAVAEACQPGVEGVNPMTQINQVTHDQAVVLQSALQSIPNPSSECMLRNVSVRLAQQISDEASRYMPDICVIRAIQKIIWASGCGSLQLVFSPNEEITKIYEKTNAGNEPDLEDEQVCCEALEVMTLCFALIPTALDALSKEKAWQTFIIDLLLHCHSKTVRQVAQEQFFLMCTRCCMGHRPLLFFITLLFTVLGSTARERAKHSGDYFTLLRHLLNYAYNSNINVPNAEVLLNNEIDWLKRIRDDVKRTGETGIEETILEGHLGVTKELLAFQTSEKKFHIGCEKGGANLIKELIDDFIFPASNVYLQYMRNGELPAEQAIPVCGSPPTINAGFELLVALAVGCVRNLKQIVDSLTEMYYIGTAITTCEALTEWEYLPPVGPRPPKGFVGLKNAGATCYMNSVIQQLYMIPSIRNGILAIEGTGSDVDDDMSGDEKQDNEMHRFTVGLQLSTVCSTVTCCTSLQPRSNWLYHLGL

SEQ ID NO: 10095 - protein, 146 aa, Artificial Sequence
  Synthetic polypeptide
MEPGDAARPGSGRATGAPPPRLLLLPLLLGWGLRVAAAASASSSGAAAEDSSAMEELATEKEAEESHRQDSVSLLTFILLLTLTILTIWLFKHRRVRFLHETGLAMIYGVIIEVMQENVLILWRCKLKYSGVKYMNPNICNFQKVQ

SEQ ID NO: 10096 - protein, 650 aa, Artificial Sequence
  Synthetic polypeptide
MSSSPLSKKRRVSGPDPKPGSNCSPAQSVLSEVPSVPTNGMAKNGSEADIDEGLYSRQLYVLGHEAMKRLQTSSVLVSGLRGLGVEIAKNIILGGVKAVTLHDQGTAQWADLSSQFYLREEDIGKNRAEVSQPRLAELNSYVPVTAYTGPLVEDFLSGFQVVVLTNTPLEDQLRVGEFCHNRGIKLVVADTRGLFGQLFCDFGEEMILTDSNGEQPLSAMVSMVTKDNPGVVTCLDEARHGFESGDFVSFSEVQGMVELNGNQPMEIKVLGPYTFSICDTSNFSDYIRGGIVSQVKVPKKISFKSLVASLAEPDFVVTDFAKFSRPAQLHIGFQALHQFCAQHGRPPRPRNEEDAAELVALAQAVNARALPAVQQNNLDEDLIRKLAYVAAGDLAPINAFIGGLAAQEVMKACSGKFMPIMQWLYFDALECLPEDKEVLTEDKCLQRQNRYDGQVAVFGSDLQEKLGKQKYFLVGAGAIGCELLKNFAMIGLGCGEGGEIIVTDMDTIEKSNLNRQFLFRPWDVTKLKSDTAAAAVRQMNPHIRVTSHQNRVGPDTERIYDDDFFQNLDGVANALDNVDARMYMDRRCVYYRKPLLESGTLGTKGNVQVVIPFLTESYSSSQDPPEKSIPICTLKNFPNAIEHTLQIPVL

SEQ ID NO: 10097 - protein, 191 aa, Artificial Sequence
  Synthetic polypeptide
MEPPRGPPANGAEPSRAVGTVKVYLPNKQRTVVTVRDGMSVYDSLDKALKVRGLNQDCCVVYRLIKGRKTVTAWDTAIAPLDGEELIVEVLEDVPLTMHNFVRKTFFSLAFCDFCLKFLFHGFRCQTCGYKFHQHCSSKVPTVCVDMSTNRQQFYHSVQDLSGGSRQHEAPSNRPLNELLTPQGPSFISTT

SEQ ID NO: 10098 - protein, 128 aa, Artificial Sequence
  Synthetic polypeptide
MGRTSKDKRDVYYRLAKENGWRARSAFKLLQLDKEFQLFQGVTRAVDLCAAPGSWSQVLSQKIGGQGSGHVVAVDLQAMAPLPGVVQIQGDITQLSTAKEIIQHFKGCPADLVVCDGAPDARCGGMCL

SEQ ID NO: 10099 - protein, 16 aa, Artificial Sequence
  Synthetic polypeptide
MPGVVACACNPSYLGG

SEQ ID NO: 10100 - protein, 145 aa, Artificial Sequence
  Synthetic polypeptide
MTTNAGPLHPYWPQHLRLDNFVPNDRPTWHILAGLFSVTGVLVVTTWLLSGRAAVVPLGTWRRLSLCWFAVCGFIHLVIEGWFVLYYEDLLGDQAFLSQLCRAQWLTLVIPALWEAEAGGSLEVRNLRPAWSTWQNPISTKNTKI

SEQ ID NO: 10101 - protein, 188 aa, Artificial Sequence
  Synthetic polypeptide
MTTNAGPLHPYWPQHLRLDNFVPNDRPTWHILAGLFSVTGVLVVTTWLLSGRAAVVPLGTWRRLSLCWFAVCGFIHLVIEGWFVLYYEDLLGDQAFLSQLWKEYAKGDSRYILGDNFTVCMETITACLWGPLSLWVVIAFLRQHPLRFILQLVVSVERPHQQKALTRCDSLTMDFPASRTVRNKFLFF

SEQ ID NO: 10102 - protein, 94 aa, Artificial Sequence
  Synthetic polypeptide
MTQQPLRGVTSLRFNQDQSCFCCAMETGVRIYNVEPLMEKGHLDHEQVGSMGLVEMLHRSNLLALVGGGSSPKFSEISVSSSVDECNSLEHSSQ

SEQ ID NO: 10103 - protein, 25 aa, Artificial Sequence
  Synthetic polypeptide
PRAGGQHGLGGDAAPLQPSGLGGRW

SEQ ID NO: 10104 - protein, 137 aa, Artificial Sequence
  Synthetic polypeptide
MEEADRILIHSLRQAGTAVPPDVQTLRAFTTELVVEAVVRCLRVINPAVGSGLSPLLPLAMSARFRLAMSLAQACMDLGYPLELGYQNFLYPSEPDLRDLLLFLAERLPTDASEDADQPAACRLPEGRDLYPVCSTK

SEQ ID NO: 10105 - protein, 584 aa, Artificial Sequence
  Synthetic polypeptide
MAMWQGAMDNRGFQQGSFSSFQNSSSDEDLMDIPATAMDFSMRDDVPPLDREVGEDKSYNGGGIGSSNRIMDFLEEPIPGVGTYDDFNTIDWVREKSRDRDRHREITNKSKESTWALIHSVSDAFSGWLLMLLIGLLSGSLAGLIDISAHWMTDLKEGICTGGFWFNHEHCCWNSEHVTFEERDKCPEWNSWSQLIISTDEGAFAYIVNYFMYVLWALLFAFLAVSLVKVFAPYACGSGIPEIKTILSGFIIRGYLGKWTLVIKTITLVLAVSSGLSLGKEGPLVHVACCCGNILCHCFNKYRKNEAKRREVLSAAAAAGVSVAFGAPIGGVLFSLEEVSYYFPLKTLWRSFFAALVAAFTLRSINPFGNSRLVLFYVEFHTPWHLFELVPFILLGIFGGLWGALFIRTNIAWCRKRKTTQLGKYPVIEVLVVTAITAILAFPNEYTRMSTSELISELFNDCGLLDSSKLCDYENRFNTSKGGELPDRPAGVGVYSAMWQLALTLILKIVITIFTFGMKIPSGLFIPSMAVGAIAGRLLGVGMEQLAYYHQEWTVFNSWCSQGADCITPGLYAMVGAAACLGKR

SEQ ID NO: 10106 - protein, 514 aa, Artificial Sequence
  Synthetic polypeptide
MDFLEEPIPGVGTYDDFNTIDWVREKSRDRDRHREITNKSKESTWALIHSVSDAFSGWLLMLLIGLLSGSLAGLIDISAHWMTDLKEGICTGGFWFNHEHCCWNSEHVTFEERDKCPEWNSWSQLIISTDEGAFAYIVNYFMYVLWALLFAFLAVSLVKVFAPYACGSGIPEIKTILSGFIIRGYLGKWTLVIKTITLVLAVSSGLSLGKEGPLVHVACCCGNILCHCFNKYRKNEAKRREVLSAAAAAGVSVAFGAPIGGVLFSLEEVSYYFPLKTLWRSFFAALVAAFTLRSINPFGNSRLVLFYVEFHTPWHLFELVPFILLGIFGGLWGALFIRTNIAWCRKRKTTQLGKYPVIEVLVVTAITAILAFPNEYTRMSTSELISELFNDCGLLDSSKLCDYENRFNTSKGGELPDRPAGVGVYSAMWQLALTLILKIVITIFTFGMKIPSGLFIPSMAVGAIAGRLLGVGMEQLAYYHQEWTVFNSWCSQGADCITPGLYAMVGAAACLGKR

SEQ ID NO: 10107 - protein, 987 aa, Artificial Sequence
  Synthetic polypeptide
MENRPGSFQYVPVQLQGGAPWGFTLKGGLEHCEPLTVSKIEDGGKAALSQKMRTGDELVNINGTPLYGSRQEALILIKGSFRILKLIVRRRNAPVSRPHSWHVAKLLEGCPEAATTMHFPSEAFSLSWHSGCNTSDVCVQWCPLSRHCSTEKSSSIGSMESLEQPGQATYESHLLPIDQNMYPNQRDSAYSSFSASSNASDCALSLRPEEPASTDCIMQGPGPTKAPSGRPNVAETSGGSRRTNGGHLTPSSQMSSRPQEGYQSGPAKAVRGPPQPPVRRDSLQASRAQLLNGEQRRASEPVVPLPQKEKLSLEPVLPARNPNRFCCLSGHDQVTSEGHQNCEFSQPPESSQQGSEHLLMQASTKAVGSPKACDRASSVDSNPLNEASAELAKASFGRPPHLIGPTGHRHSAPEQLLASHLQHVHLDTRGSKGMELPPVQDGHQWTLSPLHSSHKGKKSPCPPTGGTHDQSSKERKTRQVDDRSLVLGHQSQSSPPHGEADGHPSEKGFLDPNRTSRAASELANQQPSASGSLVQQATDCSSTTKAASGTEAGEEGDSEPKECSRMGGRRSGGTRGRSIQNRRKSERFATNLRNEIQRRKAQLQKSKGPLSQLCDTKEPVEETQEPPESPPLTASNTSLLSSCKKPPSPRDKLFNKSMMLRARSSECLSQAPESHESRTGLEGRISPGQRPGQSSLGLNTWWKAPDPSSSDPEKAHAHCGVRGGHWRWSPEHNSQPLVAAAMEGPSNPGDNKELKASTAQAGEDAILLPFADRRKFFEESSKSLSTSHLPGLTTHSNKTFTQRPKPIDQNFQPMSSSCRELRRHPMDQSYHSADQPYHATDQSYHSMSPLQSETPTYSECFASKGLENSMCCKPLHCGDFDYHRTCSYSCSVQGALVHDPCIYCSGEICPALLKRNMMPNCYNCRCHHHQCIRCSVCYHNPQHSALEDSSLAPGNTWKPRKLTVQEFPGDKWNPITGNRKTSQSGSI

SEQ ID NO: 10108 - protein, 871 aa, Artificial Sequence
  Synthetic polypeptide
MHFPSEAFSLSWHSGCNTSDVCVQWCPLSRHCSTEKSSSIGSMESLEQPGQATYESHLLPIDQNMYPNQRDSAYSSFSASSNASDCALSLRPEEPASTDCIMQGPGPTKAPSGRPNVAETSGGSRRTNGGHLTPSSQMSSRPQEGYQSGPAKAVRGPPQPPVRRDSLQASRAQLLNGEQRRASEPVVPLPQKEKLSLEPVLPARNPNRFCCLSGHDQVTSEGHQNCEFSQPPESSQQGSEHLLMQASTKAVGSPKACDRASSVDSNPLNEASAELAKASFGRPPHLIGPTGHRHSAPEQLLASHLQHVHLDTRGSKGMELPPVQDGHQWTLSPLHSSHKGKKSPCPPTGGTHDQSSKERKTRQVDDRSLVLGHQSQSSPPHGEADGHPSEKGFLDPNRTSRAASELANQQPSASGSLVQQATDCSSTTKAASGTEAGEEGDSEPKECSRMGGRRSGGTRGRSIQNRRKSERFATNLRNEIQRRKAQLQKSKGPLSQLCDTKEPVEETQEPPESPPLTASNTSLLSSCKKPPSPRDKLFNKSMMLRARSSECLSQAPESHESRTGLEGRISPGQRPGQSSLGLNTWWKAPDPSSSDPEKAHAHCGVRGGHWRWSPEHNSQPLVAAAMEGPSNPGDNKELKASTAQAGEDAILLPFADRRKFFEESSKSLSTSHLPGLTTHSNKTFTQRPKPIDQNFQPMSSSCRELRRHPMDQSYHSADQPYHATDQSYHSMSPLQSETPTYSECFASKGLENSMCCKPLHCGDFDYHRTCSYSCSVQGALVHDPCIYCSGEICPALLKRNMMPNCYNCRCHHHQCIRCSVCYHNPQHSALEDSSLAPGNTWKPRKLTVQEFPGDKWNPITGNRKTSQSGSI

SEQ ID NO: 10109 - protein, 6 aa, Artificial Sequence
  Synthetic polypeptide
QPTIWV

SEQ ID NO: 10110 - protein, 2970 aa, Artificial Sequence
  Synthetic polypeptide
MKVDRTKLKKTPTEAPADCRALIDKLKVCNDEQLLLELQQIKTWNIGKCELYHWVDLLDRFDGILADAGQTVENMSWMLVCDRPEREQLKMLLLAVLNFTALLIEYSFSRHLYSSIEHLTTLLASSDMQVVLAVLNLLYVFSKRSNYITRLGSDKRTPLLTRLQHLAESWGGKENGFGLAECCRDLHMMKYPPSATTLHFEFYADPGAEVKIEKRTTSNTLHYIHIEQLDKISESPSEIMESLTKMYSIPKDKQMLLFTHIRLAHGFSNHRKRLQAVQARLHAISILVYSNALQESANSILYNGLIEELVDVLQITDKQLMEIKAASLRTLTSIVHLERTPKLSSIIDCTGTASYHGFLPVLVRNCIQAMIDPSMDPYPHQFATALFSFLYHLASYDAGGEALVSCGMMEALLKVIKFLGDEQDQITFVTRAVRVVDLITNLDMAAFQSHSGLSIFIYRLEHEVDLCRKECPFVIKPKIQRPNTTQEGEEMETDMDGVQCIPQRAALLKSMLNFLKKAIQDPAFSDGIRHVMDGSLPTSLKHIISNAEYYGPSLFLLATEVVTVFVFQEPSLLSSLQDNGLTDVMLHALLIKDVPATREVLGSLPNVFSALCLNARGLQSFVQCQPFERLFKVLLSPDYLPAMRRRRSSDPLGDTASNLGSAVDELMRHQPTLKTDATTAIIKLLEEICNLGRDPKYICQKPSIQKADGTATAPPPRSNHAAEEASSEDEEEEEVQAMQSFNSTQQNETEPNQQVVGTEERIPIPLMDYILNVMKFVESILSNNTTDDHCQEFVNQKGLLPLVTILGLPNLPIDFPTSAACQAVAGVCKSILTLSHEPKVLQEGLLQLDSILSSLEPLHRPIESPGGSVLLRELACAGNVADATLSAQATPLLHALTAAHAYIMMFVHTCRVGQSEIRSISVNQWGSQLGLSVLSKLSQLYCSLVWESTVLLSLCTPNSLPSGCEFGQADMQKLVPKDEKAGTTQGGKRSDGEQDGAAGSMDASTQGLLEGIGLDGDTLAPMETDEPTASDSKGKSKITPAMAARIKQIKPLLSASSRLGRALAELFGLLVKLCVGSPVRQRRSHHAASTTTAPTPAARSTASALTKLLTKGLSWQPPPYTPTPRFRLTFFICSVGFTSPMLFDERKYPYHLMLQKFLCSGGHNALFETFNWALSMGGKVPVSEGLEHSDLPDGTGEFLDAWLMLVEKMVNPTTVLESPHSLPAKLPGGVQNFPQFSALRFLVVTQKAAFTCIKNLWNRKPLKVYGGRMAESMLAILCHILRGEPVIRERLSKEKEGSRGEEDTGQEEGGSRREPQVNQQQLQQLMDMGFTREHAMEALLNTSTMEQATEYLLTHPPPIMGGVVRDLSMSEEDQMMRAIAMSLGQDIPMDQRAESPEEVACRKEEEERKAREKQEEEEAKCLEKFQDADPLEQDELHTFTDTMLPGCFHLLDELPDTVYRVCDLIMTAIKRNGADYRDMILKQVVNQVWEAADVLIKAALPLTTSDTKTVSEWISQMATLPQASNLATRILLLTLLFEELKLPCAWVVESSGILNVLIKLLEVVQPCLQAAKEQKEVQTPKWITPVLLLIDFYEKTAISSKRRAQMTKYLQSNSNNWRWFDDRSGRWCSYSASNNSTIDSAWKSGETSVRFTAGRRRYTVQFTTMVQVNEETGNRRPVMLTLLRVPRLNKNSKNSNGQELEKTLEESKEMDIKRKENKGNDTPLALESTNTEKETSLEETKIGEILIQGLTEDMVTVLIRACVSMLGVPVDPDTLHATLRLCLRLTRDHKYAMMFAELKSTRMILNLTQSSGFNGFTPLVTLLLRHIIEDPCTLRHTMEKVVRSAATSGAGSTTSGVVSGSLGSREINYILRVLGPAACRNPDIFTEVANCCIRIALPAPRGSGTASDDEFENLRIKGPNAVQLVKTTPLKPSPLPVIPDTIKEVIYDMLNALAAYHAPEEADKSDPKPGVMTQEVGQLLQDMGDDVYQQYRSLTRQSSDFDTQSGFSINSQVFAADGASTETSASGTSQGEASTPEESRDGKKDKEGDRASEEGKQKGKGSKPLMPTSTILRLLAELVRSYVGIATLIANYSYTVGQSELIKEDCSVLAFVLDHLLPHTQNAEDKDTPALARLFLASLAAAGSGTDAQVALVNEVKAALGRALAMAESTEKHARLQAVMCIISTIMESCPSTSSFYSSATAKTQHNGMNNIIRLFLKKGLVNDLARVPHSLDLSSPNMANTVNAALKPLETLSRIVNQPSSLFGSKSASSKNKSEQDAQGASQDSSSNQQDPGEPGEAEVQEEDHDVTQTEVADGDIMDGEAETDSVVIAGQPEVLSSQEMQVENELEDLIDELLERDGGSGNSTIIVSRSGEDESQEDVLMDEAPSNLSQASTLQANREDSMNILDPEDEEEHTQEEDSSGSNEDEDDSQDEEEEEEEDEEDDQEDDEGEEGDEDDDDDGSEMELDEDYPDMNASPLVRFERFDREDDLIIEFDNMFSSATDIPPSPGNIPTTHPLMVRHADHSSLTLGSGSSTTRLTQGIGRSQRTLRQLTANTGHTIHVHYPGNRQPNPPLILQRLLGPSAAADILQLSSSLPLQSRGRARLLVGNDDVHIIARSDDELLDDFFHDQSTATSQAGTLSSIPTALTRWTEECKVLDAESMHDCVSVVKVSIVNHLEFLRDEELEERREKRRKQLAEEETKITDKGKEDKENRDQSAQCTASKSNDSTEQNLSDGTPMPDSYPTTPSSTDAATSESKETLGTLQSSQQQPTLPTPPALGEVPQELQSPAGEGGSSTQLLMPVEPEELGPTRPSGEAETTQMELSPAPTITSLSPERAEDSDALTAVSSQLEGSPMDTSSLASCTLEEAVGDTSAAGSSEQPRAGSSTPGDAPPAVAEVQGRSDGSGESAQPPEDSSPPASSESSSTRDSAVAISGADSRGILEEPLPSTSSEEEDPLAGSLFNFCDHE

SEQ ID NO: 10111 - protein, 186 aa, Artificial Sequence
  Synthetic polypeptide
MKVDRTKLKKTPTEAPADCRALIDKLKVCNDEQLLLELQQIKTWNIGKCELYHWVDLLDRFDGILADAGQTVENMSWMLVCDRPEREQLKMLLLAVLNFTALLIEYSFSRHLYSSIEHLTTLLASSDMQVVLAVLNLLYVFSKRSNYITRLGSDKRTPLLTRLQHLAEMLTNRKERSEEYILKEKI

SEQ ID NO: 10112 - protein, 241 aa, Artificial Sequence
  Synthetic polypeptide
MGVQGFQEFLEKRCPGAVVPVDLLKLARTVSRQQQQQHLHRQLPPTAALAPGAPRAARGSVPLQPPLPPAALGAYSGGAGPIRHHHPAHHFHHHGQAQPGLHPPLPPPPPPQLPGARVLVDAGSALPRLYGGYQTDWVCGGQWNAMLGYLSALCQACAYPGGDGLELVVMFPGGLGKDRLAEWGRRCQAERQTAQLIVGHVGNKGTPPPRAWFLPPACLSHCVRLALIRFRVKLHGVSLPQ

SEQ ID NO: 10113 - protein, 1120 aa, Artificial Sequence
  Synthetic polypeptide
MSGWRYLICVSFLLTILLELTYQGPPVPASSSTKLLMTSYSMRSTVVSRYAHTLVTSVLFNPHAEAHEAIFDLDLPHLAFISNFTMTINNKVYIAEVKEKHQAKKIYEEAHQQGKTAAHVGIRDRESEKFRISTSLAAGTEVTFSLAYEELLQRHQGQYQLVVSLRPGQLVKRLSIEVTVSERTGISYVHIPPLRTGRLRTNAHASEVDSPPSTRIERGETCVRITYCPTLQDQSSISGSGIMADFLVQYDVVMEDIIGDVQIYDDYFIHYFAPRGLPPMEKNVVFVIDVSSSMFGTKMEQTKTAMNVILSDLQANDYFNIISFSDTVNVWKAGGSIQATIQNVHSAKDYLHCMEADGWTDVNSALLAAASVLNHSNQEPGRGPSVGRIPLIIFLTDGEPTAGVTTPSVILSNVRQALGHRVSLFSLAFGDDADFTLLRRLSLENRGIARRIYEDTDAALQLKGLYEEISMPLLADVRLNYLGGLVGASPWAVFPNYFGGSELVVAGQVQPGKQELGIHLAARGPKDQLLVAHHSEGATNNSQKAFGCPGEPAPNVAHFIRRLWAYVTIGELLDAHFQARDTTTRHLLAAKVLNLSLEYNFVTPLTSLVMVQPKQASEETRRQTSTSAGPDTIMPSSSSRHGLGVSTAQPALVPKVISPKSRPVKPKFYLSSTTTASTKKMLSSKELEPLGESPHTLSMPTYPKAKIPAQQDSGTLAQPTLRTKPTILVPSNSGTLLPLKPGSLSHQNPDILPTNSRTQVPPVKPGIPASPKADTVKCVTPLHSKPGAPSHPQLGALTSQAPKGLPQSRPGVSTLQVPKYPLHTRPRVPAPKTRNNMPHLGPGILLSKTPKILLSLKPSAPPHQISTSISLSKPETPNPHMPQTPLPPRPDRPRPPLPESLSTFPNTISSSTGPSSTTTTSVLGEPLPMPFTPTLPPGRFWHQYDLLPGPQRTRQVLGPSRPGVPTMSLLNSSRPTPEGSPPNLPILLPSSILPEAISLLLLPEELELLSESMVESKFVESLNPPAFYTFLTPDEDGSPNWDGNSEEILGGAGGSMESQGSSVGLAKGTLPSIFTFSSSVDGDPHFVIQIPHSEEKICFTLNGHPGDLLQLIEDPKAGLP

SEQ ID NO: 10114 - protein, 304 aa, Artificial Sequence
  Synthetic polypeptide
MSGWRYLICVSFLLTILLELTYQGPPVPASSSTKLLMTSYSMRSTVVSRYAHTLVTSVLFNPHAEAHEAIFDLDLPHLAFISNFTMTINNKVYIAEVKEKHQAKKIYEEAHQQGKTAAHVGIRDRESEKFRISTSLAAGTEVTFSLAYEELLQRHQGQYQLVVSLRPGQLVKRLSIEVTVSERTGISYVHIPPLRTGRLRTNAHASEVDSPPSTRIERGETCVRITYCPTLQDQSSISGSGIMADFLVQYDVVMEDIIGDVQIYDDYFIHYFAPRGLPPMEKNVVFVIDVSSSMFGTKMEQGHG

SEQ ID NO: 10115 - protein, 34 aa, Artificial Sequence
  Synthetic polypeptide
MEEKTSRIKELSTPNQQNIHFFQHHTTPIPKLTT

SEQ ID NO: 10116 - protein, 184 aa, Artificial Sequence
  Synthetic polypeptide
MEESDSEKTTEKENLGPRMDPPLGEPEGSLGWVLPNTAMKKKVLLMGKSGSGKTSMRSIIFANYIARDTRRLGATIDVEHSHVRFLGNLVLNLWDCGGQDTFMENYFTSQRDNIFRNVEVLIYVFDVESRELEKDMHYYQSCLEAILQNSPDAKIFCLVHKMDLVQEDQRDLGFAVLAGLVSSS

SEQ ID NO: 10117 - protein, 146 aa, Artificial Sequence
  Synthetic polypeptide
MKKKVLLMGKSGSGKTSMRSIIFANYIARDTRRLGATIDVEHSHVRFLGNLVLNLWDCGGQDTFMENYFTSQRDNIFRNVEVLIYVFDVESRELEKDMHYYQSCLEAILQNSPDAKIFCLVHKMDLVQEDQRDLGFAVLAGLVSSS

SEQ ID NO: 10118 - protein, 212 aa, Artificial Sequence
  Synthetic polypeptide
MEESDSEKTTEKENLGPRMDPPLGEPEGSLGWVLPNTAMKKKVLLMGKSGSGKTSMRSIIFANYIARDTRRLGATILDRIHSLQINSSLSTYSLVDSVGNTKTFDVEHSHVRFLGNLVLNLWDCGGQDTFMENYFTSQRDNIFRNVEVLIYVFDVESRELEKDMHYYQSCLEAILQNSPDAKIFCLVHKMDLVQEDQRDLGFAVLAGLVSSS

SEQ ID NO: 10119 - protein, 76 aa, Artificial Sequence
  Synthetic polypeptide
MKTPNAQEAEGQQTRAAAGRATGSANMTKKKVSQKKQRGRPSSQPRRNIVGCRISHGWKEGDEPITQWKGTVLDQN

SEQ ID NO: 10120 - protein, 76 aa, Artificial Sequence; identical to SEQ ID NO: 10119
  Synthetic polypeptide

SEQ ID NO: 10121 - protein, 118 aa, Artificial Sequence
  Synthetic polypeptide
MEIPKLLPARGTLQGGGGGGIPAGGGRVHRGPDSPAGQVPTRRLLLLRGPQDGGPGRRREEASTASRGPGPSLLAPRTDQPSGGGGGGGDDFFLVLLDPTHRWKVLALSQMRLWTVDF

SEQ ID NO: 10122 - protein, 821 aa, Artificial Sequence
  Synthetic polypeptide
MEIPKLLPARGTLQGGGGGGIPAGGGRVHRGPDSPAGQVPTRRLLLLRGPQDGGPGRRREEASTASRGPGPSLLAPRTDQPSGGGGGGGDDFFLVLLDPVGGDVETAGSGQAAGPVLREEAEEGPGLQGGESGANPAGPTALGPRCLSAVPTPAPISAPGPAAAFAGTVTIHNQDLLLRFENGVLTLATPPPHAWEPGAAPAQQPGCLIAPQAGFPHAAHPGDCPELPPDLLLAEPAEPAPAPAPEEEAEGPAAALGPRGPLGSGPGVVLYLCPEAQCGQTFAKKHQLKVHLLTHSSSQGQRPFKCPLGGCGWTFTTSYKLKRHLQSHDKLRPFGCPAEGCGKSFTTVYNLKAHMKGHEQENSFKCEVCEESFPTQAKLSAHQRSHFEPERPYQCAFSGCKKTFITVSALFSHNRAHFREQELFSCSFPGCSKQYDKACRLKIHLRSHTGERPFLCDFDGCGWNFTSMSKLLRHKRKHDDDRRFMCPVEGCGKSFTRAEHLKGHSITHLGTKPFVCPVAGCCARFSARSSLYIHSKKHLQDVDTWKSRCPISSCNKLFTSKHSMKTHMVKRHKVGQDLLAQLEAANSLTPSSELTSQRQNDLSDAEIVSLFSDVPDSTSAALLDTALVNSGILTIDVASVSSTLAGHLPANNNNSVGQAVDPPSLMATSDPPQSLDTSLFFGTAATGFQQSSLNMDEVSSVSVGPLGSLDSLAMKNSSPEPQALTPSSKLTVDTDALTPSSTLCENSVSELLTPTKAEWNVHPDSDFFGQEGETQFGFPNAAGNHGSQKETDLITVTGSSFLTHRWKVLALSQMRLWTVDF

SEQ ID NO: 10123 - protein, 808 aa, Artificial Sequence
  Synthetic polypeptide
MEIPKLLPARGTLQGGGGGGIPAGGGRVHRGPDSPAGQVPTRRLLLPRGPQDGGPGRRREEASTASRGPGPSLFAPRPHQPSGGGDDFFLVLLDPVGGDVETAGSGQAAGPVLREEAKAGPGLQGDESGANPAGCSAQGPHCLSAVPTPAPISAPGPAAAFAGTVTIHNQDLLLRFENGVLTLATPPPHAWEPGAAPAQQPRCLIAPQAGFPQAAHPGDCPELRSDLLLAEPAEPAPAPAPQEEAEGLAAALGPRGLLGSGPGVVLYLCPEALCGQTFAKKHQLKMHLLTHSSSQGQRPFKCPLGGCGWTFTTSYKLKRHLQSHDKLRPFGCPAEGCGKSFTTVYNLKAHMKGHEQENSFKCEVCEESFPTQAKLGAHQRSHFEPERPYQCAFSGCKKTFITVSALFSHNRAHFREQELFSCSFPGCSKQYDKACRLKIHLRSHTGERPFLCDFDGCGWNFTSMSKLLRHKRKHDDDRRFMCPVEGCGKSFTRAEHLKGHSITHLGTKPFVCPVAGCCARFSARSSLYIHSKKHLQDVDTWKSRCPISSCNKLFTSKHSMKTHMVKRHKVGQDLLAQLEAANSLTPSSELTSQRQNDLSDAEIVSLFSDVPDSTSAALLDTALVNSGILTIDVASVSSTLAGHLPANNNNSVGQAVDPPSLMATSDPPQSLDTSLFFGTAATGFQQSSLNMDEVSSVSVGPLGSLDSLAMKNSSPEPQALTPSSKLTVDTDTLTPSSTLCENSVSELLTPAKAEWSVHPNSDFFGQEGETQFGFPNAAGNHGSQKERNLITVTGSSFLANQTFKQQRS

SEQ ID NO: 10124 - protein, 801 aa, Artificial Sequence
  Synthetic polypeptide
MEIPKLLPARGTLQGGGGGGIPAGGGRVHRGPDSPAGQVPTRRLLLPRGPQDGGPGRRREEASTASRGPGPSLFAPRPHQPSGGGDDFFLVLLDPVGGDVETAGSGQAAGPVLREEAKAGPGLQGDESGANPAGCSAQGPHCLSAVPTPAPISAPGPAAAFAGTVTIHNQDLLLRFENGVLTLATPPPHAWEPGAAPAQQPRCLIAPQAGFPQAAHPGDCPELRSDLLLAEPAEPAPAPAPQEEAEGLAAALGPRGLLGSGPGVVLYLCPEALCGQTFAKKHQLKMHLLTHSSSQGQRPFKCPLGGCGWTFTTSYKLKRHLQSHDKLRPFGCPAEGCGKSFTTVYNLKAHMKGHEQENSFKCEVCEESFPTQAKLGAHQRSHFEPERPYQCAFSGCKKTFITVSALFSHNRAHFREQELFSCSFPGCSKQYDKACRLKIHLRSHTGERPFLCDFDGCGWNFTSMSKLLRHKRKHDDDRRFMCPVEGCGKSFTRAEHLKGHSITHLGTKPFVCPVAGCCARFSARSSLYIHSKKHLQDVDTWKSRCPISSCNKLFTSKHSMKTHMVKRHKVGQDLLAQLEAANSLTPSSELTSQRQNDLSDAEIVSLFSDVPDSTSAALLDTALVNSGILTIDVASVSSTLAGHLPANNNNSVGQAVDPPSLMATSDPPQSLDTSLFFGTAATGFQQSSLNMDEVSSVSVGPLGSLDSLAMKNSSPEPQALTPSSKLTVDTDTLTPSSTLCENSVSELLTPAKAEWSVHPNSDFFGQEGETQFGFPNAAGNHGSQKERNLITVTGSSFLAHE

SEQ ID NO: 10125 - protein, 24 aa, Artificial Sequence
  Synthetic polypeptide
MADEQEIMCKLESIKEIRRDALKQ

SEQ ID NO: 10126 - protein, 33 aa, Artificial Sequence
  Synthetic polypeptide
MDAELEFAIQPNTTGKQLFDQVPVSPLTLFAML

SEQ ID NO: 10127 - protein, 44 aa, Artificial Sequence
  Synthetic polypeptide
MPKTISVRVTTMDAELEFAIQPNTTGKQLFDQVPVSPLTLFAML

SEQ ID NO: 10128 - protein, 565 aa, Artificial Sequence
  Synthetic polypeptide
MGHPPLEFSDCYLDSPDFRERLKCYEQELERTNKFIKDVIKDGNALISAMRNYSSAVQKFSQTLQSFQFDFIGDTLTDDEINIAESFKEFAELLNEVENERMMMVHNASDLLIKPLENFRKEQIGFTKERKKKFEKDGERFYSLLDRHLHLSSKKKESQLQEADLQVDKERHNFFESSLDYVYQIQEVQESKKFNIVEPVLAFLHSLFISNSLTVELTQDFLPYKQQLQLSLQNTRNHFSSTREEMEELKKRMKEAPQTCKLPGQPTIEGYLYTQEKWALGISWVKYYCQYEKETKTLTMTPMEQKPGAKQGPLDLTLKYCVRRKTESIDKRFCFDIETNERPGTITLQALSEANRRLWMEAMDGKEPIYHSPITKQQEMELNEVGFKFVRKCINIIETKGIKTEGLYRTVGSNIQVQKLLNAFFDPKCPGDVDFHNSDWDIKTITSSLKFYLRNLSEPVMTYRLHKELVSAAKSDNLDYRLGAIHSLVYKLPEKNREMLELLIRHLVNVCEHSKENLMTPSNMGVIFGPTLMRAQEDTVAAMMNIKFQNIVVEILIEHFGKKLP

SEQ ID NO: 10129 - protein, 67 aa, Artificial Sequence
  Synthetic polypeptide
MGHPPLEFSDCYLDSPDFRERLKCYEQELERTNKFIKDVIKDGNALISAMRMGIGAPNQQVLSRLFE

SEQ ID NO: 10130 - protein, 226 aa, Artificial Sequence
  Synthetic polypeptide
MAEAEESPGDPGTASPRPLFAGLSDISISQDIPVEGEITIPMRSRIREFDSSTLNESVRNTIMRDLKAVGKKFMHVLYPRKSNTLLRDWDLWGPLILCVTLALMLQRDSADSEKDGGPQFAEVFVIVWFGAVTITLNSKLLGGNISFFQSLCVLGYCILPLTVAMLICRLVLLADPGPVNFMVRLFVVIVMFAWSIVGPQVERNCTPEAILKELHLRSIMCTWTWT

SEQ ID NO: 10131 - protein, 183 aa, Artificial Sequence
  Synthetic polypeptide
MAEAEESPGDPGTASPRPLMRDLKAVGKKFMHVLYPRKSNTLLRDWDLWGPLILCVTLALMLQRDSADSEKDGGPQFAEVFVIVWFGAVTITLNSKLLGGNISFFQSLCVLGYCILPLTVAMLICRLVLLADPGPVNFMVRLFVVIVMFAWSIVGPQVERNCTPEAILKELHLRSIMCTWTWT

SEQ ID NO: 10132 - protein, 208 aa, Artificial Sequence
  Synthetic polypeptide
MGYPEVERRELLPAAAPRERGSQGCGCGGAPARAGEGNSCLLFLGFFGLSLALHLLTLCCYLELRSELRRERGAESRLGGSGTPGTSGTLSSLGGLDPDSPITSHLGQPSPKQQPLEPGEAALHSDSQDGHQMALLNFFFPDEKPYSEEESRRVRRNKRSKSNEGADDVPFTFHHDCEASPATWNCKSIKPLFLPSLGYVFINSVKTD

SEQ ID NO: 10133 - protein, 76 aa, Artificial Sequence
  Synthetic polypeptide
MALLNFFFPDEKPYSEEESRRVRRNKRSKSNEGADDVPFTFHHDCEASPATWNCKSIKPLFLPSLGYVFINSVKTD

SEQ ID NO: 10134 - protein, 294 aa, Artificial Sequence
  Synthetic polypeptide
MAAEDELQLPRLPELFETGRQLLDEVEVATEPAGSRIVQEKVFKGLDLLEKAAEMLSQLDLFSRNEDLEEIASTDLKYLLVPAFQGALTMKQVNPSKRLDHLQRAREHFINYLTQCHCYHVAEFELPKTMNNSAENHTANSSMAYPSLVAMASQRQAKIQRYKQKKELEHRLSAMKSAVESGQADDERVREYYLLHLQRWIDISLEEIESIDQEIKILRERDSSREASTSNSSRQERPPVKPFILTRNMAQAKVFGAGYPSLPTMTVSDWYEQHRKYGALPDQGIAKAAPGNPN

SEQ ID NO: 10135 - protein, 933 aa, Artificial Sequence
  Synthetic polypeptide
MKEEVKGIPVRVALRCRPLVPKEISEGCQMCLSFVPGEPQVVVGTDKSFTYDFVFDPSTEQEEVFNTAVAPLIKGVFKGYNATVLAYGQTGSGKTYSMGGAYTAEQENEPTVGVIPRVIQLLFKEIDKKSDFEFTLKVSYLEIYNEEILDLLCPSREKAQINIREDPKEGIKIVGLTEKTVLVALDTVSCLEQGNNSRTVASTAMNSQSSRSHAIFTISLEQRKKSDKNSSFRSKLHLVDLAGSERQKKTKAEGDRLKEGININRGLLCLGNVISALGDDKKGGFVPYRDSKLTRLLQDSLGGNSHTLMIACVSPADSNLEETLNTLRYADRARKIKNKPIVNIDPQTAELNHLKQQVQQLQVLLLQAHGGTLPGSITVEPSENLQSLMEKNQSLVEENEKLSRGLSEAAGQTAQMLERIILTEQANEKMNAKLEELRQHAACKLDLQKLVETLEDQELKENVEIICNLQQLITQLSDETVACMAAAIDTAVEQEAQVETSPETSRSSDAFTTQHALRQAQMSKELVELNKALALKEALARKMTQNDSQLQPIQYQYQDNIKELELEVINLQKEKEELVLELQTAKKDANQAKLSERRRKRLQELEGQIADLKKKLNEQSKLLKLKESTERTVSKLNQEIRMMKNQRVQLMRQMKEDAEKFRQWKQKKDKEVIQLKERDRKRQYELLKLERNFQKQSNVLRRKTEEAAAANKRLKDALQKQREVADKRKETQSRGMEGTAARVKNWLGNEIEVMVSTEEAKRHLNDLLEDRKILAQDVAQLKEKKESGENPPPKLRRRTFSLTEVRGQVSESEDSITKQIESLETEMEFRSAQIADLQQKLLDAESEDRPKQRWENIATILEAKCALKYLIGELVSSKIQVSKLESSLKQSKTSCADMQKMLFEERNHFAEIETELQAELVRMEQQHQEKEIS

SEQ ID NO: 10136 - protein, 24 aa, Artificial Sequence
  Synthetic polypeptide
MAAPPQPVTHLIFDMDGLLLASST

SEQ ID NO: 10137 - protein, 138 aa, Artificial Sequence
  Synthetic polypeptide
MPMAGLLKGLVRQLERFSVQQQASKMPPKGKSGSGKAGKGGAASGSDSADKKAQGPKGGGNAVKVRHILCEKHGKIMEAMEKLKSGMRFNEVAAQYSEDKARQGRMQQQGTILEAESSPHQIPILLAPSSWTLQPPEP

SEQ ID NO: 10138 - protein, 120 aa, Artificial Sequence
  Synthetic polypeptide
VQQQASKMPPKGKSGSGKAGKGGAASGSDSADKKAQGPKGGGNAVKVRHILCEKHGKIMEAMEKLKSGMRFNEVAAQYSEDKARQGRMQQQGTILEAESSPHQIPILLAPSSWTLQPPEP

SEQ ID NO: 10139 - protein, 12 aa, Artificial Sequence
  Synthetic polypeptide
QRKKWFWKSGER

SEQ ID NO: 10140 - protein, 340 aa, Artificial Sequence
  Synthetic polypeptide
MEEPEEPADSGQSLVPVYIYSPEYVSMCDSLAKIPKRASMVHSLIEAYALHKQMRIVKPKVASMEEMATFHTDAYLQHLQKVSQEGDDDHPDSIEYGLGYDCPATEGIFDYAAAIGGATITAAQCLIDGMCKVAINWSGGWHHAKKDEASGFCYLNDAVLGILRLRRKFERILYVDLDLHHGDGVEDAFSFTSKVMTVSLHKFSPGFFPGTGDVSDVGLGKGRYYSVNVPIQDGIQDEKYYQICESVLKEVYQAFNPKAVVLQLGADTIAGDPMCSFNMTPVGIGKCLKYILQWQLATLILGGGGYNLANTARCWTYLTGVILGKTLSSEIPDHELLAFK

SEQ ID NO: 10141 - protein, 249 aa, Artificial Sequence
  Synthetic polypeptide
MEEPEEPADSGQSLVPVYIYSPEYVSMCDSLAKIPKRASMVHSLIEAYALHKQMRDEASGFCYLNDAVLGILRLRRKFERILYVDLDLHHGDGVEDAFSFTSKVMTVSLHKFSPGFFPGTGDVSDVGLGKGRYYSVNVPIQDGIQDEKYYQICESVLKEVYQAFNPKAVVLQLGADTIAGDPMCSFNMTPVGIGKCLKYILQWQLATLILGGGGYNLANTARCWTYLTGVILGKTLSSEIPDHELLAFK

SEQ ID NO: 10142 - protein, 145 aa, Artificial Sequence
  Synthetic polypeptide
MTVSLHKFSPGFFPGTGDVSDVGLGKGRYYSVNVPIQDGIQDEKYYQICESVLKEVYQAFNPKAVVLQLGADTIAGDPMCSFNMTPVGIGKCLKYILQWQLATLILGGGGYNLANTARCWTYLTGVILGKTLSSEIPDHELLAFK

SEQ ID NO: 10143 - protein, 359 aa, Artificial Sequence
  Synthetic polypeptide
MEEPEEPADSGQSLVPVYIYSPEYVSMCDSLAKIPKRASMVHSLIEAYALHKQMRIVKPKVASMEEMATFHTDAYLQHLQKVSQEGDDDHPDSIEYGLGYDCPATEGIFDYAAAIGGATITAAQCLIDGMCKVAINWSGGWHHAKKDEASGFCYLNDAVLGILRLRRKFERILYVDLDLHHGDGVEDAFSFTSKVMTVSLHKFSPGFFPGTGDVSDVGLGKGRYYSVNVPIQDGIQDEKYYQICESVLKEVYQAFNPKAVVLQLGADTIAGDPMCSFNMTPVGIGKCLKYILQWQLATLILGGGGYNLANTARCWTYLTGVILGKTLSSEIPDHEVTSLNSANFGFFICKVSIMTPESQ

SEQ ID NO: 10144 - protein, 268 aa, Artificial Sequence
  Synthetic polypeptide
MEEPEEPADSGQSLVPVYIYSPEYVSMCDSLAKIPKRASMVHSLIEAYALHKQMRDEASGFCYLNDAVLGILRLRRKFERILYVDLDLHHGDGVEDAFSFTSKVMTVSLHKFSPGFFPGTGDVSDVGLGKGRYYSVNVPIQDGIQDEKYYQICESVLKEVYQAFNPKAVVLQLGADTIAGDPMCSFNMTPVGIGKCLKYILQWQLATLILGGGGYNLANTARCWTYLTGVILGKTLSSEIPDHEVTSLNSANFGFFICKVSIMTPESQ

SEQ ID NO: 10145 - protein, 164 aa, Artificial Sequence
  Synthetic polypeptide
MTVSLHKFSPGFFPGTGDVSDVGLGKGRYYSVNVPIQDGIQDEKYYQICESVLKEVYQAFNPKAVVLQLGADTIAGDPMCSFNMTPVGIGKCLKYILQWQLATLILGGGGYNLANTARCWTYLTGVILGKTLSSEIPDHEVTSLNSANFGFFICKVSIMTPESQ

SEQ ID NO: 10146 - protein, 433 aa, Artificial Sequence
  Synthetic polypeptide
MPLRKMKIPFLLLFFLWEAESHAASRPNIILVMADDLGIGDPGCYGNKTIRTPNIDRLASGGVKLTQHLAASPLCTPSRAAFMTGRYPVRSGMASWSRTGVFLFTASSGGLPTDEITFAKLLKDQGYSTALIGKWHLGMSCHSKTDFCHHPLHHGFNYFYGISLTNLRDCKPGEGSVFTTGFKRLVFLPLQIVGVTLLTLAALNCLGLLHVPLGVFFSLLFLAALILTLFLGFLHYFRPLNCFMMRNYEIIQQPMSYDNLTQRLTVEAAQFIQRNTETPFLLVLSYLHVHTALFSSKDFAGKSQHGVYGDAVEEMDWSVGQILNLLDELRLANDTLIYFTSDQGAHVEEVSSKGEIHGGSNGIYKGGKANNWEGGIRVPGILRWPRVIQAGQKIDEPTSNMDIFPTVAKLAGAPLPEDSGDDSSSSSWCSLQM

SEQ ID NO: 10147 - protein, 463 aa, Artificial Sequence
  Synthetic polypeptide
MPLRKMKIPFLLLFFLWEAESHAASRPNIILVMADDLGIGDPGCYGNKTIRTPNIDRLASGGVKLTQHLAASPLCTPSRAAFMTGRYPVRSGMASWSRTGVFLFTASSGGLPTDEITFAKLLKDQGYSTALIGKWHLGMSCHSKTDFCHHPLHHGFNYFYGISLTNLRDCKPGEGSVFTTGFKRLVFLPLQIVGVTLLTLAALNCLGLLHVPLGVFFSLLFLAALILTLFLGFLHYFRPLNCFMMRNYEIIQQPMSYDNLTQRLTVEAAQFIQRNTETPFLLVLSYLHVHTALFSSKDFAGKSQHGVYGDAVEEMDWSVGQILNLLDELRLANDTLIYFTSDQGAHVEEVSSKGEIHGGSNGIYKGGKANNWEGGIRVPGILRWPRVIQAGQKIDEPTSNMDIFPTVAKLAGAPLPEDRIIDGRDLMPLLEGKSQRSDHEFLFHYCNAYLNAVRWHPQNNGTV

SEQ ID NO: 10148 - protein, 683 aa, Artificial Sequence
  Synthetic polypeptide
MALLAMHSWRWAAAAAAFEKRRHSAILIRPLVSVSGSGPQWRPHQLGALGTARAYQQIPESLKSITWQRLGKGNSGQFLDAAKALQVWPLIEKRTCWHGHAGGGLHTDPKEGLKDVDTRKIIKAMLSYVWPKDRPDLRARVAISLGFLGGAKAMNIVVPFMFKYAVDSLNQMSGNMLNLSDAPNTVATMATAVLIGYGVSRAGAAFFNEVRNAVFGKVAQNSIRRIAKNVFLHLHNLDLGFHLSRQTGALSKAIDRGTRGISFVLSALVFNLLPIMFEVMLVSGVLYYKCGAQFALVTLGTLGTYTAFTVAVTRWRTRFRIEMNKADNDAGNAAIDSLLNYETVKYFNNERYEAQRYDGFLKTYETASLKSTSTLAMLNFGQSAIFSVGLTAIMVLASQGIVAGTLTVGDLVMVNGLLFQLSLPLNFLGTVYRETRQALIDMNTLFTLLKVDTQIKDKVMASPLQITPQTATVAFDNVHFEYIEGQKVLSGISFEVPAGKKVAIVGGSGSGKSTIVRLLFRFYEPQKGSIYLAGQNIQDVSLESLRRAVGVVPQDAVLFHNTIYYNLLYGNISASPEEVYAVAKLAGLHDAILRMPHGYDTQVGERGLKLSGGEKQRVAIARAILKDPPVILYDEATSSLDSITEETILGAMKDVVKHRTSIFIAHRLSTVVDADEIIVLDQM

SEQ ID NO: 10149 - protein, 642 aa, Artificial Sequence
  Synthetic polypeptide
MALLAMHSWRWAAAAAAFEKRRHSAILIRPLVSVSGSGPQWRPHQLGALGTARAYQIPESLKSITWQRLGKGNSGQFLDAAKALQVWPLIEKRTCWHGHAGGGLHTDPKEGAMNIVVPFMFKYAVDSLNQMSGNMLNLSDAPNTVATMATAVLIGYGVSRAGAAFFNEVRNAVFGKVAQNSIRRIAKNVFLHLHNLDLGFHLSRQTGALSKAIDRGTRGISFVLSALVFNLLPIMFEVMLVSGVLYYKCGAQFALVTLGTLGTYTAFTVAVTRWRTRFRIEMNKADNDAGNAAIDSLLNYETVKYFNNERYEAQRYDGFLKTYETASLKSTSTLAMLNFGQSAIFSVGLTAIMVLASQGIVAGTLTVGDLVMVNGLLFQLSLPLNFLGTVYRETRQALIDMNTLFTLLKVDTQIKDKVMASPLQITPQTATVAFDNVHFEYIEGQKVLSGISFEVPAGKKVAIVGGSGSGKSTIVRLLFRFYEPQKGSIYLAGQNIQDVSLESLRRAVGVVPQDAVLFHNTIYYNLLYGNISASPEEVYAVAKLAGLHDAILRMPHGYDTQVGERGLKLSGGEKQRVAIARAILKDPPVILYDEATSSLDSITEETILGAMKDVVKHRTSIFIAHRLSTVVDADEIIVLDQM

SEQ ID NO: 10150 - protein, 682 aa, Artificial Sequence
  Synthetic polypeptide
MALLAMHSWRWAAAAAAFEKRRHSAILIRPLVSVSGSGPQWRPHQLGALGTARAYQIPESLKSITWQRLGKGNSGQFLDAAKALQVWPLIEKRTCWHGHAGGGLHTDPKEGLKDVDTRKIIKAMLSYVWPKDRPDLRARVAISLGFLGGAKAMNIVVPFMFKYAVDSLNQMSGNMLNLSDAPNTVATMATAVLIGYGVSRAGAAFFNEVRNAVFGKVAQNSIRRIAKNVFLHLHNLDLGFHLSRQTGALSKAIDRGTRGISFVLSALVFNLLPIMFEVMLVSGVLYYKCGAQFALVTLGTLGTYTAFTVAVTRWRTRFRIEMNKADNDAGNAAIDSLLNYETVKYFNNERYEAQRYDGFLKTYETASLKSTSTLAMLNFGQSAIFSVGLTAIMVLASQGIVAGTLTVGDLVMVNGLLFQLSLPLNFLGTVYRETRQALIDMNTLFTLLKVDTQIKDKVMASPLQITPQTATVAFDNVHFEYIEGQKVLSGISFEVPAGKKVAIVGGSGSGKSTIVRLLFRFYEPQKGSIYLAGQNIQDVSLESLRRAVGVVPQDAVLFHNTIYYNLLYGNISASPEEVYAVAKLAGLHDAILRMPHGYDTQVGERGLKLSGGEKQRVAIARAILKDPPVILYDEATSSLDSITEETILGAMKDVVKHRTSIFIAHRLSTVVDADEIIVLDQM

SEQ ID NO: 10151 - protein, 656 aa, Artificial Sequence
  Synthetic polypeptide
MALLAMHSWRWAAAAAAFEKRRHSAILIRPLVSVSGSGPQWRPHQLGALGTARAYQALQVWPLIEKRTCWHGHAGGGLHTDPKEGLKDVDTRKIIKAMLSYVWPKDRPDLRARVAISLGFLGGAKAMNIVVPFMFKYAVDSLNQMSGNMLNLSDAPNTVATMATAVLIGYGVSRAGAAFFNEVRNAVFGKVAQNSIRRIAKNVFLHLHNLDLGFHLSRQTGALSKAIDRGTRGISFVLSALVFNLLPIMFEVMLVSGVLYYKCGAQFALVTLGTLGTYTAFTVAVTRWRTRFRIEMNKADNDAGNAAIDSLLNYETVKYFNNERYEAQRYDGFLKTYETASLKSTSTLAMLNFGQSAIFSVGLTAIMVLASQGIVAGTLTVGDLVMVNGLLFQLSLPLNFLGTVYRETRQALIDMNTLFTLLKVDTQIKDKVMASPLQITPQTATVAFDNVHFEYIEGQKVLSGISFEVPAGKKVAIVGGSGSGKSTIVRLLFRFYEPQKGSIYLAGQNIQDVSLESLRRAVGVVPQDAVLFHNTIYYNLLYGNISASPEEVYAVAKLAGLHDAILRMPHGYDTQVGERGLKLSGGEKQRVAIARAILKDPPVILYDEATSSLDSITEETILGAMKDVVKHRTSIFIAHRLSTVVDADEIIVLDQM

SEQ ID NO: 10152 - protein, 2127 aa, Artificial Sequence
  Synthetic polypeptide
MTAEPMSESKLNTLVQKLHDFLAHSSEESEETSSPPRLAMNQNTDKISGSGSNSDMMENSKEEGTSSSEKSKSSGSSRSKRKPSIVTKYVESDDEKPLDDETVNEDASNENSENDITMQSLPKGTVIVQPEPVLNEDKDDFKGPEFRSRSKMKTENLKKRGEDGLHGIVSCTACGQQVNHFQKDSIYRHPSLQVLICKNCFKYYMSDDISRDSDGMDEQCRWCAEGGNLICCDFCHNAFCKKCILRNLGRKELSTIMDENNQWYCYICHPEPLLDLVTACNSVFENLEQLLQQNKKKIKVDSEKSNKVYEHTSRFSPKKTSSNCNGEEKKLDDSCSGSVTYSYSALIVPKEMIKKAKKLIETTANMNSSYVKFLKQATDNSEISSATKLRQLKAFKSVLADIKKAHLALEEDLNSEFRAMDAVNKEKNTKEHKVIDAKFETKARKGEKPCALEKKDISKSEAKLSRKQVDSEHMHQNVPTEEQRTNKSTGGEHKKSDRKEEPQYEPANTSEDLDMDIVSVPSSVPEDIFENLETAMEVQSSVDHQGDGSSGTEQEVESSSVKLNISSKDNRGGIKSKTTAKVTKELYVKLTPVSLSNSPIKGADCQEVPQDKDGYKSCGLNPKLEKCGLGQENSDNEHLVENEVSLLLEESDLRRSPRVKTTPLRRPTETNPVTSNSDEECNETVKEKQKLSVPVRKKDKRNSSDSAIDNPKPNKLPKSKQSETVDQNSDSDEMLAILKEVSRMSHSSSSDTDINEIHTNHKTLYDLKTQAGKDDKGKRKRKSSTSGSDFDTKKGKSAKSSIISKKKRQTQSESSNYDSELEKEIKSMSKIGAARTTKKRIPNTKDFDSSEDEKHSKKGMDNQGHKNLKTSQEGSSDDAERKQERETFSSAEGTVDKDTTIMELRDRLPKKQQASASTDGVDKLSGKEQSFTSLEVRKVAETKEKSKHLKTKTCKKVQDGLSDIAEKFLKKDQSDETSEDDKKQSKKGTEEKKKPSDFKKKVIKMEQQYESSSDGTEKLPEREEICHFPKGIKQIKNGTTDGEKKSKKIRDKTSKKKDELSDYAEKSTGKGDSCDSSEDKKSKNGAYGREKKRCKLLGKSSRKRQDCSSSDTEKYSMKEDGCNSSDKRLKRIELRERRNLSSKRNTKEIQSGSSSSDAEESSEDNKKKKQRTSSKKKAVIVKEKKRNSLRTSTKRKQADITSSSSSDIEDDDQNSIGEGSSDEQKIKPVTENLVLSSHTGFCQSSGDEALSKSVPVTVDDDDDDNDPENRIAKKMLLEEIKANLSSDEDGSSDDEPEEGKKRTGKQNEENPGDEEAKNQVNSESDSDSEESKKPRYRHRLLRHKLTVSDGESGEEKKTKPKEHKEVKGRNRRKVSSEDSEDSDFQESGVSEEVSESEDEQRPRTRSAKKAELEENQRSYKQKKKRRRIKVQEDSSSENKSNSEEEEEEKEEEEEEEEEEEEEEEDENDDSKSPGKGRKKIRKILKDDKLRTETQNALKEEEERRKRIAEREREREKLREVIEIEDASPTKCPITTKLVLDEDEETKEPLVQVHRNMVIKLKPHQVDGVQFMWDCCCESVKKTKKSPGSGCILAHCMGLGKTLQVVSFLHTVLLCDKLDFSTALVVCPLNTALNWMNEFEKWQEGLKDDEKLEVSELATVKRPQERSYMLQRWQEDGGVMIIGYEMYRNLAQGRNVKSRKLKEIFNKALVDPGPDFVVCDEGHILKNEASAVSKAMNSIRSRRRIILTGTPLQNNLIEYHCMVNFIKENLLGSIKEFRNRFINPIQNGQCADSTMVDVRVMKKRAHILYEMLAGCVQRKDYTALTKFLPPKHEYVLAVRMTSIQCKLYQYYLDHLTGVGNNSEGGRGKAGAKLFQDFQMLSRIWTHPWCLQLDYISKENKGYFDEDSMDEFIASDSDETSMSLSSDDYTKKKKKGKKGKKDSSSSGSGSDNDVEVIKVWNSRSRGGGEGNVDETGNNPSVSLKLEESKATSSSNPSSPAPDWYKDFVTDADAEVLEHSGKMVLLFEILRMAEEIGDKVLVFSQSLISLDLIEDFLELASREKTEDKDKPLIYKGEGKWLRNIDYYRLDGSTTAQSRKKWAEEFNDETNVSCRLPLEAESEGYMGARLL

SEQ ID NO: 10153 - protein, 2089 aa, Artificial Sequence
  Synthetic polypeptide
MTAEPMSESKLNTLVQKLHDFLAHSSEESEETSSPPRLAMNQNTDKISGSGSNSDMMENSKEEGTSSSEKSKSSGSSRSKRKPSIVTKYVESDDEKPLDDETVNEDASNENSENDITMQSLPKEDGLHGIVSCTACGQQVNHFQKDSIYRHPSLQVLICKNCFKYYMSDDISRDSDGMDEQCRWCAEGGNLICCDFCHNAFCKKCILRNLGRKELSTIMDENNQWYCYICHPEPLLDLVTACNSVFENLEQLLQQNKKKIKVDSEKSNKVYEHTSRFSPKKTSSNCNGEEKKLDDSCSGSVTYSYSALIVPKEMIKKAKKLIETTANMNSSYVKFLKQATDNSEISSATKLRQLKAFKSVLADIKKAHLALEEDLNSEFRAMDAVNKEKNTKEHKVIDAKFETKARKGEKPCALEKKDISKSEAKLSRKQVDSEHMHQNVPTEEQRTNKSTGGEHKKSDRKEEPQYEPANTSEDLDMDIVSVPSSVPEDIFENLETAMEVQSSVDHQGDGSSGTEQEVESSSVKLNISSKDNRGGIKSKTTAKVTKELYVKLTPVSLSNSPIKGADCQEVPQDKDGYKSCGLNPKLEKCGLGQENSDNEHLVENEVSLLLEESDLRRSPRVKTTPLRRPTETNPVTSNSDEECNETVKEKQKLSVPVRKKDKRNSSDSAIDNPKPNKLPKSKQSETVDQNSDSDEMLAILKEVSRMSHSSSSDTDINEIHTNHKTLYDLKTQAGKDDKGKRKRKSSTSGSDFDTKKGKSAKSSIISKKKRQTQSESSNYDSELEKEIKSMSKIGAARTTKKRIPNTKDFDSSEDEKHSKKGMDNQGHKNLKTSQEGSSDDAERKQERETFSSAEGTVDKDTTIMELRDRLPKKQQASASTDGVDKLSGKEQSFTSLEVRKVAETKEKSKHLKTKTCKKVQDGLSDIAEKFLKKDQSDETSEDDKKQSKKGTEEKKKPSDFKKKVIKMEQQYESSSDGTEKLPEREEICHFPKGIKQIKNGTTDGEKKSKKIRDKTSKKKDELSDYAEKSTGKGDSCDSSEDKKSKNGAYGREKKRCKLLGKSSRKRQDCSSSDTEKYSMKEDGCNSSDKRLKRIELRERRNLSSKRNTKEIQSGSSSSDAEESSEDNKKKKQRTSSKKKAVIVKEKKRNSLRTSTKRKQADITSSSSSDIEDDDQNSIGEGSSDEQKIKPVTENLVLSSHTGFCQSSGDEALSKSVPVTVDDDDDDNDPENRIAKKMLLEEIKANLSSDEDGSSDDEPEEGKKRTGKQNEENPGDEEAKNQVNSESDSDSEESKKPRYRHRLLRHKLTVSDGESGEEKKTKPKEHKEVKGRNRRKVSSEDSEDSDFQESGVSEEVSESEDEQRPRTRSAKKAELEENQRSYKQKKKRRRIKVQEDSSSENKSNSEEEEEEKEEEEEEEEEEEEEEEDENDDSKSPGKGRKKIRKILKDDKLRTETQNALKEEEERRKRIAEREREREKLREVIEIEDASPTKCPITTKLVLDEDEETKEPLVQVHRNMVIKLKPHQVDGVQFMWDCCCESVKKTKKSPGSGCILAHCMGLGKTLQVVSFLHTVLLCDKLDFSTALVVCPLNTALNWMNEFEKWQEGLKDDEKLEVSELATVKRPQERSYMLQRWQEDGGVMIIGYEMYRNLAQGRNVKSRKLKEIFNKALVDPGPDFVVCDEGHILKNEASAVSKAMNSIRSRRRIILTGTPLQNNLIEYHCMVNFIKENLLGSIKEFRNRFINPIQNGQCADSTMVDVRVMKKRAHILYEMLAGCVQRKDYTALTKFLPPKHEYVLAVRMTSIQCKLYQYYLDHLTGVGNNSEGGRGKAGAKLFQDFQMLSRIWTHPWCLQLDYISKENKGYFDEDSMDEFIASDSDETSMSLSSDDYTKKKKKGKKGKKDSSSSGSGSDNDVEVIKVWNSRSRGGGEGNVDETGNNPSVSLKLEESKATSSSNPSSPAPDWYKDFVTDADAEVLEHSGKMVLLFEILRMAEEIGDKVLVFSQSLISLDLIEDFLELASREKTEDKDKPLIYKGEGKWLRNIDYYRLDGSTTAQSRKKWAEEFNDETNVSCRLPLEAESEGYMGARLL

SEQ ID NO: 10154 - protein, 51 aa, Artificial Sequence
  Synthetic polypeptide
MSLSNKLTLDKLDVKGKRVVMRVDFNVPMKNNQITNNQRTWNDAWHKRSIQ

SEQ ID NO: 10155 - protein, 23 aa, Artificial Sequence
  Synthetic polypeptide
MKNNQITNNQRTWNDAWHKRSIQ

SEQ ID NO: 10156 - protein, 243 aa, Artificial Sequence
  Synthetic polypeptide
MSLSNKLTLDKLDVKGKRVVMRVDFNVPMKNNQITNNQRIKAAVPSIKFCLDNGAKSVVLMSHLGRPDGVPMPDKYSLEPVAVELKSLLGKDVLFLKDCVGPEVEKACANPAAGSVILLENLRFHVEEEGKGKDASGNKVKAEPAKIEAFRASLSKLGDVYVNDAFGTAHRAHSSMVGVNLPQKAGGFLMKKELNYFAKALESPERPFLAILGGVVWQFHPRSPLSCHHVRCDLLPLCLPPRL

SEQ ID NO: 10157 - protein, 107 aa, Artificial Sequence
  Synthetic polypeptide
MSLSNKLTLDKLDVKGKRVVMRVDFNVPMKNNQITNNQRIKAAVPSIKFCLDNGAKSVVLMSHLGRPDGRPFLAILGGVVWQFHPRSPLSCHHVRCDLLPLCLPPRL

SEQ ID NO: 10158 - protein, 215 aa, Artificial Sequence
  Synthetic polypeptide
MKNNQITNNQRIKAAVPSIKFCLDNGAKSVVLMSHLGRPDGVPMPDKYSLEPVAVELKSLLGKDVLFLKDCVGPEVEKACANPAAGSVILLENLRFHVEEEGKGKDASGNKVKAEPAKIEAFRASLSKLGDVYVNDAFGTAHRAHSSMVGVNLPQKAGGFLMKKELNYFAKALESPERPFLAILGGVVWQFHPRSPLSCHHVRCDLLPLCLPPRL

SEQ ID NO: 10159 - protein, 204 aa, Artificial Sequence
  Synthetic polypeptide
MESGKMAPPKNAPRDALVMAQILKDMGITEYEPRVINQMLEFAFRYVTTILDDAKIYSSHAKKPNVDADDVRLAIQCRADQSFTSPPPRDFLLDIARQKNQTPLPLIKPYAGPRLPPDRYCLTAPNYRLKSLIKKGPNQGRLVPRLSVGAVSSKPTTPTIATPQTVSVPNKVATPMSVTSQRFTVQIPPSQSTPVKPGYNGSHL

SEQ ID NO: 10160 - protein, 379 aa, Artificial Sequence
  Synthetic polypeptide
MAAAPTQIEAELYYLIARFLQSGPCNKSAQVLVQELEEHQLIPRRLDWEGKEHRRSFEDLVAANAHIPPDYLLKICERIGPLLDKEIPQSVPGVQTLLGVGRQSLLRDAKDCKSTLWNGSAFAALHRGRPPELPVNYVKPPNVVNITSARQLTGCSRFGHIFPSSAYQHIKMHKRILGHLSSVYCVAFDRSGRRIFTGSDDCLVKIWATDDGRLLATLRGHSAEISDMAVNYENTLIAAGSCDKVVRVWCLRTCAPVAVLQGHSASITSIQFCPSTKGTNRYLTSTGADGTICFWQWHVKTMKFRDRPVKFTERSRPGVQISCSSFSSGGMFITTGSTDHVIRIYYLGSEVPEKIAELESHTDKVVAVQFCNNGDRMTR

SEQ ID NO: 10161 - protein, 26 aa, Artificial Sequence
  Synthetic polypeptide
MVIRVYIASSSGSTAFFSFGTWTGSP

SEQ ID NO: 10162 - protein, 118 aa, Artificial Sequence
  Synthetic polypeptide
MVIRVYIASSSGSTAIKKKQQDVLGFLEANKIGFEEKDIAANEENRKWMRENVPENSRPATGYPLPPQIFNESQYRGDYDAFFEARENNAVYAFLGLTAPPGSKPRVCLCQQGENGLI

SEQ ID NO: 10163 - protein, 121 aa, Artificial Sequence
  Synthetic polypeptide
MLPFAPQDEPWDREMEVFSGGGASSGEVNGLKMVDEPMEEGEADSCHDEGVVKEIPITHHVKEGYEKADPAQFELLKVLGQGSFGKEIATATLTFSSHHPDHSAAINIEARPSTSNKIISH

SEQ ID NO: 10164 - protein, 121 aa, Artificial Sequence
  Synthetic polypeptide
MGLSTSAIWKNTRVEIVNPYEVKRKVKVNGLKMVDEPMEEGEADSCHDEGVVKEIPITHHVKEGYEKADPAQFELLKVLGQGSFGKEIATATLTFSSHHPDHSAAINIEARPSTSNKIISH

SEQ ID NO: 10165 - protein, 92 aa, Artificial Sequence
  Synthetic polypeptide
MLPFAPQDEPWDREMEVFSGGGASSGEVNGLKMVDEPMEEGEADSCHDEGVVKEIPITHHVKEGYEKADPAQFELLKVLGQGSFGKYPFCSP

SEQ ID NO: 10166 - protein, 92 aa, Artificial Sequence
  Synthetic polypeptide
MGLSTSAIWKNTRVEIVNPYEVKRKVKVNGLKMVDEPMEEGEADSCHDEGVVKEIPITHHVKEGYEKADPAQFELLKVLGQGSFGKYPFCSP

SEQ ID NO: 10167 - protein, 601 aa, Artificial Sequence
  Synthetic polypeptide
MSSSYWSETSSSSCGTQQLPEVLQCQPQHYHCYHQSSQAQQPPEKNVVYERVRTYSGPMNKVVQALDPFNSREVLSPLKTTSSYQNLVWSDHSQELHSPTLKISTCAPSTLHITQNTEQELHSPTVKLTTYPQTTIRKYVVQNPEQEPLSQFLRGSHFFPGNNVIYEKTIRKVEKLNTDQGCHPQAQCHHHIIQQPQVIHSAHWQQPDSSQQIQAITGNNPISTHIGNELCHSGSSQICEQVIIQDDGPEKLDPRYFGELLADLSRKNTDLYHCLLEHLQRIGGSKQDFESTDESEDIESLIPKGLSEFTKQQIRYILQMRGMSDKSLRLVLSTFSNIREELGHLQNDMTSLENDKMRLEKDLSFKDTQLKEYEELLASVRANNHQQQQGLQDSSSKCQALEENNLSLRHTLSDMEYRLKELEYCKRNLEQENQNLRMQVSETCTGPMLQAKMDEIGNHYTEMVKNLRMEKDREICRLRSQLNQYHKDVSKREGSCSDFQFKLHELTSLLEEKDSLIKRQSEELSKLRQEIYSSHNQPSTGGRTTITTKKYRTQYPILGLLYDDYEYIPPGSETQTIVIEKTEDKYTCVHLSMNFLLLCYL

SEQ ID NO: 10168 - protein, 102 aa, Artificial Sequence
  Synthetic polypeptide
MVPGVPGAVLTLCLWLAASSGCLAAGPGAAAARRLDESLSAGSVQRARCASRCLSLQITRISAFFQHFQNNGSLVWCQNHKQCSKSQFLRRLRWENRLSLGS

SEQ ID NO: 10169 - protein, 73 aa, Artificial Sequence
  Synthetic polypeptide
MTELAGASSSCCHRPAGRGAMQSVLHHFQRLRGREGGSHFINTSSPRGEAKMSITSDEVNFLVYRYLQESEQN

SEQ ID NO: 10170 - protein, 22 aa, Artificial Sequence
  Synthetic polypeptide
MSITSDEVNFLVYRYLQESEQN

SEQ ID NO: 10171 - protein, 27 aa, Artificial Sequence
  Synthetic polypeptide
PVRNWAAQQEVSSGSNLQALSATFDYL

SEQ ID NO: 10172 - protein, 293 aa, Artificial Sequence
  Synthetic polypeptide
AVGRIYKHSQQPLITYEKYDVTDSPKNIGGSHSVLLLKVHGALMFVAWMTTVSIGVLVARFFKPVWSKAFLLGEAAWFQVHRMLMFTTTVLTCIAFVMPFIYRGGWSRHAGYHPYLGCIVMTLAVLQPLLAVFRPPLHDPRRQMFNWTHWSMGTAARIIAVAAMFLGMDLPGLNLPDSWKTYAMTGFVAWHVGTEVVLELKYWMMTEFRSFSHLLQWKQRVMLLKRQCWQFMSVGMLLFSSYFYLQSTIYEQAKTLAFAGQVIIIIKPKKLEACPDCLEHICEFSLGRLGSCL

SEQ ID NO: 10173 - protein, 21 aa, Artificial Sequence
  Synthetic polypeptide
ELGRTAGGEQWVEFTSTLSNL

SEQ ID NO: 10174 - protein, 259 aa, Artificial Sequence
  Synthetic polypeptide
AVGRIYKHSQQPLITYEKYDVTDSPKNIGGSHSVLLLKVHGALMFVAWMTTVSIGVLVARFFKPVWSKAFLLGEAAWFQVHRMLMFTTTVLTCIAFVMPFIYRGGWSRHAGYHPYLGCIVMTLAVLQPLLAVFRPPLHDPRRQMFNWTHWSMGTAARIIAVAAMFLGMDLPGLNLPDSWKTYAMTGFVAWHVGTEVVLEVHAYRLSRKVEILDDDRIQILQSFTAVETEGHAFKKAVLAIYVCGNVTFLIIFLSAINHL

SEQ ID NO: 10175 - protein, 20 aa, Artificial Sequence
  Synthetic polypeptide
PVRNWAAQQEVEFTSTLSNL

SEQ ID NO: 10176 - protein, 38 aa, Artificial Sequence
  Synthetic polypeptide
RDPQPTGHGLVLVCDLLGTGPHSRRSNLQALSATFDYL

SEQ ID NO: 10177 - protein, 298 aa, Artificial Sequence
  Synthetic polypeptide
ELGRTAGGRIYKHSQQPLITYEKYDVTDSPKNIGGSHSVLLLKVHGALMFVAWMTTVSIGVLVARFFKPVWSKAFLLGEAAWFQVHRMLMFTTTVLTCIAFVMPFIYRGGWSRHAGYHPYLGCIVMTLAVLQPLLAVFRPPLHDPRRQMFNWTHWSMGTAARIIAVAAMFLGMDLPGLNLPDSWKTYAMTGFVAWHVGTEVVLELKYWMMTEFRSFSHLLQWKQRVMLLKRQCWQFMSVGMLLFSSYFYLQSTIYEQAKTLAFAGQVIIIIKPKKLEACPDCLEHICEFSLGRLGSCL

SEQ ID NO: 10178 - protein, 264 aa, Artificial Sequence
  Synthetic polypeptide
ELGRTAGGRIYKHSQQPLITYEKYDVTDSPKNIGGSHSVLLLKVHGALMFVAWMTTVSIGVLVARFFKPVWSKAFLLGEAAWFQVHRMLMFTTTVLTCIAFVMPFIYRGGWSRHAGYHPYLGCIVMTLAVLQPLLAVFRPPLHDPRRQMFNWTHWSMGTAARIIAVAAMFLGMDLPGLNLPDSWKTYAMTGFVAWHVGTEVVLEVHAYRLSRKVEILDDDRIQILQSFTAVETEGHAFKKAVLAIYVCGNVTFLIIFLSAINHL

SEQ ID NO: 10179 - protein, 355 aa, Artificial Sequence
  Synthetic polypeptide
TQKKGLTRTQRCQHSHLGLPACRTANEDKTMFANLKYVSLGILVFQTTSLVLTMRYSRTLKEEGPRYLSSTAVVVAELLKIMACILLVYKDSKCSLRALNRVLHDEILNKPMETLKLAIPSGIYTLQNNLLYVALSNLDAATYQVTYQLKILTTALFSVSMLSKKLGVYQWLSLVILMTGVAFVQWPSDSQLDSKELSAGSQFVGLMAVLTACFSSGFAGVYFEKILKETKQSVWIRNIQLGFFGSIFGLMGVYIYDGELVSKNGFFQGYNRLTWIVVVLQALGGLVIAAVIKYADNILKGFATSLSIILSTLISYFWLQDFVPTSVFFLGAILVITATFLYGYDPKPAGNPTKA

SEQ ID NO: 10180 - protein, 44 aa, Artificial Sequence
  Synthetic polypeptide
GYNEKTDICELRRRASLEPNDASTLILDFQPAELQMKIKQCSPT

SEQ ID NO: 10181 - protein, 18 aa, Artificial Sequence
  Synthetic polypeptide
NPTMPALSSWTSSLQNCK

SEQ ID NO: 10182 - protein, 337 aa, Artificial Sequence
  Synthetic polypeptide
VLRNYLLNECCHICKLPGRVMGIRVLRLSLVVILVLLLVAGALTALLPSVKEDKMLMLRREIKSQGKSTMDSFTLIMQTYNRTDLLLKLLNHYQAVPNLHKVIVVWNNIGEKAPDELWNSLGPHPIPVIFKQQTANRMRNRLQVFPELETNAVLMVDDDTLISTPDLVFAFSVWQQFPDQIVGFVPRKHVSTSSGIYSYGSFEMQAPGSGNGDQYSMVLIGASFFNSKYLELFQRQPAAVHALIDDTQNCDDIAMNFIIAKHIGKTSGIFVKPVNMDNLEKETNSGYSGMWHRAEHALQRSYCINKLVNIYDSMPLRYSNIMISQFGFPYANYKRKI

SEQ ID NO: 10183 - protein, 12 aa, Artificial Sequence
  Synthetic polypeptide
MSVATSANFLGE

SEQ ID NO: 10184 - protein, 265 aa, Artificial Sequence
  Synthetic polypeptide
VLRNYLLNECCHICKLPGRVMGIRVLRLSLVVILVLLLVAGALTALLPSVKEDKMLMLRREIKSQGKSTMDSFTLIMQTYNRTDLLLKLLNHYQAVPNLHKVIVVWNNIGEKAPDELWNSLGPHPIPVIFKQQTANRMRNRLQVFPELETNAVLMVDDDTLISTPDLVFAFSVWQQFPDQIVGFVPRKHVSTSSGIYSYGSFEMQAPGSGNGDQYSMVLIGASFFNSKYLELFQRQPAAVHALIDDTQNCDDIAMNFIIAKHIGK

SEQ ID NO: 10185 - protein, 59 aa, Artificial Sequence
  Synthetic polypeptide
GWAQWLTPIIPALWEAKADGSLESRRLTPAWAIWRNPISTKKYKISQATDTVIPSLMVL

SEQ ID NO: 10186 - protein, 28 aa, Artificial Sequence
  Synthetic polypeptide
HQPGRYGETPSLQKNTKLARPRTQSFPL

SEQ ID NO: 10187 - protein, 207 aa, Artificial Sequence
  Synthetic polypeptide
PGHGHSHSLFNGALDQAHGHVDHCHSHEVKHGAAHSHDHAHGHGHFHSHDGPSLKETTGPSRQILQGVFLHILADTLGSIGVIASAIMMQNFGLMIADPICSILIAILIVVSVIPLLRESVGILMQRTPPLLENSLPQCYQRVQQLQGVYSLQEQHFWTLCSDVYVGTLKLIVAPDADARWILSQTHNIFTQAGVRQLYVQIDFAAM

SEQ ID NO: 10188 - protein, 1070 aa, Artificial Sequence
  Synthetic polypeptide
RWSKDASLSSDFVMSQVDVDSGIENMEVDENDRREKRSLSDKEPSSGPEVSEEQALQLVCKIFRVSWKDRDRDVIFLSSLSAQFKQNPKEVFSDFKDLIGQILMEVLMMSTQTRDENPFASLTATSQPIAAAARSPDRNLLLNTGSNPGTSPMFCSVASFGASSLSSLGASGGASNWDSYSDHFTIETCKETDMLNYLIECFDRVGIEEKKAPKMCSQPAVSQLLSNIRSQCISHTALVLQGSLTQPRSLQQPSFLVPYMLCRNLPYGFIQELVRTTHQDEEVFKQIFIPILQGLALAAKECSLDSDYFKYPLMALGELCETKFGKTHPVCNLVASLRLWLPKSLSPGCGRELQRLSYLGAFFSFSVFAEDDVKVVEKYFSGPAITLENTRVVSQSLQHYLELGRQELFKILHSILLNGETREAALSYMAAVVNANMKKAQMQTDDRLVSTDGFMLNFLWVLQQLSTKIKLETVDPTYIFHPRCRITLPNDETRVNATMEDVNDWLTELYGDQPPFSEPKFPTECFFLTLHAHHLSILPSCRRYIRRLRAIRELNRTVEDLKNNESQWKDSPLATRHREMLKRCKTQLKKLVRCKACADAGLLDESFLRRCLNFYGLLIQLLLRILDPAYPDITLPLNSDVPKVFAALPEFYVEDVAEFLFFIVQYSPQALYEPCTQDIVMFLVVMLCNQNYIRNPYLVAKLVEVMFMTNPAVQPRTQKFFEMIENHPLSTKLLVPSLMKFYTDVEHTGATSEFYDKFTIRYHISTIFKSLWQNIAHHGTFMEEFNSGKQFVRYINMLINDTTFLLDESLESLKRIHEVQEEMKNKEQWDQLPRDQQQARQSQLAQDERVSRSYLALATETVDMFHILTKQVQKPFLRPELGPRLAAMLNFNLQQLCGPKCRDLKVENPEKYGFEPKKLLDQLTDIYLQLDCARFAKAIADDQRSYSKELFEEVISKMRKAGIKSTIAIEKFKLLAEKVEEIVAKNARAEIDYSDAPDEFRDPLMDTLMTDPVRLPSGTIMDRSIILRHLLNSPTDPFNRQTLTESMLEPVPELKEQIQAWMREKQNSDH

SEQ ID NO: 10189 - protein, 99 aa, Artificial Sequence
  Synthetic polypeptide
IKDGVRMLHSHQTLSCPRWMWIQELKTWRLMKMIEEKSGASVIRSLPRALKCLKSRPYSWSVRSSVSLGRTGTEMSSFFLLFLHSLSRTQKKYSPILRT

SEQ ID NO: 10190 - protein, 19 aa, Artificial Sequence
  Synthetic polypeptide
GCFTLIRLCHVPGGCGFRN

SEQ ID NO: 10191 - protein, 1199 aa, Artificial Sequence
  Synthetic polypeptide
RWSKDASLSSDFVMSQVDVDSGIENMEVDENDRREKRSLSDKEPSSGPEVSEEQALQLVCKIFRVSWKDRDRDVIFLSSLSAQFKQNPKEVFSDFKDLIGQILMEVLMMSTQTRDENPFASLTATSQPIAAAARSPDRNLLLNTGSNPGTSPMFCSVASFGASSLSSLYESSPAPTPSFWSSVPVMGPSLASPSRAASQLAVPSTPLSPHSAASGTAAGSQPSSPRYRPYTVTHPWASSGVSILSSSPSPPALASSPQAVPASSSRQRPSSTGPPLPPASPSATSRRPSSLRISPSLGASGGASNWDSYSDHFTIETCKETDMLNYLIECFDRVGIEEKKAPKMCSQPAVSQLLSNIRSQCISHTALVLQGSLTQPRSLQQPSFLVPYMLCRNLPYGFIQELVRTTHQDEEVFKQIFIPILQGLALAAKECSLDSDYFKYPLMALGELCETKFGKTHPVCNLVASLRLWLPKSLSPGCGRELQRLSYLGAFFSFSVFAEDDVKVVEKYFSGPAITLENTRVVSQSLQHYLELGRQELFKILHSILLNGETREAALSYMAAVVNANMKKAQMQTDDRLVSTDGFMLNFLWVLQQLSTKIKLETVDPTYIFHPRCRITLPNDETRVNATMEDVNDWLTELYGDQPPFSEPKFPTECFFLTLHAHHLSILPSCRRYIRRLRAIRELNRTVEDLKNNESQWKDSPLATRHREMLKRCKTQLKKLVRCKACADAGLLDESFLRRCLNFYGLLIQLLLRILDPAYPDITLPLNSDVPKVFAALPEFYVEDVAEFLFFIVQYSPQALYEPCTQDIVMFLVVMLCNQNYIRNPYLVAKLVEVMFMTNPAVQPRTQKFFEMIENHPLSTKLLVPSLMKFYTDVEHTGATSEFYDKFTIRYHISTIFKSLWQNIAHHGTFMEEFNSGKQFVRYINMLINDTTFLLDESLESLKRIHEVQEEMKNKEQWDQLPRDQQQARQSQLAQDERVSRSYLALATETVDMFHILTKQVQKPFLRPELGPRLAAMLNFNLQQLCGPKCRDLKVENPEKYGFEPKKLLDQLTDIYLQLDCARFAKAIADDQRSYSKELFEEVISKMRKAGIKSTIAIEKFKLLAEKVEEIVAKNARAEIDYSDAPDEFRDPLMDTLMTDPVRLPSGTIMDRSIILRHLLNSPTDPFNRQTLTESMLEPVPELKEQIQAWMREKQNSDH

SEQ ID NO: 10192 - protein, 8 aa, Artificial Sequence
  Synthetic polypeptide
LPSCILRF

SEQ ID NO: 10193 - protein, 989 aa, Artificial Sequence
  Synthetic polypeptide
LSLECNFPHVFSDFKDLIGQILMEVLMMSTQTRDENPFASLTATSQPIAAAARSPDRNLLLNTGSNPGTSPMFCSVASFGASSLSSLGASGGASNWDSYSDHFTIETCKETDMLNYLIECFDRVGIEEKKAPKMCSQPAVSQLLSNIRSQCISHTALVLQGSLTQPRSLQQPSFLVPYMLCRNLPYGFIQELVRTTHQDEEVFKQIFIPILQGLALAAKECSLDSDYFKYPLMALGELCETKFGKTHPVCNLVASLRLWLPKSLSPGCGRELQRLSYLGAFFSFSVFAEDDVKVVEKYFSGPAITLENTRVVSQSLQHYLELGRQELFKILHSILLNGETREAALSYMAAVVNANMKKAQMQTDDRLVSTDGFMLNFLWVLQQLSTKIKLETVDPTYIFHPRCRITLPNDETRVNATMEDVNDWLTELYGDQPPFSEPKFPTECFFLTLHAHHLSILPSCRRYIRRLRAIRELNRTVEDLKNNESQWKDSPLATRHREMLKRCKTQLKKLVRCKACADAGLLDESFLRRCLNFYGLLIQLLLRILDPAYPDITLPLNSDVPKVFAALPEFYVEDVAEFLFFIVQYSPQALYEPCTQDIVMFLVVMLCNQNYIRNPYLVAKLVEVMFMTNPAVQPRTQKFFEMIENHPLSTKLLVPSLMKFYTDVEHTGATSEFYDKFTIRYHISTIFKSLWQNIAHHGTFMEEFNSGKQFVRYINMLINDTTFLLDESLESLKRIHEVQEEMKNKEQWDQLPRDQQQARQSQLAQDERVSRSYLALATETVDMFHILTKQVQKPFLRPELGPRLAAMLNFNLQQLCGPKCRDLKVENPEKYGFEPKKLLDQLTDIYLQLDCARFAKAIADDQRSYSKELFEEVISKMRKAGIKSTIAIEKFKLLAEKVEEIVAKNARAEIDYSDAPDEFRDPLMDTLMTDPVRLPSGTIMDRSIILRHLLNSPTDPFNRQTLTESMLEPVPELKEQIQAWMREKQNSDH

SEQ ID NO: 10194 - protein, 16 aa, Artificial Sequence
  Synthetic polypeptide
YHWNVTSLMYSPILRT

SEQ ID NO: 10195 - protein, 993 aa, Artificial Sequence
  Synthetic polypeptide
LSLECNFPHVFSDFKDLIGQILMEVLMMSTQTRDENPFASLTATSQPIAAAARSPDRNLLLNTGSNPGTSPMFCSVASFGASSLSSLGASGGASNWDSYSDHFTIETCKETDMLNYLIECFDRVGIEEKKAPKMCSQPAVSQLLSNIRSQCISHTALVLQGSLTQPRSLQQPSFLVPYMLCRNLPYGFIQELVRTTHQDEEVFKQIFIPILQGLALAAKECSLDSDYFKYPLMALGELCETKFGKTHPVCNLVASLRLWLPKSLSPGCGRELQRLSYLGAFFSFSVFAEDDVKVVEKYFSGPAITLENTRVVSQSLQHYLELGRQELFKILHSILLNGETREAALSYMAAVVNANMKKAQMQTDDRLVSTDGFMLNFLWVLQQLSTKIKLETVDPTYIFHPRCRITLPNDETRVNATMEDVNDWLTELYGDQPPFSEPKFPTECFFLTLHAHHLSILPSCRRYIRRLRAIRELNRTVEDLKNNESQWKDSPLATRHREMLKRCKTQLKKLVRCKACADAGLLDESFLRRCLNFYGLLIQLLLRILDPAYPDITLPLNSDVPKVFAALPEFYVEDVAEFLFFIVQYSPQALYEPCTQDIVMFLVVMLCNQNYIRNPYLVAKLVEVMFMTNPAVQPRTQKFFEMIENHPLSTKLLVPSLMKFYTDVEHTGATSEFYDKFTIRYHISTIFKSLWQNIAHHGTFMEEFNSGKQFVRYINMLINDTTFLLDESLESLKRIHEVQEEMKNKEQWDQLPRDQQQARQSQLAQDERVSRSYLALATETVDMFHILTKQVQKPFLRPELGPRLAAMLNFNLQQLCGPKCRDLKVENPEKYGFEPKKLLDQLTDIYLQLDCARFAKAIADDQRSYSKELFEEVISKMRKAGIKSTIAIEKFKLLAEKVEEIVAKNARAEIDYSDAPDEFRGKWTHPLMDTLMTDPVRLPSGTIMDRSIILRHLLNSPTDPFNRQTLTESMLEPVPELKEQIQAWMREKQNSDH

SEQ ID NO: 10196 - protein, 1118 aa, Artificial Sequence
  Synthetic polypeptide
LSLECNFPHVFSDFKDLIGQILMEVLMMSTQTRDENPFASLTATSQPIAAAARSPDRNLLLNTGSNPGTSPMFCSVASFGASSLSSLYESSPAPTPSFWSSVPVMGPSLASPSRAASQLAVPSTPLSPHSAASGTAAGSQPSSPRYRPYTVTHPWASSGVSILSSSPSPPALASSPQAVPASSSRQRPSSTGPPLPPASPSATSRRPSSLRISPSLGASGGASNWDSYSDHFTIETCKETDMLNYLIECFDRVGIEEKKAPKMCSQPAVSQLLSNIRSQCISHTALVLQGSLTQPRSLQQPSFLVPYMLCRNLPYGFIQELVRTTHQDEEVFKQIFIPILQGLALAAKECSLDSDYFKYPLMALGELCETKFGKTHPVCNLVASLRLWLPKSLSPGCGRELQRLSYLGAFFSFSVFAEDDVKVVEKYFSGPAITLENTRVVSQSLQHYLELGRQELFKILHSILLNGETREAALSYMAAVVNANMKKAQMQTDDRLVSTDGFMLNFLWVLQQLSTKIKLETVDPTYIFHPRCRITLPNDETRVNATMEDVNDWLTELYGDQPPFSEPKFPTECFFLTLHAHHLSILPSCRRYIRRLRAIRELNRTVEDLKNNESQWKDSPLATRHREMLKRCKTQLKKLVRCKACADAGLLDESFLRRCLNFYGLLIQLLLRILDPAYPDITLPLNSDVPKVFAALPEFYVEDVAEFLFFIVQYSPQALYEPCTQDIVMFLVVMLCNQNYIRNPYLVAKLVEVMFMTNPAVQPRTQKFFEMIENHPLSTKLLVPSLMKFYTDVEHTGATSEFYDKFTIRYHISTIFKSLWQNIAHHGTFMEEFNSGKQFVRYINMLINDTTFLLDESLESLKRIHEVQEEMKNKEQWDQLPRDQQQARQSQLAQDERVSRSYLALATETVDMFHILTKQVQKPFLRPELGPRLAAMLNFNLQQLCGPKCRDLKVENPEKYGFEPKKLLDQLTDIYLQLDCARFAKAIADDQRSYSKELFEEVISKMRKAGIKSTIAIEKFKLLAEKVEEIVAKNARAEIDYSDAPDEFRDPLMDTLMTDPVRLPSGTIMDRSIILRHLLNSPTDPFNRQTLTESMLEPVPELKEQIQAWMREKQNSDH

SEQ ID NO: 10197 - protein, 47 aa, Artificial Sequence
  Synthetic polypeptide
SEPAVQYLIVSMSQTALIISSPAHGRVEGGKCARGSAAGSSVSACSG

SEQ ID NO: 10198 - protein, 258 aa, Artificial Sequence
  Synthetic polypeptide
VKQLLLSPPQPMAELKEESAPEDQQQARQSQLAQDERVSRSYLALATETVDMFHILTKQVQKPFLRPELGPRLAAMLNFNLQQLCGPKCRDLKVENPEKYGFEPKKLLDQLTDIYLQLDCARFAKAIADDQRSYSKELFEEVISKMRKAGIKSTIAIEKFKLLAEKVEEIVAKNARAEIDYSDAPDEFRDPLMDTLMTDPVRLPSGTIMDRSIILRHLLNSPTDPFNRQTLTESMLEPVPELKEQIQAWMREKQNSDH

SEQ ID NO: 10199 - protein, 61 aa, Artificial Sequence
  Synthetic polypeptide
RRKVRQRISSRLVSLSLLRMSVCPALTSPWPPKPWTCSTSSRSRSRSPSSDRSLDPDWLQC

SEQ ID NO: 10200 - protein, 262 aa, Artificial Sequence
  Synthetic polypeptide
VKQLLLSPPQPMAELKEESAPEDQQQARQSQLAQDERVSRSYLALATETVDMFHILTKQVQKPFLRPELGPRLAAMLNFNLQQLCGPKCRDLKVENPEKYGFEPKKLLDQLTDIYLQLDCARFAKAIADDQRSYSKELFEEVISKMRKAGIKSTIAIEKFKLLAEKVEEIVAKNARAEIDYSDAPDEFRGKWTHPLMDTLMTDPVRLPSGTIMDRSIILRHLLNSPTDPFNRQTLTESMLEPVPELKEQIQAWMREKQNSDH

SEQ ID NO: 10201 - protein, 30 aa, Artificial Sequence
  Synthetic polypeptide
ATPSRFVDPTVRNCLKKLFQRCGRQGSNPQ

SEQ ID NO: 10202 - protein, 129 aa, Artificial Sequence
  Synthetic polypeptide
VCRSYSKELFEEVISKMRKAGIKSTIAIEKFKLLAEKVEEIVAKNARAEIDYSDAPDEFRDPLMDTLMTDPVRLPSGTIMDRSIILRHLLNSPTDPFNRQTLTESMLEPVPELKEQIQAWMREKQNSDH

SEQ ID NO: 10203 - protein, 133 aa, Artificial Sequence
  Synthetic polypeptide
VCRSYSKELFEEVISKMRKAGIKSTIAIEKFKLLAEKVEEIVAKNARAEIDYSDAPDEFRGKWTHPLMDTLMTDPVRLPSGTIMDRSIILRHLLNSPTDPFNRQTLTESMLEPVPELKEQIQAWMREKQNSDH

SEQ ID NO: 10204 - protein, 1564 aa, Artificial Sequence
  Synthetic polypeptide
LTPVIPTIWEAEAGGSPEYAPEDIIEYDYEYGEAEYKEAESVTEGPTVTEETIAQTEANIVDDFQEYNYGTMESYQTEAPRHVSGTNEPNPVEEIFTEEYLTGEDYDSQRKNSEDTLYENKEIDGRDSDLLVDGDLGEYDFYEYKEYEDKPTSPPNEEFGPGVPAETDITETSINGHGAYGEKGQKGEPAVVEPGMLVEGPPGPAGPAGIMGPPGLQGPTGPPGDPGDRGPPGRPGLPGADGLPGPPGTMLMLPFRYGGDGSKGPTISAQEAQAQAILQQARIALRGPPGPMGLTGRPGPVGGPGSSGAKGESGDPGPQGPRGVQGPPGPTGKPGKRGRPGADGGRGMPGEPGAKGDRGFDGLPGLPGDKGHRGERGPQGPPGPPGDDGMRGEDGEIGPRGLPGEAGPRGLLGPRGTPGAPGQPGMAGVDGPPGPKGNMGPQGEPGPPGQQGNPGPQGLPGPQGPIGPPGEKGPQGKPGLAGLPGADGPPGHPGKEGQSGEKGALGPPGPQGPIGYPGPRGVKGADGVRGLKGSKGEKGEDGFPGFKGDMGLKGDRGEVGQIGPRGEDGPEGPKGRAGPTGDPGPSGQAGEKGKLGVPGLPGYPGRQGPKGSTGFPGFPGANGEKGARGVAGKPGPRGQRGPTGPRGSRGARGPTGKPGPKGTSGGDGPPGPPGERGPQGPQGPVGFPGPKGPPGPPGKDGLPGHPGQRGETGFQGKTGPPGPGGVVGPQGPTGETGPIGERGHPGPPGPPGEQGLPGAAGKEGAKGDPGPQGISGKDGPAGLRGFPGERGLPGAQGAPGLKGGEGPQGPPGPVGSPGERGSAGTAGPIGLPGRPGPQGPPGPAGEKGAPGEKGPQGPAGRDGVQGPVGLPGPAGPAGSPGEDGDKGEIGEPGQKGSKGDKGENGPPGPPGLQGPVGAPGIAGGDGEPGPRGQQGMFGQKGDEGARGFPGPPGPIGLQGLPGPPGEKGENGDVGPMGPPGPPGPRGPQGPNGADGPQGPPGSVGSVGGVGEKGEPGEAGNPGPPGEAGVGGPKGERGEKGEAGPPGAAGPPGAKGPPGDDGPKGNPGPVGFPGDPGPPGEPGPAGQDGVGGDKGEDGDPGQPGPPGPSGEAGPPGPPGKRGPPGAAGAEGRQGEKGAKGEAGAEGPPGKTGPVGPQGPAGKPGPEGLRGIPGPVGEQGLPGAAGQDGPPGPMGPPGLPGLKGDPGSKGEKGHPGLIGLIGPPGEQGEKGDRGLPGTQGSPGAKGDGGIPGPAGPLGPPGPPGLPGPQGPKGNKGSTGPAGQKGDSGLPGPPGSPGPPGEVIQPLPILSSKKTRRHTEGMQADADDNILDYSDGMEEIFGSLNSLKQDIEHMKFPMGTQTNPARTCKDLQLSHPDFPDGEYWIDPNQGCSGDSFKVYCNFTSGGETCIYPDKKSEGVRISSWPKEKPGSWFSEFKRGKLLSYLDVEGNSINMVQMTFLKLLTASARQNFTYHCHQSAAWYDVSSGSYDKALRFLGSNDEEMSYDNNPFIKTLYDGCASRKGYEKTVIEINTPKIDQVPIVDVMINDFGDQNQKFGFEVGPVCFLG

SEQ ID NO: 10205 - protein, 19 aa, Artificial Sequence
  Synthetic polypeptide
SQQFGRPKRADHLSMHQRI

SEQ ID NO: 10206 - protein, 1448 aa, Artificial Sequence
  Synthetic polypeptide
LTPVIPTIWEAEAGGSPEYAPEDIIEYDYEYGEAEYKEAESVTEGPTVTEETIAQTEINGHGAYGEKGQKGEPAVVEPGMLVEGPPGPAGPAGIMGPPGLQGPTGPPGDPGDRGPPGRPGLPGADGLPGPPGTMLMLPFRYGGDGSKGPTISAQEAQAQAILQQARIALRGPPGPMGLTGRPGPVGGPGSSGAKGESGDPGPQGPRGVQGPPGPTGKPGKRGRPGADGGRGMPGEPGAKGDRGFDGLPGLPGDKGHRGERGPQGPPGPPGDDGMRGEDGEIGPRGLPGEAGPRGLLGPRGTPGAPGQPGMAGVDGPPGPKGNMGPQGEPGPPGQQGNPGPQGLPGPQGPIGPPGEKGPQGKPGLAGLPGADGPPGHPGKEGQSGEKGALGPPGPQGPIGYPGPRGVKGADGVRGLKGSKGEKGEDGFPGFKGDMGLKGDRGEVGQIGPRGEDGPEGPKGRAGPTGDPGPSGQAGEKGKLGVPGLPGYPGRQGPKGSTGFPGFPGANGEKGARGVAGKPGPRGQRGPTGPRGSRGARGPTGKPGPKGTSGGDGPPGPPGERGPQGPQGPVGFPGPKGPPGPPGKDGLPGHPGQRGETGFQGKTGPPGPGGVVGPQGPTGETGPIGERGHPGPPGPPGEQGLPGAAGKEGAKGDPGPQGISGKDGPAGLRGFPGERGLPGAQGAPGLKGGEGPQGPPGPVGSPGERGSAGTAGPIGLPGRPGPQGPPGPAGEKGAPGEKGPQGPAGRDGVQGPVGLPGPAGPAGSPGEDGDKGEIGEPGQKGSKGDKGENGPPGPPGLQGPVGAPGIAGGDGEPGPRGQQGMFGQKGDEGARGFPGPPGPIGLQGLPGPPGEKGENGDVGPMGPPGPPGPRGPQGPNGADGPQGPPGSVGSVGGVGEKGEPGEAGNPGPPGEAGVGGPKGERGEKGEAGPPGAAGPPGAKGPPGDDGPKGNPGPVGFPGDPGPPGEPGPAGQDGVGGDKGEDGDPGQPGPPGPSGEAGPPGPPGKRGPPGAAGAEGRQGEKGAKGEAGAEGPPGKTGPVGPQGPAGKPGPEGLRGIPGPVGEQGLPGAAGQDGPPGPMGPPGLPGLKGDPGSKGEKGHPGLIGLIGPPGEQGEKGDRGLPGTQGSPGAKGDGGIPGPAGPLGPPGPPGLPGPQGPKGNKGSTGPAGQKGDSGLPGPPGSPGPPGEVIQPLPILSSKKTRRHTEGMQADADDNILDYSDGMEEIFGSLNSLKQDIEHMKFPMGTQTNPARTCKDLQLSHPDFPDGEYWIDPNQGCSGDSFKVYCNFTSGGETCIYPDKKSEGVRISSWPKEKPGSWFSEFKRGKLLSYLDVEGNSINMVQMTFLKLLTASARQNFTYHCHQSAAWYDVSSGSYDKALRFLGSNDEEMSYDNNPFIKTLYDGCASRKGYEKTVIEINTPKIDQVPIVDVMINDFGDQNQKFGFEVGPVCFLG

SEQ ID NO: 10207 - protein, 16 aa, Artificial Sequence
  Synthetic polypeptide
QNEQINGTSKSSAQKT

SEQ ID NO: 10208 - protein, 217 aa, Artificial Sequence
  Synthetic polypeptide
GQVQWLTPVISALWEAEAGRSRGQEIETILANMMLVDAPCSDLAQELRQSCATVQRLQHTLQQVLDQREEVRQSKQLLQLYLQALEKEGSLLSKQEESKAAFGEEVDAVDTGISRETSSDVALASHILTALREKQAPELSLSSQDLELVTKEDPKALAVALNWDIKKTETVQEACERELALRLQQTQSLHSLRSISASKASPPGDLQNPKRARQDPT

SEQ ID NO: 10209 - protein, 4 aa, Artificial Sequence
  Synthetic polypeptide
HDAC

SEQ ID NO: 10210 - protein, 154 aa, Artificial Sequence
  Synthetic polypeptide
GQVQWLTPVISALWEAEAGRSRGQEIETILANMMLVDAPCSDLAQELRQSCATVQRLQHTLQQVLDQREEVRQSKQLLQLYLQALEKEGSLLSKQEESKAAFGEEVDAVDTGISRETSSDVALASHILTALREKQAPELSLSSQDLEVGGNQGH

SEQ ID NO: 10211 - protein, 6 aa, Artificial Sequence
  Synthetic polypeptide
KEREFL

SEQ ID NO: 10212 - protein, 290 aa, Artificial Sequence
  Synthetic polypeptide
RNVSSCDILAIDKSLTPVTLVLAEDGTIVDDDDYFLCLPSNTKFVALASNEKWAYNNSDGGTAWISQESFDVDETDSGAGLKWKNVARQLKEDLSSIILLSEEDLQMLVDAPCSDLAQELRQSCATVQRLQHTLQQVLDQREEVRQSKQLLQLYLQALEKEGSLLSKQEESKAAFGEEVDAVDTGISRETSSDVALASHILTALREKQAPELSLSSQDLELVTKEDPKALAVALNWDIKKTETVQEACERELALRLQQTQSLHSLRSISASKASPPGDLQNPKRARQDPT

SEQ ID NO: 10213 - protein, 11 aa, Artificial Sequence
  Synthetic polypeptide
VPVTFWPLISP

SEQ ID NO: 10214 - protein, 118 aa, Artificial Sequence
  Synthetic polypeptide
RNVSSCDILAIDKSLTPVTLVLAEDGTIVDDDDYFLCLPSNTKFVALASNEKWAYNNSDGGTAWISQESFDVDETDSGAGLKWKNVARQLKEDLSSIILLSEEDLQSPKLPLVRRWMQ

SEQ ID NO: 10215 - protein, 227 aa, Artificial Sequence
  Synthetic polypeptide
RNVSSCDILAIDKSLTPVTLVLAEDGTIVDDDDYFLCLPSNTKFVALASNEKWAYNNSDGGTAWISQESFDVDETDSGAGLKWKNVARQLKEDLSSIILLSEEDLQMLVDAPCSDLAQELRQSCATVQRLQHTLQQVLDQREEVRQSKQLLQLYLQALEKEGSLLSKQEESKAAFGEEVDAVDTGISRETSSDVALASHILTALREKQAPELSLSSQDLEVGGNQGH

SEQ ID NO: 10216 - protein, 288 aa, Artificial Sequence
  Synthetic polypeptide
KEPCDILAIDKSLTPVTLVLAEDGTIVDDDDYFLCLPSNTKFVALASNEKWAYNNSDGGTAWISQESFDVDETDSGAGLKWKNVARQLKEDLSSIILLSEEDLQMLVDAPCSDLAQELRQSCATVQRLQHTLQQVLDQREEVRQSKQLLQLYLQALEKEGSLLSKQEESKAAFGEEVDAVDTGISRETSSDVALASHILTALREKQAPELSLSSQDLELVTKEDPKALAVALNWDIKKTETVQEACERELALRLQQTQSLHSLRSISASKASPPGDLQNPKRARQDPT

SEQ ID NO: 10217 - protein, 12 aa, Artificial Sequence
  Synthetic polypeptide
RNPVTFWPLISP

SEQ ID NO: 10218 - protein, 3 aa, Artificial Sequence
  Synthetic polypeptide
GTL

SEQ ID NO: 10219 - protein, 116 aa, Artificial Sequence
  Synthetic polypeptide
KEPCDILAIDKSLTPVTLVLAEDGTIVDDDDYFLCLPSNTKFVALASNEKWAYNNSDGGTAWISQESFDVDETDSGAGLKWKNVARQLKEDLSSIILLSEEDLQSPKLPLVRRWMQ

SEQ ID NO: 10220 - protein, 225 aa, Artificial Sequence
  Synthetic polypeptide
KEPCDILAIDKSLTPVTLVLAEDGTIVDDDDYFLCLPSNTKFVALASNEKWAYNNSDGGTAWISQESFDVDETDSGAGLKWKNVARQLKEDLSSIILLSEEDLQMLVDAPCSDLAQELRQSCATVQRLQHTLQQVLDQREEVRQSKQLLQLYLQALEKEGSLLSKQEESKAAFGEEVDAVDTGISRETSSDVALASHILTALREKQAPELSLSSQDLEVGGNQGH

SEQ ID NO: 10221 - protein, 58 aa, Artificial Sequence
  Synthetic polypeptide
GRAWWLMPVMPALWEAETGGSLEVYQRCRSLGTILEHHPQLCMKDPLYSSRPGIPLNF

SEQ ID NO: 10222 - protein, 21 aa, Artificial Sequence
  Synthetic polypeptide
CQHFGRPRRADHLRFTKDAGH

SEQ ID NO: 10223 - protein, 557 aa, Artificial Sequence
  Synthetic polypeptide
ADKQLQQSLRIQNQCTKITSILIHQQQTESQIMSELPFTIATKRIKYLGIQLTRDVKDLFKENCKPLLNEIKEDTNKWKNIPCSWVGRISIVKMAILPKAIYRFNAIPIKLPMTFFTELEKTTLKFIWNQKRARIAKSILSQKNKAGGIMLPDFKLYYKATVTKPAWYWYQNRDIDQWNRTEPSEITPHIYNYLIFDKPEKNKQWGKDSLFNKWCWENWLAICRKLKLDPFLTPYTKINSRWIKDLNVRPKTIKPLEENLGITIQDIGMGKDFMSKTPKAMATKAKIDKWDLIKLKSFCTAKETTIRVNRQPPKWEKIFATYSSDKGLISRIYNELKQIYKKKTNNPIKKWVKDMNRHFSKEDIYAAKKHMKKCSPSLAIREMQIKTTMRYHLTPVRMAIIKKSGNNRCWRGCGEIGTLLHCWWDCKLVQPLWKSVWQFLRDLELEISFDPAIPLLGIYPKDYKSCCYKDTCTCMFIVALFTIAKTWNQAKCPTMIDWIKKMWHIYTMEYYAAIKDEFMSFVGTWMKLEIIILSKLSQEQKTKHRIFSLIALMLMGQ

SEQ ID NO: 10224 - protein, 360 aa, Artificial Sequence
  Synthetic polypeptide
TITRTKNQTPHILTHSIDVDGTMTVDWNEWRDYFLFNPVTDIEEIIRFWKHSTGIDIGDSLTIPDEFTEDEKKSGQWWRQLLAGGIAGAVSRTSTAPLDRLKIMMQVHGSKSDKMNIFGGFRQMVKEGGIRSLWRGNGTNVIKIAPETAVKFWAYEQYKKLLTEEGQKIGTFERFISGSMAGATAQTFIYPMEVMKTRLAVGKTGQYSGIYDCAKKILKHEGLGAFYKGYVPNLLGIIPYAGIDLAVYELLKSYWLDNFAKDSVNPGVMVLLGCGALSSTCGQLASYPLALVRTRMQAQAMLEGSPQLNMVGLFRRIISKEGIPGLYRGITPNFMKVLPAVGISYVVYENMKQTLGVTQK

SEQ ID NO: 10225 - protein, 23 aa, Artificial Sequence
  Synthetic polypeptide
TITRTKNQTPHILTHSIDVDGTM

SEQ ID NO: 10226 - protein, 40 aa, Artificial Sequence
  Synthetic polypeptide
FQHFGRPRQVDHLGSGVQDQPGQYENFYYWRCQQRWEAGF

SEQ ID NO: 10227 - protein, 448 aa, Artificial Sequence
  Synthetic polypeptide
GAVAHACNSSTLGGQGRWITWGQEFKTSLANMKIFTTGDVNKDGKLDFEEFMKYLKDHEKKMKLAFKSLDKNNDGKIEASEIVQSLQTLGLTISEQQAELILQSIDVDGTMTVDWNEWRDYFLFNPVTDIEEIIRFWKHSTGIDIGDSLTIPDEFTEDEKKSGQWWRQLLAGGIAGAVSRTSTAPLDRLKIMMQVHGSKSDKMNIFGGFRQMVKEGGIRSLWRGNGTNVIKIAPETAVKFWAYEQYKKLLTEEGQKIGTFERFISGSMAGATAQTFIYPMEVMKTRLAVGKTGQYSGIYDCAKKILKHEGLGAFYKGYVPNLLGIIPYAGIDLAVYELLKSYWLDNFAKDSVNPGVMVLLGCGALSSTCGQLASYPLALVRTRMQAQAMLEGSPQLNMVGLFRRIISKEGIPGLYRGITPNFMKVLPAVGISYVVYENMKQTLGVTQK

SEQ ID NO: 10228 - protein, 81 aa, Artificial Sequence
  Synthetic polypeptide
GAVAHACNSSTLGGQGRWITWGQEFKTSLANMKIFTTGDVNKDGKLDFEEFMKYLKDHEKKMKLAFKSLDKNNDALMLMGQ

SEQ ID NO: 10229 - protein, 164 aa, Artificial Sequence
  Synthetic polypeptide
AQEFETSLGIIVRPRLYKKQKNNQSQQGKPLRKDRSAEETFQLSRWTPFIKDIMEDAIDNRLDSKEWPYCSQCPAVWNGSGAVSARQKPRANYLEDRKNGSKLIVFVIGGITYSEVRCAYEVSQAHKSCEVIIGSTHVLTPKKLLDDIKMLNKPKDKVSLIKDE

SEQ ID NO: 10230 - protein, 18 aa, Artificial Sequence
  Synthetic polypeptide
DLASTKNKKITSLNKANR

SEQ ID NO: 10231 - protein, 35 aa, Artificial Sequence
  Synthetic polypeptide
PVSTRQTVKKGSVCRRNFSALSVDTFYQRYYGGCY

SEQ ID NO: 10232 - protein, 554 aa, Artificial Sequence
  Synthetic polypeptide
TFFLMMKYRMLSPLRLGTRQVCLLSPLLINIMPKVPGSMKKARNKNKRLEWKKLSLFADHLIVYAESELLQLNNFNKITGYNTQNQRFRADNLNKLKNLCSKTIGEKMKKKEPVGDDESVPENVLSFDDLTADALANLKVSQIKKVRLLIDEAILKCDAERIKLEAERFENLREIGNLLHPSVPISNDEDVDNKVERIWGDCTVRKKYSHVDLVVMVDGFEGEKGAVVAGSRGYFLKGVLVFLEQALIQYALRTLGSRGYIPIYTPFFMRKEVMQEVAQLSQFDEELYKVIGKGSEKSDDNSYDEKYLIATSEQPIAALHRDEWLRPEDLPIKYAGLSTCFRQEVGSHGRDTRGIFRVHQFEKIEQFVYSSPHDNKSWEMFEEMITTAEEFYQSLGIPYHIVNIVSGSLNHAASKKLDLEAWFPGSGAFRELVSCSNCTDYQARRLRIRYGQTKKMMDKVEFVHMLNATMCATTRTICAILENYQTEKGITVPEKLKEFMPPGLQELIPFVKPAPIEQEPSKKQKKQHEGSKKKAAARDVTLENRLQNMEVTDA

SEQ ID NO: 10233 - protein, 14 aa, Artificial Sequence
  Synthetic polypeptide
LDTIHRIKDFGQTT

SEQ ID NO: 10234 - protein, 40 aa, Artificial Sequence
  Synthetic polypeptide
QNNWIQYTESKISGRQLEQAEEPMQQDNRRENEEKRASGR

SEQ ID NO: 10235 - protein, 576 aa, Artificial Sequence
  Synthetic polypeptide
TFFLMMKYRMLSPLRLGTRQVCLLSPLLINIMPKVPGSMKKARNKNKRLEWKKLSLFADHLIVYAESELLQLNNFNKITGYNTQNQRFRADNLNKLKNLCSKTIGEKMKKKEPVGDDESVPENVLSFDDLTADALANLKVSQIKKVRLLIDEAILKCDAERIKLEAERFENLREIGNLLHPSVPISNDEDVDNKVERIWGDCTVRKKYSHVDLVVMVDGFEGEKGAVVAGSRGYFLKGVLVFLEQALIQYALRTLGSRGYIPIYTPFFMRKEVMQEVAQLSQFDEELYKVIGKGSEKSDDNSYDEKYLIATSEQPIAALHRDEWLRPEDLPIKYAGLSTCFRQEVGSHGRDTRGIFRVHQFEKIEQFVYSSPHDNKSWEMFEEMITTAEEFYQSLGIPYHIVNIVSGSLNHAASKKLDLEAWFPGSGAFRELVSCSNCTDYQARRLRIRYGQTKKMMDKRKNNLHLSTQNKLEASLFSPKKVEFVHMLNATMCATTRTICAILENYQTEKGITVPEKLKEFMPPGLQELIPFVKPAPIEQEPSKKQKKQHEGSKKKAAARDVTLENRLQNMEVTDA

SEQ ID NO: 10236 - protein, 25 aa, Artificial Sequence
  Synthetic polypeptide
FQHFGRPRQDCLSSGVGDQPGQHRA

SEQ ID NO: 10237 - protein, 29 aa, Artificial Sequence
  Synthetic polypeptide
AQELETSLGNIGREYFFSRRKIISSGICH

SEQ ID NO: 10238 - protein, 49 aa, Artificial Sequence
  Synthetic polypeptide
GRARWVMPEIPALWEADAGGSLEVRSSRPAWPTWSFLLAPCIHGLGGCM

SEQ ID NO: 10239 - protein, 48 aa, Artificial Sequence
  Synthetic polypeptide
AGRGGSCLKSQHFGRPTRVDHLRSGVRDQPGQHGLFSWHPVFMALADV

SEQ ID NO: 10240 - protein, 26 aa, Artificial Sequence
  Synthetic polypeptide
GQEFETSLANMVFSPGTLYSWPWRMY

SEQ ID NO: 10241 - protein, 52 aa, Artificial Sequence
  Synthetic polypeptide
GRARWVMPEIPALWEADAGGSLEVRSSRPAWPTWSFLLAPCIHGLGVLPLHG

SEQ ID NO: 10242 - protein, 83 aa, Artificial Sequence
  Synthetic polypeptide
AGRGGSCLKSQHFGRPTRVDHLRSGVRDQPGQHGLFSWHPVFMALAFCLCMAEAILLFSPEHSLFFFCSRKARIRLHWAGQTL

SEQ ID NO: 10243 - protein, 60 aa, Artificial Sequence
  Synthetic polypeptide
GQEFETSLANMVFSPGTLYSWPWRSASAWLKPSYSSHLNTPCSSSAPEKHGSGSTGQGRP

SEQ ID NO: 10244 - protein, 213 aa, Artificial Sequence
  Synthetic polypeptide
AGRGGSCLKSQHFGRPTRVDHLRSGVRDQPGQHGLFSWHPVFMALAFCLCMAEAILLFSPEHSLFFFCSRKARIRLHWAGQTLAILCAALGLGFIISSRTRSELPHLVSWHSWVGALTLLATAVQALCGLCLLCPRAARVSRVARLKLYHLTCGLVVYLMATVTVLLGMYSVWFQAQIKGAAWYLCLALPVYPALVIMHQISRSYLPRKKMEM

SEQ ID NO: 10245 - protein, 215 aa, Artificial Sequence
  Synthetic polypeptide
AGRGGSCLKSQHFGRPTRVDHLRSGVRDQPGQHGLFSWHPVFMALAFCLCMAEAILLFSPEHSLFFFCSRKARIRLHWAGQTLAILCAALGLGFIISSRTRSELPHLVSWHSWVGALTLLATAVQALCGLCLLCPRAARVSRVARLKLYHLTCGLVVYLMATVTVLLGMYSVWFQAQIKGAAWYLCLALPVYPALVIMHQISRSYLPRKKMEIAT

SEQ ID NO: 10246 - protein, 78 aa, Artificial Sequence
  Synthetic polypeptide
GRARWVMPEIPALWEADAGGSLEVRSSRPAWPTWSFLLAPCIHGLGGCMRAPPFSQASKPDMRLTGSLLCSQFCLCMA

SEQ ID NO: 10247 - protein, 55 aa, Artificial Sequence
  Synthetic polypeptide
GQEFETSLANMVFSPGTLYSWPWRMYESTSFFSGLQARHEAYWLSPMFTVLPLHG

SEQ ID NO: 10248 - protein, 822 aa, Artificial Sequence
  Synthetic polypeptide
GLPSHVELAVWLACVQPTVFPWSLSFRSDTDKPSSAAEVLTEASSCWTDTVECFSDYMTLWIPRSHVEGLRRWLARTLHLPGTWRSPDHLDSSLAKCGYFLHLASDGDFLFRVQYSACFVQKEKANYRLEIRIFQKGVMGLERSDRYIMKCPMLRSRLGQESVHCGPMFIQVSRPLPLWRDNRQTPWLLSLRGELVASLEDASLMGLYVDMNATTVTVQSPRQGLLQRWEVLNTSAELLPLWLVSGHHAYSLEAACPPVSFQPESEVLVHIPKQRLGLVKRGSYIEETLSLRFLRVHQSNIFMVTENKDFVVVSIPAAGVLQVQRCQEVGGTPGTQAFYRVDLSLEFAEMAAPVLWTVESFFQCVGSGTESPASTAALRTTPSPPSPGPETPPAGVPPAASSQVWAAGPAAQEWLSRDLLHRPSDALAKKGLGPFLQTAKPARRGQTSASILPRVVQAQRGPQPPPGEAGIPGHPTPPATLPSEPVEGVQASPWRPRPVLPTHPALTLPVSSDASSPSPPAPRPERPESLLVSGPSVTLTEGLGTVRPEQDPAKSPGSPLLLRGLSSGDVAAPEPIMGEPGQASEEFQPLARPWRATLAAEELVSHRSPGEPQETCSGTEVERPRQTGPGLPREGARGHMDLSSSEPSQDIEGPGLSILPARDATFSTPSVRQPDPSAWLSSGPELTGMPRVRLAAPLAVLPMEPLPPEPVRPAALLTPEASSVGGPDQARYLESAPGWPVGQEEWGVAHTSSPPSTQTLSLWAPTGVLLPSLVELEYPFQAGRGASLQQELTEPTLALSAESHRPPELQDSVEGLSERPSR

SEQ ID NO: 10249 - protein, 50 aa, Artificial Sequence
  Synthetic polypeptide
DMPFTFHCDCEASPAMWNWPSGLPVFSPRCSHGASPSGQTRTSQALQQKF

SEQ ID NO: 10250 - protein, 91 aa, Artificial Sequence
  Synthetic polypeptide
VSRDLMVLKRRVSLQFPCRQALFSCLPPYETCLSPSTVIVRPPQPCGTGRLACLCSAHGVPMEPLLQVRHGQAKLCSRSFNRSIFLLDRHS

SEQ ID NO: 10251 - protein, 65 aa, Artificial Sequence
  Synthetic polypeptide
AEIAQLTPAWATERGSVSKNKKKSWLYDYTQTYNGSFYFSGICYLLSSVSFFFVPLAERWKNSLT

SEQ ID NO: 10252 - protein, 85 aa, Artificial Sequence
  Synthetic polypeptide
SQQLMRLRQENHLNLRVGGCSEPRLRNSLQPGQQSEALSQKTKKKAGYMIIPRHTMALSTSLAYAISSLQFPFFLYHWPKDGKTV

SEQ ID NO: 10253 - protein, 35 aa, Artificial Sequence
  Synthetic polypeptide
TCGSEVAVSRDCATHSSLGNRARLCLKKQKKKLVI

SEQ ID NO: 10254 - protein, 64 aa, Artificial Sequence
  Synthetic polypeptide
AEIAQLTPAWATERGSVSKNKKKSWLYDYTQTYNGSFYFSGICYLLSSVSFFFVPLAERWKNSL

SEQ ID NO: 10255 - protein, 83 aa, Artificial Sequence
  Synthetic polypeptide
DFPSHAELPVSGMSSVGQAPAVPSACGFEGCGCAPRWGGKARSATPAATRSPSSGNASTTPVLACPTCCAPGSRTAGTAAPWT

SEQ ID NO: 10256 - protein, 21 aa, Artificial Sequence
  Synthetic polypeptide
RSDFCHDCKFPETSPAMRNCL

SEQ ID NO: 10257 - protein, 127 aa, Artificial Sequence
  Synthetic polypeptide
VLMRSDGFISVWYFPCWHSFSLLPPCEEVISAMIVSFLRLPQPCGTACERDVQCGAGTCCAISLWLRGLRMCTPLGREGEECHPGSHKVPFFRKRKHHTCPCLPNLLCSRFPDGRYRCSMDLKNINF

SEQ ID NO: 10258 - protein, 34 aa, Artificial Sequence
  Synthetic polypeptide
NKRGYKQMEEHSMLMGRKNQYRENGHTVQGLSWC

SEQ ID NO: 10259 - protein, 592 aa, Artificial Sequence
  Synthetic polypeptide
ATSAKSQDTKSIFKNHKHSYTPITESQIMSELPFTIASKRMKYLGIHLTRDVKDLFKENYKPLLNEIKEDTNKWKNIPCSWVGRINIVKMAILSKVFHGADSDIEWLQKDFGLYVVNMFDTHQAARLLNLGRHSLDHLLKLYCNVDSNKQYQLADWRIRPLPEEMLSYARDDTHYLLYIYDKMRLEMWERGNGQPVQLQVVWQRSRDICLKKFIKPIFTDESYLELYRKQKKHLNTQQLTAFQLLFAWRDKTARREDESYGYVLPNHMMLKIAEELPKEPQGIIACCNPVPPLVRQQINEMHLLIQQAREMPLLKSEVAAGVKKSGPLPSAERLENVLFGPHDCSHAPPDGYPIIPTSGSVPVQKQASLFPDEKEDNLLGTTCLIATAVITLFNEPSAEDSKKGPLTVAQKKAQNIMESFENPFRMISNRWKLAQVQVQKDSKEAVKKKAAEQTAAREQAKEACKAAAEQAISVRQQVVLENAAKKRERATSDPRTTEQKQEKKRLKISKKPKDPEPPEKEFTPYDYSQSDFKAFAGNSKSKVSSQFDPNKQTPSGKKCIAAKKIKQSVGNKSMSFPTGKSDRGFRYNWPQR

SEQ ID NO: 10260 - protein, 15 aa, Artificial Sequence
  Synthetic polypeptide
KWPYCPRSFMVLIQT

SEQ ID NO: 10261 - protein, 617 aa, Artificial Sequence
  Synthetic polypeptide
ATSAKSQDTKSIFKNHKHSYTPITESQIMSELPFTIASKRMKYLGIHLTRDVKDLFKENYKPLLNEIKEDTNKWKNIPCSWVGRINIVKMAILSKVFHGADSDIEWLQKDFGLYVVNMFDTHQAARLLNLGRHSLDHLLKLYCNVDSNKQYQLADWRIRPLPEEMLSYARDDTHYLLYIYDKMRLEMWERGNGQPVQLQVVWQRSRDICLKKFIKPIFTDESYLELYRKQKKHLNTQQLTAFQLLFAWRDKTARREDESYGYVLPNHMMLKIAEELPKEPQGIIACCNPVPPLVRQQINEMHLLIQQAREMPLLKSEVAAGVKKSGPLPSAERLENVLFGPHDCSHAPPDGYPIIPTSGSVPVQKQASLFPDEKEDNLLGTTCLIATAVITLFNEPSAEDSKKGPLTVAQKKAQNIMESFENPFRMFLPSLGHRAPVSQAAKFDPSTKIYEISNRWKLAQVQVQKDSKEAVKKKAAEQTAAREQAKEACKAAAEQAISVRQQVVLENAAKKRERATSDPRTTEQKQEKKRLKISKKPKDPEPPEKEFTPYDYSQSDFKAFAGNSKSKVSSQFDPNKQTPSGKKCIAAKKIKQSVGNKSMSFPTGKSDRGFRYNWPQR

SEQ ID NO: 10262 - protein, 411 aa, Artificial Sequence
  Synthetic polypeptide
ATSAKSQDTKSIFKNHKHSYTPITESQIMSELPFTIASKRMKYLGIHLTRDVKDLFKENYKPLLNEIKEDTNKWKNIPCSWVGRINIVKMAILSKVFHGADSDIEWLQKDFGLYVVNMFDTHQAARLLNLGRHSLDHLLKLYCNVDSNKQYQLADWRIRPLPEEMLSYARDDTHYLLYIYDKMRLEMWERGNGQPVQLQVVWQRSRDICLKKFIKPIFTDESYLELYRKQKKHLNTQQLTAFQLLFAWRDKTARREDESYGYVLPNHMMLKIAEELPKEPQGIIACCNPVPPLVRQQINEMHLLIQQAREMPLLKSEVAAGVKKSGPLPSAEVECRICFLPQEGKRQVTASASTPLTEACADSWQKATAGLHVLHASLLVSFNAEIGECSLWTSRLLPCPSGWLSNHPNQW

SEQ ID NO: 10263 - protein, 34 aa, Artificial Sequence
  Synthetic polypeptide
GRARWLTPVIPALWEAEAGGSRGQEIETIPAKTV

SEQ ID NO: 10264 - protein, 58 aa, Artificial Sequence
  Synthetic polypeptide
SQHFGRPRRADHEVRRSRPSRLKRCSGLAASPGRICLQTGLLLYQLVPGPAGTRKIHP

SEQ ID NO: 10265 - protein, 378 aa, Artificial Sequence
  Synthetic polypeptide
NGVVVLLLLQGGSAYKLVCYFTNWSQDRQEPGKFTPENIDPFLCSHLIYSFASIENNKVIIKDKSEVMLYQTINSLKTKNPKLKILLSIGGYLFGSKGFHPMVDSSTSRLEFINSIILFLRNHNFDGLDVSWIYPDQKENTHFTVLIHELAEAFQKDFTKSTKERLLLTAGVSAGRQMIDNSYQVEKLAKDLDFINLLSFDFHGSWEKPLITGHNSPLSKGWQDRGPSSYYNVEYAVGYWIHKGMPSEKVVMGIPTYGHSFTLASAETTVGAPASGPGAAGPITESSGFLAYYEICQFLKGAKITRLQDQQVPYAVKGNQWVGYDDVKSMETKVQFLKNLNLGGAMIWSIDMDDFTGKSCNQGPYPLVQAVKRSLGSL

SEQ ID NO: 10266 - protein, 208 aa, Artificial Sequence
  Synthetic polypeptide
NGVVVLLLLQGGSAYKLVCYFTNWSQDRQEPGKFTPENIDPFLCSHLIYSFASIENNKVIIKDKSEVMLYQTINSLKTKNPKLKILLSIGGYLFGSKGFHPMVDSSTSRLEFINSIILFLRNHNFDGLDVSWIYPDQKENTHFTVLIHELAEAFQKDFTKSTKERLLLTAGVSAGRQMIDNSYQVEKLAKDLDFINLLSFDFHGSWEK

SEQ ID NO: 10267 - protein, 189 aa, Artificial Sequence
  Synthetic polypeptide
NGVVVLLLLQGGSAYKLVCYFTNWSQDRQEPGKFTPENIDPFLCSHLIYSFASIENNKVIIKDKSEVMLYQTINSLKTKNPKLKILLSIGGYLFGSKGFHPMVDSSTSRLEFINSIILFLRNHNFDGLDVSWIYPDQKENTHFTVLIHELAEAFQKDFTKSTKERLLLTAGVSAGRQMIDNSYQVEKLA

SEQ ID NO: 10268 - protein, 170 aa, Artificial Sequence
  Synthetic polypeptide
NGVVVLLLLQGGSAYKLVCYFTNWSQDRQEPGKFTPENIDPFLCSHLIYSFASIENNKVIIKDKSEVMLYQTINSLKTKNPKLKILLSIGGYLFGSKGFHPMVDSSTSRLEFINSIILFLRNHNFDGLDELAEAFQKDFTKSTKERLLLTAGVSAGRQMIDNSYQVEKLA

SEQ ID NO: 10269 - protein, 127 aa, Artificial Sequence
  Synthetic polypeptide
FHLNEQFTAMRDLYMKNGQGFALVYSITAQSTFNDLQDLREQILRVKDTEDVPMILVGNKCDLEDERVVGKEQGQNLARQWCNCAFLESSAKSKINVNEIFYDLVRQINRKTPVEKKKPKKKSCLLL

SEQ ID NO: 10270 - protein, 72 aa, Artificial Sequence
  Synthetic polypeptide
FHLNEQFTAMRDLYMKNGQGFALVYSITAQSTFNDLQDLREQILRVKDTEDVPMILVGNKCDLEDERVVGKE

SEQ ID NO: 10271 - protein, 19 aa, Artificial Sequence
  Synthetic polypeptide
IGSHSFWSDGRMCGLGCGS

SEQ ID NO: 10272 - protein, 401 aa, Artificial Sequence
  Synthetic polypeptide
IKHRSGSSMYSSRSDPIPSGLMEECVDWDVEVKAAVHTYGIASVPNQPLKKQIQKIERTLQIQKAHGDHMASSRNNSVSGLSVKSKNNTKQKLPVKSHSECGIIEKATSPKELGCDRQSEEQMKNSVQTPVENSTNSQHQVKEALPVSLPQIPCLSSFKIHQPYTLTFAELVEDYEHYIKEGLEKPVEIIRHYTGPGDQTVNPQNGFVRNKVIEQRVPVLASSSQSGDSESDSDSYSSRTSSQSKGNKSYLEGSSDNQLKDSESTPVDDRISLEQPPNGSDTPNPEKYQESPGIQMKTRLKEGASQRAKQSRRNLPRRSSFRLQTEAQEDDWYDCHREIRLSFSDTYQDYEEYWRAYYRAWQEYYAAASHSYYWNAQRHPSWMAAYHMNTIYLQEMMHSNQ

SEQ ID NO: 10273 - protein, 22 aa, Artificial Sequence
  Synthetic polypeptide
ARLSTDLGVLCILVDRIPFLLV

SEQ ID NO: 10274 - protein, 427 aa, Artificial Sequence
  Synthetic polypeptide
GQARWLTPVIPAFWEAKAGGSRECKVWRNPLNLFRGAEYRRYTWVTGKEPLTYYDMNLSAQDHQTFFTCDTDFLRPSDTVMQKAWRERNPPARIKAAYQALELNNDCATAYVLLAEEEATTIVDAERLFKQALKAGETIYRQSQQCQHQSPQHEAQLRRDTNVLVYIKRRLAMCARKLGRIREAVKIMRDLMKEFPPLTMLNIHENLLESLLELQAYPDVQAVLAKYDDISLPKSAAICYTAALLKTRTVSEKFSPETASRRGLSTAEINAVEAIHRAVEFNPHVPKYLLEMKSLILPPEHILKRGDSEAIAYAFFHLQHWKRIEGALNLLQCTWEGTFRMIPYPLEKGHLFYPYPSCTETADRELLPTFHHVSVYPKKELPLFIHFTAGFCSSTAMIAILTHQFPEIMGIFAKAVVGVKTQKENAD

SEQ ID NO: 10275 - protein, 21 aa, Artificial Sequence
  Synthetic polypeptide
SQHFGRPRQADHENVRYGETL

SEQ ID NO: 10276 - protein, 23 aa, Artificial Sequence
  Synthetic polypeptide
PGAVAHTCNPSILGGQGRRITRM

SEQ ID NO: 10277 - protein, 416 aa, Artificial Sequence
  Synthetic polypeptide
GQARWLTPVIPAFWEAKAGGSRECKVWRNPLNLFRGAEYRRYTWVTGKEPLTYYDMNLSAQDHQTFFTCDTDFLRPSDTVMQKAWRERNPPARIKAAYQALELNNDCATAYVLLAEEEATTIVDAERLFKQALKAGETIYRQSQQCQHQSPQHEAQLRRDTNVLVYIKRRLAMCARKLGRIREAVKIMRDLMKEFPPLTMLNIHENLLESLLELQAYPDVQAVLAKYDDISLPKSAAICYTAALLKTRTVSEKFSPETASRRGLSTAEINAVEAIHRAVEFNPHVPKYLLEMKSLILPPEHILKRGDSEAIAYAFFHLQHWKRIEGALNLLQCTWEGTFHHVSVYPKKELPLFIHFTAGFCSSTAMIAILTHQFPEIMGIFAKAVLGLWCPQPWASSGFEENTQDLKSEDLGLSSG

SEQ ID NO: 10278 - protein, 447 aa, Artificial Sequence
  Synthetic polypeptide
GQARWLTPVIPAFWEAKAGGSRECKVWRNPLNLFRGAEYRRYTWVTGKEPLTYYDMNLSAQDHQTFFTCDTDFLRPSDTVMQKAWRERNPPARIKAAYQALELNNDCATAYVLLAEEEATTIVDAERLFKQALKAGETIYRQSQQCQHQSPQHEAQLRRDTNVLVYIKRRLAMCARKLGRIREAVKIMRDLMKEFPPLTMLNIHENLLESLLELQAYPDVQAVLAKYDDISLPKSAAICYTAALLKTRTVSEKFSPETASRRGLSTAEINAVEAIHRAVEFNPHVPKYLLEMKSLILPPEHILKRGDSEAIAYAFFHLQHWKRIEGALNLLQCTWEGTFRMIPYPLEKGHLFYPYPSCTETADRELLPTFHHVSVYPKKELPLFIHFTAGFCSSTAMIAILTHQFPEIMGIFAKAVLGLWCPQPWASSGFEENTQDLKSEDLGLSSG

SEQ ID NO: 10279 - protein, 382 aa, Artificial Sequence
  Synthetic polypeptide
GQARWLTPVIPAFWEAKAGGSRECKVWRNPLNLFRGAEYRSCATAYVLLAEEEATTIVDAERLFKQALKAGETIYRQSQQCQHQSPQHEAQLRRDTNVLVYIKRRLAMCARKLGRIREAVKIMRDLMKEFPPLTMLNIHENLLESLLELQAYPDVQAVLAKYDDISLPKSAAICYTAALLKTRTVSEKFSPETASRRGLSTAEINAVEAIHRAVEFNPHVPKYLLEMKSLILPPEHILKRGDSEAIAYAFFHLQHWKRIEGALNLLQCTWEGTFRMIPYPLEKGHLFYPYPSCTETADRELLPTFHHVSVYPKKELPLFIHFTAGFCSSTAMIAILTHQFPEIMGIFAKAVLGLWCPQPWASSGFEENTQDLKSEDLGLSSG

SEQ ID NO: 10280 - protein, 427 aa, Artificial Sequence
  Synthetic polypeptide
GQARWLTPVIPAFWEAKAGGSRECKVWRNPLNLFRGAEYRRYTWVTGKEPLTYYDMNLSAQDHQTFFTCDTDFLRPSDTVMQKAWRERNPPARIKAAYQALELNNDCATAYVLLAEEEATTIVDAERLFKQALKAGETIYRQSQQCQHQSPQHEAQLRRDTNVLVYIKRRLAMCARKLGRIREAVKIMRDLMKEFPPLTMLNIHENLLESLLELQAYPDVQAVLAKYDDISLPKSAAICYTAALLKTRTVSEKFSPETASRRGLSTAEINAVEAIHRAVEFNPHVPKYLLEMKSLILPPEHILKRGDSEAIAYAFFHLQHWKRIEGALNLLQCTWEGTFRMIPYPLEKGHLFYPYPSCTETADRELLPTFHHVSVYPKKELPLFIHFTAGFCSSTAMIAILTHQFPEIMGIFAKAVSMISRTCVDYL

SEQ ID NO: 10281 - protein, 287 aa, Artificial Sequence
  Synthetic polypeptide
GQARWLTPVIPAFWEAKAGGSRECKVWRNPLNLFRGAEYRRYTWVTGKEPLTYYDMNLSAQDHQTFFTCDTDFLRPSDTVMQKAWRERNPPARIKAAYQALELNNDCATAYVLLAEEEATTIVDAERLFKQALKAGETIYRQSQQCQHQSPQHEAQLRRDTNVLVYIKRRLAMCARKLGRIREAVKIMRDYLLEMKSLILPPEHILKRGDSEAIAYAFFHLQHWKRIEGALNLLQCTWEGTFHHVSVYPKKELPLFIHFTAGFCSSTAMIAILTHQFPEIMGIFAKA

SEQ ID NO: 10282 - protein, 290 aa, Artificial Sequence
  Synthetic polypeptide
GQARWLTPVIPAFWEAKAGGSRECKVWRNPLNLFRGAEYRRYTWVTGKEPLTYYDMNLSAQDHQTFFTCDTDFLRPSDTVMQKAWRERNPPARIKAAYQALELNNDCATAYVLLAEEEATTIVDAERLFKQALKAGETIYRQSQQCQHQSPQHEAQLRRDTNVLVYIKRRLAMCARKLGRIREAVKIMRDLMKEFPPLTMLNIHENLLESLLELQAYPDVQAVLAKYDDISLPKSAAICYTAALLKTRTVSEKFSPETASRRGLSTAEINAVEAIHRAVEFNPHVPKLLE

SEQ ID NO: 10283 - protein, 157 aa, Artificial Sequence
  Synthetic polypeptide
GQARWLTPVIPAFWEAKAGGSRECKVWRNPLNLFRGAEYRRYTWVTGKEPLTYYDMNLSAQDHQTFFTCDTDFLRPSDTVMQKAWRERNPPARIKAAYQALELNNDCATAYVLLAEEEATTIVDAERLFKQALKAGETIYRQSQQCQHQSPQHEAQL

SEQ ID NO: 10284 - protein, 25 aa, Artificial Sequence
  Synthetic polypeptide
GRARWLPIIPAVWEAETGGSRDTLG

SEQ ID NO: 10285 - protein, 19 aa, Artificial Sequence
  Synthetic polypeptide
SQQFGRPRRVDHEIHLGDW

SEQ ID NO: 10286 - protein, 407 aa, Artificial Sequence
  Synthetic polypeptide
PGAVAAYNPSSLGGRDGWITRYTWVTGKEPLTYYDMNLSAQDHQTFFTCDTDFLRPSDTVMQKAWRERNPPARIKAAYQALELNNDCATAYVLLAEEEATTIVDAERLFKQALKAGETIYRQSQQCQHQSPQHEAQLRRDTNVLVYIKRRLAMCARKLGRIREAVKIMRDLMKEFPPLTMLNIHENLLESLLELQAYPDVQAVLAKYDDISLPKSAAICYTAALLKTRTVSEKFSPETASRRGLSTAEINAVEAIHRAVEFNPHVPKYLLEMKSLILPPEHILKRGDSEAIAYAFFHLQHWKRIEGALNLLQCTWEGTFRMIPYPLEKGHLFYPYPSCTETADRELLPTFHHVSVYPKKELPLFIHFTAGFCSSTAMIAILTHQFPEIMGIFAKAVVGVKTQKENAD

SEQ ID NO: 10287 - protein, 396 aa, Artificial Sequence
  Synthetic polypeptide
PGAVAAYNPSSLGGRDGWITRYTWVTGKEPLTYYDMNLSAQDHQTFFTCDTDFLRPSDTVMQKAWRERNPPARIKAAYQALELNNDCATAYVLLAEEEATTIVDAERLFKQALKAGETIYRQSQQCQHQSPQHEAQLRRDTNVLVYIKRRLAMCARKLGRIREAVKIMRDLMKEFPPLTMLNIHENLLESLLELQAYPDVQAVLAKYDDISLPKSAAICYTAALLKTRTVSEKFSPETASRRGLSTAEINAVEAIHRAVEFNPHVPKYLLEMKSLILPPEHILKRGDSEAIAYAFFHLQHWKRIEGALNLLQCTWEGTFHHVSVYPKKELPLFIHFTAGFCSSTAMIAILTHQFPEIMGIFAKAVLGLWCPQPWASSGFEENTQDLKSEDLGLSSG

SEQ ID NO: 10288 - protein, 427 aa, Artificial Sequence
  Synthetic polypeptide
PGAVAAYNPSSLGGRDGWITRYTWVTGKEPLTYYDMNLSAQDHQTFFTCDTDFLRPSDTVMQKAWRERNPPARIKAAYQALELNNDCATAYVLLAEEEATTIVDAERLFKQALKAGETIYRQSQQCQHQSPQHEAQLRRDTNVLVYIKRRLAMCARKLGRIREAVKIMRDLMKEFPPLTMLNIHENLLESLLELQAYPDVQAVLAKYDDISLPKSAAICYTAALLKTRTVSEKFSPETASRRGLSTAEINAVEAIHRAVEFNPHVPKYLLEMKSLILPPEHILKRGDSEAIAYAFFHLQHWKRIEGALNLLQCTWEGTFRMIPYPLEKGHLFYPYPSCTETADRELLPTFHHVSVYPKKELPLFIHFTAGFCSSTAMIAILTHQFPEIMGIFAKAVLGLWCPQPWASSGFEENTQDLKSEDLGLSSG

SEQ ID NO: 10289 - protein, 407 aa, Artificial Sequence
  Synthetic polypeptide
PGAVAAYNPSSLGGRDGWITRYTWVTGKEPLTYYDMNLSAQDHQTFFTCDTDFLRPSDTVMQKAWRERNPPARIKAAYQALELNNDCATAYVLLAEEEATTIVDAERLFKQALKAGETIYRQSQQCQHQSPQHEAQLRRDTNVLVYIKRRLAMCARKLGRIREAVKIMRDLMKEFPPLTMLNIHENLLESLLELQAYPDVQAVLAKYDDISLPKSAAICYTAALLKTRTVSEKFSPETASRRGLSTAEINAVEAIHRAVEFNPHVPKYLLEMKSLILPPEHILKRGDSEAIAYAFFHLQHWKRIEGALNLLQCTWEGTFRMIPYPLEKGHLFYPYPSCTETADRELLPTFHHVSVYPKKELPLFIHFTAGFCSSTAMIAILTHQFPEIMGIFAKAVSMISRTCVDYL

SEQ ID NO: 10290 - protein, 267 aa, Artificial Sequence
  Synthetic polypeptide
PGAVAAYNPSSLGGRDGWITRYTWVTGKEPLTYYDMNLSAQDHQTFFTCDTDFLRPSDTVMQKAWRERNPPARIKAAYQALELNNDCATAYVLLAEEEATTIVDAERLFKQALKAGETIYRQSQQCQHQSPQHEAQLRRDTNVLVYIKRRLAMCARKLGRIREAVKIMRDYLLEMKSLILPPEHILKRGDSEAIAYAFFHLQHWKRIEGALNLLQCTWEGTFHHVSVYPKKELPLFIHFTAGFCSSTAMIAILTHQFPEIMGIFAKA

SEQ ID NO: 10291 - protein, 270 aa, Artificial Sequence
  Synthetic polypeptide
PGAVAAYNPSSLGGRDGWITRYTWVTGKEPLTYYDMNLSAQDHQTFFTCDTDFLRPSDTVMQKAWRERNPPARIKAAYQALELNNDCATAYVLLAEEEATTIVDAERLFKQALKAGETIYRQSQQCQHQSPQHEAQLRRDTNVLVYIKRRLAMCARKLGRIREAVKIMRDLMKEFPPLTMLNIHENLLESLLELQAYPDVQAVLAKYDDISLPKSAAICYTAALLKTRTVSEKFSPETASRRGLSTAEINAVEAIHRAVEFNPHVPKLLE

SEQ ID NO: 10292 - protein, 137 aa, Artificial Sequence
  Synthetic polypeptide
PGAVAAYNPSSLGGRDGWITRYTWVTGKEPLTYYDMNLSAQDHQTFFTCDTDFLRPSDTVMQKAWRERNPPARIKAAYQALELNNDCATAYVLLAEEEATTIVDAERLFKQALKAGETIYRQSQQCQHQSPQHEAQL

SEQ ID NO: 10293 - protein, 426 aa, Artificial Sequence
  Synthetic polypeptide
GRARWLPIIPAVWEAETGGSRECKVWRNPLNLFRGAEYRRYTWVTGKEPLTYYDMNLSAQDHQTFFTCDTDFLRPSDTVMQKAWRERNPPARIKAAYQALELNNDCATAYVLLAEEEATTIVDAERLFKQALKAGETIYRQSQQCQHQSPQHEAQLRRDTNVLVYIKRRLAMCARKLGRIREAVKIMRDLMKEFPPLTMLNIHENLLESLLELQAYPDVQAVLAKYDDISLPKSAAICYTAALLKTRTVSEKFSPETASRRGLSTAEINAVEAIHRAVEFNPHVPKYLLEMKSLILPPEHILKRGDSEAIAYAFFHLQHWKRIEGALNLLQCTWEGTFRMIPYPLEKGHLFYPYPSCTETADRELLPTFHHVSVYPKKELPLFIHFTAGFCSSTAMIAILTHQFPEIMGIFAKAVVGVKTQKENAD

SEQ ID NO: 10294 - protein, 21 aa, Artificial Sequence
  Synthetic polypeptide
SQQFGRPRRVDHENVRYGETL

SEQ ID NO: 10295 - protein, 22 aa, Artificial Sequence
  Synthetic polypeptide
PGAVAAYNPSSLGGRDGWITRM

SEQ ID NO: 10296 - protein, 415 aa, Artificial Sequence
  Synthetic polypeptide
GRARWLPIIPAVWEAETGGSRECKVWRNPLNLFRGAEYRRYTWVTGKEPLTYYDMNLSAQDHQTFFTCDTDFLRPSDTVMQKAWRERNPPARIKAAYQALELNNDCATAYVLLAEEEATTIVDAERLFKQALKAGETIYRQSQQCQHQSPQHEAQLRRDTNVLVYIKRRLAMCARKLGRIREAVKIMRDLMKEFPPLTMLNIHENLLESLLELQAYPDVQAVLAKYDDISLPKSAAICYTAALLKTRTVSEKFSPETASRRGLSTAEINAVEAIHRAVEFNPHVPKYLLEMKSLILPPEHILKRGDSEAIAYAFFHLQHWKRIEGALNLLQCTWEGTFHHVSVYPKKELPLFIHFTAGFCSSTAMIAILTHQFPEIMGIFAKAVLGLWCPQPWASSGFEENTQDLKSEDLGLSSG

SEQ ID NO: 10297 - protein, 446 aa, Artificial Sequence
  Synthetic polypeptide
GRARWLPIIPAVWEAETGGSRECKVWRNPLNLFRGAEYRRYTWVTGKEPLTYYDMNLSAQDHQTFFTCDTDFLRPSDTVMQKAWRERNPPARIKAAYQALELNNDCATAYVLLAEEEATTIVDAERLFKQALKAGETIYRQSQQCQHQSPQHEAQLRRDTNVLVYIKRRLAMCARKLGRIREAVKIMRDLMKEFPPLTMLNIHENLLESLLELQAYPDVQAVLAKYDDISLPKSAAICYTAALLKTRTVSEKFSPETASRRGLSTAEINAVEAIHRAVEFNPHVPKYLLEMKSLILPPEHILKRGDSEAIAYAFFHLQHWKRIEGALNLLQCTWEGTFRMIPYPLEKGHLFYPYPSCTETADRELLPTFHHVSVYPKKELPLFIHFTAGFCSSTAMIAILTHQFPEIMGIFAKAVLGLWCPQPWASSGFEENTQDLKSEDLGLSSG

SEQ ID NO: 10298 - protein, 381 aa, Artificial Sequence
  Synthetic polypeptide
GRARWLPIIPAVWEAETGGSRECKVWRNPLNLFRGAEYRSCATAYVLLAEEEATTIVDAERLFKQALKAGETIYRQSQQCQHQSPQHEAQLRRDTNVLVYIKRRLAMCARKLGRIREAVKIMRDLMKEFPPLTMLNIHENLLESLLELQAYPDVQAVLAKYDDISLPKSAAICYTAALLKTRTVSEKFSPETASRRGLSTAEINAVEAIHRAVEFNPHVPKYLLEMKSLILPPEHILKRGDSEAIAYAFFHLQHWKRIEGALNLLQCTWEGTFRMIPYPLEKGHLFYPYPSCTETADRELLPTFHHVSVYPKKELPLFIHFTAGFCSSTAMIAILTHQFPEIMGIFAKAVLGLWCPQPWASSGFEENTQDLKSEDLGLSSG

SEQ ID NO: 10299 - protein, 426 aa, Artificial Sequence
  Synthetic polypeptide
GRARWLPIIPAVWEAETGGSRECKVWRNPLNLFRGAEYRRYTWVTGKEPLTYYDMNLSAQDHQTFFTCDTDFLRPSDTVMQKAWRERNPPARIKAAYQALELNNDCATAYVLLAEEEATTIVDAERLFKQALKAGETIYRQSQQCQHQSPQHEAQLRRDTNVLVYIKRRLAMCARKLGRIREAVKIMRDLMKEFPPLTMLNIHENLLESLLELQAYPDVQAVLAKYDDISLPKSAAICYTAALLKTRTVSEKFSPETASRRGLSTAEINAVEAIHRAVEFNPHVPKYLLEMKSLILPPEHILKRGDSEAIAYAFFHLQHWKRIEGALNLLQCTWEGTFRMIPYPLEKGHLFYPYPSCTETADRELLPTFHHVSVYPKKELPLFIHFTAGFCSSTAMIAILTHQFPEIMGIFAKAVSMISRTCVDYL

SEQ ID NO: 10300 - protein, 286 aa, Artificial Sequence
  Synthetic polypeptide
GRARWLPIIPAVWEAETGGSRECKVWRNPLNLFRGAEYRRYTWVTGKEPLTYYDMNLSAQDHQTFFTCDTDFLRPSDTVMQKAWRERNPPARIKAAYQALELNNDCATAYVLLAEEEATTIVDAERLFKQALKAGETIYRQSQQCQHQSPQHEAQLRRDTNVLVYIKRRLAMCARKLGRIREAVKIMRDYLLEMKSLILPPEHILKRGDSEAIAYAFFHLQHWKRIEGALNLLQCTWEGTFHHVSVYPKKELPLFIHFTAGFCSSTAMIAILTHQFPEIMGIFAKA

SEQ ID NO: 10301 - protein, 289 aa, Artificial Sequence
  Synthetic polypeptide
GRARWLPIIPAVWEAETGGSRECKVWRNPLNLFRGAEYRRYTWVTGKEPLTYYDMNLSAQDHQTFFTCDTDFLRPSDTVMQKAWRERNPPARIKAAYQALELNNDCATAYVLLAEEEATTIVDAERLFKQALKAGETIYRQSQQCQHQSPQHEAQLRRDTNVLVYIKRRLAMCARKLGRIREAVKIMRDLMKEFPPLTMLNIHENLLESLLELQAYPDVQAVLAKYDDISLPKSAAICYTAALLKTRTVSEKFSPETASRRGLSTAEINAVEAIHRAVEFNPHVPKLLE

SEQ ID NO: 10302 - protein, 156 aa, Artificial Sequence
  Synthetic polypeptide
GRARWLPIIPAVWEAETGGSRECKVWRNPLNLFRGAEYRRYTWVTGKEPLTYYDMNLSAQDHQTFFTCDTDFLRPSDTVMQKAWRERNPPARIKAAYQALELNNDCATAYVLLAEEEATTIVDAERLFKQALKAGETIYRQSQQCQHQSPQHEAQL

SEQ ID NO: 10303 - protein, 496 aa, Artificial Sequence
  Synthetic polypeptide
GQVWCLVSVLPTLWEAEAGGLLVARSSRAAWTNEQDLIFEWWYFHKHGTSFIEQVSVSHLQPLMGGTESSISEPGSPSRNRENETSRQNLSECKVWRNPLNLFRGAEYRRYTWVTGKEPLTYYDMNLSAQDHQTFFTCDTDFLRPSDTVMQKAWRERNPPARIKAAYQALELNNDCATAYVLLAEEEATTIVDAERLFKQALKAGETIYRQSQQCQHQSPQHEAQLRRDTNVLVYIKRRLAMCARKLGRIREAVKIMRDLMKEFPPLTMLNIHENLLESLLELQAYPDVQAVLAKYDDISLPKSAAICYTAALLKTRTVSEKFSPETASRRGLSTAEINAVEAIHRAVEFNPHVPKYLLEMKSLILPPEHILKRGDSEAIAYAFFHLQHWKRIEGALNLLQCTWEGTFRMIPYPLEKGHLFYPYPSCTETADRELLPTFHHVSVYPKKELPLFIHFTAGFCSSTAMIAILTHQFPEIMGIFAKAVVGVKTQKENAD

SEQ ID NO: 10304 - protein, 5 aa, Artificial Sequence
  Synthetic polypeptide
TRSDI

SEQ ID NO: 10305 - protein, 485 aa, Artificial Sequence
  Synthetic polypeptide
GQVWCLVSVLPTLWEAEAGGLLVARSSRAAWTNEQDLIFEWWYFHKHGTSFIEQVSVSHLQPLMGGTESSISEPGSPSRNRENETSRQNLSECKVWRNPLNLFRGAEYRRYTWVTGKEPLTYYDMNLSAQDHQTFFTCDTDFLRPSDTVMQKAWRERNPPARIKAAYQALELNNDCATAYVLLAEEEATTIVDAERLFKQALKAGETIYRQSQQCQHQSPQHEAQLRRDTNVLVYIKRRLAMCARKLGRIREAVKIMRDLMKEFPPLTMLNIHENLLESLLELQAYPDVQAVLAKYDDISLPKSAAICYTAALLKTRTVSEKFSPETASRRGLSTAEINAVEAIHRAVEFNPHVPKYLLEMKSLILPPEHILKRGDSEAIAYAFFHLQHWKRIEGALNLLQCTWEGTFHHVSVYPKKELPLFIHFTAGFCSSTAMIAILTHQFPEIMGIFAKAVLGLWCPQPWASSGFEENTQDLKSEDLGLSSG

SEQ ID NO: 10306 - protein, 516 aa, Artificial Sequence
  Synthetic polypeptide
GQVWCLVSVLPTLWEAEAGGLLVARSSRAAWTNEQDLIFEWWYFHKHGTSFIEQVSVSHLQPLMGGTESSISEPGSPSRNRENETSRQNLSECKVWRNPLNLFRGAEYRRYTWVTGKEPLTYYDMNLSAQDHQTFFTCDTDFLRPSDTVMQKAWRERNPPARIKAAYQALELNNDCATAYVLLAEEEATTIVDAERLFKQALKAGETIYRQSQQCQHQSPQHEAQLRRDTNVLVYIKRRLAMCARKLGRIREAVKIMRDLMKEFPPLTMLNIHENLLESLLELQAYPDVQAVLAKYDDISLPKSAAICYTAALLKTRTVSEKFSPETASRRGLSTAEINAVEAIHRAVEFNPHVPKYLLEMKSLILPPEHILKRGDSEAIAYAFFHLQHWKRIEGALNLLQCTWEGTFRMIPYPLEKGHLFYPYPSCTETADRELLPTFHHVSVYPKKELPLFIHFTAGFCSSTAMIAILTHQFPEIMGIFAKAVLGLWCPQPWASSGFEENTQDLKSEDLGLSSG

SEQ ID NO: 10307 - protein, 451 aa, Artificial Sequence
  Synthetic polypeptide
GQVWCLVSVLPTLWEAEAGGLLVARSSRAAWTNEQDLIFEWWYFHKHGTSFIEQVSVSHLQPLMGGTESSISEPGSPSRNRENETSRQNLSECKVWRNPLNLFRGAEYRSCATAYVLLAEEEATTIVDAERLFKQALKAGETIYRQSQQCQHQSPQHEAQLRRDTNVLVYIKRRLAMCARKLGRIREAVKIMRDLMKEFPPLTMLNIHENLLESLLELQAYPDVQAVLAKYDDISLPKSAAICYTAALLKTRTVSEKFSPETASRRGLSTAEINAVEAIHRAVEFNPHVPKYLLEMKSLILPPEHILKRGDSEAIAYAFFHLQHWKRIEGALNLLQCTWEGTFRMIPYPLEKGHLFYPYPSCTETADRELLPTFHHVSVYPKKELPLFIHFTAGFCSSTAMIAILTHQFPEIMGIFAKAVLGLWCPQPWASSGFEENTQDLKSEDLGLSSG

SEQ ID NO: 10308 - protein, 496 aa, Artificial Sequence
  Synthetic polypeptide
GQVWCLVSVLPTLWEAEAGGLLVARSSRAAWTNEQDLIFEWWYFHKHGTSFIEQVSVSHLQPLMGGTESSISEPGSPSRNRENETSRQNLSECKVWRNPLNLFRGAEYRRYTWVTGKEPLTYYDMNLSAQDHQTFFTCDTDFLRPSDTVMQKAWRERNPPARIKAAYQALELNNDCATAYVLLAEEEATTIVDAERLFKQALKAGETIYRQSQQCQHQSPQHEAQLRRDTNVLVYIKRRLAMCARKLGRIREAVKIMRDLMKEFPPLTMLNIHENLLESLLELQAYPDVQAVLAKYDDISLPKSAAICYTAALLKTRTVSEKFSPETASRRGLSTAEINAVEAIHRAVEFNPHVPKYLLEMKSLILPPEHILKRGDSEAIAYAFFHLQHWKRIEGALNLLQCTWEGTFRMIPYPLEKGHLFYPYPSCTETADRELLPTFHHVSVYPKKELPLFIHFTAGFCSSTAMIAILTHQFPEIMGIFAKAVSMISRTCVDYL

SEQ ID NO: 10309 - protein, 359 aa, Artificial Sequence
  Synthetic polypeptide
GQVWCLVSVLPTLWEAEAGGLLVARSSRAAWTNEQDLIFEWWYFHKHGTSFIEQVSVSHLQPLMGGTESSISEPGSPSRNRENETSRQNLSECKVWRNPLNLFRGAEYRRYTWVTGKEPLTYYDMNLSAQDHQTFFTCDTDFLRPSDTVMQKAWRERNPPARIKAAYQALELNNDCATAYVLLAEEEATTIVDAERLFKQALKAGETIYRQSQQCQHQSPQHEAQLRRDTNVLVYIKRRLAMCARKLGRIREAVKIMRDLMKEFPPLTMLNIHENLLESLLELQAYPDVQAVLAKYDDISLPKSAAICYTAALLKTRTVSEKFSPETASRRGLSTAEINAVEAIHRAVEFNPHVPKLLE

SEQ ID NO: 10310 - protein, 226 aa, Artificial Sequence
  Synthetic polypeptide
GQVWCLVSVLPTLWEAEAGGLLVARSSRAAWTNEQDLIFEWWYFHKHGTSFIEQVSVSHLQPLMGGTESSISEPGSPSRNRENETSRQNLSECKVWRNPLNLFRGAEYRRYTWVTGKEPLTYYDMNLSAQDHQTFFTCDTDFLRPSDTVMQKAWRERNPPARIKAAYQALELNNDCATAYVLLAEEEATTIVDAERLFKQALKAGETIYRQSQQCQHQSPQHEAQL

SEQ ID NO: 10311 - protein, 424 aa, Artificial Sequence
  Synthetic polypeptide
PWVGQDPSLGLSLSPCCNWDAKKGEYVFPAKKKLQEYRVLITTLITAGRLVSAQFPIDHFTHIFIDEAGHCMEPESLVAIAGLMEVKETGDPGGQLVLAGDPRQLGPVLRSPLTQKHGLGYSLLERLLTYNSLYKKGPDGYDPQFITKLLRNYRSHPTILDIPNQLYYEGELQACADVVDRERFCRWAGLPRQGFPIIFHGVMGKDEREGNSPSFFNPEEAATVTSYLKLLLAPSSKKGKARLSPRSVGVISPYRKQVEKIRYCITKLDRELRGLDDIKDLKVGSVEEFQGQERSVILISTVRSSQSFVQLDLDFNLGFLKNPKRFNVAVTRAKALLIIVGNPLLLGHDPDWKVFLEFCKENGGYTGCPFPAKLDLQQGQNLLQGLSKLSPSTSGPHSHDYLPQEREGEGGLSLQVEPEWRNEL

SEQ ID NO: 10312 - protein, 44 aa, Artificial Sequence
  Synthetic polypeptide
YLLCDLGLDRTPPWASVCLPAATGTQRRGSMYFPPRRSCRNTGS

SEQ ID NO: 10313 - protein, 69 aa, Artificial Sequence
  Synthetic polypeptide
KLGDLDSDTCYVTLGWTGPLPGPQFVSLLQLGRKEGGVCISRQEEAAGIPGLNYHPHHCRQVGLGPVSH

SEQ ID NO: 10314 - protein, 28 aa, Artificial Sequence
  Synthetic polypeptide
MSSSISYPVGSMTCMETTNTHTGHVASS

SEQ ID NO: 10315 - protein, 11 aa, Artificial Sequence
  Synthetic polypeptide
CLLPSHTQSAQ

SEQ ID NO: 10316 - protein, 98 aa, Artificial Sequence
  Synthetic polypeptide
VFFHLIPSRLNDMYGDYKYTYWACGVVLIISGIYLFIGMGINYRLLAKEQKANEQKKESKEEETSIDVAGKPNEVTKAAESPDQKDTDGGPKEEESPV

SEQ ID NO: 10317 - protein, 54 aa, Artificial Sequence
  Synthetic polypeptide
VFFHLIPSRLNDMYGDYKYTYWACGVVLIISGIYLFIGMGINYRLLAKEQKANE

SEQ ID NO: 10318 - protein, 1051 aa, Artificial Sequence
  Synthetic polypeptide
TSCVTLGKVINKDLRHYLSLQFQKGSIDHKLQQVIRDNLYLRTIPCTTRAPRDGEVPGVDYNFISVEQFKALEESGALLESGTYDGNFYGTPKPPAEPSPFQPDPVDQVLFDNEFDAESQRKRTTSVSKMERMDSSLPEEEEDEDKEAINGSGNAENRERHSESSDWMKTVPSYNQTNSSMDFRNYMMRDETLEPLPKNWEMAYTDTGMIYFIDHNTKTTTWLDPRLCKKAKAPEDCEDGELPYGWEKIEDPQYGTYYVDFTLVAQAGVQWHDLGSLQPPPPGFNHLNQKTQFENPVEEAKRKKQLGQVEIGSSKPDMEKSHFTRDPSQLKGVLVRASLKKSTMGFGFTIIGGDRPDEFLQVKNVLKDGPAAQDGKIAPGDVIVDINGNCVLGHTHADVVQMFQLVPVNQYVNLTLCRGYPLPDDSEDPVVDIVAATPVINGQSLTKGETCMNPQDFKPGAMVLEQNGKSGHTLTGDGLNGPSDASEQRVSMASSGSSQPELVTIPLIKGPKGFGFAIADSPTGQKVKMILDSQWCQGLQKGDIIKEIYHQNVQNLTHLQVVEVLKQFPVGADVPLLILRGGPPSPTKTAKMKTDKKENAGSLEAINEPIPQPMPFPPSIIRSGSPKLDPSEVYLKSKTLYEDKPPNTKDLDVFLRKQESGFGFRVLGGDGPDQSIYIGAIIPLGAAEKDGRLRAADELMCIDGIPVKGKSHKQVLDLMTTAARNGHVLLTVRRKIFYGEKQPEDDSSQAFISTQNGSPRLNRAEVPARPAPQEPYDVVLQRKENEGFGFVILTSKNKPPPGVIPHKIGRVIEGSPADRCGKLKVGDHISAVNGQSIVELSHDNIVQLIKDAGVTVTLTVIAEEEHHGPPSGTNSARQSPALQHRPMGQSQANHIPGDRSALEGEIGKDVSTSYRHSWSDHKHLAQPDTAVISVVGSRHNQNLGCYPVELERGPRGFGFSLRGGKEYNMGLFILRLAEDGPAIKDGRIHVGDQIVEINGEPTQGITHTRAIELIQAGGNKVLLLLRPGTGLIPDHGLAPSGLCSYVKPEQH

SEQ ID NO: 10319 - protein, 13 aa, Artificial Sequence
  Synthetic polypeptide
LWAKSLIKICGIT

SEQ ID NO: 10320 - protein, 9 aa, Artificial Sequence
  Synthetic polypeptide
QLCDFGQSH

SEQ ID NO: 10321 - protein, 1382 aa, Artificial Sequence
  Synthetic polypeptide
TSCVTLGKVINKDLRHYLSLQFQKGSIDHKLQQVIRDNLYLRTIPCTTRAPRDGEVPGVDYNFISVEQFKALEESGALLESGTYDGNFYGTPKPPAEPSPFQPDPVDQVLFDNEFDAESQRKRTTSVSKMERMDSSLPEEEEDEDKEAINGSGNAENRERHSESSDWMKTVPSYNQTNSSMDFRNYMMRDETLEPLPKNWEMAYTDTGMIYFIDHNTKTTTWLDPRLCKKAKAPEDCEDGELPYGWEKIEDPQYGTYYVDHLNQKTQFENPVEEAKRKKQLGQVEIGSSKPDMEKSHFTRDPSQLKGVLVRASLKKSTMGFGFTIIGGDRPDEFLQVKNVLKDGPAAQDGKIAPGDVIVDINGNCVLGHTHADVVQMFQLVPVNQYVNLTLCRGYPLPDDSEDPVVDIVAATPVINGQSLTKGETCMNPQDFKPGAMVLEQNGKSGHTLTGDGLNGPSDASEQRVSMASSGSSQPELVTIPLIKGPKGFGFAIADSPTGQKVKMILDSQWCQGLQKGDIIKEIYHQNVQNLTHLQVVEVLKQFPVGADVPLLILRGGPPSPTKTAKMKTDKKENAGSLEAINEPIPQPMPFPPSIIRSGSPKLDPSEVYLKSKTLYEDKPPNTKDLDVFLRKQESGFGFRVLGGDGPDQSIYIGAIIPLGAAEKDGRLRAADELMCIDGIPVKGKSHKQVLDLMTTAARNGHVLLTVRRKIFYGEKQPEDDSSQAFISTQNGSPRLNRAEVPARPAPQEPYDVVLQRKENEGFGFVILTSKNKPPPGVIPHKIGRVIEGSPADRCGKLKVGDHISAVNGQSIVELSHDNIVQLIKDAGVTVTLTVIAEEEHHGPPSGTNSARQSPALQHRPMGQSQANHIPGDRSALEGEIGKDVSTSYRHSWSDHKHLAQPDTAVISVVGSRHNQNLGCYPVELERGPRGFGFSLRGGKEYNMGLFILRLAEDGPAIKDGRIHVGDQIVEINGEPTQGITHTRAIELIQAGGNKVLLLLRPGTGLIPDHGDWDINNPSSSNVIYDEQSPLPPSSHFASIFEESHVPVIEESLRVQICEKAEELKDIVPEKKSTLNENQPEIKHQSLLQKNVSKRDPPSSHGHSNKKNLLKVENGVTRRGRSVSPKKPASQHSEEHLDKIPSPLKNNPKRRPRDQSLSPSKGENKSCQVSTRAGSGQDQCRKSRGRSASPKKQQKIEGSKAPSNAEAKLLEGKSRRIAGYTGSNAEQIPDGKEKSDVIRKDAKQNQLEKSRTRSPEKKIKRMVEKSLPSKMTNKTTSKEVSENEKGKKVTTGETSSSNDKIGENVQLSEKRLKQEPEEKVVSNKTEDHKGKELEAADKNKETGRFKPESSSPVKKTLITPGPWKVPSGNKVTGTIGMAEKRQ

SEQ ID NO: 10322 - protein, 1026 aa, Artificial Sequence
  Synthetic polypeptide
TSCVTLGKVINKDLRHYLSLQFQKGSIDHKLQQVIRDNLYLRTIPCTTRAPRDGEVPGVDYNFISVEQFKALEESGALLESGTYDGNFYGTPKPPAEPSPFQPDPVDQVLFDNEFDAESQRKRTTSVSKMERMDSSLPEEEEDEDKEAINGSGNAENRERHSESSDWMKTVPSYNQTNSSMDFRNYMMRDETLEPLPKNWEMAYTDTGMIYFIDHNTKTTTWLDPRLCKKAKAPEDCEDGELPYGWEKIEDPQYGTYYVDHLNQKTQFENPVEEAKRKKQLGQVEIGSSKPDMEKSHFTRDPSQLKGVLVRASLKKSTMGFGFTIIGGDRPDEFLQVKNVLKDGPAAQDGKIAPGDVIVDINGNCVLGHTHADVVQMFQLVPVNQYVNLTLCRGYPLPDDSEDPVVDIVAATPVINGQSLTKGETCMNPQDFKPGAMVLEQNGKSGHTLTGDGLNGPSDASEQRVSMASSGSSQPELVTIPLIKGPKGFGFAIADSPTGQKVKMILDSQWCQGLQKGDIIKEIYHQNVQNLTHLQVVEVLKQFPVGADVPLLILRGGPPSPTKTAKMKTDKKENAGSLEAINEPIPQPMPFPPSIIRSGSPKLDPSEVYLKSKTLYEDKPPNTKDLDVFLRKQESGFGFRVLGGDGPDQSIYIGAIIPLGAAEKDGRLRAADELMCIDGIPVKGKSHKQVLDLMTTAARNGHVLLTVRRKIFYGEKQPEDDSSQAFISTQNGSPRLNRAEVPARPAPQEPYDVVLQRKENEGFGFVILTSKNKPPPGVIPHKIGRVIEGSPADRCGKLKVGDHISAVNGQSIVELSHDNIVQLIKDAGVTVTLTVIAEEEHHGPPSGTNSARQSPALQHRPMGQSQANHIPGDRSALEGEIGKDVSTSYRHSWSDHKHLAQPDTAVISVVGSRHNQNLGCYPVELERGPRGFGFSLRGGKEYNMGLFILRLAEDGPAIKDGRIHVGDQIVEINGEPTQGITHTRAIELIQAGGNKVLLLLRPGTGLIPDHGLAPSGLCSYVKPEQH

SEQ ID NO: 10323 - protein, 826 aa, Artificial Sequence
  Synthetic polypeptide
GWITRSGDQDHPGQHELPYGWEKIEDPQYGTYYVDFTLVAQAGVQWHDLGSLQPPPPGFNHLNQKTQFENPVEEAKRKKQLGQVEIGSSKPDMEKSHFTRDPSQLKGVLVRASLKKSTMGFGFTIIGGDRPDEFLQVKNVLKDGPAAQDGKIAPGDVIVDINGNCVLGHTHADVVQMFQLVPVNQYVNLTLCRGYPLPDDSEDPVVDIVAATPVINGQSLTKGETCMNPQDFKPGAMVLEQNGKSGHTLTGDGLNGPSDASEQRVSMASSGSSQPELVTIPLIKGPKGFGFAIADSPTGQKVKMILDSQWCQGLQKGDIIKEIYHQNVQNLTHLQVVEVLKQFPVGADVPLLILRGGPPSPTKTAKMKTDKKENAGSLEAINEPIPQPMPFPPSIIRSGSPKLDPSEVYLKSKTLYEDKPPNTKDLDVFLRKQESGFGFRVLGGDGPDQSIYIGAIIPLGAAEKDGRLRAADELMCIDGIPVKGKSHKQVLDLMTTAARNGHVLLTVRRKIFYGEKQPEDDSSQAFISTQNGSPRLNRAEVPARPAPQEPYDVVLQRKENEGFGFVILTSKNKPPPGVIPHKIGRVIEGSPADRCGKLKVGDHISAVNGQSIVELSHDNIVQLIKDAGVTVTLTVIAEEEHHGPPSGTNSARQSPALQHRPMGQSQANHIPGDRSALEGEIGKDVSTSYRHSWSDHKHLAQPDTAVISVVGSRHNQNLGCYPVELERGPRGFGFSLRGGKEYNMGLFILRLAEDGPAIKDGRIHVGDQIVEINGEPTQGITHTRAIELIQAGGNKVLLLLRPGTGLIPDHGLAPSGLCSYVKPEQH

SEQ ID NO: 10324 - protein, 23 aa, Artificial Sequence
  Synthetic polypeptide
GGSRGQETKTILANMSFLMAGRK

SEQ ID NO: 10325 - protein, 1157 aa, Artificial Sequence
  Synthetic polypeptide
GWITRSGDQDHPGQHELPYGWEKIEDPQYGTYYVDHLNQKTQFENPVEEAKRKKQLGQVEIGSSKPDMEKSHFTRDPSQLKGVLVRASLKKSTMGFGFTIIGGDRPDEFLQVKNVLKDGPAAQDGKIAPGDVIVDINGNCVLGHTHADVVQMFQLVPVNQYVNLTLCRGYPLPDDSEDPVVDIVAATPVINGQSLTKGETCMNPQDFKPGAMVLEQNGKSGHTLTGDGLNGPSDASEQRVSMASSGSSQPELVTIPLIKGPKGFGFAIADSPTGQKVKMILDSQWCQGLQKGDIIKEIYHQNVQNLTHLQVVEVLKQFPVGADVPLLILRGGPPSPTKTAKMKTDKKENAGSLEAINEPIPQPMPFPPSIIRSGSPKLDPSEVYLKSKTLYEDKPPNTKDLDVFLRKQESGFGFRVLGGDGPDQSIYIGAIIPLGAAEKDGRLRAADELMCIDGIPVKGKSHKQVLDLMTTAARNGHVLLTVRRKIFYGEKQPEDDSSQAFISTQNGSPRLNRAEVPARPAPQEPYDVVLQRKENEGFGFVILTSKNKPPPGVIPHKIGRVIEGSPADRCGKLKVGDHISAVNGQSIVELSHDNIVQLIKDAGVTVTLTVIAEEEHHGPPSGTNSARQSPALQHRPMGQSQANHIPGDRSALEGEIGKDVSTSYRHSWSDHKHLAQPDTAVISVVGSRHNQNLGCYPVELERGPRGFGFSLRGGKEYNMGLFILRLAEDGPAIKDGRIHVGDQIVEINGEPTQGITHTRAIELIQAGGNKVLLLLRPGTGLIPDHGDWDINNPSSSNVIYDEQSPLPPSSHFASIFEESHVPVIEESLRVQICEKAEELKDIVPEKKSTLNENQPEIKHQSLLQKNVSKRDPPSSHGHSNKKNLLKVENGVTRRGRSVSPKKPASQHSEEHLDKIPSPLKNNPKRRPRDQSLSPSKGENKSCQVSTRAGSGQDQCRKSRGRSASPKKQQKIEGSKAPSNAEAKLLEGKSRRIAGYTGSNAEQIPDGKEKSDVIRKDAKQNQLEKSRTRSPEKKIKRMVEKSLPSKMTNKTTSKEVSENEKGKKVTTGETSSSNDKIGENVQLSEKRLKQEPEEKVVSNKTEDHKGKELEAADKNKETGRFKPESSSPVKKTLITPGPWKVPSGNKVTGTIGMAEKRQ

SEQ ID NO: 10326 - protein, 801 aa, Artificial Sequence
  Synthetic polypeptide
GWITRSGDQDHPGQHELPYGWEKIEDPQYGTYYVDHLNQKTQFENPVEEAKRKKQLGQVEIGSSKPDMEKSHFTRDPSQLKGVLVRASLKKSTMGFGFTIIGGDRPDEFLQVKNVLKDGPAAQDGKIAPGDVIVDINGNCVLGHTHADVVQMFQLVPVNQYVNLTLCRGYPLPDDSEDPVVDIVAATPVINGQSLTKGETCMNPQDFKPGAMVLEQNGKSGHTLTGDGLNGPSDASEQRVSMASSGSSQPELVTIPLIKGPKGFGFAIADSPTGQKVKMILDSQWCQGLQKGDIIKEIYHQNVQNLTHLQVVEVLKQFPVGADVPLLILRGGPPSPTKTAKMKTDKKENAGSLEAINEPIPQPMPFPPSIIRSGSPKLDPSEVYLKSKTLYEDKPPNTKDLDVFLRKQESGFGFRVLGGDGPDQSIYIGAIIPLGAAEKDGRLRAADELMCIDGIPVKGKSHKQVLDLMTTAARNGHVLLTVRRKIFYGEKQPEDDSSQAFISTQNGSPRLNRAEVPARPAPQEPYDVVLQRKENEGFGFVILTSKNKPPPGVIPHKIGRVIEGSPADRCGKLKVGDHISAVNGQSIVELSHDNIVQLIKDAGVTVTLTVIAEEEHHGPPSGTNSARQSPALQHRPMGQSQANHIPGDRSALEGEIGKDVSTSYRHSWSDHKHLAQPDTAVISVVGSRHNQNLGCYPVELERGPRGFGFSLRGGKEYNMGLFILRLAEDGPAIKDGRIHVGDQIVEINGEPTQGITHTRAIELIQAGGNKVLLLLRPGTGLIPDHGLAPSGLCSYVKPEQH

SEQ ID NO: 10327 - protein, 562 aa, Artificial Sequence
  Synthetic polypeptide
SLPSLVELIKRVKLISNKGTETDNDPSCVHPIIKRRQCRPEIRMWQTREKAKFSDGEKCRREAFRRLGNGVSDDLSSEEDGEARTQMILLRRSVEGASSDNGCEVKNRKSILSRHLNSQVKKTTTRWCHIVRDSDSLAESEFESAAFSQGSRSGVSGGSRSLNMSRRDSESTRHDSETEDMLWDDLLHGPECRSSVTSDSEGAHVNTLHSGTKRDPKEDVFQQNHLFWLQNSSPSSDRVSAIIWEGNECKKMDMSVLEISGIIMSRVNAYQQGVGYQMLGNVVTIGLAFFPFLHRLFREKSLDQLKSISAEEILTLFCGAPPVTPIIVLSIINFFERLCLTWMFFFMMCVAERTYKQRFLFAKLFSHITSARKARKYEIPHFRLKKVENIKIWLSLRSYLKRRGPQRSVDVVVSSVFLLTLSIAFICCAQVLQGHKTFLNDAYNWEFLIWETALLLFLLRLASLGSETNKKYSNVSILLTEQINLYLKMEKKPNKKEQLTLVNNVLKLSTKLLKELDTPFRLYGLTMNPLIYNITRVVILSAVSGVISDLLGFNIRLWKIKS

SEQ ID NO: 10328 - protein, 45 aa, Artificial Sequence
  Synthetic polypeptide
ISLTRSDGFIRSFCFCFFFLLPPPSKKCLSPPAVILKPPQPCGTD

SEQ ID NO: 10329 - protein, 437 aa, Artificial Sequence
  Synthetic polypeptide
SLPSLVELIKRVKLISNKGTETDNDPSCVHPIIKRRQCRPEIRMWQTREKAKFSDGEKCRREAFRRLGNGVSDDLSSEEDGEARTQMILLRRSVEGASSDNGCEVKNRKSILSRHLNSQVKKTTTRWCHIVRDSDSLAESEFESAAFSQGSRSGVSGGSRSLNMSRRDSESTRHDSETEDMLWDDLLHGPECRSSVTSDSEGAHVNTLHSGTKRDPKEDVFQQNHLFWLQNSSPSSDRVSAIIWEGNECKKMDMSVLEISGIIMSRVNAYQQGVGYQMLGNVVTIGLAFFPFLHRLFREKSLDQLKSISAEEILTLFCGAPPVTPIIVLSIINFFERLCLTWMFFFMMCVAERTYKQRFLFAKLFSHITSARKARKYEIPHFRLKKVENIKIWLSLRSYLKRRGPQRSVDVVVSSVFLLTLSIAFICCAQVKVSHLL

SEQ ID NO: 10330 - protein, 678 aa, Artificial Sequence
  Synthetic polypeptide
MFKGLKNKPKKMGHIKPDLIDVDLIRVIAIVLYLMMPIVNISEVLGPLCLMLLMGTVHCQIVSTQITRPSGNNGNRRRRKLRKTVNGDGSRENGNNSSDKVRGIETLESVPIIGGFWETIFGNRIKRVKLISNKGTETDNDPSCVHPIIKRRQCRPEIRMWQTREKAKFSDGEKCRREAFRRLGNGVSDDLSSEEDGEARTQMILLRRSVEGASSDNGCEVKNRKSILSRHLNSQVKKTTTRWCHIVRDSDSLAESEFESAAFSQGSRSGVSGGSRSLNMSRRDSESTRHDSETEDMLWDDLLHGPECRSSVTSDSEGAHVNTLHSGTKRDPKEDVFQQNHLFWLQNSSPSSDRVSAIIWEGNECKKMDMSVLEISGIIMSRVNAYQQGVGYQMLGNVVTIGLAFFPFLHRLFREKSLDQLKSISAEEILTLFCGAPPVTPIIVLSIINFFERLCLTWMFFFMMCVAERTYKQRFLFAKLFSHITSARKARKYEIPHFRLKKVENIKIWLSLRSYLKRRGPQRSVDVVVSSVFLLTLSIAFICCAQVLQGHKTFLNDAYNWEFLIWETALLLFLLRLASLGSETNKKYSNVSILLTEQINLYLKMEKKPNKKEQLTLVNNVLKLSTKLLKELDTPFRLYGLTMNPLIYNITRVVILSAVSGVISDLLGFNIRLWKIKS

SEQ ID NO: 10331 - protein, 13 aa, Artificial Sequence
  Synthetic polypeptide
MNPTQRNDKCSRV

SEQ ID NO: 10332 - protein, 27 aa, Artificial Sequence
  Synthetic polypeptide
TQHKEMINVQGFEKQTEKDGPHKARLD

SEQ ID NO: 10333 - protein, 731 aa, Artificial Sequence
  Synthetic polypeptide
MFKGLKNKPKKMGHIKPDLIDVDLIRGSTFAKAKPEIPWTSLTRKGLVRVVFFPLFSNWWIQVTSLRIFVWLLLLYFMQVIAIVLYLMMPIVNISEVLGPLCLMLLMGTVHCQIVSTQITRPSGNNGNRRRRKLRKTVNGDGSRENGNNSSDKVRGIETLESVPIIGGFWETIFGNRIKRVKLISNKGTETDNDPSCVHPIIKRRQCRPEIRMWQTREKAKFSDGEKCRREAFRRLGNGVSDDLSSEEDGEARTQMILLRRSVEGASSDNGCEVKNRKSILSRHLNSQVKKTTTRWCHIVRDSDSLAESEFESAAFSQGSRSGVSGGSRSLNMSRRDSESTRHDSETEDMLWDDLLHGPECRSSVTSDSEGAHVNTLHSGTKRDPKEDVFQQNHLFWLQNSSPSSDRVSAIIWEGNECKKMDMSVLEISGIIMSRVNAYQQGVGYQMLGNVVTIGLAFFPFLHRLFREKSLDQLKSISAEEILTLFCGAPPVTPIIVLSIINFFERLCLTWMFFFMMCVAERTYKQRFLFAKLFSHITSARKARKYEIPHFRLKKVENIKIWLSLRSYLKRRGPQRSVDVVVSSVFLLTLSIAFICCAQVLQGHKTFLNDAYNWEFLIWETALLLFLLRLASLGSETNKKYSNVSILLTEQINLYLKMEKKPNKKEQLTLVNNVLKLSTKLLKELDTPFRLYGLTMNPLIYNITRVVILSAVSGVISDLLGFNIRLWKIKS

SEQ ID NO: 10334 - protein, 686 aa, Artificial Sequence
  Synthetic polypeptide
MFKGLKNKPKKMGHIKPDLIDVDLIRGSTFAKAKPEIPWTSLTRKGLVRVVFFPLFSNWWIQVTSLRIFVWLLLLYFMQVIAIVLYLMMPIVNISEVLGPLCLMLLMGTVHCQIVSTQITRPSGNNGNRRRRIKRVKLISNKGTETDNDPSCVHPIIKRRQCRPEIRMWQTREKAKFSDGEKCRREAFRRLGNGVSDDLSSEEDGEARTQMILLRRSVEGASSDNGCEVKNRKSILSRHLNSQVKKTTTRWCHIVRDSDSLAESEFESAAFSQGSRSGVSGGSRSLNMSRRDSESTRHDSETEDMLWDDLLHGPECRSSVTSDSEGAHVNTLHSGTKRDPKEDVFQQNHLFWLQNSSPSSDRVSAIIWEGNECKKMDMSVLEISGIIMSRVNAYQQGVGYQMLGNVVTIGLAFFPFLHRLFREKSLDQLKSISAEEILTLFCGAPPVTPIIVLSIINFFERLCLTWMFFFMMCVAERTYKQRFLFAKLFSHITSARKARKYEIPHFRLKKVENIKIWLSLRSYLKRRGPQRSVDVVVSSVFLLTLSIAFICCAQVLQGHKTFLNDAYNWEFLIWETALLLFLLRLASLGSETNKKYSNVSILLTEQINLYLKMEKKPNKKEQLTLVNNVLKLSTKLLKELDTPFRLYGLTMNPLIYNITRVVILSAVSGVISDLLGFNIRLWKIKS

SEQ ID NO: 10335 - protein, 606 aa, Artificial Sequence
  Synthetic polypeptide
MFKGLKNKPKKMGHIKPDLIDVDLIRGSTFAKAKPEIPWTSLTRKGLVRVVFFPLFSNWWIQVTSLRIFVWLLLLYFMQVIAIVLYLMMPIVNISEVLGPLCLMLLMGTVHCQIVSTQITRPSGNNGNRRRRKLRKTVNGDGSRENGNNSSDKVRGIETLESVPIIGGFWETIFGNRIKRVKLISNKGTETDNDPSCVHPIIKRRQCRPEIRMWQTREKAKFSDGEKCRREAFRRLGNGVSDDLSSEEDGEARTQMILLRRSVEGASSDNGCEVKNRKSILSRHLNSQVKKTTTRWCHIVRDSDSLAESEFESAAFSQGSRSGVSGGSRSLNMSRRDSESTRHDSETEDMLWDDLLHGPECRSSVTSDSEGAHVNTLHSGTKRDPKEDVFQQNHLFWLQNSSPSSDRVSAIIWEGNECKKMDMSVLEISGIIMSRVNAYQQGVGYQMLGNVVTIGLAFFPFLHRLFREKSLDQLKSISAEEILTLFCGAPPVTPIIVLSIINFFERLCLTWMFFFMMCVAERTYKQRFLFAKLFSHITSARKARKYEIPHFRLKKVENIKIWLSLRSYLKRRGPQRSVDVVVSSVFLLTLSIAFICCAQVKVSHLL

SEQ ID NO: 10336 - protein, 202 aa, Artificial Sequence
  Synthetic polypeptide
MFKGLKNKPKKMGHIKPDLIDVDLIRGSTFAKAKPEIPWTSLTRKGLVRVVFFPLFSNWWIQVTSLRIFVWLLLLYFMQVIAIVLYLMMPIVNISEVLGPLCLMLLMGTVHCQIVSTQITRPSGNNGNRRRRKLRKTVNGDGSRENGNNSSDKVRGIETLESVPIIGGFWETIFGNRRLLGVWVMGCLMTCQVKKMVKHGHR

SEQ ID NO: 10337 - protein, 74 aa, Artificial Sequence
  Synthetic polypeptide
MFKGLKNKPKKMGHIKPDLIDVDLIRGSTFAKAKPEIPWTSLTRKGLVRVVFFPLFSNWWIQVTSLRIFVWLLL

SEQ ID NO: 10338 - protein, 682 aa, Artificial Sequence
  Synthetic polypeptide
KTPWEAEGLKNKPKKMGHIKPDLIDVDLIRVIAIVLYLMMPIVNISEVLGPLCLMLLMGTVHCQIVSTQITRPSGNNGNRRRRKLRKTVNGDGSRENGNNSSDKVRGIETLESVPIIGGFWETIFGNRIKRVKLISNKGTETDNDPSCVHPIIKRRQCRPEIRMWQTREKAKFSDGEKCRREAFRRLGNGVSDDLSSEEDGEARTQMILLRRSVEGASSDNGCEVKNRKSILSRHLNSQVKKTTTRWCHIVRDSDSLAESEFESAAFSQGSRSGVSGGSRSLNMSRRDSESTRHDSETEDMLWDDLLHGPECRSSVTSDSEGAHVNTLHSGTKRDPKEDVFQQNHLFWLQNSSPSSDRVSAIIWEGNECKKMDMSVLEISGIIMSRVNAYQQGVGYQMLGNVVTIGLAFFPFLHRLFREKSLDQLKSISAEEILTLFCGAPPVTPIIVLSIINFFERLCLTWMFFFMMCVAERTYKQRFLFAKLFSHITSARKARKYEIPHFRLKKVENIKIWLSLRSYLKRRGPQRSVDVVVSSVFLLTLSIAFICCAQVLQGHKTFLNDAYNWEFLIWETALLLFLLRLASLGSETNKKYSNVSILLTEQINLYLKMEKKPNKKEQLTLVNNVLKLSTKLLKELDTPFRLYGLTMNPLIYNITRVVILSAVSGVISDLLGFNIRLWKIKS

SEQ ID NO: 10339 - protein, 8 aa, Artificial Sequence
  Synthetic polypeptide
KLLGRLRV

SEQ ID NO: 10340 - protein, 735 aa, Artificial Sequence
  Synthetic polypeptide
KTPWEAEGLKNKPKKMGHIKPDLIDVDLIRGSTFAKAKPEIPWTSLTRKGLVRVVFFPLFSNWWIQVTSLRIFVWLLLLYFMQVIAIVLYLMMPIVNISEVLGPLCLMLLMGTVHCQIVSTQITRPSGNNGNRRRRKLRKTVNGDGSRENGNNSSDKVRGIETLESVPIIGGFWETIFGNRIKRVKLISNKGTETDNDPSCVHPIIKRRQCRPEIRMWQTREKAKFSDGEKCRREAFRRLGNGVSDDLSSEEDGEARTQMILLRRSVEGASSDNGCEVKNRKSILSRHLNSQVKKTTTRWCHIVRDSDSLAESEFESAAFSQGSRSGVSGGSRSLNMSRRDSESTRHDSETEDMLWDDLLHGPECRSSVTSDSEGAHVNTLHSGTKRDPKEDVFQQNHLFWLQNSSPSSDRVSAIIWEGNECKKMDMSVLEISGIIMSRVNAYQQGVGYQMLGNVVTIGLAFFPFLHRLFREKSLDQLKSISAEEILTLFCGAPPVTPIIVLSIINFFERLCLTWMFFFMMCVAERTYKQRFLFAKLFSHITSARKARKYEIPHFRLKKVENIKIWLSLRSYLKRRGPQRSVDVVVSSVFLLTLSIAFICCAQVLQGHKTFLNDAYNWEFLIWETALLLFLLRLASLGSETNKKYSNVSILLTEQINLYLKMEKKPNKKEQLTLVNNVLKLSTKLLKELDTPFRLYGLTMNPLIYNITRVVILSAVSGVISDLLGFNIRLWKIKS

SEQ ID NO: 10341 - protein, 690 aa, Artificial Sequence
  Synthetic polypeptide
KTPWEAEGLKNKPKKMGHIKPDLIDVDLIRGSTFAKAKPEIPWTSLTRKGLVRVVFFPLFSNWWIQVTSLRIFVWLLLLYFMQVIAIVLYLMMPIVNISEVLGPLCLMLLMGTVHCQIVSTQITRPSGNNGNRRRRIKRVKLISNKGTETDNDPSCVHPIIKRRQCRPEIRMWQTREKAKFSDGEKCRREAFRRLGNGVSDDLSSEEDGEARTQMILLRRSVEGASSDNGCEVKNRKSILSRHLNSQVKKTTTRWCHIVRDSDSLAESEFESAAFSQGSRSGVSGGSRSLNMSRRDSESTRHDSETEDMLWDDLLHGPECRSSVTSDSEGAHVNTLHSGTKRDPKEDVFQQNHLFWLQNSSPSSDRVSAIIWEGNECKKMDMSVLEISGIIMSRVNAYQQGVGYQMLGNVVTIGLAFFPFLHRLFREKSLDQLKSISAEEILTLFCGAPPVTPIIVLSIINFFERLCLTWMFFFMMCVAERTYKQRFLFAKLFSHITSARKARKYEIPHFRLKKVENIKIWLSLRSYLKRRGPQRSVDVVVSSVFLLTLSIAFICCAQVLQGHKTFLNDAYNWEFLIWETALLLFLLRLASLGSETNKKYSNVSILLTEQINLYLKMEKKPNKKEQLTLVNNVLKLSTKLLKELDTPFRLYGLTMNPLIYNITRVVILSAVSGVISDLLGFNIRLWKIKS

SEQ ID NO: 10342 - protein, 610 aa, Artificial Sequence
  Synthetic polypeptide
KTPWEAEGLKNKPKKMGHIKPDLIDVDLIRGSTFAKAKPEIPWTSLTRKGLVRVVFFPLFSNWWIQVTSLRIFVWLLLLYFMQVIAIVLYLMMPIVNISEVLGPLCLMLLMGTVHCQIVSTQITRPSGNNGNRRRRKLRKTVNGDGSRENGNNSSDKVRGIETLESVPIIGGFWETIFGNRIKRVKLISNKGTETDNDPSCVHPIIKRRQCRPEIRMWQTREKAKFSDGEKCRREAFRRLGNGVSDDLSSEEDGEARTQMILLRRSVEGASSDNGCEVKNRKSILSRHLNSQVKKTTTRWCHIVRDSDSLAESEFESAAFSQGSRSGVSGGSRSLNMSRRDSESTRHDSETEDMLWDDLLHGPECRSSVTSDSEGAHVNTLHSGTKRDPKEDVFQQNHLFWLQNSSPSSDRVSAIIWEGNECKKMDMSVLEISGIIMSRVNAYQQGVGYQMLGNVVTIGLAFFPFLHRLFREKSLDQLKSISAEEILTLFCGAPPVTPIIVLSIINFFERLCLTWMFFFMMCVAERTYKQRFLFAKLFSHITSARKARKYEIPHFRLKKVENIKIWLSLRSYLKRRGPQRSVDVVVSSVFLLTLSIAFICCAQVKVSHLL

SEQ ID NO: 10343 - protein, 206 aa, Artificial Sequence
  Synthetic polypeptide
KTPWEAEGLKNKPKKMGHIKPDLIDVDLIRGSTFAKAKPEIPWTSLTRKGLVRVVFFPLFSNWWIQVTSLRIFVWLLLLYFMQVIAIVLYLMMPIVNISEVLGPLCLMLLMGTVHCQIVSTQITRPSGNNGNRRRRKLRKTVNGDGSRENGNNSSDKVRGIETLESVPIIGGFWETIFGNRRLLGVWVMGCLMTCQVKKMVKHGHR

SEQ ID NO: 10344 - protein, 78 aa, Artificial Sequence
  Synthetic polypeptide
KTPWEAEGLKNKPKKMGHIKPDLIDVDLIRGSTFAKAKPEIPWTSLTRKGLVRVVFFPLFSNWWIQVTSLRIFVWLLL

SEQ ID NO: 10345 - protein, 749 aa, Artificial Sequence
  Synthetic polypeptide
MTILLVYIFTILYFELFNFRVDSFYLLKKNQLTVKQSQVGPSGGIPEEGIVIIGDDSSLCVIAPEDPTVGQDMEGLKNKPKKMGHIKPDLIDVDLIRVIAIVLYLMMPIVNISEVLGPLCLMLLMGTVHCQIVSTQITRPSGNNGNRRRRKLRKTVNGDGSRENGNNSSDKVRGIETLESVPIIGGFWETIFGNRIKRVKLISNKGTETDNDPSCVHPIIKRRQCRPEIRMWQTREKAKFSDGEKCRREAFRRLGNGVSDDLSSEEDGEARTQMILLRRSVEGASSDNGCEVKNRKSILSRHLNSQVKKTTTRWCHIVRDSDSLAESEFESAAFSQGSRSGVSGGSRSLNMSRRDSESTRHDSETEDMLWDDLLHGPECRSSVTSDSEGAHVNTLHSGTKRDPKEDVFQQNHLFWLQNSSPSSDRVSAIIWEGNECKKMDMSVLEISGIIMSRVNAYQQGVGYQMLGNVVTIGLAFFPFLHRLFREKSLDQLKSISAEEILTLFCGAPPVTPIIVLSIINFFERLCLTWMFFFMMCVAERTYKQRFLFAKLFSHITSARKARKYEIPHFRLKKVENIKIWLSLRSYLKRRGPQRSVDVVVSSVFLLTLSIAFICCAQVLQGHKTFLNDAYNWEFLIWETALLLFLLRLASLGSETNKKYSNVSILLTEQINLYLKMEKKPNKKEQLTLVNNVLKLSTKLLKELDTPFRLYGLTMNPLIYNITRVVILSAVSGVISDLLGFNIRLWKIKS

SEQ ID NO: 10346 - protein, 6 aa, Artificial Sequence
  Synthetic polypeptide
DKIWRV

SEQ ID NO: 10347 - protein, 26 aa, Artificial Sequence
  Synthetic polypeptide
RPYSRTRYGGFEKQTEKDGPHKARLD

SEQ ID NO: 10348 - protein, 802 aa, Artificial Sequence
  Synthetic polypeptide
MTILLVYIFTILYFELFNFRVDSFYLLKKNQLTVKQSQVGPSGGIPEEGIVIIGDDSSLCVIAPEDPTVGQDMEGLKNKPKKMGHIKPDLIDVDLIRGSTFAKAKPEIPWTSLTRKGLVRVVFFPLFSNWWIQVTSLRIFVWLLLLYFMQVIAIVLYLMMPIVNISEVLGPLCLMLLMGTVHCQIVSTQITRPSGNNGNRRRRKLRKTVNGDGSRENGNNSSDKVRGIETLESVPIIGGFWETIFGNRIKRVKLISNKGTETDNDPSCVHPIIKRRQCRPEIRMWQTREKAKFSDGEKCRREAFRRLGNGVSDDLSSEEDGEARTQMILLRRSVEGASSDNGCEVKNRKSILSRHLNSQVKKTTTRWCHIVRDSDSLAESEFESAAFSQGSRSGVSGGSRSLNMSRRDSESTRHDSETEDMLWDDLLHGPECRSSVTSDSEGAHVNTLHSGTKRDPKEDVFQQNHLFWLQNSSPSSDRVSAIIWEGNECKKMDMSVLEISGIIMSRVNAYQQGVGYQMLGNVVTIGLAFFPFLHRLFREKSLDQLKSISAEEILTLFCGAPPVTPIIVLSIINFFERLCLTWMFFFMMCVAERTYKQRFLFAKLFSHITSARKARKYEIPHFRLKKVENIKIWLSLRSYLKRRGPQRSVDVVVSSVFLLTLSIAFICCAQVLQGHKTFLNDAYNWEFLIWETALLLFLLRLASLGSETNKKYSNVSILLTEQINLYLKMEKKPNKKEQLTLVNNVLKLSTKLLKELDTPFRLYGLTMNPLIYNITRVVILSAVSGVISDLLGFNIRLWKIKS

SEQ ID NO: 10349 - protein, 757 aa, Artificial Sequence
  Synthetic polypeptide
MTILLVYIFTILYFELFNFRVDSFYLLKKNQLTVKQSQVGPSGGIPEEGIVIIGDDSSLCVIAPEDPTVGQDMEGLKNKPKKMGHIKPDLIDVDLIRGSTFAKAKPEIPWTSLTRKGLVRVVFFPLFSNWWIQVTSLRIFVWLLLLYFMQVIAIVLYLMMPIVNISEVLGPLCLMLLMGTVHCQIVSTQITRPSGNNGNRRRRIKRVKLISNKGTETDNDPSCVHPIIKRRQCRPEIRMWQTREKAKFSDGEKCRREAFRRLGNGVSDDLSSEEDGEARTQMILLRRSVEGASSDNGCEVKNRKSILSRHLNSQVKKTTTRWCHIVRDSDSLAESEFESAAFSQGSRSGVSGGSRSLNMSRRDSESTRHDSETEDMLWDDLLHGPECRSSVTSDSEGAHVNTLHSGTKRDPKEDVFQQNHLFWLQNSSPSSDRVSAIIWEGNECKKMDMSVLEISGIIMSRVNAYQQGVGYQMLGNVVTIGLAFFPFLHRLFREKSLDQLKSISAEEILTLFCGAPPVTPIIVLSIINFFERLCLTWMFFFMMCVAERTYKQRFLFAKLFSHITSARKARKYEIPHFRLKKVENIKIWLSLRSYLKRRGPQRSVDVVVSSVFLLTLSIAFICCAQVLQGHKTFLNDAYNWEFLIWETALLLFLLRLASLGSETNKKYSNVSILLTEQINLYLKMEKKPNKKEQLTLVNNVLKLSTKLLKELDTPFRLYGLTMNPLIYNITRVVILSAVSGVISDLLGFNIRLWKIKS

SEQ ID NO: 10350 - protein, 677 aa, Artificial Sequence
  Synthetic polypeptide
MTILLVYIFTILYFELFNFRVDSFYLLKKNQLTVKQSQVGPSGGIPEEGIVIIGDDSSLCVIAPEDPTVGQDMEGLKNKPKKMGHIKPDLIDVDLIRGSTFAKAKPEIPWTSLTRKGLVRVVFFPLFSNWWIQVTSLRIFVWLLLLYFMQVIAIVLYLMMPIVNISEVLGPLCLMLLMGTVHCQIVSTQITRPSGNNGNRRRRKLRKTVNGDGSRENGNNSSDKVRGIETLESVPIIGGFWETIFGNRIKRVKLISNKGTETDNDPSCVHPIIKRRQCRPEIRMWQTREKAKFSDGEKCRREAFRRLGNGVSDDLSSEEDGEARTQMILLRRSVEGASSDNGCEVKNRKSILSRHLNSQVKKTTTRWCHIVRDSDSLAESEFESAAFSQGSRSGVSGGSRSLNMSRRDSESTRHDSETEDMLWDDLLHGPECRSSVTSDSEGAHVNTLHSGTKRDPKEDVFQQNHLFWLQNSSPSSDRVSAIIWEGNECKKMDMSVLEISGIIMSRVNAYQQGVGYQMLGNVVTIGLAFFPFLHRLFREKSLDQLKSISAEEILTLFCGAPPVTPIIVLSIINFFERLCLTWMFFFMMCVAERTYKQRFLFAKLFSHITSARKARKYEIPHFRLKKVENIKIWLSLRSYLKRRGPQRSVDVVVSSVFLLTLSIAFICCAQVKVSHLL

SEQ ID NO: 10351 - protein, 273 aa, Artificial Sequence
  Synthetic polypeptide
MTILLVYIFTILYFELFNFRVDSFYLLKKNQLTVKQSQVGPSGGIPEEGIVIIGDDSSLCVIAPEDPTVGQDMEGLKNKPKKMGHIKPDLIDVDLIRGSTFAKAKPEIPWTSLTRKGLVRVVFFPLFSNWWIQVTSLRIFVWLLLLYFMQVIAIVLYLMMPIVNISEVLGPLCLMLLMGTVHCQIVSTQITRPSGNNGNRRRRKLRKTVNGDGSRENGNNSSDKVRGIETLESVPIIGGFWETIFGNRRLLGVWVMGCLMTCQVKKMVKHGHR

SEQ ID NO: 10352 - protein, 145 aa, Artificial Sequence
  Synthetic polypeptide
MTILLVYIFTILYFELFNFRVDSFYLLKKNQLTVKQSQVGPSGGIPEEGIVIIGDDSSLCVIAPEDPTVGQDMEGLKNKPKKMGHIKPDLIDVDLIRGSTFAKAKPEIPWTSLTRKGLVRVVFFPLFSNWWIQVTSLRIFVWLLL

SEQ ID NO: 10353 - protein, 678 aa, Artificial Sequence
  Synthetic polypeptide
PCEGLKNKPKKMGHIKPDLIDVDLIRVIAIVLYLMMPIVNISEVLGPLCLMLLMGTVHCQIVSTQITRPSGNNGNRRRRKLRKTVNGDGSRENGNNSSDKVRGIETLESVPIIGGFWETIFGNRIKRVKLISNKGTETDNDPSCVHPIIKRRQCRPEIRMWQTREKAKFSDGEKCRREAFRRLGNGVSDDLSSEEDGEARTQMILLRRSVEGASSDNGCEVKNRKSILSRHLNSQVKKTTTRWCHIVRDSDSLAESEFESAAFSQGSRSGVSGGSRSLNMSRRDSESTRHDSETEDMLWDDLLHGPECRSSVTSDSEGAHVNTLHSGTKRDPKEDVFQQNHLFWLQNSSPSSDRVSAIIWEGNECKKMDMSVLEISGIIMSRVNAYQQGVGYQMLGNVVTIGLAFFPFLHRLFREKSLDQLKSISAEEILTLFCGAPPVTPIIVLSIINFFERLCLTWMFFFMMCVAERTYKQRFLFAKLFSHITSARKARKYEIPHFRLKKVENIKIWLSLRSYLKRRGPQRSVDVVVSSVFLLTLSIAFICCAQVLQGHKTFLNDAYNWEFLIWETALLLFLLRLASLGSETNKKYSNVSILLTEQINLYLKMEKKPNKKEQLTLVNNVLKLSTKLLKELDTPFRLYGLTMNPLIYNITRVVILSAVSGVISDLLGFNIRLWKIKS

SEQ ID NO: 10354 - protein, 26 aa, Artificial Sequence
  Synthetic polypeptide
YVVFLKNAKRVDIKCSHHTNNNHVRV

SEQ ID NO: 10355 - protein, 731 aa, Artificial Sequence
  Synthetic polypeptide
PCEGLKNKPKKMGHIKPDLIDVDLIRGSTFAKAKPEIPWTSLTRKGLVRVVFFPLFSNWWIQVTSLRIFVWLLLLYFMQVIAIVLYLMMPIVNISEVLGPLCLMLLMGTVHCQIVSTQITRPSGNNGNRRRRKLRKTVNGDGSRENGNNSSDKVRGIETLESVPIIGGFWETIFGNRIKRVKLISNKGTETDNDPSCVHPIIKRRQCRPEIRMWQTREKAKFSDGEKCRREAFRRLGNGVSDDLSSEEDGEARTQMILLRRSVEGASSDNGCEVKNRKSILSRHLNSQVKKTTTRWCHIVRDSDSLAESEFESAAFSQGSRSGVSGGSRSLNMSRRDSESTRHDSETEDMLWDDLLHGPECRSSVTSDSEGAHVNTLHSGTKRDPKEDVFQQNHLFWLQNSSPSSDRVSAIIWEGNECKKMDMSVLEISGIIMSRVNAYQQGVGYQMLGNVVTIGLAFFPFLHRLFREKSLDQLKSISAEEILTLFCGAPPVTPIIVLSIINFFERLCLTWMFFFMMCVAERTYKQRFLFAKLFSHITSARKARKYEIPHFRLKKVENIKIWLSLRSYLKRRGPQRSVDVVVSSVFLLTLSIAFICCAQVLQGHKTFLNDAYNWEFLIWETALLLFLLRLASLGSETNKKYSNVSILLTEQINLYLKMEKKPNKKEQLTLVNNVLKLSTKLLKELDTPFRLYGLTMNPLIYNITRVVILSAVSGVISDLLGFNIRLWKIKS

SEQ ID NO: 10356 - protein, 686 aa, Artificial Sequence
  Synthetic polypeptide
PCEGLKNKPKKMGHIKPDLIDVDLIRGSTFAKAKPEIPWTSLTRKGLVRVVFFPLFSNWWIQVTSLRIFVWLLLLYFMQVIAIVLYLMMPIVNISEVLGPLCLMLLMGTVHCQIVSTQITRPSGNNGNRRRRIKRVKLISNKGTETDNDPSCVHPIIKRRQCRPEIRMWQTREKAKFSDGEKCRREAFRRLGNGVSDDLSSEEDGEARTQMILLRRSVEGASSDNGCEVKNRKSILSRHLNSQVKKTTTRWCHIVRDSDSLAESEFESAAFSQGSRSGVSGGSRSLNMSRRDSESTRHDSETEDMLWDDLLHGPECRSSVTSDSEGAHVNTLHSGTKRDPKEDVFQQNHLFWLQNSSPSSDRVSAIIWEGNECKKMDMSVLEISGIIMSRVNAYQQGVGYQMLGNVVTIGLAFFPFLHRLFREKSLDQLKSISAEEILTLFCGAPPVTPIIVLSIINFFERLCLTWMFFFMMCVAERTYKQRFLFAKLFSHITSARKARKYEIPHFRLKKVENIKIWLSLRSYLKRRGPQRSVDVVVSSVFLLTLSIAFICCAQVLQGHKTFLNDAYNWEFLIWETALLLFLLRLASLGSETNKKYSNVSILLTEQINLYLKMEKKPNKKEQLTLVNNVLKLSTKLLKELDTPFRLYGLTMNPLIYNITRVVILSAVSGVISDLLGFNIRLWKIKS

SEQ ID NO: 10357 - protein, 606 aa, Artificial Sequence
  Synthetic polypeptide
PCEGLKNKPKKMGHIKPDLIDVDLIRGSTFAKAKPEIPWTSLTRKGLVRVVFFPLFSNWWIQVTSLRIFVWLLLLYFMQVIAIVLYLMMPIVNISEVLGPLCLMLLMGTVHCQIVSTQITRPSGNNGNRRRRKLRKTVNGDGSRENGNNSSDKVRGIETLESVPIIGGFWETIFGNRIKRVKLISNKGTETDNDPSCVHPIIKRRQCRPEIRMWQTREKAKFSDGEKCRREAFRRLGNGVSDDLSSEEDGEARTQMILLRRSVEGASSDNGCEVKNRKSILSRHLNSQVKKTTTRWCHIVRDSDSLAESEFESAAFSQGSRSGVSGGSRSLNMSRRDSESTRHDSETEDMLWDDLLHGPECRSSVTSDSEGAHVNTLHSGTKRDPKEDVFQQNHLFWLQNSSPSSDRVSAIIWEGNECKKMDMSVLEISGIIMSRVNAYQQGVGYQMLGNVVTIGLAFFPFLHRLFREKSLDQLKSISAEEILTLFCGAPPVTPIIVLSIINFFERLCLTWMFFFMMCVAERTYKQRFLFAKLFSHITSARKARKYEIPHFRLKKVENIKIWLSLRSYLKRRGPQRSVDVVVSSVFLLTLSIAFICCAQVKVSHLL

SEQ ID NO: 10358 - protein, 202 aa, Artificial Sequence
  Synthetic polypeptide
PCEGLKNKPKKMGHIKPDLIDVDLIRGSTFAKAKPEIPWTSLTRKGLVRVVFFPLFSNWWIQVTSLRIFVWLLLLYFMQVIAIVLYLMMPIVNISEVLGPLCLMLLMGTVHCQIVSTQITRPSGNNGNRRRRKLRKTVNGDGSRENGNNSSDKVRGIETLESVPIIGGFWETIFGNRRLLGVWVMGCLMTCQVKKMVKHGHR

SEQ ID NO: 10359 - protein, 74 aa, Artificial Sequence
  Synthetic polypeptide
PCEGLKNKPKKMGHIKPDLIDVDLIRGSTFAKAKPEIPWTSLTRKGLVRVVFFPLFSNWWIQVTSLRIFVWLLL

SEQ ID NO: 10360 - protein, 37 aa, Artificial Sequence
  Synthetic polypeptide
CLYLQCLQQCLAHSICNSCPPNKPAESVQSNNSSSFL

SEQ ID NO: 10361 - protein, 25 aa, Artificial Sequence
  Synthetic polypeptide
HIVSVILAHQTSLQNLFSQITPAHF

SEQ ID NO: 10362 - protein, 60 aa, Artificial Sequence
  Synthetic polypeptide
CLYLQCLQQCLAHSICNSCPPNKPAESVQSNNSSSFLNFGFANRFSKPKGPRNPPPTWNI

SEQ ID NO: 10363 - protein, 48 aa, Artificial Sequence
  Synthetic polypeptide
CLYLQCLQQCLAHSICNSCPPNKPAESVQSNNSSSFLNFGMCVILLKS

SEQ ID NO: 10364 - protein, 62 aa, Artificial Sequence
  Synthetic polypeptide
QQFSECGSWINSISIICDIVRNTDSWAAFRTSCPVVSFNKLSSWCNTVPSMPPRMQTDRPCG

SEQ ID NO: 10365 - protein, 959 aa, Artificial Sequence
  Synthetic polypeptide
SRLTSSPVGVIRCPVCRQECRQIDLVDNYFVKDTSEAPSSSDEKSEQVCTSCEDNASAVGFCVECGEWLCKTCIEAHQRVKFTKDHLIRKKEDVSESVGASGQRPVFCPVHKQEQLKLFCETCDRLTCRDCQLLEHKEHRYQFLEEAFQNQKGAIENLLAKLLEKKNYVHFAATQVQNRIKEVNETNKRVEQEIKVAIFTLINEINKKGKSLLQQLENVTKERQMKLLQQQNDITGLSRQVKHVMNFTNWAIASGSSTALLYSKRLITFQLRHILKARCDPVPAANGAIRFHCDPTFWAKNVVNLGNLVIESKPAPGYTPNVVVGQVPPGTNHISKTPGQINLAQLRLQHMQQQVYAQKHQQLQQMRMQQPPAPVPTTTTTTQQHPRQAAPQMLQQQPPRLISVQTMQRGNMNCGAFQAHQMRLAQNAARIPGIPRHSGPQYSMMQPHLQRQHSNPGHAGPFPVVSVHNTTINPTSPTTATMANANRGPTSPSVTAIELIPSVTNPENLPSLPDIPPIQLEDAGSSSLDNLLSRYISGSHLPPQPTSTMNPSPGPSALSPGSSGLSNSHTPVRPPSTSSTGSRGSCGSSGRTAEKTSLSFKSDQVKVKQEPGTEDEICSFSGGVKQEKTEDGRRSACMLSSPESSLTPPLSTNLHLESELDALASLENHVKIEPADMNESCKQSGLSSLVNGKSPIRSLMHRSARIGGDGNNKDDDPNEDWCAVCQNGGDLLCCEKCPKVFHLTCHVPTLLSFPSGDWICTFCRDIGKPEVEYDCDNLQHSKKGKTAQGLSPVDQRKCERLLLYLYCHELSIEFQEPVPASIPNYYKIIKKPMDLSTVKKKLQKKHSQHYQIPDDFVADVRLIFKNCERFNEMMKVVQVYADTQEINLKADSEVAQAGKAVALYFEDKLTEIYSDRTFAPLPEFEQEEDDGEVTEDSDEDFIQPRRKRLKSDERPVHIK

SEQ ID NO: 10366 - protein, 6 aa, Artificial Sequence
  Synthetic polypeptide
QALQLV

SEQ ID NO: 10367 - protein, 942 aa, Artificial Sequence
  Synthetic polypeptide
SRLTSSPVGVIRCPVCRQECRQIDLVDNYFVKDTSEAPSSSDEKSEQVCTSCEDNASAVGFCVECGEWLCKTCIEAHQRVKFTKDHLIRKKEDVSESVGASGQRPVFCPVHKQEQLKLFCETCDRLTCRDCQLLEHKEHRYQFLEEAFQNQKGAIENLLAKLLEKKNYVHFAATQVQNRIKEVNETNKRVEQEIKVAIFTLINEINKKGKSLLQQLENVTKERQMKLLQQQNDITGLSRQVKHVMNFTNWAIASGSSTALLYSKRLITFQLRHILKARCDPVPAANGAIRFHCDPTFWAKNVVNLGNLVIESKPAPGYTPNVVVGQVPPGTNHISKTPGQINLAQLRLQHMQQQVYAQKHQQLQQMRMQQPPAPVPTTTTTTQQHPRQAAPQMLQQQPPRLISVQTMQRGNMNCGAFQAHQMRLAQNAARIPGIPRHSGPQYSMMQPHLQRQHSNPGHAGPFPVVSVHNTTINPTSPTTATMANANRGPTSPSVTAIELIPSVTNPENLPSLPDIPPIQLEDAGSSSLDNLLSRYISGSHLPPQPTSTMNPSPGPSALSPGSSGLSNSHTPVRPPSTSSTGSRGSCGSSGRTAEKTSLSFKSDQVKVKQEPGTEDEICSFSGGVKQEKTEDGRRSACMLSSPESSLTPPLSTNLHLESELDALASLENHVKIEPADMNESCKQSGLSSLVNGKSPIRSLMHRSARIGGDGNNKDDDPNEDWCAVCQNGGDLLCCEKCPKVFHLTCHVPTLLSFPSGDWICTFCRDIGKPEVEYDCDNLQHSKKGKTAQGLSPVDQRKCERLLLYLYCHELSIEFQEPVPASIPNYYKIIKKPMDLSTVKKKLQKKHSQHYQIPDDFVADVRLIFKNCERFNEADSEVAQAGKAVALYFEDKLTEIYSDRTFAPLPEFEQEEDDGEVTEDSDEDFIQPRRKRLKSDERPVHIK

SEQ ID NO: 10368 - protein, 60 aa, Artificial Sequence
  Synthetic polypeptide
ANRFTFWGPVPPCQTWQAVCSGWSRGPDDGRGVLRVLRSHAGVAMCAWIIFYLPPGDICC

SEQ ID NO: 10369 - protein, 192 aa, Artificial Sequence
  Synthetic polypeptide
PGSAKHQLYDLKQIALPFGAQFLRVKHGRLYVLVGAGALMMAVGFFGCCGAMRESQCVLGSFFTCLLVIFAAEVTTGVFAFIGKGVAIRHVQTMYEEAYNDYLKDRGKGNGTLITFHSTFQCCGKESSEQVQPTCPKELLGHKNCIDEIETIISVKLQLIGIVGIGIAGLTIFGMIFSMVLCCAIRNSRDVI

SEQ ID NO: 10370 - protein, 38 aa, Artificial Sequence
  Synthetic polypeptide
PALPNTSSMTLSKSLYLLGPSSSVSNMAGCMFWLEPGP

SEQ ID NO: 10371 - protein, 58 aa, Artificial Sequence
  Synthetic polypeptide
ANRFTFWGPVPPCQTWQAVCSGWSRGPDDGRGVLRVLRSHAGVAMCAWISYPTCSDHV

SEQ ID NO: 10372 - protein, 167 aa, Artificial Sequence
  Synthetic polypeptide
PGSAKHQLYDLKQIALPFGAQFLRVKHGRLYVLVGAGALMMAVGFFGCCGAMRESQCVLGSAIRHVQTMYEEAYNDYLKDRGKGNGTLITFHSTFQCCGKESSEQVQPTCPKELLGHKNCIDEIETIISVKLQLIGIVGIGIAGLTIFGMIFSMVLCCAIRNSRDVI

SEQ ID NO: 10373 - protein, 164 aa, Artificial Sequence
  Synthetic polypeptide
PGSAKHQLYDLKQIALPFGAQFLRVKHGRLYVLVGAGALMMAVGFFGCCGAMRESQCVLGSFFTCLLVIFAAEVTTGVFAFIGKGVAIRHVQTMYEEAYNDYLKDRGKGNGTLITFHSTFQCCGKESSEQVQPTCPKELLGHKIFGMIFSMVLCCAIRNSRDVI

SEQ ID NO: 10374 - protein, 42 aa, Artificial Sequence
  Synthetic polypeptide
DVPCKMCLLPSAMIVRPPQPHGTYPASSIGGPRKLLQRFHHL

SEQ ID NO: 10375 - protein, 261 aa, Artificial Sequence
  Synthetic polypeptide
GLPSHMELIQRAALVVLENYYKDFTIYNPNLLTASKFRAAKHMAGLKVYNVDGPSNNATGQSRAMIAAAARRRDSSHNELYYEEAEHERRVKKRKARLVVAVEEAFIHIQRLQAEEQQKAPGEVMDPREAAQAIFPSMARALQKYLRITRQQNYHSMESILQHLAFCITNGMTPKAFLERYLSAGPTLQYDKDRWLSTQWRLVSDEAVTNGLRDGIVFVLKCLDFSLVVNVKKIPFIILSEEFIDPKSHKFVLRLQSETSV

SEQ ID NO: 10376 - protein, 27 aa, Artificial Sequence
  Synthetic polypeptide
DVPFAFCHDCEASPATWNLSSEQHWWS

SEQ ID NO: 10377 - protein, 57 aa, Artificial Sequence
  Synthetic polypeptide
AFTSIHSSFSDSRRATSSPAGSVHALRGHGGHPHCTGWGHAILPLGPGRAPAKSEPR

SEQ ID NO: 10378 - protein, 545 aa, Artificial Sequence
  Synthetic polypeptide
CPRPSHPFTPHSVTHAGQLPVPQAPFMLYVATEAILIALVGATPSYHWDLAELLPNQSHGNQSAGEDQAFGDWLLTANGSEIHKHVHFSSSFTSIASEWFLIANRSYKVSAASSFFFSGVFVGVISFGQLSDRFGRKKVYLTGFALDILFAIANGFSPSYEFFAVTRFLVGMMNGGMSLVAFVLLNECVGTAYWALAGSIGGLFFAVGIAQYALLGYFIRSWRTLAILVNLQGTVVFLLSLFIPESPRWLYSQGRLSEAEEALYLIAKRNRKLKCTFSLTHPANRSCRETGSFLDLFRYRVLLGHTLILMFIWFVCSLVYYGLTLSAGDLGGSIYANLALSGLIEIPSYPLCIYLINQKWFGRKRTLSAFLCLGGLACLIVMFLPEKKDTGVFAVVNSHSLSLLGKLTISAAFNIVYIYTSELYPTVIRNVGLGTCSMFSRVGGIIAPFIPSLKYVQWSLPFIVFGATGLTSGLLSLLLPETLNSPLLETFSDLQVYSYRRLGEEALSLQALDPQQCVDKESSLGSESEEEEEFYDADEETQMIK

SEQ ID NO: 10379 - protein, 61 aa, Artificial Sequence
  Synthetic polypeptide
LTQGNFQSRRLRSCSTWPRRPSSLHWLGPRHPTTGTWQSSCQIRATVTSQLVKTRPLGTGS

SEQ ID NO: 10380 - protein, 243 aa, Artificial Sequence
  Synthetic polypeptide
CPRPSHPFTPHSVTHAGQLPVPQAPFMLYVATEAILIALVGATPSYHWDLAELLPNQSHGNQSAGEDQAFGDWLLTANGSEIHKHVHFSSSFTSIASEWFLIANRSYKVSAASSFFFSGVFVGVISFGQLSDRFGRKKVYLTGFALDILFAIANGFSPSYEFFAVTRFLVGMMNGGMSLVAFVLLNECVGTAYWALAGSIGGLFFAVGIAQYALLGYFIRSWRTLAILVNLQGTVVFLLSLVD

SEQ ID NO: 10381 - protein, 23 aa, Artificial Sequence
  Synthetic polypeptide
FLHFHLRNMCNGLYHSLSSEPRV

SEQ ID NO: 10382 - protein, 124 aa, Artificial Sequence
  Synthetic polypeptide
RRSQDGRIGTALVYSSQRERRRRWVISAFPSEKYVQWSLPFIVFGATGLTSGLLSLLLPETLNSPLLETFSDLQVYSYRRLGEEALSLQALDPQQCVDKESSLGSESEEEEEFYDADEETQMIK

SEQ ID NO: 10383 - protein, 462 aa, Artificial Sequence
  Synthetic polypeptide
SYCNYLYTCFSPLLDFELLQGTSTPLLRIAWARIILDEAHNVKNPRVQTSIAVCKLQACARWAVTGTPIQNNLLDMYSLLKFLRCSPFDEFNLWRSQVDNGSKKGGERLSILTKSLLLRRTKDQLDSTGRPLVILPQRKFQLHHLKLSEDEETVYNVFFARSRSALQSYLKRHESRGNQSGRSPNNPFSRVALEFGSEEPRHSEAADSPRSSTVHILSQLLRLRQCCCHLSLLKSALDPMELKGEGLVLSLEEQLSALTLSELRDSEPSSTVSLNGTFFKMELFEGMRESTKISSLLAELEAIQRNSASQKSVIVSQWTNMLKVVALHLKKHGLTYATIDGSVNPKQRMDLVEAFNHSRGPQVMLISLLAGGVGLNLTGGNHLFLLDMHWNPSLEDQACDRIYRVGQQKDVVIHRFVCEGTVEEKILQLQEKKKDLAKQVLSGSGESVTKLTLADLRVLFGI

SEQ ID NO: 10384 - protein, 14 aa, Artificial Sequence
  Synthetic polypeptide
ILSSCRAPQHLCFE

SEQ ID NO: 10385 - protein, 20 aa, Artificial Sequence
  Synthetic polypeptide
ALAGHLNTFASNSLGSNHIG

SEQ ID NO: 10386 - protein, 17 aa, Artificial Sequence
  Synthetic polypeptide
GHKDICICCSPVMTFYL

SEQ ID NO: 10387 - protein, 107 aa, Artificial Sequence
  Synthetic polypeptide
VIIQKRFVHMHVYSSTVHHCNPNAWNQPKCPLINEWIKKLWYIYTMDYYSAIKRNQLTAFAVTWMRLETIILGEVNQEWKNQASYVLTDMWELSYEDTKIFVSAVLR

SEQ ID NO: 10388 - protein, 49 aa, Artificial Sequence
  Synthetic polypeptide
AMRTQRYLYLLFSGDDLLPLDHWVFNTEAHPLPVLHLANTTLSGNPAVR

SEQ ID NO: 10389 - protein, 45 aa, Artificial Sequence
  Synthetic polypeptide
AMRTQRYLYLLFSGDDLLPLDHWVFNTEAHPLPVLHLANTTLSES

SEQ ID NO: 10390 - protein, 66 aa, Artificial Sequence
  Synthetic polypeptide
AMRTQRYLYLLFSGDDLLPLDHWVFNTEAHPLPVLHLANTTLSGTSQGMRRQNPYFQVLYLYYPDD

SEQ ID NO: 10391 - protein, 51 aa, Artificial Sequence
  Synthetic polypeptide
SRLWYWHKDKRIGYLPKAATSLLPKVIKRGESIIALPTCRYWKCRRGACGT

SEQ ID NO: 10392 - protein, 17 aa, Artificial Sequence
  Synthetic polypeptide
TYRVLTKSCYLSTSQGH

SEQ ID NO: 10393 - protein, 90 aa, Artificial Sequence
  Synthetic polypeptide
SQHFGRLRIHFGQITSNQMLVPVIEKLRETTISKVSQVRDVIGFNMAGLDYLKRECEAKSEVMFFADATSHLEEKKRKRKKREKLILTLT

SEQ ID NO: 10394 - protein, 23 aa, Artificial Sequence
  Synthetic polypeptide
RTRWLTPVIPALWEAEDSLWTDH

SEQ ID NO: 10395 - protein, 98 aa, Artificial Sequence
  Synthetic polypeptide
GRTQWLTPVIPAFWEAEAGGSQAGGSRFRDTRGQMLSEWRKGARNRPSPDPALQGPWSAVQCGWRALRGEGRPHDPQWFGGGSWPPSVSEHLLTEDPV

SEQ ID NO: 10396 - protein, 215 aa, Artificial Sequence
  Synthetic polypeptide
SQHFGRQRQADHKPVAAGSGIPEVKCYLNGVKVPGIVRLRTLLCKVLGVLFSVAGGLFVEKEGPMIHSGSVVGAGLPQFQSISLRKIQFNFPYFRSDRDKRDFVSAGAAAGVAAAFGAPIGGTLFSLEEGSSFWNQGLTWKVLFCSMSATFTLNFFRSGIQFGSWGSFQLPGLLNFGEFKSLREPPCVSGNHRGGVCGLDGVRRMPTDVLFESNR

SEQ ID NO: 10397 - protein, 36 aa, Artificial Sequence
  Synthetic polypeptide
PDTVAHACNPSILGGRGRRITSRWQQVPGYPRSNAI

SEQ ID NO: 10398 - protein, 731 aa, Artificial Sequence
  Synthetic polypeptide
SQHFGRQRQADHKPVAAGSGIPEVKCYLNGVKVPGIVRLRTLLCKVLGVLFSVAGGLFVEKEGPMIHSGSVVGAGLPQFQSISLRKIQFNFPYFRSDRDKRDFVSAGAAAGVAAAFGAPIGGTLFSLEEGSSFWNQGLTWKVLFCSMSATFTLNFFRSGIQFGSWGSFQLPGLLNFGEFKCSDSDKKCHLWTAMDLGFFVVMGVIGGLLGATFNCLNKRLAKYRMRNVHPKPKLVRVLESLLVSLVTTVVVFVASMVLGECRQMSSSSQIGNDSFQLQVTEDVNSSIKTFFCPNDTYNDMATLFFNPQESAILQLFHQDGTFSPVTLALFFVLYFLLACWTYGISVPSGLFVPSLLCGAAFGRLVANVLKSYIGLGHIYSGTFALIGAAAFLGGVVRMTISLTVILIESTNEITYGLPIMVTLMVAKWTGDFFNKGIYDIHVGLRGVPLLEWETEVEMDKLRASDIMEPNLTYVYPHTRIQSLVSILRTTVHHAFPVVTENRGNEKEFMKGNQLISNNIKFKKSSILTRAGEQRKRSQSMKSYPSSELRNMCDEHIASEEPAEKEDLLQQMLERRYTPYPNLYPDQSPSEDWTMEERFRPLTFHGLILRSQLVTLLVRGVCYSESQSSASQPRLSYAEMAEDYPRYPDIHDLDLTLLNPRMIVDVTPYMNPSPFTVSPNTHVSQVFNLFRTMGLRHLPVVNAVGEIVGIITRHNLTYEFLQARLRQHYQTI

SEQ ID NO: 10399 - protein, 815 aa, Artificial Sequence
  Synthetic polypeptide
SQHFGRQRQADHKPVAAGSGIPEVKCYLNGVKVPGIVRLRTLLCKVLGVLFSVAGGLFVEKEGPMIHSGSVVGAGLPQFQSISLRKIQFNFPYFRSDRDKRDFVSAGAAAGVAAAFGAPIGGTLFSLEEGSSFWNQGLTWKVLFCSMSATFTLNFFRSGIQFGSWGSFQLPGLLNFGEFKCSDSDKKCHLWTAMDLGFFVVMGVIGGLLGATFNCLNKRLAKYRMRNVHPKPKLVRVLESLLVSLVTTVVVFVASMVLGECRQMSSSSQIGNDSFQLQVTEDVNSSIKTFFCPNDTYNDMATLFFNPQESAILQLFHQDGTFSPVTLALFFVLYFLLACWTYGISVPSGLFVPSLLCGAAFGRLVANVLKSYIGLGHIYSGTFALIGAAAFLGGVVRMTISLTVILIESTNEITYGLPIMVTLMVAKWTGDFFNKGIYDIHVGLRGVPLLEWETEVEMDKLRASDIMEPNLTYVYPHTRIQSLVSILRTTVHHAFPVVTENRGNEKEFMKGNQLISNNIKFKKSSILTRAGEQRKRSQSMKSYPSSELRNMCDEHIASEEPAEKEDLLQQMLERRYTPYPNLYPDQSPSEDWTMEERFRPLTFHGLILRSQLVTLLVRGVCYSESQSSASQPRLSYAEMAEDYPRYPDIHDLDLTLLNPRMIVDVTPYMNPSPFTVSPNTHVSQVFNLFRTMGLRHLPVVNAVGEVSEAPALPPPLREDPLARCCLCTQASHQKRRHPTRRGECGPTLALNPARLPCTRDPFPCLPADGTSVPLAVLSSQSRASTRLCLPPEMLLFTPYHWCSLVLHLRRDLRIR

SEQ ID NO: 10400 - protein, 13 aa, Artificial Sequence
  Synthetic polypeptide
DHTTALQPGRQSV

SEQ ID NO: 10401 - protein, 117 aa, Artificial Sequence
  Synthetic polypeptide
TEITPLHCSLGDRVSEHTQLSWILSCMVRLPRLQHLHQWKAKTTKQKHDGTVGLLTYPVLQAADILLYKSTHVPVGEDQVQHMELVQDLAQGFNKKYGEFFPVPESILSMCVLVFLT

SEQ ID NO: 10402 - protein, 45 aa, Artificial Sequence
  Synthetic polypeptide
QVLVIPATQEAEAENCLNLGVGGCCELRSHHCTAAWATECLNTHN

SEQ ID NO: 10403 - protein, 257 aa, Artificial Sequence
  Synthetic polypeptide
TEITPLHCSLGDRVSEHTQLSWILSCMVRLPRLQHLHQWKAKTTKQKHDGTVGLLTYPVLQAADILLYKSTHVPVGEDQVQHMELVQDLAQGFNKKYGEFFPVPESILTSMKKVKSLRDPSAKMSKSDPDKLATVRITDSPEEIVQKFRKAVTDFTSEVTYDPAGRAGVSNIVAVHAAVTGLSVEEVVRRSAGMNTARYKLAVADAVIEKFAPIKREIEKLKLDKDHLEKVLQIGSAKAKELAYTVCQEVKKLVGFL

SEQ ID NO: 10404 - protein, 40 aa, Artificial Sequence
  Synthetic polypeptide
VRRSRPSLLIRWLLSWKTNFSQRISFQTSQYLYDHSQREV

SEQ ID NO: 10405 - protein, 203 aa, Artificial Sequence
  Synthetic polypeptide
YGGYYHGKLIFPREFPFKPPSIYMITPNGRFKCNTRLCLSITDFHPDTWNPAWSVSTILTGLLSFMVEKGPTLGSIETSDFTKRQLAVQSLAFNLKDKVFCELFPEVVEEIKQKQKAQDELSSRPQTLPLPDVVPDGETHLVQNGIQLLNGHAPGAVPNLAGLQQANRHHGLLGGALANLFVIVGFAAFAYTVKYVLRSIAQE

SEQ ID NO: 10406 - protein, 17 aa, Artificial Sequence
  Synthetic polypeptide
QEIQTILANTVAIIMEN

SEQ ID NO: 10407 - protein, 18 aa, Artificial Sequence
  Synthetic polypeptide
VRRSRPSLLIRWLLSWKT

SEQ ID NO: 10408 - protein, 9 aa, Artificial Sequence
  Synthetic polypeptide
YGGYYHGKL

SEQ ID NO: 10409 - protein, 140 aa, Artificial Sequence
  Synthetic polypeptide
YGGYYHGKLIFPREFPFKPPSIYMITPNGRFKCNTRLCLSITDFHPDTWNPAWSVSTILTGLLSFMVEKGPTLGSIETSDFTKRQLAVQSLAFNLKDKVFCELFPEVVEEIKQKQKAQDELSSRPQTLPLPDVVPDGETH

SEQ ID NO: 10410 - protein, 38 aa, Artificial Sequence
  Synthetic polypeptide
VRRSRPSLLIRWLLSWKTNFSQRISFQTSQYLYDHSQR

SEQ ID NO: 10411 - protein, 29 aa, Artificial Sequence
  Synthetic polypeptide
YGGYYHGKLIFPREFPFKPPSIYMITPNG

SEQ ID NO: 10412 - protein, 24 aa, Artificial Sequence
  Synthetic polypeptide
VRRSRPSLLIRWLLSWKTNFSQRI

SEQ ID NO: 10413 - protein, 15 aa, Artificial Sequence
  Synthetic polypeptide
YGGYYHGKLIFPREF

SEQ ID NO: 10414 - protein, 25 aa, Artificial Sequence
  Synthetic polypeptide
YFGQITELGARRPEFFSSIAVSRWL

SEQ ID NO: 10415 - protein, 2456 aa, Artificial Sequence
  Synthetic polypeptide
EPEDQNSSPALQCRDGYEPCVNEGMCVTYHNGTGYCKCPEGFLGEYCQHRDPCEKNRCQNGGTCVAQAMLGKATCRCASGFTGEDCQYSTSHPCFVSRPCLNGGTCHMLSRDTYECTCQVGFTGKECQWTDACLSHPCANGSTCTTVANQFSCKCLTGFTGQKCETDVNECDIPGHCQHGGTCLNLPGSYQCQCPQGFTGQYCDSLYVPCAPSPCVNGGTCRQTGDFTFECNCLPGFEGSTCERNIDDCPNHRCQNGGVCVDGVNTYNCRCPPQWTGQFCTEDVDECLLQPNACQNGGTCANRNGGYGCVCVNGWSGDDCSENIDDCAFASCTPGSTCIDRVASFSCMCPEGKAGLLCHLDDACISNPCHKGALCDTNPLNGQYICTCPQGYKGADCTEDVDECAMANSNPCEHAGKCVNTDGAFHCECLKGYAGPRCEMDINECHSDPCQNDATCLDKIGGFTCLCMPGFKGVHCELEINECQSNPCVNNGQCVDKVNRFQCLCPPGFTGPVCQIDIDDCSSTPCLNGAKCIDHPNGYECQCATGFTGVLCEENIDNCDPDPCHHGQCQDGIDSYTCICNPGYMGAICSDQIDECYSSPCLNDGRCIDLVNGYQCNCQPGTSGVNCEINFDDCASNPCIHGICMDGINRYSCVCSPGFTGQRCNIDIDECASNPCRKGATCINGVNGFRCICPEGPHHPSCYSQVNECLSNPCIHGNCTGGLSGYKCLCDAGWVGINCEVDKNECLSNPCQNGGTCDNLVNGYRCTCKKGFKGYNCQVNIDECASNPCLNQGTCFDDISGYTCHCVLPYTGKNCQTVLAPCSPNPCENAAVCKESPNFESYTCLCAPGWQGQRCTIDIDECISKPCMNHGLCHNTQGSYMCECPPGFSGMDCEEDIDDCLANPCQNGGSCMDGVNTFSCLCLPGFTGDKCQTDMNECLSEPCKNGGTCSDYVNSYTCKCQAGFDGVHCENNINECTESSCFNGGTCVDGINSFSCLCPVGFTGSFCLHEINECSSHPCLNEGTCVDGLGTYRCSCPLGYTGKNCQTLVNLCSRSPCKNKGTCVQKKAESQCLCPSGWAGAYCDVPNVSCDIAASRRGVLVEHLCQHSGVCINAGNTHYCQCPLGYTGSYCEEQLDECASNPCQHGATCSDFIGGYRCECVPGYQGVNCEYEVDECQNQPCQNGGTCIDLVNHFKCSCPPGTRGLLCEENIDDCARGPHCLNGGQCMDRIGGYSCRCLPGFAGERCEGDINECLSNPCSSEGSLDCIQLTNDYLCVCRSAFTGRHCETFVDVCPQMPCLNGGTCAVASNMPDGFICRCPPGFSGARCQSSCGQVKCRKGEQCVHTASGPRCFCPSPRDCESGCASSPCQHGGSCHPQRQPPYYSCQCAPPFSGSRCELYTAPPSTPPATCLSQYCADKARDGVCDEACNSHACQWDGGDCSLTMENPWANCSSPLPCWDYINNQCDELCNTVECLFDNFECQGNSKTCKYDKYCADHFKDNHCDQGCNSEECGWDGLDCAADQPENLAEGTLVIVVLMPPEQLLQDARSFLRALGTLLHTNLRIKRDSQGELMVYPYYGEKSAAMKKQRMTRRSLPGEQEQEVAGSKVFLEIDNRQCVQDSDHCFKNTDAAAALLASHAIQGTLSYPLVSVVSESLTPERTQLLYLLAVAVVIILFIILLGVIMAKRKRKHGSLWLPEGFTLRRDASNHKRREPVGQDAVGLKNLSVQVSEANLIGTGTSEHWVDDEGPQPKKVKAEDEALLSEEDDPIDRRPWTQQHLEAADIRRTPSLALTPPQAEQEVDVLDVNVRGPDGCTPLMLASLRGGSSDLSDEDEDAEDSSANIITDLVYQGASLQAQTDRTGEMALHLAARYSRADAAKRLLDAGADANAQDNMGRCPLHAAVAADAQGVFQILIRNRVTDLDARMNDGTTPLILAARLAVEGMVAELINCQADVNAVDDHGKSALHWAAAVNNVEATLLLLKNGANRDMQDNKEETPLFLAAREGSYEAAKILLDHFANRDITDHMDRLPRDVARDRMHHDIVRLLDEYNVTPSPPGTVLTSALSPVICGPNRSFLSLKHTPMGKKSRRPSAKSTMPTSLPNLAKEAKDAKGSRRKKSLSEKVQLSESSVTLSPVDSLESPHTYVSDTTSSPMITSPGILQASPNPMLATAAPPAPVHAQHALSFSNLHEMQPLAHGASTVLPSVSQLLSHHHIVSPGSGSAGSLSRLHPVPVPADWMNRMEVNETQYNEMFGMVLAPAEGTHPGIAPQSRPPEGKHITTPREPLPPIVTFQLIPKGSIAQPAGAPQPQSTCPPAVAGPLPTMYQIPEMARLPSVAFPTAMMPQQDGQVAQTILPAYHPFPASVGKYPTPPSQHSYASSNAAERTPSHSGHLQGEHPYLTPSPESPDQWSSSSPHSASDWSDVTTSPTPGGAGGGQRGPGTHMSEPPHNNMQVYA

SEQ ID NO: 10416 - protein, 22 aa, Artificial Sequence
  Synthetic polypeptide
TRSQKTRILLQHCSVEMAMNPV

SEQ ID NO: 10417 - protein, 15 aa, Artificial Sequence
  Synthetic polypeptide
HRFTARKCVKSGKTD

SEQ ID NO: 10418 - protein, 16 aa, Artificial Sequence
  Synthetic polypeptide
GQESSPDNIGLLRGNA

SEQ ID NO: 10419 - protein, 113 aa, Artificial Sequence
  Synthetic polypeptide
AEIKPLHSNPGDKGLWTPALPSPASLRPSSPSCRSFGKPTRRSVSAAILNPSCQACVRAVAAAWRKTMNACTVTVSTGACSRCLWIPVPPAACAGHRETSRALGPWRSQRTSG

SEQ ID NO: 10420 - protein, 47 aa, Artificial Sequence
  Synthetic polypeptide
SQLLRTLRQENHLNPGSGGCSEQRSSHCTLTRATKVSGHQLFHHQPA

SEQ ID NO: 10421 - protein, 210 aa, Artificial Sequence
  Synthetic polypeptide
PGRQRSLDTSSSITSQPEAFFSKLQEFRETNKEECICSHPEPQLPGLRESSGSGVEEDHECVYCYRVNRRLFPVPVDPGTPCRLCRTPRDQQGPGTLAQPAHVRVSIPLSILEPPHRYHIHRRKSFDASDTLALPRHCLLGWDIFPPKSEKSSAPRNLDLWSSVSAEAQHQKLSGTSSPFHPASPMQMLPPTPTWSVPQVPRPHVPRQKP

SEQ ID NO: 10422 - protein, 125 aa, Artificial Sequence
  Synthetic polypeptide
AEIKPLHSNPGDKGLWTPALPSPASLRPSSPSCRSFGKPTRRSVSAAILNPSCQACVRAVAAAWRKTMNACTVTVSTGACSRCLWIPVPPAACAGHRETSRALGPWRSQRTSALPAGLGHFSSEV

SEQ ID NO: 10423 - protein, 180 aa, Artificial Sequence
  Synthetic polypeptide
PGRQRSLDTSSSITSQPEAFFSKLQEFRETNKEECICSHPEPQLPGLRESSGSGVEEDHECVYCYRVNRRLFPVPVDPGTPCRLCRTPRDQQGPGTLAQPAHVSTACWAGTFFLRSLRKAQPPGTWTSGPLSPLRPSTRSCPAPAALFTRPHQCRCCPRPRPGQCPRSLGPTSHGRSPED

SEQ ID NO: 10424 - protein, 36 aa, Artificial Sequence
  Synthetic polypeptide
VNMCQVLRAASGHSECCANKGSTLRGHLSWKPQPLL

SEQ ID NO: 10425 - protein, 587 aa, Artificial Sequence
  Synthetic polypeptide
EQLLDTVSAVQIKDRPFEDTCHGNPSHYYDKAVRRCCYRCPMGLFPTQQCPQRPTDCRKQCEPDYYLDEADRCTACVTCSRDDLVEKTPCAWNSSRVCECRPGMFCSTSAVNSCARCFFHSVCPAGMIVKFPGTAQKNTVCEPASPGVSPACASPENCKEPSSGTIPQAKPTPVSPATSSASTMPVRGGTRLAQEAASKLTRAPDSPSSVGRPSSDPGLSPTQPCPEGSGDCRKQCEPDYYLDEAGRCTACVSCSRDDLVEKTPCAWNSSRTCECRPGMICATSATNSRARCVPYPICAAETVTKPQDMAEKDTTFEAPPLGTQPDCNPTPENGEAPASTSPTQSLLVDSQASKTLPIPTSAPVALSSTGKPVLDAGPVLFWVILVLVVVVGSSAFLLCHRRACRKRIRQKLHLCYPVQTSQPKLELVDSRPRRSSTQLRSGASVTEPVAEERGLMSQPLMETCHSVGAAYLESLPLQDASPAGGPSSPRDLPEPRVSTEHTNNKIEKIYIMKADTVIVGTVKAELPEGRGLAGPAEPELEEELEADHTPHYPEQETEPPLGSCSDVMLSVEEEGKEDPLPTAASGK

SEQ ID NO: 10426 - protein, 19 aa, Artificial Sequence
  Synthetic polypeptide
TREAEIAGCAEVQGDKEAV

SEQ ID NO: 10427 - protein, 749 aa, Artificial Sequence
  Synthetic polypeptide
AWWRMPVIPAAREAEAGESLELARQRLRDVRKFKETKKQFDKVREDLELSLVRNAQAPRHRPHEVEEATGALTLTRKCFRHLALDYVLQINVLQAKKKFEILDSMLSFMHAQSSFFQQGYSLLHQLDPYMKKLAAELDQLVIDSAVEKREMERKHAAIQQRTLLQDFSYDESKVEFDVDAPSGVVMEGYLFKRASNAFKTWNRRWFSIQNSQLVYQKKLKDALTVVVDDLRLCSVKPCEDIERRFCFEVLSPTKSCMLQADSEKLRQAWVQAVQASIASAYRESPDSCYSERLDRTASPSTSSIDSATDTRERGVKGESVLQRVQSVAGNSQCGDCGQPDPRWASINLGVLLCIECSGIHRSLGVHCSKVRSLTLDSWEPELLKLMCELGNSAVNQIYEAQCEGAGSRKPTASSSRQDKEAWIKDKYVEKKFLRKAPMAPALEAPRRWRVQKCLRPHSSPRAPTARRKVRLEPVLPCVAALSSVGTLDRKFRRDSLFCPDELDSLFSYFDAGAAGAGPRSLSSDSGLGGSSDGSSDVLAFGSGSVVDSVTEEEGAESEESSGEADGDTEAEAWGLADVRELHPGLLAHRAARARDLPALAAALAHGAEVNWADAEDEGKTPLVQAVLGGSLIVCEFLLQNGADVNQRDSRGRAPLHHATLLGRTGQVCLFLKRGADQHALDQEQRDPLAIAVQAANADIVTLLRLARMAEEMREAEAAPGPPGALAGSPTELQFRRCIQEFISLHLEES

SEQ ID NO: 10428 - protein, 44 aa, Artificial Sequence
  Synthetic polypeptide
SQLLGKLRQENHLNSRGRDCGMCGSSRRQRSSLTRCGRTWSCPW

SEQ ID NO: 10429 - protein, 716 aa, Artificial Sequence
  Synthetic polypeptide
AWWRMPVIPAAREAEAGESLELARQRLRDVRKFKETKKQFDKVREDLELSLVRNAQAPRHRPHEVEEATGALTLTRKCFRHLALDYVLQINVLQAKKKFEILDSMLSFMHAQSSFFQQGYSLLHQLDPYMKKLAAELDQLVIDSAVEKREMERKHAAIQQRTLLQDFSYDESKVEFDVDAPSGVVMEGYLFKRASNAFKTWNRRWFSIQNSQLVYQKKLKDALTVVVDDLRLCSVKPCEDIERRFCFEVLSPTKSCMLQADSEKLRQAWVQAVQASIASAYRESPDSCYSERLDRTASPSTSSIDSATDTRERGVKGESVLQRVQSVAGNSQCGDCGQPDPRWASINLGVLLCIECSGIHRSLGVHCSKVRSLTLDSWEPELLKLMCELGNSAVNQIYEAQCEGAGSRKPTASSSRQDKEAWIKDKYVEKKFLRKAPMAPALEAPRRWRVQKCLRPHSSPRAPTARRKVRLEPVLPCVAALSSVGTLDRKFRRDSLFCPDELDSLFSYFDAGAAGAGPRKGAESEESSGEADGDTEAEAWGLADVRELHPGLLAHRAARARDLPALAAALAHGAEVNWADAEDEGKTPLVQAVLGGSLIVCEFLLQNGADVNQRDSRGRAPLHHATLLGRTGQVCLFLKRGADQHALDQEQRDPLAIAVQAANADIVTLLRLARMAEEMREAEAAPGPPGALAGSPTELQFRRCIQEFISLHLEES

SEQ ID NO: 10430 - protein, 303 aa, Artificial Sequence
  Synthetic polypeptide
PRDHEEGTNTLQWALLPDDFAQLSANFAGTLSDGLGKTMDNRHQSEREYIRYHAATSGEHLVAGIHGLAHGIIGGLTSVITSTVEGVKTEGGVSGFISGLGKGLVGTVTKPVAGALDFASETAQAVRDTATLSGPRTQAQRVRKPRCCTGPQGLLPRYSESQAEGQEQLFKLTDNIQDEFFIAVENIDSYCVLISSKAVYFLKSGDYVDREAIFLEVKYDDLYHCLVSKDHGKVYVQVTKKAVSTSSGVSIPGPSHQKPMVHVKSEVLAVKLSQEINYAKSLYYEQQLMLRLSENREQLELDS

SEQ ID NO: 10431 - protein, 77 aa, Artificial Sequence
  Synthetic polypeptide
RKSYMHSVETVLQILSFDLPGLVTCDPILSQCWALGQPQLLVSHVIMKREQILYSGPCCQMTSPSCQLILLEHYQMA

SEQ ID NO: 10432 - protein, 25 aa, Artificial Sequence
  Synthetic polypeptide
AVMSPLHSSLDNREARASTTGSRLC

SEQ ID NO: 10433 - protein, 25 aa, Artificial Sequence
  Synthetic polypeptide
CHHCTPAWTTGKPVPLLLDQDYVNL

SEQ ID NO: 10434 - protein, 35 aa, Artificial Sequence
  Synthetic polypeptide
GQEIEAAVSCDVTTALQPGQQGSPCLYYWIKIMLI

SEQ ID NO: 10435 - protein, 373 aa, Artificial Sequence
  Synthetic polypeptide
CHHCTPAWTTGKPVPLLLDQDYVNLKNQIIKAERRVLKELGFCVHVKHPHKIIVMYLQVLECERNQHLVQTSWNYMNDSLRTDVFVRFQPESIACACIYLAARTLEIPLPNRPHWFLLFGATEEEIQEICLKILQLYARKKVDLTHLEGEVEKRKHAIEEAKAQARGLLPGGTQVLDGTSGFSPAPKLVESPKEGKGSKPSPLSVKNTKRRLEGAKKAKADSPVNGLPKGRESRSRSRSREQSYSRSPSRSASPKRRKSDSGSTSGGSKSQSRSRSRSDSPPRQAPRSAPYKGSEIRGSRKSKDCKYPQKPHKSRSRSSSRSRSRSRERADNPGKYKKKSHYYRDQRRERSRSYERTGRRYERDHPGHSRHRR

SEQ ID NO: 10436 - protein, 89 aa, Artificial Sequence
  Synthetic polypeptide
CHHCTPAWTTGKPVPLLLDQDYVNLKNQIIKAERRVLKELGFCVHVKHPHKIIVMYLQVLECERNQHLVQTSWVASEDPLLKWDSWQRL

SEQ ID NO: 10437 - protein, 80 aa, Artificial Sequence
  Synthetic polypeptide
CHHCTPAWTTGKPVPLLLDQDYVNLKNQIIKAERRVLKELGFCVHVKHPHKIIVMYLQVLECERNQHLVQTSWVASEGIT

SEQ ID NO: 10438 - protein, 79 aa, Artificial Sequence
  Synthetic polypeptide
CHHCTPAWTTGKPVPLLLDQDYVNLKNQIIKAERRVLKELGFCVHVKHPHKIIVMYLQVLECERNQHLVQTSWVASEGK

SEQ ID NO: 10439 - protein, 23 aa, Artificial Sequence
  Synthetic polypeptide
CHHCTPAWTTGKPVPLLLDQDYV

SEQ ID NO: 10440 - protein, 34 aa, Artificial Sequence
  Synthetic polypeptide
GQEIEAAVSCDVTTALQPGQQGSPCLYYWIKIML

SEQ ID NO: 10441 - protein, 36 aa, Artificial Sequence
  Synthetic polypeptide
CHHCTPAWTTGKPVPLLLDQDYVNLKNQIIKAERRV

SEQ ID NO: 10442 - protein, 76 aa, Artificial Sequence
  Synthetic polypeptide
VWCHGQEWGLWSRLTCEQILASRYVTTQRISLCLSFLIHKVEPIAPGEELLVWYNGEDNPEIAAAIEEERASARSK

SEQ ID NO: 10443 - protein, 36 aa, Artificial Sequence
  Synthetic polypeptide
PRKGSLCVLVFSSIKWSQSRRARSSWSGTMGKTTLR

SEQ ID NO: 10444 - protein, 20 aa, Artificial Sequence
  Synthetic polypeptide
SGANRAGRGAPGLVQWGRQP

SEQ ID NO: 10445 - protein, 140 aa, Artificial Sequence
  Synthetic polypeptide
VWCHGQEWGLWSRLTCEQILASRYVTTQRISLCLSFLIHKVEPIAPGEELLVWYNGEDNPEIAAAIEEERASARSKRSSPKSRKATASAWRPDALHQRPRTSPGSIGRSKLQLQPSSRDHSSKSRHSGCSLTAPEVTWNQ

SEQ ID NO: 10446 - protein, 1596 aa, Artificial Sequence
  Synthetic polypeptide
VWCHGQEWGLWSRLTCEQILASRYVTTQRISLCLSFLIHKVEPIAPGEELLVWYNGEDNPEIAAAIEEERASARSKRSSPKSRKGKKKSQENKNKGNKIQDIQLKTSEPDFTSANMRDSAEGPKEDEEKPSASALEQPATLQEVASQEVPPELATPAPAWEPQPEPDERLEAAACEVNDLGEEEEEEEEEDEEEEEDDDDDELEDEGEEEASMPNENSVKEPEIRCDEKPEDLLEEPKTTSEETLEDCSEVTPAMQIPRTKEEANGDVFETFMFPCQHCERKFTTKQGLERHMHIHISTVNHAFKCKYCGKAFGTQINRRRHERRHEAGLKRKPSQTLQPSEDLADGKASGENVASKDDSSPPSLGPDCLIMNSEKASQDTINSSVVEENGEVKELHPCKYCKKVFGTHTNMRRHQRRVHERHLIPKGVRRKGGLEEPQPPAEQAQATQNVYVPSTEPEEEGEADDVYIMDISSNISENLNYYIDGKIQTNNNTSNCDVIEMESASADLYGINCLLTPVTVEITQNIKTTQVPVTEDLPKEPLGSTNSEAKKRRTASPPALPKIKAETDSDPMVPSCSLSLPLSISTTEAVSFHKEKSVYLSSKLKQLLQTQDKLTPAGISATEIAKLGPVCVSAPASMLPVTSSRFKRRTSSPPSSPQHSPALRDFGKPSDGKAAWTDAGLTSKKSKLESHSDSPAWSLSGRDERETVSPPCFDEYKMSKEWTASSAFSSVCNQQPLDLSSGVKQKAEGTGKTPVQWESVLDLSVHKKHCSDSEGKEFKESHSVQPTCSAVKKRKPTTCMLQKVLLNEYNGIDLPVENPADGTRSPSPCKSLEAQPDPDLGPGSGFPAPTVESTPDVCPSSPALQTPSLSSGQLPPLLIPTDPSSPPPCPPVLTVATPPPPLLPTVPLPAPSSSASPHPCPSPLSNATAQSPLPILSPTVSPSPSPIPPVEPLMSAASPGPPTLSSSSSSSSSSSSFSSSSSSSSPSPPPLSAISSVVSSGDNLEASLPMISFKQEELENEGLKPREEPQSAAEQDVVVQETFNKNFVCNVCESPFLSIKDLTKHLSIHAEEWPFKCEFCVQLFKDKTDLSEHRFLLHGVGNIFVCSVCKKEFAFLCNLQQHQRDLHPDKVCTHHEFESGTLRPQNFTDPSKAHVEHMQSLPEDPLETSKEEEELNDSSEELYTTIKIMASGIKTKDPDVRLGLNQHYPSFKPPPFQYHHRNPMGIGVTATNFTTHNIPQTFTTAIRCTKCGKGVDNMPELHKHILACASASDKKRYTPKKNPVPLKQTVQPKNGVVVLDNSGKNAFRRMGQPKRLNFSVELSKMSSNKLKLNALKKKNQLVQKAILQKNKSAKQKADLKNACESSSHICPYCNREFTYIGSLNKHAAFSCPKKPLSPPKKKVSHSSKKGGHSSPASSDKNSNSNHRRRTADAEIKMQSMQTPLGKTRARSSGPTQVPLPSSSFRSKQNVKFAASVKSKKPSSSSLRNSSPIRMAKITHVEGKKPKAVAKNHSAQLSSKTSRSLHVRVQKSKAVLQSKSTLASKKRTDRFNIKSRERSGGPVTRSLQLAAAADLSENKREDGSAKQELKDFRNFL

SEQ ID NO: 10447 - protein, 1632 aa, Artificial Sequence
  Synthetic polypeptide
VWCHGQEWGLWSRLTCEQILASRYVTTQRISLCLSFLIHKVEPIAPGEELLVWYNGEDNPEIAAAIEEERASARSKRSSPKSRKGKKKSQENKNKGNKIQDIQLKTSEPDFTSANMRDSAEGPKEDEEKPSASALEQPATLQEVASQEVPPELATPAPAWEPQPEPDERLEAAACEVNDLGEEEEEEEEEDEEEEEDDDDDELEDEGEEEASMPNENSVKEPEIRCDEKPEDLLEEPKTTSEETLEDCSEVTPAMQIPRTKEEANGDVFETFMFPCQHCERKFTTKQGLERHMHIHISTVNHAFKCKYCGKAFGTQINRRRHERRHEAGLKRKPSQTLQPSEDLADGKASGENVASKDDSSPPSLGPDCLIMNSEKASQDTINSSVVEENGEVKELHPCKYCKKVFGTHTNMRRHQRRVHERHLIPKGVRRKGGLEEPQPPAEQAQATQNVYVPSTEPEEEGEADDVYIMDISSNISENLNYYIDGKIQTNNNTSNCDVIEMESASADLYGINCLLTPVTVEITQNIKTTQVPVTEDLPKEPLGSTNSEAKKRRTASPPALPKIKAETDSDPMVPSCSLSLPLSISTTEAVSFHKEKSVYLSSKLKQLLQTQDKLTPAGISATEIAKLGPVCVSAPASMLPVTSSRFKRRTSSPPSSPQHSPALRDFGKPSDGKAAWTDAGLTSKKSKLESHSDSPAWSLSGRDERETVSPPCFDEYKMSKEWTASSAFSSVCNQQPLDLSSGVKQKAEGTGKTPVQWESVLDLSVHKKHCSDSEGKEFKESHSVQPTCSAVKKRKPTTCMLQKVLLNEYNGIDLPVENPADGTRSPSPCKSLEAQPDPDLGPGSGFPAPTVESTPDVCPSSPALQTPSLSSGQLPPLLIPTDPSSPPPCPPVLTVATPPPPLLPTVPLPAPSSSASPHPCPSPLSNATAQSPLPILSPTVSPSPSPIPPVEPLMSAASPGPPTLSSSSSSSSSSSSFSSSSSSSSPSPPPLSAISSVVSSGDNLEASLPMISFKQEELENEGLKPREEPQSAAEQDVVVQETFNKNFVCNVCESPFLSIKDLTKHLSIHAEEWPFKCEFCVQLFKDKTDLSEHRFLLHGVGNIFVCSVCKKEFAFLCNLQQHQRDLHPDKVCTHHEFESGTLRPQNFTDPSKAHVEHMQSLPEDPLETSKEEEELNDSSEELYTTIKIMASGIKTKDPDVRLGLNQHYPSFKPPPFQYHHRNPMGIGVTATNFTTHNIPQTFTTAIRCTKCGKGVDNMPELHKHILACASASDKKRYTPKKNPVPLKQTVQPKNGVVVLDNSGKNAFRRMGQPKRLNFSVELSKMSSNKLKLNALKKKNQLVQKAILQKNKSAKQKADLKNACESSSHICPYCNREFTYIGSLNKHAAFSCPKKPLSPPKKKVSHSSKKGGHSSPASSDKNSNSNHRRRTADAEIKMQSMQTPLGKTRARSSGPTQVPLPSSSFRSKQNVKFAASVKSKKPSSSSLRNSSPIRMAKITHVEGKKPKAVAKNHSAQLSSKTSRSLHVRVQKSKAVLQSKSTLASKKRTDRFNIKSRERSGGPVTRSLQLAAAADLSENKREDGSAKQELKDFSYSLRLASRCSPPAAPYITRQYRKVKAPAAAQFQGPFFKE

SEQ ID NO: 10448 - protein, 15 aa, Artificial Sequence
  Synthetic polypeptide
GRAHRCWTPEVTWNQ

SEQ ID NO: 10449 - protein, 10 aa, Artificial Sequence
  Synthetic polypeptide
EEHTDAGHLK

SEQ ID NO: 10450 - protein, 8 aa, Artificial Sequence
  Synthetic polypeptide
KSTQMLDT

SEQ ID NO: 10451 - protein, 424 aa, Artificial Sequence
  Synthetic polypeptide
DPISTKNKTLAGCDGGACGPATREAEVAGLTLLAVGVYSAKNATAVTGRFIEARLGKPSLVRETSRITVLEALRHPIQVSRRLLSRPQDVLEGVVLSPSLEARVRDIAIATRNTKKNRGLYRHILLYGPPGTGKTLFAKKLALHSGMDYAIMTGGDVAPMGREGVTAMHKLFDWANTSRRGLLLFMDEADAFLRKRATEEISKDLRATLNAFLYHMGQHSNKFMLVLASNLPEQFDCAINSRIDVMVHFDLPQQEERERLVRLHFDNCVLKPATEGKRRLKLAQFDYGRKCSEVARLTEGMSGREIAQLAVSWQATAYASKDGVLTEAMMDACVQDAVQQYRQKMRWLKAEGPGRGVEHPLSGVQGETLTSWSLATDPSYPCLAGPCTFRICSWMGTGLCPGPLSPRMSCGGGRPFCPPGHPLL

SEQ ID NO: 10452 - protein, 19 aa, Artificial Sequence
  Synthetic polypeptide
LGVMVAPVVLLLERLRWLG

SEQ ID NO: 10453 - protein, 21 aa, Artificial Sequence
  Synthetic polypeptide
LAGQGGVRLESQLLGRLRWLG

SEQ ID NO: 10454 - protein, 415 aa, Artificial Sequence
  Synthetic polypeptide
SRPRWRAPGIPAAWEAEVAGLTLLAVGVYSAKNATAVTGRFIEARLGKPSLVRETSRITVLEALRHPIQVSRRLLSRPQDVLEGVVLSPSLEARVRDIAIATRNTKKNRGLYRHILLYGPPGTGKTLFAKKLALHSGMDYAIMTGGDVAPMGREGVTAMHKLFDWANTSRRGLLLFMDEADAFLRKRATEEISKDLRATLNAFLYHMGQHSNKFMLVLASNLPEQFDCAINSRIDVMVHFDLPQQEERERLVRLHFDNCVLKPATEGKRRLKLAQFDYGRKCSEVARLTEGMSGREIAQLAVSWQATAYASKDGVLTEAMMDACVQDAVQQYRQKMRWLKAEGPGRGVEHPLSGVQGETLTSWSLATDPSYPCLAGPCTFRICSWMGTGLCPGPLSPRMSCGGGRPFCPPGHPLL

SEQ ID NO: 10455 - protein, 121 aa, Artificial Sequence
  Synthetic polypeptide
SQGFRTSLESKATAYASKDGVLTEAMMDACVQDAVQQYRQKMRWLKAEGPGRGVEHPLSGVQGETLTSWSLATDPSYPCLAGPCTFRICSWMGTGLCPGPLSPRMSCGGGRPFCPPGHPLL

SEQ ID NO: 10456 - protein, 45 aa, Artificial Sequence
  Synthetic polypeptide
WWLTLVFPAFGEAKSVRLFEARGSGPAWKARPRHMPPRTGSSLRP

SEQ ID NO: 10457 - protein, 39 aa, Artificial Sequence
  Synthetic polypeptide
RLYSQHLGRPSQSDYLKPGVQDQPGKQGHGICLQGRGPH

SEQ ID NO: 10458 - protein, 30 aa, Artificial Sequence
  Synthetic polypeptide
SWKPSFSANYCKDKKPNTACSYSQDIGGIK

SEQ ID NO: 10459 - protein, 58 aa, Artificial Sequence
  Synthetic polypeptide
VHVLCRGMDEAGNHHSQQTIARTKNQIPHVLTHRTSVGSSEKGGPRGNRSQAQQGAAG

SEQ ID NO: 10460 - protein, 354 aa, Artificial Sequence
  Synthetic polypeptide
QFLRDLELEIPFDPAIPLLGVYPNDYKSCCCKDTCTHMFIVALFTIAKTWNQAKYPAMIDWIKKMWHIYTMEYYAAIKNDEFMSFVGAWMKLETIILSKLLQGQKTKYRMFLLTGHRWDQVKKEDQEATGPRLSRELLDEKGPEVLQDSLDRCYSTPSGCLELTDSCQPYRSAFYVLEQQRVGLAVDMDEIEKYQEVEEDQDPSCPRLSRELLDEKEPEVLQDSLDRCYSTPSGYLELPDLGQPYSSAVYSLEEQYLGLALDVDRTKKDQEEEEDQGPPCPRLSRELLEVVEPEVLQDSLDRCYSTPSSCLEQPDSCQPYGSSFYALEEKHVGFSLDVGEIEKKGKGKKRRGRR

SEQ ID NO: 10461 - protein, 139 aa, Artificial Sequence
  Synthetic polypeptide
QFLRDLELEIPFDPAIPLLGVYPNDYKSCCCKDTCTHMFIVALFTIAKTWNQAKYPAMIDWIKKMWHIYTMEYYAAIKNDEFMSFVGAWMKLETIILSKLLQGQKTKYRMFLLTGHRWDQVKKEDQEATGPRLSRELLD

SEQ ID NO: 10462 - protein, 3580 aa, Artificial Sequence
  Synthetic polypeptide
QFLRDLELEIPFDPAIPLLGVYPNDYKSCCCKDTCTHMFIVALFTIAKTWNQAKYPAMIDWIKKMWHIYTMEYYAAIKNDEFMSFVGAWMKLETIILSKLLQGQKTKYRMFLLTGHRWDQVKKEDQEATGPRLSRELLDEKGPEVLQDSLDRCYSTPSGCLELTDSCQPYRSAFYVLEQQRIGLAVDMDEIEKYQEVEEDQDPSCPRLSRELLDEKEPEVLQDSLDRCYSTPSGYLELPDLGQPYSSAVYSLEEQYLGLALDVDRTKKDQEEEEDQGPPCPRLSRELLEVVEPEVLQDSLDRCYSTPSSCLEQPDSCQPYGSSFYALEEKHVGFSLDVGEIEKKGKGKKRRGRRSKKERRRGRKEGEEDQNPPCPRLSRELLDEKGPEVLQDSLDRCYSTPSGCLELTDSCQPYRSAFYVLEQQRVGLAVDMDEIEKYQEVEEDQDPSCPRLSRELLDEKEPEVLQDSLDRCYSTPSGYLELPDLGQPYSSAVYSLEEQYLGLALDVDRTKKDQEEEEDQGPPCPRLSRELLEVVEPEVLQDSLDRCYSTPSSCLEQPDSCQPYGSSFYALEEKHVGFSLDVGEIEKKGKGKKRRGRRSKKERRRGRKEGEEDQNPPCPRLSRELLDEKEPEVLQDSLDRCYSTPSGYLELPDLGQPYSSAVYSLEEQYLGLALDVDEIEKYQEVEEDQDPSCPRLSRELLDEKEPEVLQDSLDRCYSTPSGYLELPDLGQPYSSAVYSLEEQYLGLALDVDRTKKDQEEEEDQGPPCPRLSRELLEVVEPEVLQDSLDRCYSTPSSCLEQPDSCQPYGSSFYALEEKHVGFSLDVGEIEKKGKGKKRRGRRSKKERRRGRKEGEEDQNPPCPRLSRELLDEKEPEVLQDSLDRCYSTPSGYLELPDLGQPYSSAVYSLEEQYLGLALDVDRTKKDQEEEEDQGPPCPRLSRELLEVVEPEVLQDSLDRCYSTPSSCLEQPDSCQPYGSSFYALEEKHVGFSLDVGEIEKKGKGKKRRGRRSKKERRRGRKEGEEDQNPPCPRLSRELLDEKEPEVLQDSLDRCYSTPSGYLELPDLGQPYSSAVYSLEEQYLGLALDVDRTKKDQEEEEDQGPPCPRLSRELLEVVEPEVLQDSLDRCYSTPSSCLEQPDSCQPYGSSFYALEEKHVGFSLDVGEIEKKGKGKKRRGRRSKKERRRGRKEGEEDQNPPCPRLSRELLDEKEPEVLQDSLDRCYSTPSGYLELPDLGQPYSSAVYSLEEQYLGLALDVDRTKKDQEEEEDQGPPCPRLSRELLEVVEPEVLQDSLDRCYSTPSSCLEQPDSCQPYGSSFYALEEKHVGFSLDVGEIEKKGKGKKRRGRRSKKERRRGRKEGEEDQNPPCPRLSRELLDEKGPEVLQDSLDRCYSTPSGCLELTDSCQPYRSAFYVLEQQRVGLAVDMDEIEKYQEVEEDQDPSCPRLSRELLDEKEPEVLQDSLDRCYSTPSGYLELPDLGQPYSSAVYSLEEQYLGLALDVDRTKKDQEEEEDQGPPCPRLSRELLEVVEPEVLQDSLDRCYSTPSSCLEQPDSCQPYGSSFYALEEKHVGFSLDVGEIEKKGKGKKRRGRRSKKERRRGRKEGEEDQNPPCPRLSRELLDEKGPEVLQDSLDRCYSTPSGCLELTDSCQPYRSAFYVLEQQRVGLAVDMDEIEKYQEVEEDQDPSCPRLSRELLDEKEPEVLQDSLDRCYSTPSGYLELPDLGQPYSSAVYSLEEQYLGLALDVDRTKKDQEEEEDQGPPCPRLSRELLEVVEPEVLQDSLDRCYSTPSSCLEQPDSCQPYGSSFYALEEKHVGFSLDVGEIEKKGKGKKRRGRRSKKERRRGRKEGEEDQNPPCPRLSRELLDEKGPEVLQDSLDRSYSTPSGCLELTDSCQPYRSAFYVLEQQRVGLAVDMDEIEKYQEVEEDQDPSCPRLSRELLDEKEPEVLQDSLDRCYSTPSGYLELPDLGQPYSSAVYSLEEQYLGLALDVDRTKKDQEEEEDQGPPCPRLSRELLEVVEPEVLQDSLDRCYSTPSSCLEQPDSCQPYGSSFYALEEKHVGFSLDVGEIEKKGKGKKRRGRRSKKERRRGRKEGEEDQNPPCPRLSRELLDEKGPEVLQDSLDRCYSTPSGCLELTDSCQPYRSAFYVLEQQRVGLAVDMDEIEKYQEVEEDQDPSCPRLSRELLDEKEPEVLQDSLDRCYSTPSGYLELPDLGQPYSSAVYSLEEQYLGLALDVDRTKKDQEEEEDQGPPCPRLSRELLEVVEPEVLQDSLDRCYSTPSSCLEQPDSCQPYGSSFYALEEKHVGFSLDVGEIEKKGKGKKRRGRRSKKERRRGRKEGEEDQNPPCPRLSRELLDEKEPEVLQDSLDRCYSTPSGYLELPDLGQPYSSAVYSLEEQYLGLALDVDRTKKDQEEEEDQGPPCPRLSRELLEVVEPEVLQDSLDRCYSTPSSCLEQPDSCQPYGSSFYALEEKHVGFSLDVGEIEKKGKGKKRRGRRSKKERRRGRKEGEEDQNPPCPRLSRELLDEKGPEVLQDSLDRCYSTPSGCLELTDSCQPYRSAFYVLEQQRVGLAVDMDEIEKYQEVEEDQDPSCPRLSRELLDEKEPEVLQDSLDRCYSTPSGYLELPDLGQPYSSAVYSLEEQYLGLALDVDRTKKDQEEEEDQGPPCPRLSRELLEVVEPEVLQDSLDRCYSTPSSCLEQPDSCQPYGSSFYALEEKHVGFSLDVGEIEKKGKGKKRRGRRSKKERRRGRKEGEEDQNPPCPRLSRELLDEKEPEVLQDSLDRCYSTPSGYLELPDLGQPYSSAVYSLEEQYLGLALDVDRTKKDQEEEEDQGPPCPRLSRELLEVVEPEVLQDSLDRCYSTPSSCLEQPDSCQPYGSSFYALEEKHVGFSLDVGEIEKKGKGKKRRGRRSKKERRRGRKEGEEDQNPPCPRLSRELLDEKEPEVLQDSLDRCYSTPSGYLELPDLGQPYSSAVYSLEEQYLGLALDVDRTKKDQEEEEDQGPPCPRLSRELLEVVEPEVLQDSLDRCYSTPSSCLEQPDSCQPYGSSFYALEEKHVGFSLDVGEIEKKGKGKKRRGRRSKKERRRGRKEGEEDQNPPCPRLSRELLDEKEPEVLQDSLDRCYSTPSGYLELPDLGQPYSSAVYSLEEQYLGLALDVDRTKKDQEEEEDQGPPCPRLSRELLEVVEPEVLQDSLDRCYSTPSSCLEQPDSCQPYGSSFYALEEKHVGFSLDVGEIEKKGKGKKRRGRRSKKERRRGRKEGEEDQNPPCPRLSRELLDEKGPEVLQDSLDRSYSTPSGCLELTDSCQPYRSAFYVLEQQRVGLAVDMDEIEKYQEVEEDQDPSCPRLSRELLDEKEPEVLQDSLDRCYSTPSGYLELPDLGQPYSSAVYSLEEQYLGLALDVDRTKKDQEEEEDQGPPCPRLSRELLEVVEPEVLQDSLDRCYSTPSSCLEQPDSCQPYGSSFYALEEKHVGFSLDVGEIEKKGKGKKRRGRRSKKERRRGRKEGEEDQNPPCPRLSRELLDEKGPEVLQDSLDRCYSTPSGCLELTDSCQPYRSAFYVLEQQRVGLAVDMDGEYLSMKVIRIH

SEQ ID NO: 10463 - protein, 30 aa, Artificial Sequence; identical to SEQ ID NO: 10458
  Synthetic polypeptide

SEQ ID NO: 10464 - protein, 411 aa, Artificial Sequence
  Synthetic polypeptide
RCWRGCGEIGTLLHCWWDCKLVQRLWKAVWQFLKDLELEIPFDPAIPLLGVYPKDYKSCCCKDTCTHMFIAALFTIAKTWNQAKYPAMIDWIKKMWHIYTMEYYAAIKNDEFMSFVGTWMKLETIILSKLLQGQKTKYRMFLLTGHRWDQVKKEDQEATGPRLSRELLDEKGPEVLQDSLYRCYSTPSGYLELPDLGQPYSSAVYSLEEQYLGLALDLDRIKKDQEEEEDQGPPCPRLSRELLEVVEPEVLQDSLDRCYSTPSSCLEQPDSCQPYGSSFYALEEKHVGFSLDVGEIEKKGKGKKRRGRRSKKERRRGRKEGEEDQNPPCPRLNGVLMEVEEPEVLQDSLDGCYSTPSMYFELPDSFQHYRSVFYSFEEQHISFALYVDNRFFTLTVTSLHLVFQMEVIFPQ

SEQ ID NO: 10465 - protein, 58 aa, Artificial Sequence
  Synthetic polypeptide
VHVLCRDMDEAGNHHSQQTIARTKNQIPHVLTHRTSVGSSEKGGPRGNRSQAQQGAAG

SEQ ID NO: 10466 - protein, 409 aa, Artificial Sequence
  Synthetic polypeptide
RCWRGCGEIGTLLHCWWDCKLVQRLWKAVWQFLKDLELEIPFDPAIPLLGVYPKDYKSCCCKDTCTHMFIAALFTIAKTWNQAKYPAMIDWIKKMWHIYTMEYYAAIKNDEFMSFVGTWMKLETIILSKLLQGQKTKYRMFLLTGHRWDQVKKEDQEATGPRLSRELLDEKGPEVLQDSLYRCYSTPSGCLELTDSCQPYRSAFYVLEQQRVGLAVDMDEIEKYQEVEEDQDPSCPRLSRELLDEKEPEVLQDSLGRWYSTPSGYLELPDLGQPYSSAVYSLEEQYLGLALDLDRIKKDQEEEEDQGPPCPRLSRELLEVVEPEVLQDSLDVIQLLPVVLNSLTPASPMEVPFMHWRKNMLAFLLTWEKLKRRGRGRKEGEEDQRRKEEGEEKKGKKIKTHHAPGSTAC

SEQ ID NO: 10467 - protein, 486 aa, Artificial Sequence
  Synthetic polypeptide
RCWRGCGEIGTLLHCWWDCKLVQRLWKAVWQFLKDLELEIPFDPAIPLLGVYPKDYKSCCCKDTCTHMFIAALFTIAKTWNQAKYPAMIDWIKKMWHIYTMEYYAAIKNDEFMSFVGTWMKLETIILSKLLQGQKTKYRMFLLTGHRWDQVKKEDQEATGPRLSRELLDEKGPEVLQDSLYRCYSTPSGCLELTDSCQPYRSAFYVLEQQRVGLAVDMDEIEKYQEVEEDQDPSCPRLSRELLDEKEPEVLQDSLGRWYSTPSGYLELPDLGQPYSSAVYSLEEQYLGLALDLDRIKKDQEEEEDQGPPCPRLSRELLEVVEPEVLQDSLDRCYSTPSSCLEQPDSCQPYGSSFYALEEKHVGFSLDVGEIEKKGKGKKRRGRRSKKERRRGRKEGEEDQNPPCPRLNGVLMEVEEPEVLQDSLDGCYSTPSMYFELPDSFQHYRSVFYSFEEQHISFALYVDNRFFTLTVTSLHLVFQMEVIFPQ

SEQ ID NO: 10468 - protein, 324 aa, Artificial Sequence
  Synthetic polypeptide
RCWRGCGEIGTLLHCWWDCKLVQRLWKAVWQFLKDLELEIPFDPAIPLLGVYPKDYKSCCCKDTCTHMFIAALFTIAKTWNQAKYPAMIDWIKKMWHIYTMEYYAAIKNDEFMSFVGTWMKLETIILSKLLQGQKTKYRMFLLTGHRWDQVKKEDQEATGPRLSRELLDEKGPEVLQDSLYRCYSTPSGCLELTDSCQPYRSAFYVLEQQRVGLAVDMDEIEKYQEVEEDQGRWEEDQNPPCPRLNGVLMEVEEPEVLQDSLDGCYSTPSMYFELPDSFQHYRSVFYSFEEQHISFALYVDNRFFTLTVTSLHLVFQMEVIFPQ

SEQ ID NO: 10469 - protein, 169 aa, Artificial Sequence
  Synthetic polypeptide
RCWRGCGEIGTLLHCWWDCKLVQRLWKAVWQFLRDLELEIPFDPAIPLLGVYPKDYKSCCCKDTCTHMFIAALFTIAKTWNQAKYPAMIDWIKKMWHIYTMEYYAAIKNDEFMSFVGAWMKLETIILSKLLQGQKTKYRMFLLTGHRWDQVKKEDQEATGPRLSRELLD

SEQ ID NO: 10470 - protein, 30 aa, Artificial Sequence; identical to SEQ ID NO: 10458
  Synthetic polypeptide

SEQ ID NO: 10471 - protein, 58 aa, Artificial Sequence; identical to SEQ ID NO: 10459
  Synthetic polypeptide

SEQ ID NO: 10472 - protein, 486 aa, Artificial Sequence
  Synthetic polypeptide
RCWRGCGEIGTLLHCWWDCKLVQRLWKAVWQFLRDLELEIPFDPAIPLLGVYPKDYKSCCCKDTCTHMFIAALFTIAKTWNQAKYPAMIDWIKKMWHIYTMEYYAAIKNDEFMSFVGAWMKLETIILSKLLQGQKTKYRMFLLTGHRWDQVKKEDQEATGPRLSRELLDEKGPEVLQDSLDRCYSTPSGCLELTDSCQPYRSAFYVLEQQHVGLAVDMDEIEKYQEVEEDQDPSCPRLSRELLDEKEPEVLQDSLDRCYSTPSGYLELPDLGQPYSSAVYSLEEQYLGLALDVDRIKKDQEEEEDQGPPCPRLSRELLEVVEPEVLQDSLDRCYSTPSSCLEQPDSCQPYGSSFYALEEKHVGFSLDVGEIEKKGKGKKRRGRRSKKERRRGRKEGEEDQNPPCPRLNGVLMEVEEREVLQDSLDRCYSTPSMYFELPDSFQHYRSVFYSFEEQHISFALYVDNRFFTLTVTSLHLVFQMGVIFPQ

SEQ ID NO: 10473 - protein, 484 aa, Artificial Sequence
  Synthetic polypeptide
RCWRGCGEIGTLLHCWWDCKLVQRLWKAVWQFLRDLELEIPFDPAIPLLGVYPKDYKSCCCKDTCTHMFIAALFTIAKTWNQAKYPAMIDWIKKMWHIYTMEYYAAIKNDEFMSFVGAWMKLETIILSKLLQGQKTKYRMFLLTGHRWDQVKKEDQEATGPSRELLDEKGPEVFQDSQDRCYSTPSGCLELTDSCQPYRSAFYILEQQRVGLAIDMDEIEKYQEVEEDQDPSCPRLSRELLDEKEPEVLQDSLDRCYSTPSGYLELPDLGQPYSSAVYSLEEQYLGLALDVDRIKKDQEEEEDQGPPCPRLSRELLDEKGPEVLQDSLDRCYSTPSGCLELTDSCQPYRSAFYVLEQQHVGLAVDMDEIEKKGKGKKRRGRRSKKERRRGRKEGEEDQNPPCPRLNGVLMEVEEREVLQDSLDRCYSTPSMYFELPDSFQHYRSVFYSFEEQHISFALYVDNRFFTLTVTSLHLVFQMGVIFPQ

SEQ ID NO: 10474 - protein, 56 aa, Artificial Sequence
  Synthetic polypeptide
VHVLCRGMDEAGNHHSQQTIARTKNQIPHVLTHRTSVGSSEKGGPRGNRSQQGAAG

SEQ ID NO: 10475 - protein, 3097 aa, Artificial Sequence
  Synthetic polypeptide
RCWRGCGEIGTLLHCWWDCKLVQRLWKAVWQFLRDLELEIPFDPAIPLLGVYPKDYKSCCCKDTCTHMFIAALFTIAKTWNQAKYPAMIDWIKKMWHIYTMEYYAAIKNDEFMSFVGAWMKLETIILSKLLQGQKTKYRMFLLTGHRWDQVKKEDQEATGPRLSRELLDEKEPEVLQDSLDRCYSTPSGYLELPDLGQPYSSAVYSLEEQYLGLALDVDRIKKDQEEEEDQGPPCPRLSRELLEVVEPEVLQDSLDRCYSTPSSCLEQPDSCQPYGSSFYALEEKHVGFSLDVGEIEKKGKGKKRRGRRSKKERRRGRKEGEEDQNPPCPRLSRELLDEKGPEVLQDSLDRCYSTPSGCLELTDSCQPYRSAFYVLEQQRVGFAVDMDEIEKYQEVEEDQDPSCPRLSRELLDEKEPEVLQDSLDRCYSTPSGYLELPDLGQPYSSAVYSLEEQYLGLALDVDRIKKDQEEEEDQGPPCPRLSRELLEVVEPEVLQDSLDRCYSTPSSCLEQPDSCQPYGSSFYALEEKHVGFSLDVGEIEKKGKGKKRRGRRSKKERRRGRKEGEEDQNPPCPRLSRELLDEKGPEVLQDSLDRCYSTPSGCLELTDSCQPYRSAFYVLEQQRVGFAVDMDEIEKYQEVEEDQDPSCPRLSRELLDEKEPEVLQDSLDRCYSTPSGYLELPDLGQPYSSAVYSLEEQYLGLALDVDRIKKDEEEEEDQDPPCPRLSRELLEVVAPEVLQDSLDRCYSTPSSCLEQPDSCQPYGSSFYALEEKHVGFSLDVGEIEKKGKGKKRRGRRSKKERRRGRKEGEEDQNPPCPRLSRELLDEKGPEVLQDSLDRCYSTPSGCLELTDSCQPYRSAFYVLEQQRVGMAVDMDEIEKYQEVEEDQDPSCPRLSRELLDEKEPEVLQDSLNRCYSTPSGYLELPDLGQPYSSAVYSLEEQYLGLALDVDRIKKDQEEEEDEDQDPPCPRLSRELLEVVEPEVLQDSLDRCYSTPSSCLEQPDSCQPYGSSFYALEENHVGFSLDVGEIEKKGKGKKRRGRRSKKERRRGRKEGEEDQNPPCPRLSRELLDEKGPEVLQDSLDRCYSTPSGCLELTDSCQPYRSAFYVLEQQHVGLAVDMDEIEKYQEVEEDQDPSCPRLSRELLDEKEPEVLQDSLDRCYSTPSGYLELPDLGQPYSSAVYSLEEQYLGLALDVDRIKKDQEEEEDQGPPCPRLSRELLEVVEPEVLQDSLDRCYSTPSSCLEQPDSCQPYGSSFYALEENHVGFSLDVGEIEKKGKGKKRRGRRSKKERRRGRKEGEEDQNPPCPRLSRELLDEKGPEVLQDSLDRCYSTPSGCLELTDSCQPYRSAFYVLEQQHVGLAVDMDEIEKYQEVEEDQDPSCPRLSRELLDEKEPEVLQDSLDRCYSTPSGYLELPDLGQPYSSAVYSLEEQYLGLALDVDRIKKDQEEEEDQGPPCPRLSRELLEVVEPEVLQDSLDRCYSTPSSCLEQPDSCQPYGSSFYALEENHVGFSLDVGEIEKKGKGKKRRGRRSKKERRRGRKEGEEDQNPPCPRLSRELLDEKGPEVLQDSLDRCYSTPSGCLELTDSCQPYRSAFYVLEQQHVGLAVDMDEIEKYQEVEEDQDPSCPRLSRELLDEKEPEVLQDSLDRCYSTPSGYLELPDLGQPYSSAVYSLEEQYLGLALDVDRIKKDQEEEEDQGPPCPRLSRELLEVVEPEVLQDSLDRCYSTPSSCLEQPDSCQPYGSSFYALEENHVGFSLDVGEIEKKGKGKKRRGRRSKKERRRGRKEGEEDQNPPCPRLSRELLDEKGPEVLQDSLDRCYSTPSGCLELTDSCQPYRSAFYVLEQQHVGLAVDMDEIEKYQEVEEDQDPSCPRLSRELLDEKEPEVLQDSLDRCYSTPSGYLELPDLGQPYSSAVYSLEEQYLGLALDVDRIKKDQEEEEDQGPPCPRLSRELLEVVEPEVLQDSLDRCYSTPSSCLEQPDSCQPYGSSFYALEENHVGFSLDVGEIEKKGKGKKRRGRRSKKERRRGRKEGEEDQNPPCPRLSRELLDEKGPEVLQDSLDRCYSTPSGCLELTDSCQPYRSAFYVLEQQHVGLAVDMDEIEKYQEVEEDQDPSCPRLSRELLDEKEPEVLQDSLDRCYSTPSGYLELPDLGQPYSSAVYSLEEQYLGLALDVDRIKKDQEEEEDQGPPCPRLSRELLEVVEPEVLQDSLDRCYSTPSSCLEQPDSCQPYGSSFYALEEKHVGFSLDVGEIEKKGKGKKRRGRRSKKERRRGRKEGEEDQNPPCPRLSRELLDEKGPEVLQDSLDRCYSTPSGCLELTDSCQPYRSAFYVLEQQHVGLAVDMDEIEKYQEVEEDQDPSCPRLSRELLDEKEPEVLQDSLDRCYSTPSGYLELPDLGQPYSSAVYSLEEQYLGLALDVDRIKKDQEEEEDQGPPCPRLSRELLEVVEPEVLQDSLDRCYSTPSSCLEQPDSCQPYGSSFYALEEKHVGFSLDVGEIEKKGKGKKRRGRRSKKERRRGRKEGEEDQNPPCPRLSRELLDEKGPKVLQDSLDRCYSTPSGCLELCDSCQPYRSAFYVLEQQRVGLAVDMDEIEKYQEVEEDQDPSCPRLSRELLDEKGPEVLQDSLDRCYSTPSGCLELCDSCQPYRSAFYILEQQRVGLAVDMDEIEKYQEVEEDQDPSCPRLSRELLDEKEPEVLQDSLDRCYSTPSGYLELPDLGQPYSSAVYSLEEQYLGLALDVDRIKKDQEEEEDQGPPCPRLSRELLEVVEPEVLQDSLDRCYSTPSSCLEQPDSCQPYGSSFYALEEKHVGFSLDVGEIEKKGKGKKRRGRRSKKERRRGRKEGEEDQNPPCPRLSRELLDEKGPEVLQDSLDRCYSTPSGCLELCDSCQPYRSAFYVLEQQHVGLAVDMDEIEKYQEVEEDQDPSCPRLSRELLDEKEPEVLQDSLDRCYSTPSGYLELPDLGQPYSSAVYSLEEQYLGLALDVDKIEKKGKGKKRRGRRSKKERRRGRKEGEEDQNPPCPRLNGVLMEVEEREVLQDSLDRCYSTPSMYFELPDSFQHYRSVFYSFEEQHISFALYVDNRFFTLTVTSLHLVFQMGVIFPQ

SEQ ID NO: 10476 - protein, 805 aa, Artificial Sequence
  Synthetic polypeptide
RCWRGCGEIGTLLHCWWDCKLVQRLWKAVWQFLRDLELEIPFDPAIPLLGVYPKDYKSCCCKDTCTHMFIAALFTIAKTWNQAKYPAMIDWIKKMWHIYTMEYYAAIKNDEFMSFVGAWMKLETIILSKLLQGQKTKYRMFLLTGHRWDQVKKEDQEATGPRLSRELLDEKGPEVLQDSLDRCYSTPSGCLELTDSCQPYRSAFYVLEQQHVGLAVDMDEIEKYQEVEEDQDPSCPRLSRELLDEKEPEVLQDSLDRCYSTPSGYLELPDLGQPYSSAVYSLEEQYLGLALDVDRIKKDQEEEEDQGPPCPRLSRELLEVVEPEVLQDSLDRCYSTPSSCLEQPDSCQPYGSSFYALEENHVGFSLDVGEIEKKGKGKKRRGRRSKKERRRGRKEGEEDQNPPCPRLSRELLDEKGPEVLQDSLDRCYSTPSGCLELTDSCQPYRSAFYVLEQQHVGLAVDMDEIEKYQEVEEDQDPSCPRLSRELLDEKGPEVLQDSLDRCYSTPSGCLELTDSCQPYRSAFYVLEQQHVGLAVDMDEIEKYQEVEEDQDPSCPRLSRELLDEKEPEVLQDSLDRCYSTPSGYLELPDLGQPYSSAVYSLEEQYLGLALDVDRIKKDQEEEEDQGPPCPRLSRELLEVVEPEVLQDSLDRCYSTPSSCLEQPDSCQPYGSSFYALEEKHVGFSLDVGEIEKKGKGKKRRGRRSKKERRRGRKEGEEDQNPPCPRLNGVLMEVEEREVLQDSLDRCYSTPSMYFELPDSFQHYRSVFYSFEEQHISFALYVDNRFFTLTVTSLHLVFQMGVIFPQ

SEQ ID NO: 10477 - protein, 241 aa, Artificial Sequence
  Synthetic polypeptide
NVNVVEALQEFWQMKQSRGADLKNGALVVYEMVPSNSPPYVCYVTLPGGSCFGSFQFCPTKAEARRSAAKIALMNSVFNEHPSRRITDEFIEKSVSEALASFNGNREEADNPNTGIGAFRFMLESNKGKSMLEFQELMTVFQLLHWNGSLKAMRERQCSRQEVLAHYSHRALDDDIRHQMALDWVSREQSVPGALSRELASTERELDEARLAGKELRFHKEKKDILVLAAGQLGNMHSSNC

SEQ ID NO: 10478 - protein, 31 aa, Artificial Sequence
  Synthetic polypeptide
ATISSPAICEMKCECGGGTSGILADEAVPWC

SEQ ID NO: 10479 - protein, 18 aa, Artificial Sequence
  Synthetic polypeptide
SPGDRRCNLGLAVLEYSV

SEQ ID NO: 10480 - protein, 19 aa, Artificial Sequence
  Synthetic polypeptide
GGRIARAQETDVAIWVSLC

SEQ ID NO: 10481 - protein, 206 aa, Artificial Sequence
  Synthetic polypeptide
PDVTMHACSPAPQEAEVGGSLEPRRQTLQFGSRCARIFRLVLQKKHIEQKQVEDFAMIPAKEAKDMLYKMLSENFMSLQEIPKTPDHAPSRTFYLYTVNILSAARMLLHRCYKSIANLIERRQFETKENKRLLEKSQRVEAIIASMQATGAEEAQLQEIEEMITAPERQQLETLKRNVNKLDASEIQVDETIFLLESYIECTMKRQ

SEQ ID NO: 10482 - protein, 83 aa, Artificial Sequence
  Synthetic polypeptide
PDVTMHACSPAPQEAEVGGSLEPRRQTLQFGSRCARIFRLVLQKKHIEQKQVEDFAMIPAKEAKDMLYKMLSENFMSLQVGCQ

SEQ ID NO: 10483 - protein, 179 aa, Artificial Sequence
  Synthetic polypeptide
GRFGSRCARIFRLVLQKKHIEQKQVEDFAMIPAKEAKDMLYKMLSENFMSLQEIPKTPDHAPSRTFYLYTVNILSAARMLLHRCYKSIANLIERRQFETKENKRLLEKSQRVEAIIASMQATGAEEAQLQEIEEMITAPERQQLETLKRNVNKLDASEIQVDETIFLLESYIECTMKRQ

SEQ ID NO: 10484 - protein, 17 aa, Artificial Sequence
  Synthetic polypeptide
LWEAEADLGLAVLEYSV

SEQ ID NO: 10485 - protein, 12 aa, Artificial Sequence
  Synthetic polypeptide
FGRLRQIWVSLC

SEQ ID NO: 10486 - protein, 56 aa, Artificial Sequence
  Synthetic polypeptide
GRFGSRCARIFRLVLQKKHIEQKQVEDFAMIPAKEAKDMLYKMLSENFMSLQVGCQ

SEQ ID NO: 10487 - protein, 19 aa, Artificial Sequence
  Synthetic polypeptide
TPQNKELYWAQKGIYMSQM

SEQ ID NO: 10488 - protein, 290 aa, Artificial Sequence
  Synthetic polypeptide
TCCSAQDRPLKTKNYIGPKKEYICPRCESGFIEEVTDDSSFLGGGGSRIDNTTTTHFAELWGHLDHTMFFQDFRPFLSSSPLDQDNRANERGHQTHTDFWGARPPRLPLGRRYRSRGSSRPDRSPAIEGILQHIFAGFFANSAIPGSPHPFSWSGMLHSNPGDYAWGQTGLDAIVTQLLGQLENTGPPPADKEKITSLPTVTVTQEQVDMGLECPVCKEDYTVEEEVRQLPCNHFFHSSCIVPWLELHDTCPVCRKSLNGEDSTRQSQSTEASASNRFSNDSQLHDRWTF

SEQ ID NO: 10489 - protein, 61 aa, Artificial Sequence
  Synthetic polypeptide
TFLIFVTRGWRRVATVMQWVEARDAAEHAAVHRIDPSKQRIILGPKRNIYVPDVNQALLKK

SEQ ID NO: 10490 - protein, 41 aa, Artificial Sequence
  Synthetic polypeptide
TCCSAQDRPLKTKNYIGPKKEYICPRCESGFIEEVTDDSRI

SEQ ID NO: 10491 - protein, 51 aa, Artificial Sequence
  Synthetic polypeptide
TCCSAQDRPLKTKNYIGPKKEYICPRCESGFIEEVTDDSRESESERERVSA

SEQ ID NO: 10492 - protein, 38 aa, Artificial Sequence
  Synthetic polypeptide
SQHFGRPRQADHEVKRSRPSWPTWNIYVPDVNQALLKK

SEQ ID NO: 10493 - protein, 39 aa, Artificial Sequence
  Synthetic polypeptide
MAAVAHACNPSTLGGRGRRITRSRDRDHPGQHGIYMSQM

SEQ ID NO: 10494 - protein, 302 aa, Artificial Sequence
  Synthetic polypeptide
WLQWLMPVIPALWEAEAGGSRGQEIETILANMEYICPRCESGFIEEVTDDSSFLGGGGSRIDNTTTTHFAELWGHLDHTMFFQDFRPFLSSSPLDQDNRANERGHQTHTDFWGARPPRLPLGRRYRSRGSSRPDRSPAIEGILQHIFAGFFANSAIPGSPHPFSWSGMLHSNPGDYAWGQTGLDAIVTQLLGQLENTGPPPADKEKITSLPTVTVTQEQVDMGLECPVCKEDYTVEEEVRQLPCNHFFHSSCIVPWLELHDTCPVCRKSLNGEDSTRQSQSTEASASNRFSNDSQLHDRWTF

SEQ ID NO: 10495 - protein, 53 aa, Artificial Sequence
  Synthetic polypeptide
WLQWLMPVIPALWEAEAGGSRGQEIETILANMEYICPRCESGFIEEVTDDSRI
